(19) United States
(12) Patent Application Publication
(10) Pub. No.: US 2019/0290729 A1
(43) Pub. Date: Sep. 26, 2019

(54) PHARMACEUTICAL ASSOCIATION OF GROWTH FACTOR RECEPTOR AGONIST AND ADHESION PROTEIN INHIBITOR FOR CONVERTING A NEOPLASTIC CELL INTO A NON-NEOPLASTIC CELL AND USES THEREOF

(71) Applicant: HISTIDE AG, Schindellegi (CH)

(72) Inventors: Omar F. ZOUANI, Einsiedeln (CH); Veronika GOCHEVA, Einsiedeln (CH)

(21) Appl. No.: 15/760,980

(22) PCT Filed: Sep. 15, 2016
(86) PCT No.: PCT/EP2016/071794

§ 371 Date: Mar. 16, 2018

Related U.S. Application Data
(60) Provisional application No. 62/219,728, filed on Sep. 17, 2015.

(51) Int. Cl. A61K 38/18; A61K 38/07; A61K 38/08; A61K 38/10; A61K 38/12; C07K 16/28; C12N 15/113; A61P 35/00

(52) U.S. Cl. CPC A61K 38/18; A61K 38/07; A61K 38/08; A61K 38/10; A61K 45/06; C07K 16/2839; C12N 15/113; A61P 35/00; C12N 2310/14; A61K 38/12

(57) ABSTRACT

A pharmaceutical association comprising at least one growth factor receptor-binding compound, which activates at least one growth factor receptor of a neoplastic cell, and at least one adhesion protein inhibitor which inhibits at least one transmembrane cell adhesion protein of said neoplastic cell.

### FIELD OF THE INVENTION

[0001] The invention relates to associations, combinations, compositions, kits, methods and processes for the design, preparation, manufacture and/or formulation thereof, and methods and uses thereof for converting or recoding a neoplastic cell into a non-neoplastic cell and treating and/or preventing a neoplastic disease.

### BACKGROUND

[0002] Neoplastic cells, such as cancer cells, are generally characterized by abnormal and/or uncontrolled proliferation leading, in most cases, to the development of a neoplastic disease, such as cancer. Conventional methods for treating neoplastic diseases include surgical treatments, radiotherapy and chemotherapy.

[0003] Surgery is usually practised in order to extract localised (non-circulating) neoplastic cells from a patient's body and is most generally combined with radiotherapy treatments. As well as being limited to the treatment of very early stage, non-metastatic tumors, surgery is an invasive medical procedure which remains traumatic for the treated patient, involves the permanent removal of tissues or organs (which is sometimes not possible as some organs or organ parts are not accessible or cannot be removed due to life threatening consequences), in some cases has been shown to “unblock” dormant tumors, while only offering a “visual” selectivity to distinguish between healthy and tumor cells. Radiotherapy also presents some significant drawbacks for the treated patients including the high cost of the radiation therapy equipment, the high cost of the treatment itself, side effects associated with the damage or destruction of healthy cells, limited effectiveness against metastasized neoplastic diseases, skin rashes caused by external beam radiation, the potential deleterious impact on the functioning of tissues, glands or organs located near the site of treatment, and the possible development of secondary cancers as a result of exposure to the radiations.

[0004] Conventional chemotherapy methods generally involve the administration of small synthetic regulatory molecules which inhibit specific intracellular target proteins thought to be responsible for the neoplastic phenotype of the cell. One example is the inhibition of tyrosine kinase signal transduction by small molecule inhibitors to regulate uncontrolled cell proliferation. Typical chemotherapy methods also include treatments wherein DNA is covalently altered by e.g. DNA strands crosslinking, or treatments wherein the polymerisation and depolymerisation of microtubules is enhanced prevented thus provoking apoptosis of the damaged cell.

[0005] Another method for treating neoplastic diseases includes gene therapy wherein a missing or defective gene is replaced with a functional, healthy copy, which is delivered to the target dysfunctional cells using a “vector.” Gene transfer therapy can be done outside the body (ex vivo) by extracting bone marrow or blood from the patient and growing the cells in a laboratory. The corrected copy of the gene is then introduced and allowed to penetrate the cells' DNA before being injected back into the body. Gene transfers can also be done directly inside the patient's body (in vivo). Gene therapy has been applied to a few specific cases of blood cancers (chronic lymphocytic leukemia (CLL), acute lymphocytic leukemia (ALL) and multiple myeloma) through a particular form thereof in which the genetically modified cells were not the neoplastic cells themselves but instead the immune T-cells. Modified T-cells could then target and destroy specific blood cells (neoplastic as well as healthy). The body of the patient is then able to produce healthy blood cells and eventually provide a treatment to certain blood cancer types. However, gene therapy is generally best suited for the treatment of diseases caused by a single defective gene, not neoplastic diseases, which often involve multiple defective genes. Overall, issues such as the correct integration of therapeutic DNA into the genome; the immune system response to the introduction of foreign DNA into the cell; the toxicity, immune and inflammatory responses; gene control and targeting issues of the vectors (usually viral) required to transport the DNA inside the cell; the difficulties associated with the treatment of multigene-associated neoplastic cells; the possibilities of inducing tumors if the DNA is integrated in the wrong place in the genome; and/or the significant cost usually involved with such a therapy, have greatly undermined the development of gene therapy.

[0006] Other intracellular therapies have been contemplated for the treatment of neoplastic diseases using, for instance, micro-ribonucleic acids (miRNAs) or small interfering ribonucleic acids (siRNA). Under these conditions, the neoplastic cell is generally forced to down-regulate or repress the expression of one or more specific target genes (e.g. oncogenes) thus inhibiting the expression of defective and/or defecting proteins (e.g. oncoproteins). One example is the repression of genes encoding key proteins in the proliferation of cancer cells such as vascular endothelial growth factor (VEGF) and kinesin spindle protein (KSP), thus controlling cancer proliferation.

[0007] Neoplastic diseases may also be treated using immunotherapy such as antibody therapies wherein the antibodies bind to a target antigen typically on the surface of the neoplastic cell. Cell surface receptors are common targets for antibody therapies and include the epidermal growth factor receptor, HER2, CD52, the vascular endothelial growth factor-A and CD30. Once bound to an antigen (e.g. a cancer antigen), antibodies can induce antibody-dependent cell-mediated cytotoxicity, activate the complement system, prevent a receptor interacting with its ligand or deliver a payload of chemotherapy or radiation, which may all lead to the induction of neoplastic cell death. For instance, Cetuximab (Erbitux) is a chimeric IgG1 monoclonal antibody that targets the extracellular domain of the epidermal growth factor receptor (EGFR). Once a ligand binds to the EGFR on the surface of the cell, signalling pathways are activated inside the cell that are associated with malignant characteristics such as cancer cell proliferation and invasion. Cetuximab competitively inhibits ligand binding, thereby preventing EGFR activation and subsequent cellular signalling. It also activates programmed cell death (apoptosis).

[0008] Other intracellular treatments such as messenger ribonucleic acids (mRNAs) based therapies have also been used in the treatment of neoplastic disease wherein administration of mRNA material into a neoplastic cell causes the neoplastic cell e.g. to express specifically encoded antigens and causing the neoplastic cell to be eliminated by the host immune system.

[0009] Differentiation therapy is another technique which was developed on the concept that the acquisition of the malignant phenotype (such as neoplasia) in a cell is considered as a progressive de-differentiation or a defective differentiation of that cell. Thus, as e.g. tumor cell populations evolve to greater degrees of malignancy, they usually lose more and more differentiation markers. This led to the suggestion that it may be possible to treat cancer by inducing differentiation of cancer cells. However, some scientific reports have shown that the differentiation therapy does not in fact induce cancer cells differentiation but instead restrains their growth thus allowing the application of more conventional therapies (such as chemotherapy) to eradicate the malignant cells. Examples of differentiation therapy involve the forced (re-) expression of some specific micro-RNAs and thus rely on an intracellular action generally presenting the same drawbacks as in any other intracellular therapies such the siRNA and gene therapies.

[0010] A shortcoming of the medical therapies relying on previously reported methods of treatment are numerous and mainly resides in the incapacity of providing a sustainable therapeutic effect i.e. the treated cells are not healed but instead are either destroyed (e.g. through induced apoptosis) or their proliferation reduced or temporarily halted using a sustained administration of therapeutic molecules until, in most case scenarios, neoplastic cells are able to adapt themselves and render the therapy ineffective. Interrupting a known therapy will usually lead to resumption of the neoplastic cell state.

[0011] Other drawbacks associated with previously reported therapies are numerous. For example, they may be very invasive and traumatic for the patient; they may necessitate permanently removing neoplastic tissues or organs which may be in some cases not practicable or feasible (organs or organ parts not accessible) or not possible due to life-threatening consequences; they may not be applied to or have limited effectiveness against metastatic neoplastic cells; they may not possess the ability to remove or treat all neoplastic cell types (i.e. neoplastic cells having different invasiveness levels and/or of different lineage origins); they may potentially “unblock” dormant tumors; they are often expensive; they may damage or destroy healthy cells alongside neoplastic cells thereby causing adverse treatment side effects; they may cause skin rashes and skin sensitivity; they may not target cancer stem cells as these are not proliferating; they may have a mutagenic action even towards healthy cells; they may require sustained administration to maintain treatment therapeutic effects; they may display very high cytotoxicity; they may cause multi-drug resistance whereby a drug having an intracellular action is no longer imported inside the cancer cell or is systematically exported outside of the cell.

[0012] None of these previously known methods allows for the effective recoding of a neoplastic cell thus permitting conversion of a neoplastic cell into a non-neoplastic cell.

[0013] The present invention thus provides associations, combinations, compositions, kits, methods and processes for the design, preparation, manufacture and/or formulation thereof, and methods and uses thereof for converting a neoplastic cell into a non-neoplastic cell including converting or recoding the neoplastic cell to induce, provide and/or reintroduce self-recovery or self-healing capabilities thereto.

### BRIEF DESCRIPTION OF THE DRAWINGS

[0014] FIG. 1 is: a representation of a Quantitative Real Time PCR analysis of the expression of DMP-1, Sclerostin and RANK-L in neoplastic cells (osteosarcoma cells) cultured in the absence (control) or in the presence of pharmaceutical associations according to certain embodiments of the present disclosure comprising various GFR-binding compounds and adhesion protein inhibitors after 24 hours of culture, (P<0.001).

[0015] FIG. 2 is a representation of Quantitative Real Time PCR analysis of the expression of MLC-1, GATA-4 and a-Sarcomeric actin in neoplastic cells (Rabdomiosarcoma cells) cultured in the absence (control) or in the presence of pharmaceutical associations according to certain embodiments of the present disclosure comprising various GFR-binding compounds and adhesion protein inhibitors after 24 hours of culture, (P<0.005).

[0016] FIG. 3 is a representation of Quantitative Real Time PCR analysis of the expression of Sox-9, IBSP and Collagen-IV in neoplastic cells (chondrosarcoma cells) cultured in the absence (control) or in the presence of pharmaceutical associations according to certain embodiments of the present disclosure comprising various GFR-binding compounds and adhesion protein inhibitors after 24 hours of culture, (P<0.001).

[0017] FIG. 4 is a representation of Quantitative Real Time PCR analysis of the expression of MMP-9, Vimentin and a-SMA in neoplastic cells (adenocarcinoma cells) cultured in the absence (control) or in the presence of pharmaceutical associations according to certain embodiments of the present disclosure comprising various GFR-binding compounds and adhesion protein inhibitors after 24 hours of culture, (P<0.005).

[0018] FIG. 5 is (a) a diagram representing a relative quantification from western blot of the amount of p53 protein present in neoplastic cells (osteosarcoma cells) cultured in the absence (control) or in the presence of pharmaceutical associations according to certain embodiments of the present disclosure comprising various GFR-binding compounds and adhesion protein inhibitors after 24 hours of culture, (b) a diagram representing a relative quantification from western blot of the extent of phosphorylation of the pRB protein present in neoplastic cells cultured without (control) and in the presence of pharmaceutical associations according to certain embodiments of the present disclosure comprising various GFR-binding compounds and adhesion protein inhibitors after 24 hours of culture.

[0019] FIG. 6 is diagrams representing a relative quantification from western blot of the extent of phosphorylation of the ERK protein (a) and of the Src kinase (b) present in neoplastic cells (osteosarcoma cells) in the absence (control) or in the presence of pharmaceutical associations according to certain embodiments of the present disclosure comprising various GFR-binding compounds and adhesion protein inhibitors after 24 hours of culture, (c) a diagram representing a relative quantification from western blot of the amount of PDK1 protein present in neoplastic cells cultured in the absence (control) or in the presence of pharmaceutical associations according to certain embodiments of the present disclosure comprising various GFR-binding compounds and adhesion protein inhibitors after 24 hours of culture.

[0020] FIG. 7 is a representation of a Quantitative Real Time PCR analysis of the expression of Paxillin (a) and Vinculin (b) in neoplastic cells (osteosarcoma cells) cultured in the absence (control) or in the presence of pharmaceutical associations according to certain embodiments of the present disclosure comprising various GFR-binding compounds and adhesion protein inhibitors after 24 hours of culture, (P<0.001).

[0021] FIG. 8 is a representation of a Quantitative Real Time PCR analysis of the expression of Cyclin D (arithmetic mean of gene expression of Cyclin D1, D2 and D3) at different time intervals during 24 hours in neoplastic cells (osteosarcoma cells) cultured in the absence (control) or in the presence of pharmaceutical associations according to certain embodiments of the present disclosure comprising various GFR-binding compounds and adhesion protein inhibitors.

[0022] FIG. 9 is (a) a representation of a Quantitative Real Time PCR analysis of the expression of DMP-1, SCT and RANK-L in neoplastic cells (osteosarcoma cells) cultured on a native polymer scaffold (control) and on a polymer scaffold grafted with a mixture comprising a GFR-binding compound as defined in the present disclosure and a RGD peptide, after 24 hours of culture, (b) immunofluorescence staining of a representative neoplastic cell (osteosarcoma cells) cultured on a polymer scaffold grafted with a mixture comprising a GFR-binding compound as defined in the present disclosure (ID SEQ NO: 2) and a RGD peptide, after 24 hours of culture. The actin filaments were immunostained by using Alexa 488-phalloidin. The focal adhesions were represented by immunostaining with anti-vinculin. The nucleus was stained with DAPI and is represented by a circle in the center of the cell. Scale bar: 5 μm. (c) is a diagram representing the grafting density of a radiolabeled GFR-binding compound as defined in the present disclosure covalently grafted on a polymer scaffold and of a radiolabeled GFR-binding compound and a non-labeled RGD peptide both grafted on a polymer scaffold. The measurements were performed by using radioactivity quantification (no significant difference was observed). (d) Relative cell spreading function as the presence of different integrin subunits (α and β) couples (anti-α3β1, anti-αvβ3 and anti-α5β3 in neoplastic cells cultured on a non-modified polymer scaffold, after 24 h of culture.

[0023] FIG. 10 is (a) Western blot analysis of the expression integrin α3 and β1 before and after transduction with two independent integrin α3 and β1 shRNAs, which efficiently reduced endogenous integrin α3β1 protein levels. (b) Immunofluorescence visualization of a neoplastic cell (osteosarcoma cells) after silencing integrins α3β1 by using shRNAs, after 24 hours of culture on a polymer scaffold covalently grafted with RGD peptides. The silencing of these specific integrin proteins were shown to significantly reduce or suppress neoplastic cell adhesion on the RGD grafted polymers. The actin filaments were immunostained by using Alexa 488-phalloidin. The focal adhesions were represented by immunostaining with anti-vinculin. The nucleus was stained with DAPI and is represented by a circle in the center of the cell. Scale bar: 5 μm. (c) Immunofluorescence visualization of neoplastic cells cultured on a polymer scaffold covalently modified with a mixture comprising a GFR-binding compound as defined in the present disclosure (SEQ ID NO: 2) and a RGD peptide, after 24 hours of culture. Scale bar: 500 μm. A magnification of one region (right, Scale bar: 50 μm) indicates that Spheroid-like structures of neoplastic cells become predominant in this case as a result of the RGD induced integrin engagement. The actin filaments were immunostained by using Alexa 488-phalloidin. The focal adhesions were represented by immunostaining with anti-vinculin. The nucleus was stained with DAPI and is represented by a circle in the center of the cell.

[0024] FIG. 11 is a screen shot of the Standard Protein Blast online software used in the RMSD calculation procedure.

### DETAILED DESCRIPTION

[0025] Neoplastic diseases start when a cell (or neoplastic cell) is somehow altered so that it multiplies out of control. Tumors and cancers are some examples of neoplastic diseases. A tumor is a mass composed of a cluster of such abnormal cells. Most cancers form tumors, but not all tumors are cancerous. Benign, or non-cancerous, tumors—such as freckles and moles—stop growing, do not spread to other parts of the body, and do not create new tumors. Malignant, or cancerous, tumors crowd out healthy cells, interfere with body functions, and draw nutrients from body tissues. Cancers continue to grow and spread by direct extension or through a process called metastasis, whereby the malignant cells travel through the lymphatic or blood vessels, eventually forming new tumors in other parts of the body.

[0026] The term “cancer” generally encompasses more than one hundred diseases affecting nearly every part of the body, and all are potentially life threatening. The major types of cancer are carcinoma, sarcoma, melanoma, lymphoma, and leukemia.

[0027] Carcinoma is a type of cancer that develops from epithelial cells. Specifically, a carcinoma is a cancer that begins in a tissue that lines the inner or outer surfaces of the body, and that generally arises from cells originating in the endodermal or ectodermal germ layer during embryogenesis.

[0028] Sarcoma is a cancer that arises from transformed cells of mesenchymal origin. Thus, malignant tumors made of cancerous bone, cartilage, fat, muscle, vascular or hematopoietic tissues are, by definition, considered sarcomas. This is in contrast to a malignant tumor originating from epithelial cells, which are termed carcinoma. Human sarcomas are quite rare. Common malignancies, such as breast, colon, and lung cancer, are almost always carcinoma.

[0029] Melanoma is a type of skin cancer, which forms from melanocytes (pigment-containing cells in the skin).

[0030] Lymphoma is a group of blood cell tumors that develop from lymphocytes. It is sometimes used to refer to just the cancerous ones rather than all tumors. There are two main types: Hodgkin lymphoma (HL) and non-Hodgkin lymphoma (NHL), with two others, multiple myeloma and immunoproliferative diseases, also included by the World Health Organization within the category. Non-Hodgkin lymphoma makes up about 90% of cases and includes a large number of sub-types. Lymphomas are part of the broader group of neoplasms called tumors of the hematopoietic and lymphoid tissues.

[0031] Leukemia is a group of cancers that usually begins in the bone marrow and results in high numbers of abnormal white blood cells. These white blood cells are not fully developed and are called blasts or leukemia cells. Symptoms may include bleeding and bruising problems, feeling very tired, and an increased risk of infections. These symptoms occur due to a lack of normal blood cells. Diagnosis is typically by blood tests or bone marrow biopsy.

[0032] Cancers include, but are not limited to, Adrenal Cancer, Anal Cancer, Bile Duct Cancer, Bladder Cancer, Bone Cancer, Brain/CNS Tumors In Adults, Brain/CNS Tumors In Children, Breast Cancer, Breast Cancer In Men, Cancer in Adolescents, Cancer in Children, Cancer in Young Adults, Cancer of Unknown Primary, Castleman Disease, Cervical Cancer, Colon/Rectum Cancer, Endometrial Cancer, Esophagus Cancer, Ewing Family Of Tumors, Eye Cancer, Gallbladder Cancer, Gastrointestinal Carcinoid Tumors, Gastrointestinal Stromal Tumor (GIST), Gestational Trophoblastic Disease, Hodgkin Disease, Kaposi Sarcoma, Kidney Cancer, Laryngeal and Hypopharyngeal Cancer, Leukemia, Leukemia-Acute Lymphocytic (ALL) in Adults, Leukemia-Acute Myeloid (AML), Leukemia-Chronic Lymphocytic (CLL), Leukemia-Chronic Myeloid (CML), Leukemia-Chronic Myelomonocytic (CMML), Leukemia in Children, Liver Cancer, Lung Cancer, Lung Cancer-Non-Small Cell, Lung Cancer-Small Cell, Lung, Carcinoid Tumor, Lymphoma, Lymphoma of the Skin, Malignant Mesothelioma, Multiple Myeloma, Myelodysplastic Syndrome, Nasal Cavity and Paranasal Sinus Cancer, Nasopharyngeal Cancer, Neuroblastoma, Non-Hodgkin Lymphoma, Non-Hodgkin Lymphoma In Children, Oral Cavity and Oropharyngeal Cancer, Osteosarcoma, Ovarian Cancer, Pancreatic Cancer, Penile Cancer, Pituitary Tumors, Prostate Cancer, Retinoblastoma, Rhabdomyosarcoma, Salivary Gland Cancer, Sarcoma-Adult Soft Tissue Cancer, Skin Cancer, Skin Cancer-Basal and Squamous Cell, Skin Cancer Melanoma, Skin Cancer-Merkel Cell, Small Intestine Cancer, Stomach Cancer, Testicular Cancer, Thymus Cancer, Thyroid Cancer, Uterine Sarcoma, Vaginal Cancer, Vulvar Cancer, Waldenstrom Macroglobulinemia, Wilms Tumor.

[0033] The activation of growth factor receptors (GFR) is commonly known to promote neoplastic cell proliferation. For instance, many cancer treatments rely on the inhibition of growth factors, growth factors receptors and/or downstream signalling proteins such as protein kinases. Such inhibitors include, non-exhaustively, anti-Met (e.g. ARQ-197), anti-VEGF (e.g. Bevacizumab), anti-VEGFR (e.g. Sunitinib or Semaxinib), anti-Her2 (e.g. Trastuzumab), anti-EGFR (e.g. Cetuximab, Gefitinib or Erlotinib), anti-PDGFR (e.g. Imatinib), anti-IGF-1 (e.g. IMC-A12), anti-Ras (e.g. Tipifarnib), anti-Raf (e.g. Sorafenib), anti-src (e.g. Dastinib or Saracatinib), anti-Mek (e.g. C1040 or PD-0325901), anti-PI3K (e.g. LY294002), anti-PDK (e.g. UNC01), anti-HSP90 (e.g. 17-AGG or IPI-504), anti-CDK (e.g. Flavopiridol) and anti-mTOR (e.g. Everolimus).

[0034] Unlike previously reported treatments, it has been surprisingly demonstrated that the pharmaceutical associations, combinations and compositions disclosed herein can be used to treat, prevent and/or diagnose neoplasms (e.g. tumors or cancers) by activating growth factor receptors of vertebrate cells (such as mammalian cells, especially human cells).

[0035] The present invention also aims at providing mechanisms for solving and/or avoiding at least one of, preferably a plurality of, the problems, issues and/or shortcomings associated with previously reported neoplasm treatment therapies.

[0036] The present disclosure thus provides embodiments for:
[0037] Converting or recoding a neoplastic cell to induce and/or promote and/or improve self-healing and/or self-recovery thereof, particularly within a shorter period of time
[0038] Converting or recoding a neoplastic cell to induce and/or promote and/or improve self-healing and/or self-recovery thereof, particularly with a higher conversion yield;
[0039] Restoring a neoplastic cell's ability to undergo conversion into a physiologically functional and/or healthy cell, particularly within a shorter period of time;
[0040] Restoring a neoplastic cell's ability to undergo differentiation, particularly within a shorter period of time;
[0041] Converting and/or recoding a circulating or non-circulating neoplastic cell such as a cancer cell, into a non-neoplastic cell, particularly within a shorter period of time;
[0042] Protecting a subject from a neoplastic disease, disorder, condition, or pathology such as cancer, or any symptoms thereof, particularly within a shorter period of time;
[0043] Providing and/or producing a physiologically functional and/or healthy cell including an osteocyte and/or a chondrocyte and/or an adipocyte and/or a myocyte and/or a keratinocyte and/or a fibrocyte and/or a podocyte and/or a neurocyte and/or a mature endothelial cell and/or a osteoblast and/or a chondroblast and/or a neuroblast and/or a Sertoli cell and/or a Leydig cell and/or a germ cell and/or an endothelial cell and/or an angioblast and/or a fibroblast from a neoplastic cell, particularly within a shorter period of time;
[0044] Re-establishing, restoring and/or reactivating a cell adhesion checkpoint of a neoplastic cell;
[0045] Inducing and/or promoting and/or enhancing neoplastic cell differentiation, particularly within a shorter period of time;
[0046] Inducing and/or promoting and/or enhancing a decrease in Cyclin D gene and protein expression;
[0047] Inducing and/or promoting and/or enhancing a G1 to G0 cell cycle phase transition;
[0048] Inducing and/or promoting and/or enhancing the inactivation of a protein complex between a Cyclin D and at least one of Cyclin-dependent kinase (CDK) 4 or 6;
[0049] Preventing or reducing the phosphorylation of the retinoblastoma (Rb) protein thus activating its tumour suppressor functions;
[0050] Increasing the phosphorylation of the p53 protein thus reducing its degradation and activating its tumor suppressor functions;
[0051] Preventing or reducing the activation of the Ras/MAP kinase signalling cascade;
[0052] Identifying and/or analysing the features and/or markers of a neoplastic cell;
[0053] Regulating and/or activating growth factor receptors of a neoplastic cell;
[0054] Modulating and/or regulating the adhesion between a cell (in particular a neoplastic cell) and its micro-environment i.e. the surrounding extracellular matrix;
[0055] Treating, recoding or converting a neoplastic cell without temporarily or permanently damaging or killing said neoplastic cell and/or without permanently inducing a quiescent state thereof;
[0056] Dampening and/or reducing or suppressing cell division and/or cell proliferation of a neoplastic cell;
[0057] Activating and/or promoting and/or regulating anti-mitogen activity and/or tumor suppressor pathways in a neoplastic cell;
[0058] Inhibiting and/or reducing anti-oncogenic activity in a neoplastic cell;
[0059] Converting or recoding a neoplastic cell to induce and/or promote and/or improve self-healing and/or self-recovery thereof, and/or protecting a subject from a neoplastic disease, disorder, condition or pathology such as cancer using extracellular means;
[0060] Converting or recoding a neoplastic cell to induce and/or promote and/or improve self-healing and/or self-recovery thereof, protecting a subject from a neoplastic disease, disorder, condition or pathology such as cancer without modifying the genome of said cell;
[0061] Providing diagnostic tools for diagnosing neoplastic diseases in a subject.

### I. Definitions

[0062] Those skilled in the art will recognize, or be able to ascertain using no more than routine experimentation, many equivalents to the specific embodiments in accordance with the invention described herein. The scope of the present invention is not intended to be limited to the present description, but rather is as set forth in the appended claims.

[0063] In the claims, articles such as “a”, “an”, and “the” may mean one or more than one unless indicated to the contrary or otherwise evident from the context. Claims or descriptions that include “or” between one or more members of a group are considered satisfied if one, more than one, or all of the group members are present in, employed in, or otherwise relevant to a given product or process unless indicated to the contrary or otherwise evident from the context. The invention includes embodiments in which exactly one member of the group is present in, employed in, or otherwise relevant to a given product or process. The invention includes embodiments in which more than one, or all of the group members are present in, employed in, or otherwise relevant to a given product or process.

[0064] It is also noted that the term “comprising” is intended to be open and permits but does not require the inclusion of additional elements or steps. When the term “comprising” is used herein, the terms “consisting of”, “consisting essentially of”, “consisting substantially of” and “consisting exclusively of” are thus also encompassed and disclosed.

[0065] As used herein, the term “approximately” or “about,” as applied to one or more values of interest, refers to a value that is similar to a stated reference value. In certain embodiments, the term “approximately” or “about” refers to a range of values that fall within 25%, 20%, 19%, 18%, 17%, 16%, 15%, 14%, 13%, 12%, 11%, 10%, 9%, 8%, 7%, 6%, 5%, 4%, 3%, 2%, 1%, or less in either direction (greater than or less than) of the stated reference value unless otherwise indicated, self-evident or contradictory in context (e.g. except where such number would exceed 100% of a possible value).

[0066] As used herein and unless otherwise indicated or contradictory in context, the term “with” followed by a specific number of amino acids, when used to define a particular peptide, variant or analog thereof, such as in “a peptide with three amino acids”, means that such peptide, variant or analog thereof, contains exclusively the specific number of amino acids specified after this term.

[0067] As used herein and unless otherwise indicated or contradictory in context, the term “Ci-alkyl” is intended to specifically and individually disclose any branched or unbranched radical, moiety or functional group having “i” carbon atom(s).

[0068] The carbon atom content of the various hydrocarbon-containing moieties herein may be indicated by a prefix designating the minimum and maximum number of carbon atoms in the moiety. For example, in certain embodiments, (Ca-Cb)alkyl indicates an alkyl moiety of the integer “a” to the integer “b” carbon atoms, inclusive.

[0069] At various places in the present specification, substituents of compounds of the present disclosure may be disclosed in groups or in ranges. It is specifically intended that the present disclosure include each and every individual sub-combination of the members of such groups and ranges. For example, in certain embodiments, the term “C1-C5 alkyl” is an abbreviation for (and thus is specifically intended to individually disclose) C1-alkyl (i.e. methyl), C2-alkyl (i.e. ethyl), C3-alkyl (i.e. 1-propyl and 2-propyl), C4-alkyl (i.e. 1-butyl, sec-butyl, iso-butyl and tert-butyl), and C5-alkyl (i.e. 1-pentyl, 2-pentyl, 3-pentyl, 2-methyl-1-butyl, 3-methyl-1-butyl, 2-methyl-2-butyl, 3-methyl-2-butyl, 2,2-dimethyl-1-propyl and 1,1-dimethyl-1-propyl).

[0070] As used herein, unless indicated otherwise or contradictory in context, the terms “alkyl” and “(Ca-Cb)alkyl” refer to monovalent hydrocarbon radicals containing the requisite number of carbon atoms as described above, having straight or branched moieties or combinations thereof. As used herein, alkyl groups may be optionally substituted with between one to four substitutes. Non-limiting examples of alkyl groups include, e.g. methyl, ethyl, n-propyl, isopropyl, n-butyl, isobutyl, sec-butyl, t-butyl, etc. Of course, other alkyl groups will be readily apparent to those of skilled in the art given the benefit of the present disclosure.

[0071] Where ranges are given, endpoints are included. Furthermore, it is to be understood that unless otherwise indicated or otherwise evident from the context and understanding of one of ordinary skill in the art, values that are expressed as ranges can assume any specific value or sub-range within the stated ranges in different embodiments of the invention, to the tenth of the unit of the lower limit of the range, unless the context clearly dictates otherwise. For example, in certain embodiments, a disclosed 0-10 range would, for example, in certain embodiments, also specifically and individually disclose the following values and ranges: 0, 1, 2, 3, 4, 5, 6, 7, 8, 9, 10, 0.1, 0.2, 0.3, 0.4, 0.5, 0.6, 0.7, 0.8, 0.9, 1, 1.1, 1.2, 1.3, 1.4, 1.5, 1.6, 1.7, 1.8, 1.9, 2, 2.1, 2.2, 2.3, 2.4, 2.5, 2.6, 2.7, 2.8, 2.9, 3, 3.1, 3.2, 3.3, 3.4, 3.5, 3.6, 3.7, 3.8, 3.9, 4, 4.1, 4.2, 4.3, 4.4, 4.5, 4.6, 4.7, 4.8, 4.9, 5, 5.1, 5.2, 5.3, 5.4, 5.5, 5.6, 5.7, 5.8, 5.9, 6, 6.1, 6.2, 6.3, 6.4, 6.5, 6.6, 6.7, 6.8, 6.9, 7, 7.1, 7.2, 7.3, 7.4, 7.5, 7.6, 7.7, 7.8, 7.9, 8, 8.1, 8.2, 8.3, 8.4, 8.5, 8.6, 8.7, 8.8, 8.9, 9, 9.1, 9.2, 9.3, 9.4, 9.5, 9.6, 9.7, 9.8, 9.9, 10, 0-1, 0-2, 0-3, 0-4, 0-5, 0-6, 0-7, 0-8, 0-9, 1-2, 1-3, 1-4, 1-5, 1-6, 1-7, 1-8, 1-9, 2-3, 2-4, 2-5, 2-6, 2-7, 2-8, 2-9, 2-10, 3-4, 3-5, 3-6, 3-7, 3-8, 3-9, 3-10, 4-5, 4-6, 4-7, 4-8, 4-9, 4-10, 5-6, 5-7, 5-8, 5-9, 5-10, 6-7, 6-8, 6-9, 6-10, 7-8, 7-9, 7-10, 8-9, 8-10, 9-10, 0-0.1, 0-0.2, 0-0.3, 0-0.4, 0-0.5, 0-0.6, 0-0.7, 0-0.8, 0-0.9, 0-1.1, 0-1.2, etc.

[0072] As used herein and unless otherwise indicated or contradictory in context, the term “substantially” refers to the qualitative condition of exhibiting total or near-total extent or degree of a characteristic or property of interest. One of ordinary skill in the biological arts will understand that biological and chemical phenomena rarely, if ever, go to completion and/or proceed to completeness or achieve or avoid an absolute result. The term “substantially” is therefore used herein to capture the potential lack of completeness inherent in many biological and chemical phenomena.

[0073] In addition, it is to be understood that any particular embodiment of the present invention that falls within the prior art may be explicitly excluded from any one or more of the claims using the appropriate disclaimer(s) or proviso(s). Since such embodiments are deemed to be known to one of ordinary skill in the art, they may be excluded even if the exclusion is not set forth explicitly herein. Any particular embodiment of the compositions of the invention (e.g., any peptide or peptidomimetic; any method of production; any method of use; etc.) can be excluded from any one or more claims, for any reason, whether or not related to the existence of prior art.

[0074] All cited sources, for example, in certain embodiments, references, publications, databases, database entries, and art cited herein, are incorporated into this application by reference in their entirety, even if not expressly stated in the citation. In case of conflicting statements of a cited source and the instant application, the statement in the instant application shall control.

[0075] As the case may be, and unless otherwise indicated or contradictory in context, macromolecules molecular weights should be understood in the present description as being number averaged molecular weights.

[0076] The peptides mentioned in the present description may not follow the usual representation conventions. For instance, the N-terminal amino acid of a peptide sequence may be the first amino acid in the sequence or the last amino acid. Likewise, the C-terminal amino acid of a peptide sequence may be the first amino acid in the sequence or the last amino acid. For example, in the peptide sequence NAIS, “N” may be N-terminal or C-terminal, and “S” may be N-terminal or C-terminal. Consequently, for the purpose of the present disclosure, e.g. NAIS also covers SIAN, SAIS also covers SIAS, SPIN also covers NIPS, etc.

[0077] In the present application, when reference is made to a certain peptide (e.g. a GFR-binding compound as provided herein) comprising one or more other peptide(s), said one or more other peptide(s) is(are) understood to be stably (in most cases, covalently) attached/bound to at least one part of said peptide. The attachment/binding may be located anywhere on the peptide unless indicated otherwise, contradictory in context or contradictory to general scientific rules. No specific attachment/binding location of said one or more other peptide(s) to said peptide shall be assumed unless specifically mentioned.

[0078] Peptide or polypeptide: As used herein, the term “peptide” or “polypeptide” are used interchangeably and refers to a polymer of less than or equal to 100 amino acids long, e.g., about 2, 3, 4, 5, 10, 15, 20, 25, 30, 35, 40, 45, 50, 55, 60, 65, 70, 75, 80, 85, 90, 95 or 100 amino acids long. The terms apply to amino acid polymers in which one or more amino acid residue is an artificial chemical mimetic of a corresponding naturally occurring amino acid, as well as to naturally occurring amino acid polymers, non-naturally occurring amino acid polymers, peptide analogs, peptide variants and peptide mimetics. Conventional techniques for synthesising peptides involve the activation of the carboxylic acid function of an amino acid or of a peptide, using a coupling agent. This activated acid is then contacted with an amino acid or a peptide in which the N-terminal amino acid is not protected, thus forming an amide bond also called peptide bond. Coupling reaction conditions together with coupling agents are well known in the art and described, for instance, in Greene, “Protective Groups in Organic Synthesis”, Wiley, New York, 2007 4th edition. In addition, suitable peptide synthesis routes are described, for instance, in Hojo H., Recent progress in the chemical synthesis of proteins, Curr Opin Struct Biol. 2014; 26C:16-23 and Saranya Chandrudu, et al., Chemical Methods for Peptide and Protein Production, Molecules, 2013, 18, 4373-4388, each of which is incorporated herein by reference in its entirety. There are two main strategies for peptide synthesis i.e. liquid-phase peptide synthesis and solid-phase peptide synthesis (SPPS) which is now most commonly used for peptide synthesis. Instead of C-terminal protection with a chemical group, the C-terminus of the first amino acid is coupled to an activated solid support, such as polystyrene or polyacrylamide. This type of approach has a two-fold function: the resin acts as the C-terminal protecting group and provides a rapid method to separate the growing peptide product from the different reaction mixtures during synthesis. As with many different biological manufacturing processes, peptide synthesizers have been developed for automation and high-throughput peptide production. SPPS allows the synthesis of natural peptides which are difficult to express in bacteria, the incorporation of unnatural amino acids, peptide/protein backbone modification, and the synthesis of D-proteins, which consist of D-amino acids. Very long peptide can be accessed by using native chemical ligation to couple two peptides together with quantitative yields.

[0079] Peptide analogs: As used herein, unless indicated otherwise or contradictory in context, the term “peptide analogs” refers to polypeptide variants which differ by one or more amino acid alterations, e.g., substitutions, additions or deletions of amino acid residues that still maintain one or more of the properties of the parent or starting peptide.

[0080] Peptide variants: As used herein, unless indicated otherwise or contradictory in context, the term “peptide variants” refers to a peptide which has a certain identity with a native or reference compound sequence. In one example, the peptide variant refers to any post-administration, application, injection modified peptide. Such post-administration, application, injection modifications include, but are not limited to, phosphorylation, acetylation, glutamylation, tyrosination, palmitoylation, glycosylation, myristoylation, palmitoylation, isoprenylation, glypiation, lipoylation, phosphopantetheinylation, acylation, alkylation, amidation, arginylation, polyglutamylation, polyglycylation, butyrylation, gamma-carboxylation, glycosylation, polysialylation, malonylation, hydroxylation, iodination, nucleotide addition, oxidation, adenylylation, propionylation, pyroglutamate formation, S-glutathionylation, S-nitrosylation, succinylation, sulfation, glycation, biotinylation, pegylation, ISGylation, SUMOylation, ubiquitination, Neddylation, Pupylation, citrullination, deamidation, eliminylation, carbamylation, and racemization.

[0081] Peptido-mimetic: As used herein, unless indicated otherwise or contradictory in context, the term “peptido-mimetic” or “peptidomimetic” refers to a synthetic chemical compound which comprises amino acids but not only and that is able to mimic the biological action of a peptide, often because the mimetic has a basic structure that mimics the basic structure of the peptide and/or has the salient biological properties of that peptide. In one particular example, a peptidomimetic is a hybrid molecule containing both, at least one peptide, and at least one of a polysaccharide, a polynucleotide or a linear or branched, saturated or unsaturated, hydrocarbon chain.

[0082] Linear peptide: As used herein, unless indicated otherwise or contradictory in context, the term “linear peptide” means a peptide in which the C-terminal and the N-terminal amino acid residues do not covalently interact with each other and none of the C-terminal or the N-terminal amino acid residues covalently interacts with another amino acid residue of the peptide chain.

[0083] Cyclic peptide: As used herein, unless indicated otherwise or contradictory in context, the term “cyclic peptide” means peptide in which the C-terminal and N-terminal amino acid residues do covalently interact with each other or the C-terminal and/or the N-terminal amino acid residues covalently interact with at least one other amino acid residue of the peptide chain so as to form a ring-like structure.

[0084] Amino acid: As used herein, unless indicated otherwise or contradictory in context, the term “amino acid” refers to naturally occurring and non-naturally occurring amino acids including amino acid analogs. Naturally occurring amino acids are those encoded by the genetic code, as well as those amino acids that are later modified, e.g., hydroxyproline, [gamma]-carboxyglutamate, and O-phosphoserine. Naturally encoded amino acids are the 20 common amino acids glycine (Gly, G), alanine (Ala, A), valine (Val, V), leucine (Leu, L), isoleucine (Ile, I), serine (Ser, S), threonine (Thr, T), phenylalanine (Phe, F), tyrosine (Tyr, Y), tryptophane (Trp, W), cysteine (Cys, C), methionine (Met, M), proline (Pro, P), aspartic acid (Asp, D), asparagine (Asn, N), glutamine (Gln, Q), glutamic acid (Glu, E), histidine (His, H), arginine (Arg, R) et lysine (Lys, K) and pyrrolysine and selenocysteine. Non-naturally occurring amino acids include, but are not limited to, the dextrogyre (D) isomers of the above-cited naturally-occurring amino acids. Amino acid analogs refers to compounds that have the same basic chemical structure as a naturally occurring amino acid i.e., an [alpha] carbon that is bound to a hydrogen, a carboxyl group, an amino group, and an R group (i.e. side chain), and which may be used in replacement thereof without substantially affecting the overall function of the peptide to which it belongs. Amino acid analogs (or non-naturally occurring amino acids) that may be suitable for implementing embodiments of the present invention include, but are not limited to, amino acids comprising a photoactivatable cross-linker, spin-labeled amino acids, fluorescent amino acids, metal binding amino acids, metal-containing amino acids, radioactive amino acids, amino acids with novel functional groups, amino acids that covalently or noncovalently interact with other molecules, photocaged and/or photoisomerizable amino acids, amino acids comprising biotin or a biotin analogue, glycosylated amino acids such as a sugar substituted serine, other carbohydrate modified amino acids, keto-containing amino acids, amino acids comprising polyethylene glycol or polyether, heavy atom substituted amino acids, chemically cleavable and/or photocleavable amino acids, amino acids with an elongated side chains as compared to natural amino acids, including but not limited to, polyethers or long chain hydrocarbons, including but not limited to, greater than about 5 or greater than about 10 carbons, carbon-linked sugar-containing amino acids, redox-active amino acids, amino thioacid containing amino acids, and amino acids comprising one or more toxic moiety. The term “AA^{I}” (AA roman numeral one) may be used in the description and refers to an amino acid which may be any amino acid as defined above in particular any naturally occurring and non-naturally occurring amino acids.

[0085] Amino acid side chain: As used herein, unless indicated otherwise or contradictory in context, the term “amino acid side chain” means the functional group of an amino acid that differentiates it from other amino acids. All amino acid structures have a carboxyl group, an amine group and a specific side chain.

[0086] AA^{II} (AA roman numeral two): As used herein, unless indicated otherwise or contradictory in context, the terms “polar amino acid” or “AA^{II}” means amino acids having a polar, non-charged group-containing side chain. Polar amino acids are protonated at physiological pH (about 7). Examples of polar amino acids include, but are not limited to, Cys (C), Asn (N), Gln (O), Ser (S), Thr (T), or Tyr (Y).

[0087] AA^{III} (AA roman numeral three): As used herein, unless indicated otherwise or contradictory in context, the terms “acidic amino acid” or “AA^{III}” means amino acids having an acidic group-containing side chain. Acidic amino acid deprotonated forms predominate at physiological pH (about 7). Examples of acidic amino acids include, but are not limited to, Asn (N) and Glu (E).

[0088] AA^{IV} (AA roman numeral four): As used herein, unless indicated otherwise or contradictory in context, the terms “aliphatic amino acid” or “AA^{IV}” means amino acids having an aliphatic side chain. Examples of aliphatic amino acids include, but are not limited to, Ala (A), Leu (L), Ile (I), Gly (G), Val (V) and any analogs and derivatives thereof.

[0089] AA^{V} (AA roman numeral five): As used herein, unless indicated otherwise or contradictory in context, the terms “apolar amino acid” or “AA^{V}” means amino acids having an apolar side chain. Examples of apolar amino acids include, but are not limited to, Ala (A), Phe (F), Gly (G), Ile (I), Leu (L), Met (M), Pro (P), Val (V) or Trp (W).

[0090] AA^{VI} (AA roman numeral six): As used herein, unless indicated otherwise or contradictory in context, the term “aromatic amino acid” or “AA^{VI}” means amino acids having an aromatic group-containing side chain. Examples of aromatic amino acids include, but are not limited to, Trp (W), Tyr (Y) or Phe (F).

[0091] AA^{VII} (AA roman numeral seven): As used herein, unless indicated otherwise or contradictory in context, the term “basic amino acid” or “AA^{VII}” means amino acids having a basic group-containing side chain. Basic amino acid protonated forms predominate at physiological pH (about 7). Examples of basic amino acids include, but are not limited to, Arg (R), His (H), or Lys (K).

[0092] AA^{VIII} (AA roman numeral eight): As used herein, unless indicated otherwise or contradictory in context, the term “AA^{VIII}” means Leu (L) or Ile (I) and any analogs and derivatives thereof.

[0093] AA^{IX} (AA roman numeral nine): As used herein, unless indicated otherwise or contradictory in context, the term “charged amino acid” or “AA^{IX}” means amino acids having either an acidic group-containing side chain or an basic group-containing side chain. Charged amino acid charged forms predominate at physiological pH (about 7). Examples of charged amino acids include, but are not limited to, Asn (N), Glu (E), His (H), Lys (K) or Arg (R).

[0094] AAⁿ: As used herein, unless indicated otherwise or contradictory in context, the term “AAⁿ”, in which n is a positive integer arbitrarily chosen to identify a specific position within the primary sequence of a peptide. For instance, AA¹³ means the amino acid of position 13. The terms “amino acid” and “AA” are interchangeably used in the present description.

[0095] N-terminal: As used herein, unless indicated otherwise or contradictory in context, the term “N-terminal” means the amine (—NH₂) function/group/moiety located at one (terminal) end of a protein or polypeptide. This functional group is the only amine group which is not engage in n amide peptide bond.

[0096] C-terminal: As used herein, unless indicated otherwise or contradictory in context, the term “C-terminal” means the carboxylate (—CO₂H) function/group/moiety located at one (terminal) end of a protein or polypeptide. This functional group is the only carboxylic acid group which is not engage in n amide peptide bond.

[0097] Naturally-occurring peptide: As used herein, unless indicated otherwise or contradictory in context, the terms “naturally-occurring peptide” or “natural peptide” means a peptide which may be found in nature without human direct intervention (except for its extraction and/or isolation).

[0098] Synthetic peptide: As used herein, unless indicated otherwise or contradictory in context, the terms “synthetic peptide” or “non-natural peptide” means a peptide which may not be found in nature without human direct intervention (except for its extraction and/or isolation). For example, in certain embodiments, a synthetic peptide may have the amino acid sequence of a natural peptide except for at least one amino acid deletion or substitution relative to the natural sequence. In the case of a substitution, an amino acid from the natural sequence is replaced by another, different, naturally-occurring or non-naturally occurring amino acid. For example, in certain embodiments, a synthetic peptide may not possess a post-translational modification of the natural peptide such as the attachment of an acetate group, a phosphate group, a lipid, a carbohydrate, or the formation of a disulfide bridge.

[0099] Covalent interaction: As used herein, unless indicated otherwise or contradictory in context, the term “interact covalently”, “covalent interaction” or “covalent bond” are interchangeably used and means a chemical bond or interaction that involves the sharing of electron pairs between atoms. Examples of such interactions are σ-bonding and π-bonding.

[0100] Non-covalent interaction: As used herein, unless indicated otherwise or contradictory in context, the term “interact non-covalently”, “non-covalent interaction” or “non-covalent bond” are interchangeably used and means a chemical bond or interaction that does not involve the sharing of electron pairs between atoms but rather involves more dispersed variations of electromagnetic interactions between molecules or within a molecule. Non-covalent interactions can be generally classified into four categories, electrostatic interactions, π-interactions, van der Waals forces, and hydrophobic interactions.

[0101] Electrophile: As used herein, unless indicated otherwise or contradictory in context, the term “electrophile” means an organic molecule attracted to electrons that participates in a chemical reaction by accepting an electron pair in order to bond to a nucleophile. Most electrophiles are positively charged, have an atom that carries a partial positive charge, or have an atom that does not have an octet of electrons.

[0102] Nucleophile: As used herein, unless indicated otherwise or contradictory in context, the term “nucleophile” means an organic molecule that donates an electron pair to an electrophile to form a chemical bond in relation to a reaction. All molecules or ions with a free pair of electrons or at least one pi bond can act as nucleophiles.

[0103] Polysaccharide: As used herein, unless indicated otherwise or contradictory in context, the term “polysaccharide” means polymeric carbohydrate molecules composed of long chains of monosaccharide units bound together by glycosidic linkages and which upon hydrolysis provide monosaccharides or oligosaccharides. They range in structure from linear to highly branched polymers.

[0104] Polynucleotide: As used herein, the term “polynucleotide” or “nucleic acid”, which are used interchangeably, refers to the phosphate ester polymeric form of ribonucleosides (“RNA molecules”) or deoxyribonucleosides (“DNA molecules”), or any phosphoester analogs thereof, such as phosphorothioates and thioesters, in either single stranded form, or a double-stranded helix. The term “nucleic acid” includes double-stranded DNA round, inter alia, in linear (e.g., restriction fragments) or circular DNA molecules. In particular, nucleic acids as used herein refer to nucleic acids such as RNAs encoding for agonist of growth factor receptors as defined herein.

[0105] Nucleoside: As used herein, the term “nucleoside” refers to a compound containing a sugar molecule (e.g., a pentose or ribose) or derivative thereof in combination with an organic base (e.g., a purine or pyrimidine) or a derivative thereof (also referred to herein as “nucleobase”).

[0106] Nucleotide: As used herein, the term “nucleotide” refers to a nucleoside including a phosphate group.

[0107] Dendrimer: As used herein, unless indicated otherwise or contradictory in context, the term “dendrimer” means any repetitively branched molecules. Examples of dendrimers are phosphorous dendrimers, polylysine dendrimers, polypropylenimine dendrimers and PAMAM dendrimers, such as the ones described, for instance, in Scientific World Journal. 2013; 2013:732340; Curr Opin Chem Biol. 1998; 2(6):733-42; J Pept Sci. 1999; 5(5):203-20; and J Pept Sci. 2008; 14(1):2-43, which may be used for implementing embodiments of the present invention, each of which being herein incorporated by reference in its entirety.

[0108] Synthetic molecule: As used herein, unless indicated otherwise or contradictory in context, the term “synthetic molecule” means a molecule which may not be found in nature without human direct intervention (except for its extraction and/or isolation).

[0109] Synthetic polymers: As used herein, unless indicated otherwise or contradictory in context, the term “synthetic polymer” refers to a macromolecule or polymer which may not be found in nature without human direct intervention (except for its extraction and/or isolation).

[0110] Antibody: As used herein, unless indicated otherwise or contradictory in context, the term “antibody” encompasses the various forms of antibodies including, but not limited to, whole antibodies, human antibodies, humanized antibodies and genetically engineered antibodies like monoclonal antibodies, chimeric antibodies or recombinant antibodies as well as fragments of such antibodies as long as the characteristic properties according to the present disclosure are retained.

[0111] Monoclonal antibody: As used herein, unless indicated otherwise or contradictory in context, the term “monoclonal antibody” refers to an antibody obtained from a population of substantially homogeneous antibodies, i.e., the individual antibodies comprising the population are identical except for possible naturally occurring mutations that may be present in minor amounts. Monoclonal antibodies are highly specific, being directed against a single antigenic site. Furthermore, in contrast to polyclonal antibody preparations which include different antibodies directed against different determinants (epitopes), each monoclonal antibody is directed against a single determinant on the antigen. In addition to their specificity, the monoclonal antibodies are advantageous in that they may be synthesized uncontaminated by other antibodies. The modifier “monoclonal” is not to be construed as requiring production of the antibody by any particular method. For example, the monoclonal antibodies useful in the present invention may be prepared by the hybridoma methodology described by Kohler et al., Nature, 256:495 (1975), or may be made using recombinant DNA methods in bacterial, eukaryotic animal or plant cells (such as in U.S. Pat. No. 4,816,567). The “monoclonal antibodies” may also be isolated from phage antibody libraries using the techniques described in Clackson et al., Nature, 352:624-628 (1991) and Marks et al., J. Mol. Biol., 222:581-597 (1991), for example. All previously cited references being hereby incorporated by reference in their entirety.

[0112] Chimeric antibody: As used herein, unless indicated otherwise or contradictory in context, the term “chimeric antibody” refers to a monoclonal antibody comprising a variable region, i.e., binding region, from one source or species and at least a portion of a constant region derived from a different source or species, usually prepared by recombinant DNA techniques. Chimeric antibodies comprising a murine variable region and a human constant region are especially preferred. Such murine/human chimeric antibodies are the product of expressed immunoglobulin genes comprising DNA segments encoding murine immunoglobulin variable regions and DNA segments encoding human immunoglobulin constant regions. Other forms of “chimeric antibodies” encompassed by the present invention are those in which the class or subclass has been modified or changed from that of the original antibody. Such “chimeric” antibodies are also referred to as “class-switched antibodies.” Methods for producing chimeric antibodies involve conventional recombinant DNA and gene transfection techniques now well known in the art such as in Morrison, S. L., et al., Proc. Natl. Acad. Sci. USA 81 (1984) 6851-6855 and U.S. Pat. No. 5,204,244, which are hereby incorporated by reference in their entirety.

[0113] Humanized antibody: As used herein, unless indicated otherwise or contradictory in context, the term “humanized antibody” refers to antibodies in which the framework or “complementarity determining regions” (CDR) have been modified to comprise the CDR of an immunoglobulin of different specificity as compared to that of the parent immunoglobulin.

[0114] Human antibody: As used herein, unless indicated otherwise or contradictory in context, the term “human antibody” includes antibodies having variable and constant regions derived from human germline immunoglobulin sequences. Based on this technology, human antibodies against a great variety of targets can be produced. Examples of human antibodies are for example described in Kellermann, S. A., et al., Curr Opin Biotechnol. 13 (2002) 593-597, which is hereby incorporated by reference in its entirety.

[0115] Recombinant human antibody: As used herein, unless indicated otherwise or contradictory in context, the term “recombinant human antibody” includes all human antibodies that are prepared, expressed, created or isolated by recombinant means, such as antibodies isolated from a host cell such as a NSO or CHO cell or from an animal (e.g. a mouse) that is transgenic for human immunoglobulin genes or antibodies expressed using a recombinant expression vector transfected into a host cell. Such recombinant human antibodies have variable and constant regions derived from human germline immunoglobulin sequences in a rearranged form.

[0116] Antigen: As used herein, unless indicated otherwise or contradictory in context, the term “antigen” is a predetermined antigen to which an antibody can selectively bind. The target antigen may be polypeptide, carbohydrate, nucleic acid, lipid, hapten or other naturally occurring or synthetic compound. Preferably, the target antigen is a polypeptide of the transmembrane receptor family such as integrins, syndecans, selectins or dystroglycans. An antibody “which binds” an antigen of interest, e.g. an integrin expressed on the surface of a neoplastic cell, is one that binds the antigen with sufficient affinity such that the antibody is useful as a therapeutic agent in targeting a cell or tissue expressing the antigen, and does not significantly cross-react with other proteins. In such embodiments, the extent of binding of the antibody to a “non-target” protein will be less than about 10% of the binding of the antibody to its particular target protein as determined by fluorescence activated cell sorting (FACS) analysis or radioimmunoprecipitation (RIA). With regard to the binding of an antibody to a target molecule, the term “specific binding” or “specifically binds to” or is “specific for” a particular polypeptide or an epitope on a particular polypeptide target means binding that is measurably different from a non-specific interaction. Specific binding can be measured, for example, by determining binding of a molecule compared to binding of a control molecule, which generally is a molecule of similar structure that does not have binding activity. For example, specific binding can be determined by competition with a control molecule that is similar to the target, for example, an excess of non-labeled target. In this case, specific binding is indicated if the binding of the labeled target to a probe is competitively inhibited by excess unlabeled target. The term “specific binding” or “specifically binds to” or is “specific for” a particular polypeptide or an epitope on a particular polypeptide target as used herein can be exhibited, for example, by a molecule having a Kd for the target of at least about 10⁻⁴ M, alternatively at least about 10⁻⁵ M, alternatively at least about 10⁻⁶ M, alternatively at least about 10⁻⁷ M, alternatively at least about 10⁻⁸ M, alternatively at least about 10⁻⁹ M, alternatively at least about 10−10 M, alternatively at least about 10⁻¹¹ M, alternatively at least about 10⁻¹² M, or greater. In one embodiment, the term “specific binding” refers to binding where a molecule binds to a particular polypeptide or epitope on a particular polypeptide without substantially binding to any other polypeptide or polypeptide epitope.

[0117] Constant domains: As used herein, unless indicated otherwise or contradictory in context, the term “constant domains” refers to domains that are not involved directly in binding the antibody to an antigen but are involved in the effector functions (ADCC, complement binding, and CDC).

[0118] Variable region: As used herein, unless indicated otherwise or contradictory in context, the term “variable region” (variable region of a light chain (VL), variable region of a heavy chain (VH)) refers to each of the pair of light and heavy chains which is involved directly in binding the antibody to the antigen. The domains of variable human light and heavy chains have the same general structure and each domain comprises four framework (FR) regions whose sequences are widely conserved, connected by three “hypervariable regions” (or complementarity determining regions, CDRs). The framework regions adopt a b-sheet conformation and the CDRs may form loops connecting the b-sheet structure. The CDRs in each chain are held in their three-dimensional structure by the framework regions and form together with the CDRs from the other chain the antigen binding site.

[0119] Hypervariable region: As used herein, unless indicated otherwise or contradictory in context, the term “hypervariable region” or “antigen-binding portion of an antibody” refers to the amino acid residues of an antibody which are responsible for antigen-binding. The hypervariable region comprises amino acid residues from the “complementarity determining regions” or “CDRs”. “Framework” or “FR” regions are those variable domain regions other than the hypervariable region residues as herein defined. Therefore, the light and heavy chains of an antibody comprise from N- to C-terminus the domains FR1, CDR1, FR2, CDR2, FR3, CDR3, and FR4. Especially, CDR3 of the heavy chain is the region which contributes most to antigen binding. CDR and FR regions are determined according to the standard definition of Kabat, et al., Sequences of Proteins of Immunological Interest, 5th ed., Public Health Service, National Institutes of Health, Bethesda, Md. (1991), and/or those residues from a “hypervariable loop”.

[0120] Biocompatible: As used herein, unless indicated otherwise or contradictory in context, the term “biocompatible” means compatible with living cells, tissues, organs or systems posing little to no risk of injury, toxicity or rejection by the immune system.

[0121] Biologically active: As used herein, unless indicated otherwise or contradictory in context, the term “biologically active” refers to a characteristic of any substance that has activity in a biological system and/or organism. For instance, a substance that, when administered to an organism, has a biological effect on that organism, is considered to be biologically active. In particular examples, a compound, substance or pharmaceutical composition of the present disclosure may be considered biologically active even if a portion of the compound, substance or pharmaceutical composition is biologically active or mimics an activity considered biologically relevant.

[0122] Stem cells: As used herein, unless indicated otherwise or contradictory in context, the term “stem cell” refers to the term as it is generally understood in the art. For example, in certain embodiments, stem cells, regardless of their source, are cells that are capable of dividing and renewing themselves for long periods, are at least to a degree unspecialized (undifferentiated), and can give rise to (differentiate into) specialized cell types (i.e., they are progenitor or precursor cells for a variety of different, specialized cell types).

[0123] Mesenchymal stem cells: As used herein, unless indicated otherwise or contradictory in context, the term “mesenchymal stem cells” generally means multipotent adult stromal cells that can differentiate into a variety of cell types, such as osteoblasts, chondrocytes, and adipocytes.

[0124] Stem cell-like: As used herein, unless indicated otherwise or contradictory in context, the term “Stem cell-like” refers to a cell which is not a stem cell by its origin but functions as a stem cell and presents similar characteristics such as, for example, the expression of sternness markers like Stro-1 and/or is multipotent thus has the ability to differentiate into various cell types.

[0125] Progenitor cells: As used herein, unless indicated otherwise or contradictory in context, the term “progenitor cells” generally means a biological cell that, like any stem cell, has a tendency to differentiate into a specific type of cell, but is already more specific than a stem cell and is pushed to differentiate into its “target” cell. Stem cells can generally replicate indefinitely, whereas progenitor cells can divide only a limited number of times.

[0126] Adult stem cells: As used herein, unless indicated otherwise or contradictory in context, the term “adult stem cells” means undifferentiated cells, found throughout the body after development, that multiply by cell division to replenish dying cells and regenerate damaged tissues. Also known as somatic stem cells, they can be found in juvenile as well as adult animals and human bodies.

[0127] Differentiation: As used herein, unless indicated otherwise or contradictory in context, the term “differentiation” refers to the process by which a less specialized cell becomes a more specialized cell type and involves a switch from one gene expression pattern to another.

[0128] Differentiated cells: As used herein, unless indicated otherwise or contradictory in context, the term “differentiated cells” generally means any cell of a specific lineage at the exception of cells containing stem cell specific markers.

[0129] Non-terminally differentiated: As used herein, unless indicated otherwise or contradictory in context, the term “non-terminally differentiated”, when used in relation to a cell, refers to a differentiated cell as defined herein which has not reached its final state of differentiation. For example, in certain embodiments, in the Osteoblast cell lineage, a non-terminally differentiated cell is any differentiated cell of the lineage at the exception of an osteocyte.

[0130] Terminally differentiated: As used herein, unless indicated otherwise or contradictory in context, the term “terminally differentiated”, when used in relation to a cell, refers to a differentiated cell as defined herein which has reached its final state of differentiation. For example, in certain embodiments, in the Osteoblast cell lineage, a terminally differentiated cell is an osteocyte.

[0131] Methods for obtaining stem cells: Methods for obtaining such stem cells and providing initial culture conditions, such as a liquid culture or semi-solid culture medium, are known in the art. The cells are initially expanded in vivo or in vitro, by contacting the source of the stem cells with a suitable reagent that expands or enriches such cells in the tissue source or in culture. Preferably, adult stem cells are isolated from a tissue source and then expanded or enriched in vitro by exposure to a suitable agent. Cells are obtained from an individual by any suitable method for obtaining a cell sample from an animal, including, but not limited, to, collection of bone marrow collection of a bodily fluid (e.g., blood), collection of umbilical cord blood, tissue punch, and tissue dissection, including particularly, but not limited to, any biopsies of skin, intestine, cornea, spinal cord, brain tissue, scalp, stomach, breast, lung (e.g., including lavage and bronchioschopy), fine needle aspirates of the bone marrow, amniotic fluid, placenta and yolk sac.

[0132] Cell lineage: As used herein, unless indicated otherwise or contradictory in context, the term “cell lineage” refers to the developmental history of a particular cell from its primary state in the fertilized egg or embryo through to its fully differentiated state. The different steps and phases involved in the development of a cell produces many intermediate cells which may be referred to as progenitor or precursor cells in the present application and form an integral part of the cell lineage.

[0133] Bone: It is conventionally known that mature osteoblasts are the cells responsible for bone formation and are derived from osteoblast precursors. Differentiation of human bone marrow mesenchymal stem cells and osteoblast precursors is one of the important processes for bone regeneration. Osteoblasts differentiate from mesenchymal stem cells. Mature osteoblasts differentiate from osteoblast precursors and into osteocytes which are non-dividing cells. Bone-related neoplastic diseases include, but are not limited to, bone primary tumors (benign tumors or cancers) such as osteoma, osteoid osteoma, osteochondroma, osteoblastoma, enchondroma, giant cell tumor of bone, aneurysmal bone cyst, fibrous dysplasia of bone, osteosarcoma, chondrosarcoma, Ewing's sarcoma, fibrosarcoma; and secondary tumors (i.e. metastasize) such as, for example, in certain embodiments, carcinomas of the prostate, breasts, lungs, thyroid, and kidneys.

[0134] Osteoblast cell lineage: As used herein, unless indicated otherwise or contradictory in context, the term “osteoblast cell lineage” refers to bone cells at any stage of their development and thus include, but are not limited to, mesenchymal stem cells, osteoblasts, osteocytes or any precursors thereof.

[0135] Cartilage: Native chondrocytes are responsible for the synthesis and turnover of the cartilage extracellular matrix (ECM), which provides an environment of nutrition diffusion for chondrocytes and provides the joint surface with biomechanical competence. Chondrogenic cells arise from pluripotential adult mesenchymal stem cells (MSCs) through a series of differentiation pathways. Chondrogenic differentiation of MSCs is induced by various intrinsic and extrinsic factors. Growth factors play an important role in this process. For instance, in the hyaline cartilage, growth factors regulate homeostasis and integrity, as well as development. Cartilage-related neoplastic diseases include, but are not limited to, Chondroma/ecchondroma/enchondroma (Enchondromatosis, Extraskeletal chondroma), Chondrosarcoma (Mesenchymal chondrosarcoma, Myxoid chondrosarcoma), Osteochondroma (Osteochondromatosis), Chondromyxoid fibroma, and Chondroblastoma,

[0136] Chondrocytic cell lineage: As used herein, unless indicated otherwise or contradictory in context, the term “chondrocytic cell lineage” refers to cartilage cells at any stage of their development and thus include, but are not limited to, mesenchymal stem cells, chondroblasts, chondrocytes or any precursors thereof.

[0137] Muscles: Skeletal muscle is a highly complex and heterogeneous tissue serving a multitude of functions in the organism. The process of generating muscle—myogenesis—can be divided into several distinct phases. During embryonic myogenesis, mesoderm-derived structures generate the first muscle fibers of the body proper, and in subsequent waves additional fibers are generated along these template fibers. In the perinatal phase, muscle resident myogenic progenitors initially proliferate extensively but, later on, decrease as the number of myonuclei reaches a steady state and myofibrillar protein synthesis peaks. Once the muscle has matured, these progenitors will enter quiescence and henceforth reside within it as satellite cells. Adult skeletal muscle, like all renewing organs, relies on a mechanism that compensates for the turnover of terminally differentiated cells to maintain tissue homeostasis. This type of myogenesis depends on the activation of satellite cells that have the potential to differentiate into new fibers. The most comprehensively studied form of myogenesis takes place when mature muscle is damaged and large cohorts of satellite cells expand mitotically and differentiate to repair the tissue and reestablish homeostasis. It is now generally accepted that satellite cells are closely related to progenitors of somitic origin. The activation of the network of transcription factors that controls skeletal muscle development depends on paracrine factors that are released by adjacent tissues, such as the neural tube, notochord, surface ectoderm and lateral mesoderm. Several secreted factors have been identified that determine the spatial and temporal onset of myogenesis. Signalling molecules, such as Noggin and bone morphogenetic proteins (BMPs)—which inactivate and activate receptors of the transforming growth factor-β (TGFβ) superfamily, respectively are reported to participate in the orchestration of the activation of myogenesis. Muscle-related neoplastic diseases include, but are not limited to, Rhabdomyosarcoma, and Leiomyosarcoma.

[0138] Muscle cell lineage: As used herein, unless indicated otherwise or contradictory in context, the term “muscle cell lineage” refers to muscle cells at any stage of their development and thus include, but are not limited to, mesenchymal stem cells, myoblasts, myocytes or any precursors thereof.

[0139] Vascular: The vasculature in the human body forms through two distinct processes: vasculogenesis and angiogenesis. Vasculogenesis is defined as the process of de novo blood vessel formation occurring when endothelial precursor cells (angioblasts) migrate and differentiate into endothelial cells which form the new vessel. These vascular trees are then extended through angiogenesis which is defined as the new vessel formation secondary to proliferation of endothelial cells from pre-existing vessels.

[0140] Vasculogenesis as well as angiogenesis occur during the embryologic development of the circulatory system but also in the adult organism from circulating endothelial progenitor cells (derivatives of stem cells) able to contribute, albeit to varying degrees, to neovascularization. Vascular-related neoplastic diseases include, but are not limited to, Hemangiosarcoma, Kaposi's sarcoma, Lymphangiosarcoma, and Infantile hemangio-pericytoma.

[0141] Vascular cell lineage: As used herein, unless indicated otherwise or contradictory in context, the term “vascular cell lineage” refers to vascular cells at any stage of their development and thus include, but are not limited to, mesenchymal stem cells, angioblast, pericytes and endothelial cells or any precursors thereof.

[0142] Neurons: It was recently reported that neural cells can be regenerated from neural stem cells (NSCs). These are self-renewing, multipotent adult stem cells that generate the main phenotype of the nervous system. They undergo asymmetric cell division into two daughter cells, one non-specialized and one specialized. NSCs primarily differentiate into neurons, astrocytes, and oligodendrocytes. NSCs are generated throughout an adult's life via the process of neurogenesis. NSCs can be differentiated to replace lost or injured neurons or in many cases even glial cells. NSCs are stimulated to begin differentiation via exogenous cues from their microenvironment, or the neural stem cell niche. This niche defines a zone in which stem cells are retained after embryonic development for the production of new cells of the nervous system. This continual supply of new neurons and glia then provides the postnatal and adult brain with an added capacity for cellular plasticity. Critical to the maintenance of the stem cell niche are microenvironmental cues and cell-cell interactions that act to balance stem cell quiescence with proliferation and to direct neurogenesis versus gliogenesis lineage decisions. Several proteins like different growth factors are involved in the mechanisms of the neural stem cell niche as well as in the maintenance and growth of the newly formed neurons. These include the BMPs, FGFs, PDGF, VEGF, TGF β, BDNF and others. Neuron-related neoplastic diseases include, but are not limited to, Anaplastic astrocytoma, Astrocytoma, Central neurocytoma, Choroid plexus carcinoma, Choroid plexus papilloma, Choroid plexus tumor, Dysembryoplastic neuroepithelial tumour, Ependymal tumor, Fibrillary astrocytoma, Giant-cell glioblastoma, Glioblastoma multiforme, Gliomatosis cerebri, Gliosarcoma, Hemangiopericytoma, Medulloblastoma, Medulloepithelioma, Meningeal carcinomatosis, Neuroblastoma, Neurocytoma, Oligoastrocytoma, Oligodendroglioma, Optic nerve sheath meningioma, Pediatric ependymoma, Pilocytic astrocytoma, Pinealoblastoma, Pineocytoma, Pleomorphic anaplastic neuroblastoma, Pleomorphic xanthoastrocytoma, Primary central nervous system lymphoma, Sphenoid wing meningioma, Subependymal giant cell astrocytoma, Subependymoma, and Trilateral retinoblastoma.

[0143] Neuronal cell lineage: As used herein, unless indicated otherwise or contradictory in context, the term “neuron lineage” refers to brain cells at any stage of their development and thus include, but are not limited to, neural stem cells, neuroblast, neurocyte and neuroglial cells or any precursors thereof.

[0144] Eye retina: The vertebrate retina is a light-sensitive layer of tissue, lining the inner surface of the eye. Retinal development involves a complex progression of tissue induction, proliferation of retinal progenitor cell (RPC) populations and terminal differentiation of these cells into specific functional types. Bone morphogenetic protein (BMP), is a member of the transforming growth factor (TGF)-β family of signaling molecules plays an important role in the retinal cell development. BMP-2, -4, and -7 and their receptors (BMPRs) are expressed in the eye during embryogenesis and are essential for multiple aspects of retinal development. Retina-related neoplastic diseases include, but are not limited to, Retinoblastoma. It should also be noted that eye cancers can be primary (starts within the eye) and metastatic (spread to the eye from another organ). The two most common cancers that would spread to the eyes from another organ are breast cancer and lung cancer. Other, less common, sites of origin include prostate, kidney, thyroid, skin, colon and blood or bone marrow.

[0145] Retinal cell lineage: As used herein, unless indicated otherwise or contradictory in context, the term “retinal cell lineage” refers to eye retina cells at any stage of their development and thus include, but are not limited to, photoreceptor, bipolar cells, rod and cone cells or any precursors thereof.

[0146] Kidneys: The kidneys are composed of complex tissues consisting of several different cell types including glomerular podocytes, endothelial cells, mesangial cells, interstitial cells, tubular epithelial cells, and connecting duct cells. These cell types interact to establish a precise cellular environment that functions as an efficient tissue. Kidneys-related neoplastic diseases include, but are not limited to, Squamous cell carcinoma, Juxtaglomerular cell, tumor (reninoma), Angiomyolipoma, Renal oncocytoma, Bellini duct carcinoma, Clear-cell sarcoma of the kidney, Mesoblastic nephroma, Wilms' tumor, Mixed epithelial stromal tumor, Clear cell adenocarcinoma, Transitional cell carcinoma, Inverted papilloma, Renal lymphoma, Teratoma, Carcinosarcoma, and Carcinoid tumor.

[0147] Renal cell lineage: As used herein, unless indicated otherwise or contradictory in context, the term “renal cell lineage” refers to renal cells at any stage of their development and thus include, but are not limited to, mesenchymal stem cells, podocytes, or any precursors thereof.

[0148] Ligaments and Tendons: Tendons and ligaments (T/L) are dense connective tissues of mesodermal origin. They connect and transmit force from muscle to bone and bone to bone, respectively. Both tissues are able to store elastic energy and withstand hightensile forces, on which locomotion is entirely dependent. T/L are predominantly composed of collagen type I fibrils organized in a highly hierarchical manner that is unique for the T/L. Other collagens (types XI, XII, XIV, and XV) and various proteoglycans (decorin, cartilage oligomeric matrix protein (COMP), byglican, lumican, fibromodulin, tenascin-C, etc.) are building the remaining TIL substance. The cellular content of TIL is dominated by tendon-specific fibroblasts named tenocytes. During embryonic development, the tendon-specific cells descend from a sub-set of mesenchymal progenitors condensed in the syndetome, a dorsolateral domain of the sclerotome. L/T-related neoplastic diseases include, but are not limited to, Fibrosarcoma, Malignant fibrous, Hystiocytoma, and Dermatofibrosarcoma.

[0149] Ligament and tendon cell lineage: As used herein, unless indicated otherwise or contradictory in context, the term “ligament and tendon cell lineage” or “L/T cell lineage” refers to bone or cartilage cells at any stage of their development and thus include, but are not limited to, mesenchymal stem cells, fibroblasts, fibrocytes, or any precursors thereof.

[0150] Skin: The skin constantly renews itself throughout adult life. Stem cells (SCs) residing in the epidermis ensure the maintenance of adult skin homeostasis, but they also participate in the repair of the epidermis after injuries. The skin protects the body from dehydration, injury and infection. The skin consists of an underlying dermis, separated by a basement membrane from the multilayered overlaying epidermis. The dermis is of mesodermal embryonic origin and contains as adult stem cells fibroblastic mesenchymal stem-cell-like cells. These cells have a multi-lineage differentiation potential, being also able to form adipose tissue or bones. Skin-related neoplastic diseases include, but are not limited to, basal cell carcinoma, squamous cell carcinoma, malignant melanoma, dermatofibrosarcoma protuberans, Merkel cell carcinoma, Kaposi's sarcoma, keratoacanthoma, spindle cell tumors, sebaceous carcinomas, microcystic adnexal carcinoma, Paget's disease of the breast, atypical fibroxanthoma, leiomyosarcoma, and angiosarcoma.

[0151] Fibroblast lineage: As used herein, unless indicated otherwise or contradictory in context, the term “fibroblast lineage” refers to skin cells at any stage of their development and thus include, but are not limited to, mesenchymal stem cells, fibroblasts, keratinocytes, Merkel cells, melanocytes, Langerhans cells, and any precursor cells thereof.

[0152] Reproduction: Reproduction (or procreation) is the biological process by which new offspring individual organisms are produced from their parents. Sexual reproduction is a biological process by which organisms create descendants that have a combination of genetic material contributed from two (usually) different members of the species. The development and physiological functions of basic structures in the mammalian reproductive system are influenced by the tissue-specific expression of members of different growth factors families like the BMP family. The establishment of the germ line is a fundamental aspect of reproduction. Germ cell determination is induced in epiblast cells by the extraembryonic ectoderm, and is not acquired through the inheritance of preformed germ plasma. There is some strong evidence that BMP-4 and -8b play a central role in determining primordial germ cell (PGC) formation in the embryo. The genes encoding BMP-4 and -8b have overlapping expression in the extraembryonic ectoderm before gastrulation, i.e., before PGCs are seen. Thus, PGC formation requires BMP-4 expression. There is also evidence from knockout mammals that BMP-8b is required for PGC formation. Furthermore, there is increasing evidence that locally produced BMPs play a major role in the differentiation of the pituitary gonadotrope. Reproduction-related neoplastic diseases include, but are not limited to, Prostate cancer, Ovary cancer (adenocarcinoma, or glandular cancer) also known as carcinoma of the prostate or prostatic intraepithelial neoplasia.

[0153] Reproduction system lineage: As used herein, unless indicated otherwise or contradictory in context, the term “reproduction system lineage” refers to Sertoli cells, Leydig cell and Germ cell at any stage of their development, in particular, mesenchymal stem cells.

[0154] Blood: Blood is a bodily fluid in animals that delivers necessary substances such as nutrients and oxygen to the cells and transports metabolic waste products away from those cells. When it reaches the lungs, gas exchange occurs wherein carbon dioxide is diffused out of the blood into the alveoli and oxygen is diffused into the blood. This oxygenated blood is pumped to the left hand side of the heart in the pulmonary vein and enters the left atrium. From here it passes through the bicuspid valve, through the ventricle and taken all around the body by the aorta. Blood contains antibodies, nutrients, oxygen and much more to help the body work. In vertebrates, it is composed of blood cells suspended in blood plasma. Plasma, which constitutes 55% of blood fluid, is mostly water (92% by volume), and contains dissipated proteins, glucose, mineral ions, hormones, carbon dioxide (plasma being the main medium for excretory product transportation), and blood cells themselves. Albumin is the main protein in plasma, and it functions to regulate the colloidal osmotic pressure of blood. Hematopoietic stem cells (HSCs) are the blood cells that give rise to all the other blood cells and are derived from the mesoderm. They are located in the red bone marrow, which is contained in the core of most bones. The HSCs give rise to the myeloid lineage (monocytes and macrophages, neutrophils, basophils, eosinophils, erythrocytes, megakaryocytes/platelets, dendritic cells), and to the lymphoid lineages (T-cells, B-cells, NK-cells). The most abundant cells in the vertebrate blood are red blood cells (also called RBSs or erythrocytes). These contain hemoglobin, an iron-containing protein, which facilitates oxygen transport by reversibly binding to this respiratory gas and greatly increasing its solubility in blood. Blood-related neoplastic diseases include, but are not limited to, acute lymphoblastic leukemia (ALL), acute myeloid leukemia (AML), chronic lymphocytic leukemia (CLL) and chronic myeloid leukemia (CML).

[0155] Blood cell lineages (myeloid lineage and lymphoid lineage): As used herein, unless indicated otherwise or contradictory in context, the term “blood cell lineages” refers to blood cells at any stage of their development from the myeloid or from the lymphoid lineage, and thus include, but are not limited to, hematopoietic stem cells (HSC), myeloid progenitors, lymphoid progenitors, mast cells, myeloblasts, monocytes, macrophages, neutrophils, basophils, eosinophils, erythrocytes, megakaryocytes, thrombocytes, dendritic cells, small lymphocytes, T-lymphocytes (T-cells), B-lymphocytes (B-cells), natural killer (NK)-cells, and any precursor cells thereof.

[0156] Adipose tissue: Adipose tissue is loose connective tissue composed mostly of adipocytes. In addition to adipocytes, adipose tissue contains the stromal vascular fraction (SVF) of cells including preadipocytes, fibroblasts, vascular endothelial cells and a variety of immune cells (i.e. adipose tissue macrophages (ATMs)). Adipose tissue is derived from preadipocytes. Its main role is to store energy in the form of lipids, although it also cushions and insulates the body. Pre-adipocytes are thought to be undifferentiated fibroblasts that can be stimulated to form adipocytes. The pre-adipocytes originate from mesenchymal stem cells. Areolar connective tissue is composed of adipocytes. The term “lipoblast” is used to describe the precursor of the adult cell. The term “lipoblastoma” is used to describe a tumor of this cell type. Adipose tissue-related neoplastic diseases include, but are not limited to, lipoma, Adenolipomas, Angiolipoleiomyomas, Angiolipomas, Corpus callosum lipoma, Cerebellar pontine angle and internal auditory canal lipomas, Chondroid lipomas, Hibernomas, Intradermal spindle cell lipomas, Neural fibrolipomas, Pleomorphic lipomas, Spindle-cell lipomas, Superficial subcutaneous lipomas, Lipoblastoma, Liposarcoma.

[0157] Adipocyte lineage: As used herein, unless indicated otherwise or contradictory in context, the term “adipocyte cell lineage” refers to adipocyte cells at any stage of their development and thus include, but are not limited to, mesenchymal stem cells, areolar connective cells, adipocytes, pre-adipocytes/lipoblasts, and any precursor cells thereof.

[0158] Digestive system: The human digestive system is composed mainly of the gastrointestinal tract (including the esophagus, stomach, small intestine, large intestine, rectum and anus) and the accessory digestive glands (the liver, the gall bladder and the pancreas). To achieve the goal of providing energy and nutrients to the body, six major functions take place in the digestive system: ingestion, secretion, mixing and movement, digestion, absorption, excretion. The gastrointestinal wall refers to the specialized series of tissue layers surrounding the lumen of the gastrointestinal tract. The general structure involves the four following layers (ordered from the lumen outward): mucosa, submucosa, muscularis externa, serosa (if the tissue is intraperitoneal)/adventitia (if the tissue is retroperitoneal). Gastrointestinal cancer refers to malignant conditions of the gastrointestinal tract (GI tract) and accessory organs of digestion. The symptoms relate to the organ affected and can include obstruction (leading to difficulty swallowing or defecating), abnormal bleeding or other associated problems. Gastrointestinal tissue-related neoplastic diseases include, but are not limited to, Esophageal cancer, Stomach cancer, Pancreatic cancer, Liver cancer, Gallbladder cancer, MALT lymphoma, Gastrointestinal stromal tumors and Cancers of the biliary tree, including cholangiocarcinoma.

[0159] Gastrointestinal cell lineages: As used herein, unless indicated otherwise or contradictory in context, the term “gastrointestinal cell lineages” refers to gastrointestinal cells and cells of the digestive accessory organs at any stage of their development and thus include, but are not limited to interstitial cells of Cajal, gastrointestinal epithelial cells, parietal cells, acinar cells, chief cells, mucus cells, goblet cells, G cells, endocrine I cells, endocrine S cells, endocrine K cells, endocrine M cells, ECL (enterochromaffin) cells, D cells, enteroendocrine cells, APUD cells, hepatocytes, sinusoidal hepatic endothelial cells, Kupffer cells, hepatic stellate cells, centroacinar cells, pancreatic stellate cells, α-cells, γ-cells, β-cells, δ-cells, centroacinar cells, basophilic cells, ductal cells, columnar cells, cholecystocytes and any precursor cells thereof.

[0160] Lung: The lung is the essential respiration organ in many air-breathing animals. In mammals the two lungs are located near the backbone on either side of the heart. Their principal function is to transport oxygen from the atmosphere into the bloodstream, and to release carbon dioxide from the bloodstream into the atmosphere. A large surface area is needed for this exchange of gases, which is accomplished by the mosaic of specialized cells that form millions of tiny, exceptionally thin-walled air sacs called alveoli. Lung cells include, but are not limited to, type I pneumocytes, type II pneumocytes, clara cells and goblet cells. Lung tissue-related neoplastic diseases include, but are not limited to, lung cancer also known as carcinoma of the lung or pulmonary carcinoma, Epithelial cells or small-cell lung carcinoma (SCLC) and non-small-cell lung carcinoma (NSCLC).

[0161] Lung cell Lineages: As used herein, unless indicated otherwise or contradictory in context, the term “lung cell Lineage” refers to lung cells at any stage of their development and thus include, but are not limited to, epithelial cells, erythrocytes, alveolar cells and any precursor cells thereof.

[0162] Head and neck cancer: As used herein, unless indicated otherwise or contradictory in context, the term “head and neck cancer” refers to a group of cancers that usually starts in the lip, oral cavity, nasal cavity, paranasal sinuses, pharynx, and larynx. About 90% of head and neck cancers are squamous cell carcinomas. Thus, neoplastic diseases such as head and neck cancers include, but are not limited to, oral cancer, nasopharynx cancer, oropharyngeal cancer, hypopharynx cancer and laryngeal cancer.

[0163] The cell lineage involved in head and neck cancers includes all the cells involved in the formation of such cancers at any stage of their development and thus include, but are not limited to, cells of the oral cavity, cells of the pharynx, cells of the larynx, cells of the paranasal sinuses and nasal cavity, cells of the salivary glands and any precursor cells thereof.

[0164] Ratio: As used herein, unless indicated otherwise or contradictory in context, the term “ratio”, when used in relation to GFR-binding compound with respect to the adhesion protein inhibitor in the pharmaceutical association or composition disclosed herein, refers to the (molar, weight or part as specified) ratio between the quantity of GFR-binding compound and the quantity of adhesion protein inhibitor. The ratio may be a molar ratio, a weight ratio or a part ratio and will be specified as needed on a case by case basis. Quantity units may conventionally be mole, millimole, gram, milligram or parts. For example, in certain embodiments, it is convenient to express the relative quantity between GFR-binding compounds and adhesion protein inhibitors using densities. It shall be understood that this ratio may be varied according to the neoplastic cell type to be treated.

[0165] Density: As used herein, unless indicated otherwise or contradictory in context, the term “density”, when used in relation to GFR-binding compound with respect to the adhesion protein inhibitor in the pharmaceutical composition disclosed herein, refers to the quantity of GFR-binding compounds, expressed in e.g. mole, millimole, gram, or milligram, with respect to one standardised surface unit e.g. squared millimetre (mm²), squared micrometre (μm²), or squared nanometre (nm²)). For example, in certain embodiments, the ratio between a GFR-binding compound and an adhesion protein inhibitor in the pharmaceutical association or composition disclosed herein may be expressed in pmol per mm² or pmol/mm².

[0166] Cell cycle: As used herein, unless indicated otherwise or contradictory in context, the term “cell cycle” refers to the process through which a vertebrate cell self-replicate. In eukaryote cells, cell cycle consists of four discrete phases: G1, S, G2, and M. Together, the G1, S, and G2 phases make up the period known as interphase. During the S or “synthesis” phase, the cell replicates its DNA creating an exact copy of all of its chromosomes. In the M or “mitotic” phase, the cell division actually occurs and separates the chromosomes in its cell nucleus into two identical sets in two nuclei. The first phase within interphase, from the end of the previous M phase until the beginning of DNA synthesis, is called G1. During this phase the biosynthetic activities of the cell, which are considerably slowed down during M phase, resume at a high rate. This phase is marked by the formation of millions of proteins and later on enzymes that are required in S phase, mainly those needed for DNA replication. The G2 phase, or pre-mitotic phase, is the third and final sub-phase of Interphase in the cell cycle directly preceding Mitosis. It follows the successful completion of S phase and ends with the onset of prophase, the first phase of mitosis. In order to move from one phase of the cell cycle to the next, a cell must “validate” numerous checkpoints. At each checkpoint, specialized proteins determine whether the necessary conditions exist. If so, the cell is free to enter into the next phase. If not, progression through the cell cycle is halted. For example, in certain embodiments, during G1, the cell passes through a “validation” window punctuated by the restriction point R. During the “validation” phase, different checkpoints ensure that environmental conditions are favourable for replication. If conditions are not favourable, the cell may enter a resting state known as G0. The G0 phase or resting phase is a period in the cell cycle in which cells exist in a quiescent state. G0 phase is viewed as either an extended G1 phase, where the cell is neither dividing nor preparing to divide, or a distinct quiescent stage that occurs outside of the cell cycle. Typically, a healthy vertebrate cell undergoes cell division when needed e.g. to regenerate damaged tissues or simply replace old tissues by new ones, by switching from a G0 resting state into the G1 state of the cell cycle and resume cell division. In contrast, neoplastic cells (such as cancer cells) have lost their ability to suspend cell division and switch to the G0 phase therefore undergoing permanent cell division which is generally referred to uncontrolled cell division or proliferation. Another “validation” window takes place later in the cell cycle, just before a cell moves from G2 to mitosis. Here, a number of proteins scrutinize the cell's DNA ensuring proper replication has taken place. Finally, another cell cycle “validation” window takes place during mitosis in which different checkpoints determines whether chromosomes are correctly attached to the spindle, and to the network of microtubules that will separate them during cell division.

[0167] Quiescence: As used herein, unless indicated otherwise or contradictory in context, the term “quiescence”, when used in relation to a cell, refers to a resting state during which the cell does not divide, duplicate or proliferate. This state is also called the G0 state. As used herein, “inducing quiescence of a neoplastic cell” thus means to provoke the passage from G1 to G0 of a neoplastic cell which usually has lost the ability to do so. One method to detect the passage from G1 to G0 is, for instance, to monitor the state of phosphorylation of the protein Rb via Western Blot. The Rb protein is normally not phosphorylated during the G0 phase but becomes phosphorylated or even hyper-phosphorylated during the rest of the cell cycle. Consequently, observing the absence (or substantial reduction i.e. at least 90% reduction, in comparison with the quantity present in the G1 phase) of phosphorylated Rb protein on a western blot confirms that a neoplastic cell has undergone (at some point in time) a switch to the G0 phase.

[0168] Cell division or cell proliferation: As used herein, unless indicated otherwise or contradictory in context, the term “cell division” or “cell proliferation”, refers to the process by which a cell self-replicate, replicate or is caused to replicate.

[0169] Proliferate: As used herein, unless indicated otherwise or contradictory in context, the term “proliferate” means to grow, expand or increase or cause to grow, expand or increase. “Proliferative” means having the ability to proliferate. “Anti-proliferative” means having properties to counter, reduce, or inhibit proliferation.

[0170] Hyperproliferation: As used herein, unless indicated otherwise or contradictory in context, the term “hyperproliferation” or “uncontrolled proliferation” means the abnormal growth, expansion or increase or causing the abnormal growth, expansion or increase. Abnormal growth typically originates from the abnormal regulation of the cell cycle preventing the cell to reach the G0 state and stop cell division and replication. One consequence of hyper or uncontrolled proliferation is the development of neoplastic diseases such as tumours and cancers.

[0171] Hyperproliferative diseases: As used herein, unless indicated otherwise or contradictory in context, the term “hyperproliferative diseases” is used interchangeably with “neoplastic diseases” and refers to diseases that are characterized by uncontrolled cellular proliferation and/or disruption in programmed cell death. The loss of a cell's ability to control cellular proliferation is often caused by genetic damage to the cellular pathways responsible for regulating cellular functions, including but not limited to, for example, in certain embodiments, metabolism, cell cycle progression, cell adhesion, vascular function, apoptosis, and angiogenesis.

[0172] Anti-mitogen activity: As used herein, unless indicated otherwise or contradictory in context, the term “anti-mitogen activity”, refers to biological pathways that down-regulate, partially inhibit or suppress cell mitosis i.e. cell division. As used herein, a substance or pharmaceutical association which promotes, induces or favours anti-mitogen activity thus means a substance or pharmaceutical association which provides at least part of its effective biologic or therapeutic action by down-regulating, partially inhibiting or suppressing mitosis of the neoplastic cell to be treated.

[0173] Tumor suppressor pathways: As used herein, unless indicated otherwise or contradictory in context, the term “tumor suppressor pathways” refers to biological pathways that down-regulate, partially inhibit or suppress tumor activity i.e. protect the cell against cell defects which could cause tumors or cancers. As used herein, a substance or pharmaceutical association which promotes, induces or favours tumor suppressor pathways thus means a substance or pharmaceutical association which provides at least part of its effective biologic or therapeutic action by up-regulating, activating or promoting the tumor suppressor genes or proteins of the neoplastic cell to be treated. Known tumor suppressor proteins which have a dampening or repressive effect on the regulation of the cell cycle or promote apoptosis include, but are not limited to, p53, pRb, pVHL, APC, CD95, ST5, YPEL3, ST7, and ST14.

[0174] Anti-oncogenic activity: As used herein, unless indicated otherwise or contradictory in context, the term “anti-oncogenic activity” refers to any molecule having the ability to inhibit, repress or down-regulate the gene or protein expression of oncogenes. An oncogene is a gene that has the potential to cause neoplastic diseases such as cancer. Examples of anti-oncogene molecules include tumor suppressor proteins.

[0175] By “without temporarily or permanently damaging or killing a neoplastic cell”, is meant, unless indicated otherwise or contradictory in context, that a neoplastic disease, such as cancer, is treated without inducing the entry of the neoplastic cells into apoptosis as it may be assessed by the positive expression of proteins caspase 3, 6 and 7.

[0176] By “without permanently inducing a quiescent state in a neoplastic cell”, is meant, unless indicated otherwise or contradictory in context, that a neoplastic disease, such as cancer, is treated by inducing a temporary quiescent state in the neoplastic cells (the cells enter the G0 phase) and then differentiate into a more specialised state.

[0177] Non-mutagenic: As used herein, unless indicated otherwise or contradictory in context, the term “non-mutagenic”, when used in relation to a therapy or treatment, refers to a therapy which does not involve the alteration or modification of a cell's genome.

[0178] Recoding: As used herein, unless indicated otherwise or contradictory in context, the term “recoding” or “converting”, when used in relation to a cell (in particular a neoplastic cell such as a cancer cell), refers to the action of providing, to a neoplastic cell to be treated, a suitable extracellular micro-environment (e.g. in the form of a pharmaceutical association or composition as defined herein) providing appropriate extracellular signals so that the cell may undergo self-recovery or -healing and be converted into a partially or fully differentiated non-neoplastic cell.

[0179] Recoding therapy: As used herein, unless indicated otherwise or contradictory in context, the term “recoding therapy” refers to a therapy that promotes and stimulates the cell's natural abilities to redirect its own fate by integrating accurate micro-environmental recoding signals.

[0180] Extracellular micro-environment: As used herein, unless indicated otherwise or contradictory in context, the term “extracellular micro-environment” refers to the environment surrounding (in functional proximity with) a specific cell which is characterized by biophysical, mechanical and biochemical properties specific for each tissue and is able to regulate cell behavior. Modification of the extracellular micro-environment of a neoplastic cell using, for instance, pharmaceutical associations or compositions as defined herein allows for the conversion or recoding of said neoplastic cell into a healthy, functional, non-neoplastic cell.

[0181] Self-recovery or self-healing: As used herein, unless indicated otherwise or contradictory in context, the term “self-recovery” or “self-healing”, when used in relation to a neoplastic cell such as a cancer cell, means that the neoplastic cell operates its own internal biological changes once it has been recoded or treated using a pharmaceutical association or composition as defined herein, so that it becomes a functional, healthy, non-neoplastic cell. The cell heal itself when in contact with the pharmaceutical composition or association as defined herein and, in contrast with previously reported methods wherein the neoplastic cell is forced to die or maintained in a temporarily reduced or non-proliferative state.

[0182] Physiologically functional cell: As used herein, unless indicated otherwise or contradictory in context, the term “physiologically functional cell” refers to a cell which is able to perform normally all of the cell functions associated with a particular cell type and necessary for the normal physiology of a cell. These functions include all of the intracellular molecular mechanisms but also all of the activities necessary for a normal communication between the cell and its microenvironment. One method which may be used to verify if a cell is physiologically functional is the grafting of the cell, after the introduction of fluorescent markers, in other mammalian model organisms such as mouse models. The cell is grafted in the tissue corresponding to its cell type. The cell characteristics and normal functions are monitored after a period of time with various methods such as in vivo microscopy or histological staining. The term “functional” when used in relation to a molecule, compound or substance refers to a biological molecule in a form in which it exhibits a property and/or activity by which it is characterized.

[0183] Healthy cell: As used herein, unless indicated otherwise or contradictory in context, the term “healthy cell” refers to a cell which presents a normal morphology, normal cell functions and normal cell growth which are not damaged, altered or inactivated by a neoplastic disease.

[0184] Shorter period of time: As used herein, unless indicated otherwise or contradictory in context, the term “shorter period of time”, when used in relation to conversion or recoding duration, means substantially shorter to provide a substantial benefit for the treated patient in comparison with existing treatments. In certain embodiments, a shorter period of time includes at least 1.5-fold, at least 2-fold, at least 2.5-fold, at least 3-fold, at least 3.5-fold, at least 4-fold, at least 4.5-fold, at least 5-fold, at least 6-fold, at least 7-fold, at least 8-fold, at least 9-fold or at least 10-fold reduction with respect to an existing treatment.

[0185] Exogenous: As used herein, unless indicated otherwise or contradictory in context, the term “exogenous” refers to a substance coming from outside a living system such as a cell, an organ, or an individual organism. For example, in certain embodiments, exogenous factors in medicine include pathogens and therapeutics. DNA introduced into a cell via transfection or viral infection may be considered as an exogenous factor. Carcinogens are also commonly referred to as exogenous factors.

[0186] Endogenous: As used herein, unless indicated otherwise or contradictory in context, the term “endogenous” refers to substances that originate from within an organism, tissue, or cell.

[0187] Intracellular: As used herein, unless indicated otherwise or contradictory in context, the term “intracellular” generally means “inside the cell”. In vertebrates, such as animals, the cell membrane is the barrier between the inside of the cell and the outside of the cell (the extracellular milieu). Thus, treatments and therapies in which at least one substance, compound, pharmaceutical association, combination or composition penetrates the cell wall of a cell to be treated in order to produce/deliver its (effective) biological effect are considered as intracellular treatments and therapies.

[0188] Extracellular: As used herein, unless indicated otherwise or contradictory in context, the term “extracellular” means “outside the cell”. In vertebrates, such as animals, the cell membrane is the barrier between the inside of the cell (the intracellular milieu) and the outside of the cell. Thus, treatments and therapies in which no substance, compound, pharmaceutical association, combination or composition requires penetration of the cell wall in order to produce/deliver its (effective) biological effect (e.g. by interacting with trans-membrane receptors) are considered as extracellular treatments and therapies. However, a therapy using a plurality of substances in order to provide the desired biological effect wherein one or more of these substances require the entry into the intracellular compartment to provide (or deliver) its biological effect is still considered as an extracellular therapy in the sense of the present disclosure insofar as at least one of these substances provide (or deliver) its biological effect without entering the intracellular compartment. In one example, a therapy involving the extracellular action of a GFR-binding compound and the intracellular action of an adhesion protein inhibitor (e.g. via gene silencing using si-RNAs or transcription inhibition using micro-RNAs) would still be considered as an extracellular therapy for the purpose of the present disclosure.

[0189] Cytostatic: As used herein, unless indicated otherwise or contradictory in context, the term “cytostatic” refers to inhibiting, reducing, or suppressing the growth, division, or multiplication of a cell (e.g., a mammalian cell (e.g., a human cell)), bacterium, virus, fungus, protozoan, parasite, prion, or a combination thereof.

[0190] Cytotoxic: As used herein, unless indicated otherwise or contradictory in context, the term “cytotoxic” refers to killing or causing injurious, toxic, or deadly effect on a cell (e.g., a mammalian cell (e.g., a human cell)), bacterium, virus, fungus, protozoan, parasite, prion, or a combination thereof.

[0191] In vitro: As used herein, unless indicated otherwise or contradictory in context, the term “in vitro” refers to events that occur in an artificial environment, e.g., in a test tube or reaction vessel, in cell culture, in a Petri dish, etc., rather than within an organism (e.g., animal, plant, or microbe).

[0192] In vivo: As used herein, unless indicated otherwise or contradictory in context, the term “in vivo” refers to events that occur within an organism (e.g., animal, plant, or microbe or cell or tissue thereof).

[0193] Ex vivo: As used herein, unless indicated otherwise or contradictory in context, the term “ex vivo” refers to events that occur in an external environment on tissues sourced from an organism (e.g., animal, plant, or microbe) in an attempt to replicate natural living conditions outside such an organism.

[0194] Syndecans: As used herein, unless indicated otherwise or contradictory in context, the term “syndecans” refers to single transmembrane domain proteins that are thought to act as co-receptors, especially for G protein-coupled receptors. These core proteins carry three to five heparan sulfate and chondroitin sulfate chains, which allow for interaction with a large variety of ligands including fibroblast growth factors, vascular endothelial growth factor, transforming growth factor-beta, fibronectin and antithrombin-1. Interactions between fibronectin and some syndecans can be modulated by the extracellular matrix protein tenascin C. The syndecan protein family has four members. Syndecans 1 and 3 and syndecans 2 and 4, making up separate subfamilies, arose by gene duplication and divergent evolution from a single ancestral gene. The syndecan numbers reflect the order in which the cDNAs for each family member were cloned. All syndecans have an N-terminal signal peptide, an ectodomain, a single hydrophobic transmembrane domain, and a short C-terminal cytoplasmic domain. All syndecans are anchored to plasma membrane via a 24-25 amino acid long hydrophobic transmembrane domain. In mammalian cells, syndecans are expressed by unique genes located on different chromosomes. All members of the syndecan family have 5 exons. The difference in size of the syndecans is credited to the variable length of exon 3, which encodes a spacer domain. In humans, the amino acid length of syndecan 1, 2, 3 and 4 is 310, 201, 346 and 198 respectively. Glycosaminoglycan chains, a member of the heparan sulfate group, are an important component of syndecans and are responsible for a diverse set of syndecan functions. The addition of glycosaminoglycans to syndecan is controlled by a series of post-translational events.

[0195] Cyclin-dependent kinases: As used herein, unless indicated otherwise or contradictory in context, the term “Cyclin-dependent kinases” or “CDKs” refers to a family of protein involved in the regulation of the cell cycle. They are present in all known eukaryotes, and their regulatory function in the cell cycle has been evolutionarily conserved. By definition, a CDK binds a regulatory protein called a cyclin. It is reported that, without cyclin, CDK has little kinase activity; only the cyclin-CDK complex is considered to be an active kinase. CDKs phosphorylate their substrates on serines and threonines, so they can be said to belong to the serine-threonine kinase family. CDKs and cyclins are thus highly conserved across species and are present in all cell types including those having a neoplastic phenotype (e.g. cancer cells). Most of the known cyclin-CDK complexes regulate the progression through the cell cycle. Animal cells contain at least nine CDKs, four of which, CDK 1, 2, 3, 4 and 6, are reported to be directly involved in cell cycle regulation: CDK1 regulated by cyclin A, cyclin B; CDK2 regulated by cyclin A, cyclin E; CDK3 regulated by cyclin C; CDK4 regulated by cyclin D1, cyclin D2, cyclin D3; CDK5 regulated by CDK5R1, CDK5R2; CDK6 regulated by cyclin D1, cyclin D2, cyclin D3; CDK7 regulated by cyclin H; CDK8 regulated by cyclin C; CDK9 regulated by cyclin T1, cyclin T2a, cyclin T2b, cyclin K.

[0196] Cyclins: As used herein, unless indicated otherwise or contradictory in context, the term “cyclins” refers to a family of proteins that control the progression of cells through the cell cycle by activating cyclin-dependent kinase (CDK) enzymes. Cyclin D is one of the major cyclins produced in terms of its functional importance. It is known to interact with four CDKs: CDK2, 4, 5, and 6. In proliferating cells, cyclin D-CDK4/6 complex accumulation is of great importance for cell cycle progression. For instance, cyclin D-CDK4/6 complexes partially phosphorylates retinoblastoma tumor suppressor protein (Rb), whose inhibition can induce expression of some genes important for S phase progression.

[0197] Patient/subject: As used herein, unless indicated otherwise or contradictory in context, the term “patient” or “subject”, which are used interchangeably, refers to any organism to which a composition in accordance with the invention may be administered, e.g., for experimental, diagnostic, prophylactic, and/or therapeutic purposes. Typical subjects include animals (e.g., mammals such as mice, rats, rabbits, non-human primates, and humans) and/or plants. As used herein, patients/subjects include those individuals who may seek or be in need of treatment, requires treatment, is receiving treatment, will receive treatment, or a subject who is under care by a trained professional for a particular disease or condition.

[0198] Purified: As used herein, unless indicated otherwise or contradictory in context, the term “purify,” “purified,” “purification” means to make substantially pure or clear from unwanted components, material defilement, admixture or imperfection.

[0199] Targeted Cells: As used herein, unless indicated otherwise or contradictory in context, the term “targeted cells” refers to any one or more cells of interest. The cells may be found in vitro, in vivo, in situ or in the tissue or organ of an organism. The organism may be an animal, preferably a mammal, more preferably a human and most preferably a patient.

[0200] Molecule length: As used herein, unless indicated otherwise or contradictory in context, the term molecule or peptide “length” or “size” means the longest 2D or 3D distance which may possibly be measured within the molecule. For cyclic molecules, “length” or “size” means the longest measurable distance across the cyclic structure. Throughout the present disclosure, when a molecule size or length is given (in general using the nanometre, nm, unit), the following procedures were used to calculate them:
[0201] The so-called «2D» procedure: a 2D chemical structure was drawn in e.g. the ChemDraw® Software. Then, size measurement was carried out via the available ChemDraw length measurement tools. The length value given herein corresponds to the longest 2D length of the molecule using the default settings 2D bond sizes and angles of the software.
[0202] Alternatively, the so-called “3D” procedure may be followed:
[0203] (1) Drawing of the chemical structure of the molecule using suitable softwares (such as ChemDraw).
[0204] (2) Creating a 3D structure model of the molecule hereby drawn using SCWRL (Protein Sci. 2003; 12(9):2001-14) or MODELLER (Current Protocols in Bioinformatics. 15:5.6:5.6.1-5.6.30), each of which is hereby incorporated by reference in its entirety.
[0205] (3) Incubating the obtained 3D structure model in a box simulation containing water for few milliseconds using AMBER (J. Computat. Chem. 2005; 26, 1668-1688), which is hereby incorporated by reference in its entirety.
[0206] (4) Measuring the size of the molecule hereby obtained using softwares such as Pymol® using available Pymol length measurement tools (DeLano Scientific LLC, http://www.pymol.org).

[0207] Root Mean Square Deviation: As used herein, unless indicated otherwise or contradictory in context, the term “Root Mean Square Deviation” or “RMSD” is well known in the art and means the square root of the arithmetic mean of the square of the distances between certain matched atoms. One can represent a molecular conformation as a vector whose components are the Cartesian coordinates of the molecule's atoms. Therefore, a conformation for a molecule with N atoms can be represented as a 3N-dimensional vector of real numbers. To calculate the RMSD of a pair of peptides or peptidomimetics (e.g. x and y), each one of them must be represented as a 3N-length (assuming N atoms) vector of coordinates. The RMSD is therefore the square root of the arithmetic mean of the square of the distances between corresponding atoms of x and y. It is a measure of the average atomic displacement between the conformations of the two structures:

$$\sqrt{\frac{1}{N} {\sum }_{i = 1}^{N} \vert xi - yi \vert {1}^{2}}$$

[0208] In other words, the RMSD is the measure of the average distance between the atoms (usually the backbone atoms) of superimposed polypeptides or peptidomimetics. In the study of globular protein conformations, one customarily measures the similarity in three-dimensional structure by the RMSD of the Ca atomic coordinates after optimal rigid body superposition.

[0209] The RMSD value of a given peptide or peptidomimetic with respect to a specifically selected reference structure (hereinafter may also be referred to as “PEPREF”) may be calculated using various methods all well know by the skilled person. However, for the purpose of the present disclosure and for the avoidance of doubts, the RMSD of a given peptide or peptidomimetic as used in the present disclosure is obtained precisely using the following procedure:

[0210] STEP 1: Creating a 3-dimensional model of (i.e. obtaining 3D structure coordinates for) a peptide or peptidomimetic for which the RMSD is to be calculated, by:

[0211] STEP 1.1: Obtaining a set of polypeptide 3D structure coordinates based on the alignment with the sequence of a peptide or peptidomometic for which the RMSD value is to be calculated, using the BLAST algorithm according to the following procedure:
[0212] 1. Open the following link to access the “Standard Protein Blast” tool: http://blast.ncbi.nim.nih.gov/Blast.cgi?PROGRAM=blastp&PAGE_TYPE=BlastSearch&LINK_LO C=blasthome
[0213] 2. Enter the amino acid sequence of the peptide or peptidomimetic of interest in the “Enter Query Sequence” section. The alignment is performed one sequence after the other (this is not a multiple alignment tool).
[0214] 3. In the section “Choose Search Set”, choose the following database: Protein Data Bank Proteins (pdb).
[0215] 4. In the section “Choose Search Set”, do not exclude «Models (XM/XP)» and do not Exclude «Uncultured/environmental sample sequences».
[0216] 5. In the section “Program Selection”, choose the following algorithm: blastp (protein-protein BLAST)
[0217] 6. Leave other fields as shown on the screenshot in FIG. 20.
[0218] 7. Run BLAST.
[0219] 8. The results obtained from the query are presented in the form of several pdb files.
[0220] 9. From this output results, the first ten (10) PDB files corresponding to the best sequence alignments are retained. This set of 10 PDB files or structures will be used in the next step (Step 2: structural alignments with STAMP).
[0221] 10. Finally, clean up the 10 structures contained in the 10 PDB files by removing all e.g. additional small molecules, receptors or portions thereof, dimers or portions thereof, so as to retain only the polypeptide chain of interest.

[0222] The set of pdf files contains the polypeptide 3D structure coordinates of the 10 structures having the highest sequence homology with the peptide or peptidomometic for which the RMSD value is to be calculated.

[0223] STEP 1.2: Performing the structural alignment of the set of 3D structure coordinates obtained in STEP 1.1, thereby obtaining a set of aligned polypeptide 3D structure coordinates, by using STAMP (Structural Alignment of Multiple Proteins Version 4.2) according to the following procedure:
[0224] 1. Open the following link to access the “STAMP superposition” tool: http://www.russelllab.org/cgi-bin/pdc/stamp.pl
[0225] 2. In the section entitled “Structure A”, input the PDB file corresponding to the first structure from the set of ten 3D structure coordinates obtained in STEP 1.1, which corresponds to the best sequence alignment with BLAST.
[0226] 3. In the section entitled “Structure B”, input the PDB file corresponding to the second structure from the set of ten 3D structure coordinates obtained in STEP 1.1, which corresponds to the second best sequence alignment with BLAST.
[0227] 4. Run STAMP.
[0228] 5. Repeat steps 2 to 4 with the other eight pdb files from the set of ten 3D structure coordinates identified in STEP 1.1 by successively entering the PDB files in the field “Structure B”.
[0229] 6. As a result, the structural alignment of the 10 structures contained in the set of PDB files obtained in STEP 1.1 is obtained in the form of 9 distinct PDB files each containing a pair of aligned polypeptide 3D structure (structure 1 with structure 2, structure 1 with structure 3, structure 1 with structure 4, . . . structure 1 with structure 10).
[0230] 7. From these 9 “pair” PDB files, 10 PDB files each containing one of structures 1 to 10 are created.
[0231] 8. 10 PDB files containing the aligned 3D structure coordinates are thus obtained from STEP 1.2. for use in the next step.

[0232] STEP 1.3: Modelling the sequence of peptide or peptidomometic for which the RMSD value is to be calculated against the set of aligned polypeptide 3D structure coordinates obtained in STEP 1.2, thereby obtaining a set of 3D structure coordinates for the peptide or peptidomometic for which the RMSD value is to be calculated, using SCWRL (reference: “SCWRL and MolIDE: computer programs for side-chain conformation prediction and homology modeling”, Nature Protocols VOL. 3 NO. 12 2008, Qiang Wang et al.; which is hereby incorporated by reference in its entirety) according to the following procedure:
[0233] 1. Insert the input sequence of a peptide or peptidomometic for which the RMSD value is to be calculated in Fasta format.
[0234] 2. Import the first PDB file containing the aligned polypeptide 3D structure coordinates obtained in STEP 1.2.
[0235] 3. Run SCWRL by typing the following command for Unix based systems: “scwrl_path/scwrl3 -i inputpdbfile -o outputpdbfile -s sequencefile 4 logfile”.
[0236] 4. As a result, a first PBD file is obtained containing the predicted 3D structure coordinates of the peptide or peptidomometic for which the RMSD value is to be calculated.
[0237] 5. Repeat steps 1 to 3 using the 9 remaining PDB files obtained in STEP 1.2.
[0238] 6. 10 PDB files are obtained from STEP 1.3 for use in the following STEP 1.4.

[0239] STEP 1.4: Minimizing the free energy (AG) of the set of 3D structure coordinates for the peptide or peptidomometic for which the RMSD value is to be calculated obtained in STEP 1.3 using GROMACS (Reference: Hess B, Kutzner C, Van Der Spoel D, Lindahl E (2008). “GROMACS 4: Algorithms for Highly Efficient, Load-Balanced, and Scalable Molecular Simulation”. J Chem Theory Comput 4 (2): 435; which is hereby incorporated by reference in its entirety) according to the following procedure:
[0240] 1. Create a Gromacs topology (gmx) file from the first PDB file of the modeled peptide or peptidomometic for which the RMSD value is to be calculated obtained in STEP 1.3, by using the command «pdb2gmx -f NOMDUFICHIERPDB.pdb -water spc». “NOMDUFICHIERPDB” is the name of the input PDB file.
[0241] 2. Create a box around the imported modeled peptide or peptidomometic by using the command «editconf -f conf.gro -bt cubic d 0.7 o box.gro».
[0242] 3. Add solvent (water) molecules into the box by using the command «genbox cp box.gro cs spc216.gro -p topol.top -o solvated.gro».
[0243] 4. Prepare the input for the molecular dynamics (MD) run with the command «vim em.mdp». Default run is set to 1000 nsteps.
[0244] 5. Create an input for the MD run by using the command «grompp -f em.mdp -p topol.top -c solvated.gro -o em.tpr».
[0245] 6. Run the command «mdrun -v deffnm em» to perform the actual energy minimization.
[0246] 7. Run the command «g energy -f em.edr -s em.tpr -o em.xvg» and then run option «7».
[0247] 8. As a result, a first XMG file is obtained. To view the XMG file run the command «xmgrace em.xvg».
[0248] 9. Repeat steps 1 to 8 with the 9 remaining structures obtained in STEP 1.3. 10 XMG files are thus obtained.
[0249] 10. The structure of lowest energy is obtained from each XMG file in the form of a PDB file. 10 PDB files each containing one structure of lowest energy are thus obtained from STEP 1.4 for use in the next step.

[0250] STEP 2: Calculating the RMSD of the peptide or peptidomimetic for which the RMSD value is to be calculated by comparing the 3D structure coordinates of the peptide or peptidomimetic obtained in STEP 1.4 with the 3D structure coordinates of PEPREF to obtain the lowest possible RMSD value using FATCAT (Flexible structure AlignmenT by Chaining Aligned fragment pairs allowing Twists) according to the following procedure:
[0251] 1. Open the following link to access the “FATCAT” software: http://fatcat.burnham.org
[0252] 2. Open the “pairwise alignment” tool.
[0253] 3. Import the PDB file containing the structure coordinates of PEPREF in the “Get the 1st structure” section.
[0254] 4. Import the first PDB file of the peptide or peptidomimetic for which the RMSD value is to be calculated with minimized energy obtained in STEP 1.4.
[0255] 5. Run FATCAT.
[0256] 6. As a result, a first RMSD value of the first structure of the peptide or peptidomimetic for which the RMSD value is to be calculated as obtained in STEP 1.4 will be obtained in the output report.
[0257] 7. Repeat steps 1 to 5 with the 9 remaining structures (PDB files) obtained from STEP 1.4.
[0258] 8. The peptide or peptidomimetic structure with the lowest RMSD (out of the ten RMSD values successively obtained) is the value taken into account in the present application.

[0259] 3D structure coordinates of PEPREF: As used herein, unless indicated otherwise or contradictory in context, the 3D structure coordinates of PEPREF are as follows:

| | | | | | | | | |
|---|---|---|---|---|---|---|---|---|
| ATOM | 511 | N | LYS | A | 1 | −14.570 | 46.437 | 27.424 |
| ATOM | 512 | CA | LYS | A | 1 | −13.512 | 45.748 | 28.151 |
| ATOM | 513 | C | LYS | A | 1 | −13.655 | 44.259 | 27.884 |
| ATOM | 514 | O | LYS | A | 1 | −12.769 | 43.463 | 28.197 |
| ATOM | 515 | CB | LYS | A | 1 | −13.605 | 46.029 | 29.652 |
| ATOM | 516 | CG | LYS | A | 1 | −13.640 | 47.509 | 29.991 |
| ATOM | 517 | CD | LYS | A | 1 | −12.615 | 48.297 | 29.183 |
| ATOM | 518 | CE | LYS | A | 1 | −12.625 | 49.768 | 29.575 |
| ATOM | 519 | NZ | LYS | A | 1 | −13.994 | 50.369 | 29.497 |
| ATOM | 520 | N | ILE | A | 2 | −14.792 | 43.890 | 27.309 |
| ATOM | 521 | CA | ILE | A | 2 | −15.051 | 42.499 | 26.967 |
| ATOM | 522 | C | ILE | A | 2 | −14.911 | 42.370 | 25.444 |
| ATOM | 523 | O | ILE | A | 2 | −15.531 | 43.125 | 24.683 |
| ATOM | 524 | CB | ILE | A | 2 | −16.466 | 42.065 | 27.401 |
| ATOM | 525 | CG1 | ILE | A | 2 | −16.630 | 42.238 | 28.915 |
| ATOM | 526 | CG2 | ILE | A | 2 | −16.710 | 40.629 | 26.985 |
| ATOM | 527 | CD1 | ILE | A | 2 | −15.631 | 41.478 | 29.30 |
| ATOM | 528 | N | PRO | A | 3 | −14.085 | 41.411 | 24.989 |
| ATOM | 529 | CA | PRO | A | 3 | −13.789 | 41.109 | 23.588 |
| ATOM | 530 | C | PRO | A | 3 | −14.998 | 40.695 | 22.768 |
| ATOM | 531 | O | PRO | A | 3 | −15.969 | 40.164 | 23.305 |
| ATOM | 532 | CB | PRO | A | 3 | −12.785 | 39.968 | 23.688 |
| ATOM | 533 | CG | PRO | A | 3 | −12.156 | 40.166 | 25.007 |
| ATOM | 534 | CD | PRO | A | 3 | −13.330 | 40.506 | 25.867 |
| ATOM | 535 | N | LYS | A | 4 | −14.937 | 40.937 | 21.463 |
| ATOM | 536 | CA | LYS | A | 4 | −16.023 | 40.529 | 20.590 |
| ATOM | 537 | C | LYS | A | 4 | −15.886 | 39.015 | 20.391 |
| ATOM | 538 | O | LYS | A | 4 | −14.903 | 38.415 | 20.831 |
| ATOM | 539 | CB | LYS | A | 4 | −15.926 | 41.244 | 19.245 |
| ATOM | 540 | CG | LYS | A | 4 | −15.802 | 42.751 | 19.355 |
| ATOM | 541 | CD | LYS | A | 4 | −16.292 | 43.433 | 18.083 |
| ATOM | 542 | CE | LYS | A | 4 | −16.162 | 44.943 | 18.177 |
| ATOM | 543 | NZ | LYS | A | 4 | −16.825 | 45.628 | 17.019 |
| ATOM | 544 | N | ALA | A | 5 | −16.85 | 38.393 | 19.759 |
| ATOM | 545 | CA | ALA | A | 5 | −16.811 | 36.955 | 19.507 |
| ATOM | 546 | C | ALA | A | 5 | −15.772 | 36.771 | 18.416 |
| ATOM | 547 | O | ALA | A | 5 | −15.727 | 37.534 | 17.455 |
| ATOM | 548 | CB | ALA | A | 5 | −18.168 | 36.419 | 19.043 |
| ATOM | 549 | N | CYS | A | 6 | −14.935 | 35.756 | 18.562 |
| ATOM | 550 | CA | CYS | A | 6 | −13.887 | 35.518 | 17.584 |
| ATOM | 551 | C | CYS | A | 6 | −14.347 | 34.765 | 16.338 |
| ATOM | 552 | O | CYS | A | 6 | −15.327 | 34.018 | 16.368 |
| ATOM | 553 | CB | CYS | A | 6 | −12.743 | 34.768 | 18.241 |
| ATOM | 554 | SG | CYS | A | 6 | −11.198 | 34.959 | 17.353 |
| ATOM | 555 | N | CYS | A | 7 | −13.623 | 34.973 | 15.243 |
| ATOM | 556 | CA | CYS | A | 7 | −13.931 | 34.328 | 13.969 |
| ATOM | 557 | C | CYS | A | 7 | −13.091 | 33.071 | 13.798 |
| ATOM | 558 | O | CYS | A | 7 | −11.961 | 33.123 | 13.302 |
| ATOM | 559 | CB | CYS | A | 7 | −13.653 | 35.290 | 12.824 |
| ATOM | 560 | SG | CYS | A | 7 | −13.930 | 34.633 | 11.154 |
| ATOM | 561 | N | VAL | A | 8 | −13.654 | 31.941 | 14.209 |
| ATOM | 562 | CA | VAL | A | 8 | −12.949 | 30.684 | 14.110 |
| ATOM | 563 | C | VAL | A | 8 | −13.653 | 29.733 | 13.157 |
| ATOM | 564 | O | VAL | A | 8 | −14.759 | 30.016 | 12.687 |
| ATOM | 565 | CB | VAL | A | 8 | −12.814 | 30.038 | 15.492 |
| ATOM | 566 | CG1 | VAL | A | 8 | −11.807 | 30.825 | 16.337 |
| ATOM | 567 | CG2 | VAL | A | 8 | −14.161 | 30.006 | 16.170 |
| ATOM | 568 | N | PRO | A | 9 | −13.003 | 28.601 | 12.828 |
| ATOM | 569 | CA | PRO | A | 9 | −13.593 | 27.615 | 11.918 |
| ATOM | 570 | C | PRO | A | 9 | −14.726 | 26.886 | 12.631 |
| ATOM | 571 | O | PRO | A | 9 | −14.581 | 26.476 | 13.780 |
| ATOM | 572 | CB | PRO | A | 9 | −12.423 | 26.676 | 11.601 |
| ATOM | 573 | CG | PRO | A | 9 | −11.204 | 27.487 | 11.925 |
| ATOM | 574 | CD | PRO | A | 9 | −11.620 | 28.226 | 13.163 |
| ATOM | 575 | N | THR | A | 10 | −15.847 | 26.721 | 11.942 |
| ATOM | 576 | CA | THR | A | 10 | −16.999 | 26.060 | 12.527 |
| ATOM | 577 | C | THR | A | 10 | −17.334 | 24.767 | 11.804 |
| ATOM | 578 | O | THR | A | 10 | −18.097 | 23.943 | 12.303 |
| ATOM | 579 | CB | THR | A | 10 | −18.211 | 27.010 | 12.523 |
| ATOM | 580 | OG1 | THR | A | 10 | −18.491 | 27.445 | 11.185 |
| ATOM | 581 | CG2 | THR | A | 10 | −17.902 | 28.230 | 13.375 |
| ATOM | 582 | N | GLU | A | 11 | −16.750 | 24.586 | 10.627 |
| ATOM | 583 | CA | GLU | A | 11 | −16.980 | 23.377 | 9.848 |
| ATOM | 584 | C | GLU | A | 11 | −15.643 | 22.935 | 9.246 |
| ATOM | 585 | O | GLU | A | 11 | −15.029 | 23.666 | 8.464 |
| ATOM | 586 | CB | GLU | A | 11 | −17.981 | 23.624 | 8.715 |
| ATOM | 587 | CG | GLU | A | 11 | −19.421 | 23.807 | 9.163 |
| ATOM | 588 | CD | GLU | A | 11 | −19.686 | 25.166 | 9.770 |
| ATOM | 589 | OE1 | GLU | A | 11 | −19.478 | 26.175 | 9.073 |
| ATOM | 590 | OE2 | GLU | A | 11 | −20.111 | 25.227 | 10.939 |
| ATOM | 591 | N | LEU | A | 12 | −15.183 | 21.749 | 9.622 |
| ATOM | 592 | CA | LEU | A | 12 | −13.923 | 21.254 | 9.104 |
| ATOM | 593 | C | LEU | A | 12 | −14.062 | 19.912 | 8.386 |
| ATOM | 594 | O | LEU | A | 12 | −15.136 | 19.299 | 8.359 |
| ATOM | 595 | CB | LEU | A | 12 | −12.893 | 21.144 | 10.230 |
| ATOM | 596 | CG | LEU | A | 12 | −12.660 | 22.422 | 11.054 |
| ATOM | 597 | CD1 | LEU | A | 12 | −13.475 | 22.350 | 12.337 |
| ATOM | 598 | CD2 | LEU | A | 12 | −11.181 | 22.586 | 11.399 |
| ATOM | 599 | N | SER | A | 13 | −12.971 | 19.476 | 7.771 |
| ATOM | 600 | CA | SER | A | 13 | −12.964 | 18.218 | 7.046 |
| ATOM | 601 | C | SER | A | 13 | −11.568 | 17.628 | 7.164 |
| ATOM | 602 | O | SER | A | 13 | −10.613 | 18.320 | 7.550 |
| ATOM | 603 | CB | SER | A | 13 | −13.346 | 18.435 | 5.578 |
| ATOM | 604 | OG | SER | A | 13 | −12.404 | 19.261 | 4.923 |
| ATOM | 605 | N | ALA | A | 13 | −11.449 | 16.352 | 6.818 |
| ATOM | 606 | CA | ALA | A | 13 | −10.179 | 15.665 | 6.949 |
| ATOM | 607 | C | ALA | A | 13 | −9.421 | 15.471 | 5.652 |
| ATOM | 608 | O | ALA | A | 13 | −9.941 | 15.720 | 4.563 |
| ATOM | 609 | CB | ALA | A | 13 | −10.413 | 14.306 | 7.626 |
| ATOM | 610 | N | ILE | A | 14 | −8.171 | 15.046 | 5.783 |
| ATOM | 611 | CA | ILE | A | 14 | −7.343 | 14.746 | 4.623 |
| ATOM | 612 | C | ILE | A | 14 | −6.475 | 13.559 | 5.004 |
| ATOM | 613 | O | ILE | A | 14 | −6.212 | 13.316 | 6.183 |
| ATOM | 614 | CB | ILE | A | 14 | −6.401 | 15.916 | 4.183 |
| ATOM | 615 | CG1 | ILE | A | 14 | −5.284 | 16.106 | 5.200 |
| ATOM | 616 | CG2 | ILE | A | 14 | −7.188 | 17.211 | 3.982 |
| ATOM | 617 | CD1 | ILE | A | 14 | −4.173 | 16.973 | 4.696 |
| ATOM | 618 | N | SER | A | 15 | −6.045 | 12.806 | 3.999 |
| ATOM | 619 | CA | SER | A | 15 | −5.187 | 11.662 | 4.242 |
| ATOM | 620 | C | SER | A | 15 | −3.740 | 12.089 | 4.217 |
| ATOM | 621 | O | SER | A | 15 | −3.360 | 13.020 | 3.508 |
| ATOM | 622 | CB | SER | A | 15 | −5.416 | 10.584 | 3.185 |
| ATOM | 623 | OG | SER | A | 15 | −6.667 | 9.971 | 3.401 |
| ATOM | 624 | N | MET | A | 16 | −2.933 | 11.409 | 5.012 |
| ATOM | 625 | CA | MET | A | 16 | −1.518 | 11.700 | 5.047 |
| ATOM | 626 | C | MET | A | 16 | −0.778 | 10.414 | 5.244 |
| ATOM | 627 | O | MET | A | 16 | −1.137 | 9.594 | 6.078 |
| ATOM | 628 | CB | MET | A | 16 | −1.170 | 12.694 | 6.164 |
| ATOM | 629 | CG | MET | A | 16 | −1.848 | 14.042 | 5.974 |
| ATOM | 630 | SD | MET | A | 16 | −1.017 | 15.431 | 6.760 |
| ATOM | 631 | CE | MET | A | 16 | −0.799 | 14.823 | 8.475 |
| ATOM | 632 | N | LEU | A | 17 | 0.238 | 10.231 | 4.426 |
| ATOM | 633 | CA | LEU | A | 17 | 1.077 | 9.065 | 4.508 |
| ATOM | 634 | C | LEU | A | 17 | 2.289 | 9.610 | 5.264 |
| ATOM | 635 | O | LEU | A | 17 | 2.939 | 10.565 | 4.818 |
| ATOM | 636 | CB | LEU | A | 17 | 1.461 | 8.608 | 3.100 |
| ATOM | 637 | CG | LEU | A | 17 | 2.324 | 7.355 | 2.955 |
| ATOM | 638 | CD1 | LEU | A | 17 | 1.553 | 6.145 | 3.445 |
| ATOM | 639 | CD2 | LEU | A | 17 | 2.723 | 7.190 | 1.492 |
| ATOM | 640 | N | TYR | A | 18 | 2.581 | 9.029 | 6.418 |
| ATOM | 641 | CA | TYR | A | 18 | 3.706 | 9.501 | 7.196 |
| ATOM | 642 | C | TYR | A | 18 | 4.434 | 8.333 | 7.835 |
| ATOM | 643 | O | TYR | A | 18 | 4.081 | 7.186 | 7.603 |
| ATOM | 644 | CB | TYR | A | 18 | 3.222 | 10.458 | 8.281 |
| ATOM | 645 | CG | TYR | A | 18 | 2.386 | 9.782 | 9.346 |
| ATOM | 646 | CD1 | TYR | A | 18 | 1.029 | 9.527 | 9.147 |
| ATOM | 647 | CD2 | TYR | A | 18 | 2.961 | 9.379 | 10.550 |
| ATOM | 648 | CE1 | TYR | A | 18 | 0.273 | 8.894 | 10.128 |
| ATOM | 649 | CE2 | TYR | A | 18 | 2.218 | 8.745 | 11.526 |
| ATOM | 650 | CZ | TYR | A | 18 | 0.877 | 8.508 | 11.317 |
| ATOM | 651 | OH | TYR | A | 18 | 0.134 | 7.922 | 12.318 |
| ATOM | 652 | N | LEU | A | 19 | 5.439 | 8.651 | 8.650 |
| ATOM | 653 | CA | LEU | A | 19 | 6.255 | 7.661 | 9.347 |
| ATOM | 654 | C | LEU | A | 19 | 6.210 | 7.946 | 10.847 |
| ATOM | 655 | O | LEU | A | 19 | 6.685 | 8.992 | 11.288 |
| ATOM | 656 | CB | LEU | A | 19 | 7.701 | 7.763 | 8.871 |
| ATOM | 657 | CG | LEU | A | 19 | 7.901 | 7.850 | 7.359 |
| ATOM | 658 | CD1 | LEU | A | 19 | 9.300 | 8.379 | 7.039 |
| ATOM | 659 | CD2 | LEU | A | 19 | 7.669 | 6.482 | 6.748 |
| ATOM | 660 | N | ASP | A | 20 | 5.652 | 7.035 | 11.639 |
| ATOM | 661 | CA | ASP | A | 20 | 5.594 | 7.282 | 13.071 |
| ATOM | 662 | C | ASP | A | 20 | 7.001 | 7.289 | 13.662 |
| ATOM | 663 | O | ASP | A | 20 | 7.985 | 7.185 | 12.932 |
| ATOM | 664 | CB | ASP | A | 20 | 4.714 | 6.244 | 13.786 |
| ATOM | 665 | CG | ASP | A | 20 | 5.292 | 4.837 | 13.752 |
| ATOM | 666 | OD1 | ASP | A | 20 | 6.533 | 4.678 | 13.775 |
| ATOM | 667 | OD2 | ASP | A | 20 | 4.491 | 3.882 | 13.732 |
| ATOM | 668 | N | GLU | A | 21 | 7.089 | 7.413 | 14.981 |
| ATOM | 669 | CA | GLU | A | 21 | 8.375 | 7.451 | 15.669 |
| ATOM | 670 | C | GLU | A | 21 | 9.250 | 6.212 | 15.463 |
| ATOM | 671 | O | GLU | A | 21 | 10.459 | 6.246 | 15.738 |
| ATOM | 672 | CB | GLU | A | 21 | 8.164 | 7.699 | 17.171 |
| ATOM | 673 | CG | GLU | A | 21 | 7.220 | 6.731 | 17.868 |
| ATOM | 674 | CD | GLU | A | 21 | 5.828 | 6.726 | 17.257 |
| ATOM | 675 | OE1 | GLU | A | 21 | 5.347 | 7.810 | 16.856 |
| ATOM | 676 | OE2 | GLU | A | 21 | 5.210 | 5.640 | 17.185 |
| ATOM | 677 | N | ASN | A | 22 | 8.646 | 5.133 | 14.966 |
| ATOM | 678 | CA | ASN | A | 22 | 9.377 | 3.889 | 14.727 |
| ATOM | 679 | C | ASN | A | 22 | 9.682 | 3.647 | 13.249 |
| ATOM | 680 | O | ASN | A | 22 | 10.095 | 2.554 | 12.853 |
| ATOM | 681 | CB | ASN | A | 22 | 8.591 | 2.707 | 15.299 |
| ATOM | 682 | CG | ASN | A | 22 | 8.384 | 2.827 | 16.794 |
| ATOM | 683 | OD1 | ASN | A | 22 | 9.349 | 2.930 | 17.560 |
| ATOM | 684 | ND2 | ASN | A | 22 | 7.125 | 2.819 | 17.221 |
| ATOM | 685 | N | GLU | A | 23 | 9.485 | 4.672 | 12.435 |
| ATOM | 686 | CA | GLU | A | 23 | 9.749 | 4.558 | 11.015 |
| ATOM | 687 | C | GLU | A | 23 | 8.790 | 3.603 | 10.299 |
| ATOM | 688 | O | GLU | A | 23 | 9.145 | 2.996 | 9.292 |
| ATOM | 689 | CB | GLU | A | 23 | 11.203 | 4.129 | 10.784 |
| ATOM | 690 | CG | GLU | A | 23 | 12.232 | 5.210 | 11.082 |
| ATOM | 691 | CD | GLU | A | 23 | 12.072 | 6.410 | 10.166 |
| ATOM | 692 | OE1 | GLU | A | 23 | 12.108 | 6.218 | 8.928 |
| ATOM | 693 | OE2 | GLU | A | 23 | 11.907 | 7.541 | 10.677 |
| ATOM | 694 | N | LYS | A | 24 | 7.580 | 3.459 | 10.826 |
| ATOM | 695 | CA | LYS | A | 24 | 6.583 | 2.624 | 10.175 |
| ATOM | 696 | C | LYS | A | 24 | 5.815 | 3.540 | 9.228 |
| ATOM | 697 | O | LYS | A | 24 | 5.553 | 4.692 | 9.552 |
| ATOM | 698 | CB | LYS | A | 24 | 5.602 | 2.039 | 11.182 |
| ATOM | 699 | CG | LYS | A | 24 | 6.163 | 0.963 | 12.058 |
| ATOM | 700 | CD | LYS | A | 24 | 5.068 | 0.387 | 12.947 |
| ATOM | 701 | CE | LYS | A | 24 | 5.648 | −0.511 | 14.031 |
| ATOM | 702 | NZ | LYS | A | 24 | 4.577 | −1.091 | 14.886 |
| ATOM | 703 | N | VAL | A | 25 | 5.455 | 3.037 | 8.057 |
| ATOM | 704 | CA | VAL | A | 25 | 4.713 | 3.849 | 7.116 |
| ATOM | 705 | C | VAL | A | 25 | 3.237 | 3.737 | 7.444 |
| ATOM | 706 | O | VAL | A | 25 | 2.657 | 2.659 | 7.383 |
| ATOM | 707 | CB | VAL | A | 25 | 4.969 | 3.396 | 5.681 |
| ATOM | 708 | CG1 | VAL | A | 25 | 4.250 | 4.317 | 4.708 |
| ATOM | 709 | CG2 | VAL | A | 25 | 6.462 | 3.393 | 5.422 |
| ATOM | 710 | N | VAL | A | 25 | 2.637 | 4.864 | 7.800 |
| ATOM | 711 | CA | VAL | A | 25 | 1.231 | 4.916 | 8.170 |
| ATOM | 712 | C | VAL | A | 25 | 0.418 | 5.778 | 7.213 |
| ATOM | 713 | O | VAL | A | 25 | 0.871 | 6.841 | 6.774 |
| ATOM | 714 | CB | VAL | A | 25 | 1.062 | 5.531 | 9.577 |
| ATOM | 715 | CG1 | VAL | A | 25 | −0.341 | 5.253 | 10.115 |
| ATOM | 716 | CG2 | VAL | A | 25 | 2.128 | 5.006 | 10.506 |
| ATOM | 717 | N | LEU | A | 26 | −0.779 | 5.306 | 6.887 |
| ATOM | 718 | CA | LEU | A | 26 | −1.706 | 6.048 | 6.040 |
| ATOM | 719 | C | LEU | A | 26 | −2.862 | 6.358 | 6.992 |
| ATOM | 720 | O | LEU | A | 26 | −3.679 | 5.497 | 7.297 |
| ATOM | 721 | CB | LEU | A | 26 | −2.201 | 5.189 | 4.876 |
| ATOM | 722 | CG | LEU | A | 26 | −3.204 | 5.898 | 3.952 |
| ATOM | 723 | CD1 | LEU | A | 26 | −2.519 | 7.077 | 3.262 |
| ATOM | 724 | CD2 | LEU | A | 26 | −3.755 | 4.925 | 2.929 |
| ATOM | 725 | N | LYS | A | 27 | −2.910 | 7.584 | 7.489 |
| ATOM | 726 | CA | LYS | A | 27 | −3.952 | 7.965 | 8.430 |
| ATOM | 727 | C | LYS | A | 27 | −4.831 | 9.082 | 7.881 |
| ATOM | 728 | O | LYS | A | 27 | −4.374 | 9.924 | 7.103 |
| ATOM | 729 | CB | LYS | A | 27 | −3.305 | 8.409 | 9.738 |
| ATOM | 730 | CG | LYS | A | 27 | −4.265 | 8.720 | 10.859 |
| ATOM | 731 | CD | LYS | A | 27 | −3.509 | 9.382 | 11.994 |
| ATOM | 732 | CE | LYS | A | 27 | −4.397 | 9.654 | 13.186 |
| ATOM | 733 | NZ | LYS | A | 27 | −4.839 | 8.377 | 13.816 |
| ATOM | 734 | N | ASN | A | 28 | −6.098 | 9.078 | 8.279 |
| ATOM | 735 | CA | ASN | A | 28 | −7.045 | 10.095 | 7.843 |
| ATOM | 736 | C | ASN | A | 28 | −7.147 | 11.103 | 8.979 |
| ATOM | 737 | O | ASN | A | 28 | −7.815 | 10.842 | 9.969 |
| ATOM | 738 | CB | ASN | A | 28 | −8.408 | 9.455 | 7.560 |
| ATOM | 739 | CG | ASN | A | 28 | −9.518 | 10.485 | 7.364 |
| ATOM | 740 | OD1 | ASN | A | 28 | −9.360 | 11.444 | 6.597 |
| ATOM | 741 | ND2 | ASN | A | 28 | −10.653 | 10.288 | 8.050 |
| ATOM | 742 | N | TYR | A | 29 | −6.473 | 12.241 | 8.837 |
| ATOM | 743 | CA | TYR | A | 29 | −6.470 | 13.278 | 9.869 |
| ATOM | 744 | C | TYR | A | 29 | −7.680 | 14.204 | 9.836 |
| ATOM | 745 | O | TYR | A | 29 | −7.928 | 14.870 | 8.835 |
| ATOM | 746 | CB | TYR | A | 29 | −5.197 | 14.130 | 9.768 |
| ATOM | 747 | CG | TYR | A | 29 | −3.913 | 13.420 | 10.155 |
| ATOM | 748 | CD1 | TYR | A | 29 | −3.378 | 12.394 | 9.363 |
| ATOM | 749 | CD2 | TYR | A | 29 | −3.220 | 13.792 | 11.306 |
| ATOM | 750 | CE1 | TYR | A | 29 | −2.181 | 11.765 | 9.713 |
| ATOM | 751 | CE2 | TYR | A | 29 | −2.032 | 13.171 | 11.665 |
| ATOM | 752 | CZ | TYR | A | 29 | −1.516 | 12.167 | 10.869 |
| ATOM | 753 | OH | TYR | A | 29 | −0.319 | 11.603 | 11.231 |
| ATOM | 754 | N | GLN | A | 30 | −8.408 | 14.254 | 10.950 |
| ATOM | 755 | CA | GLN | A | 30 | −9.606 | 15.088 | 11.089 |
| ATOM | 756 | C | GLN | A | 30 | −9.287 | 16.541 | 11.431 |
| ATOM | 757 | O | GLN | A | 30 | −8.213 | 16.847 | 11.925 |
| ATOM | 758 | CB | GLN | A | 30 | −10.500 | 14.541 | 12.202 |
| ATOM | 759 | CG | GLN | A | 30 | −10.807 | 13.074 | 12.104 |
| ATOM | 760 | CD | GLN | A | 30 | −11.744 | 12.749 | 10.969 |
| ATOM | 761 | OE1 | GLN | A | 30 | −11.900 | 11.582 | 10.602 |
| ATOM | 762 | NE2 | GLN | A | 30 | −12.385 | 13.773 | 10.405 |
| ATOM | 763 | N | ASP | A | 31 | −10.238 | 17.430 | 11.173 |
| ATOM | 764 | CA | ASP | A | 31 | −10.085 | 18.851 | 11.495 |
| ATOM | 765 | C | ASP | A | 31 | −8.867 | 19.494 | 10.842 |
| ATOM | 766 | O | ASP | A | 31 | −8.195 | 20.335 | 11.442 |
| ATOM | 767 | CB | ASP | A | 31 | −10.000 | 19.025 | 13.019 |
| ATOM | 768 | CG | ASP | A | 31 | −11.247 | 18.520 | 13.742 |
| ATOM | 769 | OD1 | ASP | A | 31 | −12.349 | 18.587 | 13.155 |
| ATOM | 770 | OD2 | ASP | A | 31 | −11.130 | 18.069 | 14.908 |
| ATOM | 771 | N | MET | A | 32 | −8.582 | 19.113 | 9.606 |
| ATOM | 772 | CA | MET | A | 32 | −7.426 | 19.662 | 8.918 |
| ATOM | 773 | C | MET | A | 32 | −7.780 | 20.808 | 7.987 |
| ATOM | 774 | O | MET | A | 32 | −7.021 | 21.768 | 7.855 |
| ATOM | 775 | CB | MET | A | 32 | −6.741 | 18.559 | 8.125 |
| ATOM | 776 | CG | MET | A | 32 | −6.037 | 17.540 | 8.980 |
| ATOM | 777 | SD | MET | A | 32 | −4.559 | 18.231 | 9.714 |
| ATOM | 778 | CE | MET | A | 32 | −3.406 | 18.041 | 8.318 |
| ATOM | 779 | N | VAL | A | 33 | −8.942 | 20.707 | 7.351 |
| ATOM | 780 | CA | VAL | A | 33 | −9.381 | 21.719 | 6.401 |
| ATOM | 781 | C | VAL | A | 33 | −10.579 | 22.536 | 6.858 |
| ATOM | 782 | O | VAL | A | 33 | −11.586 | 21.988 | 7.292 |
| ATOM | 783 | CB | VAL | A | 33 | −9.701 | 21.056 | 5.027 |
| ATOM | 784 | CG1 | VAL | A | 33 | −10.388 | 22.040 | 4.087 |
| ATOM | 785 | CG2 | VAL | A | 33 | −8.423 | 20.561 | 4.412 |
| ATOM | 786 | N | VAL | A | 34 | −10.465 | 23.855 | 6.739 |
| ATOM | 787 | CA | VAL | A | 34 | −11.553 | 24.745 | 7.113 |
| ATOM | 788 | C | VAL | A | 34 | −12.610 | 24.835 | 6.016 |
| ATOM | 789 | O | VAL | A | 34 | −12.373 | 25.403 | 4.950 |
| ATOM | 790 | CB | VAL | A | 34 | −11.057 | 26.176 | 7.407 |
| ATOM | 791 | CG1 | VAL | A | 34 | −12.240 | 27.097 | 7.601 |
| ATOM | 792 | CG2 | VAL | A | 34 | −10.222 | 26.186 | 8.655 |
| ATOM | 793 | N | GLU | A | 35 | −13.779 | 24.266 | 6.282 |
| ATOM | 794 | CA | GLU | A | 35 | −14.870 | 24.311 | 5.321 |
| ATOM | 795 | C | GLU | A | 35 | −15.702 | 25.565 | 5.572 |
| ATOM | 796 | O | GLU | A | 35 | −16.011 | 26.303 | 4.645 |
| ATOM | 797 | CB | GLU | A | 35 | −15.733 | 23.054 | 5.447 |
| ATOM | 798 | CG | GLU | A | 35 | −14.969 | 21.782 | 5.128 |
| ATOM | 799 | CD | GLU | A | 35 | −14.515 | 21.732 | 3.676 |
| ATOM | 800 | OE1 | GLU | A | 35 | −15.036 | 22.519 | 2.858 |
| ATOM | 801 | OE2 | GLU | A | 35 | −13.643 | 20.902 | 3.344 |
| ATOM | 802 | N | GLY | A | 36 | −16.053 | 25.811 | 6.829 |
| ATOM | 803 | CA | GLY | A | 36 | −16.834 | 26.990 | 7.152 |
| ATOM | 804 | C | GLY | A | 36 | −16.322 | 27.785 | 8.341 |
| ATOM | 805 | O | GLY | A | 36 | −15.671 | 27.249 | 9.237 |
| ATOM | 806 | N | CYS | A | 37 | −16.616 | 29.077 | 8.360 |
| ATOM | 807 | CA | CYS | A | 37 | −16.177 | 29.917 | 9.466 |
| ATOM | 808 | C | CYS | A | 37 | −17.347 | 30.502 | 10.249 |
| ATOM | 809 | O | CYS | A | 37 | −18.467 | 30.628 | 9.741 |
| ATOM | 810 | CB | CYS | A | 37 | −15.301 | 31.058 | 8.967 |
| ATOM | 811 | SG | CYS | A | 37 | −13.785 | 30.558 | 8.098 |
| ATOM | 812 | N | GLY | A | 38 | −17.079 | 30.867 | 11.494 |
| ATOM | 813 | CA | GLY | A | 38 | −18.129 | 31.430 | 12.309 |
| ATOM | 814 | C | GLY | A | 38 | −17.622 | 32.176 | 13.518 |
| ATOM | 815 | O | GLY | A | 38 | −16.425 | 32.235 | 13.791 |
| ATOM | 816 | N | CYS | A | 39 | −18.564 | 32.753 | 14.245 |
| ATOM | 817 | CA | CYS | A | 39 | −18.253 | 33.505 | 15.439 |
| ATOM | 818 | C | CYS | A | 39 | −18.543 | 32.670 | 16.665 |
| ATOM | 819 | O | CYS | A | 39 | −19.620 | 32.084 | 16.794 |
| ATOM | 820 | CB | CYS | A | 39 | −19.068 | 34.779 | 15.442 |
| ATOM | 821 | SG | CYS | A | 39 | −18.539 | 35.799 | 14.053 |

[0260] Structure coordinates: As used herein, unless indicated otherwise or contradictory in context, the “structure coordinates” refers to Cartesian coordinates derived from mathematical equations related to the patterns obtained on diffraction of a monochromatic beam of X-rays by the atoms (scattering centers) of a protein, protein complex or peptide in crystal form. The diffraction data are used to calculate an electron density map of the repeating unit of the crystal. The electron density maps are then used to establish the positions of the individual atoms of the molecule or molecular complex.

[0261] STAMP: STAMP (Structural Alignment of Multiple Proteins) is a tool for aligning protein sequences based on a three-dimensional structure. Its algorithm minimizes the Ca distance between aligned residues of each molecule by applying globally optimal rigid-body rotations and translations. This program provides some information on the equivalence of the residues between the selected models.

[0262] SCWRL: This program predicts and optimizes the protein side-chain conformations. It is using the backbone of a support protein and a backbone-dependent rotamer library. The possible conformations are explored by minimizing the steric hindrance between the side-chains and between the side-chains and the backbone.

[0263] GROMACS: GROMACS is a molecular dynamics package. The “gmx rms” tool included in GROMACS compares two structures by computing the root mean square deviation (RMSD).

[0264] In one aspect, the present disclosure provides for non-mutagenic extracellular therapies having the ability to direct cell fate. It is thus possible to convert or recode a neoplastic cell by modifying its surrounding extracellular micro-environment, in-vitro, ex-vivo or in-vivo, so that the cell operates self-recovery or self-healing and a subject possessing such a neoplastic cell may be protected from a neoplastic disease.

[0265] In one example, a neoplastic cell may operate self-recovery or self-healing e.g. by inducing a quiescence state so that the neoplastic cell may remain inactive or dormant for seconds, minutes, hours, days, weeks, months or years, in particular, will never resume neoplasia; and/or by preventing, reducing or suppressing cell division and/or cell proliferation, preferably uncontrolled cell division and/or cell proliferation of said neoplastic cell; and/or by regulating or promoting anti-mitogen activity and/or tumour suppressor pathways and/or anti-oncogenic activity in said neoplastic cell; and/or by inducing cytostaticity and not cytotoxicity in the neoplastic cell; and/or by inducing differentiation; and/or by regulating and/or modulating the adhesion or interactions between the cell and its micro-environment (i.e. the surrounding ECM) so as activate, reactivate or restore cell adhesion checkpoints in said neoplastic cell.

[0266] In one aspect, the present disclosure provides a pharmaceutical association or combination having the ability to convert or recode, extracellularly, a neoplastic cell, in-vitro, ex-vivo or in-vivo, so that it may be used in the treatment, prevention and/or diagnostic of a neoplastic disease, said association comprising at least one growth factor receptor-binding compound which activates at least one growth factor receptor of a cell (in particular a neoplastic cell) and at least one adhesion protein inhibitor or antagonist which inhibits or antagonises at least one transmembrane cell adhesion protein of said cell.

[0267] In certain embodiments, said pharmaceutical association or combination reduces, down-regulates, inhibits or suppresses (i) the gene and/or protein expression of at least one cyclin-D in the cell (in particular a neoplastic cell) and/or (ii) the formation of at least one complex formed between said at least one cyclin-D and at least one of cyclin dependent-kinase (CDK) 4 or 6 in the cell (in particular a neoplastic cell).

### II. Growth Factor Receptor-Binding Compounds

[0268] In one aspect, the present disclosure provides for pharmaceutical associations or combinations comprising at least one growth factor receptor-binding compound as defined herein and at least one adhesion protein inhibitor or antagonist as defined herein, said associations or combinations having the ability to convert or recode a neoplastic cell into a non-neoplastic cell.

[0269] As used herein, the term “Growth factor receptor-binding compound” or “GFR-binding compound” refers to an exogenous or endogenous compound, molecule or substance (a) having an (binding) affinity for a growth factor receptor as defined herein and (b) comprising the ability to activate a growth factor receptor as defined herein.

[0270] There are many ways to test, measure and present the binding affinity of a given substance for a given receptor, but for the purpose of the present disclosure, and for the avoidance of any doubts, the (binding) affinity values of a given GFR-binding compound to a given GFR are provided using the method of fluorescence anisotropy. In this method, a GFR-binding compound is fluorescently labelled using techniques well established in the art. Binding of the resulting labelled compound to a growth factor receptor results in a fluctuation of fluorescence anisotropy which is used to construct an affinity binding curve from which the GFR-binding compound binding affinity value is derived. Using this technique, binding affinity values are given in the form of dissociation constants Kd. In certain embodiments, GFR-binding compounds of the present disclosure have Kd values as measured by fluorescence anisotropy of more than 1 (one) picomolar (pM). In certain embodiments, GFR-binding compounds of the present disclosure have Kd values as measured by fluorescence anisotropy of more than 1 (one) nanomolar (nM). In certain embodiments, GFR-binding compounds of the present disclosure have Kd values as measured by fluorescence anisotropy of more than 10 (ten) nanomolar (nM). In certain embodiments, GFR-binding compounds of the present disclosure have Kd values as measured by fluorescence anisotropy of more than 100 (one hundred) nanomolar (nM). In certain embodiments, GFR-binding compounds of the present disclosure have Kd values as measured by fluorescence anisotropy of more than 1 (one) micromolar (μM). In certain embodiments, GFR-binding compounds of the present disclosure have Kd values as measured by fluorescence anisotropy of more than 10 (ten) micromolar (μM). In certain embodiments, GFR-binding compounds of the present disclosure have Kd values as measured by fluorescence anisotropy of more than 100 (one hundred) micromolar (μM).

[0271] There are many ways to test and measure the ability of a given substance to activate a given receptor, but for the purpose of the present disclosure, and for the avoidance of any doubts, a given GFR-binding compound activates a growth factor receptor if it induces growth factor receptor phosphorylation as measured by the western blot method. There are many distinct phosphorylation sites on growth factor receptors and they may widely vary according to the type of growth factor receptor as reported in the published scientific article from Mark A. Lemmon and Joseph Schlessinger, “Cell Signaling by Receptor Tyrosine Kinases”, Cell. 2010; 141(7), 1117-1134, which is hereby incorporated by reference in its entirety.

[0272] Growth factor receptor: As used herein, unless indicated otherwise or contradictory in context, the term “growth factor receptor” or “GFR” is a receptor which binds to growth factors which are naturally occurring substances capable of stimulating, for instance, cellular growth, proliferation, healing, and cellular differentiation. Suitable as growth factor receptors for implementing embodiments of the present invention include epidermal growth factor receptors (EGFR), fibroblast growth factor receptors (FGFR), vascular endothelial growth factor receptors (VEGFR), nerve growth factor receptors (NGFR), Insulin receptor family, Trk receptor family, Eph receptor family, AXL receptor family, LTK receptor family, TIE receptor family, ROR receptor family, DDR receptor family, RET receptor family, KLG receptor family, RYK receptor family, MuSK receptor family, hepatocyte growth factor receptors (HGFR), somatomedin or insulin-like growth factor receptors (SGFR), platelet-derived growth factor receptors (PDGFR), transforming growth factor beta (TGF-β) superfamily proteins such as AMH, ARTN, BMP10, BMP15, BMP2, BMP3, BMP4, BMP5, BMP6, BMP7, BMP8A, BMP8B, GDF1, GDF10, GDF11, GDF15, GDF2, GDF3, GDF3A, GDF5, GDF6, GDF7, GDF8, GDF9, GDNF, INHA, INHBA, INHBB, INHBC, INHBE, LEFTY1, LEFTY2, MSTN, NODAL, NRTN, PSPN, TGFB1, TGFB2 and TGFB3, and any combination thereof.

[0273] Growth factor: As used herein, unless indicated otherwise or contradictory in context, the term “growth factor” refers to any substance(s) having the ability to bind to a growth factor receptor and produce (a) biological effect(s) or reaction(s), such as promoting the growth of tissues, by activating such a growth factor receptor. Exemplary growth factors include, but are not limited to, platelet-derived growth factor (PDGF), platelet-derived angiogenesis factor (PDAF), vascular endotheial growth factor (VEGF), platelet-derived epidermal growth factor (PDEGF), transforming growth factor beta (TGF-β), transforming growth factor A (TGF-A), epidermal growth factor (EGF), fibroblast growth factor (FGF), acidic fibroblast growth factor (FGF-A), basic fibroblast growth factor (FGF-B), insulin-like growth factors 1 and 2 (IGF-I and IGF-2), keratinocyte growth factor (KGF), tumor necrosis factor (TNF), fibroblast growth factor (FGF) and interleukin-1 (IL-I), Keratinocyte Growth Factor-2 (KGF-2), and combinations thereof.

[0274] Activation of growth factor receptors: As used herein, unless indicated otherwise or contradictory in context, the term “activating” or “activation of”, when used in relation to a growth factor receptor, refers to the phosphorylation of the tyrosine kinase domain of such a growth factor receptor.

[0275] In one aspect, the present disclosure provides a GFR-binding compound, as part of a pharmaceutical association, combination or composition as defined herein, as an active principle for use in methods and uses described herein.

[0276] In one particular example, the growth factor receptor involved in the interaction with said GFR-binding compound is an epidermal growth factor receptor. In one particular example, the growth factor receptor involved in the interaction with said GFR-binding compound is a fibroblast growth factor receptor. In one particular example, the growth factor receptor involved in the interaction with said GFR-binding compound is a vascular endothelial growth factor receptor. In one particular example, the growth factor receptor involved in the interaction with said GFR-binding compound is a nerve growth factor receptor. In one particular example, the growth factor receptor involved in the interaction with said GFR-binding compound is a hepatocyte growth factor receptor. In one particular example, the growth factor receptor involved in the interaction with said GFR-binding compound is a somatomedin or insulin-like growth factor receptor. In one particular example, the growth factor receptor involved in the interaction with said GFR-binding compound is a platelet-derived growth factor receptor. In one particular example, the growth factor receptor involved in the interaction with said GFR-binding compound is a protein from the transforming growth factor beta (TGF-β) superfamily.

[0277] In one particular example, the growth factor receptor(s) involved in the interaction with said GFR-binding compound is (are) preferably selected from epidermal growth factor receptors, fibroblast growth factor receptors, vascular endothelial growth factor receptors, nerve growth factor receptors, hepatocyte growth factor receptors, somatomedin or insulin-like growth factor receptors, platelet-derived growth factor receptors, and transforming growth factor beta (TGF-β) superfamily proteins.

[0278] In one particular example, the gene expression of cyclin-D, in a neoplastic cell, is reduced, down-regulated, inhibited or suppressed during phase G1 of the cell cycle. In one particular example, the gene expression of cyclin-D is reduced or suppressed for substantially at least the entire duration of phase G1 of a cell cycle. In one particular example, the gene expression of cyclin-D is reduced by at least 20%. In one particular example, the gene expression of cyclin-D is reduced by at least 30%. In one particular example, the gene expression of cyclin-D is reduced by at least 40%. In one particular example, the gene expression of cyclin-D is reduced by at least 50%. In one particular example, the gene expression of cyclin-D is reduced by at least 60%. In one particular example, the gene expression of cyclin-D is reduced by at least 70%. In one particular example, the gene expression of cyclin-D is reduced by at least 80%. At least 40% is particularly preferred. Reduction of cyclin D gene expression is assessed with respect to the wild-type gene expression of cyclin-D and is measured by Quantitative Real Time Polymerase Chain Reaction (Q-PCR or RT-PCR) by (i) extracting RNA from the treated cells, (ii) converting the extracted RNA into the corresponding cDNA, (iii) subjecting the obtained cDNA to a real-time PCR amplification, (iv) analysing the data obtained from the real-time PCR amplification and comparing them with the data obtained by the ΔΔCt method, and (v) comparing the obtained values to the wild-type value.

[0279] In more details, Quantitative Real Time Polymerase Chain Reaction is carried out by (i) extracting RNA from the treated cells using the RNeasy total RNA kit from Qiagen®, (ii) converting the extracted RNA into the corresponding cDNA using a reverse transcription reaction (Gibco Brl®) and random primers from Invitrogen®, (iii) subjecting the obtained cDNA to a real-time PCR amplification in the presence of SYBR green reagents from Bio-Rad® in a thermocycler (iCycler, Biorad®), (iv) analysing the data obtained from the real-time PCR amplification with the iCycler IQ™ software following the iCycler iQ™ Real-Time PCR Detection System's instruction manual (Catalog Number 170-8740) and using weighted mean as a digital filter, PCR Baseline Subtracted Curve Fit as the analysis mode, FAM/490 as a fluorophore, the automatic calculation of the baseline cycles and the threshold, and the default settings for all other parameters, and comparing them with the data obtained by the ΔΔCt method as reported and described in Livak, K. J. and T. D. Schmittgen. “Analysis of relative gene expression data using real-time quantitative PCR and the 2(−Delta Delta C(T)) Method”, Methods (2001) 25(4): 402-408, hereby incorporated by reference in its entirety, and (v) comparing the obtained values to the wild-type value.

[0280] In one particular example, the gene expression of cyclin-D is maintained at such a reduced level (at least 20%, at least 30%, at least 40%, at least 50%, at least 60%, at least 70%, or at least 80%) during phase G1 of a cell cycle of the treated neoplastic cell. In one example, the gene expression of cyclin-D is maintained at such a reduced level during substantially the entire duration of the G1 phase. In one example, the gene expression of cyclin-D is maintained at such a reduced level during substantially the entire duration of the G1 and S phases. In one example, the gene expression of cyclin-D is maintained at such a reduced level during substantially the entire duration of the G1, S and G2 phases. In one example, the gene expression of cyclin-D is maintained at such a reduced level during substantially the entire duration of the G1, S, G2 and M phases i.e. during substantially the entire duration of a cell cycle of a treated neoplastic cell. Reduction of the gene expression level of cyclin D during substantially the entire duration of G1 is preferred.

[0281] As used herein, unless indicated otherwise or contradictory in context, the term “wild-type expression” of a protein or a gene, refers to the expression of a protein or a gene observed in normal, standard biological conditions i.e., in the present disclosure, without the presence of, or prior to the provision or administration to a neoplastic cell of a pharmaceutical association, combination or composition as defined herein. In-vitro, ex-vivo or in-vivo natural expression level of a protein or a gene in a neoplastic cell may thus be used as a comparative data (or control) to assess and quantify the effect of the presence or administration of a pharmaceutical association, combination or composition as defined herein on the expression level of such a protein or gene in that cell.

[0282] Suitable GFR-binding compounds for implementing certain embodiments of the invention include, without being limited to, linear (i.e. non-cyclic) GFR-binding compounds such as peptides, or variants or analogs thereof, or peptidomimetics, and cyclic GFR-binding compounds such as cyclic peptides, or variants or analogs thereof, or cyclic peptidomimetics.

[0283] II.1. Non-Cyclic GFR-Binding Compounds

[0284] In one example, said (non-cyclic) GFR-binding compound has a molecular weight of less than 8,000 Daltons. In one particular example, said (non-cyclic) GFR-binding compound has a molecular weight of less than 6,000 Daltons. In one particular example, said (non-cyclic) GFR-binding compound has a molecular weight comprised between 2,000 and 8,000 Daltons. In one particular example, said (non-cyclic) GFR-binding compound has a molecular weight comprised between 2,000 and 6,000 Daltons. Between 2,000 and 6,000 Daltons is particularly preferred.

[0285] In one particular example, said GFR-binding compound is a (non-cyclic) peptide, a variant or analog thereof, as defined herein, with (exclusively consisting of, or constituted of) between 20 and 60 (in particular between 20 and 50, and more particularly, between 20 and 45) amino acids, having growth factor receptor-binding capability or capabilities.

[0286] In one particular example, said GFR-binding compound is a (non-cyclic) peptidomimetic as defined herein, having growth factor receptor-binding capability or capabilities, comprising (consecutively or non consecutively) between 20-60 amino acids, in particular between 20-50 or 20-45 amino acids, and more particularly, between 23-60, 23-50 or 23-45 amino acids; wherein said GFR-binding compound has a molecular weight comprised between 2,000 and 8,000 Daltons (in particular, between 2,000 and 6,000 Da).

[0287] In one particular example, said GFR-binding compound is a peptidomimetic as defined herein, having growth factor receptor-binding capability or capabilities, comprising (consecutively or non consecutively) between 20-60 amino acids, in particular between 20-50 or 20-45 amino acids, and more particularly, between 23-60, 23-50 or 23-45 amino acids; and containing at least one peptide portion or fragment with between 5-20 amino acids (in particular containing two peptide portions or fragments, each of which with between 5-20 amino acids); wherein said GFR-binding compound has a molecular weight comprised between 2,000 and 8,000 Daltons (in particular, between 2,000 and 6,000 Da).

[0288] In one particular example, said GFR-binding compound is a peptide, a variant or analog thereof, or a peptidomimetic as defined herein, with (comprising, or exclusively consisting of, or constituted of) between 20 and 60 (in particular between 20 and 50, and more particularly, between 20 and 45) amino acids, having growth factor receptor-binding capability or capabilities, comprising a peptide with four amino acids (PEP1) and a peptide with five amino acids (PEP2).

[0289] In one particular example, said GFR-binding compound is a peptide, a variant or analog thereof, or a peptidomimetic as defined herein, with (comprising, or exclusively consisting of, or constituted of) between 20 and 60 (in particular between 20 and 50, and more particularly, between 20 and 45) amino acids, comprising a peptide with eight amino acids (PEP12) and a peptide with five amino acids (PEP2).

[0290] In one particular example, said GFR-binding compound is a peptide, a variant or analog thereof, or a peptidomimetic as defined herein, with (comprising, or exclusively consisting of, or constituted of) between 20 and 60 (in particular between 20 and 50, and more particularly, between 20 and 45) amino acids, comprising a peptide with four amino acids (PEP1) and a peptide with five amino acids (PEP2); wherein said GFR-binding compound further comprises a peptide with three amino acids (PEP3) and a peptide with three amino acids (PEP4).

[0291] In one particular example, said GFR-binding compound is a peptide, a variant or analog thereof, or a peptidomimetic as defined herein, with (comprising, or exclusively consisting of, or constituted of) between 20 and 60 (in particular between 20 and 50, and more particularly, between 20 and 45) amino acids, comprising a peptide with eight amino acids (PEP12) and a peptide with five amino acids (PEP2); wherein said GFR-binding compound further comprises a peptide with three amino acids (PEP3) and a peptide with three amino acids (PEP4).

[0292] In one particular example, said GFR-binding compound is a peptide, a variant or analog thereof, or a peptidomimetic as defined herein, with (comprising, or exclusively consisting of, or constituted of) between 20 and 60 (in particular between 20 and 50, and more particularly, between 20 and 45) amino acids, comprising a peptide with four amino acids (PEP1) and a peptide with five amino acids (PEP2); wherein said GFR-binding compound further comprises a peptide with five amino acids (PEP5) and a peptide with between five and seven amino acids (PEP6).

[0293] In one particular example, said GFR-binding compound is a peptide, a variant or analog thereof, or a peptidomimetic as defined herein, with (comprising, or exclusively consisting of, or constituted of) between 20 and 60 (in particular between 20 and 50, and more particularly, between 20 and 45) amino acids, comprising a peptide with eight amino acids (PEP12) and a peptide with five amino acids (PEP2); wherein said GFR-binding compound further comprises a peptide with five amino acids (PEP5) and a peptide with between five and seven amino acids (PEP6).

[0294] In one particular example, said GFR-binding compound is a peptide, a variant or analog thereof, or a peptidomimetic as defined herein, with (comprising, or exclusively consisting of, or constituted of) between 20 and 60 (in particular between 20 and 50, and more particularly, between 20 and 45) amino acids, comprising a peptide with four amino acids (PEP1) and a peptide with five amino acids (PEP2); wherein said GFR-binding compound further comprises a peptide with between six and twelve amino acids (PEP9) and a peptide with between six and eleven amino acids (PEP10).

[0295] In one particular example, said GFR-binding compound is a peptide, a variant or analog thereof, or a peptidomimetic as defined herein, with (comprising, or exclusively consisting of, or constituted of) between 20 and 60 (in particular between 20 and 50, and more particularly, between 20 and 45) amino acids, comprising a peptide with eight amino acids (PEP12) and a peptide with five amino acids (PEP2); wherein said GFR-binding compound further comprises a peptide with between six and twelve amino acids (PEP9) and a peptide with between six and eleven amino acids (PEP10).

[0296] In one particular example, said GFR-binding compound is a peptide, a variant or analog thereof, or a peptidomimetic as defined herein, with (comprising, or exclusively consisting of, or constituted of) between 20 and 60 (in particular between 20 and 50, and more particularly, between 20 and 45) amino acids, comprising a peptide with four amino acids (PEP1) and a peptide with five amino acids (PEP2); wherein said GFR-binding compound further comprises a peptide with three amino acids (PEP3) and a peptide with between five and seven amino acids (PEP6).

[0297] In one particular example, said GFR-binding compound is a peptide, a variant or analog thereof, or a peptidomimetic as defined herein, with (comprising, or exclusively consisting of, or constituted of) between 20 and 60 (in particular between 20 and 50, and more particularly, between 20 and 45) amino acids, comprising a peptide with eight amino acids (PEP12) and a peptide with five amino acids (PEP2); wherein said GFR-binding compound further comprises a peptide with three amino acids (PEP3) and a peptide with between five and seven amino acids (PEP6).

[0298] In one particular example, said GFR-binding compound is a peptide, a variant or analog thereof, or a peptidomimetic as defined herein, with (comprising, or exclusively consisting of, or constituted of) between 20 and 60 (in particular between 20 and 50, and more particularly, between 20 and 45) amino acids, comprising a peptide with four amino acids (PEP1) and a peptide with five amino acids (PEP2); wherein said GFR-binding compound further comprises a peptide with three amino acids (PEP3) and a peptide with between six and eleven amino acids (PEP10).

[0299] In one particular example, said GFR-binding compound is a peptide, a variant or analog thereof, or a peptidomimetic as defined herein, with (comprising, or exclusively consisting of, or constituted of) between 20 and 60 (in particular between 20 and 50, and more particularly, between 20 and 45) amino acids, comprising a peptide with eight amino acids (PEP12) and a peptide with five amino acids (PEP2); wherein said GFR-binding compound further comprises a peptide with three amino acids (PEP3) and a peptide with between six and eleven amino acids (PEP10).

[0300] In one particular example, said GFR-binding compound is a peptide, a variant or analog thereof, or a peptidomimetic as defined herein, with (comprising, or exclusively consisting of, or constituted of) between 20 and 60 (in particular between 20 and 50, and more particularly, between 20 and 45) amino acids, comprising a peptide with four amino acids (PEP1) and a peptide with five amino acids (PEP2); wherein said GFR-binding compound further comprises a peptide with five amino acids (PEP5) and a peptide with three amino acids (PEP4).

[0301] In one particular example, said GFR-binding compound is a peptide, a variant or analog thereof, or a peptidomimetic as defined herein, with (comprising, or exclusively consisting of, or constituted of) between 20 and 60 (in particular between 20 and 50, and more particularly, between 20 and 45) amino acids, comprising a peptide with four amino acids (PEP12) and a peptide with five amino acids (PEP2); wherein said GFR-binding compound further comprises a peptide with five amino acids (PEP5) and a peptide with three amino acids (PEP4).

[0302] In one particular example, said GFR-binding compound is a peptide, a variant or analog thereof, or a peptidomimetic as defined herein, with (comprising, or exclusively consisting of, or constituted of) between 20 and 60 (in particular between 20 and 50, and more particularly, between 20 and 45) amino acids, comprising a peptide with four amino acids (PEP1) and a peptide with five amino acids (PEP2); wherein said GFR-binding compound further comprises a peptide with between six and twelve amino acids (PEP9) and a peptide with three amino acids (PEP4).

[0303] In one particular example, said GFR-binding compound is a peptide, a variant or analog thereof, or a peptidomimetic as defined herein, with (comprising, or exclusively consisting of, or constituted of) between 20 and 60 (in particular between 20 and 50, and more particularly, between 20 and 45) amino acids, comprising a peptide with four amino acids (PEP12) and a peptide with five amino acids (PEP2); wherein said GFR-binding compound further comprises a peptide with between six and twelve amino acids (PEP9) and a peptide with three amino acids (PEP4).

[0304] In one particular example, said GFR-binding compound is a peptide, a variant or analog thereof, or a peptidomimetic as defined herein, with (comprising, or exclusively consisting of, or constituted of) between 20 and 60 (in particular between 20 and 50, and more particularly, between 20 and 45) amino acids, comprising a peptide with four amino acids (PEP1) and a peptide with five amino acids (PEP2); wherein said GFR-binding compound further comprises a peptide with five amino acids (PEP5) and a peptide with between six and eleven amino acids (PEP10).

[0305] In one particular example, said GFR-binding compound is a peptide, a variant or analog thereof, or a peptidomimetic as defined herein, with (comprising, or exclusively consisting of, or constituted of) between 20 and 60 (in particular between 20 and 50, and more particularly, between 20 and 45) amino acids, comprising a peptide with four amino acids (PEP12) and a peptide with five amino acids (PEP2); wherein said GFR-binding compound further comprises a peptide with five amino acids (PEP5) and a peptide with between six and eleven amino acids (PEP10).

[0306] In one particular example, said GFR-binding compound is a peptide, a variant or analog thereof, or a peptidomimetic as defined herein, with (comprising, or exclusively consisting of, or constituted of) between 20 and 60 (in particular between 20 and 50, and more particularly, between 20 and 45) amino acids, comprising a peptide with four amino acids (PEP1) and a peptide with five amino acids (PEP2); wherein said GFR-binding compound further comprises a peptide with between six and twelve amino acids (PEP9) and a peptide with between five and seven amino acids (PEP6).

[0307] In one particular example, said GFR-binding compound is a peptide, a variant or analog thereof, or a peptidomimetic as defined herein, with (comprising, or exclusively consisting of, or constituted of) between 20 and 60 (in particular between 20 and 50, and more particularly, between 20 and 45) amino acids, comprising a peptide with four amino acids (PEP12) and a peptide with five amino acids (PEP2); wherein said GFR-binding compound further comprises a peptide with between six and twelve amino acids (PEP9) and a peptide with between five and seven amino acids (PEP6).

[0308] In one particular example, said GFR-binding compound is a peptide, a variant or analog thereof, or a peptidomimetic as defined herein, with (comprising, or exclusively consisting of, or constituted of) between 20 and 60 (in particular between 20 and 50, and more particularly, between 20 and 45) amino acids, comprising a peptide with four amino acids (PEP1) and a peptide with five amino acids (PEP2); wherein said GFR-binding compound further comprises a peptide with three amino acids (PEP3), an amino acid or a peptide with between two and seven amino acids (PEP7), and a peptide with three amino acids (PEP4).

[0309] In one particular example, said GFR-binding compound is a peptide, a variant or analog thereof, or a peptidomimetic as defined herein, with (comprising, or exclusively consisting of, or constituted of) between 20 and 60 (in particular between 20 and 50, and more particularly, between 20 and 45) amino acids, comprising a peptide with four amino acids (PEP12) and a peptide with five amino acids (PEP2); wherein said GFR-binding compound further comprises a peptide with three amino acids (PEP3), an amino acid or a peptide with between two and seven amino acids (PEP7), and a peptide with three amino acids (PEP4).

[0310] In one particular example, said GFR-binding compound is a peptide, a variant or analog thereof, or a peptidomimetic as defined herein, with (comprising, or exclusively consisting of, or constituted of) between 20 and 60 (in particular between 20 and 50, and more particularly, between 20 and 45) amino acids, comprising a peptide with four amino acids (PEP1) and a peptide with five amino acids (PEP2); wherein said GFR-binding compound further comprises a peptide with three amino acids (PEP3), an amino acid or a peptide with between two and seven amino acids (PEP7), and a peptide with between five and seven amino acids (PEP6).

[0311] In one particular example, said GFR-binding compound is a peptide, a variant or analog thereof, or a peptidomimetic as defined herein, with (comprising, or exclusively consisting of, or constituted of) between 20 and 60 (in particular between 20 and 50, and more particularly, between 20 and 45) amino acids, comprising a peptide with four amino acids (PEP12) and a peptide with five amino acids (PEP2); wherein said GFR-binding compound further comprises a peptide with three amino acids (PEP3), an amino acid or a peptide with between two and seven amino acids (PEP7), and a peptide with between five and seven amino acids (PEP6).

[0312] In one particular example, said GFR-binding compound is a peptide, a variant or analog thereof, or a peptidomimetic as defined herein, with (comprising, or exclusively consisting of, or constituted of) between 20 and 60 (in particular between 20 and 50, and more particularly, between 20 and 45) amino acids, comprising a peptide with four amino acids (PEP1) and a peptide with five amino acids (PEP2); wherein said GFR-binding compound further comprises a peptide with three amino acids (PEP3), an amino acid or a peptide with between two and seven amino acids (PEP7), and a peptide with between six and eleven amino acids (PEP10).

[0313] In one particular example, said GFR-binding compound is a peptide, a variant or analog thereof, or a peptidomimetic as defined herein, with (comprising, or exclusively consisting of, or constituted of) between 20 and 60 (in particular between 20 and 50, and more particularly, between 20 and 45) amino acids, comprising a peptide with four amino acids (PEP12) and a peptide with five amino acids (PEP2); wherein said GFR-binding compound further comprises a peptide with three amino acids (PEP3), an amino acid or a peptide with between two and seven amino acids (PEP7), and a peptide with between six and eleven amino acids (PEP10).

[0314] In one particular example, said GFR-binding compound is a peptide, a variant or analog thereof, or a peptidomimetic as defined herein, with (comprising, or exclusively consisting of, or constituted of) between 20 and 60 (in particular between 20 and 50, and more particularly, between 20 and 45) amino acids, comprising a peptide with four amino acids (PEP1) and a peptide with five amino acids (PEP2); wherein said GFR-binding compound further comprises a peptide with three amino acids (PEP3), an amino acid or a peptide with between two and seven amino acids (PEP7), a peptide with three amino acids (PEP4), and an amino acid or a peptide with between two and six amino acids (PEP8).

[0315] In one particular example, said GFR-binding compound is a peptide, a variant or analog thereof, or a peptidomimetic as defined herein, with (comprising, or exclusively consisting of, or constituted of) between 20 and 60 (in particular between 20 and 50, and more particularly, between 20 and 45) amino acids, comprising a peptide with four amino acids (PEP12) and a peptide with five amino acids (PEP2); wherein said GFR-binding compound further comprises a peptide with three amino acids (PEP3), an amino acid or a peptide with between two and seven amino acids (PEP7), a peptide with three amino acids (PEP4), and an amino acid or a peptide with between two and six amino acids (PEP8).

[0316] In one particular example, said GFR-binding compound is a peptide, a variant or analog thereof, or a peptidomimetic as defined herein, with (comprising, or exclusively consisting of, or constituted of) between 20 and 60 (in particular between 20 and 50, and more particularly, between 20 and 45) amino acids, comprising a peptide with four amino acids (PEP1) and a peptide with five amino acids (PEP2); wherein said GFR-binding compound further comprises a peptide with three amino acids (PEP3), an amino acid or a peptide with between two and seven amino acids (PEP7), a peptide with between five and seven amino acids (PEP6), and an amino acid or a peptide with between two and six amino acids (PEP8).

[0317] In one particular example, said GFR-binding compound is a peptide, a variant or analog thereof, or a peptidomimetic as defined herein, with (comprising, or exclusively consisting of, or constituted of) between 20 and 60 (in particular between 20 and 50, and more particularly, between 20 and 45) amino acids, comprising a peptide with four amino acids (PEP12) and a peptide with five amino acids (PEP2); wherein said GFR-binding compound further comprises a peptide with three amino acids (PEP3), an amino acid or a peptide with between two and seven amino acids (PEP7), a peptide with between five and seven amino acids (PEP6), and an amino acid or a peptide with between two and six amino acids (PEP8).

[0318] In one particular example, said GFR-binding compound is a peptide, a variant or analog thereof, or a peptidomimetic as defined herein, with (comprising, or exclusively consisting of, or constituted of) between 20 and 60 (in particular between 20 and 50, and more particularly, between 20 and 45) amino acids, comprising a peptide with four amino acids (PEP1) and a peptide with five amino acids (PEP2); wherein said GFR-binding compound further comprises a peptide with five amino acids (PEP5), an amino acid or a peptide with between two and seven amino acids (PEP7), and a peptide with three amino acids (PEP4).

[0319] In one particular example, said GFR-binding compound is a peptide, a variant or analog thereof, or a peptidomimetic as defined herein, with (comprising, or exclusively consisting of, or constituted of) between 20 and 60 (in particular between 20 and 50, and more particularly, between 20 and 45) amino acids, comprising a peptide with four amino acids (PEP12) and a peptide with five amino acids (PEP2); wherein said GFR-binding compound further comprises a peptide with five amino acids (PEP5), an amino acid or a peptide with between two and seven amino acids (PEP7), and a peptide with three amino acids (PEP4).

[0320] In one particular example, said GFR-binding compound is a peptide, a variant or analog thereof, or a peptidomimetic as defined herein, with (comprising, or exclusively consisting of, or constituted of) between 20 and 60 (in particular between 20 and 50, and more particularly, between 20 and 45) amino acids, comprising a peptide with four amino acids (PEP1) and a peptide with five amino acids (PEP2); wherein said GFR-binding compound further comprises a peptide with five amino acids (PEP5), an amino acid or a peptide with between two and seven amino acids (PEP7), and a peptide with between five and seven amino acids (PEP6).

[0321] In one particular example, said GFR-binding compound is a peptide, a variant or analog thereof, or a peptidomimetic as defined herein, with (comprising, or exclusively consisting of, or constituted of) between 20 and 60 (in particular between 20 and 50, and more particularly, between 20 and 45) amino acids, comprising a peptide with four amino acids (PEP12) and a peptide with five amino acids (PEP2); wherein said GFR-binding compound further comprises a peptide with five amino acids (PEP5), an amino acid or a peptide with between two and seven amino acids (PEP7), and a peptide with between five and seven amino acids (PEP6).

[0322] In one particular example, said GFR-binding compound is a peptide, a variant or analog thereof, or a peptidomimetic as defined herein, with (comprising, or exclusively consisting of, or constituted of) between 20 and 60 (in particular between 20 and 50, and more particularly, between 20 and 45) amino acids, comprising a peptide with four amino acids (PEP1) and a peptide with five amino acids (PEP2); wherein said GFR-binding compound further comprises a peptide with five amino acids (PEP5), an amino acid or a peptide with between two and seven amino acids (PEP7), and a peptide with between six and eleven amino acids (PEP10).

[0323] In one particular example, said GFR-binding compound is a peptide, a variant or analog thereof, or a peptidomimetic as defined herein, with (comprising, or exclusively consisting of, or constituted of) between 20 and 60 (in particular between 20 and 50, and more particularly, between 20 and 45) amino acids, comprising a peptide with four amino acids (PEP12) and a peptide with five amino acids (PEP2); wherein said GFR-binding compound further comprises a peptide with five amino acids (PEP5), an amino acid or a peptide with between two and seven amino acids (PEP7), and a peptide with between six and eleven amino acids (PEP10).

[0324] In one particular example, said GFR-binding compound is a peptide, a variant or analog thereof, or a peptidomimetic as defined herein, with (comprising, or exclusively consisting of, or constituted of) between 20 and 60 (in particular between 20 and 50, and more particularly, between 20 and 45) amino acids, comprising a peptide with four amino acids (PEP1) and a peptide with five amino acids (PEP2); wherein said GFR-binding compound further comprises a peptide with five amino acids (PEP5), an amino acid or a peptide with between two and seven amino acids (PEP7), a peptide with three amino acids (PEP4), and an amino acid or a peptide with between two and six amino acids (PEP8).

[0325] In one particular example, said GFR-binding compound is a peptide, a variant or analog thereof, or a peptidomimetic as defined herein, with (comprising, or exclusively consisting of, or constituted of) between 20 and 60 (in particular between 20 and 50, and more particularly, between 20 and 45) amino acids, comprising a peptide with four amino acids (PEP12) and a peptide with five amino acids (PEP2); wherein said GFR-binding compound further comprises a peptide with five amino acids (PEP5), an amino acid or a peptide with between two and seven amino acids (PEP7), a peptide with three amino acids (PEP4), and an amino acid or a peptide with between two and six amino acids (PEP8).

[0326] In one particular example, said GFR-binding compound is a peptide, a variant or analog thereof, or a peptidomimetic as defined herein, with (comprising, or exclusively consisting of, or constituted of) between 20 and 60 (in particular between 20 and 50, and more particularly, between 20 and 45) amino acids, comprising a peptide with four amino acids (PEP1) and a peptide with five amino acids (PEP2); wherein said GFR-binding compound further comprises a peptide with five amino acids (PEP5), an amino acid or a peptide with between two and seven amino acids (PEP7), a peptide with between five and seven amino acids (PEP6), and an amino acid or a peptide with between two and six amino acids (PEP8).

[0327] In one particular example, said GFR-binding compound is a peptide, a variant or analog thereof, or a peptidomimetic as defined herein, with (comprising, or exclusively consisting of, or constituted of) between 20 and 60 (in particular between 20 and 50, and more particularly, between 20 and 45) amino acids, comprising a peptide with four amino acids (PEP12) and a peptide with five amino acids (PEP2); wherein said GFR-binding compound further comprises a peptide with five amino acids (PEP5), an amino acid or a peptide with between two and seven amino acids (PEP7), a peptide with between five and seven amino acids (PEP6), and an amino acid or a peptide with between two and six amino acids (PEP8).

[0328] In one particular example, said GFR-binding compound is a peptide, a variant or analog thereof, or a peptidomimetic as defined herein, with (comprising, or exclusively consisting of, or constituted of) between 20 and 60 (in particular between 20 and 50, and more particularly, between 20 and 45) amino acids, comprising a peptide with four amino acids (PEP1) and a peptide with five amino acids (PEP2); wherein said GFR-binding compound further comprises a peptide with between six and twelve amino acids (PEP9), a peptide with three amino acids (PEP4), and an amino acid or a peptide with between two and six amino acids (PEP8).

[0329] In one particular example, said GFR-binding compound is a peptide, a variant or analog thereof, or a peptidomimetic as defined herein, with (comprising, or exclusively consisting of, or constituted of) between 20 and 60 (in particular between 20 and 50, and more particularly, between 20 and 45) amino acids, comprising a peptide with four amino acids (PEP12) and a peptide with five amino acids (PEP2); wherein said GFR-binding compound further comprises a peptide with between six and twelve amino acids (PEP9), a peptide with three amino acids (PEP4), and an amino acid or a peptide with between two and six amino acids (PEP8).

[0330] In one particular example, said GFR-binding compound is a peptide, a variant or analog thereof, or a peptidomimetic as defined herein, with (comprising, or exclusively consisting of, or constituted of) between 20 and 60 (in particular between 20 and 50, and more particularly, between 20 and 45) amino acids, comprising a peptide with four amino acids (PEP1) and a peptide with five amino acids (PEP2); wherein said GFR-binding compound further comprises a peptide with between six and twelve amino acids (PEP9), a peptide with between five and seven amino acids (PEP6), and an amino acid or a peptide with between two and six amino acids (PEP8).

[0331] In one particular example, said GFR-binding compound is a peptide, a variant or analog thereof, or a peptidomimetic as defined herein, with (comprising, or exclusively consisting of, or constituted of) between 20 and 60 (in particular between 20 and 50, and more particularly, between 20 and 45) amino acids, comprising a peptide with four amino acids (PEP12) and a peptide with five amino acids (PEP2); wherein said GFR-binding compound further comprises a peptide with between six and twelve amino acids (PEP9), a peptide with between five and seven amino acids (PEP6), and an amino acid or a peptide with between two and six amino acids (PEP8).

[0332] In one particular example, said GFR-binding compound is a peptide, a variant or analog thereof, or a peptidomimetic as defined herein, with (comprising, or exclusively consisting of, or constituted of) between 20 and 60 (in particular between 20 and 50, and more particularly, between 20 and 45) amino acids, having the following general formula (Ia) (hereinafter may also be referred to as compound (Ia) or peptide (I)):

PEP(A)-LINKER-PEP(B) (Ia)

[0333] wherein one end of LINKER interacts covalently with one end of PEP(A); wherein another end of LINKER interacts covalently with one end of PEP(B); wherein PEP(A) comprises PEP1; wherein PEP(B) comprises PEP2; wherein LINKER is a linear or branched organic divalent radical, moiety or compound having a molecular weight (Mw) comprised between about 28 and about 2,000 Da, in particular, between about 300 and about 1000 Da.

[0334] In the present description, the molecular weight of LINKER refer to the calculated molecular weight prior to being connected to/reacted with any of the elements it is configured to connect to or react with e.g. PEP(A), PEP(B) or any other groups defined herein.

[0335] In one particular example, said GFR-binding compound is a peptide, a variant or analog thereof, or a peptidomimetic as defined herein, with (comprising, or exclusively consisting of, or constituted of) between 20 and 60 (in particular between 20 and 50, and more particularly, between 20 and 45) amino acids, having the following general formula (Ia) (hereinafter may also be referred to as compound (Ia) or peptide (Ia)):

PEP(A)-LINKER-PEP(B) (Ia)

[0336] wherein one end of LINKER interacts covalently with one end of PEP(A); wherein another end of LINKER interacts covalently with one end of PEP(B); wherein PEP(A) comprises PEP12; wherein PEP(B) comprises PEP2; wherein LINKER is a linear or branched organic divalent radical, moiety or compound having a molecular weight (Mw) comprised between about 28 and about 2,000 Da, in particular, between about 300 and about 1000 Da.

[0337] In one aspect, the present disclosure provides a GFR-binding compound of general formula (Ia), wherein PEP(A) comprises PEP1; wherein PEP(B) comprises PEP2; wherein PEP(A) further comprises PEP3; wherein PEP(B) further comprises PEP4.

[0338] In one aspect, the present disclosure provides a GFR-binding compound of general formula (Ia), wherein PEP(A) comprises PEP12; wherein PEP(B) comprises PEP2; wherein PEP(A) further comprises PEP3; wherein PEP(B) further comprises PEP4.

[0339] In one aspect, the present disclosure provides a GFR-binding compound of general formula (Ia), wherein PEP(A) comprises PEP1; wherein PEP(B) comprises PEP2; wherein PEP(A) further comprises PEP5; wherein PEP(B) further comprises PEP6.

[0340] In one aspect, the present disclosure provides a GFR-binding compound of general formula (Ia), wherein PEP(A) comprises PEP12; wherein PEP(B) comprises PEP2; wherein PEP(A) further comprises PEP5; wherein PEP(B) further comprises PEP6.

[0341] In one aspect, the present disclosure provides a GFR-binding compound of general formula (Ia), wherein PEP(A) comprises PEP1; wherein PEP(B) comprises PEP2; wherein PEP(A) further comprises PEP9; wherein PEP(B) further comprises PEP10.

[0342] In one aspect, the present disclosure provides a GFR-binding compound of general formula (Ia), wherein PEP(A) comprises PEP12; wherein PEP(B) comprises PEP2; wherein PEP(A) further comprises PEP9; wherein PEP(B) further comprises PEP10.

[0343] In one aspect, the present disclosure provides a GFR-binding compound of general formula (Ia), wherein PEP(A) comprises PEP1; wherein PEP(B) comprises PEP2; wherein PEP(A) further comprises PEP3; wherein PEP(B) further comprises PEP6.

[0344] In one aspect, the present disclosure provides a GFR-binding compound of general formula (Ia), wherein PEP(A) comprises PEP12; wherein PEP(B) comprises PEP2; wherein PEP(A) further comprises PEP3; wherein PEP(B) further comprises PEP6.

[0345] In one aspect, the present disclosure provides a GFR-binding compound of general formula (Ia), wherein PEP(A) comprises PEP1; wherein PEP(B) comprises PEP2; wherein PEP(A) further comprises PEP3; wherein PEP(B) further comprises PEP10.

[0346] In one aspect, the present disclosure provides a GFR-binding compound of general formula (Ia), wherein PEP(A) comprises PEP12; wherein PEP(B) comprises PEP2; wherein PEP(A) further comprises PEP3; wherein PEP(B) further comprises PEP10.

[0347] In one aspect, the present disclosure provides a GFR-binding compound of general formula (Ia), wherein PEP(A) comprises PEP1; wherein PEP(B) comprises PEP2; wherein PEP(A) further comprises PEP5; wherein PEP(B) further comprises PEP4.

[0348] In one aspect, the present disclosure provides a GFR-binding compound of general formula (Ia), wherein PEP(A) comprises PEP12; wherein PEP(B) comprises PEP2; wherein PEP(A) further comprises PEP5; wherein PEP(B) further comprises PEP4.

[0349] In one aspect, the present disclosure provides a GFR-binding compound of general formula (Ia), wherein PEP(A) comprises PEP1; wherein PEP(B) comprises PEP2; wherein PEP(A) further comprises PEP9; wherein PEP(B) further comprises PEP4.

[0350] In one aspect, the present disclosure provides a GFR-binding compound of general formula (Ia), wherein PEP(A) comprises PEP12; wherein PEP(B) comprises PEP2; wherein PEP(A) further comprises PEP9; wherein PEP(B) further comprises PEP4.

[0351] In one aspect, the present disclosure provides a GFR-binding compound of general formula (Ia), wherein PEP(A) comprises PEP1; wherein PEP(B) comprises PEP2; wherein PEP(A) further comprises PEP5; wherein PEP(B) further comprises PEP10.

[0352] In one aspect, the present disclosure provides a GFR-binding compound of general formula (Ia), wherein PEP(A) comprises PEP12; wherein PEP(B) comprises PEP2; wherein PEP(A) further comprises PEP5; wherein PEP(B) further comprises PEP10.

[0353] In one aspect, the present disclosure provides a GFR-binding compound of general formula (Ia), wherein PEP(A) comprises PEP1; wherein PEP(B) comprises PEP2; wherein PEP(A) further comprises PEP9; wherein PEP(B) further comprises PEP6.

[0354] In one aspect, the present disclosure provides a GFR-binding compound of general formula (Ia), wherein PEP(A) comprises PEP12; wherein PEP(B) comprises PEP2; wherein PEP(A) further comprises PEP9; wherein PEP(B) further comprises PEP6.

[0355] In one aspect, the present disclosure provides a GFR-binding compound of general formula (Ia), wherein PEP(A) comprises PEP1; wherein PEP(B) comprises PEP2; wherein PEP(A) further comprises PEP3 and PEP7; wherein PEP(B) further comprises PEP4.

[0356] In one aspect, the present disclosure provides a GFR-binding compound of general formula (Ia), wherein PEP(A) comprises PEP12; wherein PEP(B) comprises PEP2; wherein PEP(A) further comprises PEP3 and PEP7; wherein PEP(B) further comprises PEP4.

[0357] In one aspect, the present disclosure provides a GFR-binding compound of general formula (Ia), wherein PEP(A) comprises PEP1; wherein PEP(B) comprises PEP2; wherein PEP(A) further comprises PEP3 and PEP7; wherein PEP(B) further comprises PEP6.

[0358] In one aspect, the present disclosure provides a GFR-binding compound of general formula (Ia), wherein PEP(A) comprises PEP12; wherein PEP(B) comprises PEP2; wherein PEP(A) further comprises PEP3 and PEP7; wherein PEP(B) further comprises PEP6.

[0359] In one aspect, the present disclosure provides a GFR-binding compound of general formula (Ia), wherein PEP(A) comprises PEP1; wherein PEP(B) comprises PEP2; wherein PEP(A) further comprises PEP3 and PEP7; wherein PEP(B) further comprises PEP10.

[0360] In one aspect, the present disclosure provides a GFR-binding compound of general formula (Ia), wherein PEP(A) comprises PEP12; wherein PEP(B) comprises PEP2; wherein PEP(A) further comprises PEP3 and PEP7; wherein PEP(B) further comprises PEP10.

[0361] In one aspect, the present disclosure provides a GFR-binding compound of general formula (Ia), wherein PEP(A) comprises PEP1; wherein PEP(B) comprises PEP2; wherein PEP(A) further comprises PEP7; wherein PEP(B) further comprises PEP4 and PEP8.

[0362] In one aspect, the present disclosure provides a GFR-binding compound of general formula (Ia), wherein PEP(A) comprises PEP12; wherein PEP(B) comprises PEP2; wherein PEP(A) further comprises PEP7; wherein PEP(B) further comprises PEP4 and PEP8.

[0363] In one aspect, the present disclosure provides a GFR-binding compound of general formula (Ia), wherein PEP(A) comprises PEP1; wherein PEP(B) comprises PEP2; wherein PEP(A) further comprises PEP7; wherein PEP(B) further comprises PEP6 and PEP8.

[0364] In one aspect, the present disclosure provides a GFR-binding compound of general formula (Ia), wherein PEP(A) comprises PEP12; wherein PEP(B) comprises PEP2; wherein PEP(A) further comprises PEP7; wherein PEP(B) further comprises PEP6 and PEP8.

[0365] In one aspect, the present disclosure provides a GFR-binding compound of general formula (Ia), wherein PEP(A) comprises PEP1; wherein PEP(B) comprises PEP2; wherein PEP(A) further comprises PEP5 and PEP7; wherein PEP(B) further comprises PEP4.

[0366] In one aspect, the present disclosure provides a GFR-binding compound of general formula (Ia), wherein PEP(A) comprises PEP12; wherein PEP(B) comprises PEP2; wherein PEP(A) further comprises PEP5 and PEP7; wherein PEP(B) further comprises PEP4.

[0367] In one aspect, the present disclosure provides a GFR-binding compound of general formula (Ia), wherein PEP(A) comprises PEP1; wherein PEP(B) comprises PEP2; wherein PEP(A) further comprises PEP5 and PEP7; wherein PEP(B) further comprises PEP6.

[0368] In one aspect, the present disclosure provides a GFR-binding compound of general formula (Ia), wherein PEP(A) comprises PEP12; wherein PEP(B) comprises PEP2; wherein PEP(A) further comprises PEP5 and PEP7; wherein PEP(B) further comprises PEP6.

[0369] In one aspect, the present disclosure provides a GFR-binding compound of general formula (Ia), wherein PEP(A) comprises PEP1; wherein PEP(B) comprises PEP2; wherein PEP(A) further comprises PEP5 and PEP7; wherein PEP(B) further comprises PEP10.

[0370] In one aspect, the present disclosure provides a GFR-binding compound of general formula (Ia), wherein PEP(A) comprises PEP12; wherein PEP(B) comprises PEP2; wherein PEP(A) further comprises PEP5 and PEP7; wherein PEP(B) further comprises PEP10.

[0371] In one aspect, the present disclosure provides a GFR-binding compound of general formula (Ia), wherein PEP(A) comprises PEP1; wherein PEP(B) comprises PEP2; wherein PEP(A) further comprises PEP5 and PEP7; wherein PEP(B) further comprises PEP4 and PEP8.

[0372] In one aspect, the present disclosure provides a GFR-binding compound of general formula (Ia), wherein PEP(A) comprises PEP12; wherein PEP(B) comprises PEP2; wherein PEP(A) further comprises PEP5 and PEP7; wherein PEP(B) further comprises PEP4 and PEP8.

[0373] In one aspect, the present disclosure provides a GFR-binding compound of general formula (Ia), wherein PEP(A) comprises PEP1; wherein PEP(B) comprises PEP2; wherein PEP(A) further comprises PEP5 and PEP7; wherein PEP(B) further comprises PEP6 and PEP8.

[0374] In one aspect, the present disclosure provides a GFR-binding compound of general formula (Ia), wherein PEP(A) comprises PEP12; wherein PEP(B) comprises PEP2; wherein PEP(A) further comprises PEP5 and PEP7; wherein PEP(B) further comprises PEP6 and PEP8.

[0375] In one aspect, the present disclosure provides a GFR-binding compound of general formula (Ia), wherein PEP(A) comprises PEP1; wherein PEP(B) comprises PEP2; wherein PEP(A) further comprises PEP9; wherein PEP(B) further comprises PEP4 and PEP8.

[0376] In one aspect, the present disclosure provides a GFR-binding compound of general formula (Ia), wherein PEP(A) comprises PEP12; wherein PEP(B) comprises PEP2; wherein PEP(A) further comprises PEP9; wherein PEP(B) further comprises PEP4 and PEP8.

[0377] In one aspect, the present disclosure provides a GFR-binding compound of general formula (Ia), wherein PEP(A) comprises PEP1; wherein PEP(B) comprises PEP2; wherein PEP(A) further comprises PEP9; wherein PEP(B) further comprises PEP6 and PEP8.

[0378] In one aspect, the present disclosure provides a GFR-binding compound of general formula (Ia), wherein PEP(A) comprises PEP12; wherein PEP(B) comprises PEP2; wherein PEP(A) further comprises PEP9; wherein PEP(B) further comprises PEP6 and PEP8.

[0379] In one particular example, said GFR-binding compound is a peptide, a variant or analog thereof, or a peptidomimetic as defined herein, with (comprising, or exclusively consisting of, or constituted of) between 20 and 60 (in particular between 20 and 50, and more particularly, between 20 and 45) amino acids, having the following general formula (IIa) (hereinafter may also be referred to as compound (IIa) or peptide (IIa)):

PEP(C)-PEP12-LINKER-PEP2-PEP(D) (IIa)

[0380] wherein LINKER is a linear or branched organic divalent radical, moiety or compound having a molecular weight (Mw) comprised between about 28 and about 2,000 Da, in particular, between about 300 and about 1000 Da; wherein PEP12 is a peptide with 8 amino acids of formula PEP1-AA¹⁷-PEP11 as defined herein; wherein PEP2 is a peptide with five amino acids as already defined herein; wherein one end of PEP(C) interacts covalently with PEP12 via one end of PEP1; wherein one end of PEP(D) interacts covalently with one end of PEP2; wherein one end of LINKER interacts covalently with one end of PEP12 via one end of PEP11; wherein another end of LINKER interacts covalently with another end of PEP2; wherein PEP(C) is a peptide with at least 5 amino acids, in particular a peptide with between 5 and 12 amino acids; wherein PEP(D) is a peptide with at least 5 amino acids, in particular a peptide with between 5 and 11 amino acids.

[0381] In one aspect, the present disclosure provides a GFR-binding compound of general formula (IIa), wherein PEP(C) comprises PEP3; wherein PEP(D) comprises PEP4.

[0382] In one aspect, the present disclosure provides a GFR-binding compound of general formula (IIa), wherein PEP(C) comprises PEP5; wherein PEP(D) comprises PEP6. In one particular example, PEP(C) is PEP5; and PEP(D) is PEP6.

[0383] In one aspect, the present disclosure provides a GFR-binding compound of general formula (IIa), wherein PEP(C) comprises PEP9; wherein PEP(D) comprises PEP10. In one particular example, PEP(C) is PEP9; and PEP(D) is PEP10.

[0384] In one aspect, the present disclosure provides a GFR-binding compound of general formula (IIa), wherein PEP(C) comprises PEP3; wherein PEP(D) comprises PEP6. In one particular example, PEP(C) comprises PEP3 and PEP(D) is PEP6.

[0385] In one aspect, the present disclosure provides a GFR-binding compound of general formula (IIa), wherein PEP(C) comprises PEP3; wherein PEP(D) comprises PEP10. In one particular example, PEP(C) comprises PEP3 and PEP(D) is PEP10.

[0386] In one aspect, the present disclosure provides a GFR-binding compound of general formula (IIa), wherein PEP(C) comprises PEP5; wherein PEP(D) comprises PEP4. In one particular example, PEP(C) is PEP5 and PEP(D) comprises PEP4.

[0387] In one aspect, the present disclosure provides a GFR-binding compound of general formula (IIa), wherein PEP(C) comprises PEP9; wherein PEP(D) comprises PEP4. In one particular example, PEP(C) is PEP9 and PEP(D) comprises PEP4.

[0388] In one aspect, the present disclosure provides a GFR-binding compound of general formula (IIa), wherein PEP(C) comprises PEP5; wherein PEP(D) comprises PEP10. In one particular example, PEP(C) is PEP5 and PEP(D) is PEP10.

[0389] In one aspect, the present disclosure provides a GFR-binding compound of general formula (IIa), wherein PEP(C) comprises PEP9; wherein PEP(D) comprises PEP6. In one particular example, PEP(C) is PEP9 and PEP(D) is PEP6.

[0390] In one aspect, the present disclosure provides a GFR-binding compound of general formula (IIa), wherein PEP(C) comprises PEP3 and PEP7; wherein PEP(D) comprises PEP4.

[0391] In one aspect, the present disclosure provides a GFR-binding compound of general formula (IIa), wherein PEP(C) comprises PEP3 and PEP7; wherein PEP(D) comprises PEP6. In one particular example, PEP(C) comprises PEP3 and PEP7, and PEP(D) is PEP6.

[0392] In one aspect, the present disclosure provides a GFR-binding compound of general formula (IIa), wherein PEP(C) comprises PEP3 and PEP7; wherein PEP(D) comprises PEP10. In one particular example, PEP(C) comprises PEP3 and PEP7, and PEP(D) is PEP10.

[0393] In one aspect, the present disclosure provides a GFR-binding compound of general formula (IIa), wherein PEP(C) comprises PEP7; wherein PEP(D) comprises PEP4 and PEP8.

[0394] In one aspect, the present disclosure provides a GFR-binding compound of general formula (IIa), wherein PEP(C) comprises PEP7; wherein PEP(D) comprises PEP6 and PEP8.

[0395] In one aspect, the present disclosure provides a GFR-binding compound of general formula (IIa), wherein PEP(C) comprises PEP5 and PEP7; wherein PEP(D) comprises PEP4.

[0396] In one aspect, the present disclosure provides a GFR-binding compound of general formula (IIa), wherein PEP(C) comprises PEP5 and PEP7; wherein PEP(D) comprises PEP6.

[0397] In one aspect, the present disclosure provides a GFR-binding compound of general formula (IIa), wherein PEP(C) comprises PEP5 and PEP7; wherein PEP(D) comprises PEP10.

[0398] In one aspect, the present disclosure provides a GFR-binding compound of general formula (IIa), wherein PEP(C) comprises PEP5 and PEP7; wherein PEP(D) comprises PEP4 and PEP8.

[0399] In one aspect, the present disclosure provides a GFR-binding compound of general formula (IIa), wherein PEP(C) comprises PEP5 and PEP7; wherein PEP(D) comprises PEP6 and PEP8.

[0400] In one aspect, the present disclosure provides a GFR-binding compound of general formula (IIa), wherein PEP(C) comprises PEP9; wherein PEP(D) comprises PEP4 and PEP8.

[0401] In one aspect, the present disclosure provides a GFR-binding compound of general formula (IIa), wherein PEP(C) comprises PEP9; wherein PEP(D) comprises PEP6 and PEP8.

[0402] In one aspect, the present disclosure provides a GFR-binding compound of general formula (IIa), wherein PEP(C) is PEP5 or PEP9 and wherein PEP(D) is PEP6 or PEP10.

[0403] In one particular example, said GFR-binding compound is a peptide, a variant or analog thereof, or a peptidomimetic as defined herein, with (comprising, or exclusively consisting of, or constituted of) between 20 and 60 (in particular between 20 and 50, and more particularly, between 20 and 45) amino acids, having the following general formula (IIIa) (hereinafter may also be referred to as compound (IIIa) or peptide (IIIa)):

PEP7-PEP5-PEP12-LINKER-PEP2-PEP6-PEP8 (IIIa)

[0404] wherein LINKER is a linear or branched organic divalent radical, moiety or compound having a molecular weight (Mw) comprised between about 28 and about 2,000 Da, in particular, between about 300 and about 1000 Da; wherein PEP12 is a peptide with 8 amino acids of formula PEP1-AA¹⁷-PEP11 as defined herein; wherein PEP2 is a peptide with five amino acids as already defined herein; wherein PEP5 is a peptide with five amino acids as already defined herein; wherein PEP6 is a peptide with between five and seven amino acids as already defined herein; wherein PEP7 an amino acid or a peptide with between two and seven amino acids as already defined herein; wherein PEP8 an amino acid or a peptide with between two and six amino acids as already defined herein; wherein one end of LINKER interacts covalently with one end of PEP12 via AA²⁰; wherein another end of LINKER interacts covalently with one end of PEP2 via AA²¹; wherein one end of PEP5 interacts covalently with another end of PEP12 via AA¹² wherein another end of PEP5 interacts covalently with one end of PEP7 via AA⁸; wherein one end of PEP6 interacts covalently with another end of PEP2 via AA²⁶; wherein another end of PEP6 interacts covalently with one end of PEP8 via AA³².

[0405] In one particular example, said GFR-binding compound is a peptide, a variant or analog thereof, or a peptidomimetic as defined herein, with (comprising, or exclusively consisting of, or constituted of) between 20 and 60 (in particular between 20 and 50, and more particularly, between 20 and 45) amino acids, having the following general formula (IVa) (hereinafter may also be referred to as compound (IVa) or peptide (IVa)):

AA¹-AA²-AA³-AA⁴-AA⁵-AA⁶-AA⁷-AA8-AA⁹-AA¹⁰-AA¹¹-AA¹²-
AA¹³-AA¹⁴-AA¹⁵-AA¹⁸-AA¹⁷-AA¹⁸-AA¹⁹-AA²⁰-LINKER-A^{A21}-
AA²²-AA²³-AA²⁴-AA²⁵-AA²⁸-AA²⁷-AA²⁸-AA²⁹-AA³⁰-AA³¹-
AA³²-AA³³-AA³⁴-AA³⁵-AA³⁶-AA³⁷-AA³⁸ (IVa)

[0406] wherein LINKER is a linear or branched organic divalent radical, moiety or compound having a molecular weight (Mw) comprised between about 28 and about 2,000 Da, in particular, between about 300 and about 1000 Da; wherein AA¹-AA²-AA³-AA⁴-AA⁵-AA⁶-AA⁷ is PEP7 as defined herein; wherein AA¹³-AA¹⁴-AA¹⁵-AA¹⁶-AA¹⁷-AA¹⁸-AA¹⁹-AA²⁰ is PEP12 as defined herein; wherein AA²¹-AA²²-AA²³-AA²⁴-AA²⁵ is PEP2 as already defined herein; wherein AA⁸-AA⁹-AA¹⁰ is PEP3 as defined herein; wherein AA³⁰-AA³¹-AA³² is PEP4 as defined herein; wherein AA³³-AA³⁴-AA³⁵-AA³⁶-AA³⁷-AA³⁸ is PEP8 as defined herein; wherein AA¹¹, AA¹², AA²⁶, AA²⁷, AA²⁸, and AA²⁹ are as defined herein; wherein one end of LINKER interacts covalently with AA²⁰; wherein another end of LINKER interacts covalently with AA²¹; wherein AA¹ and AA²¹ may be both N-terminal amino acids or both C-terminal amino acids; wherein AA³⁸ and AA²⁰ may be both N-terminal amino acids or both C-terminal amino acids.

[0407] In certain embodiments, PEP1 is selected from the group consisting of SAIS, SSLS, NAIS, SATS, SPIS, EPIS, SPIN, KPLS, EPLP, EPLT, SNIT, RSVK and RPVQ.

[0408] In certain embodiments, PEP2 is selected from the group consisting of LKNYQ, LKVYP, LKKYR, LRKHR, LKYHY, KFKYE, YGKIP, YKQYE, DHHKD, EQLSN, IGEMS, LGEMS, KEVQV and KKATV.

[0409] In certain embodiments, the pair PEP1:PEP2 is selected from the group consisting of SAIS:LKNYQ, SSLS:LKVYP, NAIS:LKKYR, SATS:LRKHR, SPIS:LKYHY, EPIS:KFKYE, SPIN:YGKIP, SPIS:YKQYE, KPLS:DHHKD, EPLP:EQLSN, EPLT:EQLSN, SNIT:IGEMS, SNIT:LGEMS, RSVK:KEVQV and RPVQ:KKATV.

[0410] In certain embodiments, PEP3 is selected from the group consisting of VPT, VPE, APT, TPT, VPA, APV, VPQ, VSQ, SRV and TQV.

[0411] In certain embodiments, PEP4 is selected from the group consisting of VVE, TVE, VVR, VVK, VAE, AVS, VVD, VEE, VRS, VKS, QHN, EHS, EEH and EDH.

[0412] In certain embodiments, PEP5 is a peptide of general formula PEP3-AA¹¹-AA¹²; wherein PEP3 is selected from the group consisting of VPT, VPE, APT, TPT, VPA, APV, VPQ, VSQ, SRV and TQV; wherein AA¹¹ is selected from the group consisting of E, K, Q, R, A, D, G and H; and wherein AA¹² is selected from the group consisting of L, M, T, E, Q and H. In one particular example, PEP5 is selected from the group consisting of VPTEL, VPEKM, APTKL, APTQL, VPTKL, TPTKM, VPARL, VPTRL, APVKT, VPQAL, VSQDL, VPQDL, VPTEE, VPTGQ, SRVHH and TQVQL.

[0413] In certain embodiments, PEP6 is a peptide of general formula AA²⁶-AA²⁷-AA²⁸-AA²⁹-PEP4; wherein PEP4 is selected from the group consisting of VVE, TVE, VVR, VVK, VAE, AVS, VVD, VEE, VRS, VKS, QHN, EHS, EEH and EDH; wherein AA²⁶ is absent or selected from the group consisting of AA^{III} amino acids, preferably is absent or is E; wherein AA²⁷ and AA²⁸ are independently selected from the group consisting of AA^{III} and AA^{V} amino acids; and wherein AA²⁹ is absent or selected from the group consisting of AA^{II} amino acids, preferably is absent or is S. In one particular example, PEP6 is selected from the group consisting of DMVVE, NMTVE, EMVVE, NMVVR, NMVVK, EGMSVAE, GMAVS, GMVVD, MIVEE, MIVRS, MIVKS, MVVKS, FLQHN, LEEHS, RLEEH and TLEDH.

[0414] In certain embodiments, PEP7 is an amino acid or a peptide with between two and seven amino acids of general formula AA¹-AA²-AA³-AA⁴-AA⁵-AA⁶-AA⁷; wherein wherein AA¹, AA², AA³, AA⁴, and AA⁵ are independently absent or AA^{I} as defined herein; wherein AA⁶ is absent or selected from the group consisting of S, T, C, E, Q, P and R; wherein AA⁷ is absent or is selected from the group consisting of S, T, C, E, Q, P and R, and wherein at least one of AA¹, AA², AA³, AA⁴, AA⁵, AA⁶ or AA⁷ is not absent. In one particular example, PEP7 is selected from the group consisting of KIPKAXX, GIPEPXX, SIPKAXX, HVTKPTX, YVPKPXX, TVPKPXX, AVPKAXX, KVGKAXX, KASKAXX, GSAGPXX, AAPASXX, STPPTXX, HVPKPXX, RVPSTXX, ASAAPXX, ASASPXX, NDEGLEX, SSVKXQP and RNVQXRP, wherein X is C or S throughout the present description.

[0415] In certain embodiments, PEP8 is an amino acid or a peptide with between two and six amino acids of general formula AA³³-AA³⁴-AA³⁵-AA³⁶-AA³⁷-AA³⁸; wherein AA³³ is absent or is selected from the group consisting of AA^{I} amino acids at the exception of AA^{VI} amino acids; AA³⁴ is absent or is selected from the group consisting of AA^{III} and AA^{IV} amino acids; wherein AA³⁵ is absent or is selected from the group consisting of AA^{II} amino acids, preferably is S or C; wherein AA³⁶ is absent or is selected from the group consisting of AA^{III} and AA^{IV} amino acids; wherein AA³⁷ is absent or is selected from the group consisting of AA^{II} amino acids, preferably is S or C; wherein AA³⁸ is absent or is selected from the group consisting of AA^{I}; and wherein at least one of AA³³, AA³⁴, AA³⁵, AA³⁶, AA³⁷ or AA³⁸ is not absent. In one particular example, PEP8 is selected from the group consisting of GXGXR, SXAXR, SXGXH, AXGXH, XGXR, EXGXR, RXGXS, AXGXR, SXGXR, XGXL, XKXS, KXEXR, QXEXR, LEXAXA and LAXKXE.

[0416] In certain embodiments, PEP9 is a peptide of general formula PEP7-PEP5; wherein PEP5 is a peptide of formula PEP3-AA¹¹-AA¹²; wherein PEP3 is selected from the group consisting of VPT, VPE, APT, TPT, VPA, APV, VPQ, VSQ, SRV and TQV; wherein AA¹¹ is selected from the group consisting of E, K, Q, R, A, D, G and H; and wherein AA¹² is selected from the group consisting of L, M, T, E, Q and H; wherein PEP7 is an amino acid or a peptide with between two and seven amino acids of general formula AA¹-AA²-AA³-AA⁴-AA⁵-AA⁶-AA⁷; wherein AA¹, AA², AA³, AA⁴, and AA⁵ are independently absent or AA^{I} as defined herein; wherein AA⁶ is absent or selected from the group consisting of S, T, C, E, Q, P and R; wherein AA⁷ is absent or is selected from the group consisting of S, T, C, E, Q, P and R. In one particular example, PEP9 is selected from the group consisting of KIPKAXXVPTEL, GIPEPXXVPEKM, SIPKAXXVPTEL, HVTKPTXAPTKL, YVPKPXXAPTKL, TVPKPXXAPTQL, AVPKAXXAPTKL, KVGKAXXVPTKL, KASKAXXVPTKL, GSAGPXXTPTKM, AAPASXXVPARL, STPPTXXVPTRL, HVPKPXXAPTKL, RVPSTXXAPVKT, ASAAPXXVPQAL, ASASPXXVSQDL, ASASPXXVPQDL, NDEGLEXVPTEE, NDEGLEXVPTGQ, SSVKXQPSRVHH and RNVQXRPTQVQL, wherein X is C or S throughout the present description.

[0417] In certain embodiments, PEP10 is a peptide of general formula PEP6-PEP8; wherein PEP6 is a peptide of formula AA²⁶-AA²⁷-AA²⁸-AA²⁹-PEP4; wherein PEP4 is selected from the group consisting of VVE, TVE, VVR, VVK, VAE, AVS, VVD, VEE, VRS, VKS, QHN, EHS, EEH and EDH; wherein AA²⁶ is absent or selected from the group consisting of AA^{III} amino acids, preferably is absent or is E; wherein AA²⁷ and AA²⁸ are independently selected from the group consisting of AA^{III} and AA^{V} amino acids; and wherein AA²⁹ is absent or selected from the group consisting of AA^{II} amino acids, preferably is absent or is S; wherein PEP8 is an amino acid or a peptide with between two and six amino acids of general formula AA³³-AA³⁴-AA³⁵-AA³⁶-AA³⁷-AA³⁸; AA³³ is absent or is selected from the group consisting of AA^{I} amino acids at the exception of AA^{VI} amino acids; AA³⁴ is absent or is selected from the group consisting of AA^{III} and AA^{IV} amino acids; wherein AA³⁵ is absent or is selected from the group consisting of AA^{II} amino acids, preferably is S or C; wherein AA³⁶ is absent or is selected from the group consisting of AA^{III} and AA^{IV} amino acids; wherein AA³⁷ is absent or is selected from the group consisting of AA^{II} amino acids, preferably is S or C; wherein AA³⁸ is absent or is selected from the group consisting of AA^{I}. In one particular example, PEP10 is selected from the group consisting of DMVVEGXGXR, NMTVESXAXR, EMVVEGXGXR, NMVVRSXGXH, NMVVRAXGXH, NMVVKAXGXH, EGMSVAEXGXR, GMAVSEXGXR, GMVVDRXGXS, DMVVEAXGXR, DMVVESXGXR, MIVEEXGXL, MIVRSXKXS, MIVKSXKXS, MVVKSXKXS, FLQHNKXEXR, LEEHSQXEXR, RLEEHLEXAXA and TLEDHLAXKXE.

[0418] In certain embodiments, PEP12 is a peptide of general formula PEP1-AA¹⁷-PEP11; wherein AA¹⁷ is selected from the group consisting of G, A, V, L, I, P, F, M, W, T and S (in particular is selected from the group consisting of M, I, L, V and T); wherein PEP1 is selected from the group consisting of SAIS, SSLS, NAIS, SATS, SPIS, EPIS, SPIN, KPLS, EPLP, EPLT, SNIT, RSVK and RPVQ.

[0419] In certain embodiments, the pair PEP12:PEP2 is selected from the group consisting of SAIS-AA¹⁷-LYL:LKNYQ, SSLS-AA¹⁷-LFF:LKVYP, NAIS-AA¹⁷-LYF:LKKYR, SATS-AA¹⁷-LYY:LRKHR, SPIS-AA¹⁷-LYK:LKYHY, EPIS-AA¹⁷-LYL:KFKYE, SPIN-AA¹⁷-LYF:YGKIP, SPIS-AA¹⁷-LYI:YKQYE, SPIS-AA¹⁷-LFI:YKQYE, KPLS-AA¹⁷-LYV:DHHKD, EPLP-AA¹⁷-VYY:EQLSN, EPLT-AA¹⁷-LYY:EQLSN, SNIT-AA¹⁷-QIM:IGEMS, SNIT-AA¹⁷-QIM:LGEMS, RSVK-AA¹⁷-AKV:KEVQV and RPVQ-AA¹⁷-RKI:KKATV; wherein AA¹⁷ is selected from the group consisting of G, A, V, L, I, P, F, M, W, T and S (in particular is selected from the group consisting of M, I, L, V and T).

[0420] In certain embodiments, PEP11 is a peptide with 3 amino acids of general formula AA¹⁸-AA¹⁹-AA²⁰ wherein AA¹⁸ is selected from the group consisting of L, V, Q, A and R; wherein AA¹⁹ is selected from the group consisting of F, W, H, Y, I and K; wherein AA²⁰ is selected from the group consisting of L, F, Y, K, I, V and M. In one particular example, PEP11 is selected from the group consisting of LYL, LFF, LYF, LYY, LYK, LYI, LFI, LYV, VYY, QIM, AKV and RKI.

[0421] In certain embodiments, PEP3 is selected from the group consisting of VPT, VPE, APT, TPT, VPA, APV, VPQ, VSQ, SRV and TQV; PEP4 is selected from the group consisting of VVE, TVE, VVR, VVK, VAE, AVS, VVD, VEE, VRS, VKS, QHN, EHS, EEH and EDH; and wherein the pair PEP3:PEP4 is selected from the group consisting of VPT:VVE, VPE:TVE, APT:VVR, APT:VVK, VPT:VAE, VPT:AVS, TPT:VVD, VPA:VVE, APV:VEE, VPQ:VRS, VSQ:VKS, VPQ:VKS, VPT:QHN, VPT:EHS, SRV:EEH and TQV:EDH.

[0422] In certain embodiments, PEP5 is selected from the group consisting of VPT-AA¹¹-AA¹², VPE-AA^{II}-AA¹²-AA¹¹-AA¹², APT-AA¹¹-AA¹², TPT-AA¹¹-AA¹², VPA-AA¹¹-AA¹², VPT-AA¹¹-AA¹², APV-AA¹¹-AA¹², VPQ-AA¹¹-AA¹², VSQ-AA¹¹-AA¹², VPQ-AA¹¹-AA¹², SRV-AA¹¹-AA¹² and TQV-AA¹¹-AA¹²; wherein AA¹ is selected from the group consisting of E, K, Q, R, A, D, G and H; and wherein AA¹² is selected from the group consisting of L, M, T, E, Q and H; PEP6 is selected from the group consisting of AA²⁶-AA²⁷-AA²⁸-AA²⁹-VVE, AA²⁶-AA²⁷-AA²⁸-AA²⁹-TVE, AA²⁶-AA²⁷-AA²⁸-AA²⁹-VVR, AA²⁶-AA²⁷-AA²⁸-AA²⁹-VVK, AA²⁶-AA²⁷-AA²⁸-AA²⁹-VAE, AA²⁶-AA²⁷-AA²⁸-AA²⁹-AVS, AA²⁶-AA²⁷-AA²⁸-AA²⁹-VVD, AA²⁶-AA²⁷-AA²⁸-AA²⁹-VEE, AA²⁶-AA²⁷-AA²⁸-AA²⁹-VRS, AA²⁶-AA²⁷-AA²⁸-AA²⁹-VKS, AA²⁶-AA²⁷-AA²⁸-AA²⁹-QHN, AA²⁶-AA²⁷-AA²⁸-AA²⁹-EHS, AA²⁶-AA²⁷-AA²⁸-AA²⁹-EEH and AA²⁶-AA²⁷-AA²⁸-AA²⁹-EDH; wherein AA²⁶ is absent or selected from the group consisting of AA^{III} amino acids, preferably is absent or is E; wherein AA²⁷ and AA²⁸ are independently selected from the group consisting of AA^{III} and AA^{V} amino acids; and wherein AA²⁹ is absent or selected from the group consisting of AA^{II} amino acids, preferably is absent or is S; wherein the pair PEP5:PEP6 is selected from the group consisting of VPT-AA¹¹-AA¹²:AA²⁶-AA²⁷-AA²⁸-AA²⁹-VVE, VPE-AA¹¹-AA¹²:AA²⁶-AA²⁷-AA²⁸-AA²⁹-TVE, APT-AA¹¹-AA¹²:AA²⁶-AA²⁷-AA²⁸-AA²⁹-VVR, APT-AA¹¹-AA¹²:AA²⁶-AA²⁷-AA²⁸-AA²⁹-VVK, VPT-AA¹¹-AA¹²:AA²⁶-AA²⁷-AA²⁸-AA²⁹-VAE, VPT-AA¹¹-AA¹²:AA²⁶-AA²⁷-AA²⁸-AA²⁹-AVS, TPT-AA¹¹-AA¹²:AA²⁶-AA²⁷-AA²⁸-AA²⁹-VVD, VPA-AA¹¹-AA¹²:AA²⁶-AA²⁷-AA²⁸-AA²⁹-VVE, APV-AA¹¹-AA¹²:AA²⁶-AA²⁷-AA²⁸-AA²⁹-VEE, VPQ-AA¹¹-AA¹²:AA²⁶-AA²⁷-AA²⁸-AA²⁹-VRS, VSQ-AAA-AA¹¹:AA¹²:AA²⁷-AA²⁸-AA²⁹-VKS, VPQ-AA¹¹-AA¹²:AA²⁶-AA²⁷-AA²⁸-AA²⁹-VKS, VPT-AA¹¹-AA¹²:AA²⁶:AA²⁷-AA²⁸-AA²⁹-QHN, VPT-AA¹¹-AA¹²:AA²⁶-AA²⁷-AA²⁸-AA²⁹-EHS, SRV-AA¹¹-AA¹²:AA²⁶-AA²⁷-AA²⁸-AA²⁹-EEH and TQV-AA¹¹-AA¹²:AA²⁶-AA²⁷-AA²⁸-AA²⁹-EDH.

[0423] In certain embodiments, PEP5 is selected from the group consisting of VPTEL, VPEKM, APTKL, APTQL, VPTKL, TPTKM, VPARL, VPTRL, APVKT, VPQAL, VSQDL, VPQDL, VPTEE, VPTGQ, SRVHH and TQVQL; PEP6 is selected from the group consisting of DMVVE, NMTVE, EMVVE, NMVVR, NMVVK, EGMSVAE, GMAVS, GMWD, MIVEE, MIVRS, MIVKS, MVVKS, FLQHN, LEEHS, RLEEH and TLEDH; and wherein the pair PEP5:PEP6 is selected from the group consisting of VPTEL:DMVVE, VPEKM:NMTVE, VPTEL:EMVVE, APTKL:NMVVR, APTQL:NMVVR, APTKL:NMVVK, VPTKL:EGMSVAE, VPTKL:GMAVS, TPTKM:GMVVD, VPARL:DMVVE, VPTRL:DMVVE, APVKT:MIVEE, VPQAL:MIVRS, VSQDL:MIVKS, VPQDL:MVVKS, VPTEE:FLQHN, VPTGQ:LEEHS, SRVHH:RLEEH and TQVQL:TLEDH.

[0424] In certain embodiments, PEP7 is selected from the group consisting of KIPKAXX, GIPEPXX, SIPKAXX, HVTKPTX, YVPKPXX, TVPKPXX, AVPKAXX, KVGKAXX, KASKAXX, GSAGPXX, AAPASXX, STPPTXX, HVPKPXX, RVPSTXX, ASAAPXX, ASASPXX, NDEGLEX, SSVKXQP and RNVQXRP; wherein PEP8 is selected from the group consisting of GXGXR, SXAXR, SXGXH, AXGXH, XGXR, EXGXR, RXGXS, AXGXR, SXGXR, XGXL, XKXS, KXEXR, QXEXR, LEXAXA and LAXKXE; and wherein the pair PEP7:PEP8 is selected from the group consisting of KIPKAXX:GXGXR, GIPEPXX:SXAXR, SIPKAXX:GXGXR, HVTKPTX:SXGXH, YVPKPXX:SXGXH, TVPKPXX:AXGXH, AVPKAXX:AXGXH, KVGKAXX:XGXR, KASKAXX:EXGXR, GSAGPXX:RXGXS, AAPASXX:AXGXR, STPPTXX:SXGXR, HVPKPXX:SXGXH, RVPSTXX:XGXL, ASAAPXX:XKXS, ASASPXX:XKXS, NDEGLEX:KXEXR, NDEGLEX:QXEXR, SSVKXQP:LEXAXA and RNVQXRP:LAXKXE.

[0425] In certain embodiments, PEP9 is selected from the group consisting of KIPKAXXVPT-AA¹¹-AA¹², GIPEPXXVPE-AA¹¹-AA¹², SIPKAXXVPT-AA¹¹-AA¹², HVTKPTXAPT-AA¹¹-AA¹², YVPKPXXAPT-AA¹¹-AA¹², TVPKPXXAPT-AA¹¹-AA¹², AVPKAXXAPT-AA¹¹-AA¹², KVGKAXXVPT-AA¹¹-AA¹², KASKAXXVPT-AA¹¹-AA¹², GSAGPXXTPT-AA¹¹-AA¹², AAPASXXVPA-AA¹¹-AA¹², STPPTXXVPT-AA¹¹-AA¹², HVPKPXXAPT-AA¹¹-AA¹², RVPSTXXAPV-AA¹¹-AA¹², ASAAPXXVPQ-AA¹¹-AA¹², ASASPXXVSQ-AA¹¹, AA¹², ASASPXXVPQ-AA¹¹-AA¹², NDEGLEXVPT-AA¹¹-AA¹², NDEGLEXVPT-AA¹¹-AA¹², SSVKXQPSRV-AA¹¹-AA¹² and RNVQXRPTQV-AA¹¹-AA¹²; wherein AA¹¹ is selected from the group consisting of E, K, Q, R, A, D, G and H; and wherein AA¹² is selected from the group consisting of L, M, T, E, Q and H; PEP10 is selected from the group consisting of AA²⁶-AA²⁷-AA²⁸-AA²⁹-VVEGXGXR, AA²⁶-AA²⁷-AA²⁸-AA²⁹-TVESXAXR, AA²⁶-AA²⁷-AA²⁸-AA²⁹-VVEGXR, AA²⁶-AA²⁷-AA²⁸-AA²⁹-VVRSXGXH, AA²⁶-AA²⁷-AA²⁸-AA²⁹-VVRAXGXH, AA²⁶-AA²⁷-AA²⁸-AA²⁹-VVKAXGXH, AA²⁶-AA²⁷-AA²⁸-AA²⁹-VAEXGXR, AA²⁶-AA²⁷-AA²⁸-AA²⁹-AVSEXGXR, AA²⁶-AA²⁷-AA²⁸-AA²⁹-VVDRXGXH, AA²⁶-AA²⁷-AA²⁸-AA²⁹-VVEAXGXR, AA²⁶-AA²⁷-AA²⁸-AA²⁹-VVESXGXR, AA²⁶-AA²⁷-AA²⁸-AA²⁹-VEEXGXL, AA²⁶-AA²⁷-AA²⁸-AA²⁹-VRSXKXS, AA²⁶-AA²⁷-AA²⁸-AA²⁹-VKSXKXS, AA²⁶-AA²⁷-AA²⁸-AA²⁹-VEEXGXL, AA²⁶-AA²⁷-AA²⁸-AA²⁹-QHNKXEXR, AA²⁶-AA²⁷-AA²⁸-AA²⁹-EHSQXEXR, AA²⁶-AA²⁷-AA²⁸-AA²⁹-EEHLEXAXA and AA²⁶-AA²⁷-AA²⁸-AA²⁹-EDHLAXKXE; wherein AA²⁶ is absent or selected from the group consisting of AA^{III} amino acids, preferably is absent or is E; wherein AA²⁷ and AA²⁸ are independently selected from the group consisting of AA^{III} and AA^{V} amino acids; and wherein AA²⁹ is absent or selected from the group consisting of AA^{II} amino acids, preferably is absent or is S; and wherein the pair PEP9:PEP10 is selected from the group consisting of KIPKAXXVPT-AA¹¹-AA¹²:AA²⁶-AA²⁷-AA²⁸-AA²⁹-VVEGXGXR, GIPEPXXVPE-AA¹¹-AA¹²:AA²⁶-AA²⁷-AA²⁸-AA²⁹-TVESXAXR, SIPKAXXVPT-AA¹¹-AA¹²:AA²⁶-AA²⁷-AA²⁸-AA²⁹-VVEGXGXR, HVTKPTXAPT-AA¹¹-AA¹²:AA¹²:AA²⁶-AA²⁷-AA²⁸-AA²⁹-VVRSXGXH, YVPKPXXAPT-AA¹¹-AA¹²:AA²⁶-AA²⁷-AA²⁸-AA²⁹-VVRSXGXH, TVPKPXXAPT-AA¹¹-AA¹²:AA²⁶-AA²⁷-AA²⁸-AA²⁹-VVRAXGXH, AVPKAXXAPT-AA¹¹:AA¹²:AA²⁶-AA²⁷-AA²⁸-AA²⁹-VVKAXGXH, KVGKAXXVPT-AA¹¹-AA¹²:AA²⁶-AA²⁷-AA²⁸-AA²⁹-VAEXGXR, KASKAXXVPT-AA¹¹-AA¹²-AA¹¹-AA¹²:AA²⁶-AA²⁷-AA²⁸-AA²⁹-AVSEXGXR, GSAGPXXTPT-AA¹¹-AA¹²:AA²⁶-AA²⁷-AA²⁸-AA²⁹-VVDRXGXS, AAPASXXVPA-AA¹¹-AA¹²:AA²⁶-AA²⁷-AA²⁸-AA²⁹-VVEAXGXR, STPPTXXVPT-AA^{II}-AA¹²-AA¹¹-AA¹²:AA²⁶-AA²⁷-AA²⁸-AA²⁹-VVESXGXR, HVPKPXXAPT-AA¹¹-AA¹²:AA²⁶-AA²⁷-AA²⁸-AA²⁹-VVRSXGXH, RVPSTXXAPV-AA¹¹-AA¹²:AA²⁶-AA²⁷-AA²⁸-AA²⁹-VEEXGXL, ASAAPXXVPQ-AA¹¹-AA¹¹:AA¹²-AA²⁷-AA²⁸-AA²⁹-VRSXKXS, ASASPXXVSQ-AA¹¹-AA¹²:AA²⁶-AA²⁷-AA²⁸-AA²⁹-VKSXKXS, ASASPXXVPQ-AA¹¹-AA¹²:AA²⁶-AA²⁷-AA²⁸-AA²⁹-VKSXKXS, NDEGLEXVPT-AA¹¹-AA¹²:AA²⁶-AA²⁷-AA²⁸-AA²⁹-QHNKXEXR, NDEGLEXVPT-AA¹¹-AA¹²:AA²⁶-AA²⁷-AA²⁸-AA²⁹-EHSQXEXR, SSVKXQPSRV-AA¹¹-AA¹²:AA²⁶-AA²⁷-AA²⁸-AA²⁹-EEHLEXAXA and RNVQXRPTQV-AA¹¹-AA¹²:AA²⁶-AA²⁷-AA²⁸-AA²⁹-EDHLAXKXE.

[0426] In certain embodiments, PEP9 is selected from the group consisting of KIPKAXXVPTEL, GIPEPXXVPEKM, SIPKAXXVPTEL, HVTKPTXAPTKL, YVPKPXXAPTKL, TVPKPXXAPTQL, AVPKAXXAPTKL, KVGKAXXVPTKL, KASKAXXVPTKL, GSAGPXXTPTKM, AAPASXXVPARL, STPPTXXVPTRL, HVPKPXXAPTKL, RVPSTXXAPVKT, ASAAPXXVPQAL, ASASPXXVSQDL, ASASPXXVPQDL, NDEGLEXVPTEE, NDEGLEXVPTGQ, SSVKXQPSRVHH and RNVQXRPTQVQL; PEP10 is selected from the group consisting of DMVVEGXGXR, NMTVESXAXR, EMVVEGXGXR, NMVVRSXGXH, NMVVRAXGXH, NMVVKAXGXH, EGMSVAEXGXR, GMAVSEXGXR, GMVVDRXGXS, DMVVEAXGXR, DMVVESXGXR, MIVEEXGXL, MIVRSXKXS, MIVKSXKXS, MVVKSXKXS, FLQHNKXEXR, LEEHSQXEXR, RLEEHLEXAXA and TLEDHLAXKXE; and wherein the pair PEP9:PEP10 is selected from the group consisting of KIPKAXXVPTEL:DMVVEGXGXR, GIPEPXXVPEKM:NMTVESXAXR, SIPKAXXVPTEL:EMVVEGXGXR, HVTKPTXAPTKL:NMVVRSXGXH, YVPKPXXAPTKL:NMVVRSXGXH, TVPKPXXAPTQL:NMVVRAXGXH, AVPKAXXAPTKL:NMVVKAXGXH, KVG KAXXVPTKL:EGMSVAEXGXR, KASKAXXVPTKL:GMAVSEXGXR, GSAGPXXTPTKM:GMVVDRXGXS, AAPASXXVPARL:DMVVEAXGXR, STPPTXXVPTRL:DMVVESXGXR, HVPKPXXAPTKL:NMVVRSXGXH, RVPSTXXAPVKT:MIVEEXGXL, ASAAPXXVPQAL:MIVRSXKXS, ASASPXXVSQDL:MIVKSXKXS, ASASPXXVPQDL:MVVKSXKXS, NDEGLEXVPTEE:FLQHNKXEXR, NDEGLEXVPTGQ:LEEHSQXEXR, NDEGLEXVPTEE:FLQHNKXEXR, NDEGLEXVPTEE:FLQHNKXEXR, SSVKXQPSRVHH:RLEEHLEXAXA and RNVQXRPTQVQL:TLEDHLAXKXE.

[0427] In certain embodiments, PEP5 is selected from the group consisting of VPTEL, VPEKM, APTKL, APTQL, VPTKL, TPTKM, VPARL, VPTRL, APVKT, VPQAL, VSQDL, VPQDL, VPTEE, VPTGQ, SRVHH and TQVQL; PEP6 is selected from the group consisting of DMVVE, NMTVE, EMVVE, NMVVR, NMVVK, EGMSVAE, GMAVS, GMWD, MIVEE, MIVRS, MIVKS, MVVKS, FLQHN, LEEHS, RLEEH and TLEDH; wherein the pair PEP5:PEP6 is selected from the group consisting of VPTEL:DMVVE, VPEKM:NMTVE, VPTEL:EMVVE, APTKL:NMVVR, APTQL:NMVVR, APTKL:NMVVK, VPTKL:EGMSVAE, VPTKL:GMAVS, TPTKM:GMVVD, VPARL:DMVVE, VPTRL:DMVVE, APVKT:MIVEE, VPQAL:MIVRS, VSQDL:MIVKS, VPQDL:MVVKS, VPTEE:FLQHN, VPTGQ:LEEHS, SRVHH:RLEEH and TQVQL:TLEDH; and wherein the pair PEP5:PEP6 is not VPTEL:DMVVE when PEP1 is SAIS and PEP2 is LKNYQ; wherein the pair PEP5:PEP6 is not VPEKM:NMTVE when PEP1 is SSLS and PEP2 is LKVYP; wherein the pair PEP5:PEP6 is not VPTEL:EMVVE when PEP1 is SAIS and PEP2 is LKNYQ; wherein the pair PEP5:PEP6 is not APTKL:NMVVR when PEP1 is NAIS and PEP2 is LKKYR; wherein the pair PEP5:PEP6 is not APTQL:NMVVR when PEP1 is NAIS and PEP2 is LKKYR; wherein the pair PEP5:PEP6 is not APTKL:NMVVK when PEP1 is SATS and PEP2 is LRKHR; wherein the pair PEP5:PEP6 is not VPTKL:EGMSVAE when PEP1 is SPIS and PEP2 is LKYHY; wherein the pair PEP5:PEP6 is not VPTKL:GMAVS when PEP1 is EPIS and PEP2 is KFKYE; wherein the pair PEP5:PEP6 is not TPTKM:GMVVD when PEP1 is SPIN and PEP2 is YGKIP; wherein the pair PEP5:PEP6 is not VPARL:DMVVE when PEP1 is SPIS and PEP2 is YKQYE; wherein the pair PEP5:PEP6 is not VPTRL:DMVVE when PEP1 is SPIS and PEP2 is YKQYE; wherein the pair PEP5:PEP6 is not APVKT:MIVEE when PEP1 is KPLS and PEP2 is DHHKD; wherein the pair PEP5:PEP6 is not VPQAL:MIVRS when PEP1 is EPLP and PEP2 is EQLSN; wherein the pair PEP5:PEP6 is not VSQDL:MIVKS when PEP1 is EPLT and PEP2 is EQLSN; wherein the pair PEP5:PEP6 is not VPQDL:MVVKS when PEP1 is EPLT and PEP2 is EQLSN; wherein the pair PEP5:PEP6 is not VPTEE:FLQHN when PEP1 is SNIT and PEP2 is IGEMS; wherein the pair PEP5:PEP6 is not VPTGQ:LEEHS when PEP1 is SNIT and PEP2 is LGEMS; wherein the pair PEP5:PEP6 is not SRVHH:RLEEH when PEP1 is RSVK and PEP2 is KEVQV; and wherein the pair PEP5:PEP6 is not TQVQL:TLEDH when PEP1 is RPVQ and PEP2 is KKATV.

[0428] In certain embodiments, PEP9 is selected from the group consisting of KIPKAXXVPT-AA¹¹-AA¹², GIPEPXXVPE-AA¹¹-AA¹², SIPKAXXVPT-AA¹¹-AA¹², HVTKPTXAPT-AA¹¹-AA¹², YVPKPXXAPT-AA¹¹-AA¹², TVPKPXXAPT-AA¹¹-AA¹², AVPKAXXAPT-AA¹¹-AA¹², KVGKAXXVPT-AA¹¹-AA¹², KASKAXXVPT-AA¹¹-AA¹², GSAGPXXTPT-AA¹¹-AA¹², AAPASXXVPA-AA¹¹-AA¹², STPPTXXVPT-AA¹¹-AA¹², HVPKPXXAPT-AA¹¹-AA¹², RVPSTXXAPV-AA¹¹-AA¹², ASAAPXXVPQ-AA¹¹-AA¹², ASASPXXVSQ-AA¹¹-AA¹², ASASPXXVPQ-AA¹¹-AA¹², NDEGLEXVPT-AA¹¹-AA¹², NDEGLEXVPT-AA¹¹-AA¹², SSVKXQPSRV-AA¹¹-AA¹² and RNVQXRPTQV-AA¹¹-AA¹²; wherein AA¹¹ is selected from the group consisting of E, K, Q, R, A, D, G and H; and wherein AA¹² is selected from the group consisting of L, M, T, E, Q and H; PEP10 is selected from the group consisting of AA²⁶-AA²⁷-AA²⁸-AA²⁹-VVEGXGXR, AA²⁶-AA²⁷-AA²⁸-AA²⁹-TVESXAXR, AA²⁶-AA²⁷-AA²⁸-AA²⁹-VVEGXGXR, AA²⁶-AA²⁷-AA²⁸-AA²⁹-VVRSXGXH, AA²⁶-AA²⁷-AA²⁸-AA²⁹-VVRAXGXH, AA²⁶-AA²⁷-AA²⁸-AA²⁹-VVKAXGXH, AA²⁶-AA²⁷-AA²⁸-AA²⁹-VAEXGXR, AA²⁶-AA²⁷-AA²⁸-AA²⁹-AVSEXGXR, AA²⁶-AA²⁷-AA²⁸-AA²⁹-VVDRXGXS, AA²⁶-AA²⁷-AA²⁸-AA²⁹-VVEAXGXR, AA²⁶-AA²⁷-AA²⁸-AA²⁹-VVESXGXR, AA²⁶-AA²⁷-AA²⁸-AA²⁹-VEEXGXL, AA²⁶-AA²⁷-AA²⁸-AA²⁹-VRSXKXS, AA²⁶-AA²⁷-AA²⁸-AA²⁹-VKSXKXS, AA²⁶-AA²⁷-AA²⁸-AA²⁹-VKSXKXS, AA²⁶-AA²⁷-AA²⁸-AA²⁹-QHNKXEXR, AA²⁶-AA²⁷-AA²⁸-AA²⁹-EHSQXEXR, AA²⁶-AA²⁷-AA²⁸-AA²⁹-EEHLEXAXA and AA²⁶-AA²⁷-AA²⁸-AA²⁹-EDHLAXKXE; wherein AA²⁶ is absent or selected from the group consisting of AA^{III} amino acids, preferably is absent or is E; wherein AA²⁷ and AA²⁸ are independently selected from the group consisting of AA^{III} and AA^{V} amino acids; and wherein AA²⁹ is absent or selected from the group consisting of AA^{II} amino acids, preferably is absent or is S; and wherein the pair PEP9:PEP10 is selected from the group consisting of KIPKAXXVPT-AA¹¹-AA¹²:AA²⁶-AA²⁷-AA²⁸-AA²⁹-VVEGXGXR, GIPEPXXVPE-AA¹¹-AA¹²:AA²⁶-AA²⁷-AA²⁸-AA²⁹-TVESXAXR, SIPKAXXVPT-AA¹¹-AA¹²:AA²⁶-AA²⁷-AA²⁸-AA²⁹-VVEGXGXR, HVTKPTXAPT-AA¹¹-AA¹²:AA²⁶-AA²⁷-AA²⁸-AA²⁹-VVRSXGXH, YVPKPXXAPT-AA¹¹-AA¹²:AA²⁶-AA²⁷-AA²⁸-AA²⁹-VVRSXGXH, TVPKPXXAPT-AA¹¹-AA¹²:AA²⁶-AA²⁷-AA¹-AA²⁹-VVRAXGXH, AVPKAXXAPT-AA¹¹-AA¹²:AA²⁶-AA²⁷-AA²⁸-AA²⁹-VVKAXGXH, KVGKAXXVPT-AA¹¹-AA¹²:AA²⁶-AA²⁷-AA²⁸-AA²⁹-VAEXGXR, KASKAXXVPT-AA¹¹-AA¹¹-AA¹²:AA²⁶-AA²⁷-AA²⁸-AA²⁹-AVSEXGXR, GSAGPXXTPT-AA¹¹-AA¹²:AA²⁶-AA²⁷-AA²⁸-AA²⁹-VVDRXGXS, AAPASXXVPA-AA¹¹-AA¹²:AA²⁶-AA²⁷-AA²⁸-AA²⁹-VVEAXGXR, STPPTXXVPT-AA^{II}-AA¹²-AA¹¹-AA¹²:AA²⁶-AA²⁷-AA²⁸-AA²⁹-VVESXGXR, HVPKPXXAPT-AA¹¹-AA¹²:AA²⁶-AA²⁷-AA²⁸-AA²⁹-VVRSXGXH, RVPSTXXAPV-AA¹¹-AA¹²:AA²⁶-AA²⁷-AA²⁸-AA²⁹-VEEXGXL, ASAAPXXVPQ-AA¹¹-AA¹²:AA²²⁶-AA²⁷-AA²⁸-AA²⁹-VRSXKXS, ASASPXXVSQ-AA¹¹-AA¹²:AA²⁶-AA²⁷-AA²⁸-AA²⁹-VKSXKXS, ASASPXXVPQ-AA¹¹-AA¹²:AA²⁶-AA²⁷-AA²⁸-AA²⁹-VKSXKXS, NDEGLEXVPT-AA¹¹-AA¹²:AA²⁶-AA²⁷-AA²⁸-AA²⁹-QHNKXEXR, NDEGLEXVPT-AA¹¹-AA¹²:AA²⁶-AA²⁷-AA²⁸-AA²⁹-EHSQXEXR, SSVKXQPSRV-AA¹¹-AA¹²:AA²⁶-AA²⁷-AA²⁸-AA²⁹-EEHLEXAXA and RNVQXRPTQV-AA¹²-AA²⁶: AA²⁷-AA²⁸-AA²⁹-EDHLAXKXE; and wherein PEP9:PEP10 is not KIPKAXXVPT-AA¹¹-AA¹²:AA²⁶-AA²⁷-AA²⁸-AA²⁹-VVEGXGXR when PEP1 is SAIS and PEP2 is LKNYQ; wherein PEP9:PEP10 is not GIPEPXXVPE-AA¹¹-AA¹²:AA²⁶-AA²⁷-AA²⁸-AA²⁹-TVESXAXR when PEP1 is SSLS and PEP2 is LKVYP; wherein PEP9:PEP10 is not SIPKAXXVPT-AA¹¹-AA¹²:AA²⁶-AA²⁷-AA²⁸-AA²⁹-VVEGXGXR when PEP1 is SAIS and PEP2 is LKNYQ; wherein PEP9:PEP10 is not HVTKPTXAPT-AA¹¹-AA¹²:AA²⁶-AA²⁷-AA²⁸-AA²⁹-VVRSXGXH when PEP1 is NAIS and PEP2 is LKKYR; wherein PEP9:PEP10 is not YVPKPXXAPT-AA¹¹-AA¹²:AA²⁶-AA²⁷-AA²⁸-AA²⁹-VVRSXGXH when PEP1 is NAIS and PEP2 is LKKYR; wherein PEP9:PEP10 is not TVPKPXXAPT-AA¹¹-AA¹²:AA²⁶-AA²⁷-AA²⁸-AA²⁹-VVRAXGXH when PEP1 is NAIS and PEP2 is LKKYR; wherein PEP9:PEP10 is not AVPKAXXAPT-AA¹¹-AA¹²:AA²⁶-AA²⁷-AA²⁸-AA²⁹-VVKAXGXH when PEP1 is SATS and PEP2 is LRKHR; wherein PEP9:PEP10 is not KVGKAXXVPT-AA¹¹-AA¹²:AA²⁶-AA²⁷-AA²⁸-AA²⁹-VAEXGXR when PEP1 is SPIS and PEP2 is LKYHY; wherein PEP9:PEP10 is not KASKAXXVPT-AA¹¹-AA¹²-AA¹¹-AA¹²:AA²⁶-AA²⁷-AA²⁸-AA²⁹-AVSEXGXR when PEP1 is EPIS and PEP2 is KFKYE; wherein PEP9:PEP10 is not GSAGPXXTPT-AA¹¹-AA¹²:AA²⁶-AA²⁷-AA²⁸-AA²⁹-VVDRXGXS when PEP1 is SPIN and PEP2 is YGKIP; wherein PEP9:PEP10 is not AAPASXXVPA-AA¹¹-AA¹²:AA²⁶-AA²⁷-AA²⁸-AA²⁹-VVEAXGXR when PEP1 is SPIS and PEP2 is YKQYE; wherein PEP9:PEP10 is not STPPTXXVPT-AA¹¹-AA¹²-AA¹¹-AA¹²:AA²⁶-AA²⁷-AA²⁸-AA²⁹-VVESXGXR when PEP1 is SPIS and PEP2 is YKQYE; wherein PEP9:PEP10 is not HVPKPXXAPT-AA¹¹-AA¹²:AA²⁶-AA²⁷-AA²⁸-AA²⁹-VVRSXGXH when PEP1 is NAIS and PEP2 is LKKYR; wherein PEP9:PEP10 is not RVPSTXXAPV-AA¹¹-AA¹²:AA²⁶-AA²⁷-AA²⁸-AA²⁹-VEEXGXL when PEP1 is KPLS and PEP2 is DHHKD; wherein PEP9:PEP10 is not ASAAPXXVPQ-AA¹¹-AA¹²:AA²⁶-AA²⁷-AA²⁸-AA²⁹-VRSXKXS when PEP1 is EPLP and PEP2 is EQLSN; ASASPXXVSQ-AA¹¹-AA¹²:AA²⁶-AA²⁷-AA²⁸-AA²⁹-VKSXKXS when PEP1 is EPLT and PEP2 is EQLSN; wherein PEP9:PEP10 is not ASASPXXVPQ-AA¹¹-AA¹²:AA²⁶-AA²⁷-AA²⁸-AA²⁹-VKSXKXS when PEP1 is EPLT and PEP2 is EQLSN; wherein PEP9:PEP10 is not NDEGLEXVPT-AA¹¹-AA¹²:AA²⁶-AA²⁷-AA²⁸-AA²⁹-QHNKXEXR when PEP1 is SNIT and PEP2 is IGEMS; wherein PEP9:PEP10 is not NDEGLEXVPT-AA¹¹-AA¹²:AA²⁶-AA²⁷-AA²⁸-AA²⁹-EHSQXEXR when PEP1 is SNIT and PEP2 is LGEMS; wherein PEP9:PEP10 is not SSVKXQPSRV-AA¹⁷-AA¹:AA²⁶-AA²⁷-AA²⁸-AA²⁹-EEHLEXAXA when PEP1 is RSVK and PEP2 is KEVQV; and wherein PEP9:PEP10 is not RNVQXRPTQV-AA¹¹-AA¹²:AA²⁶-AA²⁷-AA²⁸-AA²⁹-EDHLAXKXE when PEP1 is RPVQ and PEP2 is KKATV.

[0429] In certain embodiments, PEP9 is selected from the group consisting of KIPKAXXVPTEL, GIPEPXXVPEKM, SIPKAXXVPTEL, HVTKPTXAPTKL, YVPKPXXAPTKL, TVPKPXXAPTQL, AVPKAXXAPTKL, KVGKAXXVPTKL, KASKAXXVPTKL, GSAGPXXTPTKM, AAPASXXVPARL, STPPTXXVPTRL, HVPKPXXAPTKL, RVPSTXXAPVKT, ASAAPXXVPQAL, ASASPXXVSQDL, ASASPXXVPQDL, NDEGLEXVPTEE, NDEGLEXVPTGQ, SSVKXQPSRVHH and RNVQXRPTQVQL; PEP10 is selected from the group consisting of DMVVEGXGXR, NMTVESXAXR, EMVVEGXGXR, NMVVRSXGXH, NMVVRAXGXH, NMVVKAXGXH, EGMSVAEXGXR, GMAVSEXGXR, GMVVDRXGXS, DMVVEAXGXR, DMVVESXGXR, MIVEEXGXL, MIVRSXKXS, MIVKSXKXS, MVVKSXKXS, FLQHNKXEXR, LEEHSQXEXR, RLEEHLEXAXA and TLEDHLAXKXE; and wherein the pair PEP9:PEP10 is selected from the group consisting of KIPKAXXVPTEL:DMVVEGXGXR, GIPEPXXVPEKM:NMTVESXAXR, SIPKAXXVPTEL:EMVVEGXGXR, HVTKPTXAPTKL:NMVVRSXGXH, YVPKPXXAPTKL:NMVVRSXGXH, TVPKPXXAPTQL:NMVVRAXGXH, AVPKAXXAPTKL:NMVVKAXGXH, KVGKAXXVPTKL:EGMSVAEXGXR, KASKAXXVPTKL:GMAVSEXGXR, GSAGPXXTPTKM:GMVVDRXGXS, AAPASXXVPARL:DMVVEAXGXR, STPPTXXVPTRL:DMVVESXGXR, HVPKPXXAPTKL:NMVVRSXGXH, RVPSTXXAPVKT:MIVEEXGXL, ASAAPXXVPQAL:MIVRSXKXS, ASASPXXVSQDL:MIVKSXKXS, ASASPXXVPQDL:MVVKSXKXS, NDEGLEXVPTEE:FLQHNKXEXR, NDEGLEXVPTGQ:LEEHSQXEXR, NDEGLEXVPTEE:FLQHNKXEXR, NDEGLEXVPTEE:FLQHNKXEXR, SSVKXQPSRVHH:RLEEHLEXAXA and RNVQXRPTQVQL:TLEDHLAXKXE; and wherein PEP9:PEP10 is not KIPKAXXVPTEL:DMVVEGXGXR when PEP1 is SAIS and PEP2 is LKNYQ; wherein PEP9:PEP10 is not GIPEPXXVPEKM:NMTVESXAXR when PEP1 is SSLS and PEP2 is LKVYP; wherein PEP9:PEP10 is not SIPKAXXVPTEL:EMVVEGXGXR when PEP1 is SAIS and PEP2 is LKNYQ; wherein PEP9:PEP10 is not HVTKPTXAPTKL:NMVVRSXGXH when PEP1 is NAIS and PEP2 is LKKYR; wherein PEP9:PEP10 is not YVPKPXXAPTKL:NMVVRSXGXH when PEP1 is NAIS and PEP2 is LKKYR; wherein PEP9:PEP10 is not TVPKPXXAPTQL:NMVVRAXGXH when PEP1 is NAIS and PEP2 is LKKYR; wherein PEP9:PEP10 is not AVPKAXXAPTKL:NMVVKAXGXH when PEP1 is SATS and PEP2 is LRKHR; wherein PEP9:PEP10 is not KVGKAXXVPTKL:EGMSVAEXGXR when PEP1 is SPIS and PEP2 is LKYHY; wherein PEP9:PEP10 is not KASKAXXVPTKL:GMAVSEXGXR when PEP1 is EPIS and PEP2 is KFKYE; wherein PEP9:PEP10 is not GSAGPXXTPTKM:GMVVDRXGXS when PEP1 is SPIN and PEP2 is YGKIP; wherein PEP9:PEP10 is not AAPASXXVPARL:DMVVEAXGXR when PEP1 is SPIS and PEP2 is YKQYE; wherein PEP9:PEP10 is not STPPTXXVPTRL:DMVVESXGXR when PEP1 is SPIS and PEP2 is YKQYE; wherein PEP9:PEP10 is not HVPKPXXAPTKL:NMVVRSXGXH when PEP1 is NAIS and PEP2 is LKKYR; wherein PEP9:PEP10 is not RVPSTXXAPVKT:MIVEEXGXL when PEP1 is KPLS and PEP2 is DHHKD; wherein PEP9:PEP10 is not ASAAPXXVPQAL:MIVRSXKXS when PEP1 is EPLP and PEP2 is EQLSN; ASASPXXVSQDL:MIVKSXKXS when PEP1 is EPLT and PEP2 is EQLSN; wherein PEP9:PEP10 is not ASASPXXVPQDL:MVVKSXKXS when PEP1 is EPLT and PEP2 is EQLSN; wherein PEP9:PEP10 is not NDEGLEXVPTEE:FLQHNKXEXR when PEP1 is SNIT and PEP2 is IGEMS; wherein PEP9:PEP10 is not NDEGLEXVPTGQ:LEEHSQXEXR when PEP1 is SNIT and PEP2 is LGEMS wherein PEP9:PEP10 is not NDEGLEXVPTEE:FLQHNKXEXR when PEP1 is SNIT and PEP2 is IGEMS; wherein PEP9:PEP10 is not NDEGLEXVPTEE:FLQHNKXEXR when PEP1 is SNIT and PEP2 is IGEMS; wherein PEP9:PEP10 is not SSVKXQPSRVHH:RLEEHLEXAXA when PEP1 is RSVK and PEP2 is KEVQV; and wherein PEP9:PEP10 is not RNVQXRPTQVQL:TLEDHLAXKXE when PEP1 is RPVQ and PEP2 is KKATV.

[0430] In certain embodiments, PEP1 is selected from the group consisting of SAIS, SSLS, NAIS, SATS, SPIS, EPIS, SPIN, KPLS, EPLP, EPLT, SNIT, RSVK and RPVQ; PEP11 is selected from the group consisting of LYL, LFF, LYF, LYY, LYK, LYI, LFI, LYV, VYY, QIM, AKV and RKI; and the pair PEP1:PEP11 is selected from the group consisting of SAIS:LYL, SSLS:LFF, NAIS:LYF, SATS:LYY, SPIS:LYK, SPIS:LYI, SPIS:LFI, EPIS:LYL, SPIN:LYF, KPLS:LYV, EPLP:VYY, EPLT:LYY, SNIT:QIM, RSVK:AKV and RPVQ:RKI.

[0431] In one particular example, said GFR-binding compound is a peptide, a variant or analog thereof, or a peptidomimetic as defined herein, with (comprising, or exclusively consisting of, or constituted of) between 20 and 60 (in particular between 20 and 50, and more particularly, between 20 and 45) amino acids, comprising a peptide with four amino acids (PEP1) or a peptide with eight amino acids (PEP12), a peptide with five amino acids (PEP2), and optionally a pair of peptides selected form the group consisting of PEP3:PEP4, PEP3:PEP6, PEP3:PEP10, PEP5:PEP4, PEP9:PEP4, PEP5:PEP6, PEP5:PEP10, PEP9:PEP6 and PEP9:PEP10; wherein said GFR-binding compound does not comprise the pair of peptides VPTEL:DMVVE when PEP1 is SAIS and PEP2 is LKNYQ; wherein said GFR-binding compound does not comprise the pair of peptides VPEKM:NMTVE when PEP1 is SSLS and PEP2 is LKVYP; wherein said GFR-binding compound does not comprise the pair of peptides VPTEL:EMVVE when PEP1 is SAIS and PEP2 is LKNYQ; wherein said GFR-binding compound does not comprise the pair of peptides APTKL:NMVVR when PEP1 is NAIS and PEP2 is LKKYR; wherein said GFR-binding compound does not comprise the pair of peptides APTQL:NMVVR when PEP1 is NAIS and PEP2 is LKKYR; wherein said GFR-binding compound does not comprise the pair of peptides APTKL:NMVVK when PEP1 is SATS and PEP2 is LRKHR; wherein said GFR-binding compound does not comprise the pair of peptides VPTKL:EGMSVAE when PEP1 is SPIS and PEP2 is LKYHY; wherein said GFR-binding compound does not comprise the pair of peptides VPTKL:GMAVS when PEP1 is EPIS and PEP2 is KFKYE; wherein said GFR-binding compound does not comprise the pair of peptides TPTKM:GMVVD when PEP1 is SPIN and PEP2 is YGKIP; wherein said GFR-binding compound does not comprise the pair of peptides VPARL:DMVVE when PEP1 is SPIS and PEP2 is YKQYE; wherein said GFR-binding compound does not comprise the pair of peptides VPTRL:DMVVE when PEP1 is SPIS and PEP2 is YKQYE; wherein said GFR-binding compound does not comprise the pair of peptides APVKT:MIVEE when PEP1 is KPLS and PEP2 is DHHKD; wherein said GFR-binding compound does not comprise the pair of peptides VPQAL:MIVRS when PEP1 is EPLP and PEP2 is EQLSN; wherein said GFR-binding compound does not comprise the pair of peptides VSQDL:MIVKS when PEP1 is EPLT and PEP2 is EQLSN; wherein said GFR-binding compound does not comprise the pair of peptides VPQDL:MVVKS when PEP1 is EPLT and PEP2 is EQLSN; wherein said GFR-binding compound does not comprise the pair of peptides VPTEE:FLQHN when PEP1 is SNIT and PEP2 is IGEMS; wherein said GFR-binding compound does not comprise the pair of peptides VPTGQ:LEEHS when PEP1 is SNIT and PEP2 is LGEMS; wherein said GFR-binding compound does not comprise the pair of peptides SRVHH:RLEEH when PEP1 is RSVK and PEP2 is KEVQV; and wherein said GFR-binding compound does not comprise the pair of peptides TQVQL:TLEDH when PEP1 is RPVQ and PEP2 is KKATV.

[0432] In one particular example, said GFR-binding compound is a peptide, a variant or analog thereof, or a peptidomimetic as defined herein, with (comprising, or exclusively consisting of, or constituted of) between 20 and 60 (in particular between 20 and 50, and more particularly, between 20 and 45) amino acids, comprising a peptide with four amino acids (PEP1) or a peptide with eight amino acids (PEP12), a peptide with five amino acids (PEP2), and optionally a pair of peptides selected form the group consisting of PEP3:PEP4, PEP3:PEP6, PEP3:PEP10, PEP5:PEP4, PEP9:PEP4, PEP5:PEP6, PEP5:PEP10, PEP9:PEP6 and PEP9:PEP10; wherein said GFR-binding compound does not comprise the pair of peptides KIPKAXXVPTEL:DMVVEGXGXR when PEP1 is SAIS and PEP2 is LKNYQ; wherein said GFR-binding compound does not comprise the pair of peptides GIPEPXXVPEKM:NMTVESXAXR when PEP1 is SSLS and PEP2 is LKVYP; wherein said GFR-binding compound does not comprise the pair of peptides SIPKAXXVPTEL:EMVVEGXGXR when PEP1 is SAIS and PEP2 is LKNYQ; wherein said GFR-binding compound does not comprise the pair of peptides HVTKPTXAPTKL:NMVVRSXGXH when PEP1 is NAIS and PEP2 is LKKYR; wherein said GFR-binding compound does not comprise the pair of peptides YVPKPXXAPTKL:NMVVRSXGXH when PEP1 is NAIS and PEP2 is LKKYR; wherein said GFR-binding compound does not comprise the pair of peptides TVPKPXXAPTQL:NMVVRAXGXH when PEP1 is NAIS and PEP2 is LKKYR; wherein said GFR-binding compound does not comprise the pair of peptides AVPKAXXAPTKL:NMVVKAXGXH when PEP1 is SATS and PEP2 is LRKHR; wherein said GFR-binding compound does not comprise the pair of peptides KVGKAXXVPTKL:EGMSVAEXGXR when PEP1 is SPIS and PEP2 is LKYHY; wherein said GFR-binding compound does not comprise the pair of peptides KASKAXXVPTKL:GMAVSEXGXR when PEP1 is EPIS and PEP2 is KFKYE; wherein said GFR-binding compound does not comprise the pair of peptides GSAGPXXTPTKM:GMVVDRXGXS when PEP1 is SPIN and PEP2 is YGKIP; wherein said GFR-binding compound does not comprise the pair of peptides AAPASXXVPARL:DMVVEAXGXR when PEP1 is SPIS and PEP2 is YKQYE; wherein said GFR-binding compound does not comprise the pair of peptides STPPTXXVPTRL:DMVVESXGXR when PEP1 is SPIS and PEP2 is YKQYE; wherein said GFR-binding compound does not comprise the pair of peptides HVPKPXXAPTKL:NMVVRSXGXH when PEP1 is NAIS and PEP2 is LKKYR; wherein said GFR-binding compound does not comprise the pair of peptides RVPSTXXAPVKT:MIVEEXGXL when PEP1 is KPLS and PEP2 is DHHKD; wherein said GFR-binding compound does not comprise the pair of peptides ASAAPXXVPQAL:MIVRSXKXS when PEP1 is EPLP and PEP2 is EQLSN; ASASPXXVSQDL:MIVKSXKXS when PEP1 is EPLT and PEP2 is EQLSN; wherein said GFR-binding compound does not comprise the pair of peptides ASASPXXVPQDL:MVVKSXKXS when PEP1 is EPLT and PEP2 is EQLSN; wherein said GFR-binding compound does not comprise the pair of peptides NDEGLEXVPTEE:FLQHNKXEXR when PEP1 is SNIT and PEP2 is IGEMS; wherein said GFR-binding compound does not comprise the pair of peptides NDEGLEXVPTGQ:LEEHSQXEXR when PEP1 is SNIT and PEP2 is LGEMS; wherein said GFR-binding compound does not comprise the pair of peptides NDEGLEXVPTEE:FLQHNKXEXR when PEP1 is SNIT and PEP2 is IGEMS; wherein said GFR-binding compound does not comprise the pair of peptides NDEGLEXVPTEE:FLQHNKXEXR when PEP1 is SNIT and PEP2 is IGEMS; wherein said GFR-binding compound does not comprise the pair of peptides SSVKXQPSRVHH:RLEEHLEXAXA when PEP1 is RSVK and PEP2 is KEVQV; wherein said GFR-binding compound does not comprise the pair of peptides RNVQXRPTQVQL:TLEDHLAXKXE when PEP1 is RPVQ and PEP2 is KKATV.

[0433] In particular, in certain embodiments, the quadruplet PEP3:PEP1:PEP2:PEP4 is selected from the group consisting of VPT:SAIS:LKNYQ:VVE, VPE:SAIS:LKNYQ:TVE, APT:SAIS:LKNYQ:VVR, APT:SAIS:LKNYQ:VVK, VPT:SAIS:LKNYQ:VAE, VPT:SAIS:LKNYQ:AVS, TPT:SAIS:LKNYQ:VVD, VPA:SAIS:LKNYQ:VVE, APV:SAIS:LKNYQ:VEE, VPQ:SAIS:LKNYQ:VRS, VSQ:SAIS:LKNYQ:VKS, VPQ:SAIS:LKNYQ:VKS, VPT:SAIS:LKNYQ:QHN, VPT:SAIS:LKNYQ:EHS, SRV:SAIS:LKNYQ:EEH, TQV:SAIS:LKNYQ:EDH, VPE:SSLS:LKVYP:TVE, VPT:SSLS:LKVYP:VVE, APT:SSLS:LKVYP:VVR, APT:SSLS:LKVYP:VVK, VPT:SSLS:LKVYP:VAE, VPT:SSLS:LKVYP:AVS, TPT:SSLS:LKVYP:VVD, VPA:SSLS:LKVYP:VVE, APV:SSLS:LKVYP:VEE, VPQ:SSLS:LKVYP:VRS, VSQ:SSLS:LKVYP:VKS, VPQ:SSLS:LKVYP:VKS, VPT:SSLS:LKVYP:QHN, VPT:SSLS:LKVYP:EHS, SRV:SSLS:LKVYP:EEH, TQV:SSLS:LKVYP:EDH, APT:NAIS:LKKYR:VVR, VPT:NAIS:LKKYR:VVE, VPE:NAIS:LKKYR:TVE, APT:NAIS:LKKYR:VVK, VPT:NAIS:LKKYR:VAE, VPT:NAIS:LKKYR:AVS, TPT:NAIS:LKKYR:VVD, VPA:NAIS:LKKYR:VVE, APV:NAIS:LKKYR:VEE, VPQ:NAIS:LKKYR:VRS, VSQ:NAIS:LKKYR:VKS, VPQ:NAIS:LKKYR:VKS, VPT:NAIS:LKKYR:QHN, VPT:NAIS:LKKYR:EHS, SRV:NAIS:LKKYR:EEH, TQV:NAIS:LKKYR:EDH, APT:SATS:LRKHR:VVK, VPT:SATS:LRKHR:VVE, VPE:SATS:LRKHR:TVE, APT:SATS:LRKHR:VVR, VPT:SATS:LRKHR:VAE, VPT:SATS:LRKHR:AVS, TPT:SATS:LRKHR:VVD, VPA:SATS:LRKHR:VVE, APV:SATS:LRKHR:VEE, VPQ:SATS:LRKHR:VRS, VSQ:SATS:LRKHR:VKS, VPQ:SATS:LRKHR:VKS, VPT:SATS:LRKHR:QHN, VPT:SATS:LRKHR:EHS, SRV:SATS:LRKHR:EEH, TQV:SATS:LRKHR:EDH, VPT:SPIS:LKYHY:VAE, VPT:SPIS:LKYHY:VVE, VPE:SPIS:LKYHY:TVE, APT:SPIS:LKYHY:VVR, APT:SPIS:LKYHY:VVK, VPT:SPIS:LKYHY:AVS, TPT:SPIS:LKYHY:VVD, VPA:SPIS:LKYHY:VVE, APV:SPIS:LKYHY:VEE, VPQ:SPIS:LKYHY:VRS, VSQ:SPIS:LKYHY:VKS, VPQ:SPIS:LKYHY:VKS, VPT:SPIS:LKYHY:QHN, VPT:SPIS:LKYHY:EHS, SRV:SPIS:LKYHY:EEH, TQV:SPIS:LKYHY:EDH, VPT:EPIS:KFKYE:AVS, VPT:EPIS:KFKYE:VVE, VPE:EPIS:KFKYE:TVE, APT:EPIS:KFKYE:VVR, APT:EPIS:KFKYE:VVK, VPT:EPIS:KFKYE:VAE, TPT:EPIS:KFKYE:VVD, VPA:EPIS:KFKYE:VVE, APV:EPIS:KFKYE:VEE, VPQ:EPIS:KFKYE:VRS, VSQ:EPIS:KFKYE:VKS, VPQ:EPIS:KFKYE:VKS, VPT:EPIS:KFKYE:QHN, VPT:EPIS:KFKYE:EHS, SRV:EPIS:KFKYE:EEH, TQV:EPIS:KFKYE:EDH, TPT:SPIN:YGKIP:VVD, VPT:SPIN:YGKIP:VVE, VPE:SPIN:YGKIP:TVE, APT:SPIN:YGKIP:VVR, APT:SPIN:YGKIP:VVK, VPT:SPIN:YGKIP:VAE, VPT:SPIN:YGKIP:AVS, VPA:SPIN:YGKIP:VVE, APV:SPIN:YGKIP:VEE, VPQ:SPIN:YGKIP:VRS, VSQ:SPIN:YGKIP:VKS, VPQ:SPIN:YGKIP:VKS, VPT:SPIN:YGKIP:QHN, VPT:SPIN:YGKIP:EHS, SRV:SPIN:YGKIP:EEH, TQV:SPIN:YGKIP:EDH, VPA:SPIS:YKQYE:VVE, VPT:SPIS:YKQYE:VVE, VPE:SPIS:YKQYE:TVE, APT:SPIS:YKQYE:VVR, APT:SPIS:YKQYE:VVK, VPT:SPIS:YKQYE:VAE, VPT:SPIS:YKQYE:AVS, TPT:SPIS:YKQYE:VVD, APV:SPIS:YKQYE:VEE, VPQ:SPIS:YKQYE:VRS, VSQ:SPIS:YKQYE:VKS, VPQ:SPIS:YKQYE:VKS, VPT:SPIS:YKQYE:QHN, VPT:SPIS:YKQYE:EHS, SRV:SPIS:YKQYE:EEH, TQV:SPIS:YKQYE:EDH, APV:KPLS:DHHKD:VEE, VPT:KPLS:DHHKD:VVE, VPE:KPLS:DHHKD:TVE, APT:KPLS:DHHKD:VVR, APT:KPLS:DHHKD:VVK, VPT:KPLS:DHHKD:VAE, VPT:KPLS:DHHKD:AVS, TPT:KPLS:DHHKD:VVD, VPA:KPLS:DHHKD:VVE, VPQ:KPLS:DHHKD:VRS, VSQ:KPLS:DHHKD:VKS, VPQ:KPLS:DHHKD:VKS, VPT:KPLS:DHHKD:QHN, VPT:KPLS:DHHKD:EHS, SRV:KPLS:DHHKD:EEH, TQV:KPLS:DHHKD:EDH, VPQ:EPLP:EQLSN:VRS, VPT:EPLP:EQLSN:VVE, VPE:EPLP:EQLSN:TVE, APT:EPLP:EQLSN:VVR, APT:EPLP:EQLSN:VVK, VPT:EPLP:EQLSN:VAE, VPT:EPLP:EQLSN:AVS, TPT:EPLP:EQLSN:VVD, VPA:EPLP:EQLSN:VVE, APV:EPLP:EQLSN:VEE, VSQ:EPLP:EQLSN:VKS, VPQ:EPLP:EQLSN:VKS, VPT:EPLP:EQLSN:QHN, VPT:EPLP:EQLSN:EHS, SRV:EPLP:EQLSN:EEH, TQV:EPLP:EQLSN:EDH, VSQ:EPLT:EQLSN:VKS, VPT:EPLT:EQLSN:VVE, VPE:EPLT:EQLSN:TVE, APT:EPLT:EQLSN:VVR, APT:EPLT:EQLSN:VVK, VPT:EPLT:EQLSN:VAE, VPT:EPLT:EQLSN:AVS, TPT:EPLT:EQLSN:VVD, VPA:EPLT:EQLSN:VVE, APV:EPLT:EQLSN:VEE, VPQ:EPLT:EQLSN:VRS, VPQ:EPLT:EQLSN:VKS, VPT:EPLT:EQLSN:QHN, VPT:EPLT:EQLSN:EHS, SRV:EPLT:EQLSN:EEH, TQV:EPLT:EQLSN:EDH, VPT:SNIT:IGEMS:QHN, VPT:SNIT:IGEMS:VVE, VPE:SNIT:IGEMS:TVE, APT:SNIT:IGEMS:VVR, APT:SNIT:IGEMS:VVK, VPT:SNIT:IGEMS:VAE, VPT:SNIT:IGEMS:AVS, TPT:SNIT:IGEMS:VVD, VPA:SNIT:IGEMS:VVE, APV:SNIT:IGEMS:VEE, VPQ:SNIT:IGEMS:VRS, VSQ:SNIT:IGEMS:VKS, VPQ:SNIT:IGEMS:VKS, VPT:SNIT:IGEMS:EHS, SRV:SNIT:IGEMS:EEH, TQV:SNIT:IGEMS:EDH, VPT:SNIT:LGEMS:EHS, VPT:SNIT:LGEMS:VVE, VPE:SNIT:LGEMS:TVE, APT:SNIT:LGEMS:VVR, APT:SNIT:LGEMS:VVK, VPT:SNIT:LGEMS:VAE, VPT:SNIT:LGEMS:AVS, TPT:SNIT:LGEMS:VVD, VPA:SNIT:LGEMS:VVE, APV:SNIT:LGEMS:VEE, VPQ:SNIT:LGEMS:VRS, VSQ:SNIT:LGEMS:VKS, VPQ:SNIT:LGEMS:VKS, VPT:SNIT:LGEMS:QHN, SRV:SNIT:LGEMS:EEH, TQV:SNIT:LGEMS:EDH, SRV:RSVK:KEVQV:EEH, VPT:RSVK:KEVQV:VVE, VPE:RSVK:KEVQV:TVE, APT:RSVK:KEVQV:VVR, APT:RSVK:KEVQV:VVK, VPT:RSVK:KEVQV:VAE, VPT:RSVK:KEVQV:AVS, TPT:RSVK:KEVQV:VVD, VPA:RSVK:KEVQV:VVE, APV:RSVK:KEVQV:VEE, VPQ:RSVK:KEVQV:VRS, VSQ:RSVK:KEVQV:VKS, VPQ:RSVK:KEVQV:VKS, VPT:RSVK:KEVQV:QHN, VPT:RSVK:KEVQV:EHS, TQV:RSVK:KEVQV:EDH, TQV:RPVQ:KKATV:EDH, VPT:RPVQ:KKATV:VVE, VPE:RPVQ:KKATV:TVE, APT:RPVQ:KKATV:VVR, APT:RPVQ:KKATV:VVK, VPT:RPVQ:KKATV:VAE, VPT:RPVQ:KKATV:AVS, TPT:RPVQ:KKATV:VVD, VPA:RPVQ:KKATV:VVE, APV:RPVQ:KKATV:VEE, VPQ:RPVQ:KKATV:VRS, VSQ:RPVQ:KKATV:VKS, VPQ:RPVQ:KKATV:VKS, VPT:RPVQ:KKATV:QHN, VPT:RPVQ:KKATV:EHS and SRV:RPVQ:KKATV:EEH.

[0434] In particular, in certain embodiments, the quadruplet PEP3:PEP12:PEP2:PEP4 is selected from the group consisting of VPT:SAIS-AA¹⁷-LYL:LKNYQ:VVE, VPE:SAIS-AA¹⁷-LYL:LKNYQ:TVE, APT:SAIS-AA¹⁷-LYL:LKNYQ:VVR, APT:SAIS-AA¹⁷-LYL:LKNYQ:VVK, VPT:SAIS-AA¹⁷-LYL:LKNYQ:VAE, VPT:SAIS-AA¹⁷-LYL:LKNYQ:AVS, TPT:SAIS-AA¹⁷-LYL:LKNYQ:VVD, VPA:SAIS-AA¹⁷-LYL:LKNYQ:VVE, APV:SAIS-AA¹⁷-LYL:LKNYQ:VEE, VPQ:SAIS-AA¹⁷-LYL:LKNYQ:VRS, VSQ:SAIS-AA¹⁷-LYL:LKNYQ:VKS, VPQ:SAIS-AA¹⁷-LYL:LKNYQ:VKS, VPT:SAIS-AA¹⁷-LYL:LKNYQ:QHN, VPT:SAIS-AA¹⁷-LYL:LKNYQ:EHS, SRV:SAIS-AA¹⁷-LYL:LKNYQ:EEH, TQV:SAIS-AA¹⁷-LYL:LKNYQ:EDH, VPE:SSLS-AA⁷-LFF:LKVYP:TVE, VPT:SSLS-AA¹⁷-LFF:LKVYP:VVE, APT:SSLS-AA¹⁷-LFF:LKVYP:VVR, APT:SSLS-AA¹⁷-LFF:LKVYP:VVK, VPT:SSLS-AA¹⁷-LFF:LKVYP:VAE, VPT:SSLS-AA⁷-LFF:LKVYP:AVS, TPT:SSLS-AA¹⁷-LFF:LKVYP:VVD, VPA:SSLS-AA¹⁷-LFF:LKVYP:VVE, APV:SSLS-AA¹⁷-LFF:LKVYP:VEE, VPQ:SSLS-AA¹⁷-LFF:LKVYP:VRS, VSQ:SSLS-AA¹⁷-LFF:LKVYP:VKS, VPQ:SSLS-AA¹⁷-LFF:LKVYP:VKS, VPT:SSLS-AA¹⁷-LFF:LKVYP:QHN, VPT:SSLS-AA¹⁷-LFF:LKVYP:EHS, SRV:SSLS-AA¹⁷-LFF:LKVYP:EEH, TQV:SSLS-AA¹⁷-LFF:LKVYP:EDH, APT:NAIS-AA¹⁷-LYF:LKKYR:VVR, VPT:NAIS-AA¹⁷-LYF:LKKYR:VVE, VPE:NAIS-AA¹⁷-LYF:LKKYR:TVE, APT:NAIS-AA¹⁷-LYF:LKKYR:VVK, VPT:NAIS-AA¹⁷-LYF:LKKYR:VAE, VPT:NAIS-AA¹⁷-LYF:LKKYR:AVS, TPT:NAIS-AA¹⁷-LYF:LKKYR:VVD, VPA:NAIS-AA¹⁷-LYF:LKKYR:VVE, APV:NAIS-AA¹⁷-LYF:LKKYR:VEE, VPQ:NAIS-AA¹⁷-LYF:LKKYR:VRS, VSQ:NAIS-AA¹⁷-LYF:LKKYR:VKS, VPQ:NAIS-AA¹⁷-LYF:LKKYR:VKS, VPT:NAIS-AA¹⁷-LYF:LKKYR:QHN, VPT:NAIS-AA¹⁷-LYF:LKKYR:EHS, SRV:NAIS-AA¹⁷-LYF:LKKYR:EEH, TQV:NAIS-AA¹⁷-LYF:LKKYR:EDH, APT:SATS-AA¹⁷-LYY:LRKHR:VVK, VPT:SATS-AA¹⁷-LYY:LRKHR:VVE, VPE:SATS-AA¹⁷-LYY:LRKHR:TVE, APT:SATS-AA¹⁷-LYY:LRKHR:VVR, VPT:SATS-AA¹⁷-LYY:LRKHR:VAE, VPT:SATS-AA¹⁷-LYY:LRKHR:AVS, TPT:SATS-AA¹⁷-LYY:LRKHR:VVD, VPA:SATS-AA¹⁷-LYY:LRKHR:VVE, APV:SATS-AA¹⁷-LYY:LRKHR:VEE, VPQ:SATS-AA¹⁷-LYY:LRKHR:VRS, VSQ:SATS-AA¹⁷-LYY:LRKHR:VKS, VPQ:SATS-AA¹⁷-LYY:LRKHR:VKS, VPT:SATS-AA¹⁷-LYY:LRKHR:QHN, VPT:SATS-AA¹⁷-LYY:LRKHR:EHS, SRV:SATS-AA¹⁷-LYY:LRKHR:EEH, TQV:SATS-AA¹⁷-LYY:LRKHR:EDH, VPT:SPIS-AA¹⁷-LYK:LKYHY:VAE, VPT:SPIS-AA¹⁷-LYK:LKYHY:VVE, VPE:SPIS-AA¹⁷-LYK:LKYHY:TVE, APT:SPIS-AA¹⁷-LYK:LKYHY:VVR, APT:SPIS-AA¹⁷-LYK:LKYHY:VVK, VPT:SPIS-AA¹⁷-LYK:LKYHY:AVS, TPT:SPIS-AA¹⁷-LYK:LKYHY:VVD, VPA:SPIS-AA¹⁷-LYK:LKYHY:VVE, APV:SPIS-AA¹⁷-LYK:LKYHY:VEE, VPQ:SPIS-AA¹⁷-LYK:LKYHY:VRS, VSQ:SPIS-AA¹⁷-LYK:LKYHY:VKS, VPQ:SPIS-AA¹⁷-LYK:LKYHY:VKS, VPT:SPIS-AA¹⁷-LYK:LKYHY:QHN, VPT:SPIS-AA¹⁷-LYK:LKYHY:EHS, SRV:SPIS-AA¹⁷-LYK:LKYHY:EEH, TQV:SPIS-AA¹⁷-LYK:LKYHY:EDH, VPT:EPIS-AA¹⁷-LYL:KFKYE:AVS, VPT:EPIS-AA¹⁷-LYL:KFKYE:VVE, VPE:EPIS-AA¹⁷-LYL:KFKYE:TVE, APT:EPIS-AA¹⁷-LYL:KFKYE:VVR, APT:EPIS-AA¹⁷-LYL:KFKYE:VVK, VPT:EPIS-AA¹⁷-LYL:KFKYE:VAE, TPT:EPIS-AA¹⁷-LYL:KFKYE:VVD, VPA:EPIS-AA¹⁷-LYL:KFKYE:VVE, APV:EPIS-AA¹⁷-LYL:KFKYE:VEE, VPQ:EPIS-AA¹⁷-LYL:KFKYE:VRS, VSQ:EPIS-AA¹⁷-LYL:KFKYE:VKS, VPQ:EPIS-AA¹⁷-LYL:KFKYE:VKS, VPT:EPIS-AA¹⁷-LYL:KFKYE:QHN, VPT:EPIS-AA¹⁷-LYL:KFKYE:EHS, SRV:EPIS-AA¹⁷-LYL:KFKYE:EEH, TQV:EPIS-AA¹⁷-LYL:KFKYE:EDH, TPT:SPIN-AA¹⁷-LYF:YGKIP:VVD, VPT:SPIN-AA¹⁷-LYF:YGKIP:VVE, VPE:SPIN-AA¹⁷-LYF:YGKIP:TVE, APT:SPIN-AA¹⁷-LYF:YGKIP:VVR, APT:SPIN-AA¹⁷-LYF:YGKIP:VVK, VPT:SPIN-AA¹⁷-LYF:YGKIP:VAE, VPT:SPIN-AA¹⁷-LYF:YGKIP:AVS, VPA:SPIN-AA¹⁷-LYF:YGKIP:VVE, APV:SPIN-AA¹⁷-LYF:YGKIP:VEE, VPQ:SPIN-AA¹⁷-LYF:YGKIP:VRS, VSQ:SPIN-AA¹⁷-LYF:YGKIP:VKS, VPQ:SPIN-AA¹⁷-LYF:YGKIP:VKS, VPT:SPIN-AA¹⁷-LYF:YGKIP:QHN, VPT:SPIN-AA¹⁷-LYF:YGKIP:EHS, SRV:SPIN-AA¹⁷-LYF:YGKIP:EEH, TQV:SPIN-AA¹⁷-LYF:YGKIP:EDH, VPA:SPIS-AA¹⁷-LYI:YKQYE:VVE, VPT:SPIS-AA¹⁷-LYI:YKQYE:VVE, VPE:SPIS-AA¹⁷-LYI:YKQYE:TVE, APT:SPIS-AA¹⁷-LYI:YKQYE:VVR, APT:SPIS-AA¹⁷-LYI:YKQYE:VVK, VPT:SPIS-AA¹⁷-LYI:YKQYE:VAE, VPT:SPIS-AA¹⁷-LYI:YKQYE:AVS, TPT:SPIS-AA¹⁷-LYI:YKQYE:VVD, APV:SPIS-AA¹⁷-LYI:YKQYE:VEE, VPQ:SPIS-AA¹⁷-LYI:YKQYE:VRS, VSQ:SPIS-AA¹⁷-LYI:YKQYE:VKS, VPQ:SPIS-AA¹⁷-LYI:YKQYE:VKS, VPT:SPIS-AA¹⁷-LYI:YKQYE:QHN, VPT:SPIS-AA¹⁷-LYI:YKQYE:EHS, SRV:SPIS-AA¹⁷-LYI:YKQYE:EEH, TQV:SPIS-AA¹⁷-LYI:YKQYE:EDH, VPT:SPIS-AA¹⁷-LFI:YKQYE:VVE, VPE:SPIS-AA¹⁷-LFI:YKQYE:TVE, APT:SPIS-AA¹⁷-LFI:YKQYE:VVR, APT:SPIS-AA¹⁷-LFI:YKQYE:VVK, VPT:SPIS-AA¹⁷-LFI:YKQYE:VAE, VPT:SPIS-AA¹⁷-LFI:YKQYE:AVS, TPT:SPIS-AA¹⁷-LFI:YKQYE:VVD, VPA:SPIS-AA¹⁷-LFI:YKQYE:VVE, APV:SPIS-AA¹⁷-LFI:YKQYE:VEE, VPQ:SPIS-AA¹⁷-LFI:YKQYE:VRS, VSQ:SPIS-AA¹⁷-LFI:YKQYE:VKS, VPQ:SPIS-AA¹⁷-LFI:YKQYE:VKS, VPT:SPIS-AA¹⁷-LFI:YKQYE:QHN, VPT:SPIS-AA¹⁷-LFI:YKQYE:EHS, SRV:SPIS-AA¹⁷-LFI:YKQYE:EEH, TQV:SPIS-AA¹⁷-LFI:YKQYE:EDH, APV:KPLS-AA¹⁷-LYV:DHHKD:VEE, VPT:KPLS-AA¹⁷-LYV:DHHKD:VVE, VPE:KPLS-AA¹⁷-LYV:DHHKD:TVE, APT:KPLS-AA¹⁷-LYV:DHHKD:VVR, APT:KPLS-AA¹⁷-LYV:DHHKD:VVK, VPT:KPLS-AA¹⁷-LYV:DHHKD:VAE, VPT:KPLS-AA¹⁷-LYV:DHHKD:AVS, TPT:KPLS-AA¹⁷-LYV:DHHKD:VVD, VPA:KPLS-AA¹⁷-LYV:DHHKD:VVE, VPQ:KPLS-AA¹⁷-LYV:DHHKD:VRS, VSQ:KPLS-AA¹⁷-LYV:DHHKD:VKS, VPQ:KPLS-AA¹⁷-LYV:DHHKD:VKS, VPT:KPLS-AA¹⁷-LYV:DHHKD:QHN, VPT:KPLS-AA¹⁷-LYV:DHHKD:EHS, SRV:KPLS-AA¹⁷-LYV:DHHKD:EEH, TQV:KPLS-AA¹⁷-LYV:DHHKD:EDH, VPQ:EPLP-AA¹⁷-VYY:EQLSN:VRS, VPT:EPLP-AA¹⁷-VYY:EQLSN:VVE, VPE:EPLP-AA¹⁷-VYY:EQLSN:TVE, APT:EPLP-AA¹⁷-VYY:EQLSN:VVR, APT:EPLP-AA¹⁷-VYY:EQLSN:VVK, VPT:EPLP-AA¹⁷-VYY:EQLSN:VAE, VPT:EPLP-AA¹⁷-VYY:EQLSN:AVS, TPT:EPLP-AA¹⁷-VYY:EQLSN:VVD, VPA:EPLP-AA¹⁷-VYY:EQLSN:VVE, APV:EPLP-AA¹⁷-VYY:EQLSN:VEE, VSQ:EPLP-AA¹⁷-VYY:EQLSN:VKS, VPQ:EPLP-AA¹⁷-VYY:EQLSN:VKS, VPT:EPLP-AA¹⁷-VYY:EQLSN:QHN, VPT:EPLP-AA¹⁷-VYY:EQLSN:EHS, SRV:EPLP-AA¹⁷-VYY:EQLSN:EEH, TQV:EPLP-AA¹⁷-VYY:EQLSN:EDH, VSQ:EPLT-AA¹⁷-LYY:EQLSN:VKS, VPT:EPLT-AA¹⁷-LYY:EQLSN:VVE, VPE:EPLT-AA¹⁷-LYY:EQLSN:TVE, APT:EPLT-AA¹⁷-LYY:EQLSN:VVR, APT:EPLT-AA¹⁷-LYY:EQLSN:VVK, VPT:EPLT-AA¹⁷-LYY:EQLSN:VAE, VPT:EPLT-AA¹⁷-LYY:EQLSN:AVS, TPT:EPLT-AA¹⁷-LYY:EQLSN:VVD, VPA:EPLT-AA¹⁷-LYY:EQLSN:VVE, APV:EPLT-AA¹⁷-LYY:EQLSN:VEE, VPQ:EPLT-AA¹⁷-LYY:EQLSN:VRS, VPQ:EPLT-AA¹⁷-LYY:EQLSN:VKS, VPT:EPLT-AA¹⁷-LYY:EQLSN:QHN, VPT:EPLT-AA¹⁷-LYY:EQLSN:EHS, SRV:EPLT-AA¹⁷-LYY:EQLSN:EEH, TQV:EPLT-AA^{F}-LYY:EQLSN:EDH, VPT:SNIT-AA¹⁷-QIM:IGEMS:QHN, VPT:SNIT-AA¹⁷-QIM:IGEMS:VVE, VPE:SNIT-AA¹⁷-QIM:IGEMS:TVE, APT:SNIT-AA¹⁷-QIM:IGEMS:VVR, APT:SNIT-AA¹⁷-QIM:IGEMS:VVK, VPT:SNIT-AA¹⁷-QIM:IGEMS:VAE, VPT:SNIT-AA¹⁷-QIM:IGEMS:AVS, TPT:SNIT-AA¹⁷-QIM:IGEMS:VVD, VPA:SNIT-AA¹⁷-QIM:IGEMS:VVE, APV:SNIT-AA¹⁷-QIM:IGEMS:VEE, VPQ:SNIT-AA¹⁷-QIM:IGEMS:VRS, VSQ:SNIT-AA¹⁷-QIM:IGEMS:VKS, VPQ:SNIT-AA¹⁷-QIM:IGEMS:VKS, VPT:SNIT-AA¹⁷-QIM:IGEMS:EHS, SRV:SNIT-AA¹⁷-QIM:IGEMS:EEH, TQV:SNIT-AA¹⁷-QIM:IGEMS:EDH, VPT:SNIT-AA¹⁷-QIM:LGEMS:EHS, VPT:SNIT-AA¹⁷-QIM:LGEMS:VVE, VPE:SNIT-AA¹⁷-QIM:LGEMS:TVE, APT:SNIT-AA¹⁷-QIM:LGEMS:VVR, APT:SNIT-AA¹⁷-QIM:LGEMS:VVK, VPT:SNIT-AA¹⁷-QIM:LGEMS:VAE, VPT:SNIT-AA¹⁷-QIM:LGEMS:AVS, TPT:SNIT-AA¹⁷-QM:LGEMS:VVD, VPA:SNIT-AA¹⁷-QIM:LGEMS:VVE, APV:SNIT-AA¹⁷-QIM:LGEMS:VEE, VPQ:SNIT-AA¹⁷-QIM:LGEMS:VRS, VSQ:SNIT-AA¹⁷-QIM:LGEMS:VKS, VPQ:SNIT-AA¹⁷-QIM:LGEMS:VKS, VPT:SNIT-AA¹⁷-QIM:LGEMS:QHN, SRV:SNIT-AA¹⁷-QIM:LGEMS:EEH, TQV:SNIT-AA¹⁷-QIM:LGEMS:EDH, SRV:RSVK-AA¹⁷-AKV:KEVQV:EEH, VPT:RSVK-AA¹⁷-AKV:KEVQV:VVE, VPE:RSVK-AA¹⁷-AKV:KEVQV:TVE, APT:RSVK-AA¹⁷-AKV:KEVQV:VVR, APT:RSVK-AA¹⁷-AKV:KEVQV:VVK, VPT:RSVK-AA¹⁷-AKV:KEVQV:VAE, VPT:RSVK-AA¹⁷-AKV:KEVQV:AVS, TPT:RSVK-AA¹⁷-AKV:KEVQV:VVD, VPA:RSVK-AA¹⁷-AKV:KEVQV:VVE, APV:RSVK-AA¹⁷-AKV:KEVQV:VEE, VPQ:RSVK-AA¹⁷-AKV:KEVQV:VRS, VSQ:RSVK-AA¹⁷-AKV:KEVQV:VKS, VPQ:RSVK-AA¹⁷-AKV:KEVQV:VKS, VPT:RSVK-AA¹⁷-AKV:KEVQV:QHN, VPT:RSVK-AA¹⁷-AKV:KEVQV:EHS, TQV:RSVK-AA¹⁷-AKV:KEVQV:EDH, TQV:RPVQ-AA¹⁷-RKI:KKATV:EDH, VPT:RPVQ-AA¹⁷-RKI:KKATV:VVE, VPE:RPVQ-AA¹⁷-RKI:KKATV:TVE, APT:RPVQ-AA¹⁷-RKI:KKATV:VVR, APT:RPVQ-AA¹⁷-RKI:KKATV:VVK, VPT:RPVQ-AA¹⁷-RKI:KKATV:VAE, VPT:RPVQ-AA¹⁷-RKI:KKATV:AVS, TPT:RPVQ-AA^{F}-RKI:KKATV:VVD, VPA:RPVQ-AA¹⁷-RKI:KKATV:VVE, APV:RPVQ-AA¹⁷-RKI:KKATV:VEE, VPQ:RPVQ-AA¹⁷-RKI:KKATV:VRS, VSQ:RPVQ-AA¹⁷-RKI:KKATV:VKS, VPQ:RPVQ-AA¹⁷-RKI:KKATV:VKS, VPT:RPVQ-AA¹⁷-RKI:KKATV:QHN, VPT:RPVQ-AA¹⁷-RKI:KKATV:EHS and SRV:RPVQ-AA¹⁷-RKI:KKATV:EEH; and wherein AA¹⁷ is selected from the group consisting of G, A, V, L, I, P, F, M, W, T and S (in particular is selected from the group consisting of M, I, L, V and T).

[0435] In particular, in certain embodiments, the quadruplet PEP5:PEP1:PEP2:PEP6 is selected from the group consisting of VPTKM:SAIS:LKNYQ:NMVVE, VPTEL:SAIS:LKNYQ:EMVVE, VPTKL:SAIS:LKNYQ:NMVVE, VPTQL:SAIS:LKNYQ:NMVVE, VPTKL:SAIS:LKNYQ:EGMSVVE, VPTKL:SAIS:LKNYQ:GMVVE, VPTKM:SAIS:LKNYQ:GMVVE, VPTRL:SAIS:LKNYQ:DMVVE, VPTKT:SAIS:LKNYQ:MIVVE, VPTAL:SAIS:LKNYQ:MIVVE, VPTDL:SAIS:LKNYQ:MIVVE, VPTDL:SAIS:LKNYQ:MVVVE, VPTEE:SAIS:LKNYQ:FLVVE, VPTGQ:SAIS:LKNYQ:LEVVE, VPTHH:SAIS:LKNYQ:RLVVE, VPTQL:SAIS:LKNYQ:TLVVE, VPEKM:SAIS:LKNYQ:NMTVE, APTKL:SAIS:LKNYQ:NMVVR, APTQL:SAIS:LKNYQ:NMVVR, APTKL:SAIS:LKNYQ:NMVVK, VPTKL:SAIS:LKNYQ:EGMSVAE, VPTKL:SAIS:LKNYQ:GMAVS, TPTKM:SAIS:LKNYQ:GMVVD, VPARL:SAIS:LKNYQ:DMVVE, APVKT:SAIS:LKNYQ:MIVEE, VPQAL:SAIS:LKNYQ:MIVRS, VSQDL:SAIS:LKNYQ:MIVKS, VPQDL:SAIS:LKNYQ:MVVKS, VPTEE:SAIS:LKNYQ:FLQHN, VPTGQ:SAIS:LKNYQ:LEEHS, SRVHH:SAIS:LKNYQ:RLEEH, TQVQL:SAIS:LKNYQ:TLEDH, VPEEL:SSLS:LKVYP:DMTVE, VPEEL:SSLS:LKVYP:EMTVE, VPEKL:SSLS:LKVYP:NMTVE, VPEQL:SSLS:LKVYP:NMTVE, VPEKL:SSLS:LKVYP:EGMSTVE, VPEKL:SSLS:LKVYP:GMTVE, VPEKM:SSLS:LKVYP:GMTVE, VPERL:SSLS:LKVYP:DMTVE, VPEKT:SSLS:LKVYP:MITVE, VPEAL:SSLS:LKVYP:MITVE, VPEDL:SSLS:LKVYP:MITVE, VPEDL:SSLS:LKVYP:MVTVE, VPEEE:SSLS:LKVYP:FLTVE, VPEGQ:SSLS:LKVYP:LETVE, VPEHH:SSLS:LKVYP:RLTVE, VPEQL:SSLS:LKVYP:TLTVE, VPTEL:SSLS:LKVYP:DMVVE, VPTEL:SSLS:LKVYP:EMVVE, APTKL:SSLS:LKVYP:NMVVR, APTQL:SSLS:LKVYP:NMVVR, APTKL:SSLS:LKVYP:NMVVK, VPTKL:SSLS:LKVYP:EGMSVAE, VPTKL:SSLS:LKVYP:GMAVS, TPTKM:SSLS:LKVYP:GMVVD, VPARL:SSLS:LKVYP:DMVVE, VPTRL:SSLS:LKVYP:DMVVE, APVKT:SSLS:LKVYP:MIVEE, VPQAL:SSLS:LKVYP:MIVRS, VSQDL:SSLS:LKVYP:MIVKS, VPQDL:SSLS:LKVYP:MVVKS, VPTEE:SSLS:LKVYP:FLQHN, VPTGQ:SSLS:LKVYP:LEEHS, SRVHH:SSLS:LKVYP:RLEEH, TQVQL:SSLS:LKVYP:TLEDH, VPTEL:SAIS:LKNYQ:DMVVE, APTEL:NAIS:LKKYR:DMVVR, APTKM:NAIS:LKKYR:NMVVR, APTEL:NAIS:LKKYR:EMVVR, APTKL:NAIS:LKKYR:NMVVR, APTQL:NAIS:LKKYR:NMVVR, APTKL:NAIS:LKKYR:EGMSVVR, APTKL:NAIS:LKKYR:GMVVR, APTKM:NAIS:LKKYR:GMVVR, APTRL:NAIS:LKKYR:DMVVR, APTKT:NAIS:LKKYR:MIVVR, APTAL:NAIS:LKKYR:MIVVR, APTDL:NAIS:LKKYR:MIVVR, APTDL:NAIS:LKKYR:MVVVR, APTEE:NAIS:LKKYR:FLVVR, APTGQ:NAIS:LKKYR:LEVVR, APTHH:NAIS:LKKYR:RLVVR, APTQL:NAIS:LKKYR:TLVVR, VPTEL:NAIS:LKKYR:DMVVE, VPEKM:NAIS:LKKYR:NMTVE, VPTEL:NAIS:LKKYR:EMVVE, APTKL:NAIS:LKKYR:NMVVK, VPTKL:NAIS:LKKYR:EGMSVAE, VPTKL:NAIS:LKKYR:GMAVS, TPTKM:NAIS:LKKYR:GMVVD, VPARL:NAIS:LKKYR:DMVVE, VPTRL:NAIS:LKKYR:DMVVE, APVKT:NAIS:LKKYR:MIVEE, VPQAL:NAIS:LKKYR:MIVRS, VSQDL:NAIS:LKKYR:MIVKS, VPQDL:NAIS:LKKYR:MVVKS, VPTEE:NAIS:LKKYR:FLQHN, VPTGQ:NAIS:LKKYR:LEEHS, SRVHH:NAIS:LKKYR:RLEEH, TQVQL:NAIS:LKKYR:TLEDH, APTEL:SATS:LRKHR:DMVVK, APTKM:SATS:LRKHR:NMVVK, APTEL:SATS:LRKHR:EMVVK, APTKL:SATS:LRKHR:NMVVK, APTQL:SATS:LRKHR:NMVVK, APTKL:SATS:LRKHR:EGMSVVK, APTKL:SATS:LRKHR:GMVVK, APTKM:SATS:LRKHR:GMVVK, APTRL:SATS:LRKHR:DMVVK, APTKT:SATS:LRKHR:MIVVK, APTAL:SATS:LRKHR:MIVVK, APTDL:SATS:LRKHR:MIVVK, APTDL:SATS:LRKHR:MVVVK, APTEE:SATS:LRKHR:FLVVK, APTGQ:SATS:LRKHR:LEVVK, APTHH:SATS:LRKHR:RLVVK, APTQL:SATS:LRKHR:TLVVK, VPTEL:SATS:LRKHR:DMVVE, VPEKM:SATS:LRKHR:NMTVE, VPTEL:SATS:LRKHR:EMVVE, APTKL:SATS:LRKHR:NMVVR, APTQL:SATS:LRKHR:NMVVR, VPTKL:SATS:LRKHR:EGMSVAE, VPTKL:SATS:LRKHR:GMAVS, TPTKM:SATS:LRKHR:GMVVD, VPARL:SATS:LRKHR:DMVVE, VPTRL:SATS:LRKHR:DMVVE, APVKT:SATS:LRKHR:MIVEE, VPQAL:SATS:LRKHR:MIVRS, VSQDL:SATS:LRKHR:MIVKS, VPQDL:SATS:LRKHR:MVVKS, VPTEE:SATS:LRKHR:FLQHN, VPTGQ:SATS:LRKHR:LEEHS, SRVHH:SATS:LRKHR:RLEEH, TQVQL:SATS:LRKHR:TLEDH, VPTEL:SPIS:LKYHY:DMVAE, VPTKM:SPIS:LKYHY:NMVAE, VPTEL:SPIS:LKYHY:EMVAE, VPTKL:SPIS:LKYHY:NMVAE, VPTQL:SPIS:LKYHY:NMVAE, VPTKL:SPIS:LKYHY:GMVAE, VPTKM:SPIS:LKYHY:GMVAE, VPTRL:SPIS:LKYHY:DMVAE, VPTKT:SPIS:LKYHY:MIVAE, VPTAL:SPIS:LKYHY:MIVAE, VPTDL:SPIS:LKYHY:MIVAE, VPTDL:SPIS:LKYHY:MVVAE, VPTEE:SPIS:LKYHY:FLVAE, VPTGQ:SPIS:LKYHY:LEVAE, VPTHH:SPIS:LKYHY:RLVAE, VPTQL:SPIS:LKYHY:TLVAE, VPTEL:SPIS:LKYHY:DMVVE, VPEKM:SPIS:LKYHY:NMTVE, VPTEL:SPIS:LKYHY:EMVVE, APTKL:SPIS:LKYHY:NMVVR, APTQL:SPIS:LKYHY:NMVVR, APTKL:SPIS:LKYHY:NMVVK, VPTKL:SPIS:LKYHY:GMAVS, TPTKM:SPIS:LKYHY:GMVVD, VPARL:SPIS:LKYHY:DMVVE, VPTRL:SPIS:LKYHY:DMVVE, APVKT:SPIS:LKYHY:MIVEE, VPQAL:SPIS:LKYHY:MIVRS, VSQDL:SPIS:LKYHY:MIVKS, VPQDL:SPIS:LKYHY:MVVKS, VPTEE:SPIS:LKYHY:FLQHN, VPTGQ:SPIS:LKYHY:LEEHS, SRVHH:SPIS:LKYHY:RLEEH, TQVQL:SPIS:LKYHY:TLEDH, VPTEL:EPIS:KFKYE:DMAVS, VPTKM:EPIS:KFKYE:NMAVS, VPTEL:EPIS:KFKYE:EMAVS, VPTKL:EPIS:KFKYE:NMAVS, VPTQL:EPIS:KFKYE:NMAVS, VPTKL:EPIS:KFKYE:EGMSAVS, VPTKM:EPIS:KFKYE:GMAVS, VPTRL:EPIS:KFKYE:DMAVS, VPTKT:EPIS:KFKYE:MIAVS, VPTAL:EPIS:KFKYE:MIAVS, VPTDL:EPIS:KFKYE:MIAVS, VPTDL:EPIS:KFKYE:MVAVS, VPTEE:EPIS:KFKYE:FLAVS, VPTGQ:EPIS:KFKYE:LEAVS, VPTHH:EPIS:KFKYE:RLAVS, VPTQL:EPIS:KFKYE:TLAVS, VPTEL:EPIS:KFKYE:DMVVE, VPEKM:EPIS:KFKYE:NMTVE, VPTEL:EPIS:KFKYE:EMVVE, APTKL:EPIS:KFKYE:NMVVR, APTQL:EPIS:KFKYE:NMVVR, APTKL:EPIS:KFKYE:NMVVK, VPTKL:EPIS:KFKYE:EGMSVAE, TPTKM:EPIS:KFKYE:GMVVD, VPARL:EPIS:KFKYE:DMVVE, VPTRL:EPIS:KFKYE:DMVVE, APVKT:EPIS:KFKYE:MIVEE, VPQAL:EPIS:KFKYE:MIVRS, VSQDL:EPIS:KFKYE:MIVKS, VPQDL:EPIS:KFKYE:MVVKS, VPTEE:EPIS:KFKYE:FLQHN, VPTGQ:EPIS:KFKYE:LEEHS, SRVHH:EPIS:KFKYE:RLEEH, TQVQL:EPIS:KFKYE:TLEDH, TPTEL:SPIN:YGKIP:DMVVD, TPTKM:SPIN:YGKIP:NMVVD, TPTEL:SPIN:YGKIP:EMVVD, TPTKL:SPIN:YGKIP:NMVVD, TPTQL:SPIN:YGKIP:NMVVD, TPTKL:SPIN:YGKIP:EGMSVVD, TPTKL:SPIN:YGKIP:GMVVD, TPTRL:SPIN:YGKIP:DMVVD, TPTKT:SPIN:YGKIP:MIVVD, TPTAL:SPIN:YGKIP:MIVVD, TPTDL:SPIN:YGKIP:MIVVD, TPTDL:SPIN:YGKIP:MVVVD, TPTEE:SPIN:YGKIP:FLVVD, TPTGQ:SPIN:YGKIP:LEVVD, TPTHH:SPIN:YGKIP:RLVVD, TPTQL:SPIN:YGKIP:TLVVD, VPTEL:SPIN:YGKIP:DMVVE, VPEKM:SPIN:YGKIP:NMTVE, VPTEL:SPIN:YGKIP:EMVVE, APTKL:SPIN:YGKIP:NMVVR, APTQL:SPIN:YGKIP:NMVVR, APTKL:SPIN:YGKIP:NMVVK, VPTKL:SPIN:YGKIP:EGMSVAE, VPTKL:SPIN:YGKIP:GMAVS, VPARL:SPIN:YGKIP:DMVVE, VPTRL:SPIN:YGKIP:DMVVE, APVKT:SPIN:YGKIP:MIVEE, VPQAL:SPIN:YGKIP:MIVRS, VSQDL:SPIN:YGKIP:MIVKS, VPQDL:SPIN:YGKIP:MVVKS, VPTEE:SPIN:YGKIP:FLQHN, VPTGQ:SPIN:YGKIP:LEEHS, SRVHH:SPIN:YGKIP:RLEEH, TQVQL:SPIN:YGKIP:TLEDH, VPAEL:SPIS:YKQYE:DMVVE, VPAKM:SPIS:YKQYE:NMVVE, VPAEL:SPIS:YKQYE:EMVVE, VPAKL:SPIS:YKQYE:NMVVE, VPAQL:SPIS:YKQYE:NMVVE, VPAKL:SPIS:YKQYE:EGMSVVE, VPAKL:SPIS:YKQYE:GMVVE, VPAKM:SPIS:YKQYE:GMVVE, VPARL:SPIS:YKQYE:DMVVE, VPAKT:SPIS:YKQYE:MIVVE, VPAAL:SPIS:YKQYE:MIVVE, VPADL:SPIS:YKQYE:MIVVE, VPADL:SPIS:YKQYE:MVVVE, VPAEE:SPIS:YKQYE:FLVVE, VPAGQ:SPIS:YKQYE:LEVVE, VPAHH:SPIS:YKQYE:RLVVE, VPAQL:SPIS:YKQYE:TLVVE, VPTEL:SPIS:YKQYE:DMVVE, VPEKM:SPIS:YKQYE:NMTVE, VPTEL:SPIS:YKQYE:EMVVE, APTKL:SPIS:YKQYE:NMVVR, APTQL:SPIS:YKQYE:NMVVR, APTKL:SPIS:YKQYE:NMVVK, VPTKL:SPIS:YKQYE:EGMSVAE, VPTKL:SPIS:YKQYE:GMAVS, TPTKM:SPIS:YKQYE:GMVVD, VPTRL:SPIS:YKQYE:DMVVE, APVKT:SPIS:YKQYE:MIVEE, VPQAL:SPIS:YKQYE:MIVRS, VSQDL:SPIS:YKQYE:MIVKS, VPQDL:SPIS:YKQYE:MVVKS, VPTEE:SPIS:YKQYE:FLQHN, VPTGQ:SPIS:YKQYE:LEEHS, SRVHH:SPIS:YKQYE:RLEEH, TQVQL:SPIS:YKQYE:TLEDH, VPTKM:SPIS:YKQYE:NMVVE, VPTKL:SPIS:YKQYE:NMVVE, VPTQL:SPIS:YKQYE:NMVVE, VPTKL:SPIS:YKQYE:EGMSVVE, VPTKL:SPIS:YKQYE:GMVVE, VPTKM:SPIS:YKQYE:GMVVE, VPTKT:SPIS:YKQYE:MIVVE, VPTAL:SPIS:YKQYE:MIVVE, VPTDL:SPIS:YKQYE:MIVVE, VPTDL:SPIS:YKQYE:MVVVE, VPTEE:SPIS:YKQYE:FLVVE, VPTGQ:SPIS:YKQYE:LEVVE, VPTHH:SPIS:YKQYE:RLVVE, VPTQL:SPIS:YKQYE:TLVVE, APVEL:KPLS:DHHKD:DMVEE, APVKM:KPLS:DHHKD:NMVEE, APVEL:KPLS:DHHKD:EMVEE, APVKL:KPLS:DHHKD:NMVEE, APVQL:KPLS:DHHKD:NMVEE, APVKL:KPLS:DHHKD:EGMSVEE, APVKL:KPLS:DHHKD:GMVEE, APVKM:KPLS:DHHKD:GMVEE, APVRL:KPLS:DHHKD:DMVEE, APVAL:KPLS:DHHKD:MIVEE, APVDL:KPLS:DHHKD:MIVEE, APVDL:KPLS:DHHKD:MVVEE, APVEE:KPLS:DHHKD:FLVEE, APVGQ:KPLS:DHHKD:LEVEE, APVHH:KPLS:DHHKD:RLVEE, APVQL:KPLS:DHHKD:TLVEE, VPTEL:KPLS:DHHKD:DMVVE, VPEKM:KPLS:DHHKD:NMTVE, VPTEL:KPLS:DHHKD:EMVVE, APTKL:KPLS:DHHKD:NMVVR, APTQL:KPLS:DHHKD:NMVVR, APTKL:KPLS:DHHKD:NMVVK, VPTKL:KPLS:DHHKD:EGMSVAE, VPTKL:KPLS:DHHKD:GMAVS, TPTKM:KPLS:DHHKD:GMVVD, VPARL:KPLS:DHHKD:DMVVE, VPTRL:KPLS:DHHKD:DMVVE, VPQAL:KPLS:DHHKD:MIVRS, VSQDL:KPLS:DHHKD:MIVKS, VPQDL:KPLS:DHHKD:MVVKS, VPTEE:KPLS:DHHKD:FLQHN, VPTGQ:KPLS:DHHKD:LEEHS, SRVHH:KPLS:DHHKD:RLEEH, TQVQL:KPLS:DHHKD:TLEDH, VPQEL:EPLP:EQLSN:DMVRS, VPQKM:EPLP:EQLSN:NMVRS, VPQEL:EPLP:EQLSN:EMVRS, VPQKL:EPLP:EQLSN:NMVRS, VPQQL:EPLP:EQLSN:NMVRS, VPQKL:EPLP:EQLSN:EGMSVRS, VPQKL:EPLP:EQLSN:GMVRS, VPQKM:EPLP:EQLSN:GMVRS, VPQRL:EPLP:EQLSN:DMVRS, VPQKT:EPLP:EQLSN:MIVRS, VPQDL:EPLP:EQLSN:MIVRS, VPQDL:EPLP:EQLSN:MVVRS, VPQEE:EPLP:EQLSN:FLVRS, VPQGQ:EPLP:EQLSN:LEVRS, VPQHH:EPLP:EQLSN:RLVRS, VPQQL:EPLP:EQLSN:TLVRS, VPTEL:EPLP:EQLSN:DMVVE, VPEKM:EPLP:EQLSN:NMTVE, VPTEL:EPLP:EQLSN:EMVVE, APTKL:EPLP:EQLSN:NMVVR, APTQL:EPLP:EQLSN:NMVVR, APTKL:EPLP:EQLSN:NMVVK, VPTKL:EPLP:EQLSN:EGMSVAE, VPTKL:EPLP:EQLSN:GMAVS, TPTKM:EPLP:EQLSN:GMVVD, VPARL:EPLP:EQLSN:DMVVE, VPTRL:EPLP:EQLSN:DMVVE, APVKT:EPLP:EQLSN:MIVEE, VSQDL:EPLP:EQLSN:MIVKS, VPQDL:EPLP:EQLSN:MVVKS, VPTEE:EPLP:EQLSN:FLQHN, VPTGQ:EPLP:EQLSN:LEEHS, SRVHH:EPLP:EQLSN:RLEEH, TQVQL:EPLP:EQLSN:TLEDH, VSQEL:EPLT:EQLSN:DMVKS, VSQKM:EPLT:EQLSN:NMVKS, VSQEL:EPLT:EQLSN:EMVKS, VSQKL:EPLT:EQLSN:NMVKS, VSQQL:EPLT:EQLSN:NMVKS, VSQKL:EPLT:EQLSN:EGMSVKS, VSQKL:EPLT:EQLSN:GMVKS, VSQKM:EPLT:EQLSN:GMVKS, VSQRL:EPLT:EQLSN:DMVKS, VSQKT:EPLT:EQLSN:MIVKS, VSQAL:EPLT:EQLSN:MIVKS, VSQDL:EPLT:EQLSN:MVVKS, VSQEE:EPLT:EQLSN:FLVKS, VSQGQ:EPLT:EQLSN:LEVKS, VSQHH:EPLT:EQLSN:RLVKS, VSQQL:EPLT:EQLSN:TLVKS, VPTEL:EPLT:EQLSN:DMVVE, VPEKM:EPLT:EQLSN:NMTVE, VPTEL:EPLT:EQLSN:EMVVE, APTKL:EPLT:EQLSN:NMVVR, APTQL:EPLT:EQLSN:NMVVR, APTKL:EPLT:EQLSN:NMVVK, VPTKL:EPLT:EQLSN:EGMSVAE, VPTKL:EPLT:EQLSN:GMAVS, TPTKM:EPLT:EQLSN:GMVVD, VPARL:EPLT:EQLSN:DMVVE, VPTRL:EPLT:EQLSN:DMVVE, APVKT:EPLT:EQLSN:MIVEE, VPQAL:EPLT:EQLSN:MIVRS, VPQDL:EPLT:EQLSN:MVVKS, VPTEE:EPLT:EQLSN:FLQHN, VPTGQ:EPLT:EQLSN:LEEHS, SRVHH:EPLT:EQLSN:RLEEH, TQVQL:EPLT:EQLSN:TLEDH, VPQEL:EPLT:EQLSN:DMVKS, VPQKM:EPLT:EQLSN:NMVKS, VPQEL:EPLT:EQLSN:EMVKS, VPQKL:EPLT:EQLSN:NMVKS, VPQQL:EPLT:EQLSN:NMVKS, VPQKL:EPLT:EQLSN:EGMSVKS, VPQKL:EPLT:EQLSN:GMVKS, VPQKM:EPLT:EQLSN:GMVKS, VPQRL:EPLT:EQLSN:DMVKS, VPQKT:EPLT:EQLSN:MIVKS, VPQAL:EPLT:EQLSN:MIVKS, VPQDL:EPLT:EQLSN:MIVKS, VPQEE:EPLT:EQLSN:FLVKS, VPQGQ:EPLT:EQLSN:LEVKS, VPQHH:EPLT:EQLSN:RLVKS, VPQQL:EPLT:EQLSN:TLVKS, VSQDL:EPLT:EQLSN:MIVKS, VPTEL:SNIT:IGEMS:DMQHN, VPTKM:SNIT:IGEMS:NMQHN, VPTEL:SNIT:IGEMS:EMQHN, VPTKL:SNIT:IGEMS:NMQHN, VPTQL:SNIT:IGEMS:NMQHN, VPTKL:SNIT:IGEMS:EGMSQHN, VPTKL:SNIT:IGEMS:GMQHN, VPTKM:SNIT:IGEMS:GMQHN, VPTRL:SNIT:IGEMS:DMQHN, VPTKT:SNIT:IGEMS:MIQHN, VPTAL:SNIT:IGEMS:MIQHN, VPTDL:SNIT:IGEMS:MIQHN, VPTDL:SNIT:IGEMS:MVQHN, VPTGQ:SNIT:IGEMS:LEQHN, VPTEE:SNIT:IGEMS:FLQHN, VPTHH:SNIT:IGEMS:RLQHN, VPTQL:SNIT:IGEMS:TLQHN, VPTEL:SNIT:IGEMS:DMVVE, VPEKM:SNIT:IGEMS:NMTVE, VPTEL:SNIT:IGEMS:EMVVE, APTKL:SNIT:IGEMS:NMVVR, APTQL:SNIT:IGEMS:NMVVR, APTKL:SNIT:IGEMS:NMVVK, VPTKL:SNIT:IGEMS:EGMSVAE, VPTKL:SNIT:IGEMS:GMAVS, TPTKM:SNIT:IGEMS:GMVVD, VPARL:SNIT:IGEMS:DMVVE, VPTRL:SNIT:IGEMS:DMVVE, APVKT:SNIT:IGEMS:MIVEE, VPQAL:SNIT:IGEMS:MIVRS, VSQDL:SNIT:IGEMS:MIVKS, VPQDL:SNIT:IGEMS:MVVKS, VPTGQ:SNIT:IGEMS:LEEHS, SRVHH:SNIT:IGEMS:RLEEH, TQVQL:SNIT:IGEMS:TLEDH, VPTEL:SNIT:LGEMS:DMEHS, VPTKM:SNIT:LGEMS:NMEHS, VPTEL:SNIT:LGEMS:EMEHS, VPTKL:SNIT:LGEMS:NMEHS, VPTQL:SNIT:LGEMS:NMEHS, VPTKL:SNIT:LGEMS:EGMSEHS, VPTKL:SNIT:LGEMS:GMEHS, VPTKM:SNIT:LGEMS:GMEHS, VPTRL:SNIT:LGEMS:DMEHS, VPTKT:SNIT:LGEMS:MIEHS, VPTAL:SNIT:LGEMS:MIEHS, VPTDL:SNIT:LGEMS:MIEHS, VPTDL:SNIT:LGEMS:MVEHS, VPTEE:SNIT:LGEMS:FLEHS, VPTHH:SNIT:LGEMS:RLEHS, VPTQL:SNIT:LGEMS:TLEHS, VPTEL:SNIT:LGEMS:DMVVE, VPEKM:SNIT:LGEMS:NMTVE, VPTEL:SNIT:LGEMS:EMVVE, APTKL:SNIT:LGEMS:NMVVR, APTQL:SNIT:LGEMS:NMVVR, APTKL:SNIT:LGEMS:NMVVK, VPTKL:SNIT:LGEMS:EGMSVAE, VPTKL:SNIT:LGEMS:GMAVS, TPTKM:SNIT:LGEMS:GMVVD, VPARL:SNIT:LGEMS:DMVVE, VPTRL:SNIT:LGEMS:DMVVE, APVKT:SNIT:LGEMS:MIVEE, VPQAL:SNIT:LGEMS:MIVRS, VSQDL:SNIT:LGEMS:MIVKS, VPQDL:SNIT:LGEMS:MVVKS, VPTEE:SNIT:LGEMS:FLQHN, SRVHH:SNIT:LGEMS:RLEEH, TQVQL:SNIT:LGEMS:TLEDH, SRVEL:RSVK:KEVQV:DMEEH, SRVKM:RSVK:KEVQV:NMEEH, SRVEL:RSVK:KEVQV:EMEEH, SRVKL:RSVK:KEVQV:NMEEH, SRVQL:RSVK:KEVQV:NMEEH, SRVKL:RSVK:KEVQV:EGMSEEH, SRVKL:RSVK:KEVQV:GMEEH, SRVKM:RSVK:KEVQV:GMEEH, SRVRL:RSVK:KEVQV:DMEEH, SRVKT:RSVK:KEVQV:MIEEH, SRVAL:RSVK:KEVQV:MIEEH, SRVDL:RSVK:KEVQV:MIEEH, SRVDL:RSVK:KEVQV:MVEEH, SRVEE:RSVK:KEVQV:FLEEH, SRVGQ:RSVK:KEVQV:LEEEH, SRVQL:RSVK:KEVQV:TLEEH, VPTEL:RSVK:KEVQV:DMVVE, VPEKM:RSVK:KEVQV:NMTVE, VPTEL:RSVK:KEVQV:EMVVE, APTKL:RSVK:KEVQV:NMVVR, APTQL:RSVK:KEVQV:NMVVR, APTKL:RSVK:KEVQV:NMVVK, VPTKL:RSVK:KEVQV:EGMSVAE, VPTKL:RSVK:KEVQV:GMAVS, TPTKM:RSVK:KEVQV:GMVVD, VPARL:RSVK:KEVQV:DMVVE, VPTRL:RSVK:KEVQV:DMVVE, APVKT:RSVK:KEVQV:MIVEE, VPQAL:RSVK:KEVQV:MIVRS, VSQDL:RSVK:KEVQV:MIVKS, VPQDL:RSVK:KEVQV:MVVKS, VPTEE:RSVK:KEVQV:FLQHN, VPTGQ:RSVK:KEVQV:LEEHS, TQVQL:RSVK:KEVQV:TLEDH, TQVEL:RPVQ:KKATV:DMEDH, TQVKM:RPVQ:KKATV:NMEDH, TQVEL:RPVQ:KKATV:EMEDH, TQVKL:RPVQ:KKATV:NMEDH, TQVQL:RPVQ:KKATV:NMEDH, TQVKL:RPVQ:KKATV:EGMSEDH, TQVKL:RPVQ:KKATV:GMEDH, TQVKM:RPVQ:KKATV:GMEDH, TQVRL:RPVQ:KKATV:DMEDH, TQVKT:RPVQ:KKATV:MIEDH, TQVAL:RPVQ:KKATV:MIEDH, TQVDL:RPVQ:KKATV:MIEDH, TQVDL:RPVQ:KKATV:MVEDH, TQVEE:RPVQ:KKATV:FLEDH, TQVGQ:RPVQ:KKATV:LEEDH, TQVHH:RPVQ:KKATV:RLEDH, VPTEL:RPVQ:KKATV:DMVVE, VPEKM:RPVQ:KKATV:NMTVE, VPTEL:RPVQ:KKATV:EMVVE, APTKL:RPVQ:KKATV:NMVVR, APTQL:RPVQ:KKATV:NMVVR, APTKL:RPVQ:KKATV:NMVVK, VPTKL:RPVQ:KKATV:EGMSVAE, VPTKL:RPVQ:KKATV:GMAVS, TPTKM:RPVQ:KKATV:GMVVD, VPARL:RPVQ:KKATV:DMVVE, VPTRL:RPVQ:KKATV:DMVVE, APVKT:RPVQ:KKATV:MIVEE, VPQAL:RPVQ:KKATV:MIVRS, VSQDL:RPVQ:KKATV:MIVKS, VPQDL:RPVQ:KKATV:MVVKS, VPTEE:RPVQ:KKATV:FLQHN, VPTGQ:RPVQ:KKATV:LEEHS and SRVHH:RPVQ:KKATV:RLEEH. More particularly, the quadruplet PEP5:PEP1:PEP2:PEP6 is selected from the group consisting of VPTKM:SAIS:LKNYQ:NMVVE, VPTKL:SAIS:LKNYQ:NMVVE, VPTQL:SAIS:LKNYQ:NMVVE, VPTKL:SAIS:LKNYQ:EGMSVVE, VPTKL:SAIS:LKNYQ:GMVVE, VPTKM:SAIS:LKNYQ:GMVVE, VPTRL:SAIS:LKNYQ:DMVVE, VPTKT:SAIS:LKNYQ:MIVVE, VPTAL:SAIS:LKNYQ:MIVVE, VPTDL:SAIS:LKNYQ:MIVVE, VPTDL:SAIS:LKNYQ:MVVVE, VPEKM:SAIS:LKNYQ:NMTVE, APTKL:SAIS:LKNYQ:NMVVR, APTQL:SAIS:LKNYQ:NMVVR, APTKL:SAIS:LKNYQ:NMVVK, VPTKL:SAIS:LKNYQ:EGMSVAE, VPTKL:SAIS:LKNYQ:GMAVS, TPTKM:SAIS:LKNYQ:GMVVD, VPARL:SAIS:LKNYQ:DMVVE, APVKT:SAIS:LKNYQ:MIVEE, VPQAL:SAIS:LKNYQ:MIVRS, VSQDL:SAIS:LKNYQ:MIVKS, VPQDL:SAIS:LKNYQ:MVVKS, VPTEE:SAIS:LKNYQ:FLQHN, VPTGQ:SAIS:LKNYQ:LEEHS, SRVHH:SAIS:LKNYQ:RLEEH, TQVQL:SAIS:LKNYQ:TLEDH, VPEEL:SSLS:LKVYP:DMTVE, VPEEL:SSLS:LKVYP:EMTVE, VPEKL:SSLS:LKVYP:NMTVE, VPEQL:SSLS:LKVYP:NMTVE, VPEKL:SSLS:LKVYP:EGMSTVE, VPEKL:SSLS:LKVYP:GMTVE, VPEKM:SSLS:LKVYP:GMTVE, VPERL:SSLS:LKVYP:DMTVE, VPEKT:SSLS:LKVYP:MITVE, VPEAL:SSLS:LKVYP:MITVE, VPEDL:SSLS:LKVYP:MITVE, VPEDL:SSLS:LKVYP:MVTVE, VPTEL:SSLS:LKVYP:DMVVE, VPTEL:SSLS:LKVYP:EMVVE, APTKL:SSLS:LKVYP:NMVVR, APTQL:SSLS:LKVYP:NMVVR, APTKL:SSLS:LKVYP:NMVVK, VPTKL:SSLS:LKVYP:EGMSVAE, VPTKL:SSLS:LKVYP:GMAVS, TPTKM:SSLS:LKVYP:GMVVD, VPARL:SSLS:LKVYP:DMVVE, VPTRL:SSLS:LKVYP:DMVVE, APVKT:SSLS:LKVYP:MIVEE, VPQAL:SSLS:LKVYP:MIVRS, VSQDL:SSLS:LKVYP:MIVKS, VPQDL:SSLS:LKVYP:MVVKS, VPTEE:SSLS:LKVYP:FLQHN, VPTGQ:SSLS:LKVYP:LEEHS, SRVHH:SSLS:LKVYP:RLEEH, TQVQL:SSLS:LKVYP:TLEDH, APTEL:NAIS:LKKYR:DMVVR, APTKM:NAIS:LKKYR:NMVVR, APTEL:NAIS:LKKYR:EMVVR, APTKL:NAIS:LKKYR:NMVVR, APTKL:NAIS:LKKYR:EGMSVVR, APTKL:NAIS:LKKYR:GMVVR, APTKM:NAIS:LKKYR:GMVVR, APTRL:NAIS:LKKYR:DMVVR, APTKT:NAIS:LKKYR:MIVVR, APTAL:NAIS:LKKYR:MIVVR, APTDL:NAIS:LKKYR:MIVVR, APTDL:NAIS:LKKYR:MVVVR, VPTEL:NAIS:LKKYR:DMVVE, VPEKM:NAIS:LKKYR:NMTVE, VPTEL:NAIS:LKKYR:EMVVE, APTKL:NAIS:LKKYR:NMVVK, VPTKL:NAIS:LKKYR:EGMSVAE, VPTKL:NAIS:LKKYR:GMAVS, TPTKM:NAIS:LKKYR:GMVVD, VPARL:NAIS:LKKYR:DMVVE, VPTRL:NAIS:LKKYR:DMVVE, APVKT:NAIS:LKKYR:MIVEE, VPQAL:NAIS:LKKYR:MIVRS, VSQDL:NAIS:LKKYR:MIVKS, VPQDL:NAIS:LKKYR:MVVKS, VPTEE:NAIS:LKKYR:FLQHN, VPTGQ:NAIS:LKKYR:LEEHS, SRVHH:NAIS:LKKYR:RLEEH, TQVQL:NAIS:LKKYR:TLEDH, APTEL:SATS:LRKHR:DMVVK, APTKM:SATS:LRKHR:NMVVK, APTEL:SATS:LRKHR:EMVVK, APTKL:SATS:LRKHR:NMVVK, APTQL:SATS:LRKHR:NMVVK, APTKL:SATS:LRKHR:EGMSVVK, APTKL:SATS:LRKHR:GMVVK, APTKM:SATS:LRKHR:GMVVK, APTRL:SATS:LRKHR:DMVVK, APTKT:SATS:LRKHR:MIVVK, APTAL:SATS:LRKHR:MIVVK, APTDL:SATS:LRKHR:MIVVK, APTDL:SATS:LRKHR:MVVVK, VPTEL:SATS:LRKHR:DMVVE, VPEKM:SATS:LRKHR:NMTVE, VPTEL:SATS:LRKHR:EMVVE, APTKL:SATS:LRKHR:NMVVR, APTQL:SATS:LRKHR:NMVVR, VPTKL:SATS:LRKHR:EGMSVAE, VPTKL:SATS:LRKHR:GMAVS, TPTKM:SATS:LRKHR:GMVVD, VPARL:SATS:LRKHR:DMVVE, VPTRL:SATS:LRKHR:DMVVE, APVKT:SATS:LRKHR:MIVEE, VPQAL:SATS:LRKHR:MIVRS, VSQDL:SATS:LRKHR:MIVKS, VPQDL:SATS:LRKHR:MVVKS, VPTEE:SATS:LRKHR:FLQHN, VPTGQ:SATS:LRKHR:LEEHS, SRVHH:SATS:LRKHR:RLEEH, TQVQL:SATS:LRKHR:TLEDH, VPTEL:SPIS:LKYHY:DMVAE, VPTKM:SPIS:LKYHY:NMVAE, VPTEL:SPIS:LKYHY:EMVAE, VPTKL:SPIS:LKYHY:NMVAE, VPTQL:SPIS:LKYHY:NMVAE, VPTKL:SPIS:LKYHY:GMVAE, VPTKM:SPIS:LKYHY:GMVAE, VPTRL:SPIS:LKYHY:DMVAE, VPTKT:SPIS:LKYHY:MIVAE, VPTAL:SPIS:LKYHY:MIVAE, VPTDL:SPIS:LKYHY:MIVAE, VPTDL:SPIS:LKYHY:MVVAE, VPTEL:SPIS:LKYHY:DMVVE, VPEKM:SPIS:LKYHY:NMTVE, VPTEL:SPIS:LKYHY:EMVVE, APTKL:SPIS:LKYHY:NMVVR, APTQL:SPIS:LKYHY:NMVVR, APTKL:SPIS:LKYHY:NMVVK, VPTKL:SPIS:LKYHY:GMAVS, TPTKM:SPIS:LKYHY:GMVVD, VPARL:SPIS:LKYHY:DMVVE, VPTRL:SPIS:LKYHY:DMVVE, APVKT:SPIS:LKYHY:MIVEE, VPQAL:SPIS:LKYHY:MIVRS, VSQDL:SPIS:LKYHY:MIVKS, VPQDL:SPIS:LKYHY:MVVKS, VPTEE:SPIS:LKYHY:FLQHN, VPTGQ:SPIS:LKYHY:LEEHS, SRVHH:SPIS:LKYHY:RLEEH, TQVQL:SPIS:LKYHY:TLEDH, VPTEL:EPIS:KFKYE:DMAVS, VPTKM:EPIS:KFKYE:NMAVS, VPTEL:EPIS:KFKYE:EMAVS, VPTKL:EPIS:KFKYE:NMAVS, VPTQL:EPIS:KFKYE:NMAVS, VPTKL:EPIS:KFKYE:EGMSAVS, VPTKM:EPIS:KFKYE:GMAVS, VPTRL:EPIS:KFKYE:DMAVS, VPTKT:EPIS:KFKYE:MIAVS, VPTAL:EPIS:KFKYE:MIAVS, VPTDL:EPIS:KFKYE:MIAVS, VPTDL:EPIS:KFKYE:MVAVS, VPTEL:EPIS:KFKYE:DMVVE, VPEKM:EPIS:KFKYE:NMTVE, VPTEL:EPIS:KFKYE:EMVVE, APTKL:EPIS:KFKYE:NMVVR, APTQL:EPIS:KFKYE:NMVVR, APTKL:EPIS:KFKYE:NMVVK, VPTKL:EPIS:KFKYE:EGMSVAE, TPTKM:EPIS:KFKYE:GMVVD, VPARL:EPIS:KFKYE:DMVVE, VPTRL:EPIS:KFKYE:DMVVE, APVKT:EPIS:KFKYE:MIVEE, VPQAL:EPIS:KFKYE:MIVRS, VSQDL:EPIS:KFKYE:MIVKS, VPQDL:EPIS:KFKYE:MVVKS, VPTEE:EPIS:KFKYE:FLQHN, VPTGQ:EPIS:KFKYE:LEEHS, SRVHH:EPIS:KFKYE:RLEEH, TQVQL:EPIS:KFKYE:TLEDH, TPTEL:SPIN:YGKIP:DMVVD, TPTKM:SPIN:YGKIP:NMVVD, TPTEL:SPIN:YGKIP:EMVVD, TPTKL:SPIN:YGKIP:NMVVD, TPTQL:SPIN:YGKIP:NMVVD, TPTKL:SPIN:YGKIP:EGMSVVD, TPTKL:SPIN:YGKIP:GMVVD, TPTRL:SPIN:YGKIP:DMVVD, TPTKT:SPIN:YGKIP:MIVVD, TPTAL:SPIN:YGKIP:MIVVD, TPTDL:SPIN:YGKIP:MIVVD, TPTDL:SPIN:YGKIP:MVVVD, VPTEL:SPIN:YGKIP:DMVVE, VPEKM:SPIN:YGKIP:NMTVE, VPTEL:SPIN:YGKIP:EMVVE, APTKL:SPIN:YGKIP:NMVVR, APTQL:SPIN:YGKIP:NMVVR, APTKL:SPIN:YGKIP:NMVVK, VPTKL:SPIN:YGKIP:EGMSVAE, VPTKL:SPIN:YGKIP:GMAVS, VPARL:SPIN:YGKIP:DMVVE, VPTRL:SPIN:YGKIP:DMVVE, APVKT:SPIN:YGKIP:MIVEE, VPQAL:SPIN:YGKIP:MIVRS, VSQDL:SPIN:YGKIP:MIVKS, VPQDL:SPIN:YGKIP:MVVKS, VPTEE:SPIN:YGKIP:FLQHN, VPTGQ:SPIN:YGKIP:LEEHS, SRVHH:SPIN:YGKIP:RLEEH, TQVQL:SPIN:YGKIP:TLEDH, VPAEL:SPIS:YKQYE:DMVVE, VPAKM:SPIS:YKQYE:NMVVE, VPAEL:SPIS:YKQYE:EMVVE, VPAKL:SPIS:YKQYE:NMVVE, VPAQL:SPIS:YKQYE:NMVVE, VPAKL:SPIS:YKQYE:EGMSVVE, VPAKL:SPIS:YKQYE:GMVVE, VPAKM:SPIS:YKQYE:GMVVE, VPARL:SPIS:YKQYE:DMVVE, VPAKT:SPIS:YKQYE:MIVVE, VPAAL:SPIS:YKQYE:MIVVE, VPADL:SPIS:YKQYE:MIVVE, VPADL:SPIS:YKQYE:MVVVE, VPTEL:SPIS:YKQYE:DMVVE, VPEKM:SPIS:YKQYE:NMTVE, VPTEL:SPIS:YKQYE:EMVVE, APTKL:SPIS:YKQYE:NMVVR, APTQL:SPIS:YKQYE:NMVVR, APTKL:SPIS:YKQYE:NMVVK, VPTKL:SPIS:YKQYE:EGMSVAE, VPTKL:SPIS:YKQYE:GMAVS, TPTKM:SPIS:YKQYE:GMVVD, VPTRL:SPIS:YKQYE:DMVVE, APVKT:SPIS:YKQYE:MIVEE, VPQAL:SPIS:YKQYE:MIVRS, VSQDL:SPIS:YKQYE:MIVKS, VPQDL:SPIS:YKQYE:MVVKS, VPTEE:SPIS:YKQYE:FLQHN, VPTGQ:SPIS:YKQYE:LEEHS, SRVHH:SPIS:YKQYE:RLEEH, TQVQL:SPIS:YKQYE:TLEDH, VPTKM:SPIS:YKQYE:NMVVE, VPTKL:SPIS:YKQYE:NMVVE, VPTQL:SPIS:YKQYE:NMVVE, VPTKL:SPIS:YKQYE:EGMSVVE, VPTKL:SPIS:YKQYE:GMVVE, VPTKM:SPIS:YKQYE:GMVVE, VPTKT:SPIS:YKQYE:MIVVE, VPTAL:SPIS:YKQYE:MIVVE, VPTDL:SPIS:YKQYE:MIVVE, VPTDL:SPIS:YKQYE:MVVVE, APVEL:KPLS:DHHKD:DMVEE, APVKM:KPLS:DHHKD:NMVEE, APVEL:KPLS:DHHKD:EMVEE, APVKL:KPLS:DHHKD:NMVEE, APVQL:KPLS:DHHKD:NMVEE, APVKL:KPLS:DHHKD:EGMSVEE, APVKL:KPLS:DHHKD:GMVEE, APVKM:KPLS:DHHKD:GMVEE, APVRL:KPLS:DHHKD:DMVEE, APVAL:KPLS:DHHKD:MIVEE, APVDL:KPLS:DHHKD:MIVEE, APVDL:KPLS:DHHKD:MVVEE, VPTEL:KPLS:DHHKD:DMVVE, VPEKM:KPLS:DHHKD:NMTVE, VPTEL:KPLS:DHHKD:EMVVE, APTKL:KPLS:DHHKD:NMVVR, APTQL:KPLS:DHHKD:NMVVR, APTKL:KPLS:DHHKD:NMVVK, VPTKL:KPLS:DHHKD:EGMSVAE, VPTKL:KPLS:DHHKD:GMAVS, TPTKM:KPLS:DHHKD:GMVVD, VPARL:KPLS:DHHKD:DMVVE, VPTRL:KPLS:DHHKD:DMVVE, VPQAL:KPLS:DHHKD:MIVRS, VSQDL:KPLS:DHHKD:MIVKS, VPQDL:KPLS:DHHKD:MVVKS, VPTEE:KPLS:DHHKD:FLQHN, VPTGQ:KPLS:DHHKD:LEEHS, SRVHH:KPLS:DHHKD:RLEEH, TQVQL:KPLS:DHHKD:TLEDH, VPQEL:EPLP:EQLSN:DMVRS, VPQKM:EPLP:EQLSN:NMVRS, VPQEL:EPLP:EQLSN:EMVRS, VPQKL:EPLP:EQLSN:NMVRS, VPQQL:EPLP:EQLSN:NMVRS, VPQKL:EPLP:EQLSN:EGMSVRS, VPQKL:EPLP:EQLSN:GMVRS, VPQKM:EPLP:EQLSN:GMVRS, VPQRL:EPLP:EQLSN:DMVRS, VPQKT:EPLP:EQLSN:MIVRS, VPQDL:EPLP:EQLSN:MIVRS, VPQDL:EPLP:EQLSN:MVVRS, VPTEL:EPLP:EQLSN:DMVVE, VPEKM:EPLP:EQLSN:NMTVE, VPTEL:EPLP:EQLSN:EMVVE, APTKL:EPLP:EQLSN:NMVVR, APTQL:EPLP:EQLSN:NMVVR, APTKL:EPLP:EQLSN:NMVVK, VPTKL:EPLP:EQLSN:EGMSVAE, VPTKL:EPLP:EQLSN:GMAVS, TPTKM:EPLP:EQLSN:GMVVD, VPARL:EPLP:EQLSN:DMVVE, VPTRL:EPLP:EQLSN:DMVVE, APVKT:EPLP:EQLSN:MIVEE, VSQDL:EPLP:EQLSN:MIVKS, VPQDL:EPLP:EQLSN:MVVKS, VPTEE:EPLP:EQLSN:FLQHN, VPTGQ:EPLP:EQLSN:LEEHS, SRVHH:EPLP:EQLSN:RLEEH, TQVQL:EPLP:EQLSN:TLEDH, VSQEL:EPLT:EQLSN:DMVKS, VSQKM:EPLT:EQLSN:NMVKS, VSQEL:EPLT:EQLSN:EMVKS, VSQKL:EPLT:EQLSN:NMVKS, VSQQL:EPLT:EQLSN:NMVKS, VSQKL:EPLT:EQLSN:EGMSVKS, VSQKL:EPLT:EQLSN:GMVKS, VSQKM:EPLT:EQLSN:GMVKS, VSQRL:EPLT:EQLSN:DMVKS, VSQKT:EPLT:EQLSN:MIVKS, VSQAL:EPLT:EQLSN:MIVKS, VSQDL:EPLT:EQLSN:MVVKS, VPTEL:EPLT:EQLSN:DMVVE, VPEKM:EPLT:EQLSN:NMTVE, VPTEL:EPLT:EQLSN:EMVVE, APTKL:EPLT:EQLSN:NMVVR, APTQL:EPLT:EQLSN:NMVVR, APTKL:EPLT:EQLSN:NMVVK, VPTKL:EPLT:EQLSN:EGMSVAE, VPTKL:EPLT:EQLSN:GMAVS, TPTKM:EPLT:EQLSN:GMVVD, VPARL:EPLT:EQLSN:DMVVE, VPTRL:EPLT:EQLSN:DMVVE, APVKT:EPLT:EQLSN:MIVEE, VPQAL:EPLT:EQLSN:MIVRS, VPTEE:EPLT:EQLSN:FLQHN, VPTGQ:EPLT:EQLSN:LEEHS, SRVHH:EPLT:EQLSN:RLEEH, TQVQL:EPLT:EQLSN:TLEDH, VPQEL:EPLT:EQLSN:DMVKS, VPQKM:EPLT:EQLSN:NMVKS, VPQEL:EPLT:EQLSN:EMVKS, VPQKL:EPLT:EQLSN:NMVKS, VPQQL:EPLT:EQLSN:NMVKS, VPQKL:EPLT:EQLSN:EGMSVKS, VPQKL:EPLT:EQLSN:GMVKS, VPQKM:EPLT:EQLSN:GMVKS, VPQRL:EPLT:EQLSN:DMVKS, VPQKT:EPLT:EQLSN:MIVKS, VPQAL:EPLT:EQLSN:MIVKS, VPQDL:EPLT:EQLSN:MIVKS, VPTGQ:SNIT:IGEMS:LEQHN, VPTEL:SNIT:IGEMS:DMVVE, VPEKM:SNIT:IGEMS:NMTVE, VPTEL:SNIT:IGEMS:EMVVE, APTKL:SNIT:IGEMS:NMVVR, APTQL:SNIT:IGEMS:NMVVR, APTKL:SNIT:IGEMS:NMVVK, VPTKL:SNIT:IGEMS:EGMSVAE, VPTKL:SNIT:IGEMS:GMAVS, TPTKM:SNIT:IGEMS:GMVVD, VPARL:SNIT:IGEMS:DMVVE, VPTRL:SNIT:IGEMS:DMVVE, APVKT:SNIT:IGEMS:MIVEE, VPQAL:SNIT:IGEMS:MIVRS, VSQDL:SNIT:IGEMS:MIVKS, VPQDL:SNIT:IGEMS:MVVKS, VPTGQ:SNIT:IGEMS:LEEHS, SRVHH:SNIT:IGEMS:RLEEH, TQVQL:SNIT:IGEMS:TLEDH, VPTEE:SNIT:LGEMS:FLEHS, VPTEL:SNIT:LGEMS:DMVVE, VPEKM:SNIT:LGEMS:NMTVE, VPTEL:SNIT:LGEMS:EMVVE, APTKL:SNIT:LGEMS:NMVVR, APTQL:SNIT:LGEMS:NMVVR, APTKL:SNIT:LGEMS:NMVVK, VPTKL:SNIT:LGEMS:EGMSVAE, VPTKL:SNIT:LGEMS:GMAVS, TPTKM:SNIT:LGEMS:GMVVD, VPARL:SNIT:LGEMS:DMVVE, VPTRL:SNIT:LGEMS:DMVVE, APVKT:SNIT:LGEMS:MIVEE, VPQAL:SNIT:LGEMS:MIVRS, VSQDL:SNIT:LGEMS:MIVKS, VPQDL:SNIT:LGEMS:MVVKS, VPTEE:SNIT:LGEMS:FLQHN, SRVHH:SNIT:LGEMS:RLEEH, TQVQL:SNIT:LGEMS:TLEDH, SRVQL:RSVK:KEVQV:TLEEH, VPTEL:RSVK:KEVQV:DMVVE, VPEKM:RSVK:KEVQV:NMTVE, VPTEL:RSVK:KEVQV:EMVVE, APTKL:RSVK:KEVQV:NMVVR, APTQL:RSVK:KEVQV:NMVVR, APTKL:RSVK:KEVQV:NMVVK, VPTKL:RSVK:KEVQV:EGMSVAE, VPTKL:RSVK:KEVQV:GMAVS, TPTKM:RSVK:KEVQV:GMVVD, VPARL:RSVK:KEVQV:DMVVE, VPTRL:RSVK:KEVQV:DMVVE, APVKT:RSVK:KEVQV:MIVEE, VPQAL:RSVK:KEVQV:MIVRS, VSQDL:RSVK:KEVQV:MIVKS, VPQDL:RSVK:KEVQV:MVVKS, VPTEE:RSVK:KEVQV:FLQHN, VPTGQ:RSVK:KEVQV:LEEHS, TQVQL:RSVK:KEVQV:TLEDH, TQVHH:RPVQ:KKATV:RLEDH, VPTEL:RPVQ:KKATV:DMVVE, VPEKM:RPVQ:KKATV:NMTVE, VPTEL:RPVQ:KKATV:EMVVE, APTKL:RPVQ:KKATV:NMVVR, APTQL:RPVQ:KKATV:NMVVR, APTKL:RPVQ:KKATV:NMVVK, VPTKL:RPVQ:KKATV:EGMSVAE, VPTKL:RPVQ:KKATV:GMAVS, TPTKM:RPVQ:KKATV:GMVVD, VPARL:RPVQ:KKATV:DMVVE, VPTRL:RPVQ:KKATV:DMVVE, APVKT:RPVQ:KKATV:MIVEE, VPQAL:RPVQ:KKATV:MIVRS, VSQDL:RPVQ:KKATV:MIVKS, VPQDL:RPVQ:KKATV:MVVKS, VPTEE:RPVQ:KKATV:FLQHN, VPTGQ:RPVQ:KKATV:LEEHS and SRVHH:RPVQ:KKATV:RLEEH.

[0436] In particular, in certain embodiments, the quadruplet PEP5:PEP12:PEP2:PEP6 is selected from the group consisting of VPTKM:SAIS-AA¹⁷-LYL:LKNYQ:NMVVE, VPTEL:SAIS-AA¹⁷-LYL:LKNYQ:EMVVE, VPTKL:SAIS-AA¹⁷-LYL:LKNYQ:NMVVE, VPTQL:SAIS-AA¹⁷-LYL:LKNYQ:NMVVE, VPTKL:SAIS-AA¹⁷-LYL:LKNYQ:EGMSVVE, VPTKL:SAIS-AA¹⁷-LYL:LKNYQ:GMVVE, VPTKM:SAIS-AA¹⁷-LYL:LKNYQ:GMVVE, VPTRL:SAIS-AA¹⁷-LYL:LKNYQ:DMVVE, VPTKT:SAIS-AA¹⁷-LYL:LKNYQ:MIVVE, VPTAL:SAIS-AA¹⁷-LYL:LKNYQ:MIVVE, VPTDL:SAIS-AA¹⁷-LYL:LKNYQ:MIWE, VPTDL:SAIS-AA¹⁷-LYL:LKNYQ:MVVVE, VPTEE:SAIS-AA¹⁷-LYL:LKNYQ:FLVVE, VPTGQ:SAIS-AA¹⁷-LYL:LKNYQ:LEVVE, VPTHH:SAIS-AA¹⁷-LYL:LKNYQ:RLVVE, VPTQL:SAIS-AA¹⁷-LYL:LKNYQ:TLVVE, VPEKM:SAIS-AA¹⁷-LYL:LKNYQ:NMTVE, APTKL:SAIS-AA¹⁷-LYL:LKNY:NMVVR, APTQL:SAIS-AA¹⁷-LYL:LKNYQ:NMVVR, APTKL:SAIS-AA¹⁷-LYL:LKNYQ:NMVVK, VPTKL:SAIS-AA¹⁷-LYL:LKNYQ:EGMSVAE, VPTKL:SAIS-AA¹⁷-LYL:LKNYQ:GMAVS, TPTKM:SAIS-AA¹⁷-LYL:LKNYQ:GMVVD, VPARL:SAIS-AA¹⁷-LYL:LKNYQ:DMVVE, APVKT:SAIS-AA¹⁷-LYL:LKNYQ:MIVEE, VPQAL:SAIS-AA¹⁷-LYL:LKNYQ:MIVRS, VSQDL:SAIS-AA¹⁷-LYL:LKNYQ:MIVKS, VPQDL:SAIS-AA¹⁷-LYL:LKNYQ:MVVKS, VPTEE:SAIS-AA¹⁷-LYL:LKNYQ:FLQHN, VPTGQ:SAIS-AA¹⁷-LYL:LKNYQ:LEEHS, SRVHH:SAIS-AA¹⁷-LYL:LKNYQ:RLEEH, TQVQL:SAIS-AA¹⁷-LYL:LKNYQ:TLEDH, VPEEL:SSLS-AA¹⁷-LFF:LKVYP:DMTVE, VPEEL:SSLS-AA¹⁷-LFF:LKVYP:EMTVE, VPEKL:SSLS-AA¹⁷-LFF:LKVYP:NMTVE, VPEQL:SSLS-AA¹⁷-LFF:LKVYP:NMTVE, VPEKL:SSLS-AA¹⁷-LFF:LKVYP:EGMSTVE, VPEKL:SSLS-AA¹⁷-LFF:LKVYP:GMTVE, VPEKM:SSLS-AA¹⁷-LFF:LKVYP:GMTVE, VPERL:SSLS-AA¹⁷-LFF:LKVYP:DMTVE, VPEKT:SSLS-AA¹⁷-LFF:LKVYP:MITVE, VPEAL:SSLS-AA¹⁷-LFF:LKVYP:MITVE, VPEDL:SSLS-AA¹⁷-LFF:LKVYP:MITVE, VPEDL:SSLS-AA¹⁷-LFF:LKVYP:MVTVE, VPEEE:SSLS-AA¹⁷-LFF:LKVYP:FLTVE, VPEGQ:SSLS-AA¹⁷-LFF:LKVYP:LETVE, VPEHH:SSLS-AA¹⁷-LFF:LKVYP:RLTVE, VPEQL:SSLS-AA¹⁷-LFF:LKVYP:TLTVE, VPTEL:SSLS-AA¹⁷-LFF:LKVYP:DMVVE, VPTEL:SSLS-AA¹⁷-LFF:LKVYP:EMVVE, APTKL:SSLS-AA¹⁷-LFF:LKVYP:NMVVR, APTQL:SSLS-AA¹⁷-LFF:LKVYP:NMVVR, APTKL:SSLS-AA¹⁷-LFF:LKVYP:NMVVK, VPTKL:SSLS-AA¹⁷-LFF:LKVYP:EGMSVAE, VPTKL:SSLS-AA¹⁷-LFF:LKVYP:GMAVS, TPTKM:SSLS-AA¹⁷-LFF:LKVYP:GMVVD, VPARL:SSLS-AA¹⁷-LFF:LKVYP:DMVVE, VPTRL:SSLS-AA¹⁷-LFF:LKVYP:DMVVE, APVKT:SSLS-AA¹⁷-LFF:LKVYP:MIVEE, VPQAL:SSLS-AA¹⁷-LFF:LKVYP:MIVRS, VSQDL:SSLS-AA¹⁷-LFF:LKVYP:MIVKS, VPQDL:SSLS-AA¹⁷-LFF:LKVYP:MVVKS, VPTEE:SSLS-AA¹⁷-LFF:LKVYP:FLQHN, VPTGQ:SSLS-AA¹⁷-LFF:LKVYP:LEEHS, SRVHH:SSLS-AA¹⁷-LFF:LKVYP:RLEEH, TQVQL:SSLS-AA¹⁷-LFF:LKVYP:TLEDH, VPTEL:SAIS-AA¹⁷-LYL:LKNYQ:DMVVE, APTEL:NAIS-AA¹⁷-LYF:LKKYR:DMVVR, APTKM:NAIS-AA¹⁷-LYF:LKKYR:NMVVR, APTEL:NAIS-AA¹⁷-LYF:LKKYR:EMVVR, APTKL:NAIS-AA¹⁷-LYFF:LKKYR:NMVVR, APTQL:NAIS-AA¹⁷-LYF:LKKYR:NMVVR, APTK¹⁷:NAIS-AA¹⁷-LYF:LKKYR:EGMSVVR, APTKL:NAIS-AA¹⁷-LYF:LKKYR:GMVVR, APTKM:NAIS-AA¹⁷-LYF:LKKYR:GMVVR, APTRL:NAIS-AA¹⁷-LYF:LKKYR:DMVVR, APTKT:NAIS-AA¹⁷-LYF:LKKYR:MIVVR, APTAL:NAIS-AA¹⁷-LYF:LKKYR: MIVVR, APTDL:NAIS-AA¹⁷-LYF:LKKYR:MIVVR, APTDL:NAIS-AA¹⁷-LYF:LKKYR:MVVVR, APTEE:NAIS-AA¹⁷-LYF:LKKYR:FLVVR, APTGQ:NAIS-AA¹⁷-LYF:LKKYR:LEVVR, APTHH:NAIS-AA¹⁷-LYF:LKKYR:RLVVR, APTQL:NAIS-AA¹⁷-LYF:LKKYR:TLVVR, VPTEL:NAIS-AA¹⁷-LYF:LKKYR:DMVVE, VPEKM:NAIS-AA¹⁷-LYF:LKKYR:NMTVE, VPTEL:NAIS-AA¹⁷-LYF:LKKYR:EMVVE APTKL:NAIS-AA¹⁷-LYF:LKKYR:NMVVK, VPTKL:NAIS-AA¹⁷-LYF:LKKYR:EGMSVAE, VPTKL:NAIS-AA¹⁷-LYF:LKKYR:GMAVS, TPTKM:NAIS-AA¹⁷-LYF:LKKYR:GMVVD, VPARL:NAIS-AA¹⁷-LYF:LKKYR:DMVVE, VPTRL:NAIS-AA¹⁷-LYF:LKKYR:DMVVE, APVKT:NAIS-AA¹⁷-LYF:LKKYR:MIVEE, VPQAL:NAIS-AA¹⁷-LYF:LKKYR:MIVRS, VSQDL:NAIS-AA¹⁷-LYF:LKKYR:MIVKS, VPQDL:NAIS-AA¹⁷-LYF:LKKYR:MVVKS, VPTEE:NAIS-AA¹⁷-LYF:LKKYR:FLQHN, VPTGQ:NAIS-AA¹⁷-LYF:LKKYR:LEEHS, SRVHH:NAIS-AA¹⁷-LYF:LKKYR:RLEEH, TQVQL:NAIS-AA¹⁷-LYF:LKKYR:TLEDH, APTEL:SATS-AA¹⁷-LYY:LRKHR:DMVVK, APTKM:SATS-AA¹⁷-LYY:LRKHR:NMVVK, APTEL:SATS-AA¹⁷-LYY:LRKHR:EMVVK, APTKL:SATS-AA¹⁷-LYY:LRKHR:NMVVK, APTQL:SATS-AA¹⁷-LYY:LRKHR:NMVVK, APTKL:SATS-AA¹⁷-LYY:LRKHR:EGMSVVK, APTKL:SATS-AA¹⁷-LYY:LRKHR:GMVVK, APTKM:SATS-AA¹⁷-LYY:LRKHR:GMVVK, APTRL:SATS-AA¹⁷-LYY:LRKHR:DMVVK, APTKT:SATS-AA¹⁷-LYY:LRKHR:MIVVK, APTAL:SATS-AA¹⁷-LYY:LRKHR:MIVVK, APTDL:SATS-AA¹⁷-LYY:LRKHR:MIVVK, APTDL:SATS-AA¹⁷-LYY:LRKHR:MVVVK, APTEE:SATS-AA¹⁷-LYY:LRKHR:FLVVK, APTGQ:SATS-AA¹⁷-LYY:LRKHR:LEVVK, APTHH:SATS-AA¹⁷-LYY:LRKHR:RLVVK, APTQL:SATS-AA¹⁷-LYY:LRKHR:TLVVK, VPTEL:SATS-AA¹⁷-LYY:LRKHR:DMVVE, VPEKM:SATS-AA¹⁷-LYY:LRKHR:NMTVE, VPTEL:SATS-AA¹⁷-LYY:LRKHR:EMVVE, APTKL:SATS-AA¹⁷-LYY:LRKHR:NMVVR, APTQL:SATS-AA¹⁷-LYY:LRKHR:NMVVR, VPTKL:SATS-AA¹⁷-LYY:LRKHR:EGMSVAE, VPTKL:SATS-AA¹⁷-LYY:LRKHR:GMAVS, TPTKM:SATS-AA¹⁷-LYY:LRKHR:GMVVD, VPARL:SATS-AA¹⁷-LYY:LRKHR:DMVVE, VPTRL:SATS-AA¹⁷-LYY:LRKHR:DMVVE, APVKT:SATS-AA¹⁷-LYY:LRKHR:MIVEE, VPQAL:SATS-AA¹⁷-LYY:LRKHR:MIVRS, VSQDL:SATS-AA¹⁷-LYY:LRKHR:MIVKS, VPQDL:SATS-AA¹⁷-LYY:LRKHR:MVVKS, VPTEE:SATS-AA¹⁷-LYY:LRKHR:FLQHN, VPTGQ:SATS-AA¹⁷-LYY:LRKHR:LEEHS, SRVHH:SATS-AA¹⁷-LYY:LRKHR:RLEEH, TQVQL:SATS-AA¹⁷-LYY:LRKHR:TLEDH, VPTEL:SPIS-AA¹⁷-LYK:LKYHY:DMVAE, VPTKM:SPIS-AA¹⁷-LYK:LKYHY:NMVAE, VPTEL:SPIS-AA¹⁷-LYK:LKYHY:EMVAE, VPTKL:SPIS-AA¹⁷-LYK:LKYHY:NMVAE, VPTQL:SPIS-AA¹⁷-LYK:LKYHY:NMVAE VPTKL:SPIS-AA¹⁷-LYK:LKYHY:GMVAE, VPTKM:SPIS-AA¹⁷-LYK:LKYHY:GMVAE, VPTRL:SPIS-AA¹⁷-LYK:LKYHY:DMVAE, VPTKT:SPIS-AA¹⁷-LYK:LKYHY:MIVAE, VPTAL:SPIS-AA¹⁷-LYK:LKYHY:MIVAE, VPTDL:SPIS-AA¹⁷-LYK:LKYHY:MIVAE, VPTDL:SPIS-AA¹⁷-LYK:LKYHY:MVVAE, VPTEE:SPIS-AA¹⁷-LYK:LKYHY:FLVAE, VPTGQ:SPIS-AA¹⁷-LYK:LKYHY:LEVAE, VPTHH:SPIS-AA¹⁷-LYK:LKYHY:RLVAE, VPTQL:SPIS-AA¹⁷-LYK:LKYHY:TLVAE, VPTEL:SPIS-AA¹⁷-LYK:LKYHY:DMVVE, VPEKM:SPIS-AA¹⁷-LYK:LKYHY:NMTVE, VPTEL:SPIS-AA¹⁷-LYK:LKYHY:EMVVE, APTKL:SPIS-AA¹⁷-LYK:LKYHY:NMVVR, APTQL:SPIS-AA¹⁷-LYK:LKYHY:NMVVR, APTKL:SPIS-AA¹⁷-LYK:LKYHY:NMVVK, VPTKL:SPIS-AA¹⁷-LYK:LKYHY:GMAVS, TPTKM:SPIS-AA¹⁷-LYK:LKYHY:GMVVD, VPARL:SPIS-AA¹⁷-LYK:LKYHY:DMVVE, VPTRL:SPIS-AA¹⁷-LYK:LKYHY:DMVVE, APVKT:SPIS-AA¹⁷-LYK:LKYHY:MIVEE, VPQAL:SPIS-AA¹⁷-LYK:LKYHY:MIVRS, VSQDL:SPIS-AA¹⁷-LYK:LKYHY:MIVKS, VPQDL:SPIS-AA¹⁷-LYK:LKYHY:MVVKS, VPTEE:SPIS-AA¹⁷-LYK:LKYHY:FLQHN, VPTGQ:SPIS-AA¹⁷-LYK:LKYHY:LEEHS, SRVHH:SPIS-AA¹⁷-LYK:LKYHY:RLEEH, TQVQL:SPIS-AA¹⁷-LYK:LKYHY:TLEDH, VPTEL:EPIS-AA¹⁷-LYL:KFKYE:DMAVS, VPTKM:EPIS-AA¹⁷-LYL:KFKYE:NMAVS, VPTEL:EPIS-AA¹⁷-LYL:KFKYE:EMAVS, VPTKL:EPIS-AA¹⁷-LYL:KFKYE:NMAVS, VPTQL:EPIS-AA¹⁷-LYL:KFKYE:NMAVS, VPTKL:EPIS-AA¹⁷-LYL:KFKYE:EGMSAVS, VPTKM:EPIS-AA¹⁷-LYL:KFKYE:GMAVS, VPTRL:EPIS-AA¹⁷-LYL:KFKYE:DMAVS, VPTKT:EPIS-AA¹⁷-LYL:KFKYE:MIAVS, VPTAL:EPIS-AA¹⁷-LYL:KFKYE:MIAVS, VPTDL:EPIS-AA¹⁷-LYL:KFKYE:MIAVS, VPTDL:EPIS-AA¹⁷-LYL:KFKYE:MVAVS, VPTEE:EPIS-AA¹⁷-LYL:KFKYE:FLAVS, VPTGQ:EPIS-AA¹⁷-LYL:KFKYE:LEAVS, VPTHH:EPIS-AA¹⁷-LYL:KFKYE:RLAVS, VPTQL:EPIS-AA¹⁷-LYL:KFKYE:TLAVS, VPTEL:EPIS-AA¹⁷-LYL:KFKYE:DMVVE, VPEKM:EPIS-AA¹⁷-LYL:KFKYE:NMTVE, VPTEL:EPIS-AA¹⁷-LYL:KFKYE:EMVVE, APTKL:EPIS-AA¹⁷-LYL:KFKYE:NMVVR, APTQL:EPIS-AA¹⁷-LYL:KFKYE:NMVVR, APTKL:EPIS-AA¹⁷-LYL:KFKYE:NMVVK, VPTKL:EPIS-AA¹⁷-LYL:KFKYE:EGMSVAE, TPTKM:EPIS-AA¹⁷-LYL:KFKYE:GMVVD, VPARL:EPIS-AA¹⁷-LYL:KFKYE:DMVVE, VPTRL:EPIS-AA¹⁷-LYL:KFKYE:DMVVE, APVKT:EPIS-AA¹⁷-LYL:KFKYE:MIVEE, VPQAL:EPIS-AA¹⁷-LYL:KFKYE:MIVRS, VSQDL:EPIS-AA¹⁷-LYL:KFKYE:MIVKS, VPQDL:EPIS-AA¹⁷-LYL:KFKYE:MVVKS, VPTEE:EPIS-AA¹⁷-LYL:KFKYE:FLQHN, VPTGQ:EPIS-AA¹⁷-LYL:KFKYE:LEEHS, SRVHH:EPIS-AA¹⁷-LYL:KFKYE:RLEEH, TQVQL:EPIS-AA¹⁷-LYL:KFKYE:TLEDH, TPTEL:SPIN-AA¹⁷-LYF:YGKIP:DMVVD, TPTKM:SPIN-AA¹⁷-LYF:YGKIP:NMVVD, TPTEL:SPIN-AA¹⁷-LYF:YGKIP:EMVVD, TPTKL:SPIN-AA¹⁷-LYF:YGKIP:NMVVD, TPTQL:SPIN-AA¹⁷-LYF:YGKIP:NMVVD, TPTKL:SPIN-AA¹⁷-LYF:YGKIP:EGMSVVD, TPTKL:SPIN-AA¹⁷-LYF:YGKP:GMVVD, TPTRL:SPIN-AA¹⁷-LYF:YGKIP:DMVVD, TPTKT:SPIN-AA¹⁷-LYF:YGKIP:MIVVD, TPTAL:SPIN-AA¹⁷-LYF:YGKIP:MIVVD, TPTDL:SPIN-AA¹⁷-LYF:YGKIP:MIVVD, TPTDL:SPIN-AA¹⁷-LYF:YGKIP:MVVVD, TPTEE:SPIN-AA¹⁷-LYF:YGKIP:FLVVD, TPTGQ:SPIN-AA¹⁷-LYF:YGKIP:LEVVD, TPTHH:SPIN-AA¹⁷-LYF:YGKIP:RLVVD, TPTQL:SPIN-AA¹⁷-LYF:YGKIP:TLVVD, VPTEL:SPIN-AA¹⁷-LYF:YGKIP:DMVVE, VPEKM:SPIN-AA¹⁷-LYF:YGKIP:NMTVE, VPTEL:SPIN-AA¹⁷-LYF:YGKIP:EMVVE, APTKL:SPIN-AA¹⁷-LYF:YGKIP:NMVVR, APTQL:SPIN-AA¹⁷-LYF:YGKIP:NMVVR, APTKL:SPIN-AA¹⁷-LYF:YGKIP:NMVVK, VPTKL:SPIN-AA¹⁷-LYF:YGKIP:EGMSVAE, VPTKL:SPIN-AA¹⁷-LYF:YGKIP:GMAVS, VPARL:SPIN-AA¹⁷-LYF:YGKIP:DMVVE, VPTRL:SPIN-AA¹⁷-LYF:YGKIP:DMVVE, APVKT:SPIN-AA¹⁷-LYF:YGKIP:MIVEE, VPQAL:SPIN-AA¹⁷-LYF:YGKIP:MIVRS, VSQDL:SPIN-AA¹⁷-LYF:YGKIP:MIVKS, VPQDL:SPIN-AA¹⁷-LYF:YGKIP:MVVKS, VPTEE:SPIN-AA¹⁷-LYF:YGKIP:FLQHN, VPTGQ:SPIN-AA¹⁷-LYF:YGKIP:LEEHS, SRVHH:SPIN-AA¹⁷-LYF:YGKIP:RLEEH, TQVQL:SPIN-AA¹⁷-LYF:YGKIP:TLEDH, VPAEL:SPIS-AA¹⁷-LYI:YKQYE:DMVVE, VPAKM:SPIS-AA¹⁷-LYI:YKQYE:NMVVE, VPAEL:SPIS-AA¹⁷-LYI:YKQYE:EMVVE, VPAKL:SPIS-AA¹⁷-LYI:YKQYE:NMVVE, VPAQL:SPIS-AA¹⁷-LYI:YKQYE:NMVVE, VPAKL:SPIS-AA¹⁷-LYI:YKQYE:EGMSVVE, VPAKL:SPIS-AA¹⁷-LYI:YKQYE:GMVVE, VPAKM:SPIS-AA¹⁷-LYI:YKQYE:GMVVE, VPARL:SPIS-AA¹⁷-LYI:YKQYE:DMVVE, VPAKT:SPIS-AA¹⁷-LYI:YKQYE:MIVVE, VPAAL:SPIS-AA¹⁷-LYI:YKQYE:MIVVE, VPADL:SPIS-AA¹⁷-LYI:YKQYE:MIVVE, VPADL:SPIS-AA¹⁷-LYI:YKQYE:MVVVE, VPAEE:SPIS-AA¹⁷-LYI:YKQYE:FLVVE, VPAGQ:SPIS-AA¹⁷-LYI:YKQYE:LEVVE, VPAHH:SPIS-AA¹⁷-LYI:YKQYE:RLVVE, VPAQL:SPIS-AA¹⁷-LYI:YKQYE:TLVVE, VPTEL:SPIS-AA¹⁷-LYI:YKQYE:DMVVE, VPEKM:SPIS-AA¹⁷-LYI:YKQYE:NMTVE, VPTEL:SPIS-AA¹⁷-LYI:YKQYE:EMVVE, APTKL:SPIS-AA¹⁷-LYI:YKQYE:NMVVR, APTQL:SPIS-AA¹⁷-LYI:YKQYE:NMVVR, APTKL:SPIS-AA¹⁷-LYI:YKQYE:NMVVK, VPTKL:SPIS-AA¹⁷-LYI:YKQYE:EGMSVAE, VPTKL:SPIS-AA¹⁷-LYI:YKQYE:GMAVS, TPTKM:SPIS-AA¹⁷-LYI:YKQYE:GMVVD, VPTRL:SPIS-AA¹⁷-LYI:YKQYE:DMVVE, APVKT:SPIS-AA¹⁷-LYI:YKQYE:MIVEE, VPQAL:SPIS-AA¹⁷-LYI:YKQYE:MIVRS, VSQDL:SPIS-AA¹⁷-LYI:YKQYE:MIVKS, VPQDL:SPIS-AA¹⁷-LYI:YKQYE:MVVKS, VPTEE:SPIS-AA¹⁷-LYI:YKQYE:FLQHN, VPTGQ:SPIS-AA¹⁷-LYI:YKQYE:LEEHS, SRVHH:SPIS-AA¹⁷-LYI:YKQYE:RLEEH, TQVQL:SPIS-AA¹⁷-LYI:YKQYE:TLEDH, VPTEL:SPIS-AA¹⁷-LFI:YKQYE:DMVVE, VPTKM:SPIS-AA¹⁷-LFI:YKQYE:NMVVE, VPTEL:SPIS-AA¹⁷-LFI:YKQYE:EMVVE, VPTKL:SPIS-AA¹⁷-LFI:YKQYE:NMVVE, VPTQL:SPIS-AA¹⁷-LFI:YKQYE:NMVVE, VPTKL:SPIS-AA¹⁷-LFI:YKQYE:EGMSVVE, VPTKL:SPIS-AA¹⁷-LFI:YKQYE:GMVVE, VPTKM:SPIS-AA¹⁷-LFI:YKQYE:GMVVE, VPTRL:SPIS-AA¹⁷-LFI:YKQYE:DMVVE, VPTKT:SPIS-AA¹⁷-LFI:YKQYE:MIVVE, VPTAL:SPIS-AA¹⁷-LFI:YKQYE:MIVVE, VPTDL:SPIS-AA¹⁷-LFI:YKQYE:MIVVE, VPTDL:SPIS-AA¹⁷-LFI:YKQYE:MVVVE, VPTEE:SPIS-AA¹⁷-LFI:YKQYE:FLVVE, VPTGQ:SPIS-AA¹⁷-LFI:YKQYE:LEVVE, VPTHH:SPIS-AA¹⁷-LFI:YKQYE:RLVVE, VPTQL:SPIS-AA¹⁷-LFI:YKQYE:TLVVE, VPEKM:SPIS-AA¹⁷-LFI:YKQYE:NMTVE, APTKL:SPIS-AA¹⁷-LFI:YKQYE:NMVVR, APTQL:SPIS-AA¹⁷-LFI:YKQYE:NMVVR, APTKL:SPIS-AA¹⁷-LFI:YKQYE:NMVVK, VPTKL:SPIS-AA¹⁷-LFI:YKQYE:EGMSVAE, VPTKL:SPIS-AA¹⁷-LFI:YKQYE:GMAVS, TPTKM:SPIS-AA¹⁷-LFI:YKQYE:GMVVD, VPARL:SPIS-AA¹⁷-LFI:YKQYE:DMVVE, APVKT:SPIS-AA¹⁷-LFI:YKQYE:MIVEE, VPQAL:SPIS-AA¹⁷-LFI:YKQYE:MIVRS, VSQDL:SPIS-AA¹⁷-LFI:YKQYE:MIVKS, VPQDL:SPIS-AA¹⁷-LFI:YKQYE:MVVKS, VPTEE:SPIS-AA¹⁷-LFI:YKQYE:FLQHN, VPTGQ:SPIS-AA¹⁷-LFI:YKQYE:LEEHS, SRVHH:SPIS-AA¹⁷-LFI:YKQYE:RLEEH, TQVQL:SPIS-AA¹⁷-LFI:YKQYE:TLEDH, APVEL:KPLS-AA¹⁷-LYV:DHHKD:DMVEE, APVKM:KPLS-AA¹⁷-LYV:DHHKD:NMVEE, APVEL:KPLS-AA¹⁷-LYV:DHHKD:EMVEE, APVKL:KPLS-AA¹⁷-LYV:DHHKD:NMVEE, APVQL:KPLS-AA¹⁷-LYV:DHHKD:NMVEE, APVKL:KPLS-AA¹⁷-LYV:DHHKD:EGMSVEE, APVKL:KPLS-AA¹⁷-LYV:DHHKD:GMVEE, APVKM:KPLS-AA¹⁷-LYV:DHHKD:GMVEE, APVRL:KPLS-AA¹⁷-LYV:DHHKD:DMVEE, APVAL:KPLS-AA¹⁷-LYV:DHHKD:MIVEE, APVDL:KPLS-AA¹⁷-LYV:DHHKD:MIVEE, APVDL:KPLS-AA¹⁷-LYV:DHHKD:MVVEE, APVEE:KPLS-AA¹⁷-LYV:DHHKD:FLVEE, APVGQ:KPLS-AA¹⁷-LYV:DHHKD:LEVEE, APVHH:KPLS-AA¹⁷-LYV:DHHKD:RLVEE, APVQL:KPLS-AA¹⁷-LYV:DHHKD:TLVEE, VPTEL:KPLS-AA¹⁷-LYV:DHHKD:DMVVE, VPEKM:KPLS-AA¹⁷-LYV:DHHKD:NMTVE, VPTEL:KPLS-AA¹⁷-LYV:DHHKD:EMVVE, APTKL:KPLS-AA¹⁷-LYV:DHHKD:NMVVR, APTQL:KPLS-AA¹⁷-LYV:DHHKD:NMVVR, APTKL:KPLS-AA¹⁷-LYV:DHHKD:NMVVK, VPTKL:KPLS-AA¹⁷-LYV:DHHKD:EGMSVAE, VPTKL:KPLS-AA¹⁷-LYV:DHHKD:GMAVS, TPTKM:KPLS-AA¹⁷-LYV:DHHKD:GMVVD, VPARL:KPLS-AA¹⁷-LYV:DHHKD:DMVVE, VPTRL:KPLS-AA¹⁷-LYV:DHHKD:DMVVE, VPQAL:KPLS-AA¹⁷-LYV:DHHKD:MIVRS, VSQDL:KPLS-AA¹⁷-LYV:DHHKD:MIVKS, VPQDL:KPLS-AA¹⁷-LYV:DHHKD:MVVKS, VPTEE:KPLS-AA¹⁷-LYV:DHHKD:FLQHN, VPTGQ:KPLS-AA¹⁷-LYV:DHHKD:LEEHS, SRVHH:KPLS-AA¹⁷-LYV:DHHKD:RLEEH, TQVQL:KPLS-AA¹⁷-LYV:DHHKD:TLEDH, VPQEL:EPLP-AA¹⁷-VYY:EQLSN:DMVRS, VPQKM:EPLP-AA¹⁷-VYY:EQLSN:NMVRS, VPQEL:EPLP-AA¹⁷-VYY:EQLSN:EMVRS, VPQKL:EPLP-AA¹⁷-VYY:EQLSN:NMVRS, VPQQL:EPLP-AA¹⁷-VYY:EQLSN:NMVRS, VPQKL:EPLP-AA¹⁷-VYY:EQLSN:EGMSVRS, VPQKL:EPLP-AA¹⁷-VYY:EQLSN:GMVRS, VPQKM:EPLP-AA¹⁷-VYY:EQLSN:GMVRS, VPQRL:EPLP-AA¹⁷-VYY:EQLSN:DMVRS, VPQKT:EPLP-AA¹⁷-VYY:EQLSN:MIVRS, VPQDL:EPLP-AA¹⁷-VYY:EQLSN:MIVRS, VPQDL:EPLP-AA¹⁷-VYY:EQLSN:MVVRS, VPQEE:EPLP-AA¹⁷-VYY:EQLSN:FLVRS, VPQGQ:EPLP-AA¹⁷-VYY:EQLSN:LEVRS, VPQHH:EPLP-AA¹⁷-VYY:EQLSN:RLVRS, VPQQL:EPLP-AA¹⁷-VYY:EQLSN:TLVRS, VPTEL:EPLP-AA¹⁷-VYY:EQLSN:DMVVE, VPEKM:EPLP-AA¹⁷-VYY:EQLSN:NMTVE, VPTEL:EPLP-AA¹⁷-VYY:EQLSN:EMVVE, APTKL:EPLP-AA¹⁷-VYY:EQLSN:NMVVR, APTQL:EPLP-AA¹⁷-VYY:EQLSN:NMVVR, APTKL:EPLP-AA¹⁷-VYY:EQLSN:NMVVK, VPTKL:EPLP-AA¹⁷-VYY:EQLSN:EGMSVAE, VPTKL:EPLP-AA¹⁷-VYY:EQLSN:GMAVS, TPTKM:EPLP-AA¹⁷-VYY:EQLSN:GMVVD, VPARL:EPLP-AA¹⁷-VYY:EQLSN:DMVVE, VPTRL:EPLP-AA¹⁷-VYY:EQLSN:DMVVE, APVKT:EPLP-AA¹⁷-VYY:EQLSN:MIVEE, VSQDL:EPLP-AA¹⁷-VYY:EQLSN:MIVKS, VPQDL:EPLP-AA¹⁷-VYY:EQLSN:MVVKS, VPTEE:EPLP-AA¹⁷-VYY:EQLSN:FLQHN, VPTGQ:EPLP-AA¹⁷-VYY:EQLSN:LEEHS, SRVHH:EPLP-AA¹⁷-VYY:EQLSN:RLEEH, TQVQL:EPLP-AA¹⁷-VYY:EQLSN:TLEDH, VSQEL:EPLT-AA¹⁷-LYY:EQLSN:DMVKS, VSQKM:EPLT-AA¹⁷-LYY:EQLSN:NMVKS, VSQEL:EPLT-AA¹⁷-LYY:EQLSN:EMVKS, VSQKL:EPLT-AA¹⁷-LYY:EQLSN:NMVKS, VSQQL:EPLT-AA¹⁷-LYY:EQLSN:NMVKS, VSQKL:EPLT-AA¹⁷-LYY:EQLSN:EGMSVKS, VSQKL:EPLT-AA¹⁷-LYY:EQLSN:GMVKS, VSQKM:EPLT-AA¹⁷-LYY:EQLSN:GMVKS, VSQRL:EPLT-AA¹⁷-LYY:EQLSN:DMVKS, VSQKT:EPLT-AA¹⁷-LYY:EQLSN:MIVKS, VSQAL:EPLT-AA¹⁷-LYY:EQLSN:MIVKS, VSQDL:EPLT-AA¹⁷-LYY:EQLSN:MVVKS, VSQEE:EPLT-AA¹⁷-LYY:EQLSN:FLVKS, VSQGQ:EPLT-AA¹⁷-LYY:EQLSN:LEVKS, VSQHH:EPLT-AA¹⁷-LYY:EQLSN:RLVKS, VSQQL:EPLT-AA¹⁷-LYY:EQLSN:TLVKS, VPTEL:EPLT-AA¹⁷-LYY:EQLSN:DMVVE, VPEKM:EPLT-AA¹⁷-LYY:EQLSN:NMTVE, VPTEL:EPLT-AA¹⁷-LYY:EQLSN:EMVVE, APTKL:EPLT-AA¹⁷-LYY:EQLSN:NMVVR, APTQL:EPLT-AA¹⁷-LYY:EQLSN:NMVVR, APTKL:EPLT-AA¹⁷-LYY:EQLSN:NMVVK, VPTKL:EPLT-AA¹⁷-LYY:EQLSN:EGMSVAE, VPTKL:EPLT-AA¹⁷-LYY:EQLSN:GMAVS, TPTKM:EPLT-AA¹⁷-LYY:EQLSN:GMVVD, VPARL:EPLT-AA¹⁷-LYY:EQLSN:DMVVE, VPTRL:EPLT-AA¹⁷-LYY:EQLSN:DMVVE, APVKT:EPLT-AA¹⁷-LYY:EQLSN:MIVEE, VPQAL:EPLT-AA¹⁷-LYY:EQLSN:MIVRS, VPQDL:EPLT-AA¹⁷-LYY:EQLSN:MVVKS, VPTEE:EPLT-AA¹⁷-LYY:EQLSN:FLQHN, VPTGQ:EPLT-AA¹⁷-LYY:EQLSN:LEEHS, SRVHH:EPLT-AA¹⁷-LYYY:QLSN:RLEEH, TQVQL:EPLT-AA¹⁷-LYY:EQLSN:TLEDH, VPQELYY:EPLT-AA¹⁷-LYY:EQLSN:DMVKS, VPQKM:EPLT-AA¹⁷-LYY:EQLSN:NMVKS, VPQL:EPLT-AA¹⁷-LYY:EQLSN:EMVKS, VPQKL:EPLT-AA¹⁷-LYY:EQLSN:NMVKS, VPQQL:EPLT-AA¹⁷-LYY:EQLSN:NMVKS, VPQKL:EPLT-AA¹⁷-LYY:EQLSN:EGMSVKS, VPQKL:EPLT-AA¹⁷-LYY:EQLSN:GMVKS, VPQKM:EPLT-AA¹⁷-LYY:EQLSN:GMVKS, VPQRL:EPLT-AA¹⁷-LYY:EQLSN:DMVKS, VPQKT:EPLT-AA¹⁷-LYY:EQLSN:MIVKS, VPQAL:EPLT-AA¹⁷-LYY:EQLSN:MIVKS, VPQDL:EPLT-AA¹⁷-LYY:EQLSN:MIVKS, VPQEE:EPLT-AA¹⁷-LYY:EQLSN:FLVKS, VPQGQ:EPLT-AA¹⁷-LYY:EQLSN:LEVKS, VPQHH:EPLT-AA¹⁷-LYY:EQLSN:RLVKS, VPQQL:EPLT-AA¹⁷-LYY:EQLSN:TLVKS, VSQDL:EPLT-AA¹⁷-LYY:EQLSN:MIVKS, VPTEL:SNIT-AA¹⁷-QIM:IGEMS:DMQHN, VPTKM:SNIT-AA¹⁷-QIM:IGEMS:NMQHN, VPTEL:SNIT-AA¹⁷-QIM:IGEMS:EMQHN, VPTKL:SNIT-AA¹⁷-QIM:IGEMS:NMQHN, VPTQL:SNIT-AA¹⁷-QIM:IGEMS:NMQHN, VPTKL:SNIT-AA¹⁷-QIM:IGEMS:EGMSQHN, VPTKL:SNIT-AA¹⁷-QIM:IGEMS:GMQHN, VPTKM:SNIT-AA¹⁷-QIM:IGEMS:GMQHN, VPTRL:SNIT-AA¹⁷-QIM:IGEMS:DMQHN, VPTKT:SNIT-AA¹⁷-QIM:IGEMS:MIQHN, VPTAL:SNIT-AA¹⁷-QIM:IGEMS:MIQHN, VPTDL:SNIT-AA¹⁷-QIM:IGEMS:MIQHN, VPTDL:SNIT-AA¹⁷-QIM:IGEMS:MVQHN, VPTGQ:SNIT-AA¹⁷-QIM:IGEMS:LEQHN, VPTEE:SNIT-AA¹⁷-QIM:IGEMS:FLQHN, VPTHH:SNIT-AA¹⁷-QIM:IGEMS:RLQHN, VPTQL:SNIT-AA¹⁷-QIM:IGEMS:TLQHN, VPTEL:SNIT-AA¹⁷-QIM:IGEMS:DMVVE, VPEKM:SNIT-AA¹⁷-QIM:IGEMS:NMTVE, VPTEL:SNIT-AA¹⁷-QIM:IGEMS:EMVVE, APTKL:SNIT-AA¹⁷-QIM:IGEMS:NMVVR, APTQL:SNIT-AA¹⁷-QIM:IGEMS:NMVVR, APTKL:SNIT-AA¹⁷-QIM:IGEMS:NMVVK, VPTKL:SNIT-AA¹⁷-QIM:IGEMS:EGMSVAE, VPTKL:SNIT-AA¹⁷-QIM:IGEMS:GMAVS, TPTKM:SNIT-AA¹⁷-QIM:IGEMS:GMVVD, VPARL:SNIT-AA¹⁷-QIM:IGEMS:DMVVE, VPTRL:SNIT-AA¹⁷-QIM:IGEMS:DMVVE, APVKT:SNIT-AA¹⁷-QIM:IGEMS:MIVEE, VPQAL:SNIT-AA¹⁷-QIM:IGEMS:MIVRS, VSQDL:SNIT-AA¹⁷-QIM:IGEMS:MIVKS, VPQDL:SNIT-AA¹⁷-QIM:IGEMS:MVVKS, VPTGQ:SNIT-AA¹⁷-QIM:IGEMS:LEEHS, SRVHH:SNIT-AA¹⁷-QIM:IGEMS:RLEEH, TQVQL:SNIT-AA¹⁷-QIM:IGEMS:TLEDH, VPTEL:SNIT-AA¹⁷-QIM:LGEMS:DMEHS, VPTKM:SNIT-AA¹⁷-QIM:LGEMS:NMEHS, VPTEL:SNIT-AA¹⁷-QIM:LGEMS:EMEHS, VPTKL:SNIT-AA¹⁷-QIM:LGEMS:NMEHS, VPTQL:SNIT-AA¹⁷-QIM:LGEMS:NMEHS, VPTKL:SNIT-AA¹⁷-QIM:LGEMS:EGMSEHS, VPTKL:SNIT-AA¹⁷-QIM:LGEMS:GMEHS, VPTKM:SNIT-AA¹⁷-QIM:LGEMS:GMEHS, VPTRL:SNIT-AA¹⁷-QIM:LGEMS:DMEHS, VPTKT:SNIT-AA¹⁷-QIM:LGEMS:MIEHS, VPTAL:SNIT-AA¹⁷-QIM:LGEMS:MIEHS, VPTDL:SNIT-AA¹⁷-QIM:LGEMS:MIEHS, VPTDL:SNIT-AA¹⁷-QIM:LGEMS:MVEHS, VPTEE:SNIT-AA¹⁷-QIM:LGEMS:FLEHS, VPTHH:SNIT-AA¹⁷-QIM:LGEMS:RLEHS, VPTQL:SNIT-AA¹⁷-QIM:LGEMS:TLEHS, VPTEL:SNIT-AA¹⁷-QIM:LGEMS:DMVVE, VPEKM:SNIT-AA¹⁷-QIM:LGEMS:NMTVE, VPTEL:SNIT-AA¹⁷-QIM:LGEMS:EMVVE, APTKL:SNIT-AA¹⁷-QIM:LGEMS:NMVVR, APTQL:SNIT-AA¹⁷-QIM:LGEMS:NMVVR, APTKL:SNIT-AA¹⁷-QIM:LGEMS:NMVVK, VPTKL:SNIT-AA¹⁷-QIM:LGEMS:EGMSVAE, VPTKL:SNIT-AA¹⁷-QIM:LGEMS:GMAVS, TPTKM:SNIT-AA¹⁷-QIM:LGEMS:GMVVD, VPARL:SNIT-AA¹⁷-QIM:LGEMS:DMVVE, VPTRL:SNIT-AA¹⁷-QIM:LGEMS:DMVVE, APVKT:SNIT-AA¹⁷-QIM:LGEMS:MIVEE, VPQAL:SNIT-AA¹⁷-QIM:LGEMS:MIVRS, VSQDL:SNIT-AA¹⁷-QIM:LGEMS:MIVKS, VPQDL:SNIT-AA¹⁷-QIM:LGEMS:MVVKS, VPTEE:SNIT-AA¹⁷-QIM:LGEMS:FLQHN, SRVHH:SNIT-AA¹⁷-QIM:LGEMS:RLEEH, TQVQL:SNIT-AA¹⁷-QIM:LGEMS:TLEDH, SRVEL:RSVK-AA¹⁷-AKV:KEVQV:DMEEH, SRVKM:RSVK-AA¹⁷-AKV:KEVQV:NMEEH, SRVEL:RSVK-AA¹⁷-AKV:KEVQV:EMEEH, SRVKL:RSVK-AA¹⁷-AKV:KEVQV:NMEEH, SRVQL:RSVK-AA¹⁷-AKV:KEVQV:NMEEH, SRVKL:RSVK-AA¹⁷-AKV:KEVQV:EGMSEEH, SRVKL:RSVK-AA¹⁷-AKV:KEVQV:GM EEH, SRVKM:RSVK-AA¹⁷-AKV:KEVQV:GMEEH, SRVRL:RSVK-AA¹⁷-AKV:KEVQV:DM EEH, SRVKT:RSVK-AA¹⁷-AKV:KEVQV:MIEEH, SRVAL:RSVK-AA¹⁷-AKV:KEVQV:MIEEH, SRVDL:RSVK-AA¹⁷-AKV:KEVQV:MIEEH, SRVDL:RSVK-AA¹⁷-AKV:KEVQV:MVEEH, SRVEE:RSVK-AA¹⁷-AKV:KEVQV:FLEEH, SRVGQ:RSVK-AA¹⁷-AKV:KEVQV:LEEEH, SRVQL:RSVK-AA¹⁷-AKV:KEVQV:TLEEH, VPTEL:RSVK-AA¹⁷-AKV:KEVQV:DMVVE, VPEKM:RSVK-AA¹⁷-AKV:KEVQV:NMTVE, VPTEL:RSVK-AA¹⁷-AKV:KEVQV:EMVVE, APTKL:RSVK-AA¹⁷-AKV:KEVQV:NMVVR, APTQL:RSVK-AA¹⁷-AKV:KEVQV:NMVVR, APTKL:RSVK-AA¹⁷-AKV:KEVQV:NMVVK, VPTKL:RSVK-AA¹⁷-AKV:KEVQV:EGMSVAE, VPTKL:RSVK-AA¹⁷-AKV:KEVQV:GMAVS, TPTKM:RSVK-AA¹⁷-AKV:KEVQV:GMVVD, VPARL:RSVK-AA¹⁷-AKV:KEVQV:DMVVE, VPTRL:RSVK-AA¹⁷-AKV:KEVQV:DMVVE, APVKT:RSVK-AA¹⁷-AKV:KEVQV:MIVEE, VPQAL:RSVK-AA¹⁷-AKV:KEVQV:MIVRS, VSQDL:RSVK-AA¹⁷-AKV:KEVQV:MIVKS, VPQDL:RSVK-AA¹⁷-AKV:KEVQV:MVVKS, VPTEE:RSVK-AA¹⁷-AKV:KEVQV:FLQH N, VPTGQ:RSVK-AA¹⁷-AKV:KEVQV:LEEHS, TQVQL:RSVK-AA¹⁷-AKV:KEVQV:TLEDH, TQVEL:RPVQ-AA¹⁷-RKI:KKATV:DMEDH, TQVKM:RPVQ-AA¹⁷-RKI:KKATV:NMEDH, TQVEL:RPVQ-AA¹⁷-RKI:KKATV:EMEDH, TQVKL:RPVQ-AA¹⁷-RK:KKATV:NMEDH, TQVQL:RPVQ-AA¹⁷-RKI:KKATV:NMEDH, TQVKL:RPVQ-AA¹⁷-RKI:KKATV:EGMSEDH, TQVKL:RPVQ-AA¹⁷-RKI:KKATV:GMEDH, TQVKM:RPVQ-AA¹⁷-RKI:KKATV:GMEDH, TQVRL:RPVQ-AA¹⁷-RKI:KKATV:DMEDH, TQVKT:RPVQ-AA¹⁷-RKI:KKATV:MIEDH, TQVAL:RPVQ-AA¹⁷-RK:KKATV:MIEDH, TQVDL:RPVQ-AA¹⁷-RKI:KKATV:MIEDH, TQVDL:RPVQ-AA¹⁷-RK:KKATV:MVEDH, TQVEE:RPVQ-AA¹⁷-RKI:KKATV:FLEDH, TQVGQ:RPVQ-AA¹⁷-RKI:KKATV:LEEDH, TQVHH:RPVQ-AA¹⁷-RKI:KKATV:RLEDH, VPTEL:RPVQ-AA¹⁷-RKI:KKATV:DMVVE, VPEKM:RPVQ-AA¹⁷-RKI:KKATV:NMTVE, VPTEL:RPVQ-AA¹⁷-RKI:KKATV:EMVVE, APTKL:RPVQ-AA¹⁷-RKI:KKATV:NMVVR, APTQL:RPVQ-AA¹⁷-RKI:KKATV:NMVVR, APTKL:RPVQ-AA¹⁷-RKI:KKATV:NMVVK, VPTKL:RPVQ-AA¹⁷-RKI:KKATV:EGMSVAE, VPTKL:RPVQ-AA¹⁷-RKI:KKATV:GMAVS, TPTKM:RPVQ-AA¹⁷-RKI:KKATV:GMVVD, VPARL:RPVQ-AA¹⁷-RKI:KKATV:DMVVE, VPTRL:RPVQ-AA¹⁷-RKI:KKATV:DMVVE, APVKT:RPVQ-AA¹⁷-RKI:KKATV:MIVEE, VPQAL:RPVQ-AA¹⁷-RKI:KKATV:MIVRS, VSQDL:RPVQ-AA¹⁷-RKI:KKATV:MIVKS, VPQDL:RPVQ-AA¹⁷-RKI:KKATV:MVVKS, VPTEE:RPVQ-AA¹⁷-RKI:KKATV:FLQHN, VPTGQ:RPVQ-AA¹⁷-RKI:KKATV:LEEHS and SRVHH:RPVQ-AA¹⁷-RKI:KKATV:RLEEH; and wherein AA¹⁷ is selected from the group consisting of G, A, V, L, I, P, F, M, W, T and S (in particular is selected from the group consisting of M, I, L, V and T). More particularly, the quadruplet PEP5:PEP12:PEP2:PEP6 is selected from the group consisting of VPTKM:SAIS-AA¹⁷-LYL:LKNYQ:NMVVE, VPTKL:SAIS-AA¹⁷-LYL:LKNYQ:NMVVE, VPTQL:SAIS-AA¹⁷-LYL:LKNYQ:NMVVE, VPTKL:SAIS-AA¹⁷-LYL:LKNYQ:EGMSVVE, VPTKL:SAIS-AA¹⁷-LYL:LKNYQ:GMVVE, VPTKM:SAIS-AA¹⁷-LYL:LKNYQ:GMVVE, VPTRL:SAIS-AA¹⁷-LYL:LKNYQ:DMVVE, VPTKT:SAIS-AA¹⁷-LYL:LKNYQ:MIVVE, VPTAL:SAIS-AA¹⁷-LYL:LKNYQ:MIVVE, VPTDL:SAIS-AA-LYL:LKNYQ:MIVVE, VPTDL:SAIS-AA¹⁷-LYL:LKNYQ:MVVVE, VPEKM:SAIS-AA¹⁷-LYL:LKNYQ:NMTVE, APTKL:SAIS-AA¹⁷-LYL:LKNYQ:NMVVR, APTQL:SAIS-AA¹⁷-LYL:LKNYQ:NMVVR, APTKL:SAIS-AA-LYL:LKNYQ:NMVVK, VPTKL:SAIS-AA¹⁷-LYL:LKNYQ:EGMSVAE, VPTKL:SAIS-AA¹⁷-LYL:LKNYQ:GMAVS, TPTKM:SAIS-AA¹⁷-LYL:LKNYQ:GMVVD, VPARL:SAIS-AA¹⁷-LYL:LKNYQ:DMVVE, APVKT:SAIS-AA¹⁷-LYL:LKNYQ:MIVEE, VPQAL:SAIS-AA¹⁷-LYL:LKNYQ:MIVRS, VSQDL:SAIS-AA-LYL:LKNYQ:MIVKS, VPQDL:SAIS-AA¹⁷-LYL:LKNYQ:MVVKS, VPTEE:SAIS-AA¹⁷-LYL:LKNYQ:FLQHN, VPTGQ:SAIS-AA¹⁷-LYL:LKNYQ:LEEHS, SRVHH:SAIS-AA¹⁷-LYL:LKNYQ:RLEEH, TQVQL:SAIS-AA¹⁷-LYL:LKNYQ:TLEDH, VPEEL:SSLS-AA¹⁷-LFF:LKVYP:DMTVE, VPEEL:SSLS-AA¹⁷-LFF:LKVYP:EMTVE, VPEKL:SSLS-AA¹⁷-LFF:LKVYP:NMTVE, VPEQL:SSLS-AA¹⁷-LFF:LKVYP:NMTVE, VPEKL:SSLS-AA¹⁷-LFF:LKVYP:EGMSTVE, VPEKL:SSLS-AA¹⁷-LFF:LKVYP:GMTVE, VPEKM:SSLS-AA¹⁷-LFF:LKVYP:GMTVE, VPERL:SSLS-AA¹⁷-LFF:LKVYP:DMTVE, VPEKT:SSLS-AA¹⁷-LFF:LKVYP:MITVE, VPEAL:SSLS-AA¹⁷-LFF:LKVYP:MITVE, VPEDL:SSLS-AA¹⁷-LFF:LKVYP:MITVE, VPEDL:SSLS-AA¹⁷-LFF:LKVYP:MVTVE, VPTEL:SSLS-AA¹⁷-LFF:LKVYP:DMVVE, VPTEL:SSLS-AA¹⁷-LFF:LKVYP:EMVVE, APTKL:SSLS-AA¹⁷-LFF:LKVYP:NMVVR, APTQL:SSLS-AA¹⁷-LFF:LKVYP:NMVVR, APTKL:SSLS-AA¹-LFF:LKVYP:NMVVK, VPTKL:SSLS-AA¹⁷-LFF:LKVYP:EGMSVAE, VPTKL:SSLS-AA¹⁷-LFF:LKVYP:GMAVS, TPTKM:SSLS-AA¹⁷-LFF:LKVYP:GMVVD, VPARL:SSLS-AA¹⁷-LFF:LKVYP:DMVVE, VPTRL:SSLS-AA¹⁷-LFF:LKVYP:DMVVE, APVKT:SSLS-AA¹⁷-LFF:LKVYP:MIVEE, VPQAL:SSLS-AA¹⁷-LFF:LKVYP:MIVRS, VSQDL:SSLS-AA¹⁷-LFF:LKVYP:MIVKS, VPQDL:SSLS-AA¹⁷-LFF:LKVYP:MVVKS, VPTEE:SSLS-AA¹⁷-LFF:LKVYP:FLQHN, VPTGQ:SSLS-AA¹⁷-LFF:LKVYP:LEEHS, SRVHH:SSLS-AA¹⁷-LFF:LKVYP:RLEEH, TQVQL:SSLS-AA¹⁷-LFF:LKVYP:TLEDH, APTEL:NAIS-AA¹⁷-LYF:LKKYR:DMVVR, APTKM:NAIS-AA¹⁷-LYF:LKKYR:NMVVR, APTEL:NAIS-AA¹⁷-LYF:LKKYR:EMVVR, APTKL:NAIS-AA¹⁷-LYF:LKKYR:NMVVR, APTKL:NAIS-AA¹⁷-LYF:LKKYR:EGMSVVR, APTKL:NAIS-AA¹⁷-LYF:LKKYR:GMVVR, APTKM:NAIS-AA¹⁷-LYF:LKKYR:GMVVR, APTRL:NAIS-AA¹⁷-LYF:LKKYR:DMVVR, APTKT:NAIS-AA¹⁷-LYF:LKKYR:MIVVR, APTAL:NAIS-AA¹⁷-LYF:LKKYR:MIVVR, APTDL:NAIS-AA¹⁷-LYF:LKKYR:MIVVR, APTDL:NAIS-AA¹⁷-LYF:LKKYR:MVVVR, VPTEL:NAIS-AA¹⁷-LYF:LKKYR:DMVVE, VPEKM:NAIS-AA¹⁷-LYF:LKKYR:NMTVE, VPTEL:NAIS-AA¹⁷-LYF:LKKYR:EMVVE, APTKL:NAIS-AA¹⁷-LYF:LKKYR:NMVVK, VPTKL:NAIS-AA¹⁷-LYF:LKKYR:EGMSVAE, VPTKL:NAIS-AA¹⁷-LYF:LKKYR:GMAVS, TPTKM:NAIS-AA¹⁷-LYF:LKKYR:GMVVD, VPARL:NAIS-AA¹⁷-LYF:LKKYR:DMVVE, VPTRL:NAIS-AA¹⁷-LYF:LKKYR:DMVVE, APVKT:NAIS-AA¹⁷-LYF:LKKYR:MIVEE, VPQAL:NAIS-AA¹⁷-LYF:LKKYR:MIVRS, VSQDL:NAIS-AA¹⁷-LYF:LKKYR:MIVKS, VPQDL:NAIS-AA¹⁷-LYF:LKKYR:MVVKS, VPTEE:NAIS-AA¹⁷-LYF:LKKYR:FLQHN, VPTGQ:NAIS-AA¹⁷-LYF:LKKYR:LEEHS, SRVHH:NAIS-AA¹⁷-LYF:LKKYR:RLEEH, TQVQL:NAIS-AA¹⁷-LYF:LKKYR:TLEDH, APTEL:SATS-AA¹⁷-LYY:LRKHR:DMVVK, APTKM:SATS-AA¹⁷-LYY:LRKHR:NMVVK, APTEL:SATS-AA¹⁷-LYY:LRKHR:EMVVK, APTKL:SATS-AA¹⁷-LYY:LRKHR:NMVVK, APTQL:SATS-AA¹⁷-LYY:LRKHR:NMVVK, APTKL:SATS-AA¹⁷-LYY:LRKHR:EGMSVVK, APTKL:SATS-AA¹⁷-LYY:LRKHR:GMVVK, APTKM:SATS-AA¹⁷-LYY:LRKHR:GMVVK, APTRL:SATS-AA¹⁷-LYY:LRKHR:DMVVK, APTKT:SATS-AA¹⁷-LYY:LRKHR:MIVVK, APTAL:SATS-AA¹⁷-LYY:LRKHR:MIVVK, APTDL:SATS-AA¹⁷-LYY:LRKHR:MIVVK, APTDL:SATS-AA¹⁷-LYY:LRKHR:MVVVK, VPTEL:SATS-AA¹⁷-LYY:LRKHR:DMVVE, VPEKM:SATS-AA¹⁷-LYY:LRKHR:NMTVE, VPTEL:SATS-AA¹⁷-LYY:LRKHR:EMVVE, APTKL:SATS-AA¹⁷-LYY:LRKHR:NMVVR, APTQL:SATS-AA¹⁷-LYY:LRKHR:NMVVR, VPTKL:SATS-AA¹⁷-LYY:LRKHR:EGMSVAE, VPTKL:SATS-AA¹⁷-LYY:LRKHR:GMAVS, TPTKM:SATS-AA¹⁷-LYY:LRKHR:GMVVD, VPARL:SATS-AA¹⁷-LYY:LRKHR:DMVVE, VPTRL:SATS-AA¹⁷-LYY:LRKHR:DMVVE, APVKT:SATS-AA¹⁷-LYY:LRKHR:MIVEE, VPQAL:SATS-AA¹⁷-LYY:LRKHR:MIVRS, VSQDL:SATS-AA¹⁷-LYY:LRKHR:MIVKS, VPQDL:SATS-AA¹⁷-LYY:LRKHR:MVVKS, VPTEE:SATS-AA¹⁷-LYY:LRKHR:FLQHN, VPTGQ:SATS-AA¹⁷-LYY:LRKHR:LEEHS, SRVHH:SATS-AA¹-LYY:LRKHR:RLEEH, TQVQL:SATS-AA¹⁷-LYY:LRKHR:TLEDH, VPTEL:SPIS-AA¹⁷-LYK:LKYHY:DMVAE, VPTKM:SPIS-AA¹⁷-LYK:LKYHY:NMVAE, VPTEL:SPIS-AA¹⁷-LYK:LKYHY:EMVAE, VPTKL:SPIS-AA¹⁷-LYK:LKYHY:NMVAE, VPTQL:SPIS-AA¹⁷-LYK:LKYHY:NMVAE, VPTKL:SPIS-AA¹⁷-LYK:LKYHY:GMVAE, VPTKM:SPIS-AA¹⁷-LYK:LKYHY:GMVAE, VPTRL:SPIS-AA¹⁷-LYK:LKYHY:DMVAE, VPTKT:SPIS-AA¹⁷-LYK:LKYHY:MIVAE, VPTAL:SPIS-AA¹⁷-LYK:LKYHY:MIVAE, VPTDL:SPIS-AA¹⁷-LYK:LKYHY:MIVAE, VPTDL:SPIS-AA¹⁷-LYK:LKYHY:MVVAE, VPTEL:SPIS-AA¹⁷-LYK:LKYHY:DMVVE, VPEKM:SPIS-AA¹⁷-LYK:LKYHY:NMTVE, VPTEL:SPIS-AA¹⁷-LYK:LKYHY:EMVVE, APTKL:SPIS-AA¹⁷-LYK:LKYHY:NMVVR, APTQL:SPIS-AA¹⁷-LYK:LKYHY:NMVVR, APTKL:SPIS-AA¹⁷-LYK:LKYHY:NMVVK, VPTKL:SPIS-AA¹⁷-LYK:LKYHY:GMAVS, TPTKM:SPIS-AA¹⁷-LYK:LKYHY:GMVVD, VPARL:SPIS-AA¹⁷-LYK:LKYHY:DMVVE, VPTRL:SPIS-AA¹⁷-LYK:LKYHY:DMVVE, APVKT:SPIS-AA¹⁷-LYK:LKYHY:MIVEE, VPQAL:SPIS-AA¹⁷-LYK:LKYHY:MIVRS, VSQDL:SPIS-AA¹⁷-LYK:LKYHY:MIVKS, VPQDL:SPIS-AA¹⁷-LYK:LKYHY:MVVKS, VPTEE:SPIS-AA¹⁷-LYK:LKYHY:FLQHN, VPTGQ:SPIS-AA¹⁷-LYK:LKYHY:LEEHS, SRVHH:SPIS-AA¹⁷-LYK:LKYHY:RLEEH, TQVQL:SPIS-AA¹⁷-LYK:LKYHY:TLEDH, VPTEL:EPIS-AA¹⁷-LYL:KFKYE:DMAVS, VPTKM:EPIS-AA¹⁷-LYL:KFKYE:NMAVS, VPTEL:EPIS-AA¹⁷-LYL:KFKYE:EMAVS, VPTKL:EPIS-AA¹⁷-LYL:KFKYE:NMAVS, VPTQL:EPIS-AA¹⁷-LYL:KFKYE:NMAVS, VPTKL:EPIS-AA¹⁷-LYL:KFKYE:EGMSAVS, VPTKM:EPIS-AA¹⁷-LYL:KFKYE:GMAVS, VPTRL:EPIS-AA¹⁷-LYL:KFKYE:DMAVS, VPTKT:EPIS-AA¹⁷-LYL:KFKYE:MIAVS, VPTAL:EPIS-AA¹⁷-LYL:KFKYE:MIAVS, VPTDL:EPIS-AA¹⁷-LYL:KFKYE:MIAVS, VPTDL:EPIS-AA¹⁷-LYL:KFKYE:MVAVS, VPTEL:EPIS-AA¹⁷-LYL:KFKYE:DMVVE, VPEKM:EPIS-AA¹⁷-LYL:KFKYE:NMTVE, VPTEL:EPIS-AA¹⁷-LYL:KFKYE:EMVVE, APTKL:EPIS-AA¹⁷-LYL:KFKYE:NMVVR, APTQL:EPIS-AA¹⁷-LYL:KFKYE:NMVVR, APTKL:EPIS-AA¹⁷-LYL:KFKYE:NMVVK, VPTKL:EPIS-AA¹⁷-LYL:KFKYE:EGMSVAE, TPTKM:EPIS-AA¹⁷-LYL:KFKYE:GMVVD, VPARL:EPIS-AA¹⁷-LYL:KFKYE:DMVVE, VPTRL:EPIS-AA¹⁷-LYL:KFKYE:DMVVE, APVKT:EPIS-AA¹⁷-LYL:KFKYE:MIVEE, VPQAL:EPIS-AA¹⁷-LYL:KFKYE:MIVRS, VSQDL:EPIS-AA¹⁷-LYL:KFKYE:MIVKS, VPQDL:EPIS-AA¹⁷-LYL:KFKYE:MVVKS, VPTEE:EPIS-AA¹⁷-LYL:KFKYE:FLQHN, VPTGQ:EPIS-AA¹⁷-LYL:KFKYE:LEEHS, SRVHH:EPIS-AA¹⁷-LYL:KFKYE:RLEEH, TQVQL:EPIS-AA¹⁷-LYL:KFKYE:TLEDH, TPTEL:SPIN-AA¹⁷-LYF:YGKIP:DMVVD, TPTKM:SPIN-AA¹⁷-LYF:YGKIP:NMVVD, TPTEL:SPIN-AA¹⁷-LYF:YGKIP:EMVVD, TPTKL:SPIN-AA¹⁷-LYF:YGKIP:NMVVD, TPTQL:SPIN-AA¹⁷-LYF:YGKIP:NMVVD, TPTKL:SPIN-AA¹-LYF:YGKIP:EGMSVVD, TPTKL:SPIN-AA¹⁷-LYF:YGKIP:GMVVD, TPTRL:SPIN-AA¹⁷-LYF:YGKIP:DMVVD, TPTKT:SPIN-AA¹⁷-LYF:YGKIP:MIVVD, TPTAL:SPIN-AA¹⁷-LYF:YGKIP:MIVVD, TPTDL:SPIN-AA¹⁷-LYF:YGKIP:MIVVD, TPTDL:SPIN-AA¹⁷-LYF:YGKIP:MVVVD, VPTEL:SPIN-AA¹⁷-LYF:YGKIP:DMVVE, VPEKM:SPIN-AA¹⁷-LYF:YGKIP:NMTVE, VPTEL:SPIN-AA¹⁷-LYF:YGKIP:EMVVE, APTKL:SPIN-AA¹⁷-LYF:YGKIP:NMVVR, APTQL:SPIN-AA¹⁷-LYF:YGKIP:NMVVR, APTKL:SPIN-AA¹⁷-LYF:YGKIP:NMVVK, VPTKL:SPIN-AA¹⁷-LYF:YGKIP:EGMSVAE, VPTKL:SPIN-AA¹⁷-LYF:YGKIP:GMAVS, VPARL:SPIN-AA¹⁷-LYF:YGKIP:DMVVE, VPTRL:SPIN-AA¹⁷-LYF:YGKIP:DMVVE, APVKT:SPIN-AA¹⁷-LYF:YGKIP:MIVEE, VPQAL:SPIN-AA¹⁷-LYF:YGKIP:MIVRS, VSQDL:SPIN-AA¹⁷-LYF:YGKIP:MIVKS, VPQDL:SPIN-AA¹⁷-LYF:YGKIP:MVVKS, VPTEE:SPIN-AA¹⁷-LYF:YGKIP:FLQHN, VPTGQ:SPIN-AA¹⁷-LYF:YGKIP:LEEHS, SRVHH:SPIN-AA¹⁷-LYF:YGKIP:RLEEH, TQVQL:SPIN-AA¹⁷-LYF:YGKIP:TLEDH, VPAEL:SPIS-AA¹⁷-LYI:YKQYE:DMVVE, VPAKM:SPIS-AA¹⁷-LYI:YKQYE:NMVVE, VPAEL:SPIS-AA¹⁷-LYI:YKQYE:EMVVE, VPAKL:SPIS-AA¹⁷-LYI:YKQYE:NMVVE, VPAQL:SPIS-AA¹⁷-LYI:YKQYE:NMVVE, VPAKL:SPIS-AA¹⁷-LYI:YKQYE:EGMSVVE, VPAKL:SPIS-AA¹⁷-LYI:YKQYE:GMVVE, VPAKM:SPIS-AA¹⁷-LYI:YKQYE:GMVVE, VPARL:SPIS-AA¹⁷-LYI:YKQYE:DMVVE, VPAKT:SPIS-AA¹⁷-LYI:YKQYE:MIVVE, VPAAL:SPIS-AA¹⁷-LYI:YKQYE:MIVVE, VPADL:SPIS-AA¹⁷-LYI:YKQYE:MIVVE, VPADL:SPIS-AA¹⁷-LYI:YKQYE:MVVVE, VPTEL:SPIS-AA¹⁷-LYI:YKQYE:DMVVE, VPEKM:SPIS-AA¹⁷-LYI:YKQYE:NMTVE, VPTEL:SPIS-AA¹⁷-LYI:YKQYE:EMVVE, APTKL:SPIS-AA¹⁷-LYI:YKQYE:NMVVR, APTQL:SPIS-AA¹⁷-LYI:YKQYE:NMVVR, APTKL:SPIS-AA¹⁷-LYI:YKQYE:NMVVK, VPTKL:SPIS-AA¹⁷-LYI:YKQYE:EGMSVAE, VPTKL:SPIS-AA¹⁷-LYI:YKQYE:GMAVS, TPTKM:SPIS-AA¹⁷-LYI:YKQYE:GMVVD, VPTRL:SPIS-AA¹⁷-LYI:YKQYE:DMVVE, APVKT:SPIS-AA¹⁷-LYI:YKQYE:MIVEE, VPQAL:SPIS-AA¹⁷-LYI:YKQYE:MIVRS, VSQDL:SPIS-AA¹⁷-LYI:YKQYE:MIVKS, VPQDL:SPIS-AA¹⁷-LYI:YKQYE:MVVKS, VPTEE:SPIS-AA¹⁷-LYI:YKQYE:FLQHN, VPTGQ:SPIS-AA¹⁷-LYI:YKQYE:LEEHS, SRVHH:SPIS-AA¹⁷-LYI:YKQYE:RLEEH, TQVQL:SPIS-AA¹⁷-LYI:YKQYE:TLEDH, VPTEL:SPIS-AA¹⁷-LFI:YKQYE:DMVVE, VPTKM:SPIS-AA¹⁷-LFI:YKQYE:NMVVE, VPTEL:SPIS-AA¹⁷-LFI:YKQYE:EMVVE, VPTKL:SPIS-AA¹⁷-LFI:YKQYE:NMVVE, VPTQL:SPIS-AA¹⁷-LFI:YKQYE:NMVVE, VPTKL:SPIS-AA¹⁷-LFI:YKQYE:EGMSVVE, VPTKL:SPIS-AA¹⁷-LFI:YKQYE:GMVVE, VPTKM:SPIS-AA¹⁷-LFI:YKQYE:GMVVE, VPTRL:SPIS-AA¹⁷-LFI:YKQYE:DMVVE, VPTKT:SPIS-AA¹⁷-LFI:YKQYE:MIVVE, VPTAL:SPIS-AA¹⁷-LFI:YKQYE:MIVVE, VPTDL:SPIS-AA¹⁷-LFI:YKQYE:MIVVE, VPTDL:SPIS-AA¹⁷-LFI:YKQYE:MVVVE, VPEKM:SPIS-AA¹⁷-LFI:YKQYE:NMTVE, APTKL:SPIS-AA¹⁷-LFI:YKQYE:NMVVR, APTQL:SPIS-AA¹⁷-LFI:YKQYE:NMVVR, APTKL:SPIS-AA¹⁷-LFI:YKQYE:NMVVK, VPTKL:SPIS-AA¹⁷-LFI:YKQYE:EGMSVAE, VPTKL:SPIS-AA¹⁷-LFI:YKQYE:GMAVS, TPTKM:SPIS-AA¹⁷-LFI:YKQYE:GMVVD, VPARL:SPIS-AA¹⁷-LFI:YKQYE:DMVVE, APVKT:SPIS-AA¹⁷-LFI:YKQYE:MIVEE, VPQAL:SPIS-AA¹⁷-LFI:YKQYE:MIVRS, VSQDL:SPIS-AA¹⁷-LFI:YKQYE:MIVKS, VPQDL:SPIS-AA¹⁷-LFI:YKQYE:MVVKS, VPTEE:SPIS-AA¹⁷-LFI:YKQYE:FLQHN, VPTGQ:SPIS-AA¹⁷-LFI:YKQYE:LEEHS, SRVHH:SPIS-AA¹⁷-LFI:YKQYE:RLEEH, TQVQL:SPIS-AA¹⁷-LFI:YKQYE:TLEDH, APVEL:KPLS-AA¹⁷-LYV:DHHKD:DMVEE, APVKM:KPLS-AA¹⁷-LYV:DHHKD:NMVEE, APVEL:KPLS-AA¹⁷-LYV:DHHKD:EMVEE, APVKL:KPLS-AA¹⁷-LYV:DHHKD:NMVEE, APVQL:KPLS-AA¹⁷-LYV:DHHKD:NMVEE, APVKL:KPLS-AA¹⁷-LYV:DHHKD:EGMSVEE, APVKL:KPLS-AA¹⁷-LYV:DHHKD:GMVEE, APVKM:KPLS-AA¹⁷-LYV:DHHKD:GMVEE, APVRL:KPLS-AA¹⁷-LYV:DHHKD:DMVEE, APVAL:KPLS-AA¹⁷-LYV:DHHKD:MIVEE, APVDL:KPLS-AA¹⁷-LYV:DHHKD:MIVEE, APVDL:KPLS-AA¹⁷-LYV:DHHKD:MVVEE, VPTEL:KPLS-AA¹⁷-LYV:DHHKD:DMVVE, VPEKM:KPLS-AA¹⁷-LYV:DHHKD:NMTVE, VPTEL:KPLS-AA¹⁷-LYV:DHHKD:EMVVE, APTKL:KPLS-AA¹⁷-LYV:DHHKD:NMVVR, APTQL:KPLS-AA¹⁷-LYV:DHHKD:NMVVR, APTKL:KPLS-AA¹⁷-LYV:DHHKD:NMVVK, VPTKL:KPLS-AA¹⁷-LYV:DHHKD:EGMSVAE, VPTKL:KPLS-AA¹⁷-LYV:DHHKD:GMAVS, TPTKM:KPLS-AA¹⁷-LYV:DHHKD:GMVVD, VPARL:KPLS-AA¹⁷-LYV:DHHKD:DMVVE, VPTRL:KPLS-AA¹⁷-LYV:DHHKD:DMVVE, VPQAL:KPLS-AA¹⁷-LYV:DHHKD:MIVRS, VSQDL:KPLS-AA¹⁷-LYV:DHHKD:MIVKS, VPQDL:KPLS-AA¹⁷-LYV:DHHKD:MVVKS, VPTEE:KPLS-AA¹⁷-LYV:DHHKD:FLQHN, VPTGQ:KPLS-AA¹⁷-LYV:DHHKD:LEEHS, SRVHH:KPLS-AA¹⁷-LYV:DHHKD:RLEEH, TQVQL:KPLS-AA¹⁷-LYV:DHHKD:TLEDH, VPQEL:EPLP-AA¹⁷-VYY:EQLSN:DMVRS, VPQKM:EPLP-AA¹⁷-VYY:EQLSN:NMVRS, VPQEL:EPLP-AA¹⁷-VYY:EQLSN:EMVRS, VPQKL:EPLP-AA¹⁷-VYY:EQLSN:NMVRS, VPQQL:EPLP-AA¹⁷-VYY:EQLSN:NMVRS, VPQKL:EPLP-AA¹⁷-VYY:EQLSN:EGMSVRS, VPQKL:EPLP-AA¹⁷-VYY:EQLSN:GMVRS, VPQKM:EPLP-AA¹⁷-VYY:EQLSN:GMVRS, VPQRL:EPLP-AA¹⁷-VYY:EQLSN:DMVRS, VPQKT:EPLP-AA¹⁷-VYY:EQLSN:MIVRS, VPQDL:EPLP-AA¹⁷-VYY:EQLSN:MIVRS, VPQDL:EPLP-AA¹⁷-VYY:EQLSN:MVVRS, VPTEL:EPLP-AA¹⁷-VYY:EQLSN:DMVVE, VPEKM:EPLP-AA¹⁷-VYY:EQLSN:NMTVE, VPTEL:EPLP-AA¹⁷-VYY:EQLSN:EMVVE, APTKL:EPLP-AA¹⁷-VYY:EQLSN:NMVVR, APTQL:EPLP-AA¹⁷-VYY:EQLSN:NMVVR, APTKL:EPLP-AA¹⁷-VYY:EQLSN:NMVVK, VPTKL:EPLP-AA¹⁷-VYY:EQLSN:EGMSVAE, VPTKL:EPLP-AA¹⁷-VYY:EQLSN:GMAVS, TPTKM:EPLP-AA¹⁷-VYY:EQLSN:GMVVD, VPARL:EPLP-AA¹⁷-VYY:EQLSN:DMVVE, VPTRL:EPLP-AA¹⁷-VYY:EQLSN:DMVVE, APVKT:EPLP-AA¹⁷-VYY:EQLSN:MIVEE, VSQDL:EPLP-AA¹⁷-VYY:EQLSN:MIVKS, VPQDL:EPLP-AA¹⁷-VYY:EQLSN:MVVKS, VPTEE:EPLP-AA¹⁷-VYY:EQLSN:FLQHN, VPTGQ:EPLP-AA¹⁷-VYY:EQLSN:LEEHS, SRVHH:EPLP-AA¹⁷-VYY:EQLSN:RLEEH, TQVQL:EPLP-AA¹⁷-VYY:EQLSN:TLEDH, VSQEL:EPLT-AA¹⁷-LYY:EQLSN:DMVKS, VSQKM:EPLT-AA¹⁷-LYY:EQLSN:NMVKS, VSQEL:EPLT-AA¹⁷-LYY:EQLSN:EMVKS, VSQKL:EPLT-AA¹⁷-LYY:EQLSN:NMVKS, VSQQL:EPLT-AA¹⁷-LYY:EQLSN:NMVKS, VSQKL:EPLT-AA¹⁷-LYY:EQLSN:EGMSVKS, VSQKL:EPLT-AA¹⁷-LYY:EQLSN:GMVKS, VSQKM:EPLT-AA¹⁷-LYY:EQLSN:GMVKS, VSQRL:EPLT-AA¹⁷-LYY:EQLSN:DMVKS, VSQKT:EPLT-AA¹⁷-LYY:EQLSN:MIVKS, VSQAL:EPLT-AA¹⁷-LYY:EQLSN:MIVKS, VSQDL:EPLT-AA¹⁷-LYY:EQLSN:MVVKS, VPTEL:EPLT-AA¹⁷-LYY:EQLSN:DMVVE, VPEKM:EPLT-AA¹⁷-LYY:EQLSN:NMTVE, VPTEL:EPLT-AA¹⁷-LYY:EQLSN:EMVVE, APTKL:EPLT-AA¹⁷-LYY:EQLSN:NMVVR, APTQL:EPLT-AA¹⁷-LYY:EQLSN:NMVVR, APTKL:EPLT-AA¹⁷-LYY:EQLSN:NMVVK, VPTKL:EPLT-AA¹⁷-LYY:EQLSN:EGMSVAE, VPTKL:EPLT-AA¹⁷-LYY:EQLSN:GMAVS, TPTKM:EPLT-AA¹⁷-LYY:EQLSN:GMVVD, VPARL:EPLT-AA¹⁷-LYY:EQLSN:DMVVE, VPTRL:EPLT-AA¹⁷-LYY:EQLSN:DMVVE, APVKT:EPLT-AA¹⁷-LYY:EQLSN:MIVEE, VPQAL:EPLT-AA¹⁷-LYY:EQLSN:MIVRS, VPTEE:EPLT-AA¹⁷-LYY:EQLSN:FLQHN, VPTGQ:EPLT-AA¹⁷-LYY:EQLSN:LEEHS, SRVHH:EPLT-AA¹⁷-LYY:EQLSN:RLEEH, TQVQL:EPLT-AA¹⁷-LYY:EQLSN:TLEDH, VPQEL:EPLT-AA¹⁷-LYY:EQLSN:DMVKS, VPQKM:EPLT-AA¹⁷-LYY:EQLSN:NMVKS, VPQEL:EPLT-AA¹⁷-LYY:EQLSN:EMVKS, VPQKL:EPLT-AA¹⁷-LYY:EQLSN:NMVKS, VPQQL:EPLT-AA¹⁷-LYY:EQLSN:NMVKS, VPQKL:EPLT-AA¹⁷-LYY:EQLSN:EGMSVKS, VPQKL:EPLT-AA¹⁷-LYY:EQLSN:GMVKS, VPQKM:EPLT-AA¹⁷-LYY:EQLSN:GMVKS, VPQRL:EPLT-AA¹⁷-LYY:EQLSN:DMVKS, VPQKT:EPLT-AA¹⁷-LYY:EQLSN:MIVKS, VPQAL:EPLT-AA¹⁷-LYY:EQLSN:MIVKS, VPQDL:EPLT-AA¹⁷-LYY:EQLSN:MIVKS, VPTGQ:SNIT-AA¹⁷-QIM:IGEMS:LEQHN, VPTEL:SNIT-AA¹⁷-QIM:IGEMS:DMVVE, VPEKM:SNIT-AA¹⁷-QIM:IGEMS:NMTVE, VPTEL:SNIT-AA¹⁷-QIM:IGEMS:EMVVE, APTKL:SNIT-AA¹⁷-QIM:IGEMS:NMVVR, APTQL:SNIT-AA¹⁷-QIM:IGEMS:NMVVR, APTKL:SNIT-AA¹⁷-QIM:IGEMS:NMVVK, VPTKL:SNIT-AA¹⁷-QIM:IGEMS:EGMSVAE, VPTKL:SNIT-AA¹⁷-QIM:IGEMS:GMAVS, TPTKM:SNIT-AA¹⁷-QIM:IGEMS:GMVVD, VPARL:SNIT-AA¹⁷-QIM:IGEMS:DMVVE, VPTRL:SNIT-AA¹⁷-QIM:IGEMS:DMVVE, APVKT:SNIT-AA¹⁷-QIM:IGEMS:MIVEE, VPQAL:SNIT-AA¹⁷-QIM:IGEMS:MIVRS, VSQDL:SNIT-AA¹⁷-QIM:IGEMS:MIVKS, VPQDL:SNIT-AA¹⁷-QIM:IGEMS:MVVKS, VPTGQ:SNIT-AA¹⁷-QIM:IGEMS:LEEHS, SRVHH:SNIT-AA¹⁷-QIM:IGEMS:RLEEH, TQVQL:SNIT-AA¹⁷-QIM:IGEMS:TLEDH, VPTEE:SNIT-AA¹⁷-QIM:LGEMS:FLEHS, VPTEL:SNIT-AA¹⁷-QIM:LGEMS:DMVVE, VPEKM:SNIT-AA¹⁷-QIM:LGEMS:NMTVE, VPTEL:SNIT-AA¹⁷-QIM:LGEMS:EMVVE, APTKL:SNIT-AA¹⁷-QIM:LGEMS:NMVVR, APTQL:SNIT-AA¹⁷-QIM:LGEMS:NMVVR, APTKL:SNIT-AA¹⁷-QIM:LGEMS:NMVVK, VPTKL:SNIT-AA¹⁷-QIM:LGEMS:EGMSVAE, VPTKL:SNIT-AA¹⁷-QIM:LGEMS:GMAVS, TPTKM:SNIT-AA¹⁷-QIM:LGEMS:GMVVD, VPARL:SNIT-AA¹⁷-QIM:LGEMS:DMVVE, VPTRL:SNIT-AA¹⁷-QIM:LGEMS:DMVVE, APVKT:SNIT-AA¹⁷-QIM:LGEMS:MIVEE, VPQAL:SNIT-AA¹⁷-QIM:LGEMS:MIVRS, VSQDL:SNIT-AA¹⁷-QIM:LGEMS:MIVKS, VPQDL:SNIT-AA¹⁷-QIM:LGEMS:MVVKS, VPTEE:SNIT-AA¹⁷-QIM:LGEMS:FLQHN, SRVHH:SNIT-AA¹⁷-QIM:LGEMS:RLEEH, TQVQL:SNIT-AA¹⁷-QIM:LGEMS:TLEDH, SRVQL:RSVK-AA¹⁷-AKV:KEVQV:TLEEH, VPTEL:RSVK-AA¹⁷-AKV:KEVQV:DMVVE, VPEKM:RSVK-AA¹⁷-AKV:KEVQV:NMTVE, VPTEL:RSVK-AA¹⁷-AKV:KEVQV:EMVVE, APTKL:RSVK-AA¹⁷-AKV:KEVQV:NMVVR, APTQL:RSVK-AA¹⁷-AKV:KEVQV:NMVVR, APTKL:RSVK-AA¹⁷-AKV:KEVQV:NMVVK, VPTKL:RSVK-AA¹⁷-AKV:KEVQV:EGMSVAE, VPTKL:RSVK-AA¹⁷-AKV:KEVQV:GMAVS, TPTKM:RSVK-AA¹⁷-AKV:KEVQV:GMVVD, VPARL:RSVK-AA¹⁷-AKV:KEVQV:DMVVE, VPTRL:RSVK-AA¹⁷-AKV:KEVQV:DMVVE, APVKT:RSVK-AA¹⁷-AKV:KEVQV:MIVEE, VPQAL:RSVK-AA¹⁷-AKV:KEVQV:MIVRS, VSQDL:RSVK-AA¹⁷-AKV:KEVQV:MIVKS, VPQDL:RSVK-AA¹⁷-AKV:KEVQV:MVVKS, VPTEE:RSVK-AA¹⁷-AKV:KEVQV:FLQHN, VPTGQ:RSVK-AA¹⁷-AKV:KEVQV:LEEHS, TQVQL:RSVK-AA¹⁷-AKV:KEVQV:TLEDH, TQVHH:RPVQ-AA¹⁷-RKI:KKATV:RLEDH, VPTEL:RPVQ-AA¹⁷-RKI:KKATV:DMVVE, VPEKM:RPVQ-AA¹⁷-RKI:KKATV:NMTVE, VPTEL:RPVQ-AA¹⁷-RKI:KKATV:EMVVE, APTKL:RPVQ-AA¹⁷-RKI:KKATV:NMVVR, APTQL:RPVQ-AA¹⁷-RKI:KKATV:NMVVR, APTKL:RPVQ-AA¹⁷-RKI:KKATV:NMVVK, VPTKL:RPVQ-AA¹⁷-RKI:KKATV:EGMSVAE, VPTKL:RPVQ-AA¹⁷-RKI:KKATV:GMAVS, TPTKM:RPVQ-AA¹⁷-RKI:KKATV:GMVVD, VPARL:RPVQ-AA¹⁷-RKI:KKATV:DMVVE, VPTRL:RPVQ-AA¹⁷-RKI:KKATV:DMVVE, APVKT:RPVQ-AA¹⁷-RKI:KKATV:MIVEE, VPQAL:RPVQ-AA¹⁷-RKI:KKATV:MIVRS, VSQDL:RPVQ-AA¹⁷-RKI:KKATV:MIVKS, VPQDL:RPVQ-AA¹⁷-RKI:KKATV:MVVKS, VPTEE:RPVQ-AA¹⁷-RKI:KKATV:FLQHN, VPTGQ:RPVQ-AA¹⁷-RKI:KKATV:LEEHS and SRVHH:RPVQ-AA¹⁷-RKI:KKATV:RLEEH; and wherein AA¹⁷ is selected from the group consisting of G, A, V, L, I, P, F, M, W, T and S (in particular is selected from the group consisting of M, I, L, V and T).

[0437] In particular, in certain embodiments, the quadruplet PEP9:PEP1:PEP2:PEP10 is selected from the group consisting of GIPEPXXVPTKM:SAIS:LKNYQ:NMVVESXAXR, SIPKAXXVPTEL:SAIS:LKNYQ:EMVVEGXGXR, HVTKPTXVPTKL:SAIS:LKNYQ:NMVVESXGXH, YVPKPXXVPTKL:SAIS:LKNYQ:NMVVESXGXH, TVPKPXXVPTQL:SAIS:LKNYQ:NMVVEAXGXH, AVPKAXXVPTKL:SAIS:LKNYQ:NMVVEAXGXH, KVGKAXXVPTKL:SAIS:LKNYQ:EGMSVVEXGXR, KASKAXXVPTKL:SAIS:LKNYQ:GMVVEEXGXR, GSAGPXXVPTKM:SAIS:LKNYQ:GMVVERXGXS, AAPASXXVPTRL:SAIS:LKNYQ:DMVVEAXGXR, STPPTXXVPTRL:SAIS:LKNYQ:DMVVESXGXR, HVPKPXXVPTKL:SAIS:LKNYQ:NMVVESXGXH, RVPSTXXVPTKT:SAIS:LKNYQ:MIVVEXGXL, ASAAPXXVPTAL:SAIS:LKNYQ:MIVVEXKXS, ASASPXXVPTDL:SAIS:LKNYQ:MIVVEXKXS, ASASPXXVPTDL:SAIS:LKNYQ:MVVVEXKXS, NDEGLEXVPTEE:SAIS:LKNYQ:FLVVEKXEXR, NDEGLEXVPTGQ:SAIS:LKNYQ:LEVVEQXEXR, SSVKXQPVPTHH:SAIS:LKNYQ:RLVVELEXAXA, RNVQXRPVPTQL:SAIS:LKNYQ:TLVVELAXKXE, GIPEPXXVPEKM:SAIS:LKNYQ:NMTVESXAXR, HVTKPTXAPTKL:SAIS:LKNYQ:NMVVRSXGXH, YVPKPXXAPTKL:SAIS:LKNYQ:NMVVRSXGXH, TVPKPXXAPTQL:SAIS:LKNYQ:NMVVRAXGXH, AVPKAXXAPTKL:SAIS:LKNYQ:NMVVKAXGXH, KVGKAXXVPTKL:SAIS:LKNYQ:EGMSVAEXGXR, KASKAXXVPTKL:SAIS:LKNYQ:GMAVSEXGXR, GSAGPXXTPTKM:SAIS:LKNYQ:GMVVDRXGXS, AAPASXXVPARL:SAIS:LKNYQ:DMVVEAXGXR, HVPKPXXAPTKL:SAIS:LKNYQ:NMVVRSXGXH, RVPSTXXAPVKT:SAIS:LKNYQ:MIVEEXGXL, ASAAPXXVPQAL:SAIS:LKNYQ:MIVRSXKXS, ASASPXXVSQDL:SAIS:LKNYQ:MIVKSXKXS, ASASPXXVPQDL:SAIS:LKNYQ:MVVKSXKXS, NDEGLEXVPTEE:SAIS:LKNYQ:FLQHNKXEXR, NDEGLEXVPTGQ:SAIS:LKNYQ:LEEHSQXEXR, SSVKXQPSRVHH:SAIS:LKNYQ:RLEEHLEXAXA, RNVQXRPTQVQL:SAIS:LKNYQ:TLEDHLAXKXE, KIPKAXXVPEEL:SSLS:LKVYP:DMTVEGXGXR, SIPKAXXVPEEL:SSLS:LKVYP:EMTVEGXGXR, HVTKPTXVPEKL:SSLS:LKVYP:NMTVESXGXH, YVPKPXXVPEKL:SSLS:LKVYP:NMTVESXGXH, TVPKPXXVPEQL:SSLS:LKVYP:NMTVEAXGXH, AVPKAXXVPEKL:SSLS:LKVYP:NMTVEAXGXH, KVGKAXXVPEKL:SSLS:LKVYP:EGMSTVEXGXR, KASKAXXVPEKL:SSLS:LKVYP:GMTVEEXGXR, GSAGPXXVPEKM:SSLS:LKVYP:GMTVERXGXS, AAPASXXVPERL:SSLS:LKVYP:DMTVEAXGXR, STPPTXXVPERL:SSLS:LKVYP:DMTVESXGXR, HVPKPXXVPEKL:SSLS:LKVYP:NMTVESXGXH, RVPSTXXVPEKT:SSLS:LKVYP:MITVEXGXL, ASAAPXXVPEAL:SSLS:LKVYP:MITVEXKXS, ASASPXXVPEDL:SSLS:LKVYP:MITVEXKXS, ASASPXXVPEDL:SSLS:LKVYP:MVTVEXKXS, NDEGLEXVPEEE:SSLS:LKVYP:FLTVEKXEXR, NDEGLEXVPEGQ:SSLS:LKVYP:LETVEQXEXR, SSVKXQPVPEHH:SSLS:LKVYP:RLTVELEXAXA, RNVQXRPVPEQL:SSLS:LKVYP:TLTVELAXKXE, KIPKAXXVPTEL:SSLS:LKVYP:DMVVEGXGXR, SIPKAXXVPTEL:SSLS:LKVYP:EMVVEGXGXR, HVTKPTXAPTKL:SSLS:LKVYP:NMVVRSXGXH, YVPKPXXAPTKL:SSLS:LKVYP:NMVVRSXGXH, TVPKPXXAPTQL:SSLS:LKVYP:NMVVRAXGXH, AVPKAXXAPTKL:SSLS:LKVYP:NMVVKAXGXH, KVGKAXXVPTKL:SSLS:LKVYP:EGMSVAEXGXR, KASKAXXVPTKL:SSLS:LKVYP:GMAVSEXGXR, GSAGPXXTPTKM:SSLS:LKVYP:GMVVDRXGXS, AAPASXXVPARL:SSLS:LKVYP:DMVVEAXGXR, STPPTXXVPTRL:SSLS:LKVYP:DMVVESXGXR, HVPKPXXAPTKL:SSLS:LKVYP:NMVVRSXGXH, RVPSTXXAPVKT:SSLS:LKVYP:MIVEEXGXL, ASAAPXXVPQAL:SSLS:LKVYP:MIVRSXKXS, ASASPXXVSQDL:SSLS:LKVYP:MIVKSXKXS, ASASPXXVPQDL:SSLS:LKVYP:MVVKSXKXS, NDEGLEXVPTEE:SSLS:LKVYP:FLQHNKXEXR, NDEGLEXVPTGQ:SSLS:LKVYP:LEEHSQXEXR, SSVKXQPSRVHH:SSLS:LKVYP:RLEEHLEXAXA, RNVQXRPTQVQL:SSLS:LKVYP:TLEDHLAXKXE, KIPKAXXVPTEL:SAIS:LKNYQ:DMVVEGXGXR, KIPKAXXAPTEL:NAIS:LKKYR:DMVVRGXGXR, GIPEPXXAPTKM:NAIS:LKKYR:NMVVRSXAXR, SIPKAXXAPTEL:NAIS:LKKYR:EMVVRGXGXR, YVPKPXXAPTKL:NAIS:LKKYR:NMVVRSXGXH, TVPKPXXAPTQL:NAIS:LKKYR:NMVVRAXGXH, AVPKAXXAPTKL:NAIS:LKKYR:NMVVRAXGXH, KVGKAXXAPTKL:NAIS:LKKYR:EGMSVVRXGXR, KASKAXXAPTKL:NAIS:LKKYR:GMVVREXGXR, GSAGPXXAPTKM:NAIS:LKKYR:GMVVRRXGXS, AAPASXXAPTRL:NAIS:LKKYR:DMVVRAXGXR, STPPTXXAPTRL:NAIS:LKKYR:DMVVRSXGXR, HVPKPXXAPTKL:NAIS:LKKYR:NMVVRSXGXH, RVPSTXXAPTKT:NAIS:LKKYR:MIVVRXGXL, ASAAPXXAPTAL:NAIS:LKKYR:MIVVRXKXS, ASASPXXAPTDL:NAIS:LKKYR:MIVVRXKXS, ASASPXXAPTDL:NAIS:LKKYR:MVVVRXKXS, NDEGLESAPTEE:NAIS:LKKYR:FLVVRKXEXR, NDEGLESAPTGQ:NAIS:LKKYR:LEVVRQXEXR, SSVKXQPAPTHH:NAIS:LKKYR:RLVVRLEXAXA, RNVQXRPAPTQL:NAIS:LKKYR:TLVVRLAXKXE, KIPKAXXVPTEL:NAIS:LKKYR:DMVVEGXGXR, GIPEPXXVPEKM:NAIS:LKKYR:NMTVESXAXR, SIPKAXXVPTEL:NAIS:LKKYR:EMVVEGXGXR, AVPKAXXAPTKL:NAIS:LKKYR:NMVVKAXGXH, KVGKAXXVPTKL:NAIS:LKKYR:EGMSVAEXGXR, KASKAXXVPTKL:NAIS:LKKYR:GMAVSEXGXR, GSAGPXXTPTKM:NAIS:LKKYR:GMVVDRXGXS, AAPASXXVPARL:NAIS:LKKYR:DMVVEAXGXR, STPPTXXVPTRL:NAIS:LKKYR:DMVVESXGXR, RVPSTXXAPVKT:NAIS:LKKYR:MIVEEXGXL, ASAAPXXVPQAL:NAIS:LKKYR:MIVRSXKXS, ASASPXXVSQDL:NAIS:LKKYR:MIVKSXKXS, ASASPXXVPQDL:NAIS:LKKYR:MVVKSXKXS, NDEGLEXVPTEE:NAIS:LKKYR:FLQHNKXEXR, NDEGLEXVPTGQ:NAIS:LKKYR:LEEHSQXEXR, SSVKXQPSRVHH:NAIS:LKKYR:RLEEHLEXAXA, RNVQXRPTQVQL:NAIS:LKKYR:TLEDHLAXKXE, HVTKPTXAPTKL:NAIS:LKKYR:NMVVRSXGXH, KIPKAXXAPTEL:SATS:LRKHR:DMVVKGXGXR, GIPEPXXAPTKM:SATS:LRKHR:NMVVKSXAXR, SIPKAXXAPTEL:SATS:LRKHR:EMVVKGXGXR, HVTKPTXAPTKL:SATS:LRKHR:NMVVKSXGXH, YVPKPXXAPTKL:SATS:LRKHR:NMVVKSXGXH, TVPKPXXAPTQL:SATS:LRKHR:NMVVKAXGXH, KVGKAXXAPTKL:SATS:LRKHR:EGMSVVKXGXR, KASKAXXAPTKL:SATS:LRKHR:GMVVKEXGXR, GSAGPXXAPTKM:SATS:LRKHR:GMVVKRXGXS, AAPASXXAPTRL:SATS:LRKHR:DMVVKAXGXR, STPPTXXAPTRL:SATS:LRKHR:DMVVKSXGXR, HVPKPXXAPTKL:SATS:LRKHR:NMVVKSXGXH, RVPSTXXAPTKT:SATS:LRKHR:MIVVKXGXL, ASAAPXXAPTAL:SATS:LRKHR:MIVVKXKXS, ASASPXXAPTDL:SATS:LRKHR:MIVVKXKXS, ASASPXXAPTDL:SATS:LRKHR:MVVVKXKXS, NDEGLESAPTEE:SATS:LRKHR:FLVVKKXEXR, NDEGLESAPTGQ:SATS:LRKHR:LEVVKQXEXR, SSVKXQPAPTHH:SATS:LRKHR:RLVVKLEXAXA, RNVQXRPAPTQL:SATS:LRKHR:TLVVKLAXKXE, KIPKAXXVPTEL:SATS:LRKHR:DMVVEGXGXR, GIPEPXXVPEKM:SATS:LRKHR:NMTVESXAXR, SIPKAXXVPTEL:SATS:LRKHR:EMVVEGXGXR, HVTKPTXAPTKL:SATS:LRKHR:NMVVRSXGXH, YVPKPXXAPTKL:SATS:LRKHR:NMVVRSXGXH, TVPKPXXAPTQL:SATS:LRKHR:NMVVRAXGXH, KVGKAXXVPTKL:SATS:LRKHR:EGMSVAEXGXR, KASKAXXVPTKL:SATS:LRKHR:GMAVSEXGXR, GSAGPXXTPTKM:SATS:LRKHR:GMVVDRXGXS, AAPASXXVPARL:SATS:LRKHR:DMVVEAXGXR, STPPTXXVPTRL:SATS:LRKHR:DMVVESXGXR, HVPKPXXAPTKL:SATS:LRKHR:NMVVRSXGXH, RVPSTXXAPVKT:SATS:LRKHR:MIVEEXGXL, ASAAPXXVPQAL:SATS:LRKHR:MIVRSXKXS, ASASPXXVSQDL:SATS:LRKHR:MIVKSXKXS, ASASPXXVPQDL:SATS:LRKHR:MVVKSXKXS, NDEGLEXVPTEE:SATS:LRKHR:FLQHNKXEXR, NDEGLEXVPTGQ:SATS:LRKHR:LEEHSQXEXR, SSVKXQPSRVHH:SATS:LRKHR:RLEEHLEXAXA, RNVQXRPTQVQL:SATS:LRKHR:TLEDHLAXKXE, KIPKAXXVPTEL:SPIS:LKYHY:DMVAEGXGXR, GIPEPXXVPTKM:SPIS:LKYHY:NMVAESXAXR, SIPKAXXVPTEL:SPIS:LKYHY:EMVAEGXGXR, HVTKPTXVPTKL:SPIS:LKYHY:NMVAESXGXH, YVPKPXXVPTKL:SPIS:LKYHY:NMVAESXGXH, TVPKPXXVPTQL:SPIS:LKYHY:NMVAEAXGXH, AVPKAXXVPTKL:SPIS:LKYHY:NMVAEAXGXH, KASKAXXVPTKL:SPIS:LKYHY:GMVAEEXGXR, GSAGPXXVPTKM:SPIS:LKYHY:GMVAERXGXS, AAPASXXVPTRL:SPIS:LKYHY:DMVAEAXGXR, STPPTXXVPTRL:SPIS:LKYHY:DMVAESXGXR, HVPKPXXVPTKL:SPIS:LKYHY:NMVAESXGXH, RVPSTXXVPTKT:SPIS:LKYHY:MIVAEXGXL, ASAAPXXVPTAL:SPIS:LKYHY:MIVAEXKXS, ASASPXXVPTDL:SPIS:LKYHY:MIVAEXKXS, ASASPXXVPTDL:SPIS:LKYHY:MVVAEXKXS, NDEGLEXVPTEE:SPIS:LKYHY:FLVAEKXEXR, NDEGLEXVPTGQ:SPIS:LKYHY:LEVAEQXEXR, SSVKXQPVPTHH:SPIS:LKYHY:RLVAELEXAXA, RNVQXRPVPTQL:SPIS:LKYHY:TLVAELAXKXE, KIPKAXXVPTEL:SPIS:LKYHY:DMVVEGXGXR, GIPEPXXVPEKM:SPIS:LKYHY:NMTVESXAXR, SIPKAXXVPTEL:SPIS:LKYHY:EMVVEGXGXR, HVTKPTXAPTKL:SPIS:LKYHY:NMVVRSXGXH, YVPKPXXAPTKL:SPIS:LKYHY:NMVVRSXGXH, TVPKPXXAPTQL:SPIS:LKYHY:NMVVRAXGXH, AVPKAXXAPTKL:SPIS:LKYHY:NMVVKAXGXH, KASKAXXVPTKL:SPIS:LKYHY:GMAVSEXGXR, GSAGPXXTPTKM:SPIS:LKYHY:GMVVDRXGXS, AAPASXXVPARL:SPIS:LKYHY:DMVVEAXGXR, STPPTXXVPTRL:SPIS:LKYHY:DMVVESXGXR, HVPKPXXAPTKL:SPIS:LKYHY:NMVVRSXGXH, RVPSTXXAPVKT:SPIS:LKYHY:MIVEEXGXL, ASAAPXXVPQAL:SPIS:LKYHY:MIVRSXKXS, ASASPXXVSQDL:SPIS:LKYHY:MIVKSXKXS, ASASPXXVPQDL:SPIS:LKYHY:MVVKSXKXS, NDEGLEXVPTEE:SPIS:LKYHY:FLQHNKXEXR, NDEGLEXVPTGQ:SPIS:LKYHY:LEEHSQXEXR, SSVKXQPSRVHH:SPIS:LKYHY:RLEEHLEXAXA, RNVQXRPTQVQL:SPIS:LKYHY:TLEDHLAXKXE, KIPKAXXVPTEL:EPIS:KFKYE:DMAVXGXGSR, GIPEPXXVPTKM:EPIS:KFKYE:NMAVSSXAXR, SIPKAXXVPTEL:EPIS:KFKYE:EMAVXGXGSR, HVTKPTXVPTKL:EPIS:KFKYE:NMAVSSXGXH, YVPKPXXVPTKL:EPIS:KFKYE:NMAVSSXGXH, TVPKPXXVPTQL:EPIS:KFKYE:NMAVSAXGXH, AVPKAXXVPTKL:EPIS:KFKYE:NMAVSAXGXH, KVGKAXXVPTKL:EPIS:KFKYE:EGMSAVSXGXR, GSAGPXXVPTKM:EPIS:KFKYE:GMAVSRXGXS, AAPASXXVPTRL:EPIS:KFKYE:DMAVSAXGXR, STPPTXXVPTRL:EPIS:KFKYE:DMAVSSXGXR, HVPKPXXVPTKL:EPIS:KFKYE:NMAVSSXGXH, RVPSTXXVPTKT:EPIS:KFKYE:MIAVSXGXL, ASAAPXXVPTAL:EPIS:KFKYE:MIAVSXKXS, ASASPXXVPTDL:EPIS:KFKYE:MIAVSXKXS, ASASPXXVPTDL:EPIS:KFKYE:MVAVSXKXS, NDEGLEXVPTEE:EPIS:KFKYE:FLAVXKXESR, NDEGLEXVPTGQ:EPIS:KFKYE:LEAVSQXEXR, SSVKXQPVPTHH:EPIS:KFKYE:RLAVSLEXAXA, RNVQXRPVPTQL:EPIS:KFKYE:TLAVSLAXKXE, KIPKAXXVPTEL:EPIS:KFKYE:DMVVEGXGXR, GIPEPXXVPEKM:EPIS:KFKYE:NMTVESXAXR, SIPKAXXVPTEL:EPIS:KFKYE:EMVVEGXGXR, HVTKPTXAPTKL:EPIS:KFKYE:NMVVRSXGXH, YVPKPXXAPTKL:EPIS:KFKYE:NMVVRSXGXH, TVPKPXXAPTQL:EPIS:KFKYE:NMVVRAXGXH, AVPKAXXAPTKL:EPIS:KFKYE:NMVVKAXGXH, KVGKAXXVPTKL:EPIS:KFKYE:EGMSVAEXGXR, GSAGPXXTPTKM:EPIS:KFKYE:GMVVDRXGXS, AAPASXXVPARL:EPIS:KFKYE:DMVVEAXGXR, STPPTXXVPTRL:EPIS:KFKYE:DMVVESXGXR, HVPKPXXAPTKL:EPIS:KFKYE:NMVVRSXGXH, RVPSTXXAPVKT:EPIS:KFKYE:MIVEEXGXL, ASAAPXXVPQAL:EPIS:KFKYE:MIVRSXKXS, ASASPXXVSQDL:EPIS:KFKYE:MIVKSXKXS, ASASPXXVPQDL:EPIS:KFKYE:MVVKSXKXS, NDEGLEXVPTEE:EPIS:KFKYE:FLQHNKXEXR, NDEGLEXVPTGQ:EPIS:KFKYE:LEEHSQXEXR, SSVKXQPSRVHH:EPIS:KFKYE:RLEEHLEXAXA, RNVQXRPTQVQL:EPIS:KFKYE:TLEDHLAXKXE, KIPKAXXTPTEL:SPIN:YGKIP:DMVVDGXGXR, GIPEPXXTPTKM:SPIN:YGKIP:NMVVDSXAXR, SIPKAXXTPTEL:SPIN:YGKIP:EMVVDGXGXR, HVTKPTXTPTKL:SPIN:YGKIP:NMVVDSXGXH, YVPKPXXTPTKL:SPIN:YGKIP:NMVVDSXGXH, TVPKPXXTPTQL:SPIN:YGKIP:NMVVDAXGXH, AVPKAXXTPTKL:SPIN:YGKIP:NMVVDAXGXH, KVGKAXXTPTKL:SPIN:YGKIP:EGMSVVDXGXR, KASKAXXTPTKL:SPIN:YGKIP:GMVVDEXGXR, AAPASXXTPTRL:SPIN:YGKIP:DMVVDAXGXR, STPPTXXTPTRL:SPIN:YGKIP:DMVVDSXGXR, HVPKPXXTPTKL:SPIN:YGKIP:NMVVDSXGXH, RVPSTXXTPTKT:SPIN:YGKIP:MIVVDXGXL, ASAAPXXTPTAL:SPIN:YGKIP:MIVVDXKXS, ASASPXXTPTDL:SPIN:YGKIP:MIVVDXKXS, ASASPXXTPTDL:SPIN:YGKIP:MVVVDXKXS, NDEGLESTPTEE:SPIN:YGKIP:FLVVDKXEXR, NDEGLESTPTGQ:SPIN:YGKIP:LEVVDQXEXR, SSVKXQPTPTHH:SPIN:YGKIP:RLVVDLEXAXA, RNVQXRPTPTQL:SPIN:YGKIP:TLVVDLAXKXE, KIPKAXXVPTEL:SPIN:YGKIP:DMVVEGXGXR, GIPEPXXVPEKM:SPIN:YGKIP:NMTVESXAXR, SIPKAXXVPTEL:SPIN:YGKIP:EMVVEGXGXR, HVTKPTXAPTKL:SPIN:YGKIP:NMVVRSXGXH, YVPKPXXAPTKL:SPIN:YGKIP:NMVVRSXGXH, TVPKPXXAPTQL:SPIN:YGKIP:NMVVRAXGXH, AVPKAXXAPTKL:SPIN:YGKIP:NMVVKAXGXH, KVGKAXXVPTKL:SPIN:YGKIP:EGMSVAEXGXR, KASKAXXVPTKL:SPIN:YGKIP:GMAVSEXGXR, AAPASXXVPARL:SPIN:YGKIP:DMVVEAXGXR, STPPTXXVPTRL:SPIN:YGKIP:DMVVESXGXR, HVPKPXXAPTKL:SPIN:YGKIP:NMVVRSXGXH, RVPSTXXAPVKT:SPIN:YGKIP:MIVEEXGXL, ASAAPXXVPQAL:SPIN:YGKIP:MIVRSXKXS, ASASPXXVSQDL:SPIN:YGKIP:MIVKSXKXS, ASASPXXVPQDL:SPIN:YGKIP:MVVKSXKXS, NDEGLEXVPTEE:SPIN:YGKIP:FLQHNKXEXR, NDEGLEXVPTGQ:SPIN:YGKIP:LEEHSQXEXR, SSVKXQPSRVHH:SPIN:YGKIP:RLEEHLEXAXA, RNVQXRPTQVQL:SPIN:YGKIP:TLEDHLAXKXE, KIPKAXXVPAEL:SPIS:YKQYE:DMVVEGXGXR, GIPEPXXVPAKM:SPIS:YKQYE:NMVVESXAXR, SIPKAXXVPAEL:SPIS:YKQYE:EMVVEGXGXR, HVTKPTXVPAKL:SPIS:YKQYE:NMVVESXGXH, YVPKPXXVPAKL:SPIS:YKQYE:NMVVESXGXH, TVPKPXXVPAQL:SPIS:YKQYE:NMVVEAXGXH, AVPKAXXVPAKL:SPIS:YKQYE:NMVVEAXGXH, KVGKAXXVPAKL:SPIS:YKQYE:EGMSVVEXGXR, KASKAXXVPAKL:SPIS:YKQYE:GMVVEEXGXR, GSAGPXXVPAKM:SPIS:YKQYE:GMVVERXGXS, STPPTXXVPARL:SPIS:YKQYE:DMVVESXGXR, HVPKPXXVPAKL:SPIS:YKQYE:NMVVESXGXH, RVPSTXXVPAKT:SPIS:YKQYE:MIVVEXGXL, ASAAPXXVPAAL:SPIS:YKQYE:MIVVEXKXS, ASASPXXVPADL:SPIS:YKQYE:MIVVEXKXS, ASASPXXVPADL:SPIS:YKQYE:MVVVEXKXS, NDEGLEXVPAEE:SPIS:YKQYE:FLVVEKXEXR, NDEGLEXVPAGQ:SPIS:YKQYE:LEVVEQXEXR, SSVKXQPVPAHH:SPIS:YKQYE:RLVVELEXAXA, RNVQXRPVPAQL:SPIS:YKQYE:TLVVELAXKXE, KIPKAXXVPTEL:SPIS:YKQYE:DMVVEGXGXR, GIPEPXXVPEKM:SPIS:YKQYE:NMTVESXAXR, SIPKAXXVPTEL:SPIS:YKQYE:EMVVEGXGXR, HVTKPTXAPTKL:SPIS:YKQYE:NMVVRSXGXH, YVPKPXXAPTKL:SPIS:YKQYE:NMVVRSXGXH, TVPKPXXAPTQL:SPIS:YKQYE:NMVVRAXGXH, AVPKAXXAPTKL:SPIS:YKQYE:NMVVKAXGXH, KVGKAXXVPTKL:SPIS:YKQYE:EGMSVAEXGXR, KASKAXXVPTKL:SPIS:YKQYE:GMAVSEXGXR, GSAGPXXTPTKM:SPIS:YKQYE:GMVVDRXGXS, STPPTXXVPTRL:SPIS:YKQYE:DMVVESXGXR, HVPKPXXAPTKL:SPIS:YKQYE:NMVVRSXGXH, RVPSTXXAPVKT:SPIS:YKQYE:MIVEEXGXL, ASAAPXXVPQAL:SPIS:YKQYE:MIVRSXKXS, ASASPXXVSQDL:SPIS:YKQYE:MIVKSXKXS, ASASPXXVPQDL:SPIS:YKQYE:MVVKSXKXS, NDEGLEXVPTEE:SPIS:YKQYE:FLQHNKXEXR, NDEGLEXVPTGQ:SPIS:YKQYE:LEEHSQXEXR, SSVKXQPSRVHH:SPIS:YKQYE:RLEEHLEXAXA, RNVQXRPTQVQL:SPIS:YKQYE:TLEDHLAXKXE, GIPEPXXVPTKM:SPIS:YKQYE:NMVVESXAXR, HVTKPTXVPTKL:SPIS:YKQYE:NMVVESXGXH, YVPKPXXVPTKL:SPIS:YKQYE:NMVVESXGXH, TVPKPXXVPTQL:SPIS:YKQYE:NMVVEAXGXH, AVPKAXXVPTKL:SPIS:YKQYE:NMVVEAXGXH, KVGKAXXVPTKL:SPIS:YKQYE:EGMSVVEXGXR, KASKAXXVPTKL:SPIS:YKQYE:GMVVEEXGXR, GSAGPXXVPTKM:SPIS:YKQYE:GMVVERXGXS, AAPASXXVPTRL:SPIS:YKQYE:DMVVEAXGXR, HVPKPXXVPTKL:SPIS:YKQYE:NMVVESXGXH, RVPSTXXVPTKT:SPIS:YKQYE:MIVVEXGXL, ASAAPXXVPTAL:SPIS:YKQYE:MIVVEXKXS, ASASPXXVPTDL:SPIS:YKQYE:MIVVEXKXS, ASASPXXVPTDL:SPIS:YKQYE:MVVVEXKXS, NDEGLEXVPTEE:SPIS:YKQYE:FLVVEKXEXR, NDEGLEXVPTGQ:SPIS:YKQYE:LEVVEQXEXR, SSVKXQPVPTHH:SPIS:YKQYE:RLVVELEXAXA, RNVQXRPVPTQL:SPIS:YKQYE:TLVVELAXKXE, AAPASXXVPARL:SPIS:YKQYE:DMVVEAXGXR, KIPKAXXAPVEL:KPLS:DHHKD:DMVEEGXGXR, GIPEPXXAPVKM:KPLS:DHHKD:NMVEESXAXR, SIPKAXXAPVEL:KPLS:DHHKD:EMVEEGXGXR, HVTKPTXAPVKL:KPLS:DHHKD:NMVEESXGXH, YVPKPXXAPVKL:KPLS:DHHKD:NMVEESXGXH, TVPKPXXAPVQL:KPLS:DHHKD:NMVEEAXGXH, AVPKAXXAPVKL:KPLS:DHHKD:NMVEEAXGXH, KVGKAXXAPVKL:KPLS:DHHKD:EGMSVEEXGXR, KASKAXXAPVKL:KPLS:DHHKD:GMVEEEXGXR, GSAGPXXAPVKM:KPLS:DHHKD:GMVEERXGXS, AAPASXXAPVRL:KPLS:DHHKD:DMVEEAXGXR, STPPTXXAPVRL:KPLS:DHHKD:DMVEESXGXR, HVPKPXXAPVKL:KPLS:DHHKD:NMVEESXGXH, ASAAPXXAPVAL:KPLS:DHHKD:MIVEEXKXS, ASASPXXAPVDL:KPLS:DHHKD:MIVEEXKXS, ASASPXXAPVDL:KPLS:DHHKD:MVVEEXKXS, NDEGLESAPVEE:KPLS:DHHKD:FLVEEKXEXR, NDEGLESAPVGQ:KPLS:DHHKD:LEVEEQXEXR, SSVKXQPAPVHH:KPLS:DHHKD:RLVEELEXAXA, RNVQXRPAPVQL:KPLS:DHHKD:TLVEELAXKXE, KIPKAXXVPTEL:KPLS:DHHKD:DMVVEGXGXR, GIPEPXXVPEKM:KPLS:DHHKD:NMTVESXAXR, SIPKAXXVPTEL:KPLS:DHHKD:EMVVEGXGXR, HVTKPTXAPTKL:KPLS:DHHKD:NMVVRSXGXH, YVPKPXXAPTKL:KPLS:DHHKD:NMVVRSXGXH, TVPKPXXAPTQL:KPLS:DHHKD:NMVVRAXGXH, AVPKAXXAPTKL:KPLS:DHHKD:NMVVKAXGXH, KVGKAXXVPTKL:KPLS:DHHKD:EGMSVAEXGXR, KASKAXXVPTKL:KPLS:DHHKD:GMAVSEXGXR, GSAGPXXTPTKM:KPLS:DHHKD:GMVVDRXGXS, AAPASXXVPARL:KPLS:DHHKD:DMVVEAXGXR, STPPTXXVPTRL:KPLS:DHHKD:DMVVESXGXR, HVPKPXXAPTKL:KPLS:DHHKD:NMVVRSXGXH, ASAAPXXVPQAL:KPLS:DHHKD:MIVRSXKXS, ASASPXXVSQDL:KPLS:DHHKD:MIVKSXKXS, ASASPXXVPQDL:KPLS:DHHKD:MVVKSXKXS, NDEGLEXVPTEE:KPLS:DHHKD:FLQHNKXEXR, NDEGLEXVPTGQ:KPLS:DHHKD:LEEHSQXEXR, SSVKXQPSRVHH:KPLS:DHHKD:RLEEHLEXAXA, RNVQXRPTQVQL:KPLS:DHHKD:TLEDHLAXKXE, KIPKAXXVPQEL:EPLP:EQLSN:DMVRXGXGSR, GIPEPXXVPQKM:EPLP:EQLSN:NMVRSSXAXR, SIPKAXXVPQEL:EPLP:EQLSN:EMVRXGXGSR, HVTKPTXVPQKL:EPLP:EQLSN:NMVRSSXGXH, YVPKPXXVPQKL:EPLP:EQLSN:NMVRSSXGXH, TVPKPXXVPQQL:EPLP:EQLSN:NMVRSAXGXH, AVPKAXXVPQKL:EPLP:EQLSN:NMVRSAXGXH, KVGKAXXVPQKL:EPLP:EQLSN:EGMSVRSXGXR, KASKAXXVPQKL:EPLP:EQLSN:GMVRSEXGXR, GSAGPXXVPQKM:EPLP:EQLSN:GMVRSRXGXS, AAPASXXVPQRL:EPLP:EQLSN:DMVRSAXGXR, STPPTXXVPQRL:EPLP:EQLSN:DMVRSSXGXR, HVPKPXXVPQKL:EPLP:EQLSN:NMVRSSXGXH, RVPSTXXVPQKT:EPLP:EQLSN:MIVRSXGXL, ASASPXXVPQDL:EPLP:EQLSN:MIVRSXKXS, ASASPXXVPQDL:EPLP:EQLSN:MVVRSXKXS, NDEGLEXVPQEE:EPLP:EQLSN:FLVRXKXESR, NDEGLEXVPQGQ:EPLP:EQLSN:LEVRSQXEXR, SSVKXQPVPQHH:EPLP:EQLSN:RLVRSLEXAXA, RNVQXRPVPQQL:EPLP:EQLSN:TLVRSLAXKXE, KIPKAXXVPTEL:EPLP:EQLSN:DMVVEGXGXR, GIPEPXXVPEKM:EPLP:EQLSN:NMTVESXAXR, SIPKAXXVPTEL:EPLP:EQLSN:EMVVEGXGXR, HVTKPTXAPTKL:EPLP:EQLSN:NMVVRSXGXH, YVPKPXXAPTKL:EPLP:EQLSN:NMVVRSXGXH, TVPKPXXAPTQL:EPLP:EQLSN:NMVVRAXGXH, AVPKAXXAPTKL:EPLP:EQLSN:NMVVKAXGXH, KVGKAXXVPTKL:EPLP:EQLSN:EGMSVAEXGXR, KASKAXXVPTKL:EPLP:EQLSN:GMAVSEXGXR, GSAGPXXTPTKM:EPLP:EQLSN:GMVVDRXGXS, AAPASXXVPARL:EPLP:EQLSN:DMVVEAXGXR, STPPTXXVPTRL:EPLP:EQLSN:DMVVESXGXR, HVPKPXXAPTKL:EPLP:EQLSN:NMVVRSXGXH, RVPSTXXAPVKT:EPLP:EQLSN:MIVEEXGXL, ASASPXXVSQDL:EPLP:EQLSN:MIVKSXKXS, ASASPXXVPQDL:EPLP:EQLSN:MVVKSXKXS, NDEGLEXVPTEE:EPLP:EQLSN:FLQHNKXEXR, NDEGLEXVPTGQ:EPLP:EQLSN:LEEHSQXEXR, SSVKXQPSRVHH:EPLP:EQLSN:RLEEHLEXAXA, RNVQXRPTQVQL:EPLP:EQLSN:TLEDHLAXKXE, KIPKAXXVSQEL:EPLT:EQLSN:DMVKXGXGSR, GIPEPXXVSQKM:EPLT:EQLSN:NMVKSSXAXR, SIPKAXXVSQEL:EPLT:EQLSN:EMVKXGXGSR, HVTKPTXVSQKL:EPLT:EQLSN:NMVKSSXGXH, YVPKPXXVSQKL:EPLT:EQLSN:NMVKSSXGXH, TVPKPXXVSQQL:EPLT:EQLSN:NMVKSAXGXH, AVPKAXXVSQKL:EPLT:EQLSN:NMVKSAXGXH, KVGKAXXVSQKL:EPLT:EQLSN:EGMSVKSXGXR, KASKAXXVSQKL:EPLT:EQLSN:GMVKSEXGXR, GSAGPXXVSQKM:EPLT:EQLSN:GMVKSRXGXS, AAPASXXVSQRL:EPLT:EQLSN:DMVKSAXGXR, STPPTXXVSQRL:EPLT:EQLSN:DMVKSSXGXR, HVPKPXXVSQKL:EPLT:EQLSN:NMVKSSXGXH, RVPSTXXVSQKT:EPLT:EQLSN:MIVKSXGXL, ASAAPXXVSQAL:EPLT:EQLSN:MIVKSXKXS, ASASPXXVSQDL:EPLT:EQLSN:MVVKSXKXS, NDEGLEXVSQEE:EPLT:EQLSN:FLVKXKXESR, NDEGLEXVSQGQ:EPLT:EQLSN:LEVKSQXEXR, SSVKXQPVSQHH:EPLT:EQLSN:RLVKSLEXAXA, RNVQXRPVSQQL:EPLT:EQLSN:TLVKSLAXKXE, KIPKAXXVPTEL:EPLT:EQLSN:DMVVEGXGXR, GIPEPXXVPEKM:EPLT:EQLSN:NMTVESXAXR, SIPKAXXVPTEL:EPLT:EQLSN:EMVVEGXGXR, HVTKPTXAPTKL:EPLT:EQLSN:NMVVRSXGXH, YVPKPXXAPTKL:EPLT:EQLSN:NMVVRSXGXH, TVPKPXXAPTQL:EPLT:EQLSN:NMVVRAXGXH, AVPKAXXAPTKL:EPLT:EQLSN:NMVVKAXGXH, KVGKAXXVPTKL:EPLT:EQLSN:EGMSVAEXGXR, KASKAXXVPTKL:EPLT:EQLSN:GMAVSEXGXR, GSAGPXXTPTKM:EPLT:EQLSN:GMVVDRXGXS, AAPASXXVPARL:EPLT:EQLSN:DMVVEAXGXR, STPPTXXVPTRL:EPLT:EQLSN:DMVVESXGXR, HVPKPXXAPTKL:EPLT:EQLSN:NMVVRSXGXH, RVPSTXXAPVKT:EPLT:EQLSN:MIVEEXGXL, ASAAPXXVPQAL:EPLT:EQLSN:MIVRSXKXS, ASASPXXVPQDL:EPLT:EQLSN:MVVKSXKXS, NDEGLEXVPTEE:EPLT:EQLSN:FLQHNKXEXR, NDEGLEXVPTGQ:EPLT:EQLSN:LEEHSQXEXR, SSVKXQPSRVHH:EPLT:EQLSN:RLEEHLEXAXA, RNVQXRPTQVQL:EPLT:EQLSN:TLEDHLAXKXE, KIPKAXXVPQEL:EPLT:EQLSN:DMVKXGXGSR, GIPEPXXVPQKM:EPLT:EQLSN:NMVKSSXAXR, SIPKAXXVPQEL:EPLT:EQLSN:EMVKXGXGSR, HVTKPTXVPQKL:EPLT:EQLSN:NMVKSSXGXH, YVPKPXXVPQKL:EPLT:EQLSN:NMVKSSXGXH, TVPKPXXVPQQL:EPLT:EQLSN:NMVKSAXGXH, AVPKAXXVPQKL:EPLT:EQLSN:NMVKSAXGXH, KVGKAXXVPQKL:EPLT:EQLSN:EGMSVKSXGXR, KASKAXXVPQKL:EPLT:EQLSN:GMVKSEXGXR, GSAGPXXVPQKM:EPLT:EQLSN:GMVKSRXGXS, AAPASXXVPQRL:EPLT:EQLSN:DMVKSAXGXR, STPPTXXVPQRL:EPLT:EQLSN:DMVKSSXGXR, HVPKPXXVPQKL:EPLT:EQLSN:NMVKSSXGXH, RVPSTXXVPQKT:EPLT:EQLSN:MIVKSXGXL, ASAAPXXVPQAL:EPLT:EQLSN:MIVKSXKXS, ASASPXXVPQDL:EPLT:EQLSN:MIVKSXKXS, NDEGLEXVPQEE:EPLT:EQLSN:FLVKXKXESR, NDEGLEXVPQGQ:EPLT:EQLSN:LEVKSQXEXR, SSVKXQPVPQHH:EPLT:EQLSN:RLVKSLEXAXA, RNVQXRPVPQQL:EPLT:EQLSN:TLVKSLAXKXE, ASASPXXVSQDL:EPLT:EQLSN:MIVKSXKXS, KIPKAXXVPTEL:SNIT:IGEMS:DMQHNGXGXR, GIPEPXXVPTKM:SNIT:IGEMS:NMQHNSXAXR, SIPKAXXVPTEL:SNIT:IGEMS:EMQHNGXGXR, HVTKPTXVPTKL:SNIT:IGEMS:NMQHNSXGXH, YVPKPXXVPTKL:SNIT:IGEMS:NMQHNSXGXH, TVPKPXXVPTQL:SNIT:IGEMS:NMQHNAXGXH, AVPKAXXVPTKL:SNIT:IGEMS:NMQHNAXGXH, KVGKAXXVPTKL:SNIT:IGEMS:EGMSQH NXGXR, KASKAXXVPTKL:SNIT:IGEMS:GMQHNEXGXR, GSAGPXXVPTKM:SNIT:IGEMS:GMQHNRXGXS, AAPASXXVPTRL:SNIT:IGEMS:DMQHNAXGXR, STPPTXXVPTRL:SNIT:IGEMS:DMQHNSXGXR, HVPKPXXVPTKL:SNIT:IGEMS:NMQHNSXGXH, RVPSTXXVPTKT:SNIT:IGEMS:MIQHNXGXL, ASAAPXXVPTAL:SNIT:IGEMS:MIQHNXKXS, ASASPXXVPTDL:SNIT:IGEMS:MIQHNXKXS, ASASPXXVPTDL:SNIT:IGEMS:MVQHNXKXS, NDEGLEXVPTGQ:SNIT:IGEMS:LEQHNQXEXR, NDEGLEXVPTEE:SNIT:IGEMS:FLQHNKXEXR, SSVKXQPVPTHH:SNIT:IGEMS:RLQHNLEXAXA, RNVQXRPVPTQL:SNIT:IGEMS:TLQHNLAXKXE, KIPKAXXVPTEL:SNIT:IGEMS:DMVVEGXGXR, GIPEPXXVPEKM:SNIT:IGEMS:NMTVESXAXR, SIPKAXXVPTEL:SNIT:IGEMS:EMVVEGXGXR, HVTKPTXAPTKL:SNIT:IGEMS:NMVVRSXGXH, YVPKPXXAPTKL:SNIT:IGEMS:NMVVRSXGXH, TVPKPXXAPTQL:SNIT:IGEMS:NMVVRAXGXH, AVPKAXXAPTKL:SNIT:IGEMS:NMVVKAXGXH, KVGKAXXVPTKL:SNIT:IGEMS:EGMSVAEXGXR, KASKAXXVPTKL:SNIT:IGEMS:GMAVSEXGXR, GSAGPXXTPTKM:SNIT:IGEMS:GMVVDRXGXS, AAPASXXVPARL:SNIT:IGEMS:DMVVEAXGXR, STPPTXXVPTRL:SNIT:IGEMS:DMVVESXGXR, HVPKPXXAPTKL:SNIT:IGEMS:NMVVRSXGXH, RVPSTXXAPVKT:SNIT:IGEMS:MIVEEXGXL, ASAAPXXVPQAL:SNIT:IGEMS:MIVRSXKXS, ASASPXXVSQDL:SNIT:IGEMS:MIVKSXKXS, ASASPXXVPQDL:SNIT:IGEMS:MVVKSXKXS, NDEGLEXVPTGQ:SNIT:IGEMS:LEEHSQXEXR, SSVKXQPSRVHH:SNIT:IGEMS:RLEEHLEXAXA, RNVQXRPTQVQL:SNIT:IGEMS:TLEDHLAXKXE, KIPKAXXVPTEL:SNIT:LGEMS:DMEHXGXGSR, GIPEPXXVPTKM:SNIT:LGEMS:NMEHSSXAXR, SIPKAXXVPTEL:SNIT:LGEMS:EMEHXGXGSR, HVTKPTXVPTKL:SNIT:LGEMS:NMEHSSXGXH, YVPKPXXVPTKL:SNIT:LGEMS:NMEHSSXGXH, TVPKPXXVPTQL:SNIT:LGEMS:NMEHSAXGXH, AVPKAXXVPTKL:SNIT:LGEMS:NMEHSAXGXH, KVGKAXXVPTKL:SNIT:LGEMS:EGMSEHSXGXR, KASKAXXVPTKL:SNIT:LGEMS:GMEHSEXGXR, GSAGPXXVPTKM:SNIT:LGEMS:GMEHSRXGXS, AAPASXXVPTRL:SNIT:LGEMS:DMEHSAXGXR, STPPTXXVPTRL:SNIT:LGEMS:DMEHSSXGXR, HVPKPXXVPTKL:SNIT:LGEMS:NMEHSSXGXH, RVPSTXXVPTKT:SNIT:LGEMS:MIEHSXGXL, ASAAPXXVPTAL:SNIT:LGEMS:MIEHSXKXS, ASASPXXVPTDL:SNIT:LGEMS:MIEHSXKXS, ASASPXXVPTDL:SNIT:LGEMS:MVEHSXKXS, NDEGLEXVPTEE:SNIT:LGEMS:FLEHXKXESR, SSVKXQPVPTHH:SNIT:LGEMS:RLEHSLEXAXA, RNVQXRPVPTQL:SNIT:LGEMS:TLEHSLAXKXE, KIPKAXXVPTEL:SNIT:LGEMS:DMVVEGXGXR, GIPEPXXVPEKM:SNIT:LGEMS:NMTVESXAXR, SIPKAXXVPTEL:SNIT:LGEMS:EMVVEGXGXR, HVTKPTXAPTKL:SNIT:LGEMS:NMVVRSXGXH, YVPKPXXAPTKL:SNIT:LGEMS:NMVVRSXGXH, TVPKPXXAPTQL:SNIT:LGEMS:NMVVRAXGXH, AVPKAXXAPTKL:SNIT:LGEMS:NMVVKAXGXH, KVGKAXXVPTKL:SNIT:LGEMS:EGMSVAEXGXR, KASKAXXVPTKL:SNIT:LGEMS:GMAVSEXGXR, GSAGPXXTPTKM:SNIT:LGEMS:GMVVDRXGXS, AAPASXXVPARL:SNIT:LGEMS:DMVVEAXGXR, STPPTXXVPTRL:SNIT:LGEMS:DMVVESXGXR, HVPKPXXAPTKL:SNIT:LGEMS:NMVVRSXGXH, RVPSTXXAPVKT:SNIT:LGEMS:MIVEEXGXL, ASAAPXXVPQAL:SNIT:LGEMS:MIVRSXKXS, ASASPXXVSQDL:SNIT:LGEMS:MIVKSXKXS, ASASPXXVPQDL:SNIT:LGEMS:MVVKSXKXS, NDEGLEXVPTEE:SNIT:LGEMS:FLQHNKXEXR, SSVKXQPSRVHH:SNIT:LGEMS:RLEEHLEXAXA, RNVQXRPTQVQL:SNIT:LGEMS:TLEDHLAXKXE, KIPKASSSRVEL:RSVK:KEVQV:DMEEHGXGXR, GIPEPSSSRVKM:RSVK:KEVQV:NMEEHSXAXR, SIPKASSSRVEL:RSVK:KEVQV:EMEEHGXGXR, HVTKPTXSRVKL:RSVK:KEVQV:NMEEHSXGXH, YVPKPSSSRVKL:RSVK:KEVQV:NMEEHSXGXH, TVPKPSSSRVQL:RSVK:KEVQV:NM EEHAXGXH, AVPKASSSRVKL:RSVK:KEVQV:NMEEHAXGXH, KVGKASSSRVKL:RSVK:KEVQV:EGMSEEHXGXR, KASKASSSRVKL:RSVK:KEVQV:GMEEHEXGXR, GSAGPSSSRVKM:RSVK:KEVQV:GMEEHRXGXS, AAPASSSSRVRL:RSVK:KEVQV:DMEEHAXGXR, STPPTSSSRVRL:RSVK:KEVQV:DMEEHSXGXR, HVPKPSSSRVKL:RSVK:KEVQV:NMEEHSXGXH, RVPSTSSSRVKT:RSVK:KEVQV:MIEEHXGXL, ASAAPSSSRVAL:RSVK:KEVQV:MIEEHXKXS, ASASPSSSRVDL:RSVK:KEVQV:MIEEHXKXS, ASASPSSSRVDL:RSVK:KEVQV:MVEEHXKXS, NDEGLESSRVEE:RSVK:KEVQV:FLEEHKXEXR, NDEGLESSRVGQ:RSVK:KEVQV:LEEEHQXEXR, RNVQXRPSRVQL:RSVK:KEVQV:TLEEHLAXKXE, KIPKAXXVPTEL:RSVK:KEVQV:DMVVEGXGXR, GIPEPXXVPEKM:RSVK:KEVQV:NMTVESXAXR, SIPKAXXVPTEL:RSVK:KEVQV:EMVVEGXGXR, HVTKPTXAPTKL:RSVK:KEVQV:NMVVRSXGXH, YVPKPXXAPTKL:RSVK:KEVQV:NMVVRSXGXH, TVPKPXXAPTQL:RSVK:KEVQV:NMVVRAXGXH, AVPKAXXAPTKL:RSVK:KEVQV:NMVVKAXGXH, KVGKAXXVPTKL:RSVK:KEVQV:EGMSVAEXGXR, KASKAXXVPTKL:RSVK:KEVQV:GMAVSEXGXR, GSAGPXXTPTKM:RSVK:KEVQV:GMVVDRXGXS, AAPASXXVPARL:RSVK:KEVQV:DMVVEAXGXR, STPPTXXVPTRL:RSVK:KEVQV:DMVVESXGXR, HVPKPXXAPTKL:RSVK:KEVQV:NMVVRSXGXH, RVPSTXXAPVKT:RSVK:KEVQV:MIVEEXGXL, ASAAPXXVPQAL:RSVK:KEVQV:MIVRSXKXS, ASASPXXVSQDL:RSVK:KEVQV:MIVKSXKXS, ASASPXXVPQDL:RSVK:KEVQV:MVVKSXKXS, NDEGLEXVPTEE:RSVK:KEVQV:FLQHNKXEXR, NDEGLEXVPTGQ:RSVK:KEVQV:LEEHSQXEXR, RNVQXRPTQVQL:RSVK:KEVQV:TLEDHLAXKXE, KIPKASSTQVEL:RPVQ:KKATV:DMEDHGXGXR, GIPEPSSTQVKM:RPVQ:KKATV:NMEDHSXAXR, SIPKASSTQVEL:RPVQ:KKATV:EMEDHGXGXR, HVTKPTXTQVKL:RPVQ:KKATV:NMEDHSXGXH, YVPKPSSTQVKL:RPVQ:KKATV:NMEDHSXGXH, TVPKPSSTQVQL:RPVQ:KKATV:NMEDHAXGXH, AVPKASSTQVKL:RPVQ:KKATV:NMEDHAXGXH, KVGKASSTQVKL:RPVQ:KKATV:EGMSEDHXGXR, KASKASSTQVKL:RPVQ:KKATV:GMEDHEXGXR, GSAGPSSTQVKM:RPVQ:KKATV:GMEDH RXGXS, AAPASSSTQVRL:RPVQ:KKATV:DMEDHAXGXR, STPPTSSTQVRL:RPVQ:KKATV:DMEDHSXGXR, HVPKPSSTQVKL:RPVQ:KKATV:NMEDHSXGXH, RVPSTSSTQVKT:RPVQ:KKATV:MIEDHXGXL, ASAAPSSTQVAL:RPVQ:KKATV:MIEDHXKXS, ASASPSSTQVDL:RPVQ:KKATV:MIEDHXKXS, ASASPSSTQVDL:RPVQ:KKATV:MVEDHXKXS, NDEGLESTQVEE:RPVQ:KKATV:FLEDHKXEXR, NDEGLESTQVGQ:RPVQ:KKATV:LEEDHQXEXR, SSVKXQPTQVHH:RPVQ:KKATV:RLEDH LEXAXA, KIPKAXXVPTEL:RPVQ:KKATV:DMVVEGXGXR, GIPEPXXVPEKM:RPVQ:KKATV:NMTVESXAXR, SIPKAXXVPTEL:RPVQ:KKATV:EMVVEGXGXR, HVTKPTXAPTKL:RPVQ:KKATV:NMVVRSXGXH, YVPKPXXAPTKL:RPVQ:KKATV:NMVVRSXGXH, TVPKPXXAPTQL:RPVQ:KKATV:NMVVRAXGXH, AVPKAXXAPTKL:RPVQ:KKATV:NMVVKAXGXH, KVGKAXXVPTKL:RPVQ:KKATV:EGMSVAEXGXR, KASKAXXVPTKL:RPVQ:KKATV:GMAVSEXGXR, GSAGPXXTPTKM:RPVQ:KKATV:GMVVDRXGXS, AAPASXXVPARL:RPVQ:KKATV:DMVVEAXGXR, STPPTXXVPTRL:RPVQ:KKATV:DMVVESXGXR, HVPKPXXAPTKL:RPVQ:KKATV:NMVVRSXGXH, RVPSTXXAPVKT:RPVQ:KKATV:MIVEEXGXL, ASAAPXXVPQAL:RPVQ:KKATV: MIVRSXKXS, ASASPXXVSQDL:RPVQ:KKATV:MIVKSXKXS, ASASPXXVPQDL:RPVQ:KKATV:MVVKSXKXS, NDEGLEXVPTEE:RPVQ:KKATV:FLQHNKXEXR, NDEGLEXVPTGQ:RPVQ:KKATV:LEEHSQXEXR and SSVKXQPSRVHH:RPVQ:KKATV:RLEEHLEXAXA. More particularly, the quadruplet PEP9:PEP1:PEP2:PEP10 is selected from the group consisting of GIPEPXXVPTKM:SAIS:LKNYQ:NMVVESXAXR, HVTKPTXVPTKL:SAIS:LKNYQ:NMVVESXGXH, YVPKPXXVPTKL:SAIS:LKNYQ:NMVVESXGXH, TVPKPXXVPTQL:SAIS:LKNYQ:NMVVEAXGXH, AVPKAXXVPTKL:SAIS:LKNYQ:NMVVEAXGXH, KVGKAXXVPTKL:SAIS:LKNYQ:EGMSVVEXGXR, KASKAXXVPTKL:SAIS:LKNYQ:GMVVEEXGXR, GSAGPXXVPTKM:SAIS:LKNYQ:GMVVERXGXS, AAPASXXVPTRL:SAIS:LKNYQ:DMVVEAXGXR, STPPTXXVPTRL:SAIS:LKNYQ:DMVVESXGXR, HVPKPXXVPTKL:SAIS:LKNYQ:NMVVESXGXH, RVPSTXXVPTKT:SAIS:LKNYQ:MIVVEXGXL, ASAAPXXVPTAL:SAIS:LKNYQ:MIVVEXKXS, ASASPXXVPTDL:SAIS:LKNYQ:MIVVEXKXS, ASASPXXVPTDL:SAIS:LKNYQ:MVVVEXKXS, GIPEPXXVPEKM:SAIS:LKNYQ:NMTVESXAXR, HVTKPTXAPTKL:SAIS:LKNYQ:NMVVRSXGXH, YVPKPXXAPTKL:SAIS:LKNYQ:NMVVRSXGXH, TVPKPXXAPTQL:SAIS:LKNYQ:NMVVRAXGXH, AVPKAXXAPTKL:SAIS:LKNYQ:NMVVKAXGXH, KVGKAXXVPTKL:SAIS:LKNYQ:EGMSVAEXGXR, KASKAXXVPTKL:SAIS:LKNYQ:GMAVSEXGXR, GSAGPXXTPTKM:SAIS:LKNYQ:GMVVD RXGXS, AAPASXXVPARL:SAIS:LKNYQ:DMVVEAXGXR, HVPKPXXAPTKL:SAIS:LKNYQ:NMVVRSXGXH, RVPSTXXAPVKT:SAIS:LKNYQ:MIVEEXGXL, ASAAPXXVPQAL:SAIS:LKNYQ:MIVRSXKXS, ASASPSSVSQDL:SAIS:LKNYQ:MIVKSXKXS, ASASPXXVPQDL:SAIS:LKNYQ:MVVKSXKXS, NDEGLEXVPTEE:SAIS:LKNYQ:FLQHNKXEXR, NDEGLEXVPTGQ:SAIS:LKNYQ:LEEHSQXEXR, SSVKXQPSRVHH:SAIS:LKNYQ:RLEEHLEXAXA, RNVQXRPTQVQL:SAIS:LKNYQ:TLEDHLAXKXE, KIPKAXXVPEEL:SSLS:LKVYP:DMTVEGXGXR, SIPKAXXVPEEL:SSLS:LKVYP:EMTVEGXGXR, HVTKPTXVPEKL:SSLS:LKVYP:NMTVESXGXH, YVPKPXXVPEKL:SSLS:LKVYP:NMTVESXGXH, TVPKPXXVPEQL:SSLS:LKVYP:NMTVEAXGXH, AVPKAXXVPEKL:SSLS:LKVYP:NMTVEAXGXH, KVGKAXXVPEKL:SSLS:LKVYP:EGMSTVEXGXR, KASKAXXVPEKL:SSLS:LKVYP:GMTVEEXGXR, GSAGPXXVPEKM:SSLS:LKVYP:GMTVERXGXS, AAPASXXVPERL:SSLS:LKVYP:DMTVEAXGXR, STPPTXXVPERL:SSLS:LKVYP:DMTVESXGXR, HVPKPXXVPEKL:SSLS:LKVYP:NMTVESXGXH, RVPSTXXVPEKT:SSLS:LKVYP:MITVEXGXL, ASAAPXXVPEAL:SSLS:LKVYP:MITVEXKXS, ASASPXXVPEDL:SSLS:LKVYP:MITVEXKXS, ASASPXXVPEDL:SSLS:LKVYP:MVTVEXKXS, KIPKAXXVPTEL:SSLS:LKVYP:DMVVEGXGXR, SIPKAXXVPTEL:SSLS:LKVYP:EMVVEGXGXR, HVTKPTXAPTKL:SSLS:LKVYP:NMVVRSXGXH, YVPKPXXAPTKL:SSLS:LKVYP:NMVVRSXGXH, TVPKPXXAPTQL:SSLS:LKVYP:NMVVRAXGXH, AVPKAXXAPTKL:SSLS:LKVYP:NMVVKAXGXH, KVGKAXXVPTKL:SSLS:LKVYP:EGMSVAEXGXR, KASKAXXVPTKL:SSLS:LKVYP:GMAVSEXGXR, GSAGPXXTPTKM:SSLS:LKVYP:GMVVDRXGXS, AAPASXXVPARL:SSLS:LKVYP:DMVVEAXGXR, STPPTXXVPTRL:SSLS:LKVYP:DMVVESXGXR, HVPKPXXAPTKL:SSLS:LKVYP:NMVVRSXGXH, RVPSTXXAPVKT:SSLS:LKVYP:MIVEEXGXL, ASAAPXXVPQAL:SSLS:LKVYP:MIVRSXKXS, ASASPSSVSQDL:SSLS:LKVYP:MIVKSXKXS, ASASPXXVPQDL:SSLS:LKVYP:MVVKSXKXS, NDEGLEXVPTEE:SSLS:LKVYP:FLQHNKXEXR, NDEGLEXVPTGQ:SSLS:LKVYP:LEEHSQXEXR, SSVKXQPSRVHH:SSLS:LKVYP:RLEEHLEXAXA, RNVQXRPTQVQL:SSLS:LKVYP:TLEDHLAXKXE, KIPKAXXAPTEL:NAIS:LKKYR:DMVVRGXGXR, GIPEPXXAPTKM:NAIS:LKKYR:NMVVRSXAXR, SIPKAXXAPTEL:NAIS:LKKYR:EMVVRGXGXR, AVPKAXXAPTKL:NAIS:LKKYR:NMVVRAXGXH, KVGKAXXAPTKL:NAIS:LKKYR:EGMSVVRXGXR, KASKAXXAPTKL:NAIS:LKKYR:GMVVREXGXR, GSAGPXXAPTKM:NAIS:LKKYR:GMVVRRXGXS, AAPASXXAPTRL:NAIS:LKKYR:DMVVRAXGXR, STPPTXXAPTRL:NAIS:LKKYR:DMVVRSXGXR, RVPSTXXAPTKT:NAIS:LKKYR:MIVVRXGXL, ASAAPXXAPTAL:NAIS:LKKYR:MIVVRXKXS, ASASPXXAPTDL:NAIS:LKKYR:MIVVRXKXS, ASASPXXAPTDL:NAIS:LKKYR:MVVVRXKXS, KIPKAXXVPTEL:NAIS:LKKYR:DMVVEGXGXR, GIPEPXXVPEKM:NAIS:LKKYR:NMTVESXAXR, SIPKAXXVPTEL:NAIS:LKKYR:EMVVEGXGXR, AVPKAXXAPTKL:NAIS:LKKYR:NMVVKAXGXH, KVGKAXXVPTKL:NAIS:LKKYR:EGMSVAEXGXR, KASKAXXVPTKL:NAIS:LKKYR:GMAVSEXGXR, GSAGPXXTPTKM:NAIS:LKKYR:GMVVDRXGXS, AAPASXXVPARL:NAIS:LKKYR:DMVVEAXGXR, STPPTXXVPTRL:NAIS:LKKYR:DMVVESXGXR, RVPSTXXAPVKT:NAIS:LKKYR:MIVEEXGXL, ASAAPXXVPQAL:NAIS:LKKYR:MIVRSXKXS, ASASPSSVSQDL:NAIS:LKKYR:MIVKSXKXS, ASASPXXVPQDL:NAIS:LKKYR:MVVKSXKXS, NDEGLEXVPTEE:NAIS:LKKYR:FLQHNKXEXR, NDEGLEXVPTGQ:NAIS:LKKYR:LEEHSQXEXR, SSVKXQPSRVHH:NAIS:LKKYR:RLEEHLEXAXA, RNVQXRPTQVQL:NAIS:LKKYR:TLEDHLAXKXE, KIPKAXXAPTEL:SATS:LRKHR:DMVVKGXGXR, GIPEPXXAPTKM:SATS:LRKHR:NMVVKSXAXR, SIPKAXXAPTEL:SATS:LRKHR:EMVVKGXGXR, HVTKPTXAPTKL:SATS:LRKHR:NMVVKSXGXH, YVPKPXXAPTKL:SATS:LRKHR:NMVVKSXGXH, TVPKPXXAPTQL:SATS:LRKHR:NMVVKAXGXH, KVGKAXXAPTKL:SATS:LRKHR:EGMSVVKXGXR, KASKAXXAPTKL:SATS:LRKHR:GMVVKEXGXR, GSAGPXXAPTKM:SATS:LRKHR:GMVVKRXGXS, AAPASXXAPTRL:SATS:LRKHR:DMVVKAXGXR, STPPTXXAPTRL:SATS:LRKHR:DMVVKSXGXR, HVPKPXXAPTKL:SATS:LRKHR:NMVVKSXGXH, RVPSTXXAPTKT:SATS:LRKHR:MIVVKXGXL, ASAAPXXAPTAL:SATS:LRKHR:MIVVKXKXS, ASASPXXAPTDL:SATS:LRKHR:MIVVKXKXS, ASASPXXAPTDL:SATS:LRKHR:MVVVKXKXS, KIPKAXXVPTEL:SATS:LRKHR:DMVVEGXGXR, GIPEPXXVPEKM:SATS:LRKHR:NMTVESXAXR, SIPKAXXVPTEL:SATS:LRKHR:EMVVEGXGXR, HVTKPTXAPTKL:SATS:LRKHR:NMVVRSXGXH, YVPKPXXAPTKL:SATS:LRKHR:NMVVRSXGXH, TVPKPXXAPTQL:SATS:LRKHR:NMVVRAXGXH, KVGKAXXVPTKL:SATS:LRKHR:EGMSVAEXGXR, KASKAXXVPTKL:SATS:LRKHR:GMAVSEXGXR, GSAGPXXTPTKM:SATS:LRKHR:GMVVDRXGXS, AAPASXXVPARL:SATS:LRKHR:DMVVEAXGXR, STPPTXXVPTRL:SATS:LRKHR:DMVVESXGXR, HVPKPXXAPTKL:SATS:LRKHR:NMVVRSXGXH, RVPSTXXAPVKT:SATS:LRKHR:MIVEEXGXL, ASAAPXXVPQAL:SATS:LRKHR:MIVRSXKXS, ASASPSSVSQDL:SATS:LRKHR:MIVKSXKXS, ASASPXXVPQDL:SATS:LRKHR:MVVKSXKXS, NDEGLEXVPTEE:SATS:LRKHR:FLQHNKXEXR, NDEGLEXVPTGQ:SATS:LRKHR:LEEHSQXEXR, SSVKXQPSRVHH:SATS:LRKHR:RLEEHLEXAXA, RNVQXRPTQVQL:SATS:LRKHR:TLEDHLAXKXE, KIPKAXXVPTEL:SPIS:LKYHY:DMVAEGXGXR, GIPEPXXVPTKM:SPIS:LKYHY:NMVAESXAXR, SIPKAXXVPTEL:SPIS:LKYHY:EMVAEGXGXR, HVTKPTXVPTKL:SPIS:LKYHY:NMVAESXGXH, YVPKPXXVPTKL:SPIS:LKYHY:NMVAESXGXH, TVPKPXXVPTQL:SPIS:LKYHY:NMVAEAXGXH, AVPKAXXVPTKL:SPIS:LKYHY:NMVAEAXGXH, KASKAXXVPTKL:SPIS:LKYHY:GMVAEEXGXR, GSAGPXXVPTKM:SPIS:LKYHY:GMVAERXGXS, AAPASXXVPTRL:SPIS:LKYHY:DMVAEAXGXR, STPPTXXVPTRL:SPIS:LKYHY:DMVAESXGXR, HVPKPXXVPTKL:SPIS:LKYHY:NMVAESXGXH, RVPSTXXVPTKT:SPIS:LKYHY:MIVAEXGXL, ASAAPXXVPTAL:SPIS:LKYHY:MIVAEXKXS, ASASPXXVPTDL:SPIS:LKYHY:MIVAEXKXS, ASASPXXVPTDL:SPIS:LKYHY:MVVAEXKXS, KIPKAXXVPTEL:SPIS:LKYHY:DMVVEGXGXR, GIPEPXXVPEKM:SPIS:LKYHY:NMTVESXAXR, SIPKAXXVPTEL:SPIS:LKYHY:EMVVEGXGXR, HVTKPTXAPTKL:SPIS:LKYHY:NMVVRSXGXH, YVPKPXXAPTKL:SPIS:LKYHY:NMVVRSXGXH, TVPKPXXAPTQL:SPIS:LKYHY:NMVVRAXGXH, AVPKAXXAPTKL:SPIS:LKYHY:NMVVKAXGXH, KASKAXXVPTKL:SPIS:LKYHY:GMAVSEXGXR, GSAGPXXTPTKM:SPIS:LKYHY:GMVVDRXGXS, AAPASXXVPARL:SPIS:LKYHY:DMVVEAXGXR, STPPTXXVPTRL:SPIS:LKYHY:DMVVESXGXR, HVPKPXXAPTKL:SPIS:LKYHY:NMVVRSXGXH, RVPSTXXAPVKT:SPIS:LKYHY:MIVEEXGXL, ASAAPXXVPQAL:SPIS:LKYHY:MIVRSXKXS, ASASPSSVSQDL:SPIS:LKYHY:MIVKSXKXS, ASASPXXVPQDL:SPIS:LKYHY:MVVKSXKXS, NDEGLEXVPTEE:SPIS:LKYHY:FLQHNKXEXR, NDEGLEXVPTGQ:SPIS:LKYHY:LEEHSQXEXR, SSVKXQPSRVHH:SPIS:LKYHY:RLEEHLEXAXA, RNVQXRPTQVQL:SPIS:LKYHY:TLEDHLAXKXE, KIPKAXXVPTEL:EPIS:KFKYE:DMAVXGXGSR, GIPEPXXVPTKM:EPIS:KFKYE:NMAVSSXAXR, SIPKAXXVPTEL:EPIS:KFKYE:EMAVXGXGSR, HVTKPTXVPTKL:EPIS:KFKYE:NMAVSSXGXH, YVPKPXXVPTKL:EPIS:KFKYE:NMAVSSXGXH, TVPKPXXVPTQL:EPIS:KFKYE:NMAVSAXGXH, AVPKAXXVPTKL:EPIS:KFKYE:NMAVSAXGXH, KVGKAXXVPTKL:EPIS:KFKYE:EGMSAVSXGXR, GSAGPXXVPTKM:EPIS:KFKYE:GMAVSRXGXS, AAPASXXVPTRL:EPIS:KFKYE:DMAVSAXGXR, STPPTXXVPTRL:EPIS:KFKYE:DMAVSSXGXR, HVPKPXXVPTKL:EPIS:KFKYE:NMAVSSXGXH, RVPSTXXVPTKT:EPIS:KFKYE:MIAVSXGXL, ASAAPXXVPTAL:EPIS:KFKYE:MIAVSXKXS, ASASPXXVPTDL:EPIS:KFKYE:MIAVSXKXS, ASASPXXVPTDL:EPIS:KFKYE:MVAVSXKXS, KIPKAXXVPTEL:EPIS:KFKYE:DMVVEGXGXR, GIPEPXXVPEKM:EPIS:KFKYE:NMTVESXAXR, SIPKAXXVPTEL:EPIS:KFKYE:EMVVEGXGXR, HVTKPTXAPTKL:EPIS:KFKYE:NMVVRSXGXH, YVPKPXXAPTKL:EPIS:KFKYE:NMVVRSXGXH, TVPKPXXAPTQL:EPIS:KFKYE:NMVVRAXGXH, AVPKAXXAPTKL:EPIS:KFKYE:NMVVKAXGXH, KVGKAXXVPTKL:EPIS:KFKYE:EGMSVAEXGXR, GSAGPXXTPTKM:EPIS:KFKYE:GMVVDRXGXS, AAPASXXVPARL:EPIS:KFKYE:DMVVEAXGXR, STPPTXXVPTRL:EPIS:KFKYE:DMVVESXGXR, HVPKPXXAPTKL:EPIS:KFKYE:NMVVRSXGXH, RVPSTXXAPVKT:EPIS:KFKYE:MIVEEXGXL, ASAAPXXVPQAL:EPIS:KFKYE:MIVRSXKXS, ASASPSSVSQDL:EPIS:KFKYE:MIVKSXKXS, ASASPXXVPQDL:EPIS:KFKYE:MWKSXKXS, NDEGLEXVPTEE:EPIS:KFKYE:FLQHNKXEXR, NDEGLEXVPTGQ:EPIS:KFKYE:LEEHSQXEXR, SSVKXQPSRVHH:EPIS:KFKYE:RLEEHLEXAXA, RNVQXRPTQVQL:EPIS:KFKYE:TLEDHLAXKXE, KIPKAXXTPTEL:SPIN:YGKIP:DMVVDGXGXR, GIPEPXXTPTKM:SPIN:YGKIP:NMVVDSXAXR, SIPKAXXTPTEL:SPIN:YGKIP:EMVVDGXGXR, HVTKPTXTPTKL:SPIN:YGKIP:NMVVDSXGXH, YVPKPXXTPTKL:SPIN:YGKIP:NMVVDSXGXH, TVPKPXXTPTQL:SPIN:YGKIP:NMVVDAXGXH, AVPKAXXTPTKL:SPIN:YGKIP:NMVVDAXGXH, KVGKAXXTPTKL:SPIN:YGKIP:EGMSVVDXGXR, KASKAXXTPTKL:SPIN:YGKIP:GMVVDEXGXR, AAPASXXTPTRL:SPIN:YGKIP:DMVVDAXGXR, STPPTXXTPTRL:SPIN:YGKIP:DMVVDSXGXR, HVPKPXXTPTKL:SPIN:YGKIP:NMVVDSXGXH, RVPSTXXTPTKT:SPIN:YGKIP:MIVVDXGXL, ASAAPXXTPTAL:SPIN:YGKIP:MIVVDXKXS, ASASPXXTPTDL:SPIN:YGKIP:MIVVDXKXS, ASASPXXTPTDL:SPIN:YGKIP:MVVVDXKXS, KIPKAXXVPTEL:SPIN:YGKIP:DMVVEGXGXR, GIPEPXXVPEKM:SPIN:YGKIP:NMTVESXAXR, SIPKAXXVPTEL:SPIN:YGKIP:EMVVEGXGXR, HVTKPTXAPTKL:SPIN:YGKIP:NMVVRSXGXH, YVPKPXXAPTKL:SPIN:YGKIP:NMVVRSXGXH, TVPKPXXAPTQL:SPIN:YGKIP:NMVVRAXGXH, AVPKAXXAPTKL:SPIN:YGKIP:NMVVKAXGXH, KVGKAXXVPTKL:SPIN:YGKIP:EGMSVAEXGXR, KASKAXXVPTKL:SPIN:YGKIP:GMAVSEXGXR, AAPASXXVPARL:SPIN:YGKIP:DMVVEAXGXR, STPPTXXVPTRL:SPIN:YGKIP:DMVVESXGXR, HVPKPXXAPTKL:SPIN:YGKIP:NMVVRSXGXH, RVPSTXXAPVKT:SPIN:YGKIP:MIVEEXGXL, ASAAPXXVPQAL:SPIN:YGKIP:MIVRSXKXS, ASASPSSVSQDL:SPIN:YGKIP:MIVKSXKXS, ASASPXXVPQDL:SPIN:YGKIP:MVVKSXKXS, NDEGLEXVPTEE:SPIN:YGKIP:FLQHNKXEXR, NDEGLEXVPTGQ:SPIN:YGKIP:LEEHSQXEXR, SSVKXQPSRVHH:SPIN:YGKIP:RLEEHLEXAXA, RNVQXRPTQVQL:SPIN:YGKIP:TLEDHLAXKXE, KIPKAXXVPAEL:SPIS:YKQYE:DMVVEGXGXR, GIPEPXXVPAKM:SPIS:YKQYE:NMVVESXAXR, SIPKAXXVPAEL:SPIS:YKQYE:EMVVEGXGXR, HVTKPTXVPAKL:SPIS:YKQYE:NMVVESXGXH, YVPKPXXVPAKL:SPIS:YKQYE:NMVVESXGXH, TVPKPXXVPAQL:SPIS:YKQYE:NMVVEAXGXH, AVPKAXXVPAKL:SPIS:YKQYE:NMVVEAXGXH, KVGKAXXVPAKL:SPIS:YKQYE:EGMSVVEXGXR, KASKAXXVPAKL:SPIS:YKQYE:GMVVEEXGXR, GSAGPXXVPAKM:SPIS:YKQYE:GMVVERXGXS, STPPTXXVPARL:SPIS:YKQYE:DMVVESXGXR, HVPKPXXVPAKL:SPIS:YKQYE:NMVVESXGXH, RVPSTXXVPAKT:SPIS:YKQYE:MIVVEXGXL, ASAAPXXVPAAL:SPIS:YKQYE:MIVVEXKXS, ASASPXXVPADL:SPIS:YKQYE:MIVVEXKXS, ASASPXXVPADL:SPIS:YKQYE:MVVVEXKXS, KIPKAXXVPTEL:SPIS:YKQYE:DMVVEGXGXR, GIPEPXXVPEKM:SPIS:YKQYE:NMTVESXAXR, SIPKAXXVPTEL:SPIS:YKQYE:EMVVEGXGXR, HVTKPTXAPTKL:SPIS:YKQYE:NMVVRSXGXH, YVPKPXXAPTKL:SPIS:YKQYE:NMVVRSXGXH, TVPKPXXAPTQL:SPIS:YKQYE:NMVVRAXGXH, AVPKAXXAPTKL:SPIS:YKQYE:NMVVKAXGXH, KVGKAXXVPTKL:SPIS:YKQYE:EGMSVAEXGXR, KASKAXXVPTKL:SPIS:YKQYE:GMAVSEXGXR, GSAGPXXTPTKM:SPIS:YKQYE:GMVVDRXGXS, STPPTXXVPTRL:SPIS:YKQYE:DMVVESXGXR, HVPKPXXAPTKL:SPIS:YKQYE:NMVVRSXGXH, RVPSTXXAPVKT:SPIS:YKQYE:MIVEEXGXL, ASAAPXXVPQAL:SPIS:YKQYE:MIVRSXKXS, ASASPSSVSQDL:SPIS:YKQYE:MIVKSXKXS, ASASPXXVPQDL:SPIS:YKQYE:MVVKSXKXS, NDEGLEXVPTEE:SPIS:YKQYE:FLQHNKXEXR, NDEGLEXVPTGQ:SPIS:YKQYE:LEEHSQXEXR, SSVKXQPSRVHH:SPIS:YKQYE:RLEEHLEXAXA, RNVQXRPTQVQL:SPIS:YKQYE:TLEDHLAXKXE, GIPEPXXVPTKM:SPIS:YKQYE:NMVVESXAXR, HVTKPTXVPTKL:SPIS:YKQYE:NMVVESXGXH, YVPKPXXVPTKL:SPIS:YKQYE:NMVVESXGXH, TVPKPXXVPTQL:SPIS:YKQYE:NMVVEAXGXH, AVPKAXXVPTKL:SPIS:YKQYE:NMVVEAXGXH, KVGKAXXVPTKL:SPIS:YKQYE:EGMSVVEXGXR, KASKAXXVPTKL:SPIS:YKQYE:GMVVEEXGXR, GSAGPXXVPTKM:SPIS:YKQYE:GMVVERXGXS, AAPASXXVPTRL:SPIS:YKQYE:DMVVEAXGXR, HVPKPXXVPTKL:SPIS:YKQYE:NMVVESXGXH, RVPSTXXVPTKT:SPIS:YKQYE:MIVVEXGXL, ASAAPXXVPTAL:SPIS:YKQYE:MIVVEXKXS, ASASPXXVPTDL:SPIS:YKQYE:MIVVEXKXS, ASASPXXVPTDL:SPIS:YKQYE:MWVEXKXS, AAPASXXVPARL:SPIS:YKQYE:DMVVEAXGXR, KIPKAXXAPVEL:KPLS:DHHKD:DMVEEGXGXR, GIPEPXXAPVKM:KPLS:DHHKD:NMVEESXAXR, SIPKAXXAPVEL:KPLS:DHHKD:EMVEEGXGXR, HVTKPTXAPVKL:KPLS:DHHKD:NMVEESXGXH, YVPKPXXAPVKL:KPLS:DHHKD:NMVEESXGXH, TVPKPXXAPVQL:KPLS:DHHKD:NMVEEAXGXH, AVPKAXXAPVKL:KPLS:DHHKD:NMVEEAXGXH, KVGKAXXAPVKL:KPLS:DHHKD:EGMSVEEXGXR, KASKAXXAPVKL:KPLS:DHHKD:GMVEEEXGXR, GSAGPXXAPVKM:KPLS:DHHKD:GMVEERXGXS, AAPASXXAPVRL:KPLS:DHHKD:DMVEEAXGXR, STPPTXXAPVRL:KPLS:DHHKD:DMVEESXGXR, HVPKPXXAPVKL:KPLS:DHHKD:NMVEESXGXH, ASAAPXXAPVAL:KPLS:DHHKD:MIVEEXKXS, ASASPXXAPVDL:KPLS:DHHKD:MIVEEXKXS, ASASPXXAPVDL:KPLS:DHHKD:MVVEEXKXS, KIPKAXXVPTEL:KPLS:DHHKD:DMVVEGXGXR, GIPEPXXVPEKM:KPLS:DHHKD:NMTVESXAXR, SIPKAXXVPTEL:KPLS:DHHKD:EMVVEGXGXR, HVTKPTXAPTKL:KPLS:DHHKD:NMVVRSXGXH, YVPKPXXAPTKL:KPLS:DHHKD:NMVVRSXGXH, TVPKPXXAPTQL:KPLS:DHHKD:NMVVRAXGXH, AVPKAXXAPTKL:KPLS:DHHKD:NMVVKAXGXH, KVGKAXXVPTKL:KPLS:DHHKD:EGMSVAEXGXR, KASKAXXVPTKL:KPLS:DHHKD:GMAVSEXGXR, GSAGPXXTPTKM:KPLS:DHHKD:GMVVDRXGXS, AAPASXXVPARL:KPLS:DHHKD:DMVVEAXGXR, STPPTXXVPTRL:KPLS:DHHKD:DMVVESXGXR, HVPKPXXAPTKL:KPLS:DHHKD:NMVVRSXGXH, ASAAPXXVPQAL:KPLS:DHHKD:MIVRSXKXS, ASASPSSVSQDL:KPLS:DHHKD:MIVKSXKXS, ASASPXXVPQDL:KPLS:DHHKD:MVVKSXKXS, NDEGLEXVPTEE:KPLS:DHHKD:FLQHNKXEXR, NDEGLEXVPTGQ:KPLS:DHHKD:LEEHSQXEXR, SSVKXQPSRVHH:KPLS:DHHKD:RLEEHLEXAXA, RNVQXRPTQVQL:KPLS:DHHKD:TLEDHLAXKXE, KIPKAXXVPQEL:EPLP:EQLSN:DMVRXGXGSR, GIPEPXXVPQKM:EPLP:EQLSN:NMVRSSXAXR, SIPKAXXVPQEL:EPLP:EQLSN:EMVRXGXGSR, HVTKPTXVPQKL:EPLP:EQLSN:NMVRSSXGXH, YVPKPXXVPQKL:EPLP:EQLSN:NMVRSSXGXH, TVPKPXXVPQQL:EPLP:EQLSN:NMVRSAXGXH, AVPKAXXVPQKL:EPLP:EQLSN:NMVRSAXGXH, KVGKAXXVPQKL:EPLP:EQLSN:EGMSVRSXGXR, KASKAXXVPQKL:EPLP:EQLSN:GMVRSEXGXR, GSAGPXXVPQKM:EPLP:EQLSN:GMVRSRXGXS, AAPASXXVPQRL:EPLP:EQLSN:DMVRSAXGXR, STPPTXXVPQRL:EPLP:EQLSN:DMVRSSXGXR, HVPKPXXVPQKL:EPLP:EQLSN:NMVRSSXGXH, RVPSTXXVPQKT:EPLP:EQLSN:MIVRSXGXL, ASASPXXVPQDL:EPLP:EQLSN:MIVRSXKXS, ASASPXXVPQDL:EPLP:EQLSN:MVVRSXKXS, KIPKAXXVPTEL:EPLP:EQLSN:DMVVEGXGXR, GIPEPXXVPEKM:EPLP:EQLSN:NMTVESXAXR, SIPKAXXVPTEL:EPLP:EQLSN:EMVVEGXGXR, HVTKPTXAPTKL:EPLP:EQLSN:NMVVRSXGXH, YVPKPXXAPTKL:EPLP:EQLSN:NMVVRSXGXH, TVPKPXXAPTQL:EPLP:EQLSN:NMVVRAXGXH, AVPKAXXAPTKL:EPLP:EQLSN:NMVVKAXGXH, KVGKAXXVPTKL:EPLP:EQLSN:EGMSVAEXGXR, KASKAXXVPTKL:EPLP:EQLSN:GMAVSEXGXR, GSAGPXXTPTKM:EPLP:EQLSN:GMVVDRXGXS, AAPASXXVPARL:EPLP:EQLSN:DMVVEAXGXR, STPPTXXVPTRL:EPLP:EQLSN:DMVVESXGXR, HVPKPXXAPTKL:EPLP:EQLSN:NMVVRSXGXH, RVPSTXXAPVKT:EPLP:EQLSN:MIVEEXGXL, ASASPSSVSQDL:EPLP:EQLSN:MIVKSXKXS, ASASPXXVPQDL:EPLP:EQLSN:MVVKSXKXS, NDEGLEXVPTEE:EPLP:EQLSN:FLQHNKXEXR, NDEGLEXVPTGQ:EPLP:EQLSN:LEEHSQXEXR, SSVKXQPSRVHH:EPLP:EQLSN:RLEEHLEXAXA, RNVQXRPTQVQL:EPLP:EQLSN:TLEDHLAXKXE, KIPKASSVSQEL:EPLT:EQLSN:DMVKXGXGSR, GIPEPSSVSQKM:EPLT:EQLSN:NMVKSSXAXR, SIPKASSVSQEL:EPLT:EQLSN:EMVKXGXGSR, HVTKPTXVSQKL:EPLT:EQLSN:NMVKSSXGXH, YVPKPSSVSQKL:EPLT:EQLSN:NMVKSSXGXH, TVPKPSSVSQQL:EPLT:EQLSN:NMVKSAXGXH, AVPKASSVSQKL:EPLT:EQLSN:NMVKSAXGXH, KVGKASSVSQKL:EPLT:EQLSN:EGMSVKSXGXR, KASKASSVSQKL:EPLT:EQLSN:GMVKSEXGXR, GSAGPSSVSQKM:EPLT:EQLSN:GMVKSRXGXS, AAPASSSVSQRL:EPLT:EQLSN:DMVKSAXGXR, STPPTSSVSQRL:EPLT:EQLSN:DMVKSSXGXR, HVPKPSSVSQKL:EPLT:EQLSN:NMVKSSXGXH, RVPSTSSVSQKT:EPLT:EQLSN:MIVKSXGXL, ASAAPSSVSQAL:EPLT:EQLSN:MIVKSXKXS, ASASPSSVSQDL:EPLT:EQLSN:MVVKSXKXS, KIPKAXXVPTEL:EPLT:EQLSN:DMVVEGXGXR, GIPEPXXVPEKM:EPLT:EQLSN:NMTVESXAXR, SIPKAXXVPTEL:EPLT:EQLSN:EMVVEGXGXR, HVTKPTXAPTKL:EPLT:EQLSN:NMVVRSXGXH, YVPKPXXAPTKL:EPLT:EQLSN:NMVVRSXGXH, TVPKPXXAPTQL:EPLT:EQLSN:NMVVRAXGXH, AVPKAXXAPTKL:EPLT:EQLSN:NMVVKAXGXH, KVGKAXXVPTKL:EPLT:EQLSN:EGMSVAEXGXR, KASKAXXVPTKL:EPLT:EQLSN:GMAVSEXGXR, GSAGPXXTPTKM:EPLT:EQLSN:GMVVDRXGXS, AAPASXXVPARL:EPLT:EQLSN:DMVVEAXGXR, STPPTXXVPTRL:EPLT:EQLSN:DMVVESXGXR, HVPKPXXAPTKL:EPLT:EQLSN:NMVVRSXGXH, RVPSTXXAPVKT:EPLT:EQLSN:MIVEEXGXL, ASAAPXXVPQAL:EPLT:EQLSN:MIVRSXKXS, NDEGLEXVPTEE:EPLT:EQLSN:FLQHNKXEXR, NDEGLEXVPTGQ:EPLT:EQLSN:LEEHSQXEXR, SSVKXQPSRVHH:EPLT:EQLSN:RLEEHLEXAXA, RNVQXRPTQVQL:EPLT:EQLSN:TLEDHLAXKXE, KIPKAXXVPQEL:EPLT:EQLSN:DMVKXGXGSR, GIPEPXXVPQKM:EPLT:EQLSN:NMVKSSXAXR, SIPKAXXVPQEL:EPLT:EQLSN:EMVKXGXGSR, HVTKPTXVPQKL:EPLT:EQLSN:NMVKSSXGXH, YVPKPXXVPQKL:EPLT:EQLSN:NMVKSSXGXH, TVPKPXXVPQQL:EPLT:EQLSN:NMVKSAXGXH, AVPKAXXVPQKL:EPLT:EQLSN:NMVKSAXGXH, KVGKAXXVPQKL:EPLT:EQLSN:EGMSVKSXGXR, KASKAXXVPQKL:EPLT:EQLSN:GMVKSEXGXR, GSAGPXXVPQKM:EPLT:EQLSN:GMVKSRXGXS, AAPASXXVPQRL:EPLT:EQLSN:DMVKSAXGXR, STPPTXXVPQRL:EPLT:EQLSN:DMVKSSXGXR, HVPKPXXVPQKL:EPLT:EQLSN:NMVKSSXGXH, RVPSTXXVPQKT:EPLT:EQLSN:MIVKSXGXL, ASAAPXXVPQAL:EPLT:EQLSN:MIVKSXKXS, ASASPXXVPQDL:EPLT:EQLSN:MIVKSXKXS, NDEGLEXVPTGQ:SNIT:IGEMS:LEQHNQXEXR, KIPKAXXVPTEL:SNIT:IGEMS:DMVVEGXGXR, GIPEPXXVPEKM:SNIT:IGEMS:NMTVESXAXR, SIPKAXXVPTEL:SNIT:IGEMS:EMWEGXGXR, HVTKPTXAPTKL:SNIT:IGEMS:NMVVRSXGXH, YVPKPXXAPTKL:SNIT:IGEMS:NMVVRSXGXH, TVPKPXXAPTQL:SNIT:IGEMS:NMVVRAXGXH, AVPKAXXAPTKL:SNIT:IGEMS:NMVVKAXGXH, KVGKAXXVPTKL:SNIT:IGEMS:EGMSVAEXGXR, KASKAXXVPTKL:SNIT:IGEMS:GMAVSEXGXR, GSAGPXXTPTKM:SNIT:IGEMS:GMVVDRXGXS, AAPASXXVPARL:SNIT:IGEMS:DMVVEAXGXR, STPPTXXVPTRL:SNIT:IGEMS:DMVVESXGXR, HVPKPXXAPTKL:SNIT:IGEMS:NMVVRSXGXH, RVPSTXXAPVKT:SNIT:IGEMS:MIVEEXGXL, ASAAPXXVPQAL:SNIT:IGEMS:MIVRSXKXS, ASASPSSVSQDL:SNIT:IGEMS:MIVKSXKXS, ASASPXXVPQDL:SNIT:IGEMS:MVVKSXKXS, NDEGLEXVPTGQ:SNIT:IGEMS:LEEHSQXEXR, SSVKXQPSRVHH:SNIT:IGEMS:RLEEHLEXAXA, RNVQXRPTQVQL:SNIT:IGEMS:TLEDHLAXKXE, NDEGLEXVPTEE:SNIT:LGEMS:FLEHXKXESR, KIPKAXXVPTEL:SNIT:LGEMS:DMVVEGXGXR, GIPEPXXVPEKM:SNIT:LGEMS:NMTVESXAXR, SIPKAXXVPTEL:SNIT:LGEMS:EMVVEGXGXR, HVTKPTXAPTKL:SNIT:LGEMS:NMVVRSXGXH, YVPKPXXAPTKL:SNIT:LGEMS:NMVVRSXGXH, TVPKPXXAPTQL:SNIT:LGEMS:NMVVRAXGXH, AVPKAXXAPTKL:SNIT:LGEMS:NMVVKAXGXH, KVGKAXXVPTKL:SNIT:LGEMS:EGMSVAEXGXR, KASKAXXVPTKL:SNIT:LGEMS:GMAVSEXGXR, GSAGPXXTPTKM:SNIT:LGEMS:GMVVDRXGXS, AAPASXXVPARL:SNIT:LGEMS:DMVVEAXGXR, STPPTXXVPTRL:SNIT:LGEMS:DMVVESXGXR, HVPKPXXAPTKL:SNIT:LGEMS:NMVVRSXGXH, RVPSTXXAPVKT:SNIT:LGEMS:MIVEEXGXL, ASAAPXXVPQAL:SNIT:LGEMS:MIVRSXKXS, ASASPSSVSQDL:SNIT:LGEMS:MIVKSXKXS, ASASPXXVPQDL:SNIT:LGEMS:MVVKSXKXS, NDEGLEXVPTEE:SNIT:LGEMS:FLQHNKXEXR, SSVKXQPSRVHH:SNIT:LGEMS:RLEEHLEXAXA, RNVQXRPTQVQL:SNIT:LGEMS:TLEDHLAXKXE, RNVQXRPSRVQL:RSVK:KEVQV:TLEEHLAXKXE, KIPKAXXVPTEL:RSVK:KEVQV:DMVVEGXGXR, GIPEPXXVPEKM:RSVK:KEVQV:NMTVESXAXR, SIPKAXXVPTEL:RSVK:KEVQV:EMVVEGXGXR, HVTKPTXAPTKL:RSVK:KEVQV:NMVVRSXGXH, YVPKPXXAPTKL:RSVK:KEVQV:NMVVRSXGXH, TVPKPXXAPTQL:RSVK:KEVQV:NMVVRAXGXH, AVPKAXXAPTKL:RSVK:KEVQV:NMVVKAXGXH, KVGKAXXVPTKL:RSVK:KEVQV:EGMSVAEXGXR, KASKAXXVPTKL:RSVK:KEVQV:GMAVSEXGXR, GSAGPXXTPTKM:RSVK:KEVQV:GMVVDRXGXS, AAPASXXVPARL:RSVK:KEVQV:DMVVEAXGXR, STPPTXXVPTRL:RSVK:KEVQV:DMVVESXGXR, HVPKPXXAPTKL:RSVK:KEVQV:NMVVRSXGXH, RVPSTXXAPVKT:RSVK:KEVQV:MIVEEXGXL, ASAAPXXVPQAL:RSVK:KEVQV:MIVRSXKXS, ASASPSSVSQDL:RSVK:KEVQV:MIVKSXKXS, ASASPXXVPQDL:RSVK:KEVQV:MVVKSXKXS, NDEGLEXVPTEE:RSVK:KEVQV:FLQHNKXEXR, NDEGLEXVPTGQ:RSVK:KEVQV:LEEHSQXEXR, RNVQXRPTQVQL:RSVK:KEVQV:TLEDHLAXKXE, SSVKXQPTQVHH:RPVQ:KKATV:RLEDHLEXAXA, KIPKAXXVPTEL:RPVQ:KKATV:DMVVEGXGXR, GIPEPXXVPEKM:RPVQ:KKATV:NMTVESXAXR, SIPKAXXVPTEL:RPVQ:KKATV:EMVVEGXGXR, HVTKPTXAPTKL:RPVQ:KKATV:NMVVRSXGXH, YVPKPXXAPTKL:RPVQ:KKATV:NMVVRSXGXH, TVPKPXXAPTQL:RPVQ:KKATV:NMVVRAXGXH, AVPKAXXAPTKL:RPVQ:KKATV:NMVVKAXGXH, KVGKAXXVPTKL:RPVQ:KKATV:EGMSVAEXGXR, KASKAXXVPTKL:RPVQ:KKATV:GMAVSEXGXR, GSAGPXXTPTKM:RPVQ:KKATV:GMVVDRXGXS, AAPASXXVPARL:RPVQ:KKATV:DMVVEAXGXR, STPPTXXVPTRL:RPVQ:KKATV:DMVVESXGXR, HVPKPXXAPTKL:RPVQ:KKATV:NMVVRSXGXH, RVPSTXXAPVKT:RPVQ:KKATV:MIVEEXGXL, ASAAPXXVPQAL:RPVQ:KKATV:MIVRSXKXS, ASASPSSVSQDL:RPVQ:KKATV:MIVKSXKXS, ASASPXXVPQDL:RPVQ:KKATV:MVVKSXKXS, NDEGLEXVPTEE:RPVQ:KKATV:FLQHNKXEXR, NDEGLEXVPTGQ:RPVQ:KKATV:LEEHSQXEXR and SSVKXQPSRVHH:RPVQ:KKATV:RLEEHLEXAXA.

[0438] In particular, in certain embodiments, the quadruplet PEP9:PEP12:PEP2:PEP10 is selected from the group consisting of GIPEPXXVPTKM:SAIS-AA¹⁷-LYL:LKNYQ:NMVVESXAXR, SIPKAXXVPTEL:SAIS-AA¹⁷-LYL:LKNYQ:EMVVEGXGXR, HVTKPTXVPTKL:SAIS-AA¹⁷-LYL:LKNYQ:NMVVESXGXH, YVPKPXXVPTKL:SAIS-AA¹⁷-LYL:LKNYQ:NMVVESXGXH, TVPKPXXVPTQL:SAIS-AA¹⁷-LYL:LKNYQ:NMVVEAXGXH, AVPKAXXVPTKL:SAIS-AA¹⁷-LYL:LKNYQ:NMVVEAXGXH, KVGKAXXVPTKL:SAIS-AA¹⁷-LYL:LKNYQ:EGMSVVEXGXR, KASKAXXVPTKL:SAIS-AA¹⁷-LYL:LKNYQ:GMVVEEXGXR, GSAGPXXVPTKM:SAIS-AA¹⁷-LYL:LKNYQ:GMVVERXGXS, AAPASXXVPTRL:SAIS-AA¹⁷-LYL:LKNYQ:DMVVEAXGXR, STPPTXXVPTRL:SAIS-AA¹⁷-LYL:LKNYQ:DMVVESXGXR, HVPKPXXVPTKL:SAIS-AA¹⁷-LYL:LKNYQ:NMVVESXGXH, RVPSTXXVPTKT:SAIS-AA¹⁷-LYL:LKNYQ:MIVVEXGXL, ASAAPXXVPTAL:SAIS-AA¹⁷-LYL:LKNYQ:MIVVEXKXS, ASASPXXVPTDL:SAIS-AA¹⁷-LYL:LKNYQ:MIVVEXKXS, ASASPXXVPTDL:SAIS-AA¹⁷-LYL:LKNYQ:MVVVEXKXS, NDEGLEXVPTEE:SAIS-AA¹⁷-LYL:LKNYQ:FLVVEKXEXR, NDEGLEXVPTGQ:SAIS-AA¹⁷-LYL:LKNYQ:LEVVEQXEXR, SSVKXQPVPTHH:SAIS-AA¹⁷-LYL:LKNYQ:RLVVELEXAXA, RNVQXRPVPTQL:SAIS-AA¹⁷-LYL:LKNYQ:TLVVELAXKXE, GIPEPXXVPEKM:SAIS-AA¹⁷-LYL:LKNYQ:NMTVESXAXR, HVTKPTXAPTKL:SAIS-AA¹⁷-LYL:LKNYQ:NMVVRSXGXH, YVPKPXXAPTKL:SAIS-AA¹⁷-LYL:LKNYQ:NMVVRSXGXH, TVPKPXXAPTQL:SAIS-AA¹⁷-LYL:LKNYQ:NMVVRAXGXH, AVPKAXXAPTKL:SAIS-AA¹⁷-LYL:LKNYQ:NMVVKAXGXH, KVGKAXXVPTKL:SAIS-AA¹⁷-LYL:LKNYQ:EGMSVAEXGXR, KASKAXXVPTKL:SAIS-AA¹⁷-LYL:LKNYQ:GMAVSEXGXR, GSAGPXXTPTKM:SAIS-AA¹⁷-LYL:LKNYQ:GMVVDRXGXS, AAPASXXVPARL:SAIS-AA¹⁷-LYL:LKNYQ:DMVVEAXGXR, HVPKPXXAPTKL:SAIS-AA¹⁷-LYL:LKNYQ:NMVVRSXGXH, RVPSTXXAPVKT:SAIS-AA¹⁷-LYL:LKNYQ:MIVEEXGXL, ASAAPXXVPQAL:SAIS-AA¹-LYL:LKNYQ:MIVRSXKXS, ASASPXXVSQDL:SAIS-AA¹⁷-LYL:LKNYQ:MIVKSXKXS, ASASPXXVPQDL:SAIS-AA¹⁷-LYL:LKNYQ:MVVKSXKXS, NDEGLEXVPTEE:SAIS-AA¹⁷-LYL:LKNYQ:FLQHNKXEXR, NDEGLEXVPTGQ:SAIS-AA¹⁷-LYL:LKNYQ:LEEHSQXEXR, SSVKXQPSRVHH:SAIS-AA¹⁷-LYL:LKNYQ:RLEEHLEXAXA, RNVQXRPTQVQL:SAIS-AA¹⁷-LYL:LKNYQ:TLEDHLAXKXE, KIPKAXXVPEEL:SSLS-AA¹⁷-LFF:LKVYP:DMTVEGXGXR, SIPKAXXVPEEL:SSLS-AA¹⁷-LFF:LKVYP:EMTVEGXGXR, HVTKPTXVPEKL:SSLS-AA¹⁷-LFF:LKVYP:NMTVESXGXH, YVPKPXXVPEKL:SSLS-AA¹⁷-LFF:LKVYP:NMTVESXGXH, TVPKPXXVPEQL:SSLS-AA¹⁷-LFF:LKVYP:NMTVEAXGXH, AVPKAXXVPEKL:SSLS-AA¹⁷-LFF:LKVYP:NMTVEAXGXH, KVGKAXXVPEKL:SSLS-AA¹⁷-LFF:LKVYP:EGMSTVEXGXR, KASKAXXVPEKL:SSLS-AA¹⁷-LFF:LKVYP:GMTVEEXGXR, GSAGPXXVPEKM:SSLS-AA¹⁷-LFF:LKVYP:GMTVERXGXS, AAPASXXVPERL:SSLS-AA¹⁷-LFF:LKVYP:DMTVEAXGXR, STPPTXXVPERL:SSLS-AA¹⁷-LFF:LKVYP:DMTVESXGXR, HVPKPXXVPEKL:SSLS-AA¹⁷-LFF:LKVYP:NMTVESXGXH, RVPSTXXVPEKT:SSLS-AA¹⁷-LFF:LKVYP:MITVEXGXL, ASAAPXXVPEAL:SSLS-AA¹⁷-LFF:LKVYP:MITVEXKXS, ASASPXXVPEDL:SSLS-AA¹⁷-LFF:LKVYP:MITVEXKXS, ASASPXXVPEDL:SSLS-AA¹⁷-LFF:LKVYP:MVTVEXKXS, NDEGLEXVPEEE:SSLS-AA¹⁷-LFF:LKVYP:FLTVEKXEXR, NDEGLEXVPEGQ:SSLS-AA¹⁷-LFF:LKVYP:LETVEQXEXR, SSVKXQPVPEHH:SSLS-AA¹⁷-LFF:LKVYP:RLTVELEXAXA, RNVQXRPVPEQL:SSLS-AA¹⁷-LFF:LKVYP:TLTVELAXKXE, KIPKAXXVPTEL:SSLS-AA¹⁷-LFF:LKVYP:DMVVEGXGXR, SIPKAXXVPTEL:SSLS-AA¹⁷-LFF:LKVYP:EMVVEGXGXR, HVTKPTXAPTKL:SSLS-AA¹⁷-LFF:LKVYP:NMVVRSXGXH, YVPKPXXAPTKL:SSLS-AA¹⁷-LFF:LKVYP:NMVVRSXGXH, TVPKPXXAPTQL:SSLS-AA¹⁷-LFF:LKVYP:NMVVRAXGXH, AVPKAXXAPTKL:SSLS-AA¹⁷-LFF:LKVYP:NMVVKAXGXH, KVGKAXXVPTKL:SSLS-AA¹⁷-LFF:LKVYP:EGMSVAEXGXR, KASKAXXVPTKL:SSLS-AA¹⁷-LFF:LKVYP:GMAVSEXGXR, GSAGPXXTPTKM:SSLS-AA¹⁷-LFF:LKVYP:GMVVDRXGXS, AAPASXXVPARL:SSLS-AA¹⁷-LFF:LKVYP:DMVVEAXGXR, STPPTXXVPTRL:SSLS-AA¹⁷-LFF:LKVYP:DMVVESXGXR, HVPKPXXAPTKL:SSLS-AA¹⁷-LFF:LKVYP:NMVVRSXGXH, RVPSTXXAPVKT:SSLS-AA¹⁷-LFF:LKVYP:MIVEEXGXL, ASAAPXXVPQAL:SSLS-AA¹⁷-LFF:LKVYP:MIVRSXKXS, ASASPXXVSQDL:SSLS-AA¹⁷-LFF:LKVYP:MIVKSXKXS, ASASPXXVPQDL:SSLS-AA¹⁷-LFF:LKVYP:MVVKSXKXS, NDEGLEXVPTEE:SSLS-AA¹⁷-LFF:LKVYP:FLQHNKXEXR, NDEGLEXVPTGQ:SSLS-AA¹⁷-LFF:LKVYP:LEEHSQXEXR, SSVKXQPSRVHH:SSLS-AA¹⁷-LFF:LKVYP:RLEEHLEXAXA, RNVQXRPTQVQL:SSLS-AA¹⁷-LFF:LKVYP:TLEDHLAXKXE, KIPKAXXVPTEL:SAIS-AA¹⁷-LYL:LKNYQ:DMVVEGXGXR, KIPKAXXAPTEL:NAIS-AA¹⁷-LYF:LKKYR:DMVVRGXGXR, GIPEPXXAPTKM:NAIS-AA¹⁷-LYF:LKKYR:NMVVRSXAXR, SIPKAXXAPTEL:NAIS-AA¹⁷-LYF:LKKYR:EMVVRGXGXR, YVPKPXXAPTKL:NAIS-AA¹⁷-LYF:LKKYR:NMVVRSXGXH, TVPKPXXAPTQL:NAIS-AA¹⁷-LYF:LKKYR:NMVVRAXGXH, AVPKAXXAPTKL:NAIS-AA¹⁷-LYF:LKKYR:NMVVRAXGXH, KVGKAXXAPTKL:NAIS-AA¹⁷-LYF:LKKYR:EGMSVVRXGXR, KASKAXXAPTKL:NAIS-AA¹⁷-LYF:LKKYR:GMVVREXGXR, GSAGPXXAPTKM:NAIS-AA¹⁷-LYF:LKKYR:GMVVRRXGXS, AAPASXXAPTRL:NAIS-AA¹⁷-LYF:LKKYR:DMVVRAXGXR, STPPTXXAPTRL:NAIS-AA¹⁷-LYF:LKKYR:DMVVRSXGXR, HVPKPXXAPTKL:NAIS-AA¹⁷-LYF:LKKYR:NMVVRSXGXH, RVPSTXXAPTKT:NAIS-AA¹⁷-LYF:LKKYR:MIVVRXGXL, ASAAPXXAPTAL:NAIS-AA¹⁷-LYF:LKKYR:MIVVRXKXS, ASASPXXAPTDL:NAIS-AA¹⁷-LYF:LKKYR:MIVVRXKXS, ASASPXXAPTDL:NAIS-AA¹⁷-LYF:LKKYR:MVVVRXKXS, NDEGLESAPTEE:NAIS-AA¹⁷-LYF:LKKYR:FLVVRKXEXR, NDEGLESAPTGQ:NAIS-AA¹⁷-LYF:LKKYR:LEVVRQXEXR, SSVKXQPAPTHH:NAIS-AA¹⁷-LYF:LKKYR:RLVVRLEXAXA, RNVQXRPAPTQL:NAIS-AA¹⁷-LYF:LKKYR:TLVVRLAXKXE, KIPKAXXVPTEL:NAIS-AA¹⁷-LYF:LKKYR:DMVVEGXGXR, GIPEPXXVPEKM:NAIS-AA¹⁷-LYF:LKKYR:NMTVESXAXR, SIPKAXXVPTEL:NAIS-AA¹⁷-LYF:LKKYR:EMVVEGXGXR, AVPKAXXAPTKL:NAIS-AA¹⁷-LYF:LKKYR:NMVVKAXGXH, KVGKAXXVPTKL:NAIS-AA¹⁷-LYF:LKKYR:EGMSVAEXGXR, KASKAXXVPTKL:NAIS-AA¹⁷-LYF:LKKYR:GMAVSEXGXR, GSAGPXXTPTKM:NAIS-AA¹⁷-LYF:LKKYR:GMVVDRXGXS, AAPASXXVPARL:NAIS-AA¹⁷-LYF:LKKYR:DMVVEAXGXR, STPPTXXVPTRL:NAIS-AA¹⁷-LYF:LKKYR:DMVVESXGXR, RVPSTXXAPVKT:NAIS-AA¹⁷-LYF:LKKYR:MIVEEXGXL, ASAAPXXVPQAL:NAIS-AA¹⁷-LYF:LKKYR:MIVRSXKXS, ASASPXXVSQDL:NAIS-AA¹⁷-LYF:LKKYR:MIVKSXKXS, ASASPXXVPQDL:NAIS-AA¹⁷-LYF:LKKYR:MVVKSXKXS, NDEGLEXVPTEE:NAIS-AA¹⁷-LYF:LKKYR:FLQHNKXEXR, NDEGLEXVPTGQ:NAIS-AA¹⁷-LYF:LKKYR:LEEHSQXEXR, SSVKXQPSRVHH:NAIS-AA¹⁷-LYF:LKKYR:RLEEHLEXAXA, RNVQXRPTQVQL:NAIS-AA¹⁷-LYF:LKKYR:TLEDHLAXKXE, HVTKPTXAPTKL:NAIS-AA¹⁷-LYF:LKKYR:NMVVRSXGXH, KIPKAXXAPTEL:SATS-AA¹⁷-LYY:LRKHR:DMVVKGXGXR, GIPEPXXAPTKM:SATS-AA¹⁷-LYY:LRKHR:NMVVKSXAXR, SIPKAXXAPTEL:SATS-AA¹⁷-LYY:LRKHR:EMVVKGXGXR, HVTKPTXAPTKL:SATS-AA¹⁷-LYY:LRKHR:NMVVKSXGXH, YVPKPXXAPTKL:SATS-AA¹⁷-LYY:LRKHR:NMVVKSXGXH, TVPKPXXAPTQL:SATS-AA¹⁷-LYY:LRKHR:NMVVKAXGXH, KVGKAXXAPTKL:SATS-AA¹⁷-LYY:LRKHR:EGMSVVKXGXR, KASKAXXAPTKL:SATS-AA¹⁷-LYY:LRKHR:GMVVKEXGXR, GSAGPXXAPTKM:SATS-AA¹⁷-LYY:LRKHR:GMVVKRXGXS, AAPASXXAPTRL:SATS-AA¹⁷-LYY:LRKHR:DMVVKAXGXR, STPPTXXAPTRL:SATS-AA¹⁷-LYY:LRKHR:DMVVKSXGXR, HVPKPXXAPTKL:SATS-AA¹⁷-LYY:LRKHR:NMVVKSXGXH, RVPSTXXAPTKT:SATS-AA¹⁷-LYY:LRKHR:MIVVKXGXL, ASAAPXXAPTAL:SATS-AA¹⁷-LYY:LRKHR:MIVVKXKXS, ASASPXXAPTDL:SATS-AA¹⁷-LYY:LRKHR:MIVVKXKXS, ASASPXXAPTDL:SATS-AA¹⁷-LYY:LRKHR:MVVVKXKXS, NDEGLESAPTEE:SATS-AA¹⁷-LYY:LRKHR:FLVVKKXEXR, NDEGLESAPTGQ:SATS-AA¹⁷-LYY:LRKHR:LEVVKQXEXR, SSVKXQPAPTHHH:SATS-AA¹⁷-LYY:LRKHR:RLVVKLEXAXA, RNVQXRPAPTQL:SATS-AA¹⁷-LYY:LRKHR:TLVVKLAXKXE, KIPKAXXVPTEL:SATS-AA¹⁷-LYY:LRKHR:DMVVEGXGXR, GIPEPXXVPEKM:SATS-AA¹⁷-LYY:LRKHR:NMTVESXAXR, SIPKAXXVPTEL:SATS-AA¹⁷-LYY:LRKHR:EMVVEGXGXR, HVTKPTXAPTKL:SATS-AA¹⁷-LYY:LRKHR:NMVVRSXGXH, YVPKPXXAPTKL:SATS-AA¹⁷-LYY:LRKHR:NMVVRSXGXH, TVPKPXXAPTQL:SATS-AA¹⁷-LYY:LRKHR:NMVVRAXGXH, KVGKAXXVPTKL:SATS-AA¹⁷-LYY:LRKHR:EGMSVAEXGXR, KASKAXXVPTKL:SATS-AA¹⁷-LYY:LRKHR:GMAVSEXGXR, GSAGPXXTPTKM:SATS-AA¹⁷-LYY:LRKHR:GMVVDRXGXS, AAPASXXVPARL:SATS-AA¹⁷-LYY:LRKHR:DMVVEAXGXR, STPPTXXVPTRL:SATS-AA¹⁷-LYY:LRKHR:DMVVESXGXR, HVPKPXXAPTKL:SATS-AA¹⁷-LYY:LRKHR:NMVVRSXGXH, RVPSTXXAPVKT:SATS-AA¹⁷-LYY:LRKHR:MIVEEXGXL, ASAAPXXVPQAL:SATS-AA¹⁷-LYY:LRKHR:MIVRSXKXS, ASASPXXVSQDL:SATS-AA¹⁷-LYY:LRKHR:MIVKSXKXS, ASASPXXVPQDL:SATS-AA¹⁷-LYY:LRKHR:MVVKSXKXS, NDEGLEXVPTEE:SATS-AA¹⁷-LYY:LRKHR:FLQHNKXEXR, NDEGLEXVPTGQ:SATS-AA¹⁷-LYY:LRKHR:LEEHSQXEXR, SSVKXQPSRVHH:SATS-AA¹⁷-LYY:LRKHR:RLEEHLEXAXA, RNVQXRPTQVQL:SATS-AA¹⁷-LYY:LRKHR:TLEDHLAXKXE, KIPKAXXVPTEL:SPIS-AA¹⁷-LYK:LKYHY:DMVAEGXGXR, GIPEPXXVPTKM:SPIS-AA¹⁷-LYK:LKYHY:NMVAESXAXR, SIPKAXXVPTEL:SPIS-AA¹⁷-LYK:LKYHY:EMVAEGXGXR, HVTKPTXVPTKL:SPIS-AA¹⁷-LYK:LKYHY:NMVAESXGXH, YVPKPXXVPTKL:SPIS-AA¹⁷-LYK:LKYHY:NMVAESXGXH, TVPKPXXVPTQL:SPIS-AA¹⁷-LYK:LKYHY:NMVAEAXGXH, AVPKAXXVPTKL:SPIS-AA¹⁷-LYK:LKYHY:NMVAEAXGXH, KASKAXXVPTKL:SPIS-AA¹⁷-LYK:LKYHY:GMVAEEXGXR, GSAGPXXVPTKM:SPIS-AA¹⁷-LYK:LKYHY:GMVAERXGXS, AAPASXXVPTRL:SPIS-AA¹⁷-LYK:LKYHY:DMVAEAXGXR, STPPTXXVPTRL:SPIS-AA¹⁷-LYK:LKYHY:DMVAESXGXR, HVPKPXXVPTKL:SPIS-AA¹⁷-LYK:LKYHY:NMVAESXGXH, RVPSTXXVPTKT:SPIS-AA¹⁷-LYK:LKYHY:MIVAEXGXL, ASAAPXXVPTAL:SPIS-AA¹⁷-LYK:LKYHY:MIVAEXKXS, ASASPXXVPTDL:SPIS-AA¹⁷-LYK:LKYHY:MIVAEXKXS, ASASPXXVPTDL:SPIS-AA¹⁷-LYK:LKYHY:MVVAEXKXS, NDEGLEXVPTEE:SPIS-AA¹⁷-LYK:LKYHY:FLVAEKXEXR, NDEGLEXVPTGQ:SPIS-AA¹⁷-LYK:LKYHY:LEVAEQXEXR, SSVKXQPVPTHH:SPIS-AA¹⁷-LYK:LKYHY:RLVAELEXAXA, RNVQXRPVPTQL:SPIS-AA¹⁷-LYK:LKYHY:TLVAELAXKXE, KIPKAXXVPTEL:SPIS-AA¹⁷-LYK:LKYHY:DMVVEGXGXR, GIPEPXXVPEKM:SPIS-AA¹⁷-LYK:LKYHY:NMTVESXAXR, SIPKAXXVPTEL:SPIS-AA¹⁷-LYK:LKYHY:EMVVEGXGXR, HVTKPTXAPTKL:SPIS-AA¹⁷-LYK:LKYHY:NMVVRSXGXH, YVPKPXXAPTKL:SPIS-AA¹⁷-LYK:LKYHY:NMVVRSXGXH, TVPKPXXAPTQL:SPIS-AA¹⁷-LYK:LKYHY:NMVVRAXGXH, AVPKAXXAPTKL:SPIS-AA¹⁷-LYK:LKYHY:NMVVKAXGXH, KASKAXXVPTKL:SPIS-AA¹⁷-LYK:LKYHY:GMAVSEXGXR, GSAGPXXTPTKM:SPIS-AA¹⁷-LYK:LKYHY:GMVVDRXGXS, AAPASXXVPARL:SPIS-AA¹⁷-LYK:LKYHY:DMVVEAXGXR, STPPTXXVPTRL:SPIS-AA¹⁷-LYK:LKYHY:DMVVESXGXR, HVPKPXXAPTKL:SPIS-AA¹⁷-LYK:LKYHY:NMVVRSXGXH, RVPSTXXAPVKT:SPIS-AA¹⁷-LYK:LKYHY:MIVEEXGXL, ASAAPXXVPQAL:SPIS-AA¹⁷-LYK:LKYHY:MIVRSXKXS, ASASPXXVSQDL:SPIS-AA¹⁷-LYK:LKYHY:MIVKSXKXS, ASASPXXVPQDL:SPIS-AA¹⁷-LYK:LKYHY:MVVKSXKXS, NDEGLEXVPTEE:SPIS-AA¹⁷-LYK:LKYHY:FLQHNKXEXR, NDEGLEXVPTGQ:SPIS-AA¹⁷-LYK:LKYHY:LEEHSQXEXR, SSVKXQPSRVHH:SPIS-AA¹⁷-LYK:LKYHY:RLEEHLEXAXA, RNVQXRPTQVQL:SPIS-AA¹⁷-LYK:LKYHY:TLEDHLAXKXE, KIPKAXXVPTEL:EPIS-AA¹⁷-LYL:KFKYE:DMAVXGXGSR, GIPEPXXVPTKM:EPIS-AA¹⁷-LYL:KFKYE:NMAVSSXAXR, SIPKAXXVPTEL:EPIS-AA¹⁷-LYL:KFKYE:EMAVXGXGSR, HVTKPTXVPTKL:EPIS-AA¹⁷-LYL:KFKYE:NMAVSSXGXH, YVPKPXXVPTKL:EPIS-AA¹⁷-LYL:KFKYE:NMAVSSXGXH, TVPKPXXVPTQL:EPIS-AA¹⁷-LYL:KFKYE:NMAVSAXGXH, AVPKAXXVPTKL:EPIS-AA¹⁷-LYL:KFKYE:NMAVSAXGXH, KVGKAXXVPTKL:EPIS-AA¹⁷-LYL:KFKYE:EGMSAVSXGXR, GSAGPXXVPTKM:EPIS-AA¹⁷-LYL:KFKYE:GMAVSRXGXS, AAPASXXVPTRL:EPIS-AA¹⁷-LYL:KFKYE:DMAVSAXGXR, STPPTXXVPTRL:EPIS-AA¹⁷-LYL:KFKYE:DMAVSSXGXR, HVPKPXXVPTKL:EPIS-AA¹⁷-LYL:KFKYE:NMAVSSXGXH, RVPSTXXVPTKT:EPIS-AA¹⁷-LYL:KFKYE:MIAVSXGXL, ASAAPXXVPTAL:EPIS-AA¹⁷-LYL:KFKYE:MIAVSXKXS, ASASPXXVPTDL:EPIS-AA¹⁷-LYL:KFKYE:MIAVSXKXS, ASASPXXVPTDL:EPIS-AA¹⁷-LYL:KFKYE:MVAVSXKXS, NDEGLEXVPTEE:EPIS-AA¹⁷-LYL:KFKYE:FLAVXKXESR, NDEGLEXVPTGQ:EPIS-AA¹⁷-LYL:KFKYE:LEAVSQXEXR, SSVKXQPVPTHH:EPIS-AA¹⁷-LYL:KFKYE:RLAVSLEXAXA, RNVQXRPVPTQL:EPIS-AA¹⁷-LYL:KFKYE:TLAVSLAXKXE, KIPKAXXVPTEL:EPIS-AA¹⁷-LYL:KFKYE:DMVVEGXGXR, GIPEPXXVPEKM:EPIS-AA¹⁷-LYL:KFKYE:NMTVESXAXR, SIPKAXXVPTEL:EPIS-AA¹⁷-LYL:KFKYE:EMVVEGXGXR, HVTKPTXAPTKL:EPIS-AA¹⁷-LYL:KFKYE:NMVVRSXGXH, YVPKPXXAPTKL:EPIS-AA¹⁷-LYL:KFKYE:NMVVRSXGXH, TVPKPXXAPTQL:EPIS-AA¹⁷-LYL:KFKYE:NMVVRAXGXH, AVPKAXXAPTKL:EPIS-AA¹⁷-LYL:KFKYE:NMVVKAXGXH, KVGKAXXVPTKL:EPIS-AA¹⁷-LYL:KFKYE:EGMSVAEXGXR, GSAGPXXTPTKM:EPIS-AA¹⁷-LYL:KFKYE:GMVVDRXGXS, AAPASXXVPARL:EPIS-AA¹⁷-LYL:KFKYE:DMVVEAXGXR, STPPTXXVPTRL:EPIS-AA¹⁷-LYL:KFKYE:DMVVESXGXR, HVPKPXXAPTKL:EPIS-AA¹⁷-LYL:KFKYE:NMVVRSXGXH, RVPSTXXAPVKT:EPIS-AA¹⁷-LYL:KFKYE:MIVEEXGXL, ASAAPXXVPQAL:EPIS-AA¹⁷-LYL:KFKYE:MIVRSXKXS, ASASPXXVSQDL:EPIS-AA¹⁷-LYL:KFKYE:MIVKSXKXS, ASASPXXVPQDL:EPIS-AA¹⁷-LYL:KFKYE:MVVKSXKXS, NDEGLEXVPTEE:EPIS-AA¹⁷-LYL:KFKYE:FLQHNKXEXR, NDEGLEXVPTGQ:EPIS-AA¹⁷-LYL:KFKYE:LEEHSQXEXR, SSVKXQPSRVHH:EPIS-AA¹⁷-LYL:KFKYE:RLEEHLEXAXA, RNVQXRPTQVQL:EPIS-AA¹⁷-LYL:KFKYE:TLEDHLAXKXE, KIPKASSTPTEL:SPIN-AA¹⁷-LYF:YGKIP:DMVVDGXGXR, GIPEPXXTPTKM:SPIN-AA¹⁷-LYF:YGKIP:NMVVDSXAXR, SIPKASSTPTEL:SPIN-AA¹⁷-LYF:YGKIP:EMVVDGXGXR, HVTKPTSTPTKL:SPIN-AA¹⁷-LYF:YGKIP:NMVVDSXGXH, YVPKPXXTPTKL:SPIN-AA¹⁷-LYF:YGKIP:NMVVDSXGXH, TVPKPXXTPTQL:SPIN-AA¹⁷-LYF:YGKIP:NMVVDAXGXH, AVPKASSTPTKL:SPIN-AA¹⁷-LYF:YGKIP:NMVVDAXGXH, KVGKASSTPTKL:SPIN-AA¹⁷-LYF:YGKIP:EGMSVVDXGXR, KASKASSTPTKL:SPIN-AA¹⁷-LYF:YGKIP:GMVVDEXGXR, AAPASSSTPTRL:SPIN-AA¹⁷-LYF:YGKIP:DMVVDAXGXR, STPPTSSTPTRL:SPIN-AA¹⁷-LYF:YGKIP:DMVVDSXGXR, HVPKPXXTPTKL:SPIN-AA¹⁷-LYF:YGKIP:NMVVDSXGXH, RVPSTSSTPTKT:SPIN-AA¹⁷-LYF:YGKIP:MIVVDXGXL, ASAAPXXTPTAL:SPIN-AA¹⁷-LYF:YGKIP:MIVVDXKXS, ASASPXXTPTDL:SPIN-AA¹⁷-LYF:YGKIP:MIVVDXKXS, ASASPXXTPTDL:SPIN-AA¹⁷-LYF:YGKIP:MVVVDXKXS, NDEGLESTPTEE:SPIN-AA¹⁷-LYF:YGKIP:FLVVDKXEXR, NDEGLESTPTGQ:SPIN-AA¹⁷-LYF:YGKIP:LEVVDQXEXR, SSVKXQPTPTHH:SPIN-AA¹⁷-LYF:YG KIP:RLVVDLEXAXA, RNVQXRPTPTQL:SPIN-AA¹⁷-LYF:YGKIP:TLVVDLAXKXE, KIPKAXXVPTEL:SPIN-AA¹⁷-LYF:YGKIP:DMVVEGXGXR, GIPEPXXVPEKM:SPIN-AA¹⁷-LYF:YGKIP:NMTVESXAXR, SIPKAXXVPTEL:SPIN-AA¹⁷-LYF:YGKIP:EMVVEGXGXR, HVTKPTXAPTKL:SPIN-AA¹⁷-LYF:YGKIP:NMVVRSXGXH, YVPKPXXAPTKL:SPIN-AA¹⁷-LYF:YGKIP:NMVVRSXGXH, TVPKPXXAPTQL:SPIN-AA¹⁷-LYF:YGKIP:NMVVRAXGXH, AVPKAXXAPTKL:SPIN-AA¹⁷-LYF:YGKIP:NMVVKAXGXH, KVGKAXXVPTKL:SPIN-AA¹⁷-LYF:YGKIP:EGMSVAEXGXR, KASKAXXVPTKL:SPIN-AA¹⁷-LYF:YGKIP:GMAVSEXGXR, AAPASXXVPARL:SPIN-AA¹⁷-LYF:YGKIP:DMVVEAXGXR, STPPTXXVPTRL:SPIN-AA¹⁷-LYF:YGKIP:DMVVESXGXR, HVPKPXXAPTKL:SPIN-AA¹⁷-LYF:YGKIP:NMVVRSXGXH, RVPSTXXAPVKT:SPIN-AA¹⁷-LYF:YGKIP:MIVEEXGXL, ASAAPXXVPQAL:SPIN-AA¹⁷-LYF:YGKIP:MIVRSXKXS, ASASPXXVSQDL:SPIN-AA¹⁷-LYF:YGKIP:MIVKSXKXS, ASASPXXVPQDL:SPIN-AA¹⁷-LYF:YGKIP:MVVKSXKXS, NDEGLEXVPTEE:SPIN-AA¹⁷-LYF:YGKIP:FLQHNKXEXR, NDEGLEXVPTGQ:SPIN-AA¹⁷-LYF:YGKIP:LEEHSQXEXR, SSVKXQPSRVHH:SPIN-AA¹⁷-LYF:YGKIP:RLEEHLEXAXA, RNVQXRPTQVQL:SPIN-AA¹⁷-LYF:YGKIP:TLEDHLAXKXE, KIPKAXXVPAEL:SPIS-AA¹⁷-LYI:YKQYE:DMVVEGXGXR, GIPEPXXVPAKM:SPIS-AA¹⁷-LYI:YKQYE:NMVVESXAXR, SIPKAXXVPAEL:SPIS-AA¹⁷-LYI:YKQYE:EMVVEGXGXR, HVTKPTXVPAKL:SPIS-AA¹⁷-LYI:YKQYE:NMVVESXGXH, YVPKPXXVPAKL:SPIS-AA¹⁷-LYI:YKQYE:NMVVESXGXH, TVPKPXXVPAQL:SPIS-AA¹⁷-LYI:YKQYE:NMVVEAXGXH, AVPKAXXVPAKL:SPIS-AA¹⁷-LYI:YKQYE:NMVVEAXGXH, KVG KAXXVPAKL:SPIS-AA¹⁷-LYI:YKQYE:EGMSVVEXGXR, KASKAXXVPAKL:SPIS-AA¹⁷-LYI:YKQYE:GMVVEEXGXR, GSAGPXXVPAKM:SPIS-AA¹⁷-LYI:YKQYE:GMVVERXGXS, STPPTXXVPARL:SPIS-AA¹⁷-LYI:YKQYE:DMVVESXGXR, HVPKPXXVPAKL:SPIS-AA¹⁷-LYI:YKQYE:NMVVESXGXH, RVPSTXXVPAKT:SPIS-AA¹⁷-LYI:YKQYE:MIVVEXGXL, ASAAPXXVPAAL:SPIS-AA¹⁷-LYI:YKQYE: MIVVEXKXS, ASASPXXVPADL:SPIS-AA¹⁷-LYI:YKQYE:MIVVEXKXS, ASASPXXVPADL:SPIS-AA¹⁷-LYI:YKQYE:MVVVEXKXS, NDEG LEXVPAEE:SPIS-AA¹⁷-LYI:YKQYE:FLVVEKXEXR, NDEGLEXVPAGQ:SPIS-AA¹⁷-LYI:YKQYE:LEVVEQXEXR, SSVKXQPVPAHH:SPIS-AA¹⁷-LYI:YKQYE:RLVVELEXAXA, RNVQXRPVPAQL:SPIS-AA¹⁷-LYI:YKQYE:TLVVELAXKXE, KIPKAXXVPTEL:SPIS-AA¹⁷-LYI:YKQYE:DMVVEGXGXR, GIPEPXXVPEKM:SPIS-AA¹⁷-LYI:YKQYE:NMTVESXAXR, SIPKAXXVPTEL:SPIS-AA¹⁷-LYI:YKQYE:EMVVEGXGXR, HVTKPTXAPTKL:SPIS-AA¹⁷-LYI:YKQYE:NMVVRSXGXH, YVPKPXXAPTKL:SPIS-AA¹⁷-LYI:YKQYE:NMVVRSXGXH, TVPKPXXAPTQL:SPIS-AA¹⁷-LYI:YKQYE:NMVVRAXGXH, AVPKAXXAPTKL:SPIS-AA¹⁷-LYI:YKQYE:NMVVKAXGXH, KVGKAXXVPTKL:SPIS-AA¹⁷-LYI:YKQYE:EGMSVAEXGXR, KASKAXXVPTKL:SPIS-AA¹⁷-LYI:YKQYE:GMAVSEXGXR, GSAGPXXTPTKM:SPIS-AA¹⁷-LYI:YKQYE:GMVVDRXGXS, STPPTXXVPTRL:SPIS-AA¹⁷-LYI:YKQYE:DMVVESXGXR, HVPKPXXAPTKL:SPIS-AA¹⁷-LYI:YKQYE:NMVVRSXGXH, RVPSTXXAPVKT:SPIS-AA¹⁷-LYI:YKQYE:MIVEEXGXL, ASAAPXXVPQAL:SPIS-AA¹⁷-LYI:YKQYE:MIVRSXKXS, ASASPXXVSQDL:SPIS-AA¹⁷-LYI:YKQYE:MIVKSXKXS, ASASPXXVPQDL:SPIS-AA¹⁷-LYI:YKQYE:MVVKSXKXS, NDEGLEXVPTEE:SPIS-AA¹⁷-LYI:YKQYE:FLQHNKXEXR, NDEGLEXVPTGQ:SPIS-AA¹⁷-LYI:YKQYE:LEEHSQXEXR, SSVKXQPSRVHH:SPIS-AA¹⁷-LYI:YKQYE:RLEEHLEXAXA, RNVQXRPTQVQL:SPIS-AA¹⁷-LYI:YKQYE:TLEDHLAXKXE, KIPKAXXVPTEL:SPIS-AA¹⁷-LFI:YKQYE:DMVVEGXGXR, GIPEPXXVPTKM:SPIS-AA¹⁷-LFI:YKQYE:NMVVESXAXR, SIPKAXXVPTEL:SPIS-AA¹⁷-LFI:YKQYE:EMVVEGXGXR, HVTKPTXVPTKL:SPIS-AA¹⁷-LFI:YKQYE:NMVVESXGXH, YVPKPXXVPTKL:SPIS-AA¹⁷-LFI:YKQYE:NMVVESXGXH, TVPKPXXVPTQL:SPIS-AA¹⁷-LFI:YKQYE:NMVVEAXGXH, AVPKAXXVPTKL:SPIS-AA¹⁷-LFI:YKQYE:NMVVEAXGXH, KVGKAXXVPTKL:SPIS-AA¹⁷-LFI:YKQYE:EGMSVVEXGXR, KASKAXXVPTKL:SPIS-AA¹⁷-LFI:YKQYE:GMVVEEXGXR, GSAGPXXVPTKM:SPIS-AA¹⁷-LFI:YKQYE:GMVVERXGXS, AAPASXXVPTRL:SPIS-AA¹⁷-LFI:YKQYE:DMVVEAXGXR, HVPKPXXVPTKL:SPIS-AA¹⁷-LFI:YKQYE:NMVVESXGXH, RVPSTXXVPTKT:SPIS-AA¹⁷-LFI:YKQYE:MIVVEXGXL, ASAAPXXVPTAL:SPIS-AA¹⁷-LFI:YKQYE:MIVVEXKXS, ASASPXXVPTDL:SPIS-AA¹⁷-LFI:YKQYE:MIVVEXKXS, ASASPXXVPTDL:SPIS-AA¹⁷-LFI:YKQYE:MVVVEXKXS, NDEGLEXVPTEE:SPIS-AA¹⁷-LFI:YKQYE:FLVVEKXEXR, NDEGLEXVPTGQ:SPIS-AA¹⁷-LFI:YKQYE:LEVVEQXEXR, SSVKXQPVPTHH:SPIS-AA¹⁷-LFI:YKQYE:RLVVELEXAXA, RNVQXRPVPTQL:SPIS-AA¹⁷-LFI:YKQYE:TLVVELAXKXE, GIPEPXXVPEKM:SPIS-AA¹⁷-LFI:YKQYE:NMTVESXAXR, HVTKPTXAPTKL:SPIS-AA¹⁷-LFI:YKQYE:NMVVRSXGXH, YVPKPXXAPTKL:SPIS-AA¹⁷-LFI:YKQYE:NMVVRSXGXH, TVPKPXXAPTQL:SPIS-AA¹⁷-LFI:YKQYE:NMVVRAXGXH, AVPKAXXAPTKL:SPIS-AA¹⁷-LFI:YKQYE:NMVVKAXGXH, KVGKAXXVPTKL:SPIS-AA¹⁷-LFI:YKQYE:EGMSVAEXGXR, KASKAXXVPTKL:SPIS-AA¹⁷-LFI:YKQYE:GMAVSEXGXR, GSAGPXXTPTKM:SPIS-AA¹⁷-LFI:YKQYE:GMVVDRXGXS, AAPASXXVPARL:SPIS-AA¹⁷-LFI:YKQYE:DMVVEAXGXR, HVPKPXXAPTKL:SPIS-AA¹⁷-LFI:YKQYE:NMVVRSXGXH, RVPSTXXAPVKT:SPIS-AA¹⁷-LFI:YKQYE:MIVEEXGXL, ASAAPXXVPQAL:SPIS-AA¹⁷-LFI:YKQYE:MIVRSXKXS, ASASPXXVSQDL:SPIS-AA¹⁷-LFI:YKQYE:MIVKSXKXS, ASASPXXVPQDL:SPIS-AA¹⁷-LFI:YKQYE:MVVKSXKXS, NDEGLEXVPTEE:SPIS-AA¹⁷-LFI:YKQYE:FLQHNKXEXR, NDEGLEXVPTGQ:SPIS-AA¹⁷-LFI:YKQYE:LEEHSQXEXR, SSVKXQPSRVHH:SPIS-AA¹⁷-LFI:YKQYE:RLEEHLEXAXA, RNVQXRPTQVQL:SPIS-AA¹⁷-LFI:YKQYE:TLEDHLAXKXE, KIPKAXXAPVEL:KPLS-AA¹⁷-LYV:DHHKD:DMVEEGXGXR, GIPEPXXAPVKM:KPLS-AA¹⁷-LYV:DHHKD:NMVEESXAXR, SIPKAXXAPVEL:KPLS-AA¹⁷-LYV:DHHKD:EMVEEGXGXR, HVTKPTXAPVKL:KPLS-AA¹⁷-LYV:DHHKD:NMVEESXGXH, YVPKPXXAPVKL:KPLS-AA¹⁷-LYV:DHHKD:NMVEESXGXH, TVPKPXXAPVQL:KPLS-AA¹⁷-LYV:DHHKD:NMVEEAXGXH, AVPKAXXAPVKL:KPLS-AA¹⁷-LYV:DHHKD:NMVEEAXGXH, KVGKAXXAPVKL:KPLS-AA¹⁷-LYV:DHHKD:EGMSVEEXGXR, KASKAXXAPVKL:KPLS-AA¹⁷-LYV:DHHKD:GMVEEEXGXR, GSAGPXXAPVKM:KPLS-AA¹⁷-LYV:DHHKD:GMVEERXGXS, AAPASXXAPVRL:KPLS-AA¹⁷-LYV:DHHKD:DMVEEAXGXR, STPPTXXAPVRL:KPLS-AA¹⁷-LYV:DHHKD:DMVEESXGXR, HVPKPXXAPVKL:KPLS-AA¹⁷-LYV:DHHKD:NMVEESXGXH, ASAAPXXAPVAL:KPLS-AA¹⁷-LYV:DHHKD:MIVEEXKXS, ASASPXXAPVDL:KPLS-AA¹⁷-LYV:DHHKD:MIVEEXKXS, ASASPXXAPVDL:KPLS-AA¹⁷-LYV:DHHKD:MVVEEXKXS, NDEGLESAPVEE:KPLS-AA¹⁷-LYV:DHHKD:FLVEEKXEXR, NDEGLESAPVGQ:KPLS-AA¹⁷-LYV:DHHKD:LEVEEQXEXR, SSVKXQPAPVHH:KPLS-AA¹⁷-LYV:DHHKD:RLVEELEXAXA, RNVQXRPAPVQL:KPLS-AA¹⁷-LYV:DHHKD:TLVEELAXKXE, KIPKAXXVPTEL:KPLS-AA¹⁷-LYV:DHHKD:DMVVEGXGXR, GIPEPXXVPEKM:KPLS-AA¹⁷-LYV:DHHKD:NMTVESXAXR, SIPKAXXVPTEL:KPLS-AA¹⁷-LYV:DHHKD:EMVVEGXGXR, HVTKPTXAPTKL:KPLS-AA¹⁷-LYV:DHHKD:NMVVRSXGXH, YVPKPXXAPTKL:KPLS-AA¹⁷-LYV:DHHKD:NMVVRSXGXH, TVPKPXXAPTQL:KPLS-AA¹⁷-LYV:DHHKD:NMVVRAXGXH, AVPKAXXAPTKL:KPLS-AA¹⁷-LYV:DHHKD:NMVVKAXGXH, KVG KAXXVPTKL:KPLS-AA¹⁷-LYV:DHHKD:EGMSVAEXGXR, KASKAXXVPTKL:KPLS-AA¹⁷-LYV:DHHKD:GMAVSEXGXR, GSAGPXXTPTKM:KPLS-AA¹⁷-LYV:DHHKD:GMVVDRXGXS, AAPASXXVPARL:KPLS-AA¹⁷-LYV:DHHKD:DMVVEAXGXR, STPPTXXVPTRL:KPLS-AA¹⁷-LYV:DHHKD:DMVVESXGXR, HVPKPXXAPTKL:KPLS-AA¹⁷-LYV:DHHKD:NMVVRSXGXH, ASAAPXXVPQAL:KPLS-AA¹⁷-LYV:DHHKD:MIVRSXKXS, ASASPXXVSQDL:KPLS-AA¹⁷-LYV:DHHKD:MIVKSXKXS, ASASPXXVPQDL:KPLS-AA¹⁷-LYV:DHHKD:MVVKSXKXS, NDEGLEXVPTEE:KPLS-AA¹⁷-LYV:DHHKD:FLQHNKXEXR, NDEGLEXVPTGQ:KPLS-AA¹⁷-LYV:DHHKD:LEEHSQXEXR, SSVKXQPSRVHH:KPLS-AA¹⁷-LYV:DHHKD:RLEEHLEXAXA, RNVQXRPTQVQL:KPLS-AA¹⁷-LYV:DHHKD:TLEDHLAXKXE, KIPKAXXVPQEL:EPLP-AA¹⁷-VYY:EQLSN:DMVRXGXGSR, GIPEPXXVPQKM:EPLP-AA¹⁷-VYY:EQLSN:NMVRSSXAXR, SIPKAXXVPQEL:EPLP-AA¹⁷-VYY:EQLSN:EMVRXGXGSR, HVTKPTXVPQKL:EPLP-AA¹⁷-VYY:EQLSN:NMVRSSXGXH, YVPKPXXVPQKL:EPLP-AA¹⁷-VYY:EQLSN:NMVRSSXGXH, TVPKPXXVPQQL:EPLP-AA¹⁷-VYY:EQLSN:NMVRSAXGXH, AVPKAXXVPQKL:EPLP-AA¹⁷-VYY:EQLSN:NMVRSAXGXH, KVGKAXXVPQKL:EPLP-AA¹⁷-VYY:EQLSN:EGMSVRSXGXR, KASKAXXVPQKL:EPLP-AA¹⁷-VYY:EQLSN:GMVRSEXGXR, GSAGPXXVPQKM:EPLP-AA¹⁷-VYY:EQLSN:GMVRSRXGXS, AAPASXXVPQRL:EPLP-AA¹⁷-VYY:EQLSN:DMVRSAXGXR, STPPTXXVPQRL:EPLP-AA¹⁷-VYY:EQLSN:DMVRSSXGXR, HVPKPXXVPQKL:EPLP-AA¹⁷-VYY:EQLSN:NMVRSSXGXH, RVPSTXXVPQKT:EPLP-AA¹⁷-VYY:EQLSN:MIVRSXGXL, ASASPXXVPQDL:EPLP-AA¹⁷-VYY:EQLSN:MIVRSXKXS, ASASPXXVPQDL:EPLP-AA¹⁷-VYY:EQLSN:MVVRSXKXS, NDEGLEXVPQEE:EPLP-AA¹⁷-VYY:EQLSN:FLVRXKXESR, NDEGLEXVPQGQ:EPLP-AA¹⁷-VYY:EQLSN:LEVRSQXEXR, SSVKXQPVPQHH:EPLP-AA¹⁷-VYY:EQLSN:RLVRSLEXAXA, RNVQXRPVPQQL:EPLP-AA¹⁷-VYY:EQLSN:TLVRSLAXKXE, KIPKAXXVPTEL:EPLP-AA¹⁷-VYY:EQLSN:DMVVEGXGXR, GIPEPXXVPEKM:EPLP-AA¹⁷-VYY:EQLSN:NMTVESXAXR, SIPKAXXVPTEL:EPLP-AA¹⁷-VYY:EQLSN:EMVVEGXGXR, HVTKPTXAPTKL:EPLP-AA¹⁷-VYY:EQLSN:NMVVRSXGXH, YVPKPXXAPTKL:EPLP-AA¹⁷-VYY:EQLSN:NMVVRSXGXH, TVPKPXXAPTQL:EPLP-AA¹⁷-VYY:EQLSN:NMVVRAXGXH, AVPKAXXAPTKL:EPLP-AA¹⁷-VYY:EQLSN:NMVVKAXGXH, KVGKAXXVPTKL:EPLP-AA¹⁷-VYY:EQLSN:EGMSVAEXGXR, KASKAXXVPTKL:EPLP-AA¹⁷-VYY:EQLSN:GMAVSEXGXR, GSAGPXXTPTKM:EPLP-AA¹⁷-VYY:EQLSN:GMVVDRXGXS, AAPASXXVPARL:EPLP-AA¹⁷-VYY:EQLSN:DMVVEAXGXR, STPPTXXVPTRL:EPLP-AA¹⁷-VYY:EQLSN:DMVVESXGXR, HVPKPXXAPTKL:EPLP-AA¹⁷-VYY:EQLSN:NMVVRSXGXH, RVPSTXXAPVKT:EPLP-AA¹⁷-VYY:EQLSN:MIVEEXGXL, ASASPXXVSQDL:EPLP-AA¹⁷-VYY:EQLSN:MIVKSXKXS, ASASPXXVPQDL:EPLP-AA¹⁷-VYY:EQLSN:MVVKSXKXS, NDEGLEXVPTEE:EPLP-AA¹⁷-VYY:EQLSN:FLQHNKXEXR, NDEGLEXVPTGQ:EPLP-AA¹⁷-VYY:EQLSN:LEEHSQXEXR, SSVKXQPSRVHH:EPLP-AA¹⁷-VYY:EQLSN:RLEEHLEXAXA, RNVQXRPTQVQL:EPLP-AA¹⁷-VYY:EQLSN:TLEDHLAXKXE, KIPKASSVSQEL:EPLT-AA¹⁷-LYY:EQLSN:DMVKXGXGSR, GIPEPXXVSQKM:EPLT-AA¹⁷-LYY:EQLSN:NMVKSSXAXR, SIPKASSVSQEL:EPLT-AA¹⁷-LYY:EQLSN:EMVKXGXGSR, HVTKPTXVSQKL:EPLT-AA¹⁷-LYY:EQLSN:NMVKSSXGXH, YVPKPXXVSQKL:EPLT-AA¹⁷-LYY:EQLSN:NMVKSSXGXH, TVPKPXXVSQQL:EPLT-AA¹⁷-LYY:EQLSN:NMVKSAXGXH, AVPKASSVSQKL:EPLT-AA¹⁷-LYY:EQLSN:NMVKSAXGXH, KVGKASSVSQKL:EPLT-AA¹⁷-LYY:EQLSN:EGMSVKSXGXR, KASKASSVSQKL:EPLT-AA¹⁷-LYY:EQLSN:GMVKSEXGXR, GSAGPXXVSQKM:EPLT-AA¹⁷-LYY:EQLSN:GMVKSRXGXS, AAPASSSVSQRL:EPLT-AA¹⁷-LYY:EQLSN:DMVKSAXGXR, STPPTSSVSQRL:EPLT-AA¹⁷-LYY:EQLSN:DMVKSSXGXR, HVPKPXXVSQKL:EPLT-AA¹⁷-LYY:EQLSN:NMVKSSXGXH, RVPSTSSVSQKT:EPLT-AA¹⁷-LYY:EQLSN:MIVKSXGXL, ASAAPXXVSQAL:EPLT-AA¹⁷-LYY:EQLSN:MIVKSXKXS, ASASPXXVSQDL:EPLT-AA¹⁷-LYY:EQLSN:MVVKSXKXS, NDEGLEXVSQEE:EPLT-AA¹⁷-LYY:EQLSN:FLVKXKXESR, NDEGLEXVSQGQ:EPLT-AA¹⁷-LYY:EQLSN:LEVKSQXEXR, SSVKXQPVSQHH:EPLT-AA¹⁷-LYY:EQLSN:RLVKSLEXAXA, RNVQXRPVSQQL:EPLT-AA¹⁷-LYY:EQLSN:TLVKSLAXKXE, KIPKAXXVPTEL:EPLT-AA¹⁷-LYY:EQLSN:DMVVEGXGXR, GIPEPXXVPEKM:EPLT-AA¹⁷-LYY:EQLSN:NMTVESXAXR, SIPKAXXVPTEL:EPLT-AA¹⁷-LYY:EQLSN:EMVVEGXGXR, HVTKPTXAPTKL:EPLT-AA¹⁷-LYY:EQLSN:NMVVRSXGXH, YVPKPXXAPTKL:EPLT-AA¹⁷-LYY:EQLSN:NMVVRSXGXH, TVPKPXXAPTQL:EPLT-AA¹⁷-LYY:EQLSN:NMVVRAXGXH, AVPKAXXAPTKL:EPLT-AA¹⁷-LYY:EQLSN:NMVVKAXGXH, KVGKAXXVPTKL:EPLT-AA¹⁷-LYY:EQLSN:EGMSVAEXGXR, KASKAXXVPTKL:EPLT-AA¹⁷-LYY:EQLSN:GMAVSEXGXR, GSAGPXXTPTKM:EPLT-AA¹⁷-LYY:EQLSN:GMVVDRXGXS, AAPASXXVPARL:EPLT-AA¹⁷-LYY:EQLSN:DMVVEAXGXR, STPPTXXVPTRL:EPLT-AA¹⁷-LYY:EQLSN:DMVVESXGXR, HVPKPXXAPTKL:EPLT-AA¹⁷-LYY:EQLSN:NMVVRSXGXH, RVPSTXXAPVKT:EPLT-AA¹⁷-LYY:EQLSN:MIVEEXGXL, ASAAPXXVPQAL:EPLT-AA¹⁷-LYY:EQLSN:MIVRSXKXS, ASASPXXVPQDL:EPLT-AA¹⁷-LYY:EQLSN:MVVKSXKXS, NDEGLEXVPTEE:EPLT-AA¹⁷-LYY:EQLSN:FLQHNKXEXR, NDEGLEXVPTGQ:EPLT-AA¹⁷-LYY:EQLSN:LEEHSQXEXR, SSVKXQPSRVHH:EPLT-AA¹⁷-LYY:EQLSN:RLEEHLEXAXA, RNVQXRPTQVQL:EPLT-AA¹⁷-LYY:EQLSN:TLEDHLAXKXE, KIPKAXXVPQEL:EPLT-AA¹⁷-LYY:EQLSN:DMVKXGXGSR, GIPEPXXVPQKM:EPLT-AA¹⁷-LYY:EQLSN:NMVKSSXAXR, SIPKAXXVPQEL:EPLT-AA¹⁷-LYY:EQLSN:EMVKXGXGSR, HVTKPTXVPQKL:EPLT-AA¹⁷-LYY:EQLSN:NMVKSSXGXH, YVPKPXXVPQKL:EPLT-AA¹⁷-LYY:EQLSN:NMVKSSXGXH, TVPKPXXVPQQL:EPLT-AA¹⁷-LYY:EQLSN:NMVKSAXGXH, AVPKAXXVPQKL:EPLT-AA¹⁷-LYY:EQLSN:NMVKSAXGXH, KVGKAXXVPQKL:EPLT-AA¹⁷-LYY:EQLSN:EGMSVKSXGXR, KASKAXXVPQKL:EPLT-AA¹⁷-LYY:EQLSN:GMVKSEXGXR, GSAGPXXVPQKM:EPLT-AA¹⁷-LYY:EQLSN:GMVKSRXGXS, AAPASXXVPQRL:EPLT-AA¹⁷-LYY:EQLSN:DMVKSAXGXR, STPPTXXVPQRL:EPLT-AA¹⁷-LYY:EQLSN:DMVKSSXGXR, HVPKPXXVPQKL:EPLT-AA¹⁷-LYY:EQLSN:NMVKSSXGXH, RVPSTXXVPQKT:EPLT-AA¹⁷-LYY:EQLSN:MIVKSXGXL, ASAAPXXVPQAL:EPLT-AA¹⁷-LYY:EQLSN:MIVKSXKXS, ASASPXXVPQDL:EPLT-AA¹⁷-LYY:EQLSN:MIVKSXKXS, NDEGLEXVPQEE:EPLT-AA¹⁷-LYY:EQLSN:FLVKXKXESR, NDEGLEXVPQGQ:EPLT-AA¹⁷-LYY:EQLSN:LEVKSQXEXR, SSVKXQPVPQHH:EPLT-AA¹⁷-LYY:EQLSN:RLVKSLEXAXA, RNVQXRPVPQQL:EPLT-AA¹⁷-LYY:EQLSN:TLVKSLAXKXE, ASASPXXVSQDL:EPLT-AA¹⁷-LYY:EQLSN:MIVKSXKXS, KIPKAXXVPTEL:SNIT-AA¹⁷-QIM:IGEMS:DMQHNGXGXR, GIPEPXXVPTKM:SNIT-AA¹⁷-QIM:IGEMS:NMQHNSXAXR, SIPKAXXVPTEL:SNIT-AA¹⁷-QIM:IGEMS:EMQHNGXGXR, HVTKPTXVPTKL:SNIT-AA¹⁷-QIM:IGEMS:NMQHNSXGXH, YVPKPXXVPTKL:SNIT-AA¹⁷-QIM:IGEMS:NMQHNSXGXH, TVPKPXXVPTQL:SNIT-AA¹⁷-QIM:IGEMS:NMQHNAXGXH, AVPKAXXVPTKL:SNIT-AA¹⁷-QIM:IGEMS:NMQHNAXGXH, KVGKAXXVPTKL:SNIT-AA¹⁷-QIM:IGEMS:EGMSQHNXGXR, KASKAXXVPTKL:SNIT-AA¹⁷-QIM:IGEMS:GMQHNEXGXR, GSAGPXXVPTKM:SNIT-AA¹⁷-QIM:IGEMS:GMQHNRXGXS, AAPASXXVPTRL:SNIT-AA¹⁷-QIM:IGEMS:DMQHNAXGXR, STPPTXXVPTRL:SNIT-AA¹⁷-QIM:IGEMS:DMQHNSXGXR, HVPKPXXVPTKL:SNIT-AA¹⁷-QIM:IGEMS:NMQHNSXGXH, RVPSTXXVPTKT:SNIT-AA¹⁷-QIM:IGEMS:MIQHNXGXL, ASAAPXXVPTAL:SNIT-AA¹⁷-QIM:IGEMS:MIQHNXKXS, ASASPXXVPTDL:SNIT-AA¹⁷-QIM:IGEMS:MIQHNXKXS, ASASPXXVPTDL:SNIT-AA¹⁷-QIM:IGEMS:MVQHNXKXS, NDEGLEXVPTGQ:SNIT-AA¹⁷-QIM:IGEMS:LEQHNQXEXR, NDEGLEXVPTEE:SNIT-AA¹⁷-QIM:IGEMS:FLQHNKXEXR, SSVKXQPVPTHH:SNIT-AA¹⁷-QIM:IGEMS:RLQHNLEXAXA, RNVQXRPVPTQL:SNIT-AA¹⁷-QIM:IGEMS:TLQHNLAXKXE, KIPKAXXVPTEL:SNIT-AA¹⁷-QIM:IGEMS:DMVVEGXGXR, GIPEPXXVPEKM:SNIT-AA¹⁷-QIM:IGEMS:NMTVESXAXR, SIPKAXXVPTEL:SNIT-AA¹⁷-QIM:IGEMS:EMVVEGXGXR, HVTKPTXAPTKL:SNIT-AA¹⁷-QIM:IGEMS:NMVVRSXGXH, YVPKPXXAPTKL:SNIT-AA¹⁷-QIM:IGEMS:NMVVRSXGXH, TVPKPXXAPTQL:SNIT-AA¹⁷-QIM:IGEMS:NMVVRAXGXH, AVPKAXXAPTKL:SNIT-AA¹⁷-QIM:IGEMS:NMVVKAXGXH, KVGKAXXVPTKL:SNIT-AA¹⁷-QIM:IGEMS:EGMSVAEXGXR, KASKAXXVPTKL:SNIT-AA¹⁷-QIM:IGEMS:GMAVSEXGXR, GSAGPXXTPTKM:SNIT-AA¹⁷-QIM:IGEMS:GMVVDRXGXS, AAPASXXVPARL:SNIT-AA¹⁷-QIM:IGEMS:DMVVEAXGXR, STPPTXXVPTRL:SNIT-AA¹⁷-QIM:IGEMS:DMVVESXGXR, HVPKPXXAPTKL:SNIT-AA¹⁷-QIM:IGEMS:NMVVRSXGXH, RVPSTXXAPVKT:SNIT-AA¹⁷-QIM:IGEMS:MIVEEXGXL, ASAAPXXVPQAL:SNIT-AA¹⁷-QIM:IGEMS:MIVRSXKXS, ASASPXXVSQDL:SNIT-AA¹⁷-QIM:IGEMS:MIVKSXKXS, ASASPXXVPQDL:SNIT-AA¹⁷-QIM:IGEMS:MVVKSXKXS, NDEGLEXVPTGQ:SNIT-AA¹⁷-QIM:IGEMS:LEEHSQXEXR, SSVKXQPSRVHH:SNIT-AA¹⁷-QIM:IGEMS:RLEEHLEXAXA, RNVQXRPTQVQL:SNIT-AA¹⁷-QIM:IGEMS:TLEDHLAXKXE, KIPKAXXVPTEL:SNIT-AA¹⁷-QIM:LGEMS:DMEHXGXGSR, GIPEPXXVPTKM:SNIT-AA¹⁷-QIM:LGEMS:NMEHSSXAXR, SIPKAXXVPTEL:SNIT-AA¹⁷-QIM:LGEMS:EMEHXGXGSR, HVTKPTXVPTKL:SNIT-AA¹⁷-QIM:LGEMS:NMEHSSXGXH, YVPKPXXVPTKL:SNIT-AA¹⁷-QIM:LGEMS:NMEHSSXGXH, TVPKPXXVPTQL:SNIT-AA¹⁷-QIM:LGEMS:NMEHSAXGXH, AVPKAXXVPTKL:SNIT-AA¹⁷-QIM:LGEMS:NMEHSAXGXH, KVGKAXXVPTKL:SNIT-AA¹⁷-QIM:LGEMS:EGMSEHSXGXR, KASKAXXVPTKL:SNIT-AA¹⁷-QIM:LGEMS:GMEHSEXGXR, GSAGPXXVPTKM:SNIT-AA¹⁷-QIM:LGEMS:GMEHSRXGXS, AAPASXXVPTRL:SNIT-AA¹⁷-QIM:LGEMS:DMEHSAXGXR, STPPTXXVPTRL:SNIT-AA¹⁷-QIM:LGEMS:DMEHSSXGXR, HVPKPXXVPTKL:SNIT-AA¹⁷-QIM:LGEMS:NMEHSSXGXH, RVPSTXXVPTKT:SNIT-AA¹⁷-QIM:LGEMS:MIEHSXGXL, ASAAPXXVPTAL:SNIT-AA¹⁷-QIM:LGEMS:MIEHSXKXS, ASASPXXVPTDL:SNIT-AA¹⁷-QIM:LGEMS:MIEHSXKXS, ASASPXXVPTDL:SNIT-AA¹⁷-QIM:LGEMS:MVEHSXKXS, NDEGLEXVPTEE:SNIT-AA¹⁷-QIM:LGEMS:FLEHXKXESR, SSVKXQPVPTHH:SNIT-AA¹⁷-QIM:LGEMS:RLEHSLEXAXA, RNVQXRPVPTQL:SNIT-AA¹⁷-QIM:LGEMS:TLEHSLAXKXE, KIPKAXXVPTEL:SNIT-AA¹⁷-QIM:LGEMS:DMVVEGXGXR, GIPEPXXVPEKM:SNIT-AA¹⁷-QIM:LGEMS:NMTVESXAXR, SIPKAXXVPTEL:SNIT-AA¹⁷-QIM:LGEMS:EMVVEGXGXR, HVTKPTXAPTKL:SNIT-AA¹⁷-QIM:LGEMS:NMVVRSXGXH, YVPKPXXAPTKL:SNIT-AA¹⁷-QIM:LGEMS:NMVVRSXGXH, TVPKPXXAPTQL:SNIT-AA¹⁷-QIM:LGEMS:NMVVRAXGXH, AVPKAXXAPTKL:SNIT-AA¹⁷-QIM:LGEMS:NMVVKAXGXH, KVGKAXXVPTKL:SNIT-AA¹⁷-QIM:LGEMS:EGMSVAEXGXR, KASKAXXVPTKL:SNIT-AA¹⁷-QIM:LGEMS:GMAVSEXGXR, GSAGPXXTPTKM:SNIT-AA¹⁷-QIM:LGEMS:GMVVDRXGXS, AAPASXXVPARL:SNIT-AA¹⁷-QIM:LGEMS:DMVVEAXGXR, STPPTXXVPTRL:SNIT-AA¹⁷-QIM:LGEMS:DMVVESXGXR, HVPKPXXAPTKL:SNIT-AA¹⁷-QIM:LGEMS:NMVVRSXGXH, RVPSTXXAPVKT:SNIT-AA¹⁷-QIM:LGEMS:MIVEEXGXL, ASAAPXXVPQAL:SNIT-AA¹⁷-QIM:LGEMS:MIVRSXKXS, ASASPXXVSQDL:SNIT-AA¹⁷-QIM:LGEMS:MIVKSXKXS, ASASPXXVPQDL:SNIT-AA¹⁷-QIM:LGEMS:MVVKSXKXS, NDEGLEXVPTEE:SNIT-AA¹⁷-QIM:LGEMS:FLQHNKXEXR, SSVKXQPSRVHH:SNIT-AA¹⁷-QIM:LGEMS:RLEEHLEXAXA, RNVQXRPTQVQL:SNIT-AA¹⁷-QIM:LGEMS:TLEDHLAXKXE, KIPKASSSRVEL:RSVK-AA¹⁷-AKV:KEVQV:DMEEHGXGXR, GIPEPXXSRVKM:RSVK-AA¹⁷-AKV:KEVQV:NMEEHSXAXR, SIPKASSSRVEL:RSVK-AA¹⁷-AKV:KEVQV:EMEEHGXGXR, HVTKPTSSRVKL:RSVK-AA¹⁷-AKV:KEVQV:NMEEHSXGXH, YVPKPXXSRVKL:RSVK-AA¹⁷-AKV:KEVQV:NMEEHSXGXH, TVPKPXXSRVQL:RSVK-AA¹⁷-AKV:KEVQV:NMEEHAXGXH, AVPKASSSRVKL:RSVK-AA¹⁷-AKV:KEVQV:NMEEHAXGXH, KVG KASSSRVKL:RSVK-AA¹⁷-AKV:KEVQV:EGMSEEHXGXR, KASKASSSRVKL:RSVK-AA¹⁷-AKV:KEVQV:GMEEHEXGXR, GSAGPXXSRVKM:RSVK-AA¹⁷-AKV:KEVQV:GMEEHRXGXS, AAPASSSSRVRL:RSVK-AA¹⁷-AKV:KEVQV:DMEEHAXGXR, STPPTSSSRVRL:RSVK-AA¹⁷-AKV:KEVQV:DMEEHSXGXR, HVPKPXXSRVKL:RSVK-AA¹⁷-AKV:KEVQV:NMEEHSXGXH, RVPSTSSSRVKT:RSVK-AA¹⁷-AKV:KEVQV:MIEEHXGXL, ASAAPXXSRVAL:RSVK-AA¹⁷-AKV:KEVQV:MIEEHXKXS, ASASPXXSRVDL:RSVK-AA¹⁷-AKV:KEVQV:MIEEHXKXS, ASASPXXSRVDL:RSVK-AA¹⁷-AKV:KEVQV:MVEEHXKXS, NDEGLESSRVEE:RSVK-AA¹⁷-AKV:KEVQV:FLEEHKXEXR, NDEGLESSRVGQ:RSVK-AA¹⁷-AKV:KEVQV:LEEEHQXEXR, RNVQXRPSRVQL:RSVK-AA¹⁷-AKV:KEVQV:TLEEH LAXKXE, KIPKAXXVPTEL:RSVK-AA¹⁷-AKV:KEVQV:DMVVEGXGXR, GIPEPXXVPEKM:RSVK-AA¹⁷-AKV:KEVQV:NMTVESXAXR, SIPKAXXVPTEL:RSVK-AA¹⁷-AKV:KEVQV:EMVVEGXGXR, HVTKPTXAPTKL:RSVK-AA¹⁷-AKV:KEVQV:NMVVRSXGXH, YVPKPXXAPTKL:RSVK-AA¹⁷-AKV:KEVQV:NMVVRSXGXH, TVPKPXXAPTQL:RSVK-AA¹⁷-AKV:KEVQV:NMVVRAXGXH, AVPKAXXAPTKL:RSVK-AA¹⁷-AKV:KEVQV:NMVVKAXGXH, KVGKAXXVPTKL:RSVK-AA¹⁷-AKV:KEVQV:EGMSVAEXGXR, KASKAXXVPTKL:RSVK-AA¹⁷-AKV:KEVQV:GMAVSEXGXR, GSAGPXXTPTKM:RSVK-AA¹⁷-AKV:KEVQV:GMVVDRXGXS, AAPASXXVPARL:RSVK-AA¹⁷-AKV:KEVQV:DMVVEAXGXR, STPPTXXVPTRL:RSVK-AA¹⁷-AKV:KEVQV:DMVVESXGXR, HVPKPXXAPTKL:RSVK-AA¹⁷-AKV:KEVQV:NMVVRSXGXH, RVPSTXXAPVKT:RSVK-AA¹⁷-AKV:KEVQV:MIVEEXGXL, ASAAPXXVPQAL:RSVK-AA¹⁷-AKV:KEVQV:MIVRSXKXS, ASASPXXVSQDL:RSVK-AA¹⁷-AKV:KEVQV:MIVKSXKXS, ASASPXXVPQDL:RSVK-AA¹⁷-AKV:KEVQV:MVVKSXKXS, NDEGLEXVPTEE:RSVK-AA¹⁷-AKV:KEVQV:FLQHNKXEXR, NDEGLEXVPTGQ:RSVK-AA¹⁷-AKV:KEVQV:LEEHSQXEXR, RNVQXRPTQVQL:RSVK-AA¹⁷-AKV:KEVQV:TLEDHLAXKXE, KIPKASSTQVEL:RPVQ-AA¹⁷-RKI:KKATV:DM EDHGXGXR, GIPEPXXTQVKM:RPVQ-AA¹⁷-RKI:KKATV:NMEDHSXAXR, SIPKASSTQVEL:RPVQ-AA¹⁷-RKI:KKATV:EMEDHGXGXR, HVTKPTSTQVKL:RPVQ-AA¹⁷-RKI:KKATV:NMEDHSXGXH, YVPKPXXTQVKL:RPVQ-AA¹⁷-RKI:KKATV:NMEDHSXGXH, TVPKPXXTQVQL:RPVQ-AA¹⁷-RKI:KKATV:NMEDHAXGXH, AVPKASSTQVKL:RPVQ-AA¹⁷-RKI:KKATV:NMEDHAXGXH, KVGKASSTQVKL:RPVQ-AA¹⁷-RKI:KKATV:EGMSEDHXGXR, KASKASSTQVKL:RPVQ-AA¹⁷-RKI:KKATV:GMEDHEXGXR, GSAGPXXTQVKM:RPVQ-AA¹⁷-RKI:KKATV:GMEDHRXGXS, AAPASSSTQVRL:RPVQ-AA¹⁷-RKI:KKATV:DMEDHAXGXR, STPPTSSTQVRL:RPVQ-AA¹⁷-RKI:KKATV:DMEDHSXGXR, HVPKPXXTQVKL:RPVQ-AA¹⁷-RKI:KKATV:NMEDHSXGXH RVPSTSSTQVKT:RPVQ-AA¹⁷-RKI:KKATV:MIEDHXGXL, ASAAPXXTQVAL:RPVQ-AA¹⁷-RKI:KKATV:MIEDHXKXS, ASASPXXTQVDL:RPVQ-AA¹⁷-RKI:KKATV:MIEDHXKXS, ASASPXXTQVDL:RPVQ-AA¹⁷-RKI:KKATV:MVEDHXKXS, NDEGLESTQVEE:RPVQ-AA¹⁷-RKI:KKATV:FLEDHKXEXR, NDEGLESTQVGQ:RPVQ-AA¹⁷-RKI:KKATV:LEEDHQXEXR, SSVKXQPTQVHH:RPVQ-AA¹⁷-RKI:KKATV:RLEDHLEXAXA, KIPKAXXVPTEL:RPVQ-AA¹⁷-RKI:KKATV:DMVVEGXGXR, GIPEPXXVPEKM:RPVQ-AA¹⁷-RKI:KKATV:NMTVESXAXR, SIPKAXXVPTEL:RPVQ-AA¹⁷-RKI:KKATV:EMVVEGXGXR, HVTKPTXAPTKL:RPVQ-AA¹⁷-RKI:KKATV:NMVVRSXGXH, YVPKPXXAPTKL:RPVQ-AA¹⁷-RKI:KKATV:NMVVRSXGXH, TVPKPXXAPTQL:RPVQ-AA¹⁷-RKI:KKATV:NMVVRAXGXH, AVPKAXXAPTKL:RPVQ-AA¹⁷-RKI:KKATV:NMVVKAXGXH, KVGKAXXVPTKL:RPVQ-AA¹⁷-RKI:KKATV:EGMSVAEXGXR, KASKAXXVPTKL:RPVQ-AA¹⁷-RKI:KKATV:GMAVSEXGXR, GSAGPXXTPTKM:RPVQ-AA¹⁷-RKI:KKATV:GMVVDRXGXS, AAPASXXVPARL:RPVQ-AA¹⁷-RKI:KKATV:DMVVEAXGXR, STPPTXXVPTRL:RPVQ-AA¹⁷-RKI:KKATV:DMVVESXGXR, HVPKPXXAPTKL:RPVQ-AA¹⁷-RKI:KKATV:NMVVRSXGXH, RVPSTXXAPVKT:RPVQ-AA¹⁷-RKI:KKATV:MIVEEXGXL, ASAAPXXVPQAL:RPVQ-AA¹⁷-RKI:KKATV:MIVRSXKXS, ASASPXXVSQDL:RPVQ-AA¹⁷-RKI:KKATV:MIVKSXKXS, ASASPXXVPQDL:RPVQ-AA¹⁷-RKI:KKATV:MVVKSXKXS, NDEGLEXVPTEE:RPVQ-AA¹⁷-RKI:KKATV:FLQHNKXEXR, NDEGLEXVPTGQ:RPVQ-AA¹⁷-RKI:KKATV:LEEHSQXEXR and SSVKXQPSRVHH:RPVQ-AA¹⁷-RKI:KKATV:RLEEHLEXAXA; and wherein AA¹⁷ is selected from the group consisting of G, A, V, L, I, P, F, M, W, T and S (in particular is selected from the group consisting of M, I, L, V and T). More particularly, the quadruplet PEP9:PEP12:PEP2:PEP10 is selected from the group consisting of GIPEPXXVPTKM:SAIS-AA¹⁷-LYL:LKNYQ:NMVVESXAXR, HVTKPTXVPTKL:SAIS-AA¹⁷-LYL:LKNYQ:NMVVESXGXH, YVPKPXXVPTKL:SAIS-AA¹⁷-LYL:LKNYQ:NMVVESXGXH, TVPKPXXVPTQL:SAIS-AA¹⁷-LYL:LKNYQ:NMVVEAXGXH, AVPKAXXVPTKL:SAIS-AA¹⁷-LYL:LKNYQ:NMVVEAXGXH, KVGKAXXVPTKL:SAIS-AA¹⁷-LYL:LKNYQ:EGMSVVEXGXR, KASKAXXVPTKL:SAIS-AA¹⁷-LYL:LKNYQ:GMVVEEXGXR, GSAGPXXVPTKM:SAIS-AA¹⁷-LYL:LKNYQ:GMVVERXGXS, AAPASXXVPTRL:SAIS-AA¹⁷-LYL:LKNYQ:DMVVEAXGXR, STPPTXXVPTRL:SAIS-AA¹⁷-LYL:LKNYQ:DMVVESXGXR, HVPKPXXVPTKL:SAIS-AA¹⁷-LYL:LKNYQ:NMVVESXGXH, RVPSTXXVPTKT:SAIS-AA¹⁷-LYL:LKNYQ:MIVVEXGXL, ASAAPXXVPTAL:SAIS-AA¹⁷-LYL:LKNYQ:MIVVEXKXS, ASASPXXVPTDL:SAIS-AA¹⁷-LYL:LKNYQ:MIVVEXKXS, ASASPXXVPTDL:SAIS-AA¹⁷-LYL:LKNYQ:MVVVEXKXS, GIPEPXXVPEKM:SAIS-AA¹⁷-LYL:LKNYQ:NMTVESXAXR, HVTKPTXAPTKL:SAIS-AA¹⁷-LYL:LKNYQ:NMVVRSXGXH, YVPKPXXAPTKL:SAIS-AA¹⁷-LYL:LKNYQ:NMVVRSXGXH, TVPKPXXAPTQL:SAIS-AA¹⁷-LYL:LKNYQ:NMVVRAXGXH, AVPKAXXAPTKL:SAIS-AA¹⁷-LYL:LKNYQ:NMVVKAXGXH, KVGKAXXVPTKL:SAIS-AA¹⁷-LYL:LKNYQ:EGMSVAEXGXR, KASKAXXVPTKL:SAIS-AA¹⁷-LYL:LKNYQ:GMAVSEXGXR, GSAGPXXTPTKM:SAIS-AA¹⁷-LYL:LKNYQ:GMVVDRXGXS, AAPASXXVPARL:SAIS-AA¹⁷-LYL:LKNYQ:DMVVEAXGXR, HVPKPXXAPTKL:SAIS-AA¹⁷-LYL:LKNYQ:NMVVRSXGXH, RVPSTXXAPVKT:SAIS-AA¹⁷-LYL:LKNYQ:MIVEEXGXL, ASAAPXXVPQAL:SAIS-AA¹⁷-LYL:LKNYQ:MIVRSXKXS, ASASPXXVSQDL:SAIS-AA¹⁷-LYL:LKNYQ:MIVKSXKXS, ASASPXXVPQDL:SAIS-AA¹⁷-LYL:LKNYQ:MVVKSXKXS, NDEGLEXVPTEE:SAIS-AA¹⁷-LYL:LKNYQ:FLQHNKXEXR, NDEGLEXVPTGQ:SAIS-AA¹⁷-LYL:LKNYQ:LEEHSQXEXR, SSVKXQPSRVHH:SAIS-AA¹⁷-LYL:LKNYQ:RLEEHLEXAXA, RNVQXRPTQVQL:SAIS-AA¹⁷-LYL:LKNYQ:TLEDHLAXKXE, KIPKAXXVPEEL:SSLS-AA¹⁷-LFF:LKVYP:DMTVEGXGXR, SIPKAXXVPEEL:SSLS-AA¹⁷-LFF:LKVYP:EMTVEGXGXR, HVTKPTXVPEKL:SSLS-AA¹⁷-LFF:LKVYP:NMTVESXGXH, YVPKPXXVPEKL:SSLS-AA¹⁷-LFF:LKVYP:NMTVESXGXH, TVPKPXXVPEQL:SSLS-AA¹⁷-LFF:LKVYP:NMTVEAXGXH, AVPKAXXVPEKL:SSLS-AA¹⁷-LFF:LKVYP:NMTVEAXGXH, KVGKAXXVPEKL:SSLS-AA¹⁷-LFF:LKVYP:EGMSTVEXGXR, KASKAXXVPEKL:SSLS-AA¹⁷-LFF:LKVYP:GMTVEEXGXR, GSAGPXXVPEKM:SSLS-AA¹⁷-LFF:LKVYP:GMTVERXGXS, AAPASXXVPERL:SSLS-AA¹⁷-LFF:LKVYP:DMTVEAXGXR, STPPTXXVPERL:SSLS-AA¹⁷-LFF:LKVYP:DMTVESXGXR, HVPKPXXVPEKL:SSLS-AA¹⁷-LFF:LKVYP:NMTVESXGXH, RVPSTXXVPEKT:SSLS-AA¹⁷-LFF:LKVYP:MITVEXGXL, ASAAPXXVPEAL:SSLS-AA¹⁷-LFF:LKVYP:MITVEXKXS, ASASPXXVPEDL:SSLS-AA¹⁷-LFF:LKVYP:MITVEXKXS, ASASPXXVPEDL:SSLS-AA¹⁷-LFF:LKVYP:MVTVEXKXS, KIPKAXXVPTEL:SSLS-AA¹⁷-LFF:LKVYP:DMVVEGXGXR, SIPKAXXVPTEL:SSLS-AA¹⁷-LFF:LKVYP:EMVVEGXGXR, HVTKPTXAPTKL:SSLS-AA¹⁷-LFF:LKVYP:NMVVRSXGXH, YVPKPXXAPTKL:SSLS-AA¹⁷-LFF:LKVYP:NMVVRSXGXH, TVPKPXXAPTQL:SSLS-AA¹⁷-LFF:LKVYP:NMVVRAXGXH, AVPKAXXAPTKL:SSLS-AA¹⁷-LFF:LKVYP:NMVVKAXGXH, KVGKAXXVPTKL:SSLS-AA¹⁷-LFF:LKVYP:EGMSVAEXGXR, KASKAXXVPTKL:SSLS-AA¹⁷-LFF:LKVYP:GMAVSEXGXR, GSAGPXXTPTKM:SSLS-AA¹⁷-LFF:LKVYP:GMVVDRXGXS, AAPASXXVPARL:SSLS-AA¹⁷-LFF:LKVYP:DMVVEAXGXR, STPPTXXVPTRL:SSLS-AA¹⁷-LFF:LKVYP:DMVVESXGXR, HVPKPXXAPTKL:SSLS-AA¹⁷-LFF:LKVYP:NMVVRSXGXH, RVPSTXXAPVKT:SSLS-AA¹⁷-LFF:LKVYP:MIVEEXGXL, ASAAPXXVPQAL:SSLS-AA¹⁷-LFF:LKVYP:MIVRSXKXS, ASASPXXVSQDL:SSLS-AA¹⁷-LFF:LKVYP:MIVKSXKXS, ASASPXXVPQDL:SSLS-AA¹⁷-LFF:LKVYP:MVVKSXKXS, NDEGLEXVPTEE:SSLS-AA¹⁷-LFF:LKVYP:FLQHNKXEXR, NDEGLEXVPTGQ:SSLS-AA¹⁷-LFF:LKVYP:LEEHSQXEXR, SSVKXQPSRVHH:SSLS-AA¹⁷-LFF:LKVYP:RLEEHLEXAXA, RNVQXRPTQVQL:SSLS-AA¹⁷-LFF:LKVYP:TLEDHLAXKXE, KIPKAXXAPTEL:NAIS-AA¹⁷-LYF:LKKYR:DMVVRGXGXR, GIPEPXXAPTKM:NAIS-AA¹⁷-LYF:LKKYR:NMVVRSXAXR, SIPKAXXAPTEL:NAIS-AA¹⁷-LYF:LKKYR:EMVVRGXGXR, AVPKAXXAPTKL:NAIS-AA¹⁷-LYF:LKKYR:NMVVRAXGXH, KVGKAXXAPTKL:NAIS-AA¹⁷-LYF:LKKYR:EGMSVVRXGXR, KASKAXXAPTKL:NAIS-AA¹⁷-LYF:LKKYR:GMVVREXGXR, GSAGPXXAPTKM:NAIS-AA¹⁷-LYF:LKKYR:GMVVRRXGXS, AAPASXXAPTRL:NAIS-AA¹⁷-LYF:LKKYR:DMVVRAXGXR, STPPTXXAPTRL:NAIS-AA¹⁷-LYF:LKKYR:DMVVRSXGXR, RVPSTXXAPTKT:NAIS-AA¹⁷-LYF:LKKYR:MIVVRXGXL, ASAAPXXAPTAL:NAIS-AA¹⁷-LYF:LKKYR:MIVVRXKXS, ASASPXXAPTDL:NAIS-AA¹⁷-LYF:LKKYR:MIVVRXKXS, ASASPXXAPTDL:NAIS-AA¹⁷-LYF:LKKYR:MVVVRXKXS, KIPKAXXVPTEL:NAIS-AA¹⁷-LYF:LKKYR:DMVVEGXGXR, GIPEPXXVPEKM:NAIS-AA¹⁷-LYF:LKKYR:NMTVESXAXR, SIPKAXXVPTEL:NAIS-AA¹⁷-LYF:LKKYR:EMVVEGXGXR, AVPKAXXAPTKL:NAIS-AA¹⁷-LYF:LKKYR:NMVVKAXGXH, KVGKAXXVPTKL:NAIS-AA^{1-LYF}:LKKYR:EGMSVAEXGXR, KASKAXXVPTKL:NAIS-AA¹⁷-LYF:LKKYR:GMAVSEXGXR, GSAGPXXTPTKM:NAIS-AA¹⁷-LYF:LKKYR:GMVVDRXGXS, AAPASXXVPARL:NAIS-AA¹⁷-LYF:LKKYR:DMVVEAXGXR, STPPTXXVPTRL:NAIS-AA¹⁷-LYF:LKKYR:DMVVESXGXR, RVPSTXXAPVKT:NAIS-AA¹⁷-LYF:LKKYR:MIVEEXGXL, ASAAPXXVPQAL:NAIS-AA¹⁷-LYF:LKKYR:MIVRSXKXS, ASASPXXVSQDL:NAIS-AA¹⁷-LYF:LKKYR:MIVKSXKXS, ASASPXXVPQDL:NAIS-AA¹⁷-LYF:LKKYR:MVVKSXKXS, NDEGLEXVPTEE:NAIS-AA¹⁷-LYF:LKKYR:FLQHNKXEXR, NDEGLEXVPTGQ:NAIS-AA¹⁷-LYF:LKKYR:LEEHSQXEXR, SSVKXQPSRVHH:NAIS-AA¹⁷-LYF:LKKYR:RLEEHLEXAXA, RNVQXRPTQVQL:NAIS-AA¹⁷-LYF:LKKYR:TLEDHLAXKXE, KIPKAXXAPTEL:SATS-AA¹⁷-LYY:LRKHR:DMVVKGXGXR, GIPEPXXAPTKM:SATS-AA¹⁷-LYY:LRKHR:NMVVKSXAXR, SIPKAXXAPTEL:SATS-AA¹⁷-LYY:LRKHR:EMVVKGXGXR, HVTKPTXAPTKL:SATS-AA¹⁷-LYY:LRKHR:NMVVKSXGXH, YVPKPXXAPTKL:SATS-AA¹⁷-LYY:LRKHR:NMVVKSXGXH, TVPKPXXAPTQL:SATS-AA¹⁷-LYY:LRKHR:NMVVKAXGXH, KVGKAXXAPTKL:SATS-AA¹⁷-LYY:LRKHR:EGMSVVKXGXR, KASKAXXAPTKL:SATS-AA¹⁷-LYY:LRKHR:GMVVKEXGXR, GSAGPXXAPTKM:SATS-AA¹⁷-LYY:LRKHR:GMVVKRXGXS, AAPASXXAPTRL:SATS-AA¹⁷-LYY:LRKHR:DMVVKAXGXR, STPPTXXAPTRL:SATS-AA¹⁷-LYY:LRKHR:DMVVKSXGXR, HVPKPXXAPTKL:SATS-AA¹⁷-LYY:LRKHR:NMVVKSXGXH, RVPSTXXAPTKT:SATS-AA¹⁷-LYY:LRKHR:MIVVKXGXL, ASAAPXXAPTAL:SATS-AA¹⁷-LYY:LRKHR:MIVVKXKXS, ASASPXXAPTDL:SATS-AA¹⁷-LYY:LRKHR:MIVVKXKXS, ASASPXXAPTDL:SATS-AA¹⁷-LYY:LRKHR:MVVVKXKXS, KIPKAXXVPTEL:SATS-AA¹⁷-LYY:LRKHR:DMVVEGXGXR, GIPEPXXVPEKM:SATS-AA¹⁷-LYY:LRKHR:NMTVESXAXR, SIPKAXXVPTEL:SATS-AA¹⁷-LYY:LRKHR:EMVVEGXGXR, HVTKPTXAPTKL:SATS-AA¹⁷-LYY:LRKHR:NMVVRSXGXH, YVPKPXXAPTKL:SATS-AA¹⁷-LYY:LRKHR:NMVVRSXGXH, TVPKPXXAPTQL:SATS-AA¹⁷-LYY:LRKHR:NMVVRAXGXH, KVGKAXXVPTKL:SATS-AA¹⁷-LYY:LRKHR:EGMSVAEXGXR, KASKAXXVPTKL:SATS-AA¹⁷-LYY:LRKHR:GMAVSEXGXR, GSAGPXXTPTKM:SATS-AA¹⁷-LYY:LRKHR:GMVVDRXGXS, AAPASXXVPARL:SATS-AA¹⁷-LYY:LRKHR:DMVVEAXGXR, STPPTXXVPTRL:SATS-AA¹⁷-LYY:LRKHR:DMVVESXGXR, HVPKPXXAPTKL:SATS-AA¹⁷-LYY:LRKHR:NMVVRSXGXH, RVPSTXXAPVKT:SATS-AA¹⁷-LYY:LRKHR:MIVEEXGXL, ASAAPXXVPQAL:SATS-AA¹⁷-LYY:LRKHR:MIVRSXKXS, ASASPXXVSQDL:SATS-AA¹⁷-LYY:LRKHR:MIVKSXKXS, ASASPXXVPQDL:SATS-AA¹⁷-LYY:LRKHR:MVVKSXKXS, NDEGLEXVPTEE:SATS-AA¹⁷-LYY:LRKHR:FLQHNKXEXR, NDEGLEXVPTGQ:SATS-AA¹⁷-LYY:LRKHR:LEEHSQXEXR, SSVKXQPSRVHH:SATS-AA¹⁷-LYY:LRKHR:RLEEHLEXAXA, RNVQXRPTQVQL:SATS-AA¹⁷-LYY:LRKHR:TLEDH LAXKXE, KIPKAXXVPTEL:SPIS-AA¹⁷-LYK:LKYHY:DMVAEGXGXR, GIPEPXXVPTKM:SPIS-AA¹⁷-LYK:LKYHY:NMVAESXAXR, SIPKAXXVPTEL:SPIS-AA¹⁷-LYK:LKYHY:EMVAEGXGXR, HVTKPTXVPTKL:SPIS-AA¹⁷-LYK:LKYHY:NMVAESXGXH, YVPKPXXVPTKL:SPIS-AA¹⁷-LYK:LKYHY:NMVAESXGXH, TVPKPXXVPTQL:SPIS-AA¹⁷-LYK:LKYHY:NMVAEAXGXH, AVPKAXXVPTKL:SPIS-AA¹⁷-LYK:LKYHY:NMVAEAXGXH, KASKAXXVPTKL:SPIS-AA¹⁷-LYK:LKYHY:GMVAEEXGXR, GSAGPXXVPTKM:SPIS-AA¹⁷-LYK:LKYHY:GMVAERXGXS, AAPASXXVPTRL:SPIS-AA¹⁷-LYK:LKYHY:DMVAEAXGXR, STPPTXXVPTRL:SPIS-AA¹⁷-LYK:LKYHY:DMVAESXGXR, HVPKPXXVPTKL:SPIS-AA¹⁷-LYK:LKYHY:NMVAESXGXH, RVPSTXXVPTKT:SPIS-AA¹⁷-LYK:LKYHY:MIVAEXGXL, ASAAPXXVPTAL:SPIS-AA¹⁷-LYK:LKYHY:MIVAEXKXS, ASASPXXVPTDL:SPIS-AA¹⁷-LYK:LKYHY:MIVAEXKXS, ASASPXXVPTDL:SPIS-AA¹⁷-LYK:LKYHY:MVVAEXKXS, KIPKAXXVPTEL:SPIS-AA¹⁷-LYK:LKYHY:DMVVEGXGXR, GIPEPXXVPEKM:SPIS-AA¹⁷-LYK:LKYHY:NMTVESXAXR, SIPKAXXVPTEL:SPIS-AA¹⁷-LYK:LKYHY:EMVVEGXGXR, HVTKPTXAPTKL:SPIS-AA¹⁷-LYK:LKYHY:NMVVRSXGXH, YVPKPXXAPTKL:SPIS-AA¹⁷-LYK:LKYHY:NMVVRSXGXH, TVPKPXXAPTQL:SPIS-AA¹⁷-LYK:LKYHY:NMVVRAXGXH, AVPKAXXAPTKL:SPIS-AA¹⁷-LYK:LKYHY:NMVVKAXGXH, KASKAXXVPTKL:SPIS-AA¹⁷-LYK:LKYHY:GMAVSEXGXR, GSAGPXXTPTKM:SPIS-AA¹⁷-LYK:LKYHY:GMVVDRXGXS, AAPASXXVPARL:SPIS-AA¹⁷-LYK:LKYHY:DMVVEAXGXR, STPPTXXVPTRL:SPIS-AA¹⁷-LYK:LKYHY:DMVVESXGXR, HVPKPXXAPTKL:SPIS-AA¹⁷-LYK:LKYHY:NMVVRSXGXH, RVPSTXXAPVKT:SPIS-AA¹⁷-LYK:LKYHY:MIVEEXGXL, ASAAPXXVPQAL:SPIS-AA¹⁷-LYK:LKYHY:MIVRSXKXS, ASASPXXVSQDL:SPIS-AA¹⁷-LYK:LKYHY:MIVKSXKXS, ASASPXXVPQDL:SPIS-AA¹⁷-LYK:LKYHY:MVVKSXKXS, NDEGLEXVPTEE:SPIS-AA¹⁷-LYK:LKYHY:FLQHNKXEXR, NDEGLEXVPTGQ:SPIS-AA¹⁷-LYK:LKYHY:LEEHSQXEXR, SSVKXQPSRVHH:SPIS-AA¹⁷-LYK:LKYHY:RLEEHLEXAXA, RNVQXRPTQVQL:SPIS-AA¹⁷-LYK:LKYHY:TLEDH LAXKXE, KIPKAXXVPTEL:EPIS-AA¹⁷-LYL:KFKYE:DMAVXGXGSR, GIPEPXXVPTKM:EPIS-AA¹⁷-LYL:KFKYE:NMAVSSXAXR, SIPKAXXVPTEL:EPIS-AA¹⁷-LYL:KFKYE:EMAVXGXGSR, HVTKPTXVPTKL:EPIS-AA¹⁷-LYL:KFKYE:NMAVSSXGXH, YVPKPXXVPTKL:EPIS-AA¹⁷-LYL:KFKYE:NMAVSSXGXH, TVPKPXXVPTQL:EPIS-AA¹⁷-LYL:KFKYE:NMAVSAXGXH, AVPKAXXVPTKL:EPIS-AA¹⁷-LYL:KFKYE:NMAVSAXGXH, KVGKAXXVPTKL:EPIS-AA¹⁷-LYL:KFKYE:EGMSAVSXGXR, GSAGPXXVPTKM:EPIS-AA¹⁷-LYL:KFKYE:GMAVSRXGXS, AAPASXXVPTRL:EPIS-AA¹⁷-LYL:KFKYE:DMAVSAXGXR, STPPTXXVPTRL:EPIS-AA¹⁷-LYL:KFKYE:DMAVSSXGXR, HVPKPXXVPTKL:EPIS-AA¹⁷-LYL:KFKYE:NMAVSSXGXH, RVPSTXXVPTKT:EPIS-AA¹⁷-LYL:KFKYE:MIAVSXGXL, ASAAPXXVPTAL:EPIS-AA¹⁷-LYL:KFKYE:MIAVSXKXS, ASASPXXVPTDL:EPIS-AA¹⁷-LYL:KFKYE:MIAVSXKXS, ASASPXXVPTDL:EPIS-AA¹⁷-LYL:KFKYE:MVAVSXKXS, KIPKAXXVPTEL:EPIS-AA¹⁷-LYL:KFKYE:DMVVEGXGXR, GIPEPXXVPEKM:EPIS-AA¹⁷-LYL:KFKYE:NMTVESXAXR, SIPKAXXVPTEL:EPIS-AA¹⁷-LYL:KFKYE:EMVVEGXGXR, HVTKPTXAPTKL:EPIS-AA¹⁷-LYL:KFKYE:NMVVRSXGXH, YVPKPXXAPTKL:EPIS-AA¹⁷-LYL:KFKYE:NMVVRSXGXH, TVPKPXXAPTQL:EPIS-AA¹⁷-LYL:KFKYE:NMVVRAXGXH, AVPKAXXAPTKL:EPIS-AA¹⁷-LYL:KFKYE:NMVVKAXGXH, KVGKAXXVPTKL:EPIS-AA¹⁷-LYL:KFKYE:EGMSVAEXGXR, GSAGPXXTPTKM:EPIS-AA¹⁷-LYL:KFKYE:GMVVDRXGXS, AAPASXXVPARL:EPIS-AA¹⁷-LYL:KFKYE:DMVVEAXGXR, STPPTXXVPTRL:EPIS-AA¹⁷-LYL:KFKYE:DMVVESXGXR, HVPKPXXAPTKL:EPIS-AA¹⁷-LYL:KFKYE:NMVVRSXGXH, RVPSTXXAPVKT:EPIS-AA¹⁷-LYL:KFKYE:MIVEEXGXL, ASAAPXXVPQAL:EPIS-AA¹⁷-LYL:KFKYE:MIVRSXKXS, ASASPXXVSQDL:EPIS-AA¹⁷-LYL:KFKYE:MIVKSXKXS, ASASPXXVPQDL:EPIS-AA¹⁷-LYL:KFKYE:MVVKSXKXS, NDEGLEXVPTEE:EPIS-AA¹⁷-LYL:KFKYE:FLQHNKXEXR, NDEGLEXVPTGQ:EPIS-AA¹⁷-LYL:KFKYE:LEEHSQXEXR, SSVKXQPSRVHH:EPIS-AA¹⁷-LYL:KFKYE:RLEEHLEXAXA, RNVQXRPTQVQL:EPIS-AA¹⁷-LYL:KFKYE:TLEDHLAXKXE, KIPKAXXTPTEL:SPIN-AA¹⁷-LYF:YGKIP:DMVVDGXGXR, GIPEPXXTPTKM:SPIN-AA¹⁷-LYF:YGKIP:NMVVDSXAXR, SIPKAXXTPTEL:SPIN-AA¹⁷-LYF:YGKIP:EMVVDGXGXR, HVTKPTSTPTKL:SPIN-AA¹⁷-LYF:YGKIP:NMVVDSXGXH, YVPKPXXTPTKL:SPIN-AA¹⁷-LYF:YGKIP:NMVVDSXGXH, TVPKPXXTPTQL:SPIN-AA¹⁷-LYF:YGKIP:NMVVDAXGXH, AVPKAXXTPTKL:SPIN-AA¹⁷-LYF:YGKIP:NMVVDAXGXH, KVGKAXXTPTKL:SPIN-AA¹⁷-LYF:YGKIP:EGMSVVDXGXR, KASKAXXTPTKL:SPIN-AA¹⁷-LYF:YGKIP:GMVVDEXGXR, AAPASXXTPTRL:SPIN-AA¹⁷-LYF:YGKIP:DMVVDAXGXR, STPPTXXTPTRL:SPIN-AA¹⁷-LYF:YGKIP:DMVVDSXGXR, HVPKPXXTPTKL:SPIN-AA¹⁷-LYF:YGKIP:NMVVDSXGXH, RVPSTXXTPTKT:SPIN-AA¹⁷-LYF:YGKIP:MIVVDXGXL, ASAAPXXTPTAL:SPIN-AA¹⁷-LYF:YGKIP:MIVVDXKXS, ASASPXXTPTDL:SPIN-AA¹⁷-LYF:YGKIP:MIVVDXKXS, ASASPXXTPTDL:SPIN-AA¹⁷-LYF:YGKIP:MVVVDXKXS, KIPKAXXVPTEL:SPIN-AA¹⁷-LYF:YGKIP:DMVVEGXGXR, GIPEPXXVPEKM:SPIN-AA¹⁷-LYF:YGKIP:NMTVESXAXR, SIPKAXXVPTEL:SPIN-AA¹⁷-LYF:YGKIP:EMVVEGXGXR, HVTKPTXAPTKL:SPIN-AA¹⁷-LYF:YGKIP:NMVVRSXGXH, YVPKPXXAPTKL:SPIN-AA¹⁷-LYF:YGKIP:NMVVRSXGXH, TVPKPXXAPTQL:SPIN-AA¹⁷-LYF:YGKIP:NMVVRAXGXH, AVPKAXXAPTKL:SPIN-AA¹⁷-LYF:YGKIP:NMVVKAXGXH, KVGKAXXVPTKL:SPIN-AA¹⁷-LYF:YGKIP:EGMSVAEXGXR, KASKAXXVPTKL:SPIN-AA¹⁷-LYF:YGKIP:GMAVSEXGXR, AAPASXXVPARL:SPIN-AA¹⁷-LYF:YGKIP:DMVVEAXGXR, STPPTXXVPTRL:SPIN-AA¹⁷-LYF:YGKIP:DMVVESXGXR, HVPKPXXAPTKL:SPIN-AA¹⁷-LYF:YGKIP:NMVVRSXGXH, RVPSTXXAPVKT:SPIN-AA¹⁷-LYF:YGKIP:MIVEEXGXL, ASAAPXXVPQAL:SPIN-AA¹⁷-LYF:YGKIP:MIVRSXKXS, ASASPXXVSQDL:SPIN-AA¹⁷-LYF:YGKIP:MIVKSXKXS, ASASPXXVPQDL:SPIN-AA¹⁷-LYF:YGKIP:MVVKSXKXS, NDEGLEXVPTEE:SPIN-AA¹⁷-LYF:YGKIP:FLQHNKXEXR, NDEGLEXVPTGQ:SPIN-AA¹⁷-LYF:YGKIP:LEEHSQXEXR, SSVKXQPSRVHH:SPIN-AA¹⁷-LYF:YGKIP:RLEEHLEXAXA, RNVQXRPTQVQL:SPIN-AA¹⁷-LYF:YGKIP:TLEDHLAXKXE, KIPKAXXVPAEL:SPIS-AA¹⁷-LYI:YKQYE:DMVVEGXGXR, GIPEPXXVPAKM:SPIS-AA¹⁷-LYI:YKQYE:NMVVESXAXR, SIPKAXXVPAEL:SPIS-AA¹⁷-LYI:YKQYE:EMVVEGXGXR, HVTKPTXVPAKL:SPIS-AA¹⁷-LYI:YKQYE:NMVVESXGXH, YVPKPXXVPAKL:SPIS-AA¹⁷-LYI:YKQYE:NMVVESXGXH, TVPKPXXVPAQL:SPIS-AA¹⁷-LYI:YKQYE:NMVVEAXGXH, AVPKAXXVPAKL:SPIS-AA¹⁷-LYI:YKQYE:NMVVEAXGXH, KVG KAXXVPAKL:SPIS-AA¹⁷-LYI:YKQYE:EGMSVVEXGXR, KASKAXXVPAKL:SPIS-AA¹⁷-LYI:YKQYE:GMVVEEXGXR, GSAGPXXVPAKM:SPIS-AA¹⁷-LYI:YKQYE:GMVVERXGXS, STPPTXXVPARL:SPIS-AA¹⁷-LYI:YKQYE:DMVVESXGXR, HVPKPXXVPAKL:SPIS-AA¹⁷-LYI:YKQYE:NMVVESXGXH, RVPSTXXVPAKT:SPIS-AA¹⁷-LYI:YKQYE:MIVVEXGXL, ASAAPXXVPAAL:SPIS-AA¹⁷-LYI:YKQYE:MIVVEXKXS, ASASPXXVPADL:SPIS-AA¹⁷-LYI:YKQYE:MIVVEXKXS, ASASPXXVPADL:SPIS-AA¹⁷-LYI:YKQYE:MVVVEXKXS, KIPKAXXVPTEL:SPIS-AA¹⁷-LYI:YKQYE:DMVVEGXGXR, GIPEPXXVPEKM:SPIS-AA¹⁷-LYI:YKQYE:NMTVESXAXR, SIPKAXXVPTEL:SPIS-AA¹⁷-LYI:YKQYE:EMVVEGXGXR, HVTKPTXAPTKL:SPIS-AA¹⁷-LYI:YKQYE:NMVVRSXGXH, YVPKPXXAPTKL:SPIS-AA¹⁷-LYI:YKQYE:NMVVRSXGXH, TVPKPXXAPTQL:SPIS-AA¹⁷-LYI:YKQYE:NMVVRAXGXH, AVPKAXXAPTKL:SPIS-AA¹⁷-LYI:YKQYE:NMVVKAXGXH, KVGKAXXVPTKL:SPIS-AA¹⁷-LYI:YKQYE:EGMSVAEXGXR, KASKAXXVPTKL:SPIS-AA¹⁷-LYI:YKQYE:GMAVSEXGXR, GSAGPXXTPTKM:SPIS-AA¹⁷-LYI:YKQYE:GMVVDRXGXS, STPPTXXVPTRL:SPIS-AA¹⁷-LYI:YKQYE:DMVVESXGXR, HVPKPXXAPTKL:SPIS-AA¹⁷-LYI:YKQYE:NMVVRSXGXH, RVPSTXXAPVKT:SPIS-AA¹⁷-LYI:YKQYE:MIVEEXGXL, ASAAPXXVPQAL:SPIS-AA¹⁷-LYI:YKQYE:MIVRSXKXS, ASASPXXVSQDL:SPIS-AA¹⁷-LYI:YKQYE:MIVKSXKXS, ASASPXXVPQDL:SPIS-AA¹⁷-LYI:YKQYE:MVVKSXKXS, NDEGLEXVPTEE:SPIS-AA¹⁷-LYI:YKQYE:FLQHNKXEXR, NDEGLEXVPTGQ:SPIS-AA¹⁷-LYI:YKQYE:LEEHSQXEXR, SSVKXQPSRVHH:SPIS-AA¹⁷-LYI:YKQYE:RLEEHLEXAXA, RNVQXRPTQVQL:SPIS-AA¹⁷-LYI:YKQYE:TLEDH LAXKXE, KIPKAXXVPTEL:SPIS-AA¹⁷-LFI:YKQYE:DMVVEGXGXR, GIPEPXXVPTKM:SPIS-AA¹⁷-LFI:YKQYE:NMVVESXAXR, SIPKAXXVPTEL:SPIS-AA¹⁷-LFI:YKQYE:EMVVEGXGXR, HVTKPTXVPTKL:SPIS-AA¹⁷-LFI:YKQYE:NMVVESXGXH, YVPKPXXVPTKL:SPIS-AA¹⁷-LFI:YKQYE:NMVVESXGXH, TVPKPXXVPTQL:SPIS-AA¹⁷-LFI:YKQYE:NMVVEAXGXH, AVPKAXXVPTKL:SPIS-AA¹⁷-LFI:YKQYE:NMVVEAXGXH, KVGKAXXVPTKL:SPIS-AA¹⁷-LFI:YKQYE:EGMSVVEXGXR, KASKAXXVPTKL:SPIS-AA¹⁷-LFI:YKQYE:GMVVEEXGXR, GSAGPXXVPTKM:SPIS-AA¹⁷-LFI:YKQYE:GMVVERXGXS, AAPASXXVPTRL:SPIS-AA¹⁷-LFI:YKQYE:DMVVEAXGXR, HVPKPXXVPTKL:SPIS-AA¹⁷-LFI:YKQYE:NMVVESXGXH, RVPSTXXVPTKT:SPIS-AA¹⁷-LFI:YKQYE:MIVVEXGXL, ASAAPXXVPTAL:SPIS-AA¹⁷-LFI:YKQYE:MIVVEXKXS, ASASPXXVPTDL:SPIS-AA¹⁷-LFI:YKQYE:MIVVEXKXS, ASASPXXVPTDL:SPIS-AA¹⁷-LFI:YKQYE:MVVVEXKXS, GIPEPXXVPEKM:SPIS-AA¹⁷-LFI:YKQYE:NMTVESXAXR, HVTKPTXAPTKL:SPIS-AA¹⁷-LFI:YKQYE:NMVVRSXGXH, YVPKPXXAPTKL:SPIS-AA¹⁷-LFI:YKQYE:NMVVRSXGXH, TVPKPXXAPTQL:SPIS-AA¹⁷-LFI:YKQYE:NMVVRAXGXH, AVPKAXXAPTKL:SPIS-AA¹⁷-LFI:YKQYE:NMVVKAXGXH, KVGKAXXVPTKL:SPIS-AA¹⁷-LFI:YKQYE:EGMSVAEXGXR, KASKAXXVPTKL:SPIS-AA¹⁷-LFI:YKQYE:GMAVSEXGXR, GSAGPXXTPTKM:SPIS-AA¹⁷-LFI:YKQYE:GMVVDRXGXS, AAPASXXVPARL:SPIS-AA¹⁷-LFI:YKQYE:DMVVEAXGXR, HVPKPXXAPTKL:SPIS-AA¹⁷-LFI:YKQYE:NMVVRSXGXH, RVPSTXXAPVKT:SPIS-AA¹⁷-LFI:YKQYE:MIVEEXGXL, ASAAPXXVPQAL:SPIS-AA¹⁷-LFI:YKQYE:MIVRSXKXS, ASASPXXVSQDL:SPIS-AA¹⁷-LFI:YKQYE:MIVKSXKXS, ASASPXXVPQDL:SPIS-AA¹⁷-LFI:YKQYE:MVVKSXKXS, NDEGLEXVPTEE:SPIS-AA¹⁷-LFI:YKQYE:FLQHNKXEXR, NDEGLEXVPTGQ:SPIS-AA¹⁷-LFI:YKQYE:LEEHSQXEXR, SSVKXQPSRVHH:SPIS-AA¹⁷-LFI:YKQYE:RLEEHLEXAXA, RNVQXRPTQVQL:SPIS-AA¹⁷-LFI:YKQYE:TLEDHLAXKXE, KIPKAXXAPVEL:KPLS-AA¹⁷-LYV:DHHKD:DMVEEGXGXR, GIPEPXXAPVKM:KPLS-AA¹⁷-LYV:DHHKD:NMVEESXAXR, SIPKAXXAPVEL:KPLS-AA¹⁷-LYV:DHHKD:EMVEEGXGXR, HVTKPTXAPVKL:KPLS-AA¹⁷-LYV:DHHKD:NMVEESXGXH, YVPKPXXAPVKL:KPLS-AA¹⁷-LYV:DHHKD:NMVEESXGXH, TVPKPXXAPVQL:KPLS-AA¹⁷-LYV:DHHKD:NMVEEAXGXH, AVPKAXXAPVKL:KPLS-AA¹⁷-LYV:DHHKD:NMVEEAXGXH, KVGKAXXAPVKL:KPLS-AA¹⁷-LYV:DHHKD:EGMSVEEXGXR, KASKAXXAPVKL:KPLS-AA¹⁷-LYV:DHHKD:GMVEEEXGXR, GSAGPXXAPVKM:KPLS-AA¹⁷-LYV:DHHKD:GMVEERXGXS, AAPASXXAPVRL:KPLS-AA¹⁷-LYV:DHHKD:DMVEEAXGXR, STPPTXXAPVRL:KPLS-AA¹⁷-LYV:DHHKD:DMVEESXGXR, HVPKPXXAPVKL:KPLS-AA¹⁷-LYV:DHHKD:NMVEESXGXH, ASAAPXXAPVAL:KPLS-AA¹⁷-LYV:DHHKD:MIVEEXKXS, ASASPXXAPVDL:KPLS-AA¹⁷-LYV:DHHKD:MIVEEXKXS, ASASPXXAPVDL:KPLS-AA¹⁷-LYV:DHHKD:MVVEEXKXS, KIPKAXXVPTEL:KPLS-AA¹⁷-LYV:DHHKD:DMVVEGXGXR, GIPEPXXVPEKM:KPLS-AA¹⁷-LYV:DHHKD:NMTVESXAXR, SIPKAXXVPTEL:KPLS-AA¹⁷-LYV:DHHKD:EMVVEGXGXR, HVTKPTXAPTKL:KPLS-AA¹⁷-LYV:DHHKD:NMVVRSXGXH, YVPKPXXAPTKL:KPLS-AA¹⁷-LYV:DHHKD:NMVVRSXGXH, TVPKPXXAPTQL:KPLS-AA¹⁷-LYV:DHHKD:NMVVRAXGXH, AVPKAXXAPTKL:KPLS-AA¹⁷-LYV:DHHKD:NMVVKAXGXH, KVGKAXXVPTKL:KPLS-AA¹⁷-LYV:DHHKD:EGMSVAEXGXR, KASKAXXVPTKL:KPLS-AA¹⁷-LYV:DHHKD:GMAVSEXGXR, GSAGPXXTPTKM:KPLS-AA¹⁷-LYV:DHHKD:GMVVDRXGXS, AAPASXXVPARL:KPLS-AA¹⁷-LYV:DHHKD:DMVVEAXGXR, STPPTXXVPTRL:KPLS-AA¹⁷-LYV:DHHKD:DMVVESXGXR, HVPKPXXAPTKL:KPLS-AA¹⁷-LYV:DHHKD:NMVVRSXGXH, ASAAPXXVPQAL:KPLS-AA¹⁷-LYV:DHHKD:MIVRSXKXS, ASASPXXVSQDL:KPLS-AA¹⁷-LYV:DHHKD:MIVKSXKXS, ASASPXXVPQDL:KPLS-AA¹⁷-LYV:DHHKD:MVVKSXKXS, NDEGLEXVPTEE:KPLS-AA¹⁷-LYV:DHHKD:FLQHNKXEXR, NDEGLEXVPTGQ:KPLS-AA¹⁷-LYV:DHHKD:LEEHSQXEXR, SSVKXQPSRVHH:KPLS-AA¹⁷-LYV:DHHKD:RLEEHLEXAXA, RNVQXRPTQVQL:KPLS-AA¹⁷-LYV:DHHKD:TLEDHLAXKXE, KIPKAXXVPQEL:EPLP-AA¹⁷-VYY:EQLSN:DMVRXGXGSR, GIPEPXXVPQKM:EPLP-AA¹⁷-VYY:EQLSN:NMVRSSXAXR, SIPKAXXVPQEL:EPLP-AA¹⁷-VYY:EQLSN:EMVRXGXGSR, HVTKPTXVPQKL:EPLP-AA¹⁷-VYY:EQLSN:NMVRSSXGXH, YVPKPXXVPQKL:EPLP-AA¹⁷-VYY:EQLSN:NMVRSSXGXH, TVPKPXXVPQQL:EPLP-AA¹⁷-VYY:EQLSN:NMVRSAXGXH, AVPKAXXVPQKL:EPLP-AA¹⁷-VYY:EQLSN:NMVRSAXGXH, KVGKAXXVPQKL:EPLP-AA¹⁷-VYY:EQLSN:EGMSVRSXGXR, KASKAXXVPQKL:EPLP-AA¹⁷-VYY:EQLSN:GMVRSEXGXR, GSAGPXXVPQKM:EPLP-AA¹⁷-VYY:EQLSN:GMVRSRXGXS, AAPASXXVPQRL:EPLP-AA¹⁷-VYY:EQLSN:DMVRSAXGXR, STPPTXXVPQRL:EPLP-AA¹⁷-VYY:EQLSN:DMVRSSXGXR, HVPKPXXVPQKL:EPLP-AA¹⁷-VYY:EQLSN:NMVRSSXGXH, RVPSTXXVPQKT:EPLP-AA¹⁷-VYY:EQLSN:MIVRSXGXL, ASASPXXVPQDL:EPLP-AA¹⁷-VYY:EQLSN:MIVRSXKXS, ASASPXXVPQDL:EPLP-AA¹⁷-VYY:EQLSN:MVVRSXKXS, KIPKAXXVPTEL:EPLP-AA¹⁷-VYY:EQLSN:DMVVEGXGXR, GIPEPXXVPEKM:EPLP-AA¹⁷-VYY:EQLSN:NMTVESXAXR, SIPKAXXVPTEL:EPLP-AA¹⁷-VYY:EQLSN:EMVVEGXGXR, HVTKPTXAPTKL:EPLP-AA¹⁷-VYY:EQLSN:NMVVRSXGXH, YVPKPXXAPTKL:EPLP-AA¹⁷-VYY:EQLSN:NMVVRSXGXH, TVPKPXXAPTQL:EPLP-AA¹⁷-VYY:EQLSN:NMVVRAXGXH, AVPKAXXAPTKL:EPLP-AA¹⁷-VYY:EQLSN:NMVVKAXGXH, KVGKAXXVPTKL:EPLP-AA¹⁷-VYY:EQLSN:EGMSVAEXGXR, KASKAXXVPTKL:EPLP-AA¹⁷-VYY:EQLSN:GMAVSEXGXR, GSAGPXXTPTKM:EPLP-AA¹⁷-VYY:EQLSN:GMVVDRXGXS, AAPASXXVPARL:EPLP-AA¹⁷-VYY:EQLSN:DMVVEAXGXR, STPPTXXVPTRL:EPLP-AA¹⁷-VYY:EQLSN:DMVVESXGXR, HVPKPXXAPTKL:EPLP-AA¹⁷-VYY:EQLSN:NMVVRSXGXH, RVPSTXXAPVKT:EPLP-AA¹⁷-VYY:EQLSN:MIVEEXGXL, ASASPXXVSQDL:EPLP-AA¹⁷-VYY:EQLSN:MIVKSXKXS, ASASPXXVPQDL:EPLP-AA¹⁷-VYY:EQLSN:MVVKSXKXS, NDEGLEXVPTEE:EPLP-AA¹⁷-VYY:EQLSN:FLQHNKXEXR, NDEGLEXVPTGQ:EPLP-AA¹⁷-VYY:EQLSN:LEEHSQXEXR, SSVKXQPSRVHH:EPLP-AA¹⁷-VYY:EQLSN:RLEEHLEXAXA, RNVQXRPTQVQL:EPLP-AA¹⁷-VYY:EQLSN:TLEDHLAXKXE, KIPKAXXVSQEL:EPLT-AA¹⁷-LYY:EQLSN:DMVKXGXGSR, GIPEPXXVSQKM:EPLT-AA¹⁷-LYY:EQLSN:NMVKSSXAXR, SIPKAXXVSQEL:EPLT-AA¹⁷-LYY:EQLSN:EMVKXGXGSR, HVTKPTXVSQKL:EPLT-AA¹⁷-LYY:EQLSN:NMVKSSXGXH, YVPKPXXVSQKL:EPLT-AA¹⁷-LYY:EQLSN:NMVKSSXGXH, TVPKPXXVSQQL:EPLT-AA¹⁷-LYY:EQLSN:NMVKSAXGXH, AVPKAXXVSQKL:EPLT-AA¹⁷-LYY:EQLSN:NMVKSAXGXH, KVGKAXXVSQKL:EPLT-AA¹⁷-LYY:EQLSN:EGMSVKSXGXR, KASKAXXVSQKL:EPLT-AA¹⁷-LYY:EQLSN:GMVKSEXGXR, GSAGPXXVSQKM:EPLT-AA¹⁷-LYY:EQLSN:GMVKSRXGXS, AAPASXXVSQRL:EPLT-AA¹⁷-LYY:EQLSN:DMVKSAXGXR, STPPTXXVSQRL:EPLT-AA¹⁷-LYY:EQLSN:DMVKSSXGXR, HVPKPXXVSQKL:EPLT-AA¹⁷-LYY:EQLSN:NMVKSSXGXH, RVPSTXXVSQKT:EPLT-AA¹⁷-LYY:EQLSN:MIVKSXGXL, ASAAPXXVSQAL:EPLT-AA¹⁷-LYY:EQLSN:MIVKSXKXS, ASASPXXVSQDL:EPLT-AA¹⁷-LYY:EQLSN:MVVKSXKXS, KIPKAXXVPTEL:EPLT-AA¹⁷-LYY:EQLSN:DMVVEGXGXR, GIPEPXXVPEKM:EPLT-AA¹⁷-LYY:EQLSN:NMTVESXAXR, SIPKAXXVPTEL:EPLT-AA¹⁷-LYY:EQLSN:EMVVEGXGXR, HVTKPTXAPTKL:EPLT-AA¹⁷-LYY:EQLSN:NMVVRSXGXH, YVPKPXXAPTKL:EPLT-AA¹⁷-LYY:EQLSN:NMVVRSXGXH, TVPKPXXAPTQL:EPLT-AA¹⁷-LYY:EQLSN:NMVVRAXGXH, AVPKAXXAPTKL:EPLT-AA¹⁷-LYY:EQLSN:NMVVKAXGXH, KVGKAXXVPTKL:EPLT-AA¹⁷-LYY:EQLSN:EGMSVAEXGXR, KASKAXXVPTKL:EPLT-AA¹⁷-LYY:EQLSN:GMAVSEXGXR, GSAGPXXTPTKM:EPLT-AA¹⁷-LYY:EQLSN:GMVVDRXGXS, AAPASXXVPARL:EPLT-AA¹⁷-LYY:EQLSN:DMVVEAXGXR, STPPTXXVPTRL:EPLT-AA¹⁷-LYY:EQLSN:DMVVESXGXR, HVPKPXXAPTKL:EPLT-AA¹⁷-LYY:EQLSN:NMVVRSXGXH, RVPSTXXAPVKT:EPLT-AA¹⁷-LYY:EQLSN:MIVEEXGXL, ASAAPXXVPQAL:EPLT-AA¹⁷-LYY:EQLSN:MIVRSXKXS, NDEGLEXVPTEE:EPLT-AA¹⁷-LYY:EQLSN:FLQHNKXEXR, NDEGLEXVPTGQ:EPLT-AA¹⁷-LYY:EQLSN:LEEHSQXEXR, SSVKXQPSRVHH:EPLT-AA¹⁷-LYY:EQLSN:RLEEHLEXAXA, RNVQXRPTQVQL:EPLT-AA¹⁷-LYY:EQLSN:TLEDHLAXKXE, KIPKAXXVPQEL:EPLT-AA¹⁷-LYY:EQLSN:DMVKXGXGSR, GIPEPXXVPQKM:EPLT-AA¹⁷-LYY:EQLSN:NMVKSSXAXR, SIPKAXXVPQEL:EPLT-AA¹⁷-LYY:EQLSN:EMVKXGXGSR, HVTKPTXVPQKL:EPLT-AA¹⁷-LYY:EQLSN:NMVKSSXGXH, YVPKPXXVPQKL:EPLT-AA¹⁷-LYY:EQLSN:NMVKSSXGXH, TVPKPXXVPQQL:EPLT-AA¹⁷-LYY:EQLSN:NMVKSAXGXH, AVPKAXXVPQKL:EPLT-AA¹⁷-LYY:EQLSN:NMVKSAXGXH, KVGKAXXVPQKL:EPLT-AA¹⁷-LYY:EQLSN:EGMSVKSXGXR, KASKAXXVPQKL:EPLT-AA¹⁷-LYY:EQLSN:GMVKSEXGXR, GSAGPXXVPQKM:EPLT-AA¹⁷-LYY:EQLSN:GMVKSRXGXS, AAPASXXVPQRL:EPLT-AA¹⁷-LYY:EQLSN:DMVKSAXGXR, STPPTXXVPQRL:EPLT-AA¹⁷-LYY:EQLSN:DMVKSSXGXR, HVPKPXXVPQKL:EPLT-AA¹⁷-LYY:EQLSN:NMVKSSXGXH, RVPSTXXVPQKT:EPLT-AA¹⁷-LYY:EQLSN:MIVKSXGXL, ASAAPXXVPQAL:EPLT-AA¹⁷-LYY:EQLSN:MIVKSXKXS, ASASPXXVPQDL:EPLT-AA¹⁷-LYY:EQLSN:MIVKSXKXS, NDEGLEXVPTGQ:SNIT-AA¹⁷-QIM:IGEMS:LEQHNQXEXR, KIPKAXXVPTEL:SNIT-AA¹⁷-QIM:IGEMS:DMVVEGXGXR, GIPEPXXVPEKM:SNIT-AA¹⁷-QIM:IGEMS:NMTVESXAXR, SIPKAXXVPTEL:SNIT-AA¹⁷-QIM:IGEMS:EMVVEGXGXR, HVTKPTXAPTKL:SNIT-AA¹⁷-QIM:IGEMS:NMVVRSXGXH, YVPKPXXAPTKL:SNIT-AA¹⁷-QIM:IGEMS:NMVVRSXGXH, TVPKPXXAPTQL:SNIT-AA¹⁷-QIM:IGEMS:NMVVRAXGXH, AVPKAXXAPTKL:SNIT-AA¹⁷-QIM:IGEMS:NMVVKAXGXH, KVGKAXXVPTKL:SNIT-AA¹⁷-QIM:IGEMS:EGMSVAEXGXR, KASKAXXVPTKL:SNIT-AA¹⁷-QIM:IGEMS:GMAVSEXGXR, GSAGPXXTPTKM:SNIT-AA¹⁷-QIM:IGEMS:GMVVDRXGXS, AAPASXXVPARL:SNIT-AA¹⁷-QIM:IGEMS:DMVVEAXGXR, STPPTXXVPTRL:SNIT-AA¹⁷-QIM:IGEMS:DMVVESXGXR, HVPKPXXAPTKL:SNIT-AA¹⁷-QIM:IGEMS:NMVVRSXGXH, RVPSTXXAPVKT:SNIT-AA¹⁷-QIM:IGEMS:MIVEEXGXL, ASAAPXXVPQAL:SNIT-AA¹⁷-QIM:IGEMS:MIVRSXKXS, ASASPXXVSQDL:SNIT-AA¹⁷-QIM:IGEMS:MIVKSXKXS, ASASPXXVPQDL:SNIT-AA¹⁷-QIM:IGEMS:MVVKSXKXS, NDEGLEXVPTGQ:SNIT-AA¹⁷-QIM:IGEMS:LEEHSQXEXR, SSVKXQPSRVHH:SNIT-AA¹⁷-QIM:IGEMS:RLEEHLEXAXA, RNVQXRPTQVQL:SNIT-AA¹⁷-QIM:IGEMS:TLEDHLAXKXE, NDEGLEXVPTEE:SNIT-AA¹⁷-QIM:LGEMS:FLEHXKXESR, KIPKAXXVPTEL:SNIT-AA¹⁷-QIM:LGEMS:DMVVEGXGXR, GIPEPXXVPEKM:SNIT-AA¹⁷-QIM:LGEMS:NMTVESXAXR, SIPKAXXVPTEL:SNIT-AA¹⁷-QIM:LGEMS:EMVVEGXGXR, HVTKPTXAPTKL:SNIT-AA¹⁷-QIM:LGEMS:NMWRSXGXH, YVPKPXXAPTKL:SNIT-AA¹⁷-QIM:LGEMS:NMVVRSXGXH, TVPKPXXAPTQL:SNIT-AA¹⁷-QIM:LGEMS:NMVVRAXGXH, AVPKAXXAPTKL:SNIT-AA¹⁷-QIM:LGEMS:NMVVKAXGXH, KVGKAXXVPTKL:SNIT-AA¹⁷-QIM:LGEMS:EGMSVAEXGXR, KASKAXXVPTKL:SNIT-AA¹⁷-QIM:LGEMS:GMAVSEXGXR, GSAGPXXTPTKM:SNIT-AA¹⁷-QIM:LGEMS:GMVVDRXGXS, AAPASXXVPARL:SNIT-AA¹⁷-QIM:LGEMS:DMVVEAXGXR, STPPTXXVPTRL:SNIT-AA¹⁷-QIM:LGEMS:DMVVESXGXR, HVPKPXXAPTKL:SNIT-AA¹⁷-QIM:LGEMS:NMVVRSXGXH, RVPSTXXAPVKT:SNIT-AA¹⁷-QIM:LGEMS:MIVEEXGXL, ASAAPXXVPQAL:SNIT-AA¹⁷-QIM:LGEMS:MIVRSXKXS, ASASPXXVSQDL:SNIT-AA¹⁷-QIM:LGEMS:MIVKSXKXS, ASASPXXVPQDL:SNIT-AA¹⁷-QIM:LGEMS:MVVKSXKXS, NDEGLEXVPTEE:SNIT-AA¹⁷-QIM:LGEMS:FLQHNKXEXR, SSVKXQPSRVHH:SNIT-AA¹⁷-QIM:LGEMS:RLEEHLEXAXA, RNVQXRPTQVQL:SNIT-AA¹⁷-QIM:LGEMS:TLEDHLAXKXE, RNVQXRPSRVQL:RSVK-AA¹⁷-AKV:KEVQV:TLEEH LAXKXE, KIPKAXXVPTEL:RSVK-AA¹⁷-AKV:KEVQV:DMVVEGXGXR, GIPEPXXVPEKM:RSVK-AA¹⁷-AKV:KEVQV:NMTVESXAXR, SIPKAXXVPTEL:RSVK-AA¹⁷-AKV:KEVQV:EMVVEGXGXR, HVTKPTXAPTKL:RSVK-AA¹⁷-AKV:KEVQV:NMVVRSXGXH, YVPKPXXAPTKL:RSVK-AA¹⁷-AKV:KEVQV:NMVVRSXGXH, TVPKPXXAPTQL:RSVK-AA¹⁷-AKV:KEVQV:NMVVRAXGXH, AVPKAXXAPTKL:RSVK-AA¹⁷-AKV:KEVQV:NMVVKAXGXH, KVG KAXXVPTKL:RSVK-AA¹⁷-AKV:KEVQV:EGMSVAEXGXR, KASKAXXVPTKL:RSVK-AA¹⁷-AKV:KEVQV:GMAVSEXGXR, GSAGPXXTPTKM:RSVK-AA¹⁷-AKV:KEVQV:GMVVDRXGXS, AAPASXXVPARL:RSVK-AA¹⁷-AKV:KEVQV:DMVVEAXGXR, STPPTXXVPTRL:RSVK-AA¹⁷-AKV:KEVQV:DMVVESXGXR, HVPKPXXAPTKL:RSVK-AA¹⁷-AKV:KEVQV:NMVVRSXGXH, RVPSTXXAPVKT:RSVK-AA¹⁷-AKV:KEVQV:MIVEEXGXL, ASAAPXXVPQAL:RSVK-AA¹⁷-AKV:KEVQV:MIVRSXKXS, ASASPXXVSQDL:RSVK-AA¹⁷-AKV:KEVQV:MIVKSXKXS, ASASPXXVPQDL:RSVK-AA¹⁷-AKV:KEVQV:MVVKSXKXS, NDEGLEXVPTEE:RSVK-AA¹⁷-AKV:KEVQV:FLQHNKXEXR, NDEGLEXVPTGQ:RSVK-AA¹⁷-AKV:KEVQV:LEEHSQXEXR, RNVQXRPTQVQL:RSVK-AA¹⁷-AKV:KEVQV:TLEDHLAXKXE, SSVKXQPTQVHH:RPVQ-AA¹⁷-RKI:KKATV:RLEDHLEXAXA, KIPKAXXVPTEL:RPVQ-AA¹⁷-RKI:KKATV:DMVVEGXGXR, GIPEPXXVPEKM:RPVQ-AA¹⁷-RKI:KKATV:NMTVESXAXR, SIPKAXXVPTEL:RPVQ-AA¹⁷-RKI:KKATV:EMVVEGXGXR, HVTKPTXAPTKL:RPVQ-AA¹⁷-RKI:KKATV:NMVVRSXGXH, YVPKPXXAPTKL:RPVQ-AA¹⁷-RKI:KKATV:NMVVRSXGXH, TVPKPXXAPTQL:RPVQ-AA¹⁷-RKI:KKATV:NMVVRAXGXH, AVPKAXXAPTKL:RPVQ-AA¹⁷-RKI:KKATV:NMVVKAXGXH, KVGKAXXVPTKL:RPVQ-AA¹⁷-RKI:KKATV:EGMSVAEXGXR, KASKAXXVPTKL:RPVQ-AA¹⁷-RKI:KKATV:GMAVSEXGXR, GSAGPXXTPTKM:RPVQ-AA¹⁷-RKI:KKATV:GMVVDRXGXS, AAPASXXVPARL:RPVQ-AA¹⁷-RKI:KKATV:DMVVEAXGXR, STPPTXXVPTRL:RPVQ-AA¹⁷-RKI:KKATV:DMVVESXGXR, HVPKPXXAPTKL:RPVQ-AA¹⁷-RKI:KKATV:NMVVRSXGXH, RVPSTXXAPVKT:RPVQ-AA¹⁷-RKI:KKATV:MIVEEXGXL, ASAAPXXVPQAL:RPVQ-AA¹⁷-RKI:KKATV:MIVRSXKXS, ASASPXXVSQDL:RPVQ-AA¹⁷-RKI:KKATV:MIVKSXKXS, ASASPXXVPQDL:RPVQ-AA¹⁷-RKI:KKATV:MVVKSXKXS, NDEGLEXVPTEE:RPVQ-AA¹⁷-RKI:KKATV:FLQHNKXEXR, NDEGLEXVPTGQ:RPVQ-AA¹⁷-RKI:KKATV:LEEHSQXEXR and SSVKXQPSRVHH:RPVQ-AA¹⁷-RKI:KKATV:RLEEHLEXAXA; and wherein AA¹⁷ is selected from the group consisting of G, A, V, L, I, P, F, M, W, T and S (in particular is selected from the group consisting of M, I, L, V and T).

[0439] In particular, in certain embodiments, the hexaplet PEP7:PEP3:PEP1:PEP2:PEP4:PEP8 is selected from the group consisting of GIPEPXX:VPT:SAIS:LKNYQ:VVE:SXAXR, SIPKAXX:VPT:SAIS:LKNYQ:VVE:GXGXR, HVTKPTX:VPT:SAIS:LKNYQ:VVE:SXGXH, YVPKPXX:VPT:SAIS:LKNYQ:VVE:SXGXH, TVPKPXX:VPT:SAIS:LKNYQ:VVE:AXGXH, AVPKAXX:VPT:SAIS:LKNYQ:VVE:AXGXH, KVG KAXX:VPT:SAIS:LKNYQ:VVE:XGXR, KASKAXX:VPT:SAIS:LKNYQ:VVE:EXGXR, GSAGPXX:VPT:SAIS:LKNYQ:VVE:RXGXS, AAPASXX:VPT:SAIS:LKNYQ:VVE:AXGXR, STPPTXX:VPT:SAIS:LKNYQ:VVE:SXGXR, HVPKPXX:VPT:SAIS:LKNYQ:VVE:SXGXH, RVPSTXX:VPT:SAIS:LKNYQ:VVE:XGXL, ASAAPXX:VPT:SAIS:LKNYQ:VVE:XKXS, ASASPXX:VPT:SAIS:LKNYQ:VVE:XKXS, NDEGLEX:VPT:SAIS:LKNYQ:VVE:KXEXR, NDEGLEX:VPT:SAIS:LKNYQ:VVE:QXEXR, SSVKXQP:VPT:SAIS:LKNYQ:VVE:LEXAXA, RNVQXRP:VPT:SAIS:LKNYQ:VVE:LAXKXE, GIPEPXX:VPE:SAIS:LKNYQ:TVE:SXAXR, HVTKPTX:APT:SAIS:LKNYQ:VVR:SXGXH, YVPKPXX:APT:SAIS:LKNYQ:VVR:SXGXH, TVPKPXX:APT:SAIS:LKNYQ:VVR:AXGXH, AVPKAXX:APT:SAIS:LKNYQ:VVK:AXGXH, KVG KAXX:VPT:SAIS:LKNYQ:VAE:XGXR, KASKAXX:VPT:SAIS:LKNYQ:AVS:EXGXR, GSAG PXX:TPT:SAIS:LKNYQ:VVD:RXGXS, AAPASXX:VPA:SAIS:LKNYQ:VVE:AXGXR, HVPKPXX:APT:SAIS:LKNYQ:VVR:SXGXH, RVPSTXX:APV:SAIS:LKNYQ:VEE:XGXL, ASAAPXX:VPQ:SAIS:LKNYQ:VRS:XKXS, ASASPXX:VSQ:SAIS:LKNYQ:VKS:XKXS, ASASPXX:VPQ:SAIS:LKNYQ:VKS:XKXS, NDEGLEX:VPT:SAIS:LKNYQ:QHN:KXEXR, NDEGLEX:VPT:SAIS:LKNYQ:EHS:QXEXR, SSVKXQP:SRV:SAIS:LKNYQ:EEH:LEXAXA, RNVQXRP:TQV:SAIS:LKNYQ:EDH:LAXKXE, KIPKAXX:VPE:SSLS:LKVYP:TVE:GXGXR, SIPKAXX:VPE:SSLS:LKVYP:TVE:GXGXR, HVTKPTX:VPE:SSLS:LKVYP:TVE:SXGXH, YVPKPXX:VPE:SSLS:LKVYP:TVE:SXGXH, TVPKPXX:VPE:SSLS:LKVYP:TVE:AXGXH, AVPKAXX:VPE:SSLS:LKVYP:TVE:AXGXH, KVGKAXX:VPE:SSLS:LKVYP:TVE:XGXR, KASKAXX:VPE:SSLS:LKVYP:TVE:EXGXR, GSAGPXX:VPE:SSLS:LKVYP:TVE:RXGXS, AAPASXX:VPE:SSLS:LKVYP:TVE:AXGXR, STPPTXX:VPE:SSLS:LKVYP:TVE:SXGXR, HVPKPXX:VPE:SSLS:LKVYP:TVE:SXGXH, RVPSTXX:VPE:SSLS:LKVYP:TVE:XGXL, ASAAPXX:VPE:SSLS:LKVYP:TVE:XKXS, ASASPXX:VPE:SSLS:LKVYP:TVE:XKXS, NDEGLEX:VPE:SSLS:LKVYP:TVE:KXEXR, NDEGLEX:VPE:SSLS:LKVYP:TVE:QXEXR, SSVKXQP:VPE:SSLS:LKVYP:TVE:LEXAXA, RNVQXRP:VPE:SSLS:LKVYP:TVE:LAXKXE, KIPKAXX:VPT:SSLS:LKVYP:VVE:GXGXR, SIPKAXX:VPT:SSLS:LKVYP:VVE:GXGXR, HVTKPTX:APT:SSLS:LKVYP:VVR:SXGXH, YVPKPXX:APT:SSLS:LKVYP:VVR:SXGXH, TVPKPXX:APT:SSLS:LKVYP:VVR:AXGXH, AVPKAXX:APT:SSLS:LKVYP:VVK:AXGXH, KVGKAXX:VPT:SSLS:LKVYP:VAE:XGXR, KASKAXX:VPT:SSLS:LKVYP:AVS:EXGXR, GSAGPXX:TPT:SSLS:LKVYP:VVD:RXGXS, AAPASXX:VPA:SSLS:LKVYP:VVE:AXGXR, STPPTXX:VPT:SSLS:LKVYP:VVE:SXGXR, HVPKPXX:APT:SSLS:LKVYP:VVR:SXGXH, RVPSTXX:APV:SSLS:LKVYP:VEE:XGXL, ASAAPXX:VPQ:SSLS:LKVYP:VRS:XKXS, ASASPXX:VSQ:SSLS:LKVYP:VKS:XKXS, ASASPXX:VPQ:SSLS:LKVYP:VKS:XKXS, NDEGLEX:VPT:SSLS:LKVYP:QHN:KXEXR, NDEGLEX:VPT:SSLS:LKVYP:EHS:QXEXR, SSVKXQP:SRV:SSLS:LKVYP:EEH:LEXAXA, RNVQXRP:TQV:SSLS:LKVYP:EDH:LAXKXE, KIPKAXX:VPT:SAIS:LKNYQ:VVE:GXGXR, KIPKAXX:APT:NAIS:LKKYR:VVR:GXGXR, GIPEPXX:APT:NAIS:LKKYR:VVR:SXAXR, SIPKAXX:APT:NAIS:LKKYR:VVR:GXGXR, YVPKPXX:APT:NAIS:LKKYR:VVR:SXGXH, TVPKPXX:APT:NAIS:LKKYR:VVR:AXGXH, AVPKAXX:APT:NAIS:LKKYR:VVR:AXGXH, KVGKAXX:APT:NAIS:LKKYR:VVR:XGXR, KASKAXX:APT:NAIS:LKKYR:VVR:EXGXR, GSAGPXX:APT:NAIS:LKKYR:VVR:RXGXS, AAPASXX:APT:NAIS:LKKYR:VVR:AXGXR, STPPTXX:APT:NAIS:LKKYR:VVR:SXGXR, HVPKPXX:APT:NAIS:LKKYR:VVR:SXGXH, RVPSTXX:APT:NAIS:LKKYR:VVR:XGXL, ASAAPXX:APT:NAIS:LKKYR:VVR:XKXS, ASASPXX:APT:NAIS:LKKYR:VVR:XKXS, NDEGLEX:APT:NAIS:LKKYR:VVR:KXEXR, NDEGLEX:APT:NAIS:LKKYR:VVR:QXEXR, SSVKXQP:APT:NAIS:LKKYR:VVR:LEXAXA, RNVQXRP:APT:NAIS:LKKYR:VVR:LAXKXE, KIPKAXX:VPT:NAIS:LKKYR:VVE:GXGXR, GIPEPXX:VPE:NAIS:LKKYR:TVE:SXAXR, SIPKAXX:VPT:NAIS:LKKYR:VVE:GXGXR, AVPKAXX:APT:NAIS:LKKYR:VVK:AXGXH, KVGKAXX:VPT:NAIS:LKKYR:VAE:XGXR, KASKAXX:VPT:NAIS:LKKYR:AVS:EXGXR, GSAGPXX:TPT:NAIS:LKKYR:VVD:RXGXS, AAPASXX:VPA:NAIS:LKKYR:VVE:AXGXR, STPPTXX:VPT:NAIS:LKKYR:VVE:SXGXR, RVPSTXX:APV:NAIS:LKKYR:VEE:XGXL, ASAAPXX:VPQ:NAIS:LKKYR:VRS:XKXS, ASASPXX:VSQ:NAIS:LKKYR:VKS:XKXS, ASASPXX:VPQ:NAIS:LKKYR:VKS:XKXS, NDEGLEX:VPT:NAIS:LKKYR:QHN:KXEXR, NDEGLEX:VPT:NAIS:LKKYR:EHS:QXEXR, SSVKXQP:SRV:NAIS:LKKYR:EEH:LEXAXA, RNVQXRP:TQV:NAIS:LKKYR:EDH:LAXKXE, HVTKPTX:APT:NAIS:LKKYR:VVR:SXGXH, KIPKAXX:APT:SATS:LRKHR:VVK:GXGXR, GIPEPXX:APT:SATS:LRKHR:VVK:SXAXR, SIPKAXX:APT:SATS:LRKHR:VVK:GXGXR, HVTKPTX:APT:SATS:LRKHR:VVK:SXGXH, YVPKPXX:APT:SATS:LRKHR:VVK:SXGXH, TVPKPXX:APT:SATS:LRKHR:VVK:AXGXH, KVGKAXX:APT:SATS:LRKHR:VVK:XGXR, KASKAXX:APT:SATS:LRKHR:VVK:EXGXR, GSAGPXX:APT:SATS:LRKHR:VVK:RXGXS, AAPASXX:APT:SATS:LRKHR:VVK:AXGXR, STPPTXX:APT:SATS:LRKHR:VVK:SXGXR, HVPKPXX:APT:SATS:LRKHR:VVK:SXGXH, RVPSTXX:APT:SATS:LRKHR:VVK:XGXL, ASAAPXX:APT:SATS:LRKHR:VVK:XKXS, ASASPXX:APT:SATS:LRKHR:VVK:XKXS, NDEGLEX:APT:SATS:LRKHR:VVK:KXEXR, NDEGLEX:APT:SATS:LRKHR:VVK:QXEXR, SSVKXQP:APT:SATS:LRKHR:VVK:LEXAXA, RNVQXRP:APT:SATS:LRKHR:VVK:LAXKXE, KIPKAXX:VPT:SATS:LRKHR:VVE:GXGXR, GIPEPXX:VPE:SATS:LRKHR:TVE:SXAXR, SIPKAXX:VPT:SATS:LRKHR:VVE:GXGXR, HVTKPTX:APT:SATS:LRKHR:VVR:SXGXH, YVPKPXX:APT:SATS:LRKHR:VVR:SXGXH, TVPKPXX:APT:SATS:LRKHR:VVR:AXGXH, KVGKAXX:VPT:SATS:LRKHR:VAE:XGXR, KASKAXX:VPT:SATS:LRKHR:AVS:EXGXR, GSAGPXX:TPT:SATS:LRKHR:VVD:RXGXS, AAPASXX:VPA:SATS:LRKHR:VVE:AXGXR, STPPTXX:VPT:SATS:LRKHR:VVE:SXGXR, HVPKPXX:APT:SATS:LRKHR:VVR:SXGXH, RVPSTXX:APV:SATS:LRKHR:VEE:XGXL, ASAAPXX:VPQ:SATS:LRKHR:VRS:XKXS, ASASPXX:VSQ:SATS:LRKHR:VKS:XKXS, ASASPXX:VPQ:SATS:LRKHR:VKS:XKXS, NDEGLEX:VPT:SATS:LRKHR:QHN:KXEXR, NDEGLEX:VPT:SATS:LRKHR:EHS:QXEXR, SSVKXQP:SRV:SATS:LRKHR:EEH:LEXAXA, RNVQXRP:TQV:SATS:LRKHR:EDH:LAXKXE, KIPKAXX:VPT:SPIS:LKYHY:VAE:GXGXR, GIPEPXX:VPT:SPIS:LKYHY:VAE:SXAXR, SIPKAXX:VPT:SPIS:LKYHY:VAE:GXGXR, HVTKPTX:VPT:SPIS:LKYHY:VAE:SXGXH, YVPKPXX:VPT:SPIS:LKYHY:VAE:SXGXH, TVPKPXX:VPT:SPIS:LKYHY:VAE:AXGXH, AVPKAXX:VPT:SPIS:LKYHY:VAE:AXGXH, KASKAXX:VPT:SPIS:LKYHY:VAE:EXGXR, GSAGPXX:VPT:SPIS:LKYHY:VAE:RXGXS, AAPASXX:VPT:SPIS:LKYHY:VAE:AXGXR, STPPTXX:VPT:SPIS:LKYHY:VAE:SXGXR, HVPKPXX:VPT:SPIS:LKYHY:VAE:SXGXH, RVPSTXX:VPT:SPIS:LKYHY:VAE:XGXL, ASAAPXX:VPT:SPIS:LKYHY:VAE:XKXS, ASASPXX:VPT:SPIS:LKYHY:VAE:XKXS, NDEGLEX:VPT:SPIS:LKYHY:VAE:KXEXR, NDEGLEX:VPT:SPIS:LKYHY:VAE:QXEXR, SSVKXQP:VPT:SPIS:LKYHY:VAE:LEXAXA, RNVQXRP:VPT:SPIS:LKYHY:VAE:LAXKXE, KIPKAXX:VPT:SPIS:LKYHY:VVE:GXGXR, GIPEPXX:VPE:SPIS:LKYHY:TVE:SXAXR, SIPKAXX:VPT:SPIS:LKYHY:VVE:GXGXR, HVTKPTX:APT:SPIS:LKYHY:VVR:SXGXH, YVPKPXX:APT:SPIS:LKYHY:VVR:SXGXH, TVPKPXX:APT:SPIS:LKYHY:VVR:AXGXH, AVPKAXX:APT:SPIS:LKYHY:VVK:AXGXH, KASKAXX:VPT:SPIS:LKYHY:AVS:EXGXR, GSAGPXX:TPT:SPIS:LKYHY:VVD:RXGXS, AAPASXX:VPA:SPIS:LKYHY:VVE:AXGXR, STPPTXX:VPT:SPIS:LKYHY:VVE:SXGXR, HVPKPXX:APT:SPIS:LKYHY:VVR:SXGXH, RVPSTXX:APV:SPIS:LKYHY:VEE:XGXL, ASAAPXX:VPQ:SPIS:LKYHY:VRS:XKXS, ASASPXX:VSQ:SPIS:LKYHY:VKS:XKXS, ASASPXX:VPQ:SPIS:LKYHY:VKS:XKXS, NDEGLEX:VPT:SPIS:LKYHY:QHN:KXEXR, NDEGLEX:VPT:SPIS:LKYHY:EHS:QXEXR, SSVKXQP:SRV:SPIS:LKYHY:EEH:LEXAXA, RNVQXRP:TQV:SPIS:LKYHY:EDH:LAXKXE, KIPKAXX:VPT:EPIS:KFKYE:AVS:GXGXR, GIPEPXX:VPT:EPIS:KFKYE:AVS:SXAXR, SIPKAXX:VPT:EPIS:KFKYE:AVS:GXGXR, HVTKPTX:VPT:EPIS:KFKYE:AVS:SXGXH, YVPKPXX:VPT:EPIS:KFKYE:AVS:SXGXH, TVPKPXX:VPT:EPIS:KFKYE:AVS:AXGXH, AVPKAXX:VPT:EPIS:KFKYE:AVS:AXGXH, KVGKAXX:VPT:EPIS:KFKYE:AVS:XGXR, GSAGPXX:VPT:EPIS:KFKYE:AVS:RXGXS, AAPASXX:VPT:EPIS:KFKYE:AVS:AXGXR, STPPTXX:VPT:EPIS:KFKYE:AVS:SXGXR, HVPKPXX:VPT:EPIS:KFKYE:AVS:SXGXH, RVPSTXX:VPT:EPIS:KFKYE:AVS:XGXL, ASAAPXX:VPT:EPIS:KFKYE:AVS:XKXS, ASASPXX:VPT:EPIS:KFKYE:AVS:XKXS, NDEGLEX:VPT:EPIS:KFKYE:AVS:KXEXR, NDEGLEX:VPT:EPIS:KFKYE:AVS:QXEXR, SSVKXQP:VPT:EPIS:KFKYE:AVS:LEXAXA, RNVQXRP:VPT:EPIS:KFKYE:AVS:LAXKXE, KIPKAXX:VPT:EPIS:KFKYE:VVE:GXGXR, GIPEPXX:VPE:EPIS:KFKYE:TVE:SXAXR, SIPKAXX:VPT:EPIS:KFKYE:VVE:GXGXR, HVTKPTX:APT:EPIS:KFKYE:VVR:SXGXH, YVPKPXX:APT:EPIS:KFKYE:VVR:SXGXH, TVPKPXX:APT:EPIS:KFKYE:VVR:AXGXH, AVPKAXX:APT:EPIS:KFKYE:VVK:AXGXH, KVGKAXX:VPT:EPIS:KFKYE:VAE:XGXR, GSAGPXX:TPT:EPIS:KFKYE:VVD:RXGXS, AAPASXX:VPA:EPIS:KFKYE:VVE:AXGXR, STPPTXX:VPT:EPIS:KFKYE:VVE:SXGXR, HVPKPXX:APT:EPIS:KFKYE:VVR:SXGXH, RVPSTXX:APV:EPIS:KFKYE:VEE:XGXL, ASAAPXX:VPQ:EPIS:KFKYE:VRS:XKXS, ASASPXX:VSQ:EPIS:KFKYE:VKS:XKXS, ASASPXX:VPQ:EPIS:KFKYE:VKS:XKXS, NDEGLEX:VPT:EPIS:KFKYE:QHN:KXEXR, NDEGLEX:VPT:EPIS:KFKYE:EHS:QXEXR, SSVKXQP:SRV:EPIS:KFKYE:EEH:LEXAXA, RNVQXRP:TQV:EPIS:KFKYE:EDH:LAXKXE, KIPKAXX:TPT:SPIN:YGKIP:VVD:GXGXR, GIPEPXX:TPT:SPIN:YGKIP:VVD:SXAXR, SIPKAXX:TPT:SPIN:YGKIP:VVD:GXGXR, HVTKPTX:TPT:SPIN:YGKIP:VVD:SXGXH, YVPKPXX:TPT:SPIN:YGKIP:VVD:SXGXH, TVPKPXX:TPT:SPIN:YGKIP:VVD:AXGXH, AVPKAXX:TPT:SPIN:YGKIP:VVD:AXGXH, KVGKAXX:TPT:SPIN:YGKIP:VVD:XGXR, KASKAXX:TPT:SPIN:YGKIP:VVD:EXGXR, AAPASXX:TPT:SPIN:YGKIP:VVD:AXGXR, STPPTXX:TPT:SPIN:YGKIP:VVD:SXGXR, HVPKPXX:TPT:SPIN:YGKIP:VVD:SXGXH, RVPSTXX:TPT:SPIN:YGKIP:VVD:XGXL, ASAAPXX:TPT:SPIN:YGKIP:VVD:XKXS, ASASPXX:TPT:SPIN:YGKIP:VVD:XKXS, NDEGLEX:TPT:SPIN:YGKIP:VVD:KXEXR, NDEGLEX:TPT:SPIN:YGKIP:VVD:QXEXR, SSVKXQP:TPT:SPIN:YGKIP:VVD:LEXAXA, RNVQXRP:TPT:SPIN:YGKIP:VVD:LAXKXE, KIPKAXX:VPT:SPIN:YGKIP:VVE:GXGXR, GIPEPXX:VPE:SPIN:YGKIP:TVE:SXAXR, SIPKAXX:VPT:SPIN:YGKIP:VVE:GXGXR, HVTKPTX:APT:SPIN:YGKIP:VVR:SXGXH, YVPKPXX:APT:SPIN:YGKIP:VVR:SXGXH, TVPKPXX:APT:SPIN:YGKIP:VVR:AXGXH, AVPKAXX:APT:SPIN:YGKIP:VVK:AXGXH, KVGKAXX:VPT:SPIN:YGKIP:VAE:XGXR, KASKAXX:VPT:SPIN:YGKIP:AVS:EXGXR, AAPASXX:VPA:SPIN:YGKIP:VVE:AXGXR, STPPTXX:VPT:SPIN:YGKIP:VVE:SXGXR, HVPKPXX:APT:SPIN:YGKIP:VVR:SXGXH, RVPSTXX:APV:SPIN:YGKIP:VEE:XGXL, ASAAPXX:VPQ:SPIN:YGKIP:VRS:XKXS, ASASPXX:VSQ:SPIN:YGKIP:VKS:XKXS, ASASPXX:VPQ:SPIN:YGKIP:VKS:XKXS, NDEGLEX:VPT:SPIN:YGKIP:QHN:KXEXR, NDEGLEX:VPT:SPIN:YGKIP:EHS:QXEXR, SSVKXQP:SRV:SPIN:YGKIP:EEH:LEXAXA, RNVQXRP:TQV:SPIN:YGKIP:EDH:LAXKXE, KIPKAXX:VPA:SPIS:YKQYE:VVE:GXGXR, GIPEPXX:VPA:SPIS:YKQYE:VVE:SXAXR, SIPKAXX:VPA:SPIS:YKQYE:VVE:GXGXR, HVTKPTX:VPA:SPIS:YKQYE:VVE:SXGXH, YVPKPXX:VPA:SPIS:YKQYE:VVE:SXGXH, TVPKPXX:VPA:SPIS:YKQYE:VVE:AXGXH, AVPKAXX:VPA:SPIS:YKQYE:VVE:AXGXH, KVGKAXX:VPA:SPIS:YKQYE:VVE:XGXR, KASKAXX:VPA:SPIS:YKQYE:VVE:EXGXR, GSAGPXX:VPA:SPIS:YKQYE:VVE:RXGXS, STPPTXX:VPA:SPIS:YKQYE:VVE:SXGXR, HVPKPXX:VPA:SPIS:YKQYE:VVE:SXGXH, RVPSTXX:VPA:SPIS:YKQYE:VVE:XGXL, ASAAPXX:VPA:SPIS:YKQYE:VVE:XKXS, ASASPXX:VPA:SPIS:YKQYE:VVE:XKXS, NDEGLEX:VPA:SPIS:YKQYE:VVE:KXEXR, NDEGLEX:VPA:SPIS:YKQYE:VVE:QXEXR, SSVKXQP:VPA:SPIS:YKQYE:VVE:LEXAXA, RNVQXRP:VPA:SPIS:YKQYE:VVE:LAXKXE, KIPKAXX:VPT:SPIS:YKQYE:VVE:GXGXR, GIPEPXX:VPE:SPIS:YKQYE:TVE:SXAXR, SIPKAXX:VPT:SPIS:YKQYE:VVE:GXGXR, HVTKPTX:APT:SPIS:YKQYE:VVR:SXGXH, YVPKPXX:APT:SPIS:YKQYE:VVR:SXGXH, TVPKPXX:APT:SPIS:YKQYE:VVR:AXGXH, AVPKAXX:APT:SPIS:YKQYE:VVK:AXGXH, KVGKAXX:VPT:SPIS:YKQYE:VAE:XGXR, KASKAXX:VPT:SPIS:YKQYE:AVS:EXGXR, GSAGPXX:TPT:SPIS:YKQYE:VVD:RXGXS, STPPTXX:VPT:SPIS:YKQYE:VVE:SXGXR, HVPKPXX:APT:SPIS:YKQYE:VVR:SXGXH, RVPSTXX:APV:SPIS:YKQYE:VEE:XGXL, ASAAPXX:VPQ:SPIS:YKQYE:VRS:XKXS, ASASPXX:VSQ:SPIS:YKQYE:VKS:XKXS, ASASPXX:VPQ:SPIS:YKQYE:VKS:XKXS, NDEGLEX:VPT:SPIS:YKQYE:QHN:KXEXR, NDEGLEX:VPT:SPIS:YKQYE:EHS:QXEXR, SSVKXQP:SRV:SPIS:YKQYE:EEH:LEXAXA, RNVQXRP:TQV:SPIS:YKQYE:EDH:LAXKXE, GIPEPXX:VPT:SPIS:YKQYE:VVE:SXAXR, HVTKPTX:VPT:SPIS:YKQYE:VVE:SXGXH, YVPKPXX:VPT:SPIS:YKQYE:VVE:SXGXH, TVPKPXX:VPT:SPIS:YKQYE:VVE:AXGXH, AVPKAXX:VPT:SPIS:YKQYE:VVE:AXGXH, KVGKAXX:VPT:SPIS:YKQYE:VVE:XGXR, KASKAXX:VPT:SPIS:YKQYE:VVE:EXGXR, GSAGPXX:VPT:SPIS:YKQYE:VVE:RXGXS, AAPASXX:VPT:SPIS:YKQYE:VVE:AXGXR, HVPKPXX:VPT:SPIS:YKQYE:VVE:SXGXH, RVPSTXX:VPT:SPIS:YKQYE:VVE:XGXL, ASAAPXX:VPT:SPIS:YKQYE:VVE:XKXS, ASASPXX:VPT:SPIS:YKQYE:VVE:XKXS, NDEGLEX:VPT:SPIS:YKQYE:VVE:KXEXR, NDEGLEX:VPT:SPIS:YKQYE:VVE:QXEXR, SSVKXQP:VPT:SPIS:YKQYE:VVE:LEXAXA, RNVQXRP:VPT:SPIS:YKQYE:VVE:LAXKXE, AAPASXX:VPA:SPIS:YKQYE:VVE:AXGXR, KIPKAXX:APV:KPLS:DHHKD:VEE:GXGXR, GIPEPXX:APV:KPLS:DHHKD:VEE:SXAXR, SIPKAXX:APV:KPLS:DHHKD:VEE:GXGXR, HVTKPTX:APV:KPLS:DHHKD:VEE:SXGXH, YVPKPXX:APV:KPLS:DHHKD:VEE:SXGXH, TVPKPXX:APV:KPLS:DHHKD:VEE:AXGXH, AVPKAXX:APV:KPLS:DHHKD:VEE:AXGXH, KVGKAXX:APV:KPLS:DHHKD:VEE:XGXR, KASKAXX:APV:KPLS:DHHKD:VEE:EXGXR, GSAGPXX:APV:KPLS:DHHKD:VEE:RXGXS, AAPASXX:APV:KPLS:DHHKD:VEE:AXGXR, STPPTXX:APV:KPLS:DHHKD:VEE:SXGXR, HVPKPXX:APV:KPLS:DHHKD:VEE:SXGXH, ASAAPXX:APV:KPLS:DHHKD:VEE:XKXS, ASASPXX:APV:KPLS:DHHKD:VEE:XKXS, NDEGLEX:APV:KPLS:DHHKD:VEE:KXEXR, NDEGLEX:APV:KPLS:DHHKD:VEE:QXEXR, SSVKXQP:APV:KPLS:DHHKD:VEE:LEXAXA, RNVQXRP:APV:KPLS:DHHKD:VEE:LAXKXE, KIPKAXX:VPT:KPLS:DHHKD:VVE:GXGXR, GIPEPXX:VPE:KPLS:DHHKD:TVE:SXAXR, SIPKAXX:VPT:KPLS:DHHKD:VVE:GXGXR, HVTKPTX:APT:KPLS:DHHKD:VVR:SXGXH, YVPKPXX:APT:KPLS:DHHKD:VVR:SXGXH, TVPKPXX:APT:KPLS:DHHKD:VVR:AXGXH, AVPKAXX:APT:KPLS:DHHKD:VVK:AXGXH, KVGKAXX:VPT:KPLS:DHHKD:VAE:XGXR, KASKAXX:VPT:KPLS:DHHKD:AVS:EXGXR, GSAGPXX:TPT:KPLS:DHHKD:VVD:RXGXS, AAPASXX:VPA:KPLS:DHHKD:VVE:AXGXR, STPPTXX:VPT:KPLS:DHHKD:VVE:SXGXR, HVPKPXX:APT:KPLS:DHHKD:VVR:SXGXH, ASAAPXX:VPQ:KPLS:DHHKD:VRS:XKXS, ASASPXX:VSQ:KPLS:DHHKD:VKS:XKXS, ASASPXX:VPQ:KPLS:DHHKD:VKS:XKXS, NDEGLEX:VPT:KPLS:DHHKD:QHN:KXEXR, NDEGLEX:VPT:KPLS:DHHKD:EHS:QXEXR, SSVKXQP:SRV:KPLS:DHHKD:EEH:LEXAXA, RNVQXRP:TQV:KPLS:DHHKD:EDH:LAXKXE, KIPKAXX:VPQ:EPLP:EQLSN:VRS:GXGXR, GIPEPXX:VPQ:EPLP:EQLSN:VRS:SXAXR, SIPKAXX:VPQ:EPLP:EQLSN:VRS:GXGXR, HVTKPTX:VPQ:EPLP:EQLSN:VRS:SXGXH, YVPKPXX:VPQ:EPLP:EQLSN:VRS:SXGXH, TVPKPXX:VPQ:EPLP:EQLSN:VRS:AXGXH, AVPKAXX:VPQ:EPLP:EQLSN:VRS:AXGXH, KVGKAXX:VPQ:EPLP:EQLSN:VRS:XGXR, KASKAXX:VPQ:EPLP:EQLSN:VRS:EXGXR, GSAGPXX:VPQ:EPLP:EQLSN:VRS:RXGXS, AAPASXX:VPQ:EPLP:EQLSN:VRS:AXGXR, STPPTXX:VPQ:EPLP:EQLSN:VRS:SXGXR, HVPKPXX:VPQ:EPLP:EQLSN:VRS:SXGXH, RVPSTXX:VPQ:EPLP:EQLSN:VRS:XGXL, ASASPXX:VPQ:EPLP:EQLSN:VRS:XKXS, NDEGLEX:VPQ:EPLP:EQLSN:VRS:KXEXR, NDEGLEX:VPQ:EPLP:EQLSN:VRS:QXEXR, SSVKXQP:VPQ:EPLP:EQLSN:VRS:LEXAXA, RNVQXRP:VPQ:EPLP:EQLSN:VRS:LAXKXE, KIPKAXX:VPT:EPLP:EQLSN:VVE:GXGXR, GIPEPXX:VPE:EPLP:EQLSN:TVE:SXAXR, SIPKAXX:VPT:EPLP:EQLSN:VVE:GXGXR, HVTKPTX:APT:EPLP:EQLSN:VVR:SXGXH, YVPKPXX:APT:EPLP:EQLSN:VVR:SXGXH, TVPKPXX:APT:EPLP:EQLSN:VVR:AXGXH, AVPKAXX:APT:EPLP:EQLSN:VVK:AXGXH, KVGKAXX:VPT:EPLP:EQLSN:VAE:XGXR, KASKAXX:VPT:EPLP:EQLSN:AVS:EXGXR, GSAGPXX:TPT:EPLP:EQLSN:VVD:RXGXS, AAPASXX:VPA:EPLP:EQLSN:VVE:AXGXR, STPPTXX:VPT:EPLP:EQLSN:VVE:SXGXR, HVPKPXX:APT:EPLP:EQLSN:VVR:SXGXH, RVPSTXX:APV:EPLP:EQLSN:VEE:XGXL, ASASPXX:VSQ:EPLP:EQLSN:VKS:XKXS, ASASPXX:VPQ:EPLP:EQLSN:VKS:XKXS, NDEGLEX:VPT:EPLP:EQLSN:QHN:KXEXR, NDEGLEX:VPT:EPLP:EQLSN:EHS:QXEXR, SSVKXQP:SRV:EPLP:EQLSN:EEH:LEXAXA, RNVQXRP:TQV:EPLP:EQLSN:EDH:LAXKXE, KIPKAXX:VSQ:EPLT:EQLSN:VKS:GXGXR, GIPEPXX:VSQ:EPLT:EQLSN:VKS:SXAXR, SIPKAXX:VSQ:EPLT:EQLSN:VKS:GXGXR, HVTKPTX:VSQ:EPLT:EQLSN:VKS:SXGXH, YVPKPXX:VSQ:EPLT:EQLSN:VKS:SXGXH, TVPKPXX:VSQ:EPLT:EQLSN:VKS:AXGXH, AVPKAXX:VSQ:EPLT:EQLSN:VKS:AXGXH, KVGKAXX:VSQ:EPLT:EQLSN:VKS:XGXR, KASKAXX:VSQ:EPLT:EQLSN:VKS:EXGXR, GSAGPXX:VSQ:EPLT:EQLSN:VKS:RXGXS, AAPASXX:VSQ:EPLT:EQLSN:VKS:AXGXR, STPPTXX:VSQ:EPLT:EQLSN:VKS:SXGXR, HVPKPXX:VSQ:EPLT:EQLSN:VKS:SXGXH, RVPSTXX:VSQ:EPLT:EQLSN:VKS:XGXL, ASAAPXX:VSQ:EPLT:EQLSN:VKS:XKXS, ASASPXX:VSQ:EPLT:EQLSN:VKS:XKXS, NDEGLEX:VSQ:EPLT:EQLSN:VKS:KXEXR, NDEGLEX:VSQ:EPLT:EQLSN:VKS:QXEXR, SSVKXQP:VSQ:EPLT:EQLSN:VKS:LEXAXA, RNVQXRP:VSQ:EPLT:EQLSN:VKS:LAXKXE, KIPKAXX:VPT:EPLT:EQLSN:VVE:GXGXR, GIPEPXX:VPE:EPLT:EQLSN:TVE:SXAXR, SIPKAXX:VPT:EPLT:EQLSN:VVE:GXGXR, HVTKPTX:APT:EPLT:EQLSN:VVR:SXGXH, YVPKPXX:APT:EPLT:EQLSN:VVR:SXGXH, TVPKPXX:APT:EPLT:EQLSN:VVR:AXGXH, AVPKAXX:APT:EPLT:EQLSN:VVK:AXGXH, KVGKAXX:VPT:EPLT:EQLSN:VAE:XGXR, KASKAXX:VPT:EPLT:EQLSN:AVS:EXGXR, GSAGPXX:TPT:EPLT:EQLSN:VVD:RXGXS, AAPASXX:VPA:EPLT:EQLSN:VVE:AXGXR, STPPTXX:VPT:EPLT:EQLSN:VVE:SXGXR, HVPKPXX:APT:EPLT:EQLSN:VVR:SXGXH, RVPSTXX:APV:EPLT:EQLSN:VEE:XGXL, ASAAPXX:VPQ:EPLT:EQLSN:VRS:XKXS, ASASPXX:VPQ:EPLT:EQLSN:VKS:XKXS, NDEGLEX:VPT:EPLT:EQLSN:QHN:KXEXR, NDEGLEX:VPT:EPLT:EQLSN:EHS:QXEXR, SSVKXQP:SRV:EPLT:EQLSN:EEH:LEXAXA, RNVQXRP:TQV:EPLT:EQLSN:EDH:LAXKXE, KIPKAXX:VPQ:EPLT:EQLSN:VKS:GXGXR, GIPEPXX:VPQ:EPLT:EQLSN:VKS:SXAXR, SIPKAXX:VPQ:EPLT:EQLSN:VKS:GXGXR, HVTKPTX:VPQ:EPLT:EQLSN:VKS:SXGXH, YVPKPXX:VPQ:EPLT:EQLSN:VKS:SXGXH, TVPKPXX:VPQ:EPLT:EQLSN:VKS:AXGXH, AVPKAXX:VPQ:EPLT:EQLSN:VKS:AXGXH, KVGKAXX:VPQ:EPLT:EQLSN:VKS:XGXR, KASKAXX:VPQ:EPLT:EQLSN:VKS:EXGXR, GSAGPXX:VPQ:EPLT:EQLSN:VKS:RXGXS, AAPASXX:VPQ:EPLT:EQLSN:VKS:AXGXR, STPPTXX:VPQ:EPLT:EQLSN:VKS:SXGXR, HVPKPXX:VPQ:EPLT:EQLSN:VKS:SXGXH, RVPSTXX:VPQ:EPLT:EQLSN:VKS:XGXL, ASAAPXX:VPQ:EPLT:EQLSN:VKS:XKXS, NDEGLEX:VPQ:EPLT:EQLSN:VKS:KXEXR, NDEGLEX:VPQ:EPLT:EQLSN:VKS:QXEXR, SSVKXQP:VPQ:EPLT:EQLSN:VKS:LEXAXA, RNVQXRP:VPQ:EPLT:EQLSN:VKS:LAXKXE, KIPKAXX:VPT:SNIT:IGEMS:QHN:GXGXR, GIPEPXX:VPT:SNIT:IGEMS:QHN:SXAXR, SIPKAXX:VPT:SNIT:IGEMS:QHN:GXGXR, HVTKPTX:VPT:SNIT:IGEMS:QHN:SXGXH, YVPKPXX:VPT:SNIT:IGEMS:QHN:SXGXH, TVPKPXX:VPT:SNIT:IGEMS:QHN:AXGXH, AVPKAXX:VPT:SNIT:IGEMS:QHN:AXGXH, KVGKAXX:VPT:SNIT:IGEMS:QHN:XGXR, KASKAXX:VPT:SNIT:IGEMS:QHN:EXGXR, GSAGPXX:VPT:SNIT:IGEMS:QHN:RXGXS, AAPASXX:VPT:SNIT:IGEMS:QHN:AXGXR, STPPTXX:VPT:SNIT:IGEMS:QHN:SXGXR, HVPKPXX:VPT:SNIT:IGEMS:QHN:SXGXH, RVPSTXX:VPT:SNIT:IGEMS:QHN:XGXL, ASAAPXX:VPT:SNIT:IGEMS:QHN:XKXS, ASASPXX:VPT:SNIT:IGEMS:QHN:XKXS, NDEGLEX:VPT:SNIT:IGEMS:QHN:QXEXR, NDEGLEX:VPT:SNIT:IGEMS:QHN:KXEXR, SSVKXQP:VPT:SNIT:IGEMS:QHN:LEXAXA, RNVQXRP:VPT:SNIT:IGEMS:QHN:LAXKXE, KIPKAXX:VPT:SNIT:IGEMS:VVE:GXGXR, GIPEPXX:VPE:SNIT:IGEMS:TVE:SXAXR, SIPKAXX:VPT:SNIT:IGEMS:VVE:GXGXR, HVTKPTX:APT:SNIT:IGEMS:VVR:SXGXH, YVPKPXX:APT:SNIT:IGEMS:VVR:SXGXH, TVPKPXX:APT:SNIT:IGEMS:VVR:AXGXH, AVPKAXX:APT:SNIT:IGEMS:VVK:AXGXH, KVGKAXX:VPT:SNIT:IGEMS:VAE:XGXR, KASKAXX:VPT:SNIT:IGEMS:AVS:EXGXR, GSAGPXX:TPT:SNIT:IGEMS:VVD:RXGXS, AAPASXX:VPA:SNIT:IGEMS:VVE:AXGXR, STPPTXX:VPT:SNIT:IGEMS:VVE:SXGXR, HVPKPXX:APT:SNIT:IGEMS:VVR:SXGXH, RVPSTXX:APV:SNIT:IGEMS:VEE:XGXL, ASAAPXX:VPQ:SNIT:IGEMS:VRS:XKXS, ASASPXX:VSQ:SNIT:IGEMS:VKS:XKXS, ASASPXX:VPQ:SNIT:IGEMS:VKS:XKXS, NDEGLEX:VPT:SNIT:IGEMS:EHS:QXEXR, SSVKXQP:SRV:SNIT:IGEMS:EEH:LEXAXA, RNVQXRP:TQV:SNIT:IGEMS:EDH:LAXKXE, KIPKAXX:VPT:SNIT:LGEMS:EHS:GXGXR, GIPEPXX:VPT:SNIT:LGEMS:EHS:SXAXR, SIPKAXX:VPT:SNIT:LGEMS:EHS:GXGXR, HVTKPTX:VPT:SNIT:LGEMS:EHS:SXGXH, YVPKPXX:VPT:SNIT:LGEMS:EHS:SXGXH, TVPKPXX:VPT:SNIT:LGEMS:EHS:AXGXH, AVPKAXX:VPT:SNIT:LGEMS:EHS:AXGXH, KVGKAXX:VPT:SNIT:LGEMS:EHS:XGXR, KASKAXX:VPT:SNIT:LGEMS:EHS:EXGXR, GSAGPXX:VPT:SNIT:LGEMS:EHS:RXGXS, AAPASXX:VPT:SNIT:LGEMS:EHS:AXGXR, STPPTXX:VPT:SNIT:LGEMS:EHS:SXGXR, HVPKPXX:VPT:SNIT:LGEMS:EHS:SXGXH, RVPSTXX:VPT:SNIT:LGEMS:EHS:XGXL, ASAAPXX:VPT:SNIT:LGEMS:EHS:XKXS, ASASPXX:VPT:SNIT:LGEMS:EHS:XKXS, NDEGLEX:VPT:SNIT:LGEMS:EHS:KXEXR, SSVKXQP:VPT:SNIT:LGEMS:EHS:LEXAXA, RNVQXRP:VPT:SNIT:LGEMS:EHS:LAXKXE, KIPKAXX:VPT:SNIT:LGEMS:VVE:GXGXR, GIPEPXX:VPE:SNIT:LGEMS:TVE:SXAXR, SIPKAXX:VPT:SNIT:LGEMS:VVE:GXGXR, HVTKPTX:APT:SNIT:LGEMS:VVR:SXGXH, YVPKPXX:APT:SNIT:LGEMS:VVR:SXGXH, TVPKPXX:APT:SNIT:LGEMS:VVR:AXGXH, AVPKAXX:APT:SNIT:LGEMS:VVK:AXGXH, KVGKAXX:VPT:SNIT:LGEMS:VAE:XGXR, KASKAXX:VPT:SNIT:LGEMS:AVS:EXGXR, GSAGPXX:TPT:SNIT:LGEMS:VVD:RXGXS, AAPASXX:VPA:SNIT:LGEMS:VVE:AXGXR, STPPTXX:VPT:SNIT:LGEMS:VVE:SXGXR, HVPKPXX:APT:SNIT:LGEMS:VVR:SXGXH, RVPSTXX:APV:SNIT:LGEMS:VEE:XGXL, ASAAPXX:VPQ:SNIT:LGEMS:VRS:XKXS, ASASPXX:VSQ:SNIT:LGEMS:VKS:XKXS, ASASPXX:VPQ:SNIT:LGEMS:VKS:XKXS, NDEGLEX:VPT:SNIT:LGEMS:QHN:KXEXR, SSVKXQP:SRV:SNIT:LGEMS:EEH:LEXAXA, RNVQXRP:TQV:SNIT:LGEMS:EDH:LAXKXE, KIPKAXX:SRV:RSVK:KEVQV:EEH:GXGXR, GIPEPXX:SRV:RSVK:KEVQV:EEH:SXAXR, SIPKAXX:SRV:RSVK:KEVQV:EEH:GXGXR, HVTKPTX:SRV:RSVK:KEVQV:EEH:SXGXH, YVPKPXX:SRV:RSVK:KEVQV:EEH:SXGXH, TVPKPXX:SRV:RSVK:KEVQV:EEH:AXGXH, AVPKAXX:SRV:RSVK:KEVQV:EEH:AXGXH, KVGKAXX:SRV:RSVK:KEVQV:EEH:XGXR, KASKAXX:SRV:RSVK:KEVQV:EEH:EXGXR, GSAGPXX:SRV:RSVK:KEVQV:EEH:RXGXS, AAPASXX:SRV:RSVK:KEVQV:EEH:AXGXR, STPPTXX:SRV:RSVK:KEVQV:EEH:SXGXR, HVPKPXX:SRV:RSVK:KEVQV:EEH:SXGXH, RVPSTXX:SRV:RSVK:KEVQV:EEH:XGXL, ASAAPXX:SRV:RSVK:KEVQV:EEH:XKXS, ASASPXX:SRV:RSVK:KEVQV:EEH:XKXS, NDEGLEX:SRV:RSVK:KEVQV:EEH:KXEXR, NDEGLEX:SRV:RSVK:KEVQV:EEH:QXEXR, RNVQXRP:SRV:RSVK:KEVQV:EEH:LAXKXE, KIPKAXX:VPT:RSVK:KEVQV:VVE:GXGXR, GIPEPXX:VPE:RSVK:KEVQV:TVE:SXAXR, SIPKAXX:VPT:RSVK:KEVQV:VVE:GXGXR, HVTKPTX:APT:RSVK:KEVQV:WR:SXGXH, YVPKPXX:APT:RSVK:KEVQV:VVR:SXGXH, TVPKPXX:APT:RSVK:KEVQV:VVR:AXGXH, AVPKAXX:APT:RSVK:KEVQV:VVK:AXGXH, KVGKAXX:VPT:RSVK:KEVQV:VAE:XGXR, KASKAXX:VPT:RSVK:KEVQV:AVS:EXGXR, GSAGPXX:TPT:RSVK:KEVQV:VVD:RXGXS, AAPASXX:VPA:RSVK:KEVQV:VVE:AXGXR, STPPTXX:VPT:RSVK:KEVQV:VVE:SXGXR, HVPKPXX:APT:RSVK:KEVQV:VVR:SXGXH, RVPSTXX:APV:RSVK:KEVQV:VEE:XGXL, ASAAPXX:VPQ:RSVK:KEVQV:VRS:XKXS, ASASPXX:VSQ:RSVK:KEVQV:VKS:XKXS, ASASPXX:VPQ:RSVK:KEVQV:VKS:XKXS, NDEGLEX:VPT:RSVK:KEVQV:QHN:KXEXR, NDEGLEX:VPT:RSVK:KEVQV:EHS:QXEXR, RNVQXRP:TQV:RSVK:KEVQV:EDH:LAXKXE, KIPKAXX:TQV:RPVQ:KKATV:EDH:GXGXR, GIPEPXX:TQV:RPVQ:KKATV:EDH:SXAXR, SIPKAXX:TQV:RPVQ:KKATV:EDH:GXGXR, HVTKPTX:TQV:RPVQ:KKATV:EDH:SXGXH, YVPKPXX:TQV:RPVQ:KKATV:EDH:SXGXH, TVPKPXX:TQV:RPVQ:KKATV:EDH:AXGXH, AVPKAXX:TQV:RPVQ:KKATV:EDH:AXGXH, KVGKAXX:TQV:RPVQ:KKATV:EDH:XGXR, KASKAXX:TQV:RPVQ:KKATV:EDH:EXGXR, GSAGPXX:TQV:RPVQ:KKATV:EDH:RXGXS, AAPASXX:TQV:RPVQ:KKATV:EDH:AXGXR, STPPTXX:TQV:RPVQ:KKATV:EDH:SXGXR, HVPKPXX:TQV:RPVQ:KKATV:EDH:SXGXH, RVPSTXX:TQV:RPVQ:KKATV:EDH:XGXL, ASAAPXX:TQV:RPVQ:KKATV:EDH:XKXS, ASASPXX:TQV:RPVQ:KKATV:EDH:XKXS, NDEGLEX:TQV:RPVQ:KKATV:EDH:KXEXR, NDEGLEX:TQV:RPVQ:KKATV:EDH:QXEXR, SSVKXQP:TQV:RPVQ:KKATV:EDH:LEXAXA, KIPKAXX:VPT:RPVQ:KKATV:VVE:GXGXR, GIPEPXX:VPE:RPVQ:KKATV:TVE:SXAXR, SIPKAXX:VPT:RPVQ:KKATV:VVE:GXGXR, HVTKPTX:APT:RPVQ:KKATV:VVR:SXGXH, YVPKPXX:APT:RPVQ:KKATV:WVVR:SXGXH, TVPKPXX:APT:RPVQ:KKATV:VVR:AXGXH, AVPKAXX:APT:RPVQ:KKATV:WK:AXGXH, KVGKAXX:VPT:RPVQ:KKATV:VAE:XGXR, KASKAXX:VPT:RPVQ:KKATV:AVS:EXGXR, GSAGPXX:TPT:RPVQ:KKATV:VVD:RXGXS, AAPASXX:VPA:RPVQ:KKATV:VVE:AXGXR, STPPTXX:VPT:RPVQ:KKATV:VVE:SXGXR, HVPKPXX:APT:RPVQ:KKATV:VVR:SXGXH, RVPSTXX:APV:RPVQ:KKATV:VEE:XGXL, ASAAPXX:VPQ:RPVQ:KKATV:VRS:XKXS, ASASPXX:VSQ:RPVQ:KKATV:VKS:XKXS, ASASPXX:VPQ:RPVQ:KKATV:VKS:XKXS, NDEGLEX:VPT:RPVQ:KKATV:QHN:KXEXR, NDEGLEX:VPT:RPVQ:KKATV:EHS:QXEXR and SSVKXQP:SRV:RPVQ:KKATV:EEH:LEXAXA. More particularly, the hexaplet PEP7:PEP3:PEP1:PEP2:PEP4:PEP8 is selected from the group consisting of GIPEPXX:VPT:SAIS:LKNYQ:VVE:SXAXR, HVTKPTX:VPT:SAIS:LKNYQ:VVE:SXGXH, YVPKPXX:VPT:SAIS:LKNYQ:VVE:SXGXH, TVPKPXX:VPT:SAIS:LKNYQ:VVE:AXGXH, AVPKAXX:VPT:SAIS:LKNYQ:VVE:AXGXH, KVG KAXX:VPT:SAIS:LKNYQ:VVE:XGXR, KASKAXX:VPT:SAIS:LKNYQ:VVE:EXGXR, GSAGPXX:VPT:SAIS:LKNYQ:VVE:RXGXS, AAPASXX:VPT:SAIS:LKNYQ:VVE:AXGXR, STPPTXX:VPT:SAIS:LKNYQ:VVE:SXGXR, HVPKPXX:VPT:SAIS:LKNYQ:VVE:SXGXH, RVPSTXX:VPT:SAIS:LKNYQ:VVE:XGXL, ASAAPXX:VPT:SAIS:LKNYQ:VVE:XKXS, ASASPXX:VPT:SAIS:LKNYQ:VVE:XKXS, GIPEPXX:VPE:SAIS:LKNYQ:TVE:SXAXR, HVTKPTX:APT:SAIS:LKNYQ:VVR:SXGXH, YVPKPXX:APT:SAIS:LKNYQ:VVR:SXGXH, TVPKPXX:APT:SAIS:LKNYQ:VVR:AXGXH, AVPKAXX:APT:SAIS:LKNYQ:VVK:AXGXH, KVGKAXX:VPT:SAIS:LKNYQ:VAE:XGXR, KASKAXX:VPT:SAIS:LKNYQ:AVS:EXGXR, GSAG PXX:TPT:SAIS:LKNYQ:VVD:RXGXS, AAPASXX:VPA:SAIS:LKNYQ:VVE:AXGXR, HVPKPXX:APT:SAIS:LKNYQ:VVR:SXGXH, RVPSTXX:APV:SAIS:LKNYQ:VEE:XGXL, ASAAPXX:VPQ:SAIS:LKNYQ:VRS:XKXS, ASASPXX:VSQ:SAIS:LKNYQ:VKS:XKXS, ASASPXX:VPQ:SAIS:LKNYQ:VKS:XKXS, NDEGLEX:VPT:SAIS:LKNYQ:QHN:KXEXR, NDEGLEX:VPT:SAIS:LKNYQ:EHS:QXEXR, SSVKXQP:SRV:SAIS:LKNYQ:EEH:LEXAXA, RNVQXRP:TQV:SAIS:LKNYQ:EDH:LAXKXE, KIPKAXX:VPE:SSLS:LKVYP:TVE:GXGXR, SIPKAXX:VPE:SSLS:LKVYP:TVE:GXGXR, HVTKPTX:VPE:SSLS:LKVYP:TVE:SXGXH, YVPKPXX:VPE:SSLS:LKVYP:TVE:SXGXH, TVPKPXX:VPE:SSLS:LKVYP:TVE:AXGXH, AVPKAXX:VPE:SSLS:LKVYP:TVE:AXGXH, KVGKAXX:VPE:SSLS:LKVYP:TVE:XGXR, KASKAXX:VPE:SSLS:LKVYP:TVE:EXGXR, GSAGPXX:VPE:SSLS:LKVYP:TVE:RXGXS, AAPASXX:VPE:SSLS:LKVYP:TVE:AXGXR, STPPTXX:VPE:SSLS:LKVYP:TVE:SXGXR, HVPKPXX:VPE:SSLS:LKVYP:TVE:SXGXH, RVPSTXX:VPE:SSLS:LKVYP:TVE:XGXL, ASAAPXX:VPE:SSLS:LKVYP:TVE:XKXS, ASASPXX:VPE:SSLS:LKVYP:TVE:XKXS, KIPKAXX:VPT:SSLS:LKVYP:VVE:GXGXR, SIPKAXX:VPT:SSLS:LKVYP:VVE:GXGXR, HVTKPTX:APT:SSLS:LKVYP:VVR:SXGXH, YVPKPXX:APT:SSLS:LKVYP:VVR:SXGXH, TVPKPXX:APT:SSLS:LKVYP:VVR:AXGXH, AVPKAXX:APT:SSLS:LKVYP:VVK:AXGXH, KVGKAXX:VPT:SSLS:LKVYP:VAE:XGXR, KASKAXX:VPT:SSLS:LKVYP:AVS:EXGXR, GSAGPXX:TPT:SSLS:LKVYP:VVD:RXGXS, AAPASXX:VPA:SSLS:LKVYP:VVE:AXGXR, STPPTXX:VPT:SSLS:LKVYP:VVE:SXGXR, HVPKPXX:APT:SSLS:LKVYP:VVR:SXGXH, RVPSTXX:APV:SSLS:LKVYP:VEE:XGXL, ASAAPXX:VPQ:SSLS:LKVYP:VRS:XKXS, ASASPXX:VSQ:SSLS:LKVYP:VKS:XKXS, ASASPXX:VPQ:SSLS:LKVYP:VKS:XKXS, NDEGLEX:VPT:SSLS:LKVYP:QHN:KXEXR, NDEGLEX:VPT:SSLS:LKVYP:EHS:QXEXR, SSVKXQP:SRV:SSLS:LKVYP:EEH:LEXAXA, RNVQXRP:TQV:SSLS:LKVYP:EDH:LAXKXE, KIPKAXX:APT:NAIS:LKKYR:VVR:GXGXR, GIPEPXX:APT:NAIS:LKKYR:VVR:SXAXR, SIPKAXX:APT:NAIS:LKKYR:VVR:GXGXR, AVPKAXX:APT:NAIS:LKKYR:VVR:AXGXH, KVGKAXX:APT:NAIS:LKKYR:VVR:XGXR, KASKAXX:APT:NAIS:LKKYR:VVR:EXGXR, GSAGPXX:APT:NAIS:LKKYR:VVR:RXGXS, AAPASXX:APT:NAIS:LKKYR:VVR:AXGXR, STPPTXX:APT:NAIS:LKKYR:VVR:SXGXR, RVPSTXX:APT:NAIS:LKKYR:VVR:XGXL, ASAAPXX:APT:NAIS:LKKYR:VVR:XKXS, ASASPXX:APT:NAIS:LKKYR:VVR:XKXS, KIPKAXX:VPT:NAIS:LKKYR:VVE:GXGXR, GIPEPXX:VPE:NAIS:LKKYR:TVE:SXAXR, SIPKAXX:VPT:NAIS:LKKYR:VVE:GXGXR, AVPKAXX:APT:NAIS:LKKYR:VVK:AXGXH, KVGKAXX:VPT:NAIS:LKKYR:VAE:XGXR, KASKAXX:VPT:NAIS:LKKYR:AVS:EXGXR, GSAGPXX:TPT:NAIS:LKKYR:VVD:RXGXS, AAPASXX:VPA:NAIS:LKKYR:VVE:AXGXR, STPPTXX:VPT:NAIS:LKKYR:VVE:SXGXR, RVPSTXX:APV:NAIS:LKKYR:VEE:XGXL, ASAAPXX:VPQ:NAIS:LKKYR:VRS:XKXS, ASASPXX:VSQ:NAIS:LKKYR:VKS:XKXS, ASASPXX:VPQ:NAIS:LKKYR:VKS:XKXS, NDEGLEX:VPT:NAIS:LKKYR:QHN:KXEXR, NDEGLEX:VPT:NAIS:LKKYR:EHS:QXEXR, SSVKXQP:SRV:NAIS:LKKYR:EEH:LEXAXA, RNVQXRP:TQV:NAIS:LKKYR:EDH:LAXKXE, KIPKAXX:APT:SATS:LRKHR:VVK:GXGXR, GIPEPXX:APT:SATS:LRKHR:VVK:SXAXR, SIPKAXX:APT:SATS:LRKHR:VVK:GXGXR, HVTKPTX:APT:SATS:LRKHR:VVK:SXGXH, YVPKPXX:APT:SATS:LRKHR:VVK:SXGXH, TVPKPXX:APT:SATS:LRKHR:VVK:AXGXH, KVGKAXX:APT:SATS:LRKHR:WK:XGXR, KASKAXX:APT:SATS:LRKHR:VVK:EXGXR, GSAGPXX:APT:SATS:LRKHR:VVK:RXGXS, AAPASXX:APT:SATS:LRKHR:VVK:AXGXR, STPPTXX:APT:SATS:LRKHR:VVK:SXGXR, HVPKPXX:APT:SATS:LRKHR:VVK:SXGXH, RVPSTXX:APT:SATS:LRKHR:VVK:XGXL, ASAAPXX:APT:SATS:LRKHR:VVK:XKXS, ASASPXX:APT:SATS:LRKHR:VVK:XKXS, KIPKAXX:VPT:SATS:LRKHR:VVE:GXGXR, GIPEPXX:VPE:SATS:LRKHR:TVE:SXAXR, SIPKAXX:VPT:SATS:LRKHR:VVE:GXGXR, HVTKPTX:APT:SATS:LRKHR:VVR:SXGXH, YVPKPXX:APT:SATS:LRKHR:VVR:SXGXH, TVPKPXX:APT:SATS:LRKHR:VVR:AXGXH, KVGKAXX:VPT:SATS:LRKHR:VAE:XGXR, KASKAXX:VPT:SATS:LRKHR:AVS:EXGXR, GSAGPXX:TPT:SATS:LRKHR:VVD:RXGXS, AAPASXX:VPA:SATS:LRKHR:VVE:AXGXR, STPPTXX:VPT:SATS:LRKHR:VVE:SXGXR, HVPKPXX:APT:SATS:LRKHR:VVR:SXGXH, RVPSTXX:APV:SATS:LRKHR:VEE:XGXL, ASAAPXX:VPQ:SATS:LRKHR:VRS:XKXS, ASASPXX:VSQ:SATS:LRKHR:VKS:XKXS, ASASPXX:VPQ:SATS:LRKHR:VKS:XKXS, NDEGLEX:VPT:SATS:LRKHR:QHN:KXEXR, NDEGLEX:VPT:SATS:LRKHR:EHS:QXEXR, SSVKXQP:SRV:SATS:LRKHR:EEH:LEXAXA, RNVQXRP:TQV:SATS:LRKHR:EDH:LAXKXE, KIPKAXX:VPT:SPIS:LKYHY:VAE:GXGXR, GIPEPXX:VPT:SPIS:LKYHY:VAE:SXAXR, SIPKAXX:VPT:SPIS:LKYHY:VAE:GXGXR, HVTKPTX:VPT:SPIS:LKYHY:VAE:SXGXH, YVPKPXX:VPT:SPIS:LKYHY:VAE:SXGXH, TVPKPXX:VPT:SPIS:LKYHY:VAE:AXGXH, AVPKAXX:VPT:SPIS:LKYHY:VAE:AXGXH, KASKAXX:VPT:SPIS:LKYHY:VAE:EXGXR, GSAGPXX:VPT:SPIS:LKYHY:VAE:RXGXS, AAPASXX:VPT:SPIS:LKYHY:VAE:AXGXR, STPPTXX:VPT:SPIS:LKYHY:VAE:SXGXR, HVPKPXX:VPT:SPIS:LKYHY:VAE:SXGXH, RVPSTXX:VPT:SPIS:LKYHY:VAE:XGXL, ASAAPXX:VPT:SPIS:LKYHY:VAE:XKXS, ASASPXX:VPT:SPIS:LKYHY:VAE:XKXS, KIPKAXX:VPT:SPIS:LKYHY:VVE:GXGXR, GIPEPXX:VPE:SPIS:LKYHY:TVE:SXAXR, SIPKAXX:VPT:SPIS:LKYHY:VVE:GXGXR, HVTKPTX:APT:SPIS:LKYHY:VVR:SXGXH, YVPKPXX:APT:SPIS:LKYHY:VVR:SXGXH, TVPKPXX:APT:SPIS:LKYHY:VVR:AXGXH, AVPKAXX:APT:SPIS:LKYHY:VVK:AXGXH, KASKAXX:VPT:SPIS:LKYHY:AVS:EXGXR, GSAGPXX:TPT:SPIS:LKYHY:VVD:RXGXS, AAPASXX:VPA:SPIS:LKYHY:VVE:AXGXR, STPPTXX:VPT:SPIS:LKYHY:VVE:SXGXR, HVPKPXX:APT:SPIS:LKYHY:VVR:SXGXH, RVPSTXX:APV:SPIS:LKYHY:VEE:XGXL, ASAAPXX:VPQ:SPIS:LKYHY:VRS:XKXS, ASASPXX:VSQ:SPIS:LKYHY:VKS:XKXS, ASASPXX:VPQ:SPIS:LKYHY:VKS:XKXS, NDEGLEX:VPT:SPIS:LKYHY:QHN:KXEXR, NDEGLEX:VPT:SPIS:LKYHY:EHS:QXEXR, SSVKXQP:SRV:SPIS:LKYHY:EEH:LEXAXA, RNVQXRP:TQV:SPIS:LKYHY:EDH:LAXKXE, KIPKAXX:VPT:EPIS:KFKYE:AVS:GXGXR, GIPEPXX:VPT:EPIS:KFKYE:AVS:SXAXR, SIPKAXX:VPT:EPIS:KFKYE:AVS:GXGXR, HVTKPTX:VPT:EPIS:KFKYE:AVS:SXGXH, YVPKPXX:VPT:EPIS:KFKYE:AVS:SXGXH, TVPKPXX:VPT:EPIS:KFKYE:AVS:AXGXH, AVPKAXX:VPT:EPIS:KFKYE:AVS:AXGXH, KVGKAXX:VPT:EPIS:KFKYE:AVS:XGXR, GSAGPXX:VPT:EPIS:KFKYE:AVS:RXGXS, AAPASXX:VPT:EPIS:KFKYE:AVS:AXGXR, STPPTXX:VPT:EPIS:KFKYE:AVS:SXGXR, HVPKPXX:VPT:EPIS:KFKYE:AVS:SXGXH, RVPSTXX:VPT:EPIS:KFKYE:AVS:XGXL, ASAAPXX:VPT:EPIS:KFKYE:AVS:XKXS, ASASPXX:VPT:EPIS:KFKYE:AVS:XKXS, KIPKAXX:VPT:EPIS:KFKYE:VVE:GXGXR, GIPEPXX:VPE:EPIS:KFKYE:TVE:SXAXR, SIPKAXX:VPT:EPIS:KFKYE:VVE:GXGXR, HVTKPTX:APT:EPIS:KFKYE:VVR:SXGXH, YVPKPXX:APT:EPIS:KFKYE:VVR:SXGXH, TVPKPXX:APT:EPIS:KFKYE:VVR:AXGXH, AVPKAXX:APT:EPIS:KFKYE:VVK:AXGXH, KVGKAXX:VPT:EPIS:KFKYE:VAE:XGXR, GSAGPXX:TPT:EPIS:KFKYE:VVD:RXGXS, AAPASXX:VPA:EPIS:KFKYE:VVE:AXGXR, STPPTXX:VPT:EPIS:KFKYE:VVE:SXGXR, HVPKPXX:APT:EPIS:KFKYE:VVR:SXGXH, RVPSTXX:APV:EPIS:KFKYE:VEE:XGXL, ASAAPXX:VPQ:EPIS:KFKYE:VRS:XKXS, ASASPXX:VSQ:EPIS:KFKYE:VKS:XKXS, ASASPXX:VPQ:EPIS:KFKYE:VKS:XKXS, NDEGLEX:VPT:EPIS:KFKYE:QHN:KXEXR, NDEGLEX:VPT:EPIS:KFKYE:EHS:QXEXR, SSVKXQP:SRV:EPIS:KFKYE:EEH:LEXAXA, RNVQXRP:TQV:EPIS:KFKYE:EDH:LAXKXE, KIPKAXX:TPT:SPIN:YGKIP:VVD:GXGXR, GIPEPXX:TPT:SPIN:YGKIP:VVD:SXAXR, SIPKAXX:TPT:SPIN:YGKIP:VVD:GXGXR, HVTKPTX:TPT:SPIN:YGKIP:VVD:SXGXH, YVPKPXX:TPT:SPIN:YGKIP:VVD:SXGXH, TVPKPXX:TPT:SPIN:YGKIP:VVD:AXGXH, AVPKAXX:TPT:SPIN:YGKIP:VVD:AXGXH, KVGKAXX:TPT:SPIN:YGKIP:VVD:XGXR, KASKAXX:TPT:SPIN:YGKIP:VVD:EXGXR, AAPASXX:TPT:SPIN:YGKIP:VVD:AXGXR, STPPTXX:TPT:SPIN:YGKIP:VVD:SXGXR, HVPKPXX:TPT:SPIN:YGKIP:VVD:SXGXH, RVPSTXX:TPT:SPIN:YGKIP:VVD:XGXL, ASAAPXX:TPT:SPIN:YGKIP:VVD:XKXS, ASASPXX:TPT:SPIN:YGKIP:VVD:XKXS, KIPKAXX:VPT:SPIN:YGKIP:VVE:GXGXR, GIPEPXX:VPE:SPIN:YGKIP:TVE:SXAXR, SIPKAXX:VPT:SPIN:YGKIP:VVE:GXGXR, HVTKPTX:APT:SPIN:YGKIP:VVR:SXGXH, YVPKPXX:APT:SPIN:YGKIP:VVR:SXGXH, TVPKPXX:APT:SPIN:YGKIP:VVR:AXGXH, AVPKAXX:APT:SPIN:YGKIP:VVK:AXGXH, KVGKAXX:VPT:SPIN:YGKIP:VAE:XGXR, KASKAXX:VPT:SPIN:YGKIP:AVS:EXGXR, AAPASXX:VPA:SPIN:YGKIP:VVE:AXGXR, STPPTXX:VPT:SPIN:YGKIP:VVE:SXGXR, HVPKPXX:APT:SPIN:YGKIP:VVR:SXGXH, RVPSTXX:APV:SPIN:YGKIP:VEE:XGXL, ASAAPXX:VPQ:SPIN:YGKIP:VRS:XKXS, ASASPXX:VSQ:SPIN:YGKIP:VKS:XKXS, ASASPXX:VPQ:SPIN:YGKIP:VKS:XKXS, NDEGLEX:VPT:SPIN:YGKIP:QHN:KXEXR, NDEGLEX:VPT:SPIN:YGKIP:EHS:QXEXR, SSVKXQP:SRV:SPIN:YGKIP:EEH:LEXAXA, RNVQXRP:TQV:SPIN:YGKIP:EDH:LAXKXE, KIPKAXX:VPA:SPIS:YKQYE:VVE:GXGXR, GIPEPXX:VPA:SPIS:YKQYE:VVE:SXAXR, SIPKAXX:VPA:SPIS:YKQYE:VVE:GXGXR, HVTKPTX:VPA:SPIS:YKQYE:VVE:SXGXH, YVPKPXX:VPA:SPIS:YKQYE:VVE:SXGXH, TVPKPXX:VPA:SPIS:YKQYE:VVE:AXGXH, AVPKAXX:VPA:SPIS:YKQYE:VVE:AXGXH, KVGKAXX:VPA:SPIS:YKQYE:VVE:XGXR, KASKAXX:VPA:SPIS:YKQYE:VVE:EXGXR, GSAGPXX:VPA:SPIS:YKQYE:VVE:RXGXS, STPPTXX:VPA:SPIS:YKQYE:VVE:SXGXR, HVPKPXX:VPA:SPIS:YKQYE:VVE:SXGXH, RVPSTXX:VPA:SPIS:YKQYE:VVE:XGXL, ASAAPXX:VPA:SPIS:YKQYE:VVE:XKXS, ASASPXX:VPA:SPIS:YKQYE:VVE:XKXS, KIPKAXX:VPT:SPIS:YKQYE:VVE:GXGXR, GIPEPXX:VPE:SPIS:YKQYE:TVE:SXAXR, SIPKAXX:VPT:SPIS:YKQYE:VVE:GXGXR, HVTKPTX:APT:SPIS:YKQYE:VVR:SXGXH, YVPKPXX:APT:SPIS:YKQYE:VVR:SXGXH, TVPKPXX:APT:SPIS:YKQYE:VVR:AXGXH, AVPKAXX:APT:SPIS:YKQYE:VVK:AXGXH, KVGKAXX:VPT:SPIS:YKQYE:VAE:XGXR, KASKAXX:VPT:SPIS:YKQYE:AVS:EXGXR, GSAGPXX:TPT:SPIS:YKQYE:VVD:RXGXS, STPPTXX:VPT:SPIS:YKQYE:VVE:SXGXR, HVPKPXX:APT:SPIS:YKQYE:VVR:SXGXH, RVPSTXX:APV:SPIS:YKQYE:VEE:XGXL, ASAAPXX:VPQ:SPIS:YKQYE:VRS:XKXS, ASASPXX:VSQ:SPIS:YKQYE:VKS:XKXS, ASASPXX:VPQ:SPIS:YKQYE:VKS:XKXS, NDEGLEX:VPT:SPIS:YKQYE:QHN:KXEXR, NDEGLEX:VPT:SPIS:YKQYE:EHS:QXEXR, SSVKXQP:SRV:SPIS:YKQYE:EEH:LEXAXA, RNVQXRP:TQV:SPIS:YKQYE:EDH:LAXKXE, GIPEPXX:VPT:SPIS:YKQYE:VVE:SXAXR, HVTKPTX:VPT:SPIS:YKQYE:VVE:SXGXH, YVPKPXX:VPT:SPIS:YKQYE:VVE:SXGXH, TVPKPXX:VPT:SPIS:YKQYE:VVE:AXGXH, AVPKAXX:VPT:SPIS:YKQYE:VVE:AXGXH, KVGKAXX:VPT:SPIS:YKQYE:VVE:XGXR, KASKAXX:VPT:SPIS:YKQYE:VVE:EXGXR, GSAGPXX:VPT:SPIS:YKQYE:VVE:RXGXS, AAPASXX:VPT:SPIS:YKQYE:VVE:AXGXR, HVPKPXX:VPT:SPIS:YKQYE:VVE:SXGXH, RVPSTXX:VPT:SPIS:YKQYE:VVE:XGXL, ASAAPXX:VPT:SPIS:YKQYE:VVE:XKXS, ASASPXX:VPT:SPIS:YKQYE:VVE:XKXS, AAPASXX:VPA:SPIS:YKQYE:VVE:AXGXR, KIPKAXX:APV:KPLS:DHHKD:VEE:GXGXR, GIPEPXX:APV:KPLS:DHHKD:VEE:SXAXR, SIPKAXX:APV:KPLS:DHHKD:VEE:GXGXR, HVTKPTX:APV:KPLS:DHHKD:VEE:SXGXH, YVPKPXX:APV:KPLS:DHHKD:VEE:SXGXH, TVPKPXX:APV:KPLS:DHHKD:VEE:AXGXH, AVPKAXX:APV:KPLS:DHHKD:VEE:AXGXH, KVGKAXX:APV:KPLS:DHHKD:VEE:XGXR, KASKAXX:APV:KPLS:DHHKD:VEE:EXGXR, GSAGPXX:APV:KPLS:DHHKD:VEE:RXGXS, AAPASXX:APV:KPLS:DHHKD:VEE:AXGXR, STPPTXX:APV:KPLS:DHHKD:VEE:SXGXR, HVPKPXX:APV:KPLS:DHHKD:VEE:SXGXH, ASAAPXX:APV:KPLS:DHHKD:VEE:XKXS, ASASPXX:APV:KPLS:DHHKD:VEE:XKXS, KIPKAXX:VPT:KPLS:DHHKD:VVE:GXGXR, GIPEPXX:VPE:KPLS:DHHKD:TVE:SXAXR, SIPKAXX:VPT:KPLS:DHHKD:VVE:GXGXR, HVTKPTX:APT:KPLS:DHHKD:VVR:SXGXH, YVPKPXX:APT:KPLS:DHHKD:VVR:SXGXH, TVPKPXX:APT:KPLS:DHHKD:VVR:AXGXH, AVPKAXX:APT:KPLS:DHHKD:VVK:AXGXH, KVGKAXX:VPT:KPLS:DHHKD:VAE:XGXR, KASKAXX:VPT:KPLS:DHHKD:AVS:EXGXR, GSAGPXX:TPT:KPLS:DHHKD:VVD:RXGXS, AAPASXX:VPA:KPLS:DHHKD:VVE:AXGXR, STPPTXX:VPT:KPLS:DHHKD:VVE:SXGXR, HVPKPXX:APT:KPLS:DHHKD:VVR:SXGXH, ASAAPXX:VPQ:KPLS:DHHKD:VRS:XKXS, ASASPXX:VSQ:KPLS:DHHKD:VKS:XKXS, ASASPXX:VPQ:KPLS:DHHKD:VKS:XKXS, NDEGLEX:VPT:KPLS:DHHKD:QHN:KXEXR, NDEGLEX:VPT:KPLS:DHHKD:EHS:QXEXR, SSVKXQP:SRV:KPLS:DHHKD:EEH:LEXAXA, RNVQXRP:TQV:KPLS:DHHKD:EDH:LAXKXE, KIPKAXX:VPQ:EPLP:EQLSN:VRS:GXGXR, GIPEPXX:VPQ:EPLP:EQLSN:VRS:SXAXR, SIPKAXX:VPQ:EPLP:EQLSN:VRS:GXGXR, HVTKPTX:VPQ:EPLP:EQLSN:VRS:SXGXH, YVPKPXX:VPQ:EPLP:EQLSN:VRS:SXGXH, TVPKPXX:VPQ:EPLP:EQLSN:VRS:AXGXH, AVPKAXX:VPQ:EPLP:EQLSN:VRS:AXGXH, KVGKAXX:VPQ:EPLP:EQLSN:VRS:XGXR, KASKAXX:VPQ:EPLP:EQLSN:VRS:EXGXR, GSAGPXX:VPQ:EPLP:EQLSN:VRS:RXGXS, AAPASXX:VPQ:EPLP:EQLSN:VRS:AXGXR, STPPTXX:VPQ:EPLP:EQLSN:VRS:SXGXR, HVPKPXX:VPQ:EPLP:EQLSN:VRS:SXGXH, RVPSTXX:VPQ:EPLP:EQLSN:VRS:XGXL, ASASPXX:VPQ:EPLP:EQLSN:VRS:XKXS, KIPKAXX:VPT:EPLP:EQLSN:VVE:GXGXR, GIPEPXX:VPE:EPLP:EQLSN:TVE:SXAXR, SIPKAXX:VPT:EPLP:EQLSN:VVE:GXGXR, HVTKPTX:APT:EPLP:EQLSN:VVR:SXGXH, YVPKPXX:APT:EPLP:EQLSN:VVR:SXGXH, TVPKPXX:APT:EPLP:EQLSN:VVR:AXGXH, AVPKAXX:APT:EPLP:EQLSN:VVK:AXGXH, KVGKAXX:VPT:EPLP:EQLSN:VAE:XGXR, KASKAXX:VPT:EPLP:EQLSN:AVS:EXGXR, GSAGPXX:TPT:EPLP:EQLSN:VVD:RXGXS, AAPASXX:VPA:EPLP:EQLSN:VVE:AXGXR, STPPTXX:VPT:EPLP:EQLSN:VVE:SXGXR, HVPKPXX:APT:EPLP:EQLSN:VVR:SXGXH, RVPSTXX:APV:EPLP:EQLSN:VEE:XGXL, ASASPXX:VSQ:EPLP:EQLSN:VKS:XKXS, ASASPXX:VPQ:EPLP:EQLSN:VKS:XKXS, NDEGLEX:VPT:EPLP:EQLSN:QHN:KXEXR, NDEGLEX:VPT:EPLP:EQLSN:EHS:QXEXR, SSVKXQP:SRV:EPLP:EQLSN:EEH:LEXAXA, RNVQXRP:TQV:EPLP:EQLSN:EDH:LAXKXE, KIPKAXX:VSQ:EPLT:EQLSN:VKS:GXGXR, GIPEPXX:VSQ:EPLT:EQLSN:VKS:SXAXR, SIPKAXX:VSQ:EPLT:EQLSN:VKS:GXGXR, HVTKPTX:VSQ:EPLT:EQLSN:VKS:SXGXH, YVPKPXX:VSQ:EPLT:EQLSN:VKS:SXGXH, TVPKPXX:VSQ:EPLT:EQLSN:VKS:AXGXH, AVPKAXX:VSQ:EPLT:EQLSN:VKS:AXGXH, KVGKAXX:VSQ:EPLT:EQLSN:VKS:XGXR, KASKAXX:VSQ:EPLT:EQLSN:VKS:EXGXR, GSAGPXX:VSQ:EPLT:EQLSN:VKS:RXGXS, AAPASXX:VSQ:EPLT:EQLSN:VKS:AXGXR, STPPTXX:VSQ:EPLT:EQLSN:VKS:SXGXR, HVPKPXX:VSQ:EPLT:EQLSN:VKS:SXGXH, RVPSTXX:VSQ:EPLT:EQLSN:VKS:XGXL, ASAAPXX:VSQ:EPLT:EQLSN:VKS:XKXS, ASASPXX:VSQ:EPLT:EQLSN:VKS:XKXS, KIPKAXX:VPT:EPLT:EQLSN:VVE:GXGXR, GIPEPXX:VPE:EPLT:EQLSN:TVE:SXAXR, SIPKAXX:VPT:EPLT:EQLSN:VVE:GXGXR, HVTKPTX:APT:EPLT:EQLSN:VVR:SXGXH, YVPKPXX:APT:EPLT:EQLSN:VVR:SXGXH, TVPKPXX:APT:EPLT:EQLSN:VVR:AXGXH, AVPKAXX:APT:EPLT:EQLSN:VVK:AXGXH, KVGKAXX:VPT:EPLT:EQLSN:VAE:XGXR, KASKAXX:VPT:EPLT:EQLSN:AVS:EXGXR, GSAGPXX:TPT:EPLT:EQLSN:VVD:RXGXS, AAPASXX:VPA:EPLT:EQLSN:VVE:AXGXR, STPPTXX:VPT:EPLT:EQLSN:VVE:SXGXR, HVPKPXX:APT:EPLT:EQLSN:VVR:SXGXH, RVPSTXX:APV:EPLT:EQLSN:VEE:XGXL, ASAAPXX:VPQ:EPLT:EQLSN:VRS:XKXS, NDEGLEX:VPT:EPLT:EQLSN:QHN:KXEXR, NDEGLEX:VPT:EPLT:EQLSN:EHS:QXEXR, SSVKXQP:SRV:EPLT:EQLSN:EEH:LEXAXA, RNVQXRP:TQV:EPLT:EQLSN:EDH:LAXKXE, KIPKAXX:VPQ:EPLT:EQLSN:VKS:GXGXR, GIPEPXX:VPQ:EPLT:EQLSN:VKS:SXAXR, SIPKAXX:VPQ:EPLT:EQLSN:VKS:GXGXR, HVTKPTX:VPQ:EPLT:EQLSN:VKS:SXGXH, YVPKPXX:VPQ:EPLT:EQLSN:VKS:SXGXH, TVPKPXX:VPQ:EPLT:EQLSN:VKS:AXGXH, AVPKAXX:VPQ:EPLT:EQLSN:VKS:AXGXH, KVGKAXX:VPQ:EPLT:EQLSN:VKS:XGXR, KASKAXX:VPQ:EPLT:EQLSN:VKS:EXGXR, GSAGPXX:VPQ:EPLT:EQLSN:VKS:RXGXS, AAPASXX:VPQ:EPLT:EQLSN:VKS:AXGXR, STPPTXX:VPQ:EPLT:EQLSN:VKS:SXGXR, HVPKPXX:VPQ:EPLT:EQLSN:VKS:SXGXH, RVPSTXX:VPQ:EPLT:EQLSN:VKS:XGXL, ASAAPXX:VPQ:EPLT:EQLSN:VKS:XKXS, ASASPXX:VPQ:EPLT:EQLSN:VKS:XKXS, NDEGLEX:VPT:SNIT:IGEMS:QHN:QXEXR, KIPKAXX:VPT:SNIT:IGEMS:VVE:GXGXR, GIPEPXX:VPE:SNIT:IGEMS:TVE:SXAXR, SIPKAXX:VPT:SNIT:IGEMS:VVE:GXGXR, HVTKPTX:APT:SNIT:IGEMS:VVR:SXGXH, YVPKPXX:APT:SNIT:IGEMS:VVR:SXGXH, TVPKPXX:APT:SNIT:IGEMS:VVR:AXGXH, AVPKAXX:APT:SNIT:IGEMS:VVK:AXGXH, KVGKAXX:VPT:SNIT:IGEMS:VAE:XGXR, KASKAXX:VPT:SNIT:IGEMS:AVS:EXGXR, GSAGPXX:TPT:SNIT:IGEMS:VVD:RXGXS, AAPASXX:VPA:SNIT:IGEMS:VVE:AXGXR, STPPTXX:VPT:SNIT:IGEMS:VVE:SXGXR, HVPKPXX:APT:SNIT:IGEMS:VVR:SXGXH, RVPSTXX:APV:SNIT:IGEMS:VEE:XGXL, ASAAPXX:VPQ:SNIT:IGEMS:VRS:XKXS, ASASPXX:VSQ:SNIT:IGEMS:VKS:XKXS, ASASPXX:VPQ:SNIT:IGEMS:VKS:XKXS, NDEGLEX:VPT:SNIT:IGEMS:EHS:QXEXR, SSVKXQP:SRV:SNIT:IGEMS:EEH:LEXAXA, RNVQXRP:TQV:SNIT:IGEMS:EDH:LAXKXE, NDEGLEX:VPT:SNIT:LGEMS:EHS:KXEXR, KIPKAXX:VPT:SNIT:LGEMS:VVE:GXGXR, GIPEPXX:VPE:SNIT:LGEMS:TVE:SXAXR, SIPKAXX:VPT:SNIT:LGEMS:VVE:GXGXR, HVTKPTX:APT:SNIT:LGEMS:VVR:SXGXH, YVPKPXX:APT:SNIT:LGEMS:VVR:SXGXH, TVPKPXX:APT:SNIT:LGEMS:VVR:AXGXH, AVPKAXX:APT:SNIT:LGEMS:VVK:AXGXH, KVGKAXX:VPT:SNIT:LGEMS:VAE:XGXR, KASKAXX:VPT:SNIT:LGEMS:AVS:EXGXR, GSAGPXX:TPT:SNIT:LGEMS:VVD:RXGXS, AAPASXX:VPA:SNIT:LGEMS:VVE:AXGXR, STPPTXX:VPT:SNIT:LGEMS:VVE:SXGXR, HVPKPXX:APT:SNIT:LGEMS:VVR:SXGXH, RVPSTXX:APV:SNIT:LGEMS:VEE:XGXL, ASAAPXX:VPQ:SNIT:LGEMS:VRS:XKXS, ASASPXX:VSQ:SNIT:LGEMS:VKS:XKXS, ASASPXX:VPQ:SNIT:LGEMS:VKS:XKXS, NDEGLEX:VPT:SNIT:LGEMS:QHN:KXEXR, SSVKXQP:SRV:SNIT:LGEMS:EEH:LEXAXA, RNVQXRP:TQV:SNIT:LGEMS:EDH:LAXKXE, RNVQXRP:SRV:RSVK:KEVQV:EEH:LAXKXE, KIPKAXX:VPT:RSVK:KEVQV:VVE:GXGXR, GIPEPXX:VPE:RSVK:KEVQV:TVE:SXAXR, SIPKAXX:VPT:RSVK:KEVQV:VVE:GXGXR, HVTKPTX:APT:RSVK:KEVQV:VVR:SXGXH, YVPKPXX:APT:RSVK:KEVQV:VVR:SXGXH, TVPKPXX:APT:RSVK:KEVQV:VVR:AXGXH, AVPKAXX:APT:RSVK:KEVQV:VVK:AXGXH, KVGKAXX:VPT:RSVK:KEVQV:VAE:XGXR, KASKAXX:VPT:RSVK:KEVQV:AVS:EXGXR, GSAGPXX:TPT:RSVK:KEVQV:VVD:RXGXS, AAPASXX:VPA:RSVK:KEVQV:VVE:AXGXR, STPPTXX:VPT:RSVK:KEVQV:VVE:SXGXR, HVPKPXX:APT:RSVK:KEVQV:VVR:SXGXH, RVPSTXX:APV:RSVK:KEVQV:VEE:XGXL, ASAAPXX:VPQ:RSVK:KEVQV:VRS:XKXS, ASASPXX:VSQ:RSVK:KEVQV:VKS:XKXS, ASASPXX:VPQ:RSVK:KEVQV:VKS:XKXS, NDEGLEX:VPT:RSVK:KEVQV:QHN:KXEXR, NDEGLEX:VPT:RSVK:KEVQV:EHS:QXEXR, RNVQXRP:TQV:RSVK:KEVQV:EDH:LAXKXE, SSVKXQP:TQV:RPVQ:KKATV:EDH:LEXAXA, KIPKAXX:VPT:RPVQ:KKATV:VVE:GXGXR, GIPEPXX:VPE:RPVQ:KKATV:TVE:SXAXR, SIPKAXX:VPT:RPVQ:KKATV:VVE:GXGXR, HVTKPTX:APT:RPVQ:KKATV:VVR:SXGXH, YVPKPXX:APT:RPVQ:KKATV:WVVR:SXGXH, TVPKPXX:APT:RPVQ:KKATV:VVR:AXGXH, AVPKAXX:APT:RPVQ:KKATV:WK:AXGXH, KVGKAXX:VPT:RPVQ:KKATV:VAE:XGXR, KASKAXX:VPT:RPVQ:KKATV:AVS:EXGXR, GSAGPXX:TPT:RPVQ:KKATV:VVD:RXGXS, AAPASXX:VPA:RPVQ:KKATV:VVE:AXGXR, STPPTXX:VPT:RPVQ:KKATV:VVE:SXGXR, HVPKPXX:APT:RPVQ:KKATV:VVR:SXGXH, RVPSTXX:APV:RPVQ:KKATV:VEE:XGXL, ASAAPXX:VPQ:RPVQ:KKATV:VRS:XKXS, ASASPXX:VSQ:RPVQ:KKATV:VKS:XKXS, ASASPXX:VPQ:RPVQ:KKATV:VKS:XKXS, NDEGLEX:VPT:RPVQ:KKATV:QHN:KXEXR, NDEGLEX:VPT:RPVQ:KKATV:EHS:QXEXR and SSVKXQP:SRV:RPVQ:KKATV:EEH:LEXAXA.

[0440] In particular, in certain embodiments, the hexaplet PEP7:PEP3:PEP12:PEP2:PEP4:PEP8 is selected from the group consisting of GIPEPXX:VPT:SAIS-AA¹⁷-LYL:LKNYQ:VVE:SXAXR, SIPKAXX:VPT:SAIS-AA¹⁷-LYL:LKNYQ:VVE:GXGXR, HVTKPTX:VPT:SAIS-AA¹⁷-LYL:LKNYQ:VVE:SXGXH, YVPKPXX:VPT:SAIS-AA¹⁷-LYL:LKNYQ:VVE:SXGXH, TVPKPXX:VPT:SAIS-AA¹⁷-LYL:LKNYQ:VVE:AXGXH, AVPKAXX:VPT:SAIS-AA¹⁷-LYL:LKNYQ:VVE:AXGXH, KVGKAXX:VPT:SAIS-AA¹⁷-LYL:LKNYQ:VVE:XGXR, KASKAXX:VPT:SAIS-AA¹⁷-LYL:LKNYQ:VVE:EXGXR, GSAGPXX:VPT:SAIS-AA¹⁷-LYL:LKNYQ:VVE:RXGXS, AAPASXX:VPT:SAIS-AA¹⁷-LYL:LKNYQ:VVE:AXGXR, STPPTXX:VPT:SAIS-AA¹⁷-LYL:LKNYQ:VVE:SXGXR, HVPKPXX:VPT:SAIS-AA¹⁷-LYL:LKNYQ:VVE:SXGXH, RVPSTXX:VPT:SAIS-AA¹⁷-LYL:LKNYQ:VVE:XGXL, ASAAPXX:VPT:SAIS-AA¹⁷-LYL:LKNYQ:VVE:XKXS, ASASPXX:VPT:SAIS-AA¹⁷-LYL:LKNYQ:VVE:XKXS, NDEGLEX:VPT:SAIS-AA¹⁷-LYL:LKNYQ:VVE:KXEXR, NDEGLEX:VPT:SAIS-AA¹⁷-LYL:LKNYQ:VVE:QXEXR, SSVKXQP:VPT:SAIS-AA¹⁷-LYL:LKNYQ:VVE:LEXAXA, RNVQXRP:VPT:SAIS-AA¹⁷-LYL:LKNYQ:VVE:LAXKXE, GIPEPXX:VPE:SAIS-AA¹⁷-LYL:LKNYQ:TVE:SXAXR, HVTKPTX:APT:SAIS-AA¹⁷-LYL:LKNYQ:VVR:SXGXH, YVPKPXX:APT:SAIS-AA¹⁷-LYL:LKNYQ:VVR:SXGXH, TVPKPXX:APT:SAIS-AA¹⁷-LYL:LKNYQ:VVR:AXGXH, AVPKAXX:APT:SAIS-AA¹⁷-LYL:LKNYQ:VVK:AXGXH, KVGKAXX:VPT:SAIS-AA¹⁷-LYL:LKNYQ:VAE:XGXR, KASKAXX:VPT:SAIS-AA¹⁷-LYL:LKNYQ:AVS:EXGXR, GSAGPXX:TPT:SAIS-AA¹⁷-LYL:LKNYQ:VVD:RXGXS, AAPASXX:VPA:SAIS-AA¹⁷-LYL:LKNYQ:VVE:AXGXR, HVPKPXX:APT:SAIS-AA¹⁷-LYL:LKNYQ:VVR:SXGXH, RVPSTXX:APV:SAIS-AA¹⁷-LYL:LKNYQ:VEE:XGXL, ASAAPXX:VPQ:SAIS-AA¹⁷-LYL:LKNYQ:VRS:XKXS, ASASPXX:VSQ:SAIS-AA¹⁷-LYL:LKNYQ:VKS:XKXS, ASASPXX:VPQ:SAIS-AA¹⁷-LYL:LKNYQ:VKS:XKXS, NDEGLEX:VPT:SAIS-AA¹⁷-LYL:LKNYQ:QHN:KXEXR, NDEGLEX:VPT:SAIS-AA¹⁷-LYL:LKNYQ:EHS:QXEXR, SSVKXQP:SRV:SAIS-AA¹⁷-LYL:LKNYQ:EEH:LEXAXA, RNVQXRP:TQV:SAIS-AA¹⁷-LYL:LKNYQ:EDH:LAXKXE, KIPKAXX:VPE:SSLS-AA¹⁷-LFF:LKVYP:TVE:GXGXR, SIPKAXX:VPE:SSLS-AA¹⁷-LFF:LKVYP:TVE:GXGXR, HVTKPTX:VPE:SSLS-AA¹⁷-LFF:LKVYP:TVE:SXGXH, YVPKPXX:VPE:SSLS-AA¹⁷-LFF:LKVYP:TVE:SXGXH, TVPKPXX:VPE:SSLS-AA¹⁷-LFF:LKVYP:TVE:AXGXH, AVPKAXX:VPE:SSLS-AA¹⁷-LFF:LKVYP:TVE:AXGXH, KVGKAXX:VPE:SSLS-AA¹⁷-LFF:LKVYP:TVE:XGXR, KASKAXX:VPE:SSLS-AA¹⁷-LFF:LKVYP:TVE:EXGXR, GSAGPXX:VPE:SSLS-AA¹⁷-LFF:LKVYP:TVE:RXGXS, AAPASXX:VPE:SSLS-AA¹⁷-LFF:LKVYP:TVE:AXGXR, STPPTXX:VPE:SSLS-AA¹⁷-LFF:LKVYP:TVE:SXGXR, HVPKPXX:VPE:SSLS-AA¹⁷-LFF:LKVYP:TVE:SXGXH, RVPSTXX:VPE:SSLS-AA¹⁷-LFF:LKVYP:TVE:XGXL, ASAAPXX:VPE:SSLS-AA¹⁷-LFF:LKVYP:TVE:XKXS, ASASPXX:VPE:SSLS-AA¹⁷-LFF:LKVYP:TVE:XKXS, NDEGLEX:VPE:SSLS-AA¹⁷-LFF:LKVYP:TVE:KXEXR, NDEGLEX:VPE:SSLS-AA¹⁷-LFF:LKVYP:TVE:QXEXR, SSVKXQP:VPE:SSLS-AA¹⁷-LFF:LKVYP:TVE:LEXAXA, RNVQXRP:VPE:SSLS-AA¹⁷-LFF:LKVYP:TVE:LAXKXE, KIPKAXX:VPT:SSLS-AA¹⁷-LFF:LKVYP:VVE:GXGXR, SIPKAXX:VPT:SSLS-AA¹⁷-LFF:LKVYP:VVE:GXGXR, HVTKPTX:APT:SSLS-AA¹⁷-LFF:LKVYP:VVR:SXGXH, YVPKPXX:APT:SSLS-AA¹⁷-LFF:LKVYP:VVR:SXGXH, TVPKPXX:APT:SSLS-AA¹⁷-LFF:LKVYP:VVR:AXGXH, AVPKAXX:APT:SSLS-AA¹⁷-LFF:LKVYP:VVK:AXGXH, KVGKAXX:VPT:SSLS-AA¹⁷-LFF:LKVYP:VAE:XGXR, KASKAXX:VPT:SSLS-AA¹⁷-LFF:LKVYP:AVS:EXGXR, GSAGPXX:TPT:SSLS-AA¹⁷-LFF:LKVYP:VVD:RXGXS, AAPASXX:VPA:SSLS-AA¹⁷-LFF:LKVYP:VVE:AXGXR, STPPTXX:VPT:SSLS-AA¹⁷-LFF:LKVYP:VVE:SXGXR, HVPKPXX:APT:SSLS-AA¹⁷-LFF:LKVYP:VVR:SXGXH, RVPSTXX:APV:SSLS-AA¹⁷-LFF:LKVYP:VEE:XGXL, ASAAPXX:VPQ:SSLS-AA¹⁷-LFF:LKVYP:VRS:XKXS, ASASPXX:VSQ:SSLS-AA¹⁷-LFF:LKVYP:VKS:XKXS, ASASPXX:VPQ:SSLS-AA¹⁷-LFF:LKVYP:VKS:XKXS, NDEGLEX:VPT:SSLS-AA¹⁷-LFF:LKVYP:QHN:KXEXR, NDEGLEX:VPT:SSLS-AA¹⁷-LFF:LKVYP:EHS:QXEXR, SSVKXQP:SRV:SSLS-AA¹⁷-LFF:LKVYP:EEH:LEXAXA, RNVQXRP:TQV:SSLS-AA¹⁷-LFF:LKVYP:EDH:LAXKXE, KIPKAXX:VPT:SAIS-AA¹⁷-LYL:LKNYQ:VVE:GXGXR, KIPKAXX:APT:NAIS-AA¹⁷-LYF:LKKYR:VVR:GXGXR, GIPEPXX:APT:NAIS-AA¹⁷-LYF:LKKYR:VVR:SXAXR, SIPKAXX:APT:NAIS-AA¹⁷-LYF:LKKYR:VVR:GXGXR, YVPKPXX:APT:NAIS-AA¹⁷-LYF:LKKYR:VVR:SXGXH, TVPKPXX:APT:NAIS-AA¹⁷-LYF:LKKYR:VVR:AXGXH, AVPKAXX:APT:NAIS-AA¹⁷-LYF:LKKYR:VVR:AXGXH, KVGKAXX:APT:NAIS-AA¹⁷-LYF:LKKYR:VVR:XGXR, KASKAXX:APT:NAIS-AA¹⁷-LYF:LKKYR:VVR:EXGXR, GSAGPXX:APT:NAIS-AA¹⁷-LYF:LKKYR:VVR:RXGXS, AAPASXX:APT:NAIS-AA¹⁷-LYF:LKKYR:VVR:AXGXR, STPPTXX:APT:NAIS-AA¹⁷-LYF:LKKYR:VVR:SXGXR, HVPKPXX:APT:NAIS-AA¹⁷-LYF:LKKYR:VVR:SXGXH, RVPSTXX:APT:NAIS-AA¹⁷-LYF:LKKYR:VVR:XGXL, ASAAPXX:APT:NAIS-AA¹⁷-LYF:LKKYR:VVR:XKXS, ASASPXX:APT:NAIS-AA¹⁷-LYF:LKKYR:VVR:XKXS, NDEGLEX:APT:NAIS-AA¹⁷-LYF:LKKYR:VVR:KXEXR, NDEGLEX:APT:NAIS-AA¹⁷-LYF:LKKYR:VVR:QXEXR, SSVKXQP:APT:NAIS-AA¹⁷-LYF:LKKYR:VVR:LEXAXA, RNVQXRP:APT:NAIS-AA¹⁷-LYF:LKKYR:VVR:LAXKXE, KIPKAXX:VPT:NAIS-AA¹⁷-LYF:LKKYR:VVE:GXGXR, GIPEPXX:VPE:NAIS-AA¹⁷-LYF:LKKYR:TVE:SXAXR, SIPKAXX:VPT:NAIS-AA¹⁷-LYF:LKKYR:VVE:GXGXR, AVPKAXX:APT:NAIS-AA¹⁷-LYF:LKKYR:VVK:AXGXH, KVGKAXX:VPT:NAIS-AA¹⁷-LYF:LKKYR:VAE:XGXR, KASKAXX:VPT:NAIS-AA¹⁷-LYF:LKKYR:AVS:EXGXR, GSAGPXX:TPT:NAIS-AA¹⁷-LYF:LKKYR:VVD:RXGXS, AAPASXX:VPA:NAIS-AA¹⁷-LYF:LKKYR:VVE:AXGXR, STPPTXX:VPT:NAIS-AA¹⁷-LYF:LKKYR:VVE:SXGXR, RVPSTXX:APV:NAIS-AA¹⁷-LYF:LKKYR:VEE:XGXL, ASAAPXX:VPQ:NAIS-AA¹⁷-LYF:LKKYR:VRS:XKXS, ASASPXX:VSQ:NAIS-AA¹⁷-LYF:LKKYR:VKS:XKXS, ASASPXX:VPQ:NAIS-AA¹⁷-LYF:LKKYR:VKS:XKXS, NDEGLEX:VPT:NAIS-AA¹⁷-LYF:LKKYR:QHN:KXEXR, NDEGLEX:VPT:NAIS-AA¹⁷-LYF:LKKYR:EHS:QXEXR, SSVKXQP:SRV:NAIS-AA¹⁷-LYF:LKKYR:EEH:LEXAXA, RNVQXRP:TQV:NAIS-AA¹⁷-LYF:LKKYR:EDH:LAXKXE, HVTKPTX:APT:NAIS-AA¹⁷-LYF:LKKYR:VVR:SXGXH, KIPKAXX:APT:SATS-AA¹⁷-LYY:LRKHR:VVK:GXGXR, GIPEPXX:APT:SATS-AA¹⁷-LYY:LRKHR:VVK:SXAXR, SIPKAXX:APT:SATS-AA¹⁷-LYY:LRKHR:VVK:GXGXR, HVTKPTX:APT:SATS-AA¹⁷-LYY:LRKHR:VVK:SXGXH, YVPKPXX:APT:SATS-AA¹⁷-LYY:LRKHR:VVK:SXGXH, TVPKPXX:APT:SATS-AA¹⁷-LYY:LRKHR:VVK:AXGXH, KVGKAXX:APT:SATS-AA¹⁷-LYY:LRKHR:VVK:XGXR, KASKAXX:APT:SATS-AA¹⁷-LYY:LRKHR:VVK:EXGXR, GSAGPXX:APT:SATS-AA¹⁷-LYY:LRKHR:VVK:RXGXS, AAPASXX:APT:SATS-AA¹⁷-LYY:LRKHR:VVK:AXGXR, STPPTXX:APT:SATS-AA¹⁷-LYY:LRKHR:VVK:SXGXR, HVPKPXX:APT:SATS-AA¹⁷-LYY:LRKHR:VVK:SXGXH, RVPSTXX:APT:SATS-AA¹⁷-LYY:LRKHR:VVK:XGXL, ASAAPXX:APT:SATS-AA¹⁷-LYY:LRKHR:VVK:XKXS, ASASPXX:APT:SATS-AA¹⁷-LYY:LRKHR:VVK:XKXS, NDEGLEX:APT:SATS-AA¹⁷-LYY:LRKHR:VVK:KXEXR, NDEGLEX:APT:SATS-AA¹⁷-LYY:LRKHR:VVK:QXEXR, SSVKXQP:APT:SATS-AA¹⁷-LYY:LRKHR:VVK:LEXAXA, RNVQXRP:APT:SATS-AA¹⁷-LYY:LRKHR:VVK:LAXKXE, KIPKAXX:VPT:SATS-AA¹⁷-LYY:LRKHR:VVE:GXGXR, GIPEPXX:VPE:SATS-AA¹⁷-LYY:LRKHR:TVE:SXAXR, S IPKAXX:VPT:SATS-AA¹⁷-LYY:LRKHR:VVE:GXGXR, HVTKPTX:APT:SATS-AA¹⁷-LYY:LRKHR:VVR:SXGXH, YVPKPXX:APT:SATS-AA¹⁷-LYY:LRKHR:VVR:SXGXH, TVPKPXX:APT:SATS-AA¹⁷-LYY:LRKHR:VVR:AXGXH, KVGKAXX:VPT:SATS-AA¹⁷-LYY:LRKHR:VAE:XGXR, KASKAXX:VPT:SATS-AA¹⁷-LYY:LRKHR:AVS:EXGXR, GSAGPXX:TPT:SATS-AA¹⁷-LYY:LRKHR:VVD:RXGXS, AAPASXX:VPA:SATS-AA¹⁷-LYY:LRKHR:VVE:AXGXR, STPPTXX:VPT:SATS-AA¹⁷-LYY:LRKHR:VVE:SXGXR, HVPKPXX:APT:SATS-AA¹⁷-LYY:LRKHR:VVR:SXGXH, RVPSTXX:APV:SATS-AA¹⁷-LYY:LRKHR:VEE:XGXL, ASAAPXX:VPQ:SATS-AA¹⁷-LYY:LRKHR:VRS:XKXS, ASASPXX:VSQ:SATS-AA¹⁷-LYY:LRKHR:VKS:XKXS, ASASPXX:VPQ:SATS-AA¹⁷-LYY:LRKHR:VKS:XKXS, NDEGLEX:VPT:SATS-AA¹⁷-LYY:LRKHR:QHN:KXEXR, NDEGLEX:VPT:SATS-AA¹⁷-LYY:LRKHR:EHS:QXEXR, SSVKXQP:SRV:SATS-AA¹⁷-LYY:LRKHR:EEH:LEXAXA, RNVQXRP:TQV:SATS-AA¹⁷-LYY:LRKHR:EDH:LAXKXE, KIPKAXX:VPT:SPIS-AA¹⁷-LYK:LKYHY:VAE:GXGXR, GIPEPXX:VPT:SPIS-AA¹⁷-LYK:LKYHY:VAE:SXAXR, SIPKAXX:VPT:SPIS-AA¹⁷-LYK:LKYHY:VAE:GXGXR, HVTKPTX:VPT:SPIS-AA¹⁷-LYK:LKYHY:VAE:SXGXH, YVPKPXX:VPT:SPIS-AA¹⁷-LYK:LKYHY:VAE:SXGXH, TVPKPXX:VPT:SPIS-AA¹⁷-LYK:LKYHY:VAE:AXGXH, AVPKAXX:VPT:SPIS-AA¹⁷-LYK:LKYHY:VAE:AXGXH, KASKAXX:VPT:SPIS-AA¹⁷-LYK:LKYHY:VAE:EXGXR, GSAGPXX:VPT:SPIS-AA¹⁷-LYK:LKYHY:VAE:RXGXS, AAPASXX:VPT:SPIS-AA¹⁷-LYK:LKYHY:VAE:AXGXR, STPPTXX:VPT:SPIS-AA¹⁷-LYK:LKYHY:VAE:SXGXR, HVPKPXX:VPT:SPIS-AA¹⁷-LYK:LKYHY:VAE:SXGXH, RVPSTXX:VPT:SPIS-AA¹⁷-LYK:LKYHY:VAE:XGXL, ASAAPXX:VPT:SPIS-AA¹⁷-LYK:LKYHY:VAE:XKXS, ASASPXX:VPT:SPIS-AA¹⁷-LYK:LKYHY:VAE:XKXS, NDEGLEX:VPT:SPIS-AA¹⁷-LYK:LKYHY:VAE:KXEXR, NDEGLEX:VPT:SPIS-AA¹⁷-LYK:LKYHY:VAE:QXEXR, SSVKXQP:VPT:SPIS-AA¹⁷-LYK:LKYHY:VAE:LEXAXA, RNVQXRP:VPT:SPIS-AA¹⁷-LYK:LKYHY:VAE:LAXKXE, KIPKAXX:VPT:SPIS-AA¹⁷-LYK:LKYHY:VVE:GXGXR, GIPEPXX:VPE:SPIS-AA¹⁷-LYK:LKYHY:TVE:SXAXR, SIPKAXX:VPT:SPIS-AA¹⁷-LYK:LKYHY:VVE:GXGXR, HVTKPTX:APT:SPIS-AA¹⁷-LYK:LKYHY:VVR:SXGXH, YVPKPXX:APT:SPIS-AA¹⁷-LYK:LKYHY:VVR:SXGXH, TVPKPXX:APT:SPIS-AA¹⁷-LYK:LKYHY:VVR:AXGXH, AVPKAXX:APT:SPIS-AA¹⁷-LYK:LKYHY:VVK:AXGXH, KASKAXX:VPT:SPIS-AA¹⁷-LYK:LKYHY:AVS:EXGXR, GSAGPXX:TPT:SPIS-AA¹⁷-LYK:LKYHY:VVD:RXGXS, AAPASXX:VPA:SPIS-AA¹⁷-LYK:LKYHY:VVE:AXGXR, STPPTXX:VPT:SPIS-AA¹⁷-LYK:LKYHY:VVE:SXGXR, HVPKPXX:APT:SPIS-AA¹⁷-LYK:LKYHY:VVR:SXGXH, RVPSTXX:APV:SPIS-AA¹⁷-LYK:LKYHY:VEE:XGXL, ASAAPXX:VPQ:SPIS-AA¹⁷-LYK:LKYHY:VRS:XKXS, ASASPXX:VSQ:SPIS-AA¹⁷-LYK:LKYHY:VKS:XKXS, ASASPXX:VPQ:SPIS-AA¹⁷-LYK:LKYHY:VKS:XKXS, NDEGLEX:VPT:SPIS-AA¹⁷-LYK:LKYHY:QHN:KXEXR, NDEGLEX:VPT:SPIS-AA¹⁷-LYK:LKYHY:EHS:QXEXR, SSVKXQP:SRV:SPIS-AA¹⁷-LYK:LKYHY:EEH:LEXAXA, RNVQXRP:TQV:SPIS-AA¹⁷-LYK:LKYHY:EDH:LAXKXE, KIPKAXX:VPT:EPIS-AA¹⁷-LYL:KFKYE:AVS:GXGXR, GIPEPXX:VPT:EPIS-AA¹⁷-LYL:KFKYE:AVS:SXAXR, SIPKAXX:VPT:EPIS-AA¹⁷-LYL:KFKYE:AVS:GXGXR, HVTKPTX:VPT:EPIS-AA¹⁷-LYL:KFKYE:AVS:SXGXH, YVPKPXX:VPT:EPIS-AA¹⁷-LYL:KFKYE:AVS:SXGXH, TVPKPXX:VPT:EPIS-AA¹⁷-LYL:KFKYE:AVS:AXGXH, AVPKAXX:VPT:EPIS-AA¹⁷-LYL:KFKYE:AVS:AXGXH, KVGKAXX:VPT:EPIS-AA¹⁷-LYL:KFKYE:AVS:XGXR, GSAGPXX:VPT:EPIS-AA¹⁷-LYL:KFKYE:AVS:RXGXS, AAPASXX:VPT:EPIS-AA¹⁷-LYL:KFKYE:AVS:AXGXR, STPPTXX:VPT:EPIS-AA¹⁷-LYL:KFKYE:AVS:SXGXR, HVPKPXX:VPT:EPIS-AA¹⁷-LYL:KFKYE:AVS:SXGXH, RVPSTXX:VPT:EPIS-AA¹⁷-LYL:KFKYE:AVS:XGXL, ASAAPXX:VPT:EPIS-AA¹⁷-LYL:KFKYE:AVS:XKXS, ASASPXX:VPT:EPIS-AA¹⁷-LYL:KFKYE:AVS:XKXS, NDEGLEX:VPT:EPIS-AA¹⁷-LYL:KFKYE:AVS:KXEXR, NDEGLEX:VPT:EPIS-AA¹⁷-LYL:KFKYE:AVS:QXEXR, SSVKXQP:VPT:EPIS-AA¹⁷-LYL:KFKYE:AVS:LEXAXA, RNVQXRP:VPT:EPIS-AA¹⁷-LYL:KFKYE:AVS:LAXKXE, KIPKAXX:VPT:EPIS-AA¹⁷-LYL:KFKYE:VVE:GXGXR, GIPEPXX:VPE:EPIS-AA¹⁷-LYL:KFKYE:TVE:SXAXR, SIPKAXX:VPT:EPIS-AA¹⁷-LYL:KFKYE:VVE:GXGXR, HVTKPTX:APT:EPIS-AA¹⁷-LYL:KFKYE:VVR:SXGXH, YVPKPXX:APT:EPIS-AA¹⁷-LYL:KFKYE:VVR:SXGXH, TVPKPXX:APT:EPIS-AA¹⁷-LYL:KFKYE:VVR:AXGXH, AVPKAXX:APT:EPIS-AA¹⁷-LYL:KFKYE:VVK:AXGXH, KVGKAXX:VPT:EPIS-AA¹⁷-LYL:KFKYE:VAE:XGXR, GSAGPXX:TPT:EPIS-AA¹⁷-LYL:KFKYE:VVD:RXGXS, AAPASXX:VPA:EPIS-AA¹⁷-LYL:KFKYE:VVE:AXGXR, STPPTXX:VPT:EPIS-AA¹⁷-LYL:KFKYE:VVE:SXGXR, HVPKPXX:APT:EPIS-AA¹⁷-LYL:KFKYE:VVR:SXGXH, RVPSTXX:APV:EPIS-AA¹⁷-LYL:KFKYE:VEE:XGXL, ASAAPXX:VPQ:EPIS-AA¹⁷-LYL:KFKYE:VRS:XKXS, ASASPXX:VSQ:EPIS-AA¹⁷-LYL:KFKYE:VKS:XKXS, ASASPXX:VPQ:EPIS-AA¹⁷-LYL:KFKYE:VKS:XKXS, NDEGLEX:VPT:EPIS-AA¹⁷-LYL:KFKYE:QHN:KXEXR, NDEGLEX:VPT:EPIS-AA¹⁷-LYL:KFKYE:EHS:QXEXR, SSVKXQP:SRV:EPIS-AA¹⁷-LYL:KFKYE:EEH:LEXAXA, RNVQXRP:TQV:EPIS-AA¹⁷-LYL:KFKYE:EDH:LAXKXE, KIPKAXX:TPT:SPIN-AA¹⁷-LYF:YGKIP:VVD:GXGXR, GIPEPXX:TPT:SPIN-AA¹⁷-LYF:YGKIP:VVD:SXAXR, SIPKAXX:TPT:SPIN-AA¹⁷-LYF:YGKIP:VVD:GXGXR, HVTKPTX:TPT:SPIN-AA¹⁷-LYF:YGKIP:VVD:SXGXH, YVPKPXX:TPT:SPIN-AA¹⁷-LYF:YGKIP:VVD:SXGXH, TVPKPXX:TPT:SPIN-AA¹⁷-LYF:YGKIP:VVD:AXGXH, AVPKAXX:TPT:SPIN-AA¹⁷-LYF:YGKIP:VVD:AXGXH, KVGKAXX:TPT:SPIN-AA¹⁷-LYF:YGKIP:VVD:XGXR, KASKAXX:TPT:SPIN-AA¹⁷-LYF:YGKIP:VVD:EXGXR, AAPASXX:TPT:SPIN-AA¹⁷-LYF:YGKIP:VVD:AXGXR, STPPTXX:TPT:SPIN-AA¹⁷-LYF:YGKIP:VVD:SXGXR, HVPKPXX:TPT:SPIN-AA¹⁷-LYF:YGKIP:VVD:SXGXH, RVPSTXX:TPT:SPIN-AA¹⁷-LYF:YGKIP:VVD:XGXL, ASAAPXX:TPT:SPIN-AA¹⁷-LYF:YGKIP:VVD:XKXS, ASASPXX:TPT:SPIN-AA¹⁷-LYF:YGKIP:VVD:XKXS, NDEGLEX:TPT:SPIN-AA¹⁷-LYF:YGKIP:VVD:KXEXR, NDEGLEX:TPT:SPIN-AA¹⁷-LYF:YGKIP:VVD:QXEXR, SSVKXQP:TPT:SPIN-AA¹⁷-LYF:YGKIP:VVD:LEXAXA, RNVQXRP:TPT:SPIN-AA¹⁷-LYF:YGKIP:VVD:LAXKXE, KIPKAXX:VPT:SPIN-AA¹⁷-LYF:YGKIP:VVE:GXGXR, GIPEPXX:VPE:SPIN-AA¹⁷-LYF:YGKIP:TVE:SXAXR, SIPKAXX:VPT:SPIN-AA¹⁷-LYF:YGKIP:VVE:GXGXR, HVTKPTX:APT:SPIN-AA¹⁷-LYF:YGKIP:VVR:SXGXH, YVPKPXX:APT:SPIN-AA¹⁷-LYF:YGKIP:VVR:SXGXH, TVPKPXX:APT:SPIN-AA¹⁷-LYF:YGKIP:VVR:AXGXH, AVPKAXX:APT:SPIN-AA¹⁷-LYF:YGKIP:VVK:AXGXH, KVGKAXX:VPT:SPIN-AA¹⁷-LYF:YGKIP:VAE:XGXR, KASKAXX:VPT:SPIN-AA¹⁷-LYF:YGKIP:AVS:EXGXR, AAPASXX:VPA:SPIN-AA¹⁷-LYF:YGKIP:VVE:AXGXR, STPPTXX:VPT:SPIN-AA¹⁷-LYF:YGKIP:VVE:SXGXR, HVPKPXX:APT:SPIN-AA¹⁷-LYF:YGKIP:VVR:SXGXH, RVPSTXX:APV:SPIN-AA¹⁷-LYF:YGKIP:VEE:XGXL, ASAAPXX:VPQ:SPIN-AA¹⁷-LYF:YGKIP:VRS:XKXS, ASASPXX:VSQ:SPIN-AA¹⁷-LYF:YGKIP:VKS:XKXS, ASASPXX:VPQ:SPIN-AA¹⁷-LYF:YGKIP:VKS:XKXS, NDEGLEX:VPT:SPIN-AA¹⁷-LYF:YGKIP:QHN:KXEXR, NDEGLEX:VPT:SPIN-AA¹⁷-LYF:YGKIP:EHS:QXEXR, SSVKXQP:SRV:SPIN-AA¹⁷-LYF:YGKIP:EEH:LEXAXA, RNVQXRP:TQV:SPIN-AA¹⁷-LYF:YGKIP:EDH:LAXKXE, KIPKAXX:VPA:SPIS-AA¹⁷-LYI:YKQYE:VVE:GXGXR, GIPEPXX:VPA:SPIS-AA¹⁷-LYI:YKQYE:VVE:SXAXR, SIPKAXX:VPA:SPIS-AA¹⁷-LYI:YKQYE:VVE:GXGXR, HVTKPTX:VPA:SPIS-AA¹⁷-LYI:YKQYE:VVE:SXGXH, YVPKPXX:VPA:SPIS-AA¹⁷-LYI:YKQYE:VVE:SXGXH, TVPKPXX:VPA:SPIS-AA¹⁷-LYI:YKQYE:VVE:AXGXH, AVPKAXX:VPA:SPIS-AA¹⁷-LYI:YKQYE:VVE:AXGXH, KVGKAXX:VPA:SPIS-AA¹⁷-LYI:YKQYE:VVE:XGXR, KASKAXX:VPA:SPIS-AA¹⁷-LYI:YKQYE:VVE:EXGXR, GSAGPXX:VPA:SPIS-AA¹⁷-LYI:YKQYE:VVE:RXGXS, STPPTXX:VPA:SPIS-AA¹⁷-LYI:YKQYE:VVE:SXGXR, HVPKPXX:VPA:SPIS-AA¹⁷-LYI:YKQYE:VVE:SXGXH, RVPSTXX:VPA:SPIS-AA¹⁷-LYI:YKQYE:VVE:XGXL, ASAAPXX:VPA:SPIS-AA¹⁷-LYI:YKQYE:VVE:XKXS, ASASPXX:VPA:SPIS-AA¹⁷-LYI:YKQYE:VVE:XKXS, NDEGLEX:VPA:SPIS-AA¹⁷-LYI:YKQYE:VVE:KXEXR, NDEGLEX:VPA:SPIS-AA¹⁷-LYI:YKQYE:VVE:QXEXR, SSVKXQP:VPA:SPIS-AA¹⁷-LYI:YKQYE:VVE:LEXAXA, RNVQXRP:VPA:SPIS-AA¹⁷-LYI:YKQYE:VVE:LAXKXE, KIPKAXX:VPT:SPIS-AA¹⁷-LYI:YKQYE:VVE:GXGXR, GIPEPXX:VPE:SPIS-AA¹⁷-LYI:YKQYE:TVE:SXAXR, SIPKAXX:VPT:SPIS-AA¹⁷-LYI:YKQYE:VVE:GXGXR, HVTKPTX:APT:SPIS-AA¹⁷-LYI:YKQYE:VVR:SXGXH, YVPKPXX:APT:SPIS-AA¹⁷-LYI:YKQYE:VVR:SXGXH, TVPKPXX:APT:SPIS-AA¹⁷-LYI:YKQYE:VVR:AXGXH, AVPKAXX:APT:SPIS-AA¹⁷-LYI:YKQYE:VVK:AXGXH, KVGKAXX:VPT:SPIS-AA¹⁷-LYI:YKQYE:VAE:XGXR, KASKAXX:VPT:SPIS-AA¹⁷-LYI:YKQYE:AVS:EXGXR, GSAGPXX:TPT:SPIS-AA¹⁷-LYI:YKQYE:VVD:RXGXS, STPPTXX:VPT:SPIS-AA¹⁷-LYI:YKQYE:VVE:SXGXR, HVPKPXX:APT:SPIS-AA¹⁷-LYI:YKQYE:VVR:SXGXH, RVPSTXX:APV:SPIS-AA¹⁷-LYI:YKQYE:VEE:XGXL, ASAAPXX:VPQ:SPIS-AA¹⁷-LYI:YKQYE:VRS:XKXS, ASASPXX:VSQ:SPIS-AA¹⁷-LYI:YKQYE:VKS:XKXS, ASASPXX:VPQ:SPIS-AA¹⁷-LYI:YKQYE:VKS:XKXS, NDEGLEX:VPT:SPIS-AA¹⁷-LYI:YKQYE:QHN:KXEXR, NDEGLEX:VPT:SPIS-AA¹⁷-LYI:YKQYE:EHS:QXEXR, SSVKXQP:SRV:SPIS-AA¹⁷-LYI:YKQYE:EEH:LEXAXA, RNVQXRP:TQV:SPIS-AA¹⁷-LYI:YKQYE:EDH:LAXKXE, KIPKAXX:VPT:SPIS-AA¹⁷-LFI:YKQYE:VVE:GXGXR, GIPEPXX:VPT:SPIS-AA¹⁷-LFI:YKQYE:VVE:SXAXR, SIPKAXX:VPT:SPIS-AA¹⁷-LFI:YKQYE:VVE:GXGXR, HVTKPTX:VPT:SPIS-AA¹⁷-LFI:YKQYE:VVE:SXGXH, YVPKPXX:VPT:SPIS-AA¹⁷-LFI:YKQYE:VVE: SXGXH, TVPKPXX:VPT:SPIS-AA¹⁷-LFI:YKQYE:VVE:AXGXH, AVPKAXX:VPT:SPIS-AA¹⁷-LFI:YKQYE:VVE:AXGXH, KVGKAXX:VPT:SPIS-AA¹⁷-LFI:YKQYE:VVE:XGXR, KASKAXX:VPT:SPIS-AA¹⁷-LFI:YKQYE:VVE:EXGXR, GSAGPXX:VPT:SPIS-AA¹⁷-LFI:YKQYE:VVE:RXGXS, AAPASXX:VPT:SPIS-AA¹⁷-LFI:YKQYE:VVE:AXGXR, HVPKPXX:VPT:SPIS-AA¹⁷-LFI:YKQYE:VVE:SXGXH, RVPSTXX:VPT:SPIS-AA¹⁷-LFI:YKQYE:VVE:XGXL, ASAAPXX:VPT:SPIS-AA¹⁷-LFI:YKQYE:VVE:XKXS, ASASPXX:VPT:SPIS-AA¹⁷-LFI:YKQYE:VVE:XKXS, NDEGLEX:VPT:SPIS-AA¹⁷-LFI:YKQYE:VVE:KXEXR, NDEGLEX:VPT:SPIS-AA¹⁷-LFI:YKQYE:VVE:QXEXR, SSVKXQP:VPT:SPIS-AA¹⁷-LFI:YKQYE:VVE:LEXAXA, RNVQXRP:VPT:SPIS-AA¹⁷-LFI:YKQYE:VVE:LAXKXE, GIPEPXX:VPE:SPIS-AA¹⁷-LFI:YKQYE:TVE:SXAXR, HVTKPTX:APT:SPIS-AA¹⁷-LFI:YKQYE:VVR:SXGXH, YVPKPXX:APT:SPIS-AA¹⁷-LFI:YKQYE:VVR:SXGXH, TVPKPXX:APT:SPIS-AA¹⁷-LFI:YKQYE:VVR:AXGXH, AVPKAXX:APT:SPIS-AA¹⁷-LFI:YKQYE:VVK:AXGXH, KVGKAXX:VPT:SPIS-AA¹⁷-LFI:YKQYE:VAE:XGXR, KASKAXX:VPT:SPIS-AA¹⁷-LFI:YKQYE:AVS:EXGXR, GSAGPXX:TPT:SPIS-AA¹⁷-LFI:YKQYE:VVD:RXGXS, AAPASXX:VPA:SPIS-AA¹⁷-LFI:YKQYE:VVE:AXGXR, HVPKPXX:APT:SPIS-AA¹⁷-LFI:YKQYE:VVR:SXGXH, RVPSTXX:APV:SPIS-AA¹⁷-LFI:YKQYE:VEE:XGXL, ASAAPXX:VPQ:SPIS-AA¹⁷-LFI:YKQYE:VRS:XKXS, ASASPXX:VSQ:SPIS-AA¹⁷-LFI:YKQYE:VKS:XKXS, ASASPXX:VPQ:SPIS-AA¹⁷-LFI:YKQYE:VKS:XKXS, NDEGLEX:VPT:SPIS-AA¹⁷-LFI:YKQYE:QHN:KXEXR, NDEGLEX:VPT:SPIS-AA¹⁷-LFI:YKQYE:EHS:QXEXR, SSVKXQP:SRV:SPIS-AA¹⁷-LFI:YKQYE:EEH:LEXAXA, RNVQXRP:TQV:SPIS-AA¹⁷-LFI:YKQYE:EDH:LAXKXE, KIPKAXX:APV:KPLS-AA¹⁷-LYV:DHHKD:VEE:GXGXR, GIPEPXX:APV:KPLS-AA¹⁷-LYV:DHHKD:VEE:SXAXR, SIPKAXX:APV:KPLS-AA¹⁷-LYV:DHHKD:VEE:GXGXR, HVTKPTX:APV:KPLS-AA¹⁷-LYV:DHHKD:VEE:SXGXH, YVPKPXX:APV:KPLS-AA¹⁷-LYV:DHHKD:VEE:SXGXH, TVPKPXX:APV:KPLS-AA¹⁷-LYV:DHHKD:VEE:AXGXH, AVPKAXX:APV:KPLS-AA¹⁷-LYV:DHHKD:VEE:AXGXH, KVGKAXX:APV:KPLS-AA¹⁷-LYV:DHHKD:VEE:XGXR, KASKAXX:APV:KPLS-AA¹⁷-LYV:DHHKD:VEE:EXGXR, GSAGPXX:APV:KPLS-AA¹⁷-LYV:DHHKD:VEE:RXGXS, AAPASXX:APV:KPLS-AA¹⁷-LYV:DHHKD:VEE:AXGXR, STPPTXX:APV:KPLS-AA¹⁷-LYV:DHHKD:VEE:SXGXR, HVPKPXX:APV:KPLS-AA¹⁷-LYV:DHHKD:VEE:SXGXH, ASAAPXX:APV:KPLS-AA¹⁷-LYV:DHHKD:VEE:XKXS, ASASPXX:APV:KPLS-AA¹⁷-LYV:DHHKD:VEE:XKXS, NDEGLEX:APV:KPLS-AA¹⁷-LYV:DHHKD:VEE:KXEXR, NDEGLEX:APV:KPLS-AA¹⁷-LYV:DHHKD:VEE:QXEXR, SSVKXQP:APV:KPLS-AA¹⁷-LYV:DHHKD:VEE:LEXAXA, RNVQXRP:APV:KPLS-AA¹⁷-LYV:DHHKD:VEE:LAXKXE, KIPKAXX:VPT:KPLS-AA¹⁷-LYV:DHHKD:VVE:GXGXR, GIPEPXX:VPE:KPLS-AA¹⁷-LYV:DHHKD:TVE:SXAXR, SIPKAXX:VPT:KPLS-AA¹⁷-LYV:DHHKD:VVE:GXGXR, HVTKPTX:APT:KPLS-AA¹⁷-LYV:DHHKD:VVR:SXGXH, YVPKPXX:APT:KPLS-AA¹⁷-LYV:DHHKD:VVR:SXGXH, TVPKPXX:APT:KPLS-AA¹⁷-LYV:DHHKD:VVR:AXGXH, AVPKAXX:APT:KPLS-AA¹⁷-LYV:DHHKD:VVK:AXGXH, KVGKAXX:VPT:KPLS-AA¹⁷-LYV:DHHKD:VAE:XGXR, KASKAXX:VPT:KPLS-AA¹⁷-LYV:DHHKD:AVS:EXGXR, GSAGPXX:TPT:KPLS-AA¹⁷-LYV:DHHKD:VVD:RXGXS, AAPASXX:VPA:KPLS-AA¹⁷-LYV:DHHKD:VVE:AXGXR, STPPTXX:VPT:KPLS-AA¹⁷-LYV:DHHKD:VVE:SXGXR, HVPKPXX:APT:KPLS-AA¹⁷-LYV:DHHKD:VVR:SXGXH, ASAAPXX:VPQ:KPLS-AA¹⁷-LYV:DHHKD:VRS:XKXS, ASASPXX:VSQ:KPLS-AA¹⁷-LYV:DHHKD:VKS:XKXS, ASASPXX:VPQ:KPLS-AA¹⁷-LYV:DHHKD:VKS:XKXS, NDEGLEX:VPT:KPLS-AA¹⁷-LYV:DHHKD:QHN:KXEXR, NDEGLEX:VPT:KPLS-AA¹⁷-LYV:DHHKD:EHS:QXEXR, SSVKXQP:SRV:KPLS-AA¹⁷-LYV:DHHKD:EEH:LEXAXA, RNVQXRP:TQV:KPLS-AA¹⁷-LYV:DHHKD:EDH:LAXKXE, KIPKAXX:VPQ:EPLP-AA¹⁷-VYY:EQLSN:VRS:GXGXR, GIPEPXX:VPQ:EPLP-AA¹⁷-VYY:EQLSN:VRS:SXAXR, SIPKAXX:VPQ:EPLP-AA¹⁷-VYY:EQLSN:VRS:GXGXR, HVTKPTX:VPQ:EPLP-AA¹⁷-VYY:EQLSN:VRS:SXGXH, YVPKPXX:VPQ:EPLP-AA¹⁷-VYY:EQLSN:VRS:SXGXH, TVPKPXX:VPQ:EPLP-AA¹⁷-VYY:EQLSN:VRS:AXGXH, AVPKAXX:VPQ:EPLP-AA¹⁷-VYY:EQLSN:VRS:AXGXH, KVGKAXX:VPQ:EPLP-AA¹⁷-VYY:EQLSN:VRS:XGXR, KASKAXX:VPQ:EPLP-AA¹⁷-VYY:EQLSN:VRS:EXGXR, GSAGPXX:VPQ:EPLP-AA¹⁷-VYY:EQLSN:VRS:RXGXS, AAPASXX:VPQ:EPLP-AA¹⁷-VYY:EQLSN:VRS:AXGXR, STPPTXX:VPQ:EPLP-AA¹⁷-VYY:EQLSN:VRS:SXGXR, HVPKPXX:VPQ:EPLP-AA¹⁷-VYY:EQLSN:VRS:SXGXH, RVPSTXX:VPQ:EPLP-AA¹⁷-VYY:EQLSN:VRS:XGXL, ASASPXX:VPQ:EPLP-AA¹⁷-VYY:EQLSN:VRS:XKXS, NDEGLEX:VPQ:EPLP-AA¹⁷-VYY:EQLSN:VRS:KXEXR, NDEGLEX:VPQ:EPLP-AA¹⁷-VYY:EQLSN:VRS:QXEXR, SSVKXQP:VPQ:EPLP-AA¹⁷-VYY:EQLSN:VRS:LEXAXA, RNVQXRP:VPQ:EPLP-AA¹⁷-VYY:EQLSN:VRS:LAXKXE, KIPKAXX:VPT:EPLP-AA¹⁷-VYY:EQLSN:VVE:GXGXR, GIPEPXX:VPE:EPLP-AA¹⁷-VYY:EQLSN:TVE:SXAXR, SIPKAXX:VPT:EPLP-AA¹⁷-VYY:EQLSN:VVE:GXGXR, HVTKPTX:APT:EPLP-AA¹⁷-VYY:EQLSN:VVR:SXGXH, YVPKPXX:APT:EPLP-AA¹⁷-VYY:EQLSN:VVR:SXGXH, TVPKPXX:APT:EPLP-AA¹⁷-VYY:EQLSN:VVR:AXGXH, AVPKAXX:APT:EPLP-AA¹⁷-VYY:EQLSN:VVK:AXGXH, KVGKAXX:VPT:EPLP-AA¹⁷-VYY:EQLSN:VAE:XGXR, KASKAXX:VPT:EPLP-AA¹⁷-VYY:EQLSN:AVS:EXGXR, GSAGPXX:TPT:EPLP-AA¹⁷-VYY:EQLSN:VVD:RXGXS, AAPASXX:VPA:EPLP-AA¹⁷-VYY:EQLSN:VVE:AXGXR, STPPTXX:VPT:EPLP-AA¹⁷-VYY:EQLSN:VVE:SXGXR, HVPKPXX:APT:EPLP-AA¹⁷-VYY:EQLSN:VVR:SXGXH, RVPSTXX:APV:EPLP-AA¹⁷-VYY:EQLSN:VEE:XGXL, ASASPXX:VSQ:EPLP-AA¹⁷-VYY:EQLSN:VKS:XKXS, ASASPXX:VPQ:EPLP-AA¹⁷-VYY:EQLSN:VKS:XKXS, NDEGLEX:VPT:EPLP-AA¹⁷-VYY:EQLSN:QHN:KXEXR, NDEGLEX:VPT:EPLP-AA¹⁷-VYY:EQLSN:EHS:QXEXR, SSVKXQP:SRV:EPLP-AA¹⁷-VYY:EQLSN:EEH:LEXAXA, RNVQXRP:TQV:EPLP-AA¹⁷-VYY:EQLSN:EDH:LAXKXE, KIPKAXX:VSQ:EPLT-AA¹⁷-LYY:EQLSN:VKS:GXGXR, GIPEPXX:VSQ:EPLT-AA¹⁷-LYY:EQLSN:VKS:SXAXR, SIPKAXX:VSQ:EPLT-AA¹⁷-LYY:EQLSN:VKS:GXGXR, HVTKPTX:VSQ:EPLT-AA¹⁷-LYY:EQLSN:VKS:SXGXH, YVPKPXX:VSQ:EPLT-AA¹⁷-LYY:EQLSN:VKS:SXGXH, TVPKPXX:VSQ:EPLT-AA¹⁷-LYY:EQLSN:VKS:AXGXH, AVPKAXX:VSQ:EPLT-AA¹⁷-LYY:EQLSN:VKS:AXGXH, KVGKAXX:VSQ:EPLT-AA¹⁷-LYY:EQLSN:VKS:XGXR, KASKAXX:VSQ:EPLT-AA¹⁷-LYY:EQLSN:VKS:EXGXR, GSAGPXX:VSQ:EPLT-AA¹⁷-LYY:EQLSN:VKS:RXGXS, AAPASXX:VSQ:EPLT-AA¹⁷-LYY:EQLSN:VKS:AXGXR, STPPTXX:VSQ:EPLT-AA¹⁷-LYY:EQLSN:VKS:SXGXR, HVPKPXX:VSQ:EPLT-AA¹⁷-LYY:EQLSN:VKS:SXGXH, RVPSTXX:VSQ:EPLT-AA¹⁷-LYY:EQLSN:VKS:XGXL, ASAAPXX:VSQ:EPLT-AA¹⁷-LYY:EQLSN:VKS:XKXS, ASASPXX:VSQ:EPLT-AA¹⁷-LYY:EQLSN:VKS:XKXS, NDEGLEX:VSQ:EPLT-AA¹⁷-LYY:EQLSN:VKS:KXEXR, NDEGLEX:VSQ:EPLT-AA¹⁷-LYY:EQLSN:VKS:QXEXR, SSVKXQP:VSQ:EPLT-AA¹⁷-LYY:EQLSN:VKS:LEXAXA, RNVQXRP:VSQ:EPLT-AA¹⁷-LYY:EQLSN:VKS:LAXKXE, KIPKAXX:VPT:EPLT-AA¹⁷-LYY:EQLSN:VVE:GXGXR, GIPEPXX:VPE:EPLT-AA¹⁷-LYY:EQLSN:TVE:SXAXR, SIPKAXX:VPT:EPLT-AA¹⁷-LYY:EQLSN:VVE:GXGXR, HVTKPTX:APT:EPLT-AA¹⁷-LYY:EQLSN:VVR:SXGXH, YVPKPXX:APT:EPLT-AA¹⁷-LYY:EQLSN:VVR:SXGXH, TVPKPXX:APT:EPLT-AA¹⁷-LYY:EQLSN:VVR:AXGXH, AVPKAXX:APT:EPLT-AA¹⁷-LYY:EQLSN:VVK:AXGXH, KVG KAXX:VPT:EPLT-AA¹⁷-LYY:EQLSN:VAE:XGXR, KASKAXX:VPT:EPLT-AA¹⁷-LYY:EQLSN:AVS:EXGXR, GSAGPXX:TPT:EPLT-AA¹⁷-LYY:EQLSN:VVD:RXGXS, AAPASXX:VPA:EPLT-AA¹⁷-LYY:EQLSN:VVE:AXGXR, STPPTXX:VPT:EPLT-AA¹⁷-LYY:EQLSN:VVE:SXGXR, HVPKPXX:APT:EPLT-AA¹⁷-LYY:EQLSN:VVR:SXGXH, RVPSTXX:APV:EPLT-AA¹⁷-LYY:EQLSN:VEE:XGXL, ASAAPXX:VPQ:EPLT-AA¹⁷-LYY:EQLSN:VRS:XKXS, ASASPXX:VPQ:EPLT-AA¹⁷-LYY:EQLSN:VKS:XKXS, NDEGLEX:VPT:EPLT-AA¹⁷-LYY:EQLSN:QHN:KXEXR, NDEGLEX:VPT:EPLT-AA¹⁷-LYY:EQLSN:EHS:QXEXR, SSVKXQP:SRV:EPLT-AA¹⁷-LYY:EQLSN:EEH:LEXAXA, RNVQXRP:TQV:EPLT-AA¹⁷-LYY:EQLSN:EDH:LAXKXE, KIPKAXX:VPQ:EPLT-AA¹⁷-LYY:EQLSN:VKS:GXGXR, GIPEPXX:VPQ:EPLT-AA¹⁷-LYY:EQLSN:VKS:SXAXR, SIPKAXX:VPQ:EPLT-AA¹⁷-LYY:EQLSN:VKS:GXGXR, HVTKPTX:VPQ:EPLT-AA¹⁷-LYY:EQLSN:VKS:SXGXH, YVPKPXX:VPQ:EPLT-AA¹⁷-LYY:EQLSN:VKS:SXGXH, TVPKPXX:VPQ:EPLT-AA¹⁷-LYY:EQLSN:VKS:AXGXH, AVPKAXX:VPQ:EPLT-AA¹⁷-LYY:EQLSN:VKS:AXGXH, KVGKAXX:VPQ:EPLT-AA¹⁷-LYY:EQLSN:VKS:XGXR, KASKAXX:VPQ:EPLT-AA¹⁷-LYY:EQLSN:VKS:EXGXR, GSAGPXX:VPQ:EPLT-AA¹⁷-LYY:EQLSN:VKS:RXGXS, AAPASXX:VPQ:EPLT-AA¹⁷-LYY:EQLSN:VKS:AXGXR, STPPTXX:VPQ:EPLT-AA¹⁷-LYY:EQLSN:VKS:SXGXR, HVPKPXX:VPQ:EPLT-AA¹⁷-LYY:EQLSN:VKS:SXGXH, RVPSTXX:VPQ:EPLT-AA¹⁷-LYY:EQLSN:VKS:XGXL, ASAAPXX:VPQ:EPLT-AA¹⁷-LYY:EQLSN:VKS:XKXS, NDEGLEX:VPQ:EPLT-AA¹⁷-LYY:EQLSN:VKS:KXEXR, NDEGLEX:VPQ:EPLT-AA¹⁷-LYY:EQLSN:VKS:QXEXR, SSVKXQP:VPQ:EPLT-AA¹⁷-LYY:EQLSN:VKS:LEXAXA, RNVQXRP:VPQ:EPLT-AA¹⁷-LYY:EQLSN:VKS:LAXKXE, KIPKAXX:VPT:SNIT-AA¹⁷-QIM:IGEMS:QHN:GXGXR, GIPEPXX:VPT:SNIT-AA¹⁷-QIM:IGEMS:QHN:SXAXR, SIPKAXX:VPT:SNIT-AA¹⁷-QIM:IGEMS:QHN:GXGXR, HVTKPTX:VPT:SNIT-AA¹⁷-QIM:IGEMS:QHN:SXGXH, YVPKPXX:VPT:SNIT-AA¹⁷-QIM:IGEMS:QHN:SXGXH, TVPKPXX:VPT:SNIT-AA¹⁷-QIM:IGEMS:QHN:AXGXH, AVPKAXX:VPT:SNIT-AA¹⁷-QIM:IGEMS:QHN:AXGXH, KVGKAXX:VPT:SNIT-AA¹⁷-QIM:IGEMS:QHN:XGXR, KASKAXX:VPT:SNIT-AA¹⁷-QIM:IGEMS:QHN:EXGXR, GSAGPXX:VPT:SNIT-AA¹⁷-QIM:IGEMS:QHN:RXGXS, AAPASXX:VPT:SNIT-AA¹⁷-QIM:IGEMS:QHN:AXGXR, STPPTXX:VPT:SNIT-AA¹⁷-QIM:IGEMS:QHN:SXGXR, HVPKPXX:VPT:SNIT-AA¹⁷-QIM:IGEMS:QHN:SXGXH, RVPSTXX:VPT:SNIT-AA¹⁷-QIM:IGEMS:QHN:XGXL, ASAAPXX:VPT:SNIT-AA¹⁷-QIM:IGEMS:QHN:XKXS, ASASPXX:VPT:SNIT-AA¹⁷-QIM:IGEMS:QHN:XKXS, NDEGLEX:VPT:SNIT-AA¹⁷-QIM:IGEMS:QHN:QXEXR, NDEGLEX:VPT:SNIT-AA¹⁷-QIM:IGEMS:QHN:KXEXR, SSVKXQP:VPT:SNIT-AA¹⁷-QIM:IGEMS:QHN:LEXAXA, RNVQXRP:VPT:SNIT-AA¹⁷-QIM:IGEMS:QHN:LAXKXE, KIPKAXX:VPT:SNIT-AA¹⁷-QIM:IGEMS:VVE:GXGXR, GIPEPXX:VPE:SNIT-AA¹⁷-QIM:IGEMS:TVE:SXAXR, SIPKAXX:VPT:SNIT-AA¹⁷-QIM:IGEMS:VVE:GXGXR, HVTKPTX:APT:SNIT-AA¹⁷-QIM:IGEMS:VVR:SXGXH, YVPKPXX:APT:SNIT-AA¹⁷-QIM:IGEMS:VVR:SXGXH, TVPKPXX:APT:SNIT-AA¹⁷-QIM:IGEMS:VVR:AXGXH, AVPKAXX:APT:SNIT-AA¹⁷-QIM:IGEMS:VVK:AXGXH, KVGKAXX:VPT:SNIT-AA¹⁷-QIM:IGEMS:VAE:XGXR, KASKAXX:VPT:SNIT-AA¹⁷-QIM:IGEMS:AVS:EXGXR, GSAGPXX:TPT:SNIT-AA¹⁷-QIM:IGEMS:VVD:RXGXS, AAPASXX:VPA:SNIT-AA¹⁷-QIM:IGEMS:VVE:AXGXR, STPPTXX:VPT:SNIT-AA¹⁷-QIM:IGEMS:VVE:SXGXR, HVPKPXX:APT:SNIT-AA¹⁷-QIM:IGEMS:VVR:SXGXH, RVPSTXX:APV:SNIT-AA¹⁷-QIM:IGEMS:VEE:XGXL, ASAAPXX:VPQ:SNIT-AA¹⁷-QIM:IGEMS:VRS:XKXS, ASASPXX:VSQ:SNIT-AA¹⁷-QIM:IGEMS:VKS:XKXS, ASASPXX:VPQ:SNIT-AA¹⁷-QIM:IGEMS:VKS:XKXS, NDEGLEX:VPT:SNIT-AA¹⁷-QIM:IGEMS:EHS:QXEXR, SSVKXQP:SRV:SNIT-AA¹⁷-QIM:IGEMS:EEH:LEXAXA, RNVQXRP:TQV:SNIT-AA¹⁷-QIM:IGEMS:EDH:LAXKXE, KIPKAXX:VPT:SNIT-AA¹⁷-QIM:LGEMS:EHS:GXGXR, GIPEPXX:VPT:SNIT-AA¹⁷-QIM:LGEMS:EHS:SXAXR, SIPKAXX:VPT:SNIT-AA¹⁷-QIM:LGEMS:EHS:GXGXR, HVTKPTX:VPT:SNIT-AA¹⁷-QIM:LGEMS:EHS:SXGXH, YVPKPXX:VPT:SNIT-AA¹⁷-QIM:LGEMS:EHS:SXGXH, TVPKPXX:VPT:SNIT-AA¹⁷-QIM:LGEMS:EHS:AXGXH, AVPKAXX:VPT:SNIT-AA¹⁷-QIM:LGEMS:EHS:AXGXH, KVGKAXX:VPT:SNIT-AA¹⁷-QIM:LGEMS:EHS:XGXR, KASKAXX:VPT:SNIT-AA¹⁷-QIM:LGEMS:EHS:EXGXR, GSAGPXX:VPT:SNIT-AA¹⁷-QIM:LGEMS:EHS:RXGXS, AAPASXX:VPT:SNIT-AA¹⁷-QIM:LGEMS:EHS:AXGXR, STPPTXX:VPT:SNIT-AA¹⁷-QIM:LGEMS:EHS:SXGXR, HVPKPXX:VPT:SNIT-AA¹⁷-QIM:LGEMS:EHS:SXGXH, RVPSTXX:VPT:SNIT-AA¹⁷-QIM:LGEMS:EHS:XGXL, ASAAPXX:VPT:SNIT-AA¹⁷-QIM:LGEMS:EHS:XKXS, ASASPXX:VPT:SNIT-AA¹⁷-QIM:LGEMS:EHS:XKXS, NDEGLEX:VPT:SNIT-AA¹⁷-QIM:LGEMS:EHS:KXEXR, SSVKXQP:VPT:SNIT-AA¹⁷-QIM:LGEMS:EHS:LEXAXA, RNVQXRP:VPT:SNIT-AA¹⁷-QIM:LGEMS:EHS:LAXKXE, KIPKAXX:VPT:SNIT-AA¹⁷-QIM:LGEMS:VVE:GXGXR, GIPEPXX:VPE:SNIT-AA¹⁷-QIM:LGEMS:TVE:SXAXR, SIPKAXX:VPT:SNIT-AA¹⁷-QIM:LGEMS:VVE:GXGXR, HVTKPTX:APT:SNIT-AA¹⁷-QIM:LGEMS:VVR:SXGXH, YVPKPXX:APT:SNIT-AA¹⁷-QIM:LGEMS:VVR:SXGXH, TVPKPXX:APT:SNIT-AA¹⁷-QIM:LGEMS:VVR:AXGXH, AVPKAXX:APT:SNIT-AA¹⁷-QIM:LGEMS:VVK:AXGXH, KVGKAXX:VPT:SNIT-AA¹⁷-QIM:LGEMS:VAE:XGXR, KASKAXX:VPT:SNIT-AA¹⁷-QIM:LGEMS:AVS:EXGXR, GSAGPXX:TPT:SNIT-AA¹⁷-QIM:LGEMS:VVD:RXGXS, AAPASXX:VPA:SNIT-AA¹⁷-QIM:LGEMS:VVE:AXGXR, STPPTXX:VPT:SNIT-AA¹⁷-QIM:LGEMS:VVE:SXGXR, HVPKPXX:APT:SNIT-AA¹⁷-QIM:LGEMS:VVR:SXGXH, RVPSTXX:APV:SNIT-AA¹⁷-QIM:LGEMS:VEE:XGXL, ASAAPXX:VPQ:SNIT-AA¹⁷-QIM:LGEMS:VRS:XKXS, ASASPXX:VSQ:SNIT-AA¹⁷-QIM:LGEMS:VKS:XKXS, ASASPXX:VPQ:SNIT-AA¹⁷-QIM:LGEMS:VKS:XKXS, NDEGLEX:VPT:SNIT-AA¹⁷-QIM:LGEMS:QHN:KXEXR, SSVKXQP:SRV:SNIT-AA¹⁷-QIM:LGEMS:EEH:LEXAXA, RNVQXRP:TQV:SNIT-AA¹⁷-QIM:LGEMS:EDH:LAXKXE, KIPKAXX:SRV:RSVK-AA¹⁷-AKV:KEVQV:EEH:GXGXR, GIPEPXX:SRV:RSVK-AA¹⁷-AKV:KEVQV:EEH:SXAXR, SIPKAXX:SRV:RSVK-AA¹⁷-AKV:KEVQV:EEH:GXGXR, HVTKPTX:SRV:RSVK-AA¹⁷-AKV:KEVQV:EEH:SXGXH, YVPKPXX:SRV:RSVK-AA¹⁷-AKV:KEVQV:EEH:SXGXH, TVPKPXX:SRV:RSVK-AA¹⁷-AKV:KEVQV:EEH:AXGXH, AVPKAXX:SRV:RSVK-AA¹⁷-AKV:KEVQV:EEH:AXGXH, KVGKAXX:SRV:RSVK-AA¹⁷-AKV:KEVQV:EEH:XGXR, KASKAXX:SRV:RSVK-AA¹⁷-AKV:KEVQV:EEH:EXGXR, GSAGPXX:SRV:RSVK-AA¹⁷-AKV:KEVQV:EEH:RXGXS, AAPASXX:SRV:RSVK-AA¹⁷-AKV:KEVQV:EEH:AXGXR, STPPTXX:SRV:RSVK-AA¹⁷-AKV:KEVQV:EEH:SXGXR, HVPKPXX:SRV:RSVK-AA¹⁷-AKV:KEVQV:EEH:SXGXH, RVPSTXX:SRV:RSVK-AA¹⁷-AKV:KEVQV:EEH:XGXL, ASAAPXX:SRV:RSVK-AA¹⁷-AKV:KEVQV:EEH:XKXS, ASASPXX:SRV:RSVK-AA¹⁷-AKV:KEVQV:EEH:XKXS, NDEGLEX:SRV:RSVK-AA¹⁷-AKV:KEVQV:EEH:KXEXR, NDEGLEX:SRV:RSVK-AA¹⁷-AKV:KEVQV:EEH:QXEXR, RNVQXRP:SRV:RSVK-AA¹⁷-AKV:KEVQV:EEH:LAXKXE, KIPKAXX:VPT:RSVK-AA¹⁷-AKV:KEVQV:VVE:GXGXR, GIPEPXX:VPE:RSVK-AA¹⁷-AKV:KEVQV:TVE:SXAXR, SIPKAXX:VPT:RSVK-AA¹⁷-AKV:KEVQV:VVE:GXGXR, HVTKPTX:APT:RSVK-AA¹⁷-AKV:KEVQV:VVR:SXGXH, YVPKPXX:APT:RSVK-AA¹⁷-AKV:KEVQV:VVR:SXGXH, TVPKPXX:APT:RSVK-AA¹⁷-AKV:KEVQV:VVR:AXGXH, AVPKAXX:APT:RSVK-AA¹⁷-AKV:KEVQV:VVK:AXGXH, KVGKAXX:VPT:RSVK-AA¹⁷-AKV:KEVQV:VAE:XGXR, KASKAXX:VPT:RSVK-AA¹⁷-AKV:KEVQV:AVS:EXGXR, GSAGPXX:TPT:RSVK-AA¹⁷-AKV:KEVQV:VVD:RXGXS, AAPASXX:VPA:RSVK-AA¹⁷-AKV:KEVQV:VVE:AXGXR, STPPTXX:VPT:RSVK-AA¹⁷-AKV:KEVQV:VVE:SXGXR, HVPKPXX:APT:RSVK-AA¹⁷-AKV:KEVQV:VVR:SXGXH, RVPSTXX:APV:RSVK-AA¹⁷-AKV:KEVQV:VEE:XGXL, ASAAPXX:VPQ:RSVK-AA¹⁷-AKV:KEVQV:VRS:XKXS, ASASPXX:VSQ:RSVK-AA¹⁷-AKV:KEVQV:VKS:XKXS, ASASPXX:VPQ:RSVK-AA¹⁷-AKV:KEVQV:VKS:XKXS, NDEGLEX:VPT:RSVK-AA¹⁷-AKV:KEVQV:QHN:KXEXR, NDEGLEX:VPT:RSVK-AA¹⁷-AKV:KEVQV:EHS:QXEXR, RNVQXRP:TQV:RSVK-AA¹⁷-AKV:KEVQV:EDH:LAXKXE, KIPKAXX:TQV:RPVQ-AA¹⁷-RKI:KKATV:EDH:GXGXR, GIPEPXX:TQV:RPVQ-AA¹⁷-RKI:KKATV:EDH:SXAXR, SIPKAXX:TQV:RPVQ-AA¹⁷-RKI:KKATV:EDH:GXGXR, HVTKPTX:TQV:RPVQ-AA¹⁷-RKI:KKATV:EDH:SXGXH, YVPKPXX:TQV:RPVQ-AA¹⁷-RKI:KKATV:EDH:SXGXH, TVPKPXX:TQV:RPVQ-AA¹⁷-RKI:KKATV:EDH:AXGXH, AVPKAXX:TQV:RPVQ-AA¹⁷-RKI:KKATV:EDH:AXGXH, KVGKAXX:TQV:RPVQ-AA¹⁷-RKI:KKATV:EDH:XGXR, KASKAXX:TQV:RPVQ-AA¹⁷-RKI:KKATV:EDH:EXGXR, GSAGPXX:TQV:RPVQ-AA¹⁷-RKI:KKATV:EDH:RXGXS, AAPASXX:TQV:RPVQ-AA¹⁷-RKI:KKATV:EDH:AXGXR, STPPTXX:TQV:RPVQ-AA¹⁷-RKI:KKATV:EDH:SXGXR, HVPKPXX:TQV:RPVQ-AA¹⁷-RKI:KKATV:EDH:SXGXH, RVPSTXX:TQV:RPVQ-AA¹⁷-RKI:KKATV:EDH:XGXL, ASAAPXX:TQV:RPVQ-AA¹⁷-RKI:KKATV:EDH:XKXS, ASASPXX:TQV:RPVQ-AA¹⁷-RKI:KKATV:EDH:XKXS, NDEGLEX:TQV:RPVQ-AA¹⁷-RKI:KKATV:EDH:KXEXR, NDEGLEX:TQV:RPVQ-AA¹⁷-RKI:KKATV:EDH:QXEXR, SSVKXQP:TQV:RPVQ-AA¹⁷-RKI:KKATV:EDH:LEXAXA, KIPKAXX:VPT:RPVQ-AA¹⁷-RKI:KKATV:VVE:GXGXR, GIPEPXX:VPE:RPVQ-AA¹⁷-RKI:KKATV:TVE:SXAXR, SIPKAXX:VPT:RPVQ-AA¹⁷-RKI:KKATV:VVE:GXGXR, HVTKPTX:APT:RPVQ-AA¹⁷-RKI:KKATV:VVR:SXGXH, YVPKPXX:APT:RPVQ-AA¹⁷-RKI:KKATV:VVR:SXGXH, TVPKPXX:APT:RPVQ-AA¹⁷-RKI:KKATV:VVR:AXGXH, AVPKAXX:APT:RPVQ-AA¹⁷-RKI:KKATV:VVK:AXGXH, KVGKAXX:VPT:RPVQ-AA¹⁷-RKI:KKATV:VAE:XGXR, KASKAXX:VPT:RPVQ-AA¹⁷-RKI:KKATV:AVS:EXGXR, GSAGPXX:TPT:RPVQ-AA¹⁷-RKI:KKATV:VVD:RXGXS, AAPASXX:VPA:RPVQ-AA¹⁷-RKI:KKATV:VVE:AXGXR, STPPTXX:VPT:RPVQ-AA¹⁷-RKI:KKATV:VVE:SXGXR, HVPKPXX:APT:RPVQ-AA¹⁷-RKI:KKATV:VVR:SXGXH, RVPSTXX:APV:RPVQ-AA¹⁷-RKI:KKATV:VEE:XGXL, ASAAPXX:VPQ:RPVQ-AA¹⁷-RKI:KKATV:VRS:XKXS, ASASPXX:VSQ:RPVQ-AA¹⁷-RKI:KKATV:VKS:XKXS, ASASPXX:VPQ:RPVQ-AA¹⁷-RKI:KKATV:VKS:XKXS, NDEGLEX:VPT:RPVQ-AA¹⁷-RKI:KKATV:QHN:KXEXR, NDEGLEX:VPT:RPVQ-AA¹⁷-RKI:KKATV:EHS:QXEXR and SSVKXQP:SRV:RPVQ-AA¹⁷-RKI:KKATV:EEH:LEXAXA; and wherein AA¹⁷ is selected from the group consisting of G, A, V, L, I, P, F, M, W, T and S (in particular is selected from the group consisting of M, I, L, V and T). More particularly, the hexaplet PEP7:PEP3:PEP12:PEP2:PEP4:PEP8 is selected from the group consisting of GIPEPXX:VPT:SAIS-AA¹⁷-LYL:LKNYQ:VVE:SXAXR, HVTKPTX:VPT:SAIS-AA¹⁷-LYL:LKNYQ:VVE:SXGXH, YVPKPXX:VPT:SAIS-AA¹⁷-LYL:LKNYQ:VVE:SXGXH, TVPKPXX:VPT:SAIS-AA¹⁷-LYL:LKNYQ:VVE:AXGXH, AVPKAXX:VPT:SAIS-AA¹⁷-LYL:LKNYQ:VVE:AXGXH, KVGKAXX:VPT:SAIS-AA¹⁷-LYL:LKNYQ:VVE:XGXR, KASKAXX:VPT:SAIS-AA¹⁷-LYL:LKNYQ:VVE:EXGXR, GSAGPXX:VPT:SAIS-AA¹⁷-LYL:LKNYQ:VVE:RXGXS, AAPASXX:VPT:SAIS-AA¹⁷-LYL:LKNYQ:VVE:AXGXR, STPPTXX:VPT:SAIS-AA¹⁷-LYL:LKNYQ:VVE:SXGXR, HVPKPXX:VPT:SAIS-AA¹⁷-LYL:LKNYQ:VVE:SXGXH, RVPSTXX:VPT:SAIS-AA¹⁷-LYL:LKNYQ:VVE:XGXL, ASAAPXX:VPT:SAIS-AA¹⁷-LYL:LKNYQ:VVE:XKXS, ASASPXX:VPT:SAIS-AA¹⁷-LYL:LKNYQ:VVE:XKXS, GIPEPXX:VPE:SAIS-AA¹⁷-LYL:LKNYQ:TVE:SXAXR, HVTKPTX:APT:SAIS-AA¹⁷-LYL:LKNYQ:VVR:SXGXH, YVPKPXX:APT:SAIS-AA¹⁷-LYL:LKNYQ:VVR:SXGXH, TVPKPXX:APT:SAIS-AA¹⁷-LYL:LKNYQ:VVR:AXGXH, AVPKAXX:APT:SAIS-AA¹⁷-LYL:LKNYQ:VVK:AXGXH, KVGKAXX:VPT:SAIS-AA¹⁷-LYL:LKNYQ:VAE:XGXR, KASKAXX:VPT:SAIS-AA¹⁷-LYL:LKNYQ:AVS:EXGXR, GSAGPXX:TPT:SAIS-AA¹⁷-LYL:LKNYQ:VVD:RXGXS, AAPASXX:VPA:SAIS-AA¹⁷-LYL:LKNYQ:VVE:AXGXR, HVPKPXX:APT:SAIS-AA¹⁷-LYL:LKNYQ:VVR:SXGXH, RVPSTXX:APV:SAIS-AA¹⁷-LYL:LKNYQ:VEE:XGXL, ASAAPXX:VPQ:SAIS-AA¹⁷-LYL:LKNYQ:VRS:XKXS, ASASPXX:VSQ:SAIS-AA¹⁷-LYL:LKNYQ:VKS:XKXS, ASASPXX:VPQ:SAIS-AA¹⁷-LYL:LKNYQ:VKS:XKXS, NDEGLEX:VPT:SAIS-AA¹⁷-LYL:LKNYQ:QHN:KXEXR, NDEGLEX:VPT:SAIS-AA¹⁷-LYL:LKNYQ:EHS:QXEXR, SSVKXQP:SRV:SAIS-AA¹⁷-LYL:LKNYQ:EEH:LEXAXA, RNVQXRP:TQV:SAIS-AA¹⁷-LYL:LKNYQ:EDH:LAXKXE, KIPKAXX:VPE:SSLS-AA¹⁷-LFF:LKVYP:TVE:GXGXR, SIPKAXX:VPE:SSLS-AA¹⁷-LFF:LKVYP:TVE:GXGXR, HVTKPTX:VPE:SSLS-AA¹⁷-LFF:LKVYP:TVE:SXGXH, YVPKPXX:VPE:SSLS-AA¹⁷-LFF:LKVYP:TVE:SXGXH, TVPKPXX:VPE:SSLS-AA¹⁷-LFF:LKVYP:TVE:AXGXH, AVPKAXX:VPE:SSLS-AA¹⁷-LFF:LKVYP:TVE:AXGXH, KVGKAXX:VPE:SSLS-AA¹⁷-LFF:LKVYP:TVE:XGXR, KASKAXX:VPE:SSLS-AA¹⁷-LFF:LKVYP:TVE:EXGXR, GSAGPXX:VPE:SSLS-AA¹⁷-LFF:LKVYP:TVE:RXGXS, AAPASXX:VPE:SSLS-AA¹⁷-LFF:LKVYP:TVE:AXGXR, STPPTXX:VPE:SSLS-AA¹⁷-LFF:LKVYP:TVE:SXGXR, HVPKPXX:VPE:SSLS-AA¹⁷-LFF:LKVYP:TVE:SXGXH, RVPSTXX:VPE:SSLS-AA¹⁷-LFF:LKVYP:TVE:XGXL, ASAAPXX:VPE:SSLS-AA¹⁷-LFF:LKVYP:TVE:XKXS, ASASPXX:VPE:SSLS-AA¹⁷-LFF:LKVYP:TVE:XKXS, KIPKAXX:VPT:SSLS-AA¹⁷-LFF:LKVYP:VVE:GXGXR, SIPKAXX:VPT:SSLS-AA¹⁷-LFF:LKVYP:VVE:GXGXR, HVTKPTX:APT:SSLS-AA¹⁷-LFF:LKVYP:VVR:SXGXH, YVPKPXX:APT:SSLS-AA¹⁷-LFF:LKVYP:VVR:SXGXH, TVPKPXX:APT:SSLS-AA¹⁷-LFF:LKVYP:VVR:AXGXH, AVPKAXX:APT:SSLS-AA¹⁷-LFF:LKVYP:VVK:AXGXH, KVGKAXX:VPT:SSLS-AA¹⁷-LFF:LKVYP:VAE:XGXR, KASKAXX:VPT:SSLS-AA¹⁷-LFF:LKVYP:AVS:EXGXR, GSAGPXX:TPT:SSLS-AA¹⁷-LFF:LKVYP:VVD:RXGXS, AAPASXX:VPA:SSLS-AA¹⁷-LFF:LKVYP:VVE:AXGXR, STPPTXX:VPT:SSLS-AA¹⁷-LFF:LKVYP:VVE:SXGXR, HVPKPXX:APT:SSLS-AA¹⁷-LFF:LKVYP:VVR:SXGXH, RVPSTXX:APV:SSLS-AA¹⁷-LFF:LKVYP:VEE:XGXL, ASAAPXX:VPQ:SSLS-AA¹⁷-LFF:LKVYP:VRS:XKXS, ASASPXX:VSQ:SSLS-AA¹⁷-LFF:LKVYP:VKS:XKXS, ASASPXX:VPQ:SSLS-AA¹⁷-LFF:LKVYP:VKS:XKXS, NDEGLEX:VPT:SSLS-AA¹⁷-LFF:LKVYP:QHN:KXEXR, NDEGLEX:VPT:SSLS-AA¹⁷-LFF:LKVYP:EHS:QXEXR, SSVKXQP:SRV:SSLS-AA¹⁷-LFF:LKVYP:EEH:LEXAXA, RNVQXRP:TQV:SSLS-AA¹⁷-LFF:LKVYP:EDH:LAXKXE, KIPKAXX:APT:NAIS-AA¹⁷-LYF:LKKYR:VVR:GXGXR, GIPEPXX:APT:NAIS-AA¹⁷-LYF:LKKYR:VVR:SXAXR, SIPKAXX:APT:NAIS-AA¹⁷-LYF:LKKYR:VVR:GXGXR, AVPKAXX:APT:NAIS-AA¹⁷-LYF:LKKYR:VVR:AXGXH, KVGKAXX:APT:NAIS-AA¹⁷-LYF:LKKYR:VVR:XGXR, KASKAXX:APT:NAIS-AA¹⁷-LYF:LKKYR:VVR:EXGXR, GSAGPXX:APT:NAIS-AA¹⁷-LYF:LKKYR:VVR:RXGXS, AAPASXX:APT:NAIS-AA¹⁷-LYF:LKKYR:VVR:AXGXR, STPPTXX:APT:NAIS-AA¹⁷-LYF:LKKYR:VVR:SXGXR, RVPSTXX:APT:NAIS-AA¹⁷-LYF:LKKYR:VVR:XGXL, ASAAPXX:APT:NAIS-AA¹⁷-LYF:LKKYR:VVR:XKXS, ASASPXX:APT:NAIS-AA¹⁷-LYF:LKKYR:VVR:XKXS, KIPKAXX:VPT:NAIS-AA¹⁷-LYF:LKKYR:VVE:GXGXR, GIPEPXX:VPE:NAIS-AA¹⁷-LYF:LKKYR:TVE:SXAXR, SIPKAXX:VPT:NAIS-AA¹⁷-LYF:LKKYR:VVE:GXGXR, AVPKAXX:APT:NAIS-AA¹⁷-LYF:LKKYR:VVK:AXGXH, KVGKAXX:VPT:NAIS-AA¹⁷-LYF:LKKYR:VAE:XGXR, KASKAXX:VPT:NAIS-AA¹⁷-LYF:LKKYR:AVS:EXGXR, GSAGPXX:TPT:NAIS-AA¹⁷-LYF:LKKYR:VVD:RXGXS, AAPASXX:VPA:NAIS-AA¹⁷-LYF:LKKYR:VVE:AXGXR, STPPTXX:VPT:NAIS-AA¹⁷-LYF:LKKYR:VVE:SXGXR, RVPSTXX:APV:NAIS-AA¹⁷-LYF:LKKYR:VEE:XGXL, ASAAPXX:VPQ:NAIS-AA¹⁷-LYF:LKKYR:VRS:XKXS, ASASPXX:VSQ:NAIS-AA¹⁷-LYF:LKKYR:VKS:XKXS, ASASPXX:VPQ:NAIS-AA¹⁷-LYF:LKKYR:VKS:XKXS, NDEGLEX:VPT:NAIS-AA¹⁷-LYF:LKKYR:QHN:KXEXR, NDEGLEX:VPT:NAIS-AA¹⁷-LYF:LKKYR:EHS:QXEXR, SSVKXQP:SRV:NAIS-AA¹⁷-LYF:LKKYR:EEH:LEXAXA, RNVQXRP:TQV:NAIS-AA¹⁷-LYF:LKKYR:EDH:LAXKXE, KIPKAXX:APT:SATS-AA¹⁷-LYY:LRKHR:VVK:GXGXR, GIPEPXX:APT:SATS-AA¹⁷-LYY:LRKHR:VVK:SXAXR, SIPKAXX:APT:SATS-AA¹⁷-LYY:LRKHR:VVK:GXGXR, HVTKPTX:APT:SATS-AA¹⁷-LYY:LRKHR:VVK:SXGXH, YVPKPXX:APT:SATS-AA¹⁷-LYY:LRKHR:VVK:SXGXH, TVPKPXX:APT:SATS-AA¹⁷-LYY:LRKHR:VVK:AXGXH, KVGKAXX:APT:SATS-AA¹⁷-LYY:LRKHR:VVK:XGXR, KASKAXX:APT:SATS-AA¹⁷-LYY:LRKHR:VVK:EXGXR, GSAGPXX:APT:SATS-AA¹⁷-LYY:LRKHR:VVK:RXGXS, AAPASXX:APT:SATS-AA¹⁷-LYY:LRKHR:VVK:AXGXR, STPPTXX:APT:SATS-AA¹⁷-LYY:LRKHR:VVK:SXGXR, HVPKPXX:APT:SATS-AA¹⁷-LYY:LRKHR:VVK:SXGXH, RVPSTXX:APT:SATS-AA¹⁷-LYY:LRKHR:VVK:XGXL, ASAAPXX:APT:SATS-AA¹⁷-LYY:LRKHR:VVK:XKXS, ASASPXX:APT:SATS-AA¹⁷-LYY:LRKHR:VVK:XKXS, KIPKAXX:VPT:SATS-AA¹⁷-LYY:LRKHR:VVE:GXGXR, GIPEPXX:VPE:SATS-AA¹⁷-LYY:LRKHR:TVE:SXAXR, SIPKAXX:VPT:SATS-AA¹⁷-LYY:LRKHR:VVE:GXGXR, HVTKPTX:APT:SATS-AA¹⁷-LYY:LRKHR:VVR:SXGXH, YVPKPXX:APT:SATS-AA¹⁷-LYY:LRKHR:VVR:SXGXH, TVPKPXX:APT:SATS-AA¹⁷-LYY:LRKHR:VVR:AXGXH, KVGKAXX:VPT:SATS-AA¹⁷-LYY:LRKHR:VAE:XGXR, KASKAXX:VPT:SATS-AA¹⁷-LYY:LRKHR:AVS:EXGXR, GSAGPXX:TPT:SATS-AA¹⁷-LYY:LRKHR:VVD:RXGXS, AAPASXX:VPA:SATS-AA¹⁷-LYY:LRKHR:VVE:AXGXR, STPPTXX:VPT:SATS-AA¹⁷-LYY:LRKHR:VVE:SXGXR, HVPKPXX:APT:SATS-AA¹⁷-LYY:LRKHR:VVR:SXGXH, RVPSTXX:APV:SATS-AA¹⁷-LYY:LRKHR:VEE:XGXL, ASAAPXX:VPQ:SATS-AA¹⁷-LYY:LRKHR:VRS:XKXS, ASASPXX:VSQ:SATS-AA¹⁷-LYY:LRKHR:VKS:XKXS, ASASPXX:VPQ:SATS-AA¹⁷-LYY:LRKHR:VKS:XKXS, NDEGLEX:VPT:SATS-AA¹⁷-LYY:LRKHR:QHN:KXEXR, NDEGLEX:VPT:SATS-AA¹⁷-LYY:LRKHR:EHS:QXEXR, SSVKXQP:SRV:SATS-AA¹⁷-LYY:LRKHR:EEH:LEXAXA, RNVQXRP:TQV:SATS-AA¹⁷-LYY:LRKHR:EDH:LAXKXE, KIPKAXX:VPT:SPIS-AA¹⁷-LYK:LKYHY:VAE:GXGXR, GIPEPXX:VPT:SPIS-AA¹⁷-LYK:LKYHY:VAE:SXAXR, SIPKAXX:VPT:SPIS-AA¹⁷-LYK:LKYHY:VAE:GXGXR, HVTKPTX:VPT:SPIS-AA¹⁷-LYK:LKYHY:VAE:SXGXH, YVPKPXX:VPT:SPIS-AA¹⁷-LYK:LKYHY:VAE:SXGXH, TVPKPXX:VPT:SPIS-AA¹⁷-LYK:LKYHY:VAE:AXGXH, AVPKAXX:VPT:SPIS-AA¹⁷-LYK:LKYHY:VAE:AXGXH, KASKAXX:VPT:SPIS-AA¹⁷-LYK:LKYHY:VAE:EXGXR, GSAGPXX:VPT:SPIS-AA¹⁷-LYK:LKYHY:VAE:RXGXS, AAPASXX:VPT:SPIS-AA¹⁷-LYK:LKYHY:VAE:AXGXR, STPPTXX:VPT:SPIS-AA¹⁷-LYK:LKYHY:VAE:SXGXR, HVPKPXX:VPT:SPIS-AA¹⁷-LYK:LKYHY:VAE:SXGXH, RVPSTXX:VPT:SPIS-AA¹⁷-LYK:LKYHY:VAE:XGXL, ASAAPXX:VPT:SPIS-AA¹⁷-LYK:LKYHY:VAE:XKXS, ASASPXX:VPT:SPIS-AA¹⁷-LYK:LKYHY:VAE:XKXS, KIPKAXX:VPT:SPIS-AA¹⁷-LYK:LKYHY:VVE:GXGXR, GIPEPXX:VPE:SPIS-AA¹⁷-LYK:LKYHY:TVE:SXAXR, SIPKAXX:VPT:SPIS-AA¹⁷-LYK:LKYHY:VVE:GXGXR, HVTKPTX:APT:SPIS-AA¹⁷-LYK:LKYHY:VVR:SXGXH, YVPKPXX:APT:SPIS-AA¹⁷-LYK:LKYHY:VVR:SXGXH, TVPKPXX:APT:SPIS-AA¹⁷-LYK:LKYHY:VVR:AXGXH, AVPKAXX:APT:SPIS-AA¹⁷-LYK:LKYHY:VVK:AXGXH, KASKAXX:VPT:SPIS-AA¹⁷-LYK:LKYHY:AVS:EXGXR, GSAGPXX:TPT:SPIS-AA¹⁷-LYK:LKYHY:VVD:RXGXS, AAPASXX:VPA:SPIS-AA¹⁷-LYK:LKYHY:VVE:AXGXR, STPPTXX:VPT:SPIS-AA¹⁷-LYK:LKYHY:VVE:SXGXR, HVPKPXX:APT:SPIS-AA¹⁷-LYK:LKYHY:VVR:SXGXH, RVPSTXX:APV:SPIS-AA¹⁷-LYK:LKYHY:VEE:XGXL, ASAAPXX:VPQ:SPIS-AA¹⁷-LYK:LKYHY:VRS:XKXS, ASASPXX:VSQ:SPIS-AA¹⁷-LYK:LKYHY:VKS:XKXS, ASASPXX:VPQ:SPIS-AA¹⁷-LYK:LKYHY:VKS:XKXS, NDEGLEX:VPT:SPIS-AA¹⁷-LYK:LKYHY:QHN:KXEXR, NDEGLEX:VPT:SPIS-AA¹⁷-LYK:LKYHY:EHS:QXEXR, SSVKXQP:SRV:SPIS-AA¹⁷-LYK:LKYHY:EEH:LEXAXA, RNVQXRP:TQV:SPIS-AA¹⁷-LYK:LKYHY:EDH:LAXKXE, KIPKAXX:VPT:EPIS-AA¹⁷-LYL:KFKYE:AVS:GXGXR, GIPEPXX:VPT:EPIS-AA¹⁷-LYL:KFKYE:AVS:SXAXR, SIPKAXX:VPT:EPIS-AA¹⁷-LYL:KFKYE:AVS:GXGXR, HVTKPTX:VPT:EPIS-AA¹⁷-LYL:KFKYE:AVS:SXGXH, YVPKPXX:VPT:EPIS-AA¹⁷-LYL:KFKYE:AVS:SXGXH, TVPKPXX:VPT:EPIS-AA¹⁷-LYL:KFKYE:AVS:AXGXH, AVPKAXX:VPT:EPIS-AA¹⁷-LYL:KFKYE:AVS:AXGXH, KVGKAXX:VPT:EPIS-AA¹⁷-LYL:KFKYE:AVS:XGXR, GSAGPXX:VPT:EPIS-AA¹⁷-LYL:KFKYE:AVS:RXGXS, AAPASXX:VPT:EPIS-AA¹⁷-LYL:KFKYE:AVS:AXGXR, STPPTXX:VPT:EPIS-AA¹⁷-LYL:KFKYE:AVS:SXGXR, HVPKPXX:VPT:EPIS-AA¹⁷-LYL:KFKYE:AVS:SXGXH, RVPSTXX:VPT:EPIS-AA¹⁷-LYL:KFKYE:AVS:XGXL, ASAAPXX:VPT:EPIS-AA¹⁷-LYL:KFKYE:AVS:XKXS, ASASPXX:VPT:EPIS-AA¹⁷-LYL:KFKYE:AVS:XKXS, KIPKAXX:VPT:EPIS-AA¹⁷-LYL:KFKYE:VVE:GXGXR, GIPEPXX:VPE:EPIS-AA¹⁷-LYL:KFKYE:TVE:SXAXR, SIPKAXX:VPT:EPIS-AA¹⁷-LYL:KFKYE:VVE:GXGXR, HVTKPTX:APT:EPIS-AA¹⁷-LYL:KFKYE:VVR:SXGXH, YVPKPXX:APT:EPIS-AA¹⁷-LYL:KFKYE:VVR:SXGXH, TVPKPXX:APT:EPIS-AA¹⁷-LYL:KFKYE:VVR:AXGXH, AVPKAXX:APT:EPIS-AA¹⁷-LYL:KFKYE:VVK:AXGXH, KVGKAXX:VPT:EPIS-AA¹⁷-LYL:KFKYE:VAE:XGXR, GSAGPXX:TPT:EPIS-AA¹⁷-LYL:KFKYE:VVD:RXGXS, AAPASXX:VPA:EPIS-AA¹⁷-LYL:KFKYE:VVE:AXGXR, STPPTXX:VPT:EPIS-AA¹⁷-LYL:KFKYE:VVE:SXGXR, HVPKPXX:APT:EPIS-AA¹⁷-LYL:KFKYE:VVR:SXGXH, RVPSTXX:APV:EPIS-AA¹⁷-LYL:KFKYE:VEE:XGXL, ASAAPXX:VPQ:EPIS-AA¹⁷-LYL:KFKYE:VRS:XKXS, ASASPXX:VSQ:EPIS-AA¹⁷-LYL:KFKYE:VKS:XKXS, ASASPXX:VPQ:EPIS-AA¹⁷-LYL:KFKYE:VKS:XKXS, NDEGLEX:VPT:EPIS-AA¹⁷-LYL:KFKYE:QHN:KXEXR, NDEGLEX:VPT:EPIS-AA¹⁷-LYL:KFKYE:EHS:QXEXR, SSVKXQP:SRV:EPIS-AA¹⁷-LYL:KFKYE:EEH:LEXAXA, RNVQXRP:TQV:EPIS-AA¹⁷-LYL:KFKYE:EDH:LAXKXE, KIPKAXX:TPT:SPIN-AA¹⁷-LYF:YGKIP:VVD:GXGXR, GIPEPXX:TPT:SPIN-AA¹⁷-LYF:YGKIP:VVD:SXAXR, SIPKAXX:TPT:SPIN-AA¹⁷-LYF:YGKIP:VVD:GXGXR, HVTKPTX:TPT:SPIN-AA¹⁷-LYF:YGKIP:VVD:SXGXH, YVPKPXX:TPT:SPIN-AA¹⁷-LYF:YGKIP:VVD:SXGXH, TVPKPXX:TPT:SPIN-AA¹⁷-LYF:YGKIP:VVD:AXGXH, AVPKAXX:TPT:SPIN-AA¹⁷-LYF:YGKIP:VVD:AXGXH, KVGKAXX:TPT:SPIN-AA¹⁷-LYF:YGKIP:VVD:XGXR, KASKAXX:TPT:SPIN-AA¹⁷-LYF:YGKIP:VVD:EXGXR, AAPASXX:TPT:SPIN-AA¹⁷-LYF:YGKIP:VVD:AXGXR, STPPTXX:TPT:SPIN-AA¹⁷-LYF:YGKIP:VVD:SXGXR, HVPKPXX:TPT:SPIN-AA¹⁷-LYF:YGKIP:VVD:SXGXH, RVPSTXX:TPT:SPIN-AA¹⁷-LYF:YGKIP:VVD:XGXL, ASAAPXX:TPT:SPIN-AA¹⁷-LYF:YGKIP:VVD:XKXS, ASASPXX:TPT:SPIN-AA¹⁷-LYF:YGKIP:VVD:XKXS, KIPKAXX:VPT:SPIN-AA¹⁷-LYF:YGKIP:VVE:GXGXR, GIPEPXX:VPE:SPIN-AA¹⁷-LYF:YGKIP:TVE:SXAXR, SIPKAXX:VPT:SPIN-AA¹⁷-LYF:YGKIP:VVE:GXGXR, HVTKPTX:APT:SPIN-AA¹⁷-LYF:YGKIP:VVR:SXGXH, YVPKPXX:APT:SPIN-AA¹⁷-LYF:YGKIP:VVR:SXGXH, TVPKPXX:APT:SPIN-AA¹⁷-LYF:YGKIP:VVR:AXGXH, AVPKAXX:APT:SPIN-AA¹⁷-LYF:YGKIP:VVK:AXGXH, KVGKAXX:VPT:SPIN-AA¹⁷-LYF:YGKIP:VAE:XGXR, KASKAXX:VPT:SPIN-AA¹⁷-LYF:YGKIP:AVS:EXGXR, AAPASXX:VPA:SPIN-AA¹⁷-LYF:YGKIP:VVE:AXGXR, STPPTXX:VPT:SPIN-AA¹⁷-LYF:YGKIP:VVE:SXGXR, HVPKPXX:APT:SPIN-AA¹⁷-LYF:YGKIP:VVR:SXGXH, RVPSTXX:APV:SPIN-AA¹⁷-LYF:YGKIP:VEE:XGXL, ASAAPXX:VPQ:SPIN-AA¹⁷-LYF:YGKIP:VRS:XKXS, ASASPXX:VSQ:SPIN-AA¹⁷-LYF:YGKIP:VKS:XKXS, ASASPXX:VPQ:SPIN-AA¹⁷-LYF:YGKIP:VKS:XKXS, NDEGLEX:VPT:SPIN-AA¹⁷-LYF:YGKIP:QHN:KXEXR, NDEGLEX:VPT:SPIN-AA¹⁷-LYF:YGKIP:EHS:QXEXR, SSVKXQP:SRV:SPIN-AA¹⁷-LYF:YGKIP:EEH:LEXAXA, RNVQXRP:TQV:SPIN-AA¹⁷-LYF:YGKIP:EDH:LAXKXE, KIPKAXX:VPA:SPIS-AA¹⁷-LYI:YKQYE:VVE:GXGXR, GIPEPXX:VPA:SPIS-AA¹⁷-LYI:YKQYE:VVE:SXAXR, SIPKAXX:VPA:SPIS-AA¹⁷-LYI:YKQYE:VVE:GXGXR, HVTKPTX:VPA:SPIS-AA¹⁷-LYI:YKQYE:VVE:SXGXH, YVPKPXX:VPA:SPIS-AA¹⁷-LYI:YKQYE:VVE:SXGXH, TVPKPXX:VPA:SPIS-AA¹⁷-LYI:YKQYE:VVE:AXGXH, AVPKAXX:VPA:SPIS-AA¹⁷-LYI:YKQYE:VVE:AXGXH, KVGKAXX:VPA:SPIS-AA¹⁷-LYI:YKQYE:VVE:XGXR, KASKAXX:VPA:SPIS-AA¹⁷-LYI:YKQYE:VVE:EXGXR, GSAGPXX:VPA:SPIS-AA¹⁷-LYI:YKQYE:VVE:RXGXS, STPPTXX:VPA:SPIS-AA¹⁷-LYI:YKQYE:VVE:SXGXR, HVPKPXX:VPA:SPIS-AA¹⁷-LYI:YKQYE:VVE:SXGXH, RVPSTXX:VPA:SPIS-AA¹⁷-LYI:YKQYE:VVE:XGXL, ASAAPXX:VPA:SPIS-AA¹⁷-LYI:YKQYE:VVE:XKXS, ASASPXX:VPA:SPIS-AA¹⁷-LYI:YKQYE:VVE:XKXS, KIPKAXX:VPT:SPIS-AA¹⁷-LYI:YKQYE:VVE:GXGXR, GIPEPXX:VPE:SPIS-AA¹⁷-LYI:YKQYE:TVE:SXAXR, SIPKAXX:VPT:SPIS-AA¹⁷-LYI:YKQYE:VVE:GXGXR, HVTKPTX:APT:SPIS-AA¹⁷-LYI:YKQYE:VVR:SXGXH, YVPKPXX:APT:SPIS-AA¹⁷-LYI:YKQYE:VVR:SXGXH, TVPKPXX:APT:SPIS-AA¹⁷-LYI:YKQYE:VVR:AXGXH, AVPKAXX:APT:SPIS-AA¹⁷-LYI:YKQYE:VVK:AXGXH, KVGKAXX:VPT:SPIS-AA¹⁷-LYI:YKQYE:VAE:XGXR, KASKAXX:VPT:SPIS-AA¹⁷-LYI:YKQYE:AVS:EXGXR, GSAGPXX:TPT:SPIS-AA¹⁷-LYI:YKQYE:VVD:RXGXS, STPPTXX:VPT:SPIS-AA¹⁷-LYI:YKQYE:VVE:SXGXR, HVPKPXX:APT:SPIS-AA¹⁷-LYI:YKQYE:VVR:SXGXH, RVPSTXX:APV:SPIS-AA¹⁷-LYI:YKQYE:VEE:XGXL, ASAAPXX:VPQ:SPIS-AA¹⁷-LYI:YKQYE:VRS:XKXS, ASASPXX:VSQ:SPIS-AA¹⁷-LYI:YKQYE:VKS:XKXS, ASASPXX:VPQ:SPIS-AA¹⁷-LYI:YKQYE:VKS:XKXS, NDEGLEX:VPT:SPIS-AA¹⁷-LYI:YKQYE:QHN:KXEXR, NDEGLEX:VPT:SPIS-AA¹⁷-LYI:YKQYE:EHS:QXEXR, SSVKXQP:SRV:SPIS-AA¹⁷-LYI:YKQYE:EEH:LEXAXA, RNVQXRP:TQV:SPIS-AA¹⁷-LYI:YKQYE:EDH:LAXKXE, KIPKAXX:VPT:SPIS-AA¹⁷-LFI:YKQYE:VVE:GXGXR, GIPEPXX:VPT:SPIS-AA¹⁷-LFI:YKQYE:VVE:SXAXR, SIPKAXX:VPT:SPIS-AA¹⁷-LFI:YKQYE:VVE:GXGXR, HVTKPTX:VPT:SPIS-AA¹⁷-LFI:YKQYE:VVE:SXGXH, YVPKPXX:VPT:SPIS-AA¹⁷-LFI:YKQYE:VVE: SXGXH, TVPKPXX:VPT:SPIS-AA¹⁷-LFI:YKQYE:VVE:AXGXH, AVPKAXX:VPT:SPIS-AA¹⁷-LFI:YKQYE:VVE:AXGXH, KVGKAXX:VPT:SPIS-AA¹⁷-LFI:YKQYE:VVE:XGXR, KASKAXX:VPT:SPIS-AA¹⁷-LFI:YKQYE:VVE:EXGXR, GSAGPXX:VPT:SPIS-AA¹⁷-LFI:YKQYE:VVE:RXGXS, AAPASXX:VPT:SPIS-AA¹⁷-LFI:YKQYE:VVE:AXGXR, HVPKPXX:VPT:SPIS-AA¹⁷-LFI:YKQYE:VVE:SXGXH, RVPSTXX:VPT:SPIS-AA¹⁷-LFI:YKQYE:VVE:XGXL, ASAAPXX:VPT:SPIS-AA¹⁷-LFI:YKQYE:VVE:XKXS, ASASPXX:VPT:SPIS-AA¹⁷-LFI:YKQYE:VVE:XKXS, GIPEPXX:VPE:SPIS-AA¹⁷-LFI:YKQYE:TVE:SXAXR, HVTKPTX:APT:SPIS-AA¹⁷-LFI:YKQYE:VVR:SXGXH, YVPKPXX:APT:SPIS-AA¹⁷-LFI:YKQYE:VVR:SXGXH, TVPKPXX:APT:SPIS-AA¹⁷-LFI:YKQYE:VVR:AXGXH, AVPKAXX:APT:SPIS-AA¹⁷-LFI:YKQYE:VVK:AXGXH, KVGKAXX:VPT:SPIS-AA¹⁷-LFI:YKQYE:VAE:XGXR, KASKAXX:VPT:SPIS-AA¹⁷-LFI:YKQYE:AVS:EXGXR, GSAGPXX:TPT:SPIS-AA¹⁷-LFI:YKQYE:VVD:RXGXS, AAPASXX:VPA:SPIS-AA¹⁷-LFI:YKQYE:VVE:AXGXR, HVPKPXX:APT:SPIS-AA¹⁷-LFI:YKQYE:VVR:SXGXH, RVPSTXX:APV:SPIS-AA¹⁷-LFI:YKQYE:VEE:XGXL, ASAAPXX:VPQ:SPIS-AA¹⁷-LFI:YKQYE:VRS:XKXS, ASASPXX:VSQ:SPIS-AA¹⁷-LFI:YKQYE:VKS:XKXS, ASASPXX:VPQ:SPIS-AA¹⁷-LFI:YKQYE:VKS:XKXS, NDEGLEX:VPT:SPIS-AA¹⁷-LFI:YKQYE:QHN:KXEXR, NDEGLEX:VPT:SPIS-AA¹⁷-LFI:YKQYE:EHS:QXEXR, SSVKXQP:SRV:SPIS-AA¹⁷-LFI:YKQYE:EEH:LEXAXA, RNVQXRP:TQV:SPIS-AA¹⁷-LFI:YKQYE:EDH:LAXKXE, KIPKAXX:APV:KPLS-AA¹⁷-LYV:DHHKD:VEE:GXGXR, GIPEPXX:APV:KPLS-AA¹⁷-LYV:DHHKD:VEE:SXAXR, SIPKAXX:APV:KPLS-AA¹⁷-LYV:DHHKD:VEE:GXGXR, HVTKPTX:APV:KPLS-AA¹⁷-LYV:DHHKD:VEE:SXGXH, YVPKPXX:APV:KPLS-AA¹⁷-LYV:DHHKD:VEE:SXGXH, TVPKPXX:APV:KPLS-AA¹⁷-LYV:DHHKD:VEE:AXGXH, AVPKAXX:APV:KPLS-AA¹⁷-LYV:DHHKD:VEE:AXGXH, KVG KAXX:APV:KPLS-AA¹⁷-LYV:DHHKD:VEE:XGXR, KASKAXX:APV:KPLS-AA¹⁷-LYV:DHHKD:VEE:EXGXR, GSAGPXX:APV:KPLS-AA¹⁷-LYV:DHHKD:VEE:RXGXS, AAPASXX:APV:KPLS-AA¹⁷-LYV:DHHKD:VEE:AXGXR, STPPTXX:APV:KPLS-AA¹⁷-LYV:DHHKD:VEE:SXGXR, HVPKPXX:APV:KPLS-AA¹⁷-LYV:DHHKD:VEE:SXGXH, ASAAPXX:APV:KPLS-AA¹⁷-LYV:DHHKD:VEE:XKXS, ASASPXX:APV:KPLS-AA¹⁷-LYV:DHHKD:VEE:XKXS, KIPKAXX:VPT:KPLS-AA¹⁷-LYV:DHHKD:VVE:GXGXR, GIPEPXX:VPE:KPLS-AA¹⁷-LYV:DHHKD:TVE:SXAXR, SIPKAXX:VPT:KPLS-AA¹⁷-LYV:DHHKD:VVE:GXGXR, HVTKPTX:APT:KPLS-AA¹⁷-LYV:DHHKD:VVR:SXGXH, YVPKPXX:APT:KPLS-AA¹⁷-LYV:DHHKD:VVR:SXGXH, TVPKPXX:APT:KPLS-AA¹⁷-LYV:DHHKD:VVR:AXGXH, AVPKAXX:APT:KPLS-AA¹⁷-LYV:DHHKD:VVK:AXGXH, KVGKAXX:VPT:KPLS-AA¹⁷-LYV:DHHKD:VAE:XGXR, KASKAXX:VPT:KPLS-AA¹⁷-LYV:DHHKD:AVS:EXGXR, GSAGPXX:TPT:KPLS-AA¹⁷-LYV:DHHKD:VVD:RXGXS, AAPASXX:VPA:KPLS-AA¹⁷-LYV:DHHKD:VVE:AXGXR, STPPTXX:VPT:KPLS-AA¹⁷-LYV:DHHKD:VVE:SXGXR, HVPKPXX:APT:KPLS-AA¹⁷-LYV:DHHKD:VVR:SXGXH, ASAAPXX:VPQ:KPLS-AA¹⁷-LYV:DHHKD:VRS:XKXS, ASASPXX:VSQ:KPLS-AA¹⁷-LYV:DHHKD:VKS:XKXS, ASASPXX:VPQ:KPLS-AA¹⁷-LYV:DHHKD:VKS:XKXS, NDEGLEX:VPT:KPLS-AA¹⁷-LYV:DHHKD:QHN:KXEXR, NDEGLEX:VPT:KPLS-AA¹⁷-LYV:DHHKD:EHS:QXEXR, SSVKXQP:SRV:KPLS-AA¹⁷-LYV:DHHKD:EEH:LEXAXA, RNVQXRP:TQV:KPLS-AA¹⁷-LYV:DHHKD:EDH:LAXKXE, KIPKAXX:VPQ:EPLP-AA¹⁷-VYY:EQLSN:VRS:GXGXR, GIPEPXX:VPQ:EPLP-AA¹⁷-VYY:EQLSN:VRS:SXAXR, SIPKAXX:VPQ:EPLP-AA¹⁷-VYY:EQLSN:VRS:GXGXR, HVTKPTX:VPQ:EPLP-AA¹⁷-VYY:EQLSN:VRS:SXGXH, YVPKPXX:VPQ:EPLP-AA¹⁷-VYY:EQLSN:VRS:SXGXH, TVPKPXX:VPQ:EPLP-AA¹⁷-VYY:EQLSN:VRS:AXGXH, AVPKAXX:VPQ:EPLP-AA¹⁷-VYY:EQLSN:VRS:AXGXH, KVGKAXX:VPQ:EPLP-AA¹⁷-VYY:EQLSN:VRS:XGXR, KASKAXX:VPQ:EPLP-AA¹⁷-VYY:EQLSN:VRS:EXGXR, GSAGPXX:VPQ:EPLP-AA¹⁷-VYY:EQLSN:VRS:RXGXS, AAPASXX:VPQ:EPLP-AA¹⁷-VYY:EQLSN:VRS:AXGXR, STPPTXX:VPQ:EPLP-AA¹⁷-VYY:EQLSN:VRS:SXGXR, HVPKPXX:VPQ:EPLP-AA¹⁷-VYY:EQLSN:VRS:SXGXH, RVPSTXX:VPQ:EPLP-AA¹⁷-VYY:EQLSN:VRS:XGXL, ASASPXX:VPQ:EPLP-AA¹⁷-VYY:EQLSN:VRS:XKXS, KIPKAXX:VPT:EPLP-AA¹⁷-VYY:EQLSN:VVE:GXGXR, GIPEPXX:VPE:EPLP-AA¹⁷-VYY:EQLSN:TVE:SXAXR, SIPKAXX:VPT:EPLP-AA¹⁷-VYY:EQLSN:VVE:GXGXR, HVTKPTX:APT:EPLP-AA¹⁷-VYY:EQLSN:VVR:SXGXH, YVPKPXX:APT:EPLP-AA¹⁷-VYY:EQLSN:VVR:SXGXH, TVPKPXX:APT:EPLP-AA¹⁷-VYY:EQLSN:VVR:AXGXH, AVPKAXX:APT:EPLP-AA¹⁷-VYY:EQLSN:VVK:AXGXH, KVGKAXX:VPT:EPLP-AA¹⁷-VYY:EQLSN:VAE:XGXR, KASKAXX:VPT:EPLP-AA¹⁷-VYY:EQLSN:AVS:EXGXR, GSAGPXX:TPT:EPLP-AA¹⁷-VYY:EQLSN:VVD:RXGXS, AAPASXX:VPA:EPLP-AA¹⁷-VYY:EQLSN:VVE:AXGXR, STPPTXX:VPT:EPLP-AA¹⁷-VYY:EQLSN:VVE:SXGXR, HVPKPXX:APT:EPLP-AA¹⁷-VYY:EQLSN:VVR:SXGXH, RVPSTXX:APV:EPLP-AA¹⁷-VYY:EQLSN:VEE:XGXL, ASASPXX:VSQ:EPLP-AA¹⁷-VYY:EQLSN:VKS:XKXS, ASASPXX:VPQ:EPLP-AA¹⁷-VYY:EQLSN:VKS:XKXS, NDEGLEX:VPT:EPLP-AA¹⁷-VYY:EQLSN:QHN:KXEXR, NDEGLEX:VPT:EPLP-AA¹⁷-VYY:EQLSN:EHS:QXEXR, SSVKXQP:SRV:EPLP-AA¹⁷-VYY:EQLSN:EEH:LEXAXA, RNVQXRP:TQV:EPLP-AA¹⁷-VYY:EQLSN:EDH:LAXKXE, KIPKAXX:VSQ:EPLT-AA¹⁷-LYY:EQLSN:VKS:GXGXR, GIPEPXX:VSQ:EPLT-AA¹⁷-LYY:EQLSN:VKS:SXAXR, SIPKAXX:VSQ:EPLT-AA¹⁷-LYY:EQLSN:VKS:GXGXR, HVTKPTX:VSQ:EPLT-AA¹⁷-LYY:EQLSN:VKS:SXGXH, YVPKPXX:VSQ:EPLT-AA¹⁷-LYY:EQLSN:VKS:SXGXH, TVPKPXX:VSQ:EPLT-AA¹⁷-LYY:EQLSN:VKS:AXGXH, AVPKAXX:VSQ:EPLT-AA¹⁷-LYY:EQLSN:VKS:AXGXH, KVGKAXX:VSQ:EPLT-AA¹⁷-LYY:EQLSN:VKS:XGXR, KASKAXX:VSQ:EPLT-AA¹⁷-LYY:EQLSN:VKS:EXGXR, GSAGPXX:VSQ:EPLT-AA¹⁷-LYY:EQLSN:VKS:RXGXS, AAPASXX:VSQ:EPLT-AA¹⁷-LYY:EQLSN:VKS:AXGXR, STPPTXX:VSQ:EPLT-AA¹⁷-LYY:EQLSN:VKS:SXGXR, HVPKPXX:VSQ:EPLT-AA¹⁷-LYY:EQLSN:VKS:SXGXH, RVPSTXX:VSQ:EPLT-AA¹⁷-LYY:EQLSN:VKS:XGXL, ASAAPXX:VSQ:EPLT-AA¹⁷-LYY:EQLSN:VKS:XKXS, ASASPXX:VSQ:EPLT-AA¹⁷-LYY:EQLSN:VKS:XKXS, KIPKAXX:VPT:EPLT-AA¹⁷-LYY:EQLSN:VVE:GXGXR, GIPEPXX:VPE:EPLT-AA¹⁷-LYY:EQLSN:TVE:SXAXR, SIPKAXX:VPT:EPLT-AA¹⁷-LYY:EQLSN:VVE:GXGXR, HVTKPTX:APT:EPLT-AA¹⁷-LYY:EQLSN:VVR:SXGXH, YVPKPXX:APT:EPLT-AA¹⁷-LYY:EQLSN:VVR:SXGXH, TVPKPXX:APT:EPLT-AA¹⁷-LYY:EQLSN:VVR:AXGXH, AVPKAXX:APT:EPLT-AA¹⁷-LYY:EQLSN:VVK:AXGXH, KVGKAXX:VPT:EPLT-AA¹⁷-LYY:EQLSN:VAE:XGXR, KASKAXX:VPT:EPLT-AA¹⁷-LYY:EQLSN:AVS:EXGXR, GSAGPXX:TPT:EPLT-AA¹⁷-LYY:EQLSN:VVD:RXGXS, AAPASXX:VPA:EPLT-AA¹⁷-LYY:EQLSN:VVE:AXGXR, STPPTXX:VPT:EPLT-AA¹⁷-LYY:EQLSN:VVE:SXGXR, HVPKPXX:APT:EPLT-AA¹⁷-LYY:EQLSN:VVR:SXGXH, RVPSTXX:APV:EPLT-AA¹⁷-LYY:EQLSN:VEE:XGXL, ASAAPXX:VPQ:EPLT-AA¹⁷-LYY:EQLSN:VRS:XKXS, NDEGLEX:VPT:EPLT-AA¹⁷-LYY:EQLSN:QHN:KXEXR, NDEGLEX:VPT:EPLT-AA¹⁷-LYY:EQLSN:EHS:QXEXR, SSVKXQP:SRV:EPLT-AA¹⁷-LYY:EQLSN:EEH:LEXAXA, RNVQXRP:TQV:EPLT-AA¹⁷-LYY:EQLSN:EDH:LAXKXE, KIPKAXX:VPQ:EPLT-AA¹⁷-LYY:EQLSN:VKS:GXGXR, GIPEPXX:VPQ:EPLT-AA¹⁷-LYY:EQLSN:VKS:SXAXR, SIPKAXX:VPQ:EPLT-AA¹⁷-LYY:EQLSN:VKS:GXGXR, HVTKPTX:VPQ:EPLT-AA¹⁷-LYY:EQLSN:VKS:SXGXH, YVPKPXX:VPQ:EPLT-AA¹⁷-LYY:EQLSN:VKS:SXGXH, TVPKPXX:VPQ:EPLT-AA¹⁷-LYY:EQLSN:VKS:AXGXH, AVPKAXX:VPQ:EPLT-AA¹⁷-LYY:EQLSN:VKS:AXGXH, KVGKAXX:VPQ:EPLT-AA¹⁷-LYY:EQLSN:VKS:XGXR, KASKAXX:VPQ:EPLT-AA¹⁷-LYY:EQLSN:VKS:EXGXR, GSAGPXX:VPQ:EPLT-AA¹⁷-LYY:EQLSN:VKS:RXGXS, AAPASXX:VPQ:EPLT-AA¹⁷-LYY:EQLSN:VKS:AXGXR, STPPTXX:VPQ:EPLT-AA¹⁷-LYY:EQLSN:VKS:SXGXR, HVPKPXX:VPQ:EPLT-AA¹⁷-LYY:EQLSN:VKS:SXGXH, RVPSTXX:VPQ:EPLT-AA¹⁷-LYY:EQLSN:VKS:XGXL, ASAAPXX:VPQ:EPLT-AA¹⁷-LYY:EQLSN:VKS:XKXS, ASASPXX:VPQ:EPLT-AA¹⁷-LYY:EQLSN:VKS:XKXS, NDEGLEX:VPT:SNIT-AA¹⁷-QIM:IGEMS:QHN:QXEXR, KIPKAXX:VPT:SNIT-AA¹⁷-QIM:IGEMS:VVE:GXGXR, GIPEPXX:VPE:SNIT-AA¹⁷-QIM:IGEMS:TVE:SXAXR, SIPKAXX:VPT:SNIT-AA¹⁷-QIM:IGEMS:VVE:GXGXR, HVTKPTX:APT:SNIT-AA¹⁷-QIM:IGEMS:VVR:SXGXH, YVPKPXX:APT:SNIT-AA¹⁷-QIM:IGEMS:VVR:SXGXH, TVPKPXX:APT:SNIT-AA¹⁷-QIM:IGEMS:VVR:AXGXH, AVPKAXX:APT:SNIT-AA¹⁷-QIM:IGEMS:VVK:AXGXH, KVGKAXX:VPT:SNIT-AA¹⁷-QIM:IGEMS:VAE:XGXR, KASKAXX:VPT:SNIT-AA¹⁷-QIM:IGEMS:AVS:EXGXR, GSAGPXX:TPT:SNIT-AA¹⁷-QIM:IGEMS:VVD:RXGXS, AAPASXX:VPA:SNIT-AA¹⁷-QIM:IGEMS:VVE:AXGXR, STPPTXX:VPT:SNIT-AA¹⁷-QIM:IGEMS:VVE:SXGXR, HVPKPXX:APT:SNIT-AA¹⁷-QIM:IGEMS:VVR:SXGXH, RVPSTXX:APV:SNIT-AA¹⁷-QIM:IGEMS:VEE:XGXL, ASAAPXX:VPQ:SNIT-AA¹⁷-QIM:IGEMS:VRS:XKXS, ASASPXX:VSQ:SNIT-AA¹⁷-QIM:IGEMS:VKS:XKXS, ASASPXX:VPQ:SNIT-AA¹⁷-QIM:IGEMS:VKS:XKXS, NDEGLEX:VPT:SNIT-AA¹⁷-QIM:IGEMS:EHS:QXEXR, SSVKXQP:SRV:SNIT-AA¹⁷-QIM:IGEMS:EEH:LEXAXA, RNVQXRP:TQV:SNIT-AA¹⁷-QIM:IGEMS:EDH:LAXKXE, NDEGLEX:VPT:SNIT-AA¹⁷-QIM:LGEMS:EHS:KXEXR, KIPKAXX:VPT:SNIT-AA¹⁷-QIM:LGEMS:VVE:GXGXR, GIPEPXX:VPE:SNIT-AA¹⁷-QIM:LGEMS:TVE:SXAXR, SIPKAXX:VPT:SNIT-AA¹⁷-QIM:LGEMS:VVE:GXGXR, HVTKPTX:APT:SNIT-AA¹⁷-QIM:LGEMS:VVR:SXGXH, YVPKPXX:APT:SNIT-AA¹⁷-QIM:LGEMS:VVR:SXGXH, TVPKPXX:APT:SNIT-AA¹⁷-QIM:LGEMS:VVR:AXGXH, AVPKAXX:APT:SNIT-AA¹⁷-QIM:LGEMS:VVK:AXGXH, KVGKAXX:VPT:SNIT-AA¹⁷-QIM:LGEMS:VAE:XGXR, KASKAXX:VPT:SNIT-AA¹⁷-QIM:LGEMS:AVS:EXGXR, GSAGPXX:TPT:SNIT-AA¹⁷-QIM:LGEMS:VVD:RXGXS, AAPASXX:VPA:SNIT-AA¹⁷-QIM:LGEMS:VVE:AXGXR, STPPTXX:VPT:SNIT-AA¹⁷-QIM:LGEMS:VVE:SXGXR, HVPKPXX:APT:SNIT-AA¹⁷-QIM:LGEMS:VVR:SXGXH, RVPSTXX:APV:SNIT-AA¹⁷-QIM:LGEMS:VEE:XGXL, ASAAPXX:VPQ:SNIT-AA¹⁷-QIM:LGEMS:VRS:XKXS, ASASPXX:VSQ:SNIT-AA¹⁷-QIM:LGEMS:VKS:XKXS, ASASPXX:VPQ:SNIT-AA¹⁷-QIM:LGEMS:VKS:XKXS, NDEGLEX:VPT:SNIT-AA¹⁷-QIM:LGEMS:QHN:KXEXR, SSVKXQP:SRV:SNIT-AA¹⁷-QIM:LGEMS:EEH:LEXAXA, RNVQXRP:TQV:SNIT-AA¹⁷-QIM:LGEMS:EDH:LAXKXE, RNVQXRP:SRV:RSVK-AA¹⁷-AKV:KEVQV:EEH:LAXKXE, KIPKAXX:VPT:RSVK-AA¹⁷-AKV:KEVQV:VVE:GXGXR, GIPEPXX:VPE:RSVK-AA¹⁷-AKV:KEVQV:TVE:SXAXR, SIPKAXX:VPT:RSVK-AA¹⁷-AKV:KEVQV:VVE:GXGXR, HVTKPTX:APT:RSVK-AA¹⁷-AKV:KEVQV:VVR:SXGXH, YVPKPXX:APT:RSVK-AA¹⁷-AKV:KEVQV:VVR:SXGXH, TVPKPXX:APT:RSVK-AA¹⁷-AKV:KEVQV:VVR:AXGXH, AVPKAXX:APT:RSVK-AA¹⁷-AKV:KEVQV:VVK:AXGXH, KVGKAXX:VPT:RSVK-AA¹⁷-AKV:KEVQV:VAE:XGXR, KASKAXX:VPT:RSVK-AA¹⁷-AKV:KEVQV:AVS:EXGXR, GSAGPXX:TPT:RSVK-AA¹⁷-AKV:KEVQV:VVD:RXGXS, AAPASXX:VPA:RSVK-AA¹⁷-AKV:KEVQV:VVE:AXGXR, STPPTXX:VPT:RSVK-AA¹⁷-AKV:KEVQV:VVE:SXGXR, HVPKPXX:APT:RSVK-AA¹⁷-AKV:KEVQV:VVR:SXGXH, RVPSTXX:APV:RSVK-AA¹⁷-AKV:KEVQV:VEE:XGXL, ASAAPXX:VPQ:RSVK-AA¹⁷-AKV:KEVQV:VRS:XKXS, ASASPXX:VSQ:RSVK-AA¹⁷-AKV:KEVQV:VKS:XKXS, ASASPXX:VPQ:RSVK-AA¹⁷-AKV:KEVQV:VKS:XKXS, NDEGLEX:VPT:RSVK-AA¹⁷-AKV:KEVQV:QHN:KXEXR, NDEGLEX:VPT:RSVK-AA¹⁷-AKV:KEVQV:EHS:QXEXR, RNVQXRP:TQV:RSVK-AA¹⁷-AKV:KEVQV:EDH:LAXKXE, SSVKXQP:TQV:RPVQ-AA¹⁷-RKI:KKATV:EDH:LEXAXA, KIPKAXX:VPT:RPVQ-AA¹⁷-RKI:KKATV:VVE:GXGXR, GIPEPXX:VPE:RPVQ-AA¹⁷-RKI:KKATV:TVE:SXAXR, SIPKAXX:VPT:RPVQ-AA¹⁷-RKI:KKATV:VVE:GXGXR, HVTKPTX:APT:RPVQ-AA¹⁷-RKI:KKATV:VVR:SXGXH, YVPKPXX:APT:RPVQ-AA¹⁷-RKI:KKATV:VVR:SXGXH, TVPKPXX:APT:RPVQ-AA¹⁷-RKI:KKATV:VVR:AXGXH, AVPKAXX:APT:RPVQ-AA¹⁷-RKI:KKATV:VVK:AXGXH, KVGKAXX:VPT:RPVQ-AA¹⁷-RKI:KKATV:VAE:XGXR, KASKAXX:VPT:RPVQ-AA¹⁷-RKI:KKATV:AVS:EXGXR, GSAGPXX:TPT:RPVQ-AA¹⁷-RKI:KKATV:VVD:RXGXS, AAPASXX:VPA:RPVQ-AA¹⁷-RKI:KKATV:VVE:AXGXR, STPPTXX:VPT:RPVQ-AA¹⁷-RKI:KKATV:VVE:SXGXR, HVPKPXX:APT:RPVQ-AA¹⁷-RKI:KKATV:VVR:SXGXH, RVPSTXX:APV:RPVQ-AA¹⁷-RKI:KKATV:VEE:XGXL, ASAAPXX:VPQ:RPVQ-AA¹⁷-RKI:KKATV:VRS:XKXS, ASASPXX:VSQ:RPVQ-AA¹⁷-RKI:KKATV:VKS:XKXS, ASASPXX:VPQ:RPVQ-AA¹⁷-RKI:KKATV:VKS:XKXS, NDEGLEX:VPT:RPVQ-AA¹⁷-RKI:KKATV:QHN:KXEXR, NDEGLEX:VPT:RPVQ-AA¹⁷-RKI:KKATV:EHS:QXEXR and SSVKXQP:SRV:RPVQ-AA¹⁷-RKI:KKATV:EEH:LEXAXA; and wherein AA¹⁷ is selected from the group consisting of G, A, V, L, I, P, F, M, W, T and S (in particular is selected from the group consisting of M, I, L, V and T).

[0441] In particular, in certain embodiments, the hexaplet PEP7:PEP5:PEP1:PEP2:PEP6:PEP8 is selected from the group consisting of GIPEPXX:VPTKM:SAIS:LKNYQ:NMVVE:SXAXR, SIPKAXX:VPTEL:SAIS:LKNYQ:EMVVE:GXGXR, HVTKPTX:VPTKL:SAIS:LKNYQ:NMVVE:SXGXH, YVPKPXX:VPTKL:SAIS:LKNYQ:NMVVE:SXGXH, TVPKPXX:VPTQL:SAIS:LKNYQ:NMVVE:AXGXH, AVPKAXX:VPTKL:SAIS:LKNYQ:NMVVE:AXGXH, KVGKAXX:VPTKL:SAIS:LKNYQ:EGMSVVE:XGXR, KASKAXX:VPTKL:SAIS:LKNYQ:GMVVE:EXGXR, GSAGPXX:VPTKM:SAIS:LKNYQ:GMVVE:RXGXS, AAPASXX:VPTRL:SAIS:LKNYQ:DMVVE:AXGXR, STPPTXX:VPTRL:SAIS:LKNYQ:DMVVE:SXGXR, HVPKPXX:VPTKL:SAIS:LKNYQ:NMVVE:SXGXH, RVPSTXX:VPTKT:SAIS:LKNYQ:MIVVE:XGXL, ASAAPXX:VPTAL:SAIS:LKNYQ:MIVVE:XKXS, ASASPXX:VPTDL:SAIS:LKNYQ:MIVVE:XKXS, ASASPXX:VPTDL:SAIS:LKNYQ:MVVVE:XKXS, NDEGLEX:VPTEE:SAIS:LKNYQ:FLVVE:KXEXR, NDEGLEX:VPTGQ:SAIS:LKNYQ:LEVVE:QXEXR, SSVKXQP:VPTHH:SAIS:LKNYQ:RLVVE:LEXAXA, RNVQXRP:VPTQL:SAIS:LKNYQ:TLVVE:LAXKXE, GIPEPXX:VPEKM:SAIS:LKNYQ:NMTVE:SXAXR, HVTKPTX:APTKL:SAIS:LKNYQ:NMVVR:SXGXH, YVPKPXX:APTKL:SAIS:LKNYQ:NMVVR:SXGXH, TVPKPXX:APTQL:SAIS:LKNYQ:NMVVR:AXGXH, AVPKAXX:APTKL:SAIS:LKNYQ:NMVVK:AXGXH, KVGKAXX:VPTKL:SAIS:LKNYQ:EGMSVAE:XGXR, KASKAXX:VPTKL:SAIS:LKNYQ:GMAVS:EXGXR, GSAGPXX:TPTKM:SAIS:LKNYQ:GMVVD:RXGXS, AAPASXX:VPARL:SAIS:LKNYQ:DMVVE:AXGXR, HVPKPXX:APTKL:SAIS:LKNYQ:NMVVR:SXGXH, RVPSTXX:APVKT:SAIS:LKNYQ:MIVEE:XGXL, ASAAPXX:VPQAL:SAIS:LKNYQ:MIVRS:XKXS, ASASPXX:VSQDL:SAIS:LKNYQ:MIVKS:XKXS, ASASPXX:VPQDL:SAIS:LKNYQ:MVVKS:XKXS, NDEGLEX:VPTEE:SAIS:LKNYQ:FLQHN:KXEXR, NDEGLEX:VPTGQ:SAIS:LKNYQ:LEEHS:QXEXR, SSVKXQP:SRVHH:SAIS:LKNYQ:RLEEH:LEXAXA, RNVQXRP:TQVQL:SAIS:LKNYQ:TLEDH:LAXKXE, KIPKAXX:VPEEL:SSLS:LKVYP:DMTVE:GXGXR, SIPKAXX:VPEEL:SSLS:LKVYP:EMTVE:GXGXR, HVTKPTX:VPEKL:SSLS:LKVYP:NMTVE:SXGXH, YVPKPXX:VPEKL:SSLS:LKVYP:NMTVE:SXGXH, TVPKPXX:VPEQL:SSLS:LKVYP:NMTVE:AXGXH, AVPKAXX:VPEKL:SSLS:LKVYP:NMTVE:AXGXH, KVGKAXX:VPEKL:SSLS:LKVYP:EGMSTVE:XGXR, KASKAXX:VPEKL:SSLS:LKVYP:GMTVE:EXGXR, GSAGPXX:VPEKM:SSLS:LKVYP:GMTVE:RXGXS, AAPASXX:VPERL:SSLS:LKVYP:DMTVE:AXGXR, STPPTXX:VPERL:SSLS:LKVYP:DMTVE:SXGXR, HVPKPXX:VPEKL:SSLS:LKVYP:NMTVE:SXGXH, RVPSTXX:VPEKT:SSLS:LKVYP:MITVE:XGXL, ASAAPXX:VPEAL:SSLS:LKVYP:MITVE:XKXS, ASASPXX:VPEDL:SSLS:LKVYP:MITVE:XKXS, ASASPXX:VPEDL:SSLS:LKVYP:MVTVE:XKXS, NDEGLEX:VPEEE:SSLS:LKVYP:FLTVE:KXEXR, NDEGLEX:VPEGQ:SSLS:LKVYP:LETVE:QXEXR, SSVKXQP:VPEHH:SSLS:LKVYP:RLTVE:LEXAXA, RNVQXRP:VPEQL:SSLS:LKVYP:TLTVE:LAXKXE, KIPKAXX:VPTEL:SSLS:LKVYP:DMVVE:GXGXR, SIPKAXX:VPTEL:SSLS:LKVYP:EMVVE:GXGXR, HVTKPTX:APTKL:SSLS:LKVYP:NMVVR:SXGXH, YVPKPXX:APTKL:SSLS:LKVYP:NMVVR:SXGXH, TVPKPXX:APTQL:SSLS:LKVYP:NMVVR:AXGXH, AVPKAXX:APTKL:SSLS:LKVYP:NMVVK:AXGXH, KVG KAXX:VPTKL:SSLS:LKVYP:EGMSVAE:XGXR, KASKAXX:VPTKL:SSLS:LKVYP:GMAVS:EXGXR, GSAGPXX:TPTKM:SSLS:LKVYP:GMVVD:RXGXS, AAPASXX:VPARL:SSLS:LKVYP:DMVVE:AXGXR, STPPTXX:VPTRL:SSLS:LKVYP:DMVVE:SXGXR, HVPKPXX:APTKL:SSLS:LKVYP:NMVVR:SXGXH, RVPSTXX:APVKT:SSLS:LKVYP:MIVEE:XGXL, ASAAPXX:VPQAL:SSLS:LKVYP:MIVRS:XKXS, ASASPXX:VSQDL:SSLS:LKVYP:MIVKS:XKXS, ASASPXX:VPQDL:SSLS:LKVYP:MVVKS:XKXS, NDEGLEX:VPTEE:SSLS:LKVYP:FLQHN:KXEXR, NDEGLEX:VPTGQ:SSLS:LKVYP:LEEHS:QXEXR, SSVKXQP:SRVHH:SSLS:LKVYP:RLEEH:LEXAXA, RNVQXRP:TQVQL:SSLS:LKVYP:TLEDH:LAXKXE, KIPKAXX:VPTEL:SAIS:LKNYQ:DMVVE:GXGXR, KIPKAXX:APTEL:NAIS:LKKYR:DMVVR:GXGXR, GIPEPXX:APTKM:NAIS:LKKYR:NMVVR:SXAXR, SIPKAXX:APTEL:NAIS:LKKYR:EMVVR:GXGXR, YVPKPXX:APTKL:NAIS:LKKYR:NMVVR:SXGXH, TVPKPXX:APTQL:NAIS:LKKYR:NMVVR:AXGXH, AVPKAXX:APTKL:NAIS:LKKYR:NMVVR:AXGXH, KVGKAXX:APTKL:NAIS:LKKYR:EGMSVVR:XGXR, KASKAXX:APTKL:NAIS:LKKYR:GMVVR:EXGXR, GSAGPXX:APTKM:NAIS:LKKYR:GMVVR:RXGXS, AAPASXX:APTRL:NAIS:LKKYR:DMVVR:AXGXR, STPPTXX:APTRL:NAIS:LKKYR:DMVVR:SXGXR, HVPKPXX:APTKL:NAIS:LKKYR:NMVVR:SXGXH, RVPSTXX:APTKT:NAIS:LKKYR:MIVVR:XGXL, ASAAPXX:APTAL:NAIS:LKKYR:MIVVR:XKXS, ASASPXX:APTDL:NAIS:LKKYR:MIVVR:XKXS, ASASPXX:APTDL:NAIS:LKKYR:MVVVR:XKXS, NDEGLEX:APTEE:NAIS:LKKYR:FLVVR:KXEXR, NDEGLEX:APTGQ:NAIS:LKKYR:LEVVR:QXEXR, SSVKXQP:APTHH:NAIS:LKKYR:RLVVR:LEXAXA, RNVQXRP:APTQL:NAIS:LKKYR:TLVVR:LAXKXE, KIPKAXX:VPTEL:NAIS:LKKYR:DMVVE:GXGXR, GIPEPXX:VPEKM:NAIS:LKKYR:NMTVE:SXAXR, SIPKAXX:VPTEL:NAIS:LKKYR:EMVVE:GXGXR, AVPKAXX:APTKL:NAIS:LKKYR:NMVVK:AXGXH, KVGKAXX:VPTKL:NAIS:LKKYR:EGMSVAE:XGXR, KASKAXX:VPTKL:NAIS:LKKYR:GMAVS:EXGXR, GSAGPXX:TPTKM:NAIS:LKKYR:GMVVD:RXGXS, AAPASXX:VPARL:NAIS:LKKYR:DMVVE:AXGXR, STPPTXX:VPTRL:NAIS:LKKYR:DMVVE:SXGXR, RVPSTXX:APVKT:NAIS:LKKYR:MIVEE:XGXL, ASAAPXX:VPQAL:NAIS:LKKYR:MIVRS:XKXS, ASASPXX:VSQDL:NAIS:LKKYR:MIVKS:XKXS, ASASPXX:VPQDL:NAIS:LKKYR:MVVKS:XKXS, NDEGLEX:VPTEE:NAIS:LKKYR:FLQHN:KXEXR, NDEGLEX:VPTGQ:NAIS:LKKYR:LEEHS:QXEXR, SSVKXQP:SRVHH:NAIS:LKKYR:RLEEH:LEXAXA, RNVQXRP:TQVQL:NAIS:LKKYR:TLEDH:LAXKXE, HVTKPTX:APTKL:NAIS:LKKYR:NMVVR:SXGXH, KIPKAXX:APTEL:SATS:LRKHR:DMVVK:GXGXR, GIPEPXX:APTKM:SATS:LRKHR:NMVVK:SXAXR, SIPKAXX:APTEL:SATS:LRKHR:EMVVK:GXGXR, HVTKPTX:APTKL:SATS:LRKHR:NMVVK:SXGXH, YVPKPXX:APTKL:SATS:LRKHR:NMVVK:SXGXH, TVPKPXX:APTQL:SATS:LRKHR:NMVVK:AXGXH, KVGKAXX:APTKL:SATS:LRKHR:EGMSVVK:XGXR, KASKAXX:APTKL:SATS:LRKHR:GMVVK:EXGXR, GSAGPXX:APTKM:SATS:LRKHR:GMVVK:RXGXS, AAPASXX:APTRL:SATS:LRKHR:DMVVK:AXGXR, STPPTXX:APTRL:SATS:LRKHR:DMVVK:SXGXR, HVPKPXX:APTKL:SATS:LRKHR:NMVVK:SXGXH, RVPSTXX:APTKT:SATS:LRKHR:MIVVK:XGXL, ASAAPXX:APTAL:SATS:LRKHR:MIVVK:XKXS, ASASPXX:APTDL:SATS:LRKHR:MIVVK:XKXS, ASASPXX:APTDL:SATS:LRKHR:MVVVK:XKXS, NDEGLEX:APTEE:SATS:LRKHR:FLVVK:KXEXR, NDEGLEX:APTGQ:SATS:LRKHR:LEVVK:QXEXR, SSVKXQP:APTHH:SATS:LRKHR:RLVVK:LEXAXA, RNVQXRP:APTQL:SATS:LRKHR:TLVVK:LAXKXE, KIPKAXX:VPTEL:SATS:LRKHR:DMVVE:GXGXR, GIPEPXX:VPEKM:SATS:LRKHR:NMTVE:SXAXR, SIPKAXX:VPTEL:SATS:LRKHR:EMVVE:GXGXR, HVTKPTX:APTKL:SATS:LRKHR:NMVVR:SXGXH, YVPKPXX:APTKL:SATS:LRKHR:NMVVR:SXGXH, TVPKPXX:APTQL:SATS:LRKHR:NMVVR:AXGXH, KVGKAXX:VPTKL:SATS:LRKHR:EGMSVAE:XGXR, KASKAXX:VPTKL:SATS:LRKHR:GMAVS:EXGXR, GSAGPXX:TPTKM:SATS:LRKHR:GMVVD:RXGXS, AAPASXX:VPARL:SATS:LRKHR:DMVVE:AXGXR, STPPTXX:VPTRL:SATS:LRKHR:DMVVE:SXGXR, HVPKPXX:APTKL:SATS:LRKHR:NMVVR:SXGXH, RVPSTXX:APVKT:SATS:LRKHR:MIVEE:XGXL, ASAAPXX:VPQAL:SATS:LRKHR:MIVRS:XKXS, ASASPXX:VSQDL:SATS:LRKHR:MIVKS:XKXS, ASASPXX:VPQDL:SATS:LRKHR:MVVKS:XKXS, NDEGLEX:VPTEE:SATS:LRKHR:FLQHN:KXEXR, NDEGLEX:VPTGQ:SATS:LRKHR:LEEHS:QXEXR, SSVKXQP:SRVHH:SATS:LRKHR:RLEEH:LEXAXA, RNVQXRP:TQVQL:SATS:LRKHR:TLEDH:LAXKXE, KIPKAXX:VPTEL:SPIS:LKYHY:DMVAE:GXGXR, GIPEPXX:VPTKM:SPIS:LKYHY:NMVAE:SXAXR, SIPKAXX:VPTEL:SPIS:LKYHY:EMVAE:GXGXR, HVTKPTX:VPTKL:SPIS:LKYHY:NMVAE:SXGXH, YVPKPXX:VPTKL:SPIS:LKYHY:NMVAE:SXGXH, TVPKPXX:VPTQL:SPIS:LKYHY:NMVAE:AXGXH, AVPKAXX:VPTKL:SPIS:LKYHY:NMVAE:AXGXH, KASKAXX:VPTKL:SPIS:LKYHY:GMVAE:EXGXR, GSAGPXX:VPTKM:SPIS:LKYHY:GMVAE:RXGXS, AAPASXX:VPTRL:SPIS:LKYHY:DMVAE:AXGXR, STPPTXX:VPTRL:SPIS:LKYHY:DMVAE:SXGXR, HVPKPXX:VPTKL:SPIS:LKYHY:NMVAE:SXGXH, RVPSTXX:VPTKT:SPIS:LKYHY:MIVAE:XGXL, ASAAPXX:VPTAL:SPIS:LKYHY:MIVAE:XKXS, ASASPXX:VPTDL:SPIS:LKYHY:MIVAE:XKXS, ASASPXX:VPTDL:SPIS:LKYHY:MVVAE:XKXS, NDEGLEX:VPTEE:SPIS:LKYHY:FLVAE:KXEXR, NDEGLEX:VPTGQ:SPIS:LKYHY:LEVAE:QXEXR, SSVKXQP:VPTHH:SPIS:LKYHY:RLVAE:LEXAXA, RNVQXRP:VPTQL:SPIS:LKYHY:TLVAE:LAXKXE, KIPKAXX:VPTEL:SPIS:LKYHY:DMVVE:GXGXR, GIPEPXX:VPEKM:SPIS:LKYHY:NMTVE:SXAXR, SIPKAXX:VPTEL:SPIS:LKYHY:EMVVE:GXGXR, HVTKPTX:APTKL:SPIS:LKYHY:NMVVR:SXGXH, YVPKPXX:APTKL:SPIS:LKYHY:NMVVR:SXGXH, TVPKPXX:APTQL:SPIS:LKYHY:NMVVR:AXGXH, AVPKAXX:APTKL:SPIS:LKYHY:NMVVK:AXGXH, KASKAXX:VPTKL:SPIS:LKYHY:GMAVS:EXGXR, GSAGPXX:TPTKM:SPIS:LKYHY:GMVVD:RXGXS, AAPASXX:VPARL:SPIS:LKYHY:DMVVE:AXGXR, STPPTXX:VPTRL:SPIS:LKYHY:DMVVE:SXGXR, HVPKPXX:APTKL:SPIS:LKYHY:NMVVR:SXGXH, RVPSTXX:APVKT:SPIS:LKYHY:MIVEE:XGXL, ASAAPXX:VPQAL:SPIS:LKYHY:MIVRS:XKXS, ASASPXX:VSQDL:SPIS:LKYHY:MIVKS:XKXS, ASASPXX:VPQDL:SPIS:LKYHY:MVVKS:XKXS, NDEGLEX:VPTEE:SPIS:LKYHY:FLQHN:KXEXR, NDEGLEX:VPTGQ:SPIS:LKYHY:LEEHS:QXEXR, SSVKXQP:SRVHH:SPIS:LKYHY:RLEEH:LEXAXA, RNVQXRP:TQVQL:SPIS:LKYHY:TLEDH:LAXKXE, KIPKAXX:VPTEL:EPIS:KFKYE:DMAVS:GXGXR, GIPEPXX:VPTKM:EPIS:KFKYE:NMAVS:SXAXR, SIPKAXX:VPTEL:EPIS:KFKYE:EMAVS:GXGXR, HVTKPTX:VPTKL:EPIS:KFKYE:NMAVS:SXGXH, YVPKPXX:VPTKL:EPIS:KFKYE:NMAVS:SXGXH, TVPKPXX:VPTQL:EPIS:KFKYE:NMAVS:AXGXH, AVPKAXX:VPTKL:EPIS:KFKYE:NMAVS:AXGXH, KVGKAXX:VPTKL:EPIS:KFKYE:EGMSAVS:XGXR, GSAGPXX:VPTKM:EPIS:KFKYE:GMAVS:RXGXS, AAPASXX:VPTRL:EPIS:KFKYE:DMAVS:AXGXR, STPPTXX:VPTRL:EPIS:KFKYE:DMAVS:SXGXR, HVPKPXX:VPTKL:EPIS:KFKYE:NMAVS:SXGXH, RVPSTXX:VPTKT:EPIS:KFKYE:MIAVS:XGXL, ASAAPXX:VPTAL:EPIS:KFKYE:MIAVS:XKXS, ASASPXX:VPTDL:EPIS:KFKYE:MIAVS:XKXS, ASASPXX:VPTDL:EPIS:KFKYE:MVAVS:XKXS, NDEGLEX:VPTEE:EPIS:KFKYE:FLAVS:KXEXR, NDEGLEX:VPTGQ:EPIS:KFKYE:LEAVS:QXEXR, SSVKXQP:VPTHH:EPIS:KFKYE:RLAVS:LEXAXA, RNVQXRP:VPTQL:EPIS:KFKYE:TLAVS:LAXKXE, KIPKAXX:VPTEL:EPIS:KFKYE:DMVVE:GXGXR, GIPEPXX:VPEKM:EPIS:KFKYE:NMTVE:SXAXR, SIPKAXX:VPTEL:EPIS:KFKYE:EMVVE:GXGXR, HVTKPTX:APTKL:EPIS:KFKYE:NMVVR:SXGXH, YVPKPXX:APTKL:EPIS:KFKYE:NMVVR:SXGXH, TVPKPXX:APTQL:EPIS:KFKYE:NMVVR:AXGXH, AVPKAXX:APTKL:EPIS:KFKYE:NMVVK:AXGXH, KVGKAXX:VPTKL:EPIS:KFKYE:EGMSVAE:XGXR, GSAGPXX:TPTKM:EPIS:KFKYE:GMVVD:RXGXS, AAPASXX:VPARL:EPIS:KFKYE:DMVVE:AXGXR, STPPTXX:VPTRL:EPIS:KFKYE:DMVVE:SXGXR, HVPKPXX:APTKL:EPIS:KFKYE:NMVVR:SXGXH, RVPSTXX:APVKT:EPIS:KFKYE:MIVEE:XGXL, ASAAPXX:VPQAL:EPIS:KFKYE:MIVRS:XKXS, ASASPXX:VSQDL:EPIS:KFKYE:MIVKS:XKXS, ASASPXX:VPQDL:EPIS:KFKYE:MVVKS:XKXS, NDEGLEX:VPTEE:EPIS:KFKYE:FLQHN:KXEXR, NDEGLEX:VPTGQ:EPIS:KFKYE:LEEHS:QXEXR, SSVKXQP:SRVHH:EPIS:KFKYE:RLEEH:LEXAXA, RNVQXRP:TQVQL:EPIS:KFKYE:TLEDH:LAXKXE, KIPKAXX:TPTEL:SPIN:YGKIP:DMVVD:GXGXR, GIPEPXX:TPTKM:SPIN:YGKIP:NMVVD:SXAXR, SIPKAXX:TPTEL:SPIN:YGKIP:EMVVD:GXGXR, HVTKPTX:TPTKL:SPIN:YGKIP:NMVVD:SXGXH, YVPKPXX:TPTKL:SPIN:YGKIP:NMVVD:SXGXH, TVPKPXX:TPTQL:SPIN:YGKIP:NMVVD:AXGXH, AVPKAXX:TPTKL:SPIN:YGKIP:NMVVD:AXGXH, KVGKAXX:TPTKL:SPIN:YGKIP:EGMSVVD:XGXR, KASKAXX:TPTKL:SPIN:YGKIP:GMVVD:EXGXR, AAPASXX:TPTRL:SPIN:YGKIP:DMVVD:AXGXR, STPPTXX:TPTRL:SPIN:YGKIP:DMVVD:SXGXR, HVPKPXX:TPTKL:SPIN:YGKIP:NMVVD:SXGXH, RVPSTXX:TPTKT:SPIN:YGKIP:MIVVD:XGXL, ASAAPXX:TPTAL:SPIN:YGKIP:MIVVD:XKXS, ASASPXX:TPTDL:SPIN:YGKIP:MIVVD:XKXS, ASASPXX:TPTDL:SPIN:YGKIP:MVVVD:XKXS, NDEGLEX:TPTEE:SPIN:YGKIP:FLVVD:KXEXR, NDEGLEX:TPTGQ:SPIN:YGKIP:LEVVD:QXEXR, SSVKXQP:TPTHH:SPIN:YGKIP:RLVVD:LEXAXA, RNVQXRP:TPTQL:SPIN:YGKIP:TLVVD:LAXKXE, KIPKAXX:VPTEL:SPIN:YGKIP:DMVVE:GXGXR, GIPEPXX:VPEKM:SPIN:YGKIP:NMTVE:SXAXR, SIPKAXX:VPTEL:SPIN:YGKIP:EMVVE:GXGXR, HVTKPTX:APTKL:SPIN:YGKIP:NMVVR:SXGXH, YVPKPXX:APTKL:SPIN:YGKIP:NMVVR:SXGXH, TVPKPXX:APTQL:SPIN:YGKIP:NMVVR:AXGXH, AVPKAXX:APTKL:SPIN:YGKIP:NMVVK:AXGXH, KVGKAXX:VPTKL:SPIN:YGKIP:EGMSVAE:XGXR, KASKAXX:VPTKL:SPIN:YGKIP:GMAVS:EXGXR, AAPASXX:VPARL:SPIN:YGKIP:DMVVE:AXGXR, STPPTXX:VPTRL:SPIN:YGKIP:DMVVE:SXGXR, HVPKPXX:APTKL:SPIN:YGKIP:NMVVR:SXGXH, RVPSTXX:APVKT:SPIN:YGKIP:MIVEE:XGXL, ASAAPXX:VPQAL:SPIN:YGKIP:MIVRS:XKXS, ASASPXX:VSQDL:SPIN:YGKIP:MIVKS:XKXS, ASASPXX:VPQDL:SPIN:YGKIP:MVVKS:XKXS, NDEGLEX:VPTEE:SPIN:YGKIP:FLQHN:KXEXR, NDEGLEX:VPTGQ:SPIN:YGKIP:LEEHS:QXEXR, SSVKXQP:SRVHH:SPIN:YGKIP:RLEEH:LEXAXA, RNVQXRP:TQVQL:SPIN:YGKIP:TLEDH:LAXKXE, KIPKAXX:VPAEL:SPIS:YKQYE:DMVVE:GXGXR, GIPEPXX:VPAKM:SPIS:YKQYE:NMVVE:SXAXR, SIPKAXX:VPAEL:SPIS:YKQYE:EMVVE:GXGXR, HVTKPTX:VPAKL:SPIS:YKQYE:NMVVE:SXGXH, YVPKPXX:VPAKL:SPIS:YKQYE:NMVVE:SXGXH, TVPKPXX:VPAQL:SPIS:YKQYE:NMVVE:AXGXH, AVPKAXX:VPAKL:SPIS:YKQYE:NMVVE:AXGXH, KVG KAXX:VPAKL:SPIS:YKQYE:EGMSVVE:XGXR, KASKAXX:VPAKL:SPIS:YKQYE:GMVVE:EXGXR, GSAGPXX:VPAKM:SPIS:YKQYE:GMVVE:RXGXS, STPPTXX:VPARL:SPIS:YKQYE:DMVVE:SXGXR, HVPKPXX:VPAKL:SPIS:YKQYE:NMVVE:SXGXH, RVPSTXX:VPAKT:SPIS:YKQYE:MIVVE:XGXL, ASAAPXX:VPAAL:SPIS:YKQYE:MIVVE:XKXS, ASASPXX:VPADL:SPIS:YKQYE:MIVVE:XKXS, ASASPXX:VPADL:SPIS:YKQYE:MVVVE:XKXS, NDEGLEX:VPAEE:SPIS:YKQYE:FLVVE:KXEXR, NDEGLEX:VPAGQ:SPIS:YKQYE:LEVVE:QXEXR, SSVKXQP:VPAHH:SPIS:YKQYE:RLVVE:LEXAXA, RNVQXRP:VPAQL:SPIS:YKQYE:TLVVE:LAXKXE, KIPKAXX:VPTEL:SPIS:YKQYE:DMVVE:GXGXR, GIPEPXX:VPEKM:SPIS:YKQYE:NMTVE:SXAXR, SIPKAXX:VPTEL:SPIS:YKQYE:EMVVE:GXGXR, HVTKPTX:APTKL:SPIS:YKQYE:NMVVR:SXGXH, YVPKPXX:APTKL:SPIS:YKQYE:NMVVR:SXGXH, TVPKPXX:APTQL:SPIS:YKQYE:NMVVR:AXGXH, AVPKAXX:APTKL:SPIS:YKQYE:NMVVK:AXGXH, KVGKAXX:VPTKL:SPIS:YKQYE:EGMSVAE:XGXR, KASKAXX:VPTKL:SPIS:YKQYE:GMAVS:EXGXR, GSAGPXX:TPTKM:SPIS:YKQYE:GMVVD:RXGXS, STPPTXX:VPTRL:SPIS:YKQYE:DMVVE:SXGXR, HVPKPXX:APTKL:SPIS:YKQYE:NMVVR:SXGXH, RVPSTXX:APVKT:SPIS:YKQYE:MIVEE:XGXL, ASAAPXX:VPQAL:SPIS:YKQYE:MIVRS:XKXS, ASASPXX:VSQDL:SPIS:YKQYE:MIVKS:XKXS, ASASPXX:VPQDL:SPIS:YKQYE:MVVKS:XKXS, NDEGLEX:VPTEE:SPIS:YKQYE:FLQHN:KXEXR, NDEGLEX:VPTGQ:SPIS:YKQYE:LEEHS:QXEXR, SSVKXQP:SRVHH:SPIS:YKQYE:RLEEH:LEXAXA, RNVQXRP:TQVQL:SPIS:YKQYE:TLEDH:LAXKXE, GIPEPXX:VPTKM:SPIS:YKQYE:NMVVE:SXAXR, HVTKPTX:VPTKL:SPIS:YKQYE:NMVVE:SXGXH, YVPKPXX:VPTKL:SPIS:YKQYE:NMVVE:SXGXH, TVPKPXX:VPTQL:SPIS:YKQYE:NMVVE:AXGXH, AVPKAXX:VPTKL:SPIS:YKQYE:NMVVE:AXGXH, KVGKAXX:VPTKL:SPIS:YKQYE:EGMSVVE:XGXR, KASKAXX:VPTKL:SPIS:YKQYE:GMVVE:EXGXR, GSAGPXX:VPTKM:SPIS:YKQYE:GMVVE:RXGXS, AAPASXX:VPTRL:SPIS:YKQYE:DMVVE:AXGXR, HVPKPXX:VPTKL:SPIS:YKQYE:NMVVE:SXGXH, RVPSTXX:VPTKT:SPIS:YKQYE:MIVVE:XGXL, ASAAPXX:VPTAL:SPIS:YKQYE:MIVVE:XKXS, ASASPXX:VPTDL:SPIS:YKQYE:MIVVE:XKXS, ASASPXX:VPTDL:SPIS:YKQYE:MVVVE:XKXS, NDEGLEX:VPTEE:SPIS:YKQYE:FLVVE:KXEXR, NDEGLEX:VPTGQ:SPIS:YKQYE:LEVVE:QXEXR, SSVKXQP:VPTHH:SPIS:YKQYE:RLVVE:LEXAXA, RNVQXRP:VPTQL:SPIS:YKQYE:TLVVE:LAXKXE, AAPASXX:VPARL:SPIS:YKQYE:DMVVE:AXGXR, KIPKAXX:APVEL:KPLS:DHHKD:DMVEE:GXGXR, GIPEPXX:APVKM:KPLS:DHHKD:NMVEE:SXAXR, SIPKAXX:APVEL:KPLS:DHHKD:EMVEE:GXGXR, HVTKPTX:APVKL:KPLS:DHHKD:NMVEE:SXGXH, YVPKPXX:APVKL:KPLS:DHHKD:NMVEE:SXGXH, TVPKPXX:APVQL:KPLS:DHHKD:NMVEE:AXGXH, AVPKAXX:APVKL:KPLS:DHHKD:NMVEE:AXGXH, KVGKAXX:APVKL:KPLS:DHHKD:EGMSVEE:XGXR, KASKAXX:APVKL:KPLS:DHHKD:GMVEE:EXGXR, GSAGPXX:APVKM:KPLS:DHHKD:GMVEE:RXGXS, AAPASXX:APVRL:KPLS:DHHKD:DMVEE:AXGXR, STPPTXX:APVRL:KPLS:DHHKD:DMVEE:SXGXR, HVPKPXX:APVKL:KPLS:DHHKD:NMVEE:SXGXH, ASAAPXX:APVAL:KPLS:DHHKD:MIVEE:XKXS, ASASPXX:APVDL:KPLS:DHHKD:MIVEE:XKXS, ASASPXX:APVDL:KPLS:DHHKD:MVVEE:XKXS, NDEGLEX:APVEE:KPLS:DHHKD:FLVEE:KXEXR, NDEGLEX:APVGQ:KPLS:DHHKD:LEVEE:QXEXR, SSVKXQP:APVHH:KPLS:DHHKD:RLVEE:LEXAXA, RNVQXRP:APVQL:KPLS:DHHKD:TLVEE:LAXKXE, KIPKAXX:VPTEL:KPLS:DHHKD:DMVVE:GXGXR, GIPEPXX:VPEKM:KPLS:DHHKD:NMTVE:SXAXR, SIPKAXX:VPTEL:KPLS:DHHKD:EMVVE:GXGXR, HVTKPTX:APTKL:KPLS:DHHKD:NMVVR:SXGXH, YVPKPXX:APTKL:KPLS:DHHKD:NMVVR:SXGXH, TVPKPXX:APTQL:KPLS:DHHKD:NMVVR:AXGXH, AVPKAXX:APTKL:KPLS:DHHKD:NMVVK:AXGXH, KVGKAXX:VPTKL:KPLS:DHHKD:EGMSVAE:XGXR, KASKAXX:VPTKL:KPLS:DHHKD:GMAVS:EXGXR, GSAGPXX:TPTKM:KPLS:DHHKD:GMVVD:RXGXS, AAPASXX:VPARL:KPLS:DHHKD:DMVVE:AXGXR, STPPTXX:VPTRL:KPLS:DHHKD:DMVVE:SXGXR, HVPKPXX:APTKL:KPLS:DHHKD:NMVVR:SXGXH, ASAAPXX:VPQAL:KPLS:DHHKD:MIVRS:XKXS, ASASPXX:VSQDL:KPLS:DHHKD:MIVKS:XKXS, ASASPXX:VPQDL:KPLS:DHHKD:MVVKS:XKXS, NDEGLEX:VPTEE:KPLS:DHHKD:FLQHN:KXEXR, NDEGLEX:VPTGQ:KPLS:DHHKD:LEEHS:QXEXR, SSVKXQP:SRVHH:KPLS:DHHKD:RLEEH:LEXAXA, RNVQXRP:TQVQL:KPLS:DHHKD:TLEDH:LAXKXE, KIPKAXX:VPQEL:EPLP:EQLSN:DMVRS:GXGXR, GIPEPXX:VPQKM:EPLP:EQLSN:NMVRS:SXAXR, SIPKAXX:VPQEL:EPLP:EQLSN:EMVRS:GXGXR, HVTKPTX:VPQKL:EPLP:EQLSN:NMVRS:SXGXH, YVPKPXX:VPQKL:EPLP:EQLSN:NMVRS:SXGXH, TVPKPXX:VPQQL:EPLP:EQLSN:NMVRS:AXGXH, AVPKAXX:VPQKL:EPLP:EQLSN:NMVRS:AXGXH, KVGKAXX:VPQKL:EPLP:EQLSN:EGMSVRS:XGXR, KASKAXX:VPQKL:EPLP:EQLSN:GMVRS:EXGXR, GSAGPXX:VPQKM:EPLP:EQLSN:GMVRS:RXGXS, AAPASXX:VPQRL:EPLP:EQLSN:DMVRS:AXGXR, STPPTXX:VPQRL:EPLP:EQLSN:DMVRS:SXGXR, HVPKPXX:VPQKL:EPLP:EQLSN:NMVRS:SXGXH, RVPSTXX:VPQKT:EPLP:EQLSN:MIVRS:XGXL, ASASPXX:VPQDL:EPLP:EQLSN:MIVRS:XKXS, ASASPXX:VPQDL:EPLP:EQLSN:MVVRS:XKXS, NDEGLEX:VPQEE:EPLP:EQLSN:FLVRS:KXEXR, NDEGLEX:VPQGQ:EPLP:EQLSN:LEVRS:QXEXR, SSVKXQP:VPQHH:EPLP:EQLSN:RLVRS:LEXAXA, RNVQXRP:VPQQL:EPLP:EQLSN:TLVRS:LAXKXE, KIPKAXX:VPTEL:EPLP:EQLSN:DMVVE:GXGXR, GIPEPXX:VPEKM:EPLP:EQLSN:NMTVE:SXAXR, SIPKAXX:VPTEL:EPLP:EQLSN:EMVVE:GXGXR, HVTKPTX:APTKL:EPLP:EQLSN:NMVVR:SXGXH, YVPKPXX:APTKL:EPLP:EQLSN:NMVVR:SXGXH, TVPKPXX:APTQL:EPLP:EQLSN:NMVVR:AXGXH, AVPKAXX:APTKL:EPLP:EQLSN:NMVVK:AXGXH, KVGKAXX:VPTKL:EPLP:EQLSN:EGMSVAE:XGXR, KASKAXX:VPTKL:EPLP:EQLSN:GMAVS:EXGXR, GSAGPXX:TPTKM:EPLP:EQLSN:GMVVD:RXGXS, AAPASXX:VPARL:EPLP:EQLSN:DMVVE:AXGXR, STPPTXX:VPTRL:EPLP:EQLSN:DMVVE:SXGXR, HVPKPXX:APTKL:EPLP:EQLSN:NMVVR:SXGXH, RVPSTXX:APVKT:EPLP:EQLSN:MIVEE:XGXL, ASASPXX:VSQDL:EPLP:EQLSN:MIVKS:XKXS, ASASPXX:VPQDL:EPLP:EQLSN:MVVKS:XKXS, NDEGLEX:VPTEE:EPLP:EQLSN:FLQHN:KXEXR, NDEGLEX:VPTGQ:EPLP:EQLSN:LEEHS:QXEXR, SSVKXQP:SRVHH:EPLP:EQLSN:RLEEH:LEXAXA, RNVQXRP:TQVQL:EPLP:EQLSN:TLEDH:LAXKXE, KIPKAXX:VSQEL:EPLT:EQLSN:DMVKS:GXGXR, GIPEPXX:VSQKM:EPLT:EQLSN:NMVKS:SXAXR, SIPKAXX:VSQEL:EPLT:EQLSN:EMVKS:GXGXR, HVTKPTX:VSQKL:EPLT:EQLSN:NMVKS:SXGXH, YVPKPXX:VSQKL:EPLT:EQLSN:NMVKS:SXGXH, TVPKPXX:VSQQL:EPLT:EQLSN:NMVKS:AXGXH, AVPKAXX:VSQKL:EPLT:EQLSN:NMVKS:AXGXH, KVGKAXX:VSQKL:EPLT:EQLSN:EGMSVKS:XGXR, KASKAXX:VSQKL:EPLT:EQLSN:GMVKS:EXGXR, GSAGPXX:VSQKM:EPLT:EQLSN:GMVKS:RXGXS, AAPASXX:VSQRL:EPLT:EQLSN:DMVKS:AXGXR, STPPTXX:VSQRL:EPLT:EQLSN:DMVKS:SXGXR, HVPKPXX:VSQKL:EPLT:EQLSN:NMVKS:SXGXH, RVPSTXX:VSQKT:EPLT:EQLSN:MIVKS:XGXL, ASAAPXX:VSQAL:EPLT:EQLSN:MIVKS:XKXS, ASASPXX:VSQDL:EPLT:EQLSN:MVVKS:XKXS, NDEGLEX:VSQEE:EPLT:EQLSN:FLVKS:KXEXR, NDEGLEX:VSQGQ:EPLT:EQLSN:LEVKS:QXEXR, SSVKXQP:VSQHH:EPLT:EQLSN:RLVKS:LEXAXA, RNVQXRP:VSQQL:EPLT:EQLSN:TLVKS:LAXKXE, KIPKAXX:VPTEL:EPLT:EQLSN:DMVVE:GXGXR, GIPEPXX:VPEKM:EPLT:EQLSN:NMTVE:SXAXR, SIPKAXX:VPTEL:EPLT:EQLSN:EMVVE:GXGXR, HVTKPTX:APTKL:EPLT:EQLSN:NMVVR:SXGXH, YVPKPXX:APTKL:EPLT:EQLSN:NMVVR:SXGXH, TVPKPXX:APTQL:EPLT:EQLSN:NMVVR:AXGXH, AVPKAXX:APTKL:EPLT:EQLSN:NMVVK:AXGXH, KVGKAXX:VPTKL:EPLT:EQLSN:EGMSVAE:XGXR, KASKAXX:VPTKL:EPLT:EQLSN:GMAVS:EXGXR, GSAGPXX:TPTKM:EPLT:EQLSN:GMVVD:RXGXS, AAPASXX:VPARL:EPLT:EQLSN:DMVVE:AXGXR, STPPTXX:VPTRL:EPLT:EQLSN:DMVVE:SXGXR, HVPKPXX:APTKL:EPLT:EQLSN:NMVVR:SXGXH, RVPSTXX:APVKT:EPLT:EQLSN:MIVEE:XGXL, ASAAPXX:VPQAL:EPLT:EQLSN:MIVRS:XKXS, ASASPXX:VPQDL:EPLT:EQLSN:MVVKS:XKXS, NDEGLEX:VPTEE:EPLT:EQLSN:FLQHN:KXEXR, NDEGLEX:VPTGQ:EPLT:EQLSN:LEEHS:QXEXR, SSVKXQP:SRVHH:EPLT:EQLSN:RLEEH:LEXAXA, RNVQXRP:TQVQL:EPLT:EQLSN:TLEDH:LAXKXE, KIPKAXX:VPQEL:EPLT:EQLSN:DMVKS:GXGXR, GIPEPXX:VPQKM:EPLT:EQLSN:NMVKS:SXAXR, SIPKAXX:VPQEL:EPLT:EQLSN:EMVKS:GXGXR, HVTKPTX:VPQKL:EPLT:EQLSN:NMVKS:SXGXH, YVPKPXX:VPQKL:EPLT:EQLSN:NMVKS:SXGXH, TVPKPXX:VPQQL:EPLT:EQLSN:NMVKS:AXGXH, AVPKAXX:VPQKL:EPLT:EQLSN:NMVKS:AXGXH, KVGKAXX:VPQKL:EPLT:EQLSN:EGMSVKS:XGXR, KASKAXX:VPQKL:EPLT:EQLSN:GMVKS:EXGXR, GSAGPXX:VPQKM:EPLT:EQLSN:GMVKS:RXGXS, AAPASXX:VPQRL:EPLT:EQLSN:DMVKS:AXGXR, STPPTXX:VPQRL:EPLT:EQLSN:DMVKS:SXGXR, HVPKPXX:VPQKL:EPLT:EQLSN:NMVKS:SXGXH, RVPSTXX:VPQKT:EPLT:EQLSN:MIVKS:XGXL, ASAAPXX:VPQAL:EPLT:EQLSN:MIVKS:XKXS, ASASPXX:VPQDL:EPLT:EQLSN:MIVKS:XKXS, NDEGLEX:VPQEE:EPLT:EQLSN:FLVKS:KXEXR, NDEGLEX:VPQGQ:EPLT:EQLSN:LEVKS:QXEXR, SSVKXQP:VPQHH:EPLT:EQLSN:RLVKS:LEXAXA, RNVQXRP:VPQQL:EPLT:EQLSN:TLVKS:LAXKXE, ASASPXX:VSQDL:EPLT:EQLSN:MIVKS:XKXS, KIPKAXX:VPTEL:SNIT:IGEMS:DMQHN:GXGXR, GIPEPXX:VPTKM:SNIT:IGEMS:NMQHN:SXAXR, SIPKAXX:VPTEL:SNIT:IGEMS:EMQHN:GXGXR, HVTKPTX:VPTKL:SNIT:IGEMS:NMQHN:SXGXH, YVPKPXX:VPTKL:SNIT:IGEMS:NMQHN:SXGXH, TVPKPXX:VPTQL:SNIT:IGEMS:NMQHN:AXGXH, AVPKAXX:VPTKL:SNIT:IGEMS:NMQHN:AXGXH, KVGKAXX:VPTKL:SNIT:IGEMS:EGMSQHN:XGXR, KASKAXX:VPTKL:SNIT:IGEMS:GMQHN:EXGXR, GSAGPXX:VPTKM:SNIT:IGEMS:GMQHN:RXGXS, AAPASXX:VPTRL:SNIT:IGEMS:DMQHN:AXGXR, STPPTXX:VPTRL:SNIT:IGEMS:DMQHN:SXGXR, HVPKPXX:VPTKL:SNIT:IGEMS:NMQHN:SXGXH, RVPSTXX:VPTKT:SNIT:IGEMS:MIQHN:XGXL, ASAAPXX:VPTAL:SNIT:IGEMS:MIQHN:XKXS, ASASPXX:VPTDL:SNIT:IGEMS:MIQHN:XKXS, ASASPXX:VPTDL:SNIT:IGEMS:MVQHN:XKXS, NDEGLEX:VPTGQ:SNIT:IGEMS:LEQHN:QXEXR, NDEGLEX:VPTEE:SNIT:IGEMS:FLQHN:KXEXR, SSVKXQP:VPTHH:SNIT:IGEMS:RLQHN:LEXAXA, RNVQXRP:VPTQL:SNIT:IGEMS:TLQHN:LAXKXE, KIPKAXX:VPTEL:SNIT:IGEMS:DMVVE:GXGXR, GIPEPXX:VPEKM:SNIT:IGEMS:NMTVE:SXAXR, SIPKAXX:VPTEL:SNIT:IGEMS:EMVVE:GXGXR, HVTKPTX:APTKL:SNIT:IGEMS:NMVVR:SXGXH, YVPKPXX:APTKL:SNIT:IGEMS:NMVVR:SXGXH, TVPKPXX:APTQL:SNIT:IGEMS:NMVVR:AXGXH, AVPKAXX:APTKL:SNIT:IGEMS:NMVVK:AXGXH, KVGKAXX:VPTKL:SNIT:IGEMS:EGMSVAE:XGXR, KASKAXX:VPTKL:SNIT:IGEMS:GMAVS:EXGXR, GSAGPXX:TPTKM:SNIT:IGEMS:GMVVD:RXGXS, AAPASXX:VPARL:SNIT:IGEMS:DMVVE:AXGXR, STPPTXX:VPTRL:SNIT:IGEMS:DMVVE:SXGXR, HVPKPXX:APTKL:SNIT:IGEMS:NMVVR:SXGXH, RVPSTXX:APVKT:SNIT:IGEMS:MIVEE:XGXL, ASAAPXX:VPQAL:SNIT:IGEMS:MIVRS:XKXS, ASASPXX:VSQDL:SNIT:IGEMS:MIVKS:XKXS, ASASPXX:VPQDL:SNIT:IGEMS:MVVKS:XKXS, NDEGLEX:VPTGQ:SNIT:IGEMS:LEEHS:QXEXR, SSVKXQP:SRVHH:SNIT:IGEMS:RLEEH:LEXAXA, RNVQXRP:TQVQL:SNIT:IGEMS:TLEDH:LAXKXE, KIPKAXX:VPTEL:SNIT:LGEMS:DMEHS:GXGXR, GIPEPXX:VPTKM:SNIT:LGEMS:NMEHS:SXAXR, SIPKAXX:VPTEL:SNIT:LGEMS:EMEHS:GXGXR, HVTKPTX:VPTKL:SNIT:LGEMS:NMEHS:SXGXH, YVPKPXX:VPTKL:SNIT:LGEMS:NMEHS:SXGXH, TVPKPXX:VPTQL:SNIT:LGEMS:NMEHS:AXGXH, AVPKAXX:VPTKL:SNIT:LGEMS:NMEHS:AXGXH, KVGKAXX:VPTKL:SNIT:LGEMS:EGMSEHS:XGXR, KASKAXX:VPTKL:SNIT:LGEMS:GMEHS:EXGXR, GSAGPXX:VPTKM:SNIT:LGEMS:GMEHS:RXGXS, AAPASXX:VPTRL:SNIT:LGEMS:DMEHS:AXGXR, STPPTXX:VPTRL:SNIT:LGEMS:DMEHS:SXGXR, HVPKPXX:VPTKL:SNIT:LGEMS:NMEHS:SXGXH, RVPSTXX:VPTKT:SNIT:LGEMS:MIEHS:XGXL, ASAAPXX:VPTAL:SNIT:LGEMS:MIEHS:XKXS, ASASPXX:VPTDL:SNIT:LGEMS:MIEHS:XKXS, ASASPXX:VPTDL:SNIT:LGEMS:MVEHS:XKXS, NDEGLEX:VPTEE:SNIT:LGEMS:FLEHS:KXEXR, SSVKXQP:VPTHH:SNIT:LGEMS:RLEHS:LEXAXA, RNVQXRP:VPTQL:SNIT:LGEMS:TLEHS:LAXKXE, KIPKAXX:VPTEL:SNIT:LGEMS:DMVVE:GXGXR, GIPEPXX:VPEKM:SNIT:LGEMS:NMTVE:SXAXR, SIPKAXX:VPTEL:SNIT:LGEMS:EMVVE:GXGXR, HVTKPTX:APTKL:SNIT:LGEMS:NMVVR:SXGXH, YVPKPXX:APTKL:SNIT:LGEMS:NMVVR:SXGXH, TVPKPXX:APTQL:SNIT:LGEMS:NMVVR:AXGXH, AVPKAXX:APTKL:SNIT:LGEMS:NMVVK:AXGXH, KVGKAXX:VPTKL:SNIT:LGEMS:EGMSVAE:XGXR, KASKAXX:VPTKL:SNIT:LGEMS:GMAVS:EXGXR, GSAGPXX:TPTKM:SNIT:LGEMS:GMVVD:RXGXS, AAPASXX:VPARL:SNIT:LGEMS:DMVVE:AXGXR, STPPTXX:VPTRL:SNIT:LGEMS:DMVVE:SXGXR, HVPKPXX:APTKL:SNIT:LGEMS:NMVVR:SXGXH, RVPSTXX:APVKT:SNIT:LGEMS:MIVEE:XGXL, ASAAPXX:VPQAL:SNIT:LGEMS:MIVRS:XKXS, ASASPXX:VSQDL:SNIT:LGEMS:MIVKS:XKXS, ASASPXX:VPQDL:SNIT:LGEMS:MVVKS:XKXS, NDEGLEX:VPTEE:SNIT:LGEMS:FLQHN:KXEXR, SSVKXQP:SRVHH:SNIT:LGEMS:RLEEH:LEXAXA, RNVQXRP:TQVQL:SNIT:LGEMS:TLEDH:LAXKXE, KIPKAXX:SRVEL:RSVK:KEVQV:DMEEH:GXGXR, GIPEPXX:SRVKM:RSVK:KEVQV:NMEEH:SXAXR, SIPKAXX:SRVEL:RSVK:KEVQV:EMEEH:GXGXR, HVTKPTX:SRVKL:RSVK:KEVQV:NMEEH:SXGXH, YVPKPXX:SRVKL:RSVK:KEVQV:NMEEH:SXGXH, TVPKPXX:SRVQL:RSVK:KEVQV:NMEEH:AXGXH, AVPKAXX:SRVKL:RSVK:KEVQV:NMEEH:AXGXH, KVGKAXX:SRVKL:RSVK:KEVQV:EGMSEEH:XGXR, KASKAXX:SRVKL:RSVK:KEVQV:GMEEH:EXGXR, GSAGPXX:SRVKM:RSVK:KEVQV:GMEEH:RXGXS, AAPASXX:SRVRL:RSVK:KEVQV:DMEEH:AXGXR, STPPTXX:SRVRL:RSVK:KEVQV:DMEEH:SXGXR, HVPKPXX:SRVKL:RSVK:KEVQV:NMEEH:SXGXH, RVPSTXX:SRVKT:RSVK:KEVQV:MIEEH:XGXL, ASAAPXX:SRVAL:RSVK:KEVQV:MIEEH:XKXS, ASASPXX:SRVDL:RSVK:KEVQV:MIEEH:XKXS, ASASPXX:SRVDL:RSVK:KEVQV:MVEEH:XKXS, NDEGLEX:SRVEE:RSVK:KEVQV:FLEEH:KXEXR, NDEGLEX:SRVGQ:RSVK:KEVQV:LEEEH:QXEXR, RNVQXRP:SRVQL:RSVK:KEVQV:TLEEH:LAXKXE, KIPKAXX:VPTEL:RSVK:KEVQV:DMVVE:GXGXR, GIPEPXX:VPEKM:RSVK:KEVQV:NMTVE:SXAXR, SIPKAXX:VPTEL:RSVK:KEVQV:EMVVE:GXGXR, HVTKPTX:APTKL:RSVK:KEVQV:NMVVR:SXGXH, YVPKPXX:APTKL:RSVK:KEVQV:NMVVR:SXGXH, TVPKPXX:APTQL:RSVK:KEVQV:NMVVR:AXGXH, AVPKAXX:APTKL:RSVK:KEVQV:NMVVK:AXGXH, KVGKAXX:VPTKL:RSVK:KEVQV:EGMSVAE:XGXR, KASKAXX:VPTKL:RSVK:KEVQV:GMAVS:EXGXR, GSAGPXX:TPTKM:RSVK:KEVQV:GMVVD:RXGXS, AAPASXX:VPARL:RSVK:KEVQV:DMVVE:AXGXR, STPPTXX:VPTRL:RSVK:KEVQV:DMVVE:SXGXR, HVPKPXX:APTKL:RSVK:KEVQV:NMVVR:SXGXH, RVPSTXX:APVKT:RSVK:KEVQV:MIVEE:XGXL, ASAAPXX:VPQAL:RSVK:KEVQV:MIVRS:XKXS, ASASPXX:VSQDL:RSVK:KEVQV:MIVKS:XKXS, ASASPXX:VPQDL:RSVK:KEVQV:MVVKS:XKXS, NDEGLEX:VPTEE:RSVK:KEVQV:FLQHN:KXEXR, NDEGLEX:VPTGQ:RSVK:KEVQV:LEEHS:QXEXR, RNVQXRP:TQVQL:RSVK:KEVQV:TLEDH:LAXKXE, KIPKAXX:TQVEL:RPVQ:KKATV:DMEDH:GXGXR, GIPEPXX:TQVKM:RPVQ:KKATV:NMEDH:SXAXR, SIPKAXX:TQVEL:RPVQ:KKATV:EMEDH:GXGXR, HVTKPTX:TQVKL:RPVQ:KKATV:NMEDH:SXGXH, YVPKPXX:TQVKL:RPVQ:KKATV:NMEDH:SXGXH, TVPKPXX:TQVQL:RPVQ:KKATV:NMEDH:AXGXH, AVPKAXX:TQVKL:RPVQ:KKATV:NMEDH:AXGXH, KVGKAXX:TQVKL:RPVQ:KKATV:EGMSEDH:XGXR, KASKAXX:TQVKL:RPVQ:KKATV:GMEDH:EXGXR, GSAGPXX:TQVKM:RPVQ:KKATV:GMEDH:RXGXS, AAPASXX:TQVRL:RPVQ:KKATV:DM EDH:AXGXR, STPPTXX:TQVRL:RPVQ:KKATV:DMEDH:SXGXR, HVPKPXX:TQVKL:RPVQ:KKATV:NMEDH:SXGXH, RVPSTXX:TQVKT:RPVQ:KKATV:MIEDH:XGXL, ASAAPXX:TQVAL:RPVQ:KKATV:MIEDH:XKXS, ASASPXX:TQVDL:RPVQ:KKATV:MIEDH:XKXS, ASASPXX:TQVDL:RPVQ:KKATV:MVEDH:XKXS, NDEGLEX:TQVEE:RPVQ:KKATV:FLEDH:KXEXR, NDEGLEX:TQVGQ:RPVQ:KKATV:LEEDH:QXEXR, SSVKXQP:TQVHH:RPVQ:KKATV:RLEDH:LEXAXA, KIPKAXX:VPTEL:RPVQ:KKATV:DMVVE:GXGXR, GIPEPXX:VPEKM:RPVQ:KKATV:NMTVE:SXAXR, SIPKAXX:VPTEL:RPVQ:KKATV:EMVVE:GXGXR, HVTKPTX:APTKL:RPVQ:KKATV:NMVVR:SXGXH, YVPKPXX:APTKL:RPVQ:KKATV:NMVVR:SXGXH, TVPKPXX:APTQL:RPVQ:KKATV:NMVVR:AXGXH, AVPKAXX:APTKL:RPVQ:KKATV:NMVVK:AXGXH, KVG KAXX:VPTKL:RPVQ:KKATV:EGMSVAE:XGXR, KASKAXX:VPTKL:RPVQ:KKATV:GMAVS:EXGXR, GSAGPXX:TPTKM:RPVQ:KKATV:GMVVD:RXGXS, AAPASXX:VPARL:RPVQ:KKATV:DMVVE:AXGXR, STPPTXX:VPTRL:RPVQ:KKATV:DMVVE:SXGXR, HVPKPXX:APTKL:RPVQ:KKATV:NMVVR:SXGXH, RVPSTXX:APVKT:RPVQ:KKATV:MIVEE:XGXL, ASAAPXX:VPQAL:RPVQ:KKATV:MIVRS:XKXS, ASASPXX:VSQDL:RPVQ:KKATV:MIVKS:XKXS, ASASPXX:VPQDL:RPVQ:KKATV:MVVKS:XKXS, NDEGLEX:VPTEE:RPVQ:KKATV:FLQHN:KXEXR, NDEGLEX:VPTGQ:RPVQ:KKATV:LEEHS:QXEXR and SSVKXQP:SRVHH:RPVQ:KKATV:RLEEH:LEXAXA. More particularly, the hexaplet PEP7:PEP5:PEP1:PEP2:PEP6:PEP8 is selected from the group consisting of GIPEPXX:VPTKM:SAIS:LKNYQ:NMVVE:SXAXR, HVTKPTX:VPTKL:SAIS:LKNYQ:NMVVE:SXGXH, YVPKPXX:VPTKL:SAIS:LKNYQ:NMVVE:SXGXH, TVPKPXX:VPTQL:SAIS:LKNYQ:NMVVE:AXGXH, AVPKAXX:VPTKL:SAIS:LKNYQ:NMVVE:AXGXH, KVGKAXX:VPTKL:SAIS:LKNYQ:EGMSVVE:XGXR, KASKAXX:VPTKL:SAIS:LKNYQ:GMVVE:EXGXR, GSAGPXX:VPTKM:SAIS:LKNYQ:GMVVE:RXGXS, AAPASXX:VPTRL:SAIS:LKNYQ:DMVVE:AXGXR, STPPTXX:VPTRL:SAIS:LKNYQ:DMVVE:SXGXR, HVPKPXX:VPTKL:SAIS:LKNYQ:NMVVE:SXGXH, RVPSTXX:VPTKT:SAIS:LKNYQ:MIVVE:XGXL, ASAAPXX:VPTAL:SAIS:LKNYQ:MIVVE:XKXS, ASASPXX:VPTDL:SAIS:LKNYQ:MIVVE:XKXS, ASASPXX:VPTDL:SAIS:LKNYQ:MVVVE:XKXS, GIPEPXX:VPEKM:SAIS:LKNYQ:NMTVE:SXAXR, HVTKPTX:APTKL:SAIS:LKNYQ:NMVVR:SXGXH, YVPKPXX:APTKL:SAIS:LKNYQ:NMVVR:SXGXH, TVPKPXX:APTQL:SAIS:LKNYQ:NMVVR:AXGXH, AVPKAXX:APTKL:SAIS:LKNYQ:NMVVK:AXGXH, KVGKAXX:VPTKL:SAIS:LKNYQ:EGMSVAE:XGXR, KASKAXX:VPTKL:SAIS:LKNYQ:GMAVS:EXGXR, GSAGPXX:TPTKM:SAIS:LKNYQ:GMVVD:RXGXS, AAPASXX:VPARL:SAIS:LKNYQ:DMVVE:AXGXR, HVPKPXX:APTKL:SAIS:LKNYQ:NMVVR:SXGXH, RVPSTXX:APVKT:SAIS:LKNYQ:MIVEE:XGXL, ASAAPXX:VPQAL:SAIS:LKNYQ:MIVRS:XKXS, ASASPXX:VSQDL:SAIS:LKNYQ:MIVKS:XKXS, ASASPXX:VPQDL:SAIS:LKNYQ:MVVKS:XKXS, NDEGLEX:VPTEE:SAIS:LKNYQ:FLQHN:KXEXR, NDEGLEX:VPTGQ:SAIS:LKNYQ:LEEHS:QXEXR, SSVKXQP:SRVHH:SAIS:LKNYQ:RLEEH:LEXAXA, RNVQXRP:TQVQL:SAIS:LKNYQ:TLEDH:LAXKXE, KIPKAXX:VPEEL:SSLS:LKVYP:DMTVE:GXGXR, SIPKAXX:VPEEL:SSLS:LKVYP:EMTVE:GXGXR, HVTKPTX:VPEKL:SSLS:LKVYP:NMTVE:SXGXH, YVPKPXX:VPEKL:SSLS:LKVYP:NMTVE:SXGXH, TVPKPXX:VPEQL:SSLS:LKVYP:NMTVE:AXGXH, AVPKAXX:VPEKL:SSLS:LKVYP:NMTVE:AXGXH, KVGKAXX:VPEKL:SSLS:LKVYP:EGMSTVE:XGXR, KASKAXX:VPEKL:SSLS:LKVYP:GMTVE:EXGXR, GSAGPXX:VPEKM:SSLS:LKVYP:GMTVE:RXGXS, AAPASXX:VPERL:SSLS:LKVYP:DMTVE:AXGXR, STPPTXX:VPERL:SSLS:LKVYP:DMTVE:SXGXR, HVPKPXX:VPEKL:SSLS:LKVYP:NMTVE:SXGXH, RVPSTXX:VPEKT:SSLS:LKVYP:MITVE:XGXL, ASAAPXX:VPEAL:SSLS:LKVYP:MITVE:XKXS, ASASPXX:VPEDL:SSLS:LKVYP:MITVE:XKXS, ASASPXX:VPEDL:SSLS:LKVYP:MVTVE:XKXS, KIPKAXX:VPTEL:SSLS:LKVYP:DMVVE:GXGXR, SIPKAXX:VPTEL:SSLS:LKVYP:EMVVE:GXGXR, HVTKPTX:APTKL:SSLS:LKVYP:NMVVR:SXGXH, YVPKPXX:APTKL:SSLS:LKVYP:NMVVR:SXGXH, TVPKPXX:APTQL:SSLS:LKVYP:NMVVR:AXGXH, AVPKAXX:APTKL:SSLS:LKVYP:NMVVK:AXGXH, KVG KAXX:VPTKL:SSLS:LKVYP:EGMSVAE:XGXR, KASKAXX:VPTKL:SSLS:LKVYP:GMAVS:EXGXR, GSAGPXX:TPTKM:SSLS:LKVYP:GMVVD:RXGXS, AAPASXX:VPARL:SSLS:LKVYP:DMVVE:AXGXR, STPPTXX:VPTRL:SSLS:LKVYP:DMVVE:SXGXR, HVPKPXX:APTKL:SSLS:LKVYP:NMVVR:SXGXH, RVPSTXX:APVKT:SSLS:LKVYP:MIVEE:XGXL, ASAAPXX:VPQAL:SSLS:LKVYP:MIVRS:XKXS, ASASPXX:VSQDL:SSLS:LKVYP:MIVKS:XKXS, ASASPXX:VPQDL:SSLS:LKVYP:MVVKS:XKXS, NDEGLEX:VPTEE:SSLS:LKVYP:FLQHN:KXEXR, NDEGLEX:VPTGQ:SSLS:LKVYP:LEEHS:QXEXR, SSVKXQP:SRVHH:SSLS:LKVYP:RLEEH:LEXAXA, RNVQXRP:TQVQL:SSLS:LKVYP:TLEDH:LAXKXE, KIPKAXX:APTEL:NAIS:LKKYR:DMVVR:GXGXR, GIPEPXX:APTKM:NAIS:LKKYR:NMVVR:SXAXR, SIPKAXX:APTEL:NAIS:LKKYR:EMVVR:GXGXR, AVPKAXX:APTKL:NAIS:LKKYR:NMVVR:AXGXH, KVGKAXX:APTKL:NAIS:LKKYR:EGMSVVR:XGXR, KASKAXX:APTKL:NAIS:LKKYR:GMVVR:EXGXR, GSAGPXX:APTKM:NAIS:LKKYR:GMVVR:RXGXS, AAPASXX:APTRL:NAIS:LKKYR:DMVVR:AXGXR, STPPTXX:APTRL:NAIS:LKKYR:DMVVR:SXGXR, RVPSTXX:APTKT:NAIS:LKKYR:MIVVR:XGXL, ASAAPXX:APTAL:NAIS:LKKYR:MIVVR:XKXS, ASASPXX:APTDL:NAIS:LKKYR:MIVVR:XKXS, ASASPXX:APTDL:NAIS:LKKYR:MVVVR:XKXS, KIPKAXX:VPTEL:NAIS:LKKYR:DMVVE:GXGXR, GIPEPXX:VPEKM:NAIS:LKKYR:NMTVE:SXAXR, SIPKAXX:VPTEL:NAIS:LKKYR:EMVVE:GXGXR, AVPKAXX:APTKL:NAIS:LKKYR:NMVVK:AXGXH, KVGKAXX:VPTKL:NAIS:LKKYR:EGMSVAE:XGXR, KASKAXX:VPTKL:NAIS:LKKYR:GMAVS:EXGXR, GSAGPXX:TPTKM:NAIS:LKKYR:GMVVD:RXGXS, AAPASXX:VPARL:NAIS:LKKYR:DMVVE:AXGXR, STPPTXX:VPTRL:NAIS:LKKYR:DMVVE:SXGXR, RVPSTXX:APVKT:NAIS:LKKYR:MIVEE:XGXL, ASAAPXX:VPQAL:NAIS:LKKYR:MIVRS:XKXS, ASASPXX:VSQDL:NAIS:LKKYR:MIVKS:XKXS, ASASPXX:VPQDL:NAIS:LKKYR:MVVKS:XKXS, NDEGLEX:VPTEE:NAIS:LKKYR:FLQHN:KXEXR, NDEGLEX:VPTGQ:NAIS:LKKYR:LEEHS:QXEXR, SSVKXQP:SRVHH:NAIS:LKKYR:RLEEH:LEXAXA, RNVQXRP:TQVQL:NAIS:LKKYR:TLEDH:LAXKXE, KIPKAXX:APTEL:SATS:LRKHR:DMVVK:GXGXR, GIPEPXX:APTKM:SATS:LRKHR:NMVVK:SXAXR, SIPKAXX:APTEL:SATS:LRKHR:EMVVK:GXGXR, HVTKPTX:APTKL:SATS:LRKHR:NMVVK:SXGXH, YVPKPXX:APTKL:SATS:LRKHR:NMVVK:SXGXH, TVPKPXX:APTQL:SATS:LRKHR:NMVVK:AXGXH, KVGKAXX:APTKL:SATS:LRKHR:EGMSVVK:XGXR, KASKAXX:APTKL:SATS:LRKHR:GMVVK:EXGXR, GSAGPXX:APTKM:SATS:LRKHR:GMVVK:RXGXS, AAPASXX:APTRL:SATS:LRKHR:DMVVK:AXGXR, STPPTXX:APTRL:SATS:LRKHR:DMVVK:SXGXR, HVPKPXX:APTKL:SATS:LRKHR:NMVVK:SXGXH, RVPSTXX:APTKT:SATS:LRKHR:MIVVK:XGXL, ASAAPXX:APTAL:SATS:LRKHR:MIVVK:XKXS, ASASPXX:APTDL:SATS:LRKHR:MIVVK:XKXS, ASASPXX:APTDL:SATS:LRKHR:MVVVK:XKXS, KIPKAXX:VPTEL:SATS:LRKHR:DMVVE:GXGXR, GIPEPXX:VPEKM:SATS:LRKHR:NMTVE:SXAXR, SIPKAXX:VPTEL:SATS:LRKHR:EMVVE:GXGXR, HVTKPTX:APTKL:SATS:LRKHR:NMVVR:SXGXH, YVPKPXX:APTKL:SATS:LRKHR:NMVVR:SXGXH, TVPKPXX:APTQL:SATS:LRKHR:NMVVR:AXGXH, KVGKAXX:VPTKL:SATS:LRKHR:EGMSVAE:XGXR, KASKAXX:VPTKL:SATS:LRKHR:GMAVS:EXGXR, GSAGPXX:TPTKM:SATS:LRKHR:GMVVD:RXGXS, AAPASXX:VPARL:SATS:LRKHR:DMVVE:AXGXR, STPPTXX:VPTRL:SATS:LRKHR:DMVVE:SXGXR, HVPKPXX:APTKL:SATS:LRKHR:NMVVR:SXGXH, RVPSTXX:APVKT:SATS:LRKHR:MIVEE:XGXL, ASAAPXX:VPQAL:SATS:LRKHR:MIVRS:XKXS, ASASPXX:VSQDL:SATS:LRKHR:MIVKS:XKXS, ASASPXX:VPQDL:SATS:LRKHR:MVVKS:XKXS, NDEGLEX:VPTEE:SATS:LRKHR:FLQHN:KXEXR, NDEGLEX:VPTGQ:SATS:LRKHR:LEEHS:QXEXR, SSVKXQP:SRVHH:SATS:LRKHR:RLEEH:LEXAXA, RNVQXRP:TQVQL:SATS:LRKHR:TLEDH:LAXKXE, KIPKAXX:VPTEL:SPIS:LKYHY:DMVAE:GXGXR, GIPEPXX:VPTKM:SPIS:LKYHY:NMVAE:SXAXR, SIPKAXX:VPTEL:SPIS:LKYHY:EMVAE:GXGXR, HVTKPTX:VPTKL:SPIS:LKYHY:NMVAE:SXGXH, YVPKPXX:VPTKL:SPIS:LKYHY:NMVAE:SXGXH, TVPKPXX:VPTQL:SPIS:LKYHY:NMVAE:AXGXH, AVPKAXX:VPTKL:SPIS:LKYHY:NMVAE:AXGXH, KASKAXX:VPTKL:SPIS:LKYHY:GMVAE:EXGXR, GSAGPXX:VPTKM:SPIS:LKYHY:GMVAE:RXGXS, AAPASXX:VPTRL:SPIS:LKYHY:DMVAE:AXGXR, STPPTXX:VPTRL:SPIS:LKYHY:DMVAE:SXGXR, HVPKPXX:VPTKL:SPIS:LKYHY:NMVAE:SXGXH, RVPSTXX:VPTKT:SPIS:LKYHY:MIVAE:XGXL, ASAAPXX:VPTAL:SPIS:LKYHY:MIVAE:XKXS, ASASPXX:VPTDL:SPIS:LKYHY:MIVAE:XKXS, ASASPXX:VPTDL:SPIS:LKYHY:MVVAE:XKXS, KIPKAXX:VPTEL:SPIS:LKYHY:DMVVE:GXGXR, GIPEPXX:VPEKM:SPIS:LKYHY:NMTVE:SXAXR, SIPKAXX:VPTEL:SPIS:LKYHY:EMVVE:GXGXR, HVTKPTX:APTKL:SPIS:LKYHY:NMVVR:SXGXH, YVPKPXX:APTKL:SPIS:LKYHY:NMVVR:SXGXH, TVPKPXX:APTQL:SPIS:LKYHY:NMVVR:AXGXH, AVPKAXX:APTKL:SPIS:LKYHY:NMVVK:AXGXH, KASKAXX:VPTKL:SPIS:LKYHY:GMAVS:EXGXR, GSAGPXX:TPTKM:SPIS:LKYHY:GMVVD:RXGXS, AAPASXX:VPARL:SPIS:LKYHY:DMVVE:AXGXR, STPPTXX:VPTRL:SPIS:LKYHY:DMVVE:SXGXR, HVPKPXX:APTKL:SPIS:LKYHY:NMVVR:SXGXH, RVPSTXX:APVKT:SPIS:LKYHY:MIVEE:XGXL, ASAAPXX:VPQAL:SPIS:LKYHY:MIVRS:XKXS, ASASPXX:VSQDL:SPIS:LKYHY:MIVKS:XKXS, ASASPXX:VPQDL:SPIS:LKYHY:MVVKS:XKXS, NDEGLEX:VPTEE:SPIS:LKYHY:FLQHN:KXEXR, NDEGLEX:VPTGQ:SPIS:LKYHY:LEEHS:QXEXR, SSVKXQP:SRVHH:SPIS:LKYHY:RLEEH:LEXAXA, RNVQXRP:TQVQL:SPIS:LKYHY:TLEDH:LAXKXE, KIPKAXX:VPTEL:EPIS:KFKYE:DMAVS:GXGXR, GIPEPXX:VPTKM:EPIS:KFKYE:NMAVS:SXAXR, SIPKAXX:VPTEL:EPIS:KFKYE:EMAVS:GXGXR, HVTKPTX:VPTKL:EPIS:KFKYE:NMAVS:SXGXH, YVPKPXX:VPTKL:EPIS:KFKYE:NMAVS:SXGXH, TVPKPXX:VPTQL:EPIS:KFKYE:NMAVS:AXGXH, AVPKAXX:VPTKL:EPIS:KFKYE:NMAVS:AXGXH, KVGKAXX:VPTKL:EPIS:KFKYE:EGMSAVS:XGXR, GSAGPXX:VPTKM:EPIS:KFKYE:GMAVS:RXGXS, AAPASXX:VPTRL:EPIS:KFKYE:DMAVS:AXGXR, STPPTXX:VPTRL:EPIS:KFKYE:DMAVS:SXGXR, HVPKPXX:VPTKL:EPIS:KFKYE:NMAVS:SXGXH, RVPSTXX:VPTKT:EPIS:KFKYE:MIAVS:XGXL, ASAAPXX:VPTAL:EPIS:KFKYE:MIAVS:XKXS, ASASPXX:VPTDL:EPIS:KFKYE:MIAVS:XKXS, ASASPXX:VPTDL:EPIS:KFKYE:MVAVS:XKXS, KIPKAXX:VPTEL:EPIS:KFKYE:DMVVE:GXGXR, GIPEPXX:VPEKM:EPIS:KFKYE:NMTVE:SXAXR, SIPKAXX:VPTEL:EPIS:KFKYE:EMVVE:GXGXR, HVTKPTX:APTKL:EPIS:KFKYE:NMVVR:SXGXH, YVPKPXX:APTKL:EPIS:KFKYE:NMVVR:SXGXH, TVPKPXX:APTQL:EPIS:KFKYE:NMVVR:AXGXH, AVPKAXX:APTKL:EPIS:KFKYE:NMVVK:AXGXH, KVGKAXX:VPTKL:EPIS:KFKYE:EGMSVAE:XGXR, GSAGPXX:TPTKM:EPIS:KFKYE:GMVVD:RXGXS, AAPASXX:VPARL:EPIS:KFKYE:DMVVE:AXGXR, STPPTXX:VPTRL:EPIS:KFKYE:DMVVE:SXGXR, HVPKPXX:APTKL:EPIS:KFKYE:NMVVR:SXGXH, RVPSTXX:APVKT:EPIS:KFKYE:MIVEE:XGXL, ASAAPXX:VPQAL:EPIS:KFKYE:MIVRS:XKXS, ASASPXX:VSQDL:EPIS:KFKYE:MIVKS:XKXS, ASASPXX:VPQDL:EPIS:KFKYE:MVVKS:XKXS, NDEGLEX:VPTEE:EPIS:KFKYE:FLQHN:KXEXR, NDEGLEX:VPTGQ:EPIS:KFKYE:LEEHS:QXEXR, SSVKXQP:SRVHH:EPIS:KFKYE:RLEEH:LEXAXA, RNVQXRP:TQVQL:EPIS:KFKYE:TLEDH:LAXKXE, KIPKAXX:TPTEL:SPIN:YGKIP:DMVVD:GXGXR, GIPEPXX:TPTKM:SPIN:YGKIP:NMVVD:SXAXR, SIPKAXX:TPTEL:SPIN:YGKIP:EMVVD:GXGXR, HVTKPTX:TPTKL:SPIN:YGKIP:NMVVD:SXGXH, YVPKPXX:TPTKL:SPIN:YGKIP:NMVVD:SXGXH, TVPKPXX:TPTQL:SPIN:YGKIP:NMVVD:AXGXH, AVPKAXX:TPTKL:SPIN:YGKIP:NMVVD:AXGXH, KVGKAXX:TPTKL:SPIN:YGKIP:EGMSVVD:XGXR, KASKAXX:TPTKL:SPIN:YGKIP:GMVVD:EXGXR, AAPASXX:TPTRL:SPIN:YGKIP:DMVVD:AXGXR, STPPTXX:TPTRL:SPIN:YGKIP:DMVVD:SXGXR, HVPKPXX:TPTKL:SPIN:YGKIP:NMVVD:SXGXH, RVPSTXX:TPTKT:SPIN:YGKIP:MIVVD:XGXL, ASAAPXX:TPTAL:SPIN:YGKIP:MIVVD:XKXS, ASASPXX:TPTDL:SPIN:YGKIP:MIVVD:XKXS, ASASPXX:TPTDL:SPIN:YGKIP:MVVVD:XKXS, KIPKAXX:VPTEL:SPIN:YGKIP:DMVVE:GXGXR, GIPEPXX:VPEKM:SPIN:YGKIP:NMTVE:SXAXR, SIPKAXX:VPTEL:SPIN:YGKIP:EMVVE:GXGXR, HVTKPTX:APTKL:SPIN:YGKIP:NMVVR:SXGXH, YVPKPXX:APTKL:SPIN:YGKIP:NMVVR:SXGXH, TVPKPXX:APTQL:SPIN:YGKIP:NMVVR:AXGXH, AVPKAXX:APTKL:SPIN:YGKIP:NMVVK:AXGXH, KVGKAXX:VPTKL:SPIN:YGKIP:EGMSVAE:XGXR, KASKAXX:VPTKL:SPIN:YGKIP:GMAVS:EXGXR, AAPASXX:VPARL:SPIN:YGKIP:DMVVE:AXGXR, STPPTXX:VPTRL:SPIN:YGKIP:DMVVE:SXGXR, HVPKPXX:APTKL:SPIN:YGKIP:NMVVR:SXGXH, RVPSTXX:APVKT:SPIN:YGKIP:MIVEE:XGXL, ASAAPXX:VPQAL:SPIN:YGKIP:MIVRS:XKXS, ASASPXX:VSQDL:SPIN:YGKIP:MIVKS:XKXS, ASASPXX:VPQDL:SPIN:YGKIP:MVVKS:XKXS, NDEGLEX:VPTEE:SPIN:YGKIP:FLQHN:KXEXR, NDEGLEX:VPTGQ:SPIN:YGKIP:LEEHS:QXEXR, SSVKXQP:SRVHH:SPIN:YGKIP:RLEEH:LEXAXA, RNVQXRP:TQVQL:SPIN:YGKIP:TLEDH:LAXKXE, KIPKAXX:VPAEL:SPIS:YKQYE:DMVVE:GXGXR, GIPEPXX:VPAKM:SPIS:YKQYE:NMVVE:SXAXR, SIPKAXX:VPAEL:SPIS:YKQYE:EMVVE:GXGXR, HVTKPTX:VPAKL:SPIS:YKQYE:NMVVE:SXGXH, YVPKPXX:VPAKL:SPIS:YKQYE:NMVVE:SXGXH, TVPKPXX:VPAQL:SPIS:YKQYE:NMVVE:AXGXH, AVPKAXX:VPAKL:SPIS:YKQYE:NMVVE:AXGXH, KVGKAXX:VPAKL:SPIS:YKQYE:EGMSVVE:XGXR, KASKAXX:VPAKL:SPIS:YKQYE:GMVVE:EXGXR, GSAGPXX:VPAKM:SPIS:YKQYE:GMVVE:RXGXS, STPPTXX:VPARL:SPIS:YKQYE:DMVVE:SXGXR, HVPKPXX:VPAKL:SPIS:YKQYE:NMVVE:SXGXH, RVPSTXX:VPAKT:SPIS:YKQYE:MIVVE:XGXL, ASAAPXX:VPAAL:SPIS:YKQYE:MIVVE:XKXS, ASASPXX:VPADL:SPIS:YKQYE:MIVVE:XKXS, ASASPXX:VPADL:SPIS:YKQYE:MVVVE:XKXS, KIPKAXX:VPTEL:SPIS:YKQYE:DMVVE:GXGXR, GIPEPXX:VPEKM:SPIS:YKQYE:NMTVE:SXAXR, SIPKAXX:VPTEL:SPIS:YKQYE:EMVVE:GXGXR, HVTKPTX:APTKL:SPIS:YKQYE:NMVVR:SXGXH, YVPKPXX:APTKL:SPIS:YKQYE:NMVVR:SXGXH, TVPKPXX:APTQL:SPIS:YKQYE:NMVVR:AXGXH, AVPKAXX:APTKL:SPIS:YKQYE:NMVVK:AXGXH, KVGKAXX:VPTKL:SPIS:YKQYE:EGMSVAE:XGXR, KASKAXX:VPTKL:SPIS:YKQYE:GMAVS:EXGXR, GSAGPXX:TPTKM:SPIS:YKQYE:GMVVD:RXGXS, STPPTXX:VPTRL:SPIS:YKQYE:DMVVE:SXGXR, HVPKPXX:APTKL:SPIS:YKQYE:NMVVR:SXGXH, RVPSTXX:APVKT:SPIS:YKQYE:MIVEE:XGXL, ASAAPXX:VPQAL:SPIS:YKQYE:MIVRS:XKXS, ASASPXX:VSQDL:SPIS:YKQYE:MIVKS:XKXS, ASASPXX:VPQDL:SPIS:YKQYE:MVVKS:XKXS, NDEGLEX:VPTEE:SPIS:YKQYE:FLQHN:KXEXR, NDEGLEX:VPTGQ:SPIS:YKQYE:LEEHS:QXEXR, SSVKXQP:SRVHH:SPIS:YKQYE:RLEEH:LEXAXA, RNVQXRP:TQVQL:SPIS:YKQYE:TLEDH:LAXKXE, GIPEPXX:VPTKM:SPIS:YKQYE:NMVVE:SXAXR, HVTKPTX:VPTKL:SPIS:YKQYE:NMVVE:SXGXH, YVPKPXX:VPTKL:SPIS:YKQYE:NMVVE:SXGXH, TVPKPXX:VPTQL:SPIS:YKQYE:NMVVE:AXGXH, AVPKAXX:VPTKL:SPIS:YKQYE:NMVVE:AXGXH, KVGKAXX:VPTKL:SPIS:YKQYE:EGMSVVE:XGXR, KASKAXX:VPTKL:SPIS:YKQYE:GMVVE:EXGXR, GSAGPXX:VPTKM:SPIS:YKQYE:GMVVE:RXGXS, AAPASXX:VPTRL:SPIS:YKQYE:DMVVE:AXGXR, HVPKPXX:VPTKL:SPIS:YKQYE:NMVVE:SXGXH, RVPSTXX:VPTKT:SPIS:YKQYE:MIVVE:XGXL, ASAAPXX:VPTAL:SPIS:YKQYE:MIVVE:XKXS, ASASPXX:VPTDL:SPIS:YKQYE:MIVVE:XKXS, ASASPXX:VPTDL:SPIS:YKQYE:MVVVE:XKXS, AAPASXX:VPARL:SPIS:YKQYE:DMVVE:AXGXR, KIPKAXX:APVEL:KPLS:DHHKD:DMVEE:GXGXR, GIPEPXX:APVKM:KPLS:DHHKD:NMVEE:SXAXR, SIPKAXX:APVEL:KPLS:DHHKD:EMVEE:GXGXR, HVTKPTX:APVKL:KPLS:DHHKD:NMVEE:SXGXH, YVPKPXX:APVKL:KPLS:DHHKD:NMVEE:SXGXH, TVPKPXX:APVQL:KPLS:DHHKD:NMVEE:AXGXH, AVPKAXX:APVKL:KPLS:DHHKD:NMVEE:AXGXH, KVGKAXX:APVKL:KPLS:DHHKD:EGMSVEE:XGXR, KASKAXX:APVKL:KPLS:DHHKD:GMVEE:EXGXR, GSAGPXX:APVKM:KPLS:DHHKD:GMVEE:RXGXS, AAPASXX:APVRL:KPLS:DHHKD:DMVEE:AXGXR, STPPTXX:APVRL:KPLS:DHHKD:DMVEE:SXGXR, HVPKPXX:APVKL:KPLS:DHHKD:NMVEE:SXGXH, ASAAPXX:APVAL:KPLS:DHHKD:MIVEE:XKXS, ASASPXX:APVDL:KPLS:DHHKD:MIVEE:XKXS, ASASPXX:APVDL:KPLS:DHHKD:MVVEE:XKXS, KIPKAXX:VPTEL:KPLS:DHHKD:DMVVE:GXGXR, GIPEPXX:VPEKM:KPLS:DHHKD:NMTVE:SXAXR, SIPKAXX:VPTEL:KPLS:DHHKD:EMVVE:GXGXR, HVTKPTX:APTKL:KPLS:DHHKD:NMVVR:SXGXH, YVPKPXX:APTKL:KPLS:DHHKD:NMVVR:SXGXH, TVPKPXX:APTQL:KPLS:DHHKD:NMVVR:AXGXH, AVPKAXX:APTKL:KPLS:DHHKD:NMVVK:AXGXH, KVGKAXX:VPTKL:KPLS:DHHKD:EGMSVAE:XGXR, KASKAXX:VPTKL:KPLS:DHHKD:GMAVS:EXGXR, GSAGPXX:TPTKM:KPLS:DHHKD:GMVVD:RXGXS, AAPASXX:VPARL:KPLS:DHHKD:DMVVE:AXGXR, STPPTXX:VPTRL:KPLS:DHHKD:DMVVE:SXGXR, HVPKPXX:APTKL:KPLS:DHHKD:NMVVR:SXGXH, ASAAPXX:VPQAL:KPLS:DHHKD:MIVRS:XKXS, ASASPXX:VSQDL:KPLS:DHHKD:MIVKS:XKXS, ASASPXX:VPQDL:KPLS:DHHKD:MVVKS:XKXS, NDEGLEX:VPTEE:KPLS:DHHKD:FLQHN:KXEXR, NDEGLEX:VPTGQ:KPLS:DHHKD:LEEHS:QXEXR, SSVKXQP:SRVHH:KPLS:DHHKD:RLEEH:LEXAXA, RNVQXRP:TQVQL:KPLS:DHHKD:TLEDH:LAXKXE, KIPKAXX:VPQEL:EPLP:EQLSN:DMVRS:GXGXR, GIPEPXX:VPQKM:EPLP:EQLSN:NMVRS:SXAXR, SIPKAXX:VPQEL:EPLP:EQLSN:EMVRS:GXGXR, HVTKPTX:VPQKL:EPLP:EQLSN:NMVRS:SXGXH, YVPKPXX:VPQKL:EPLP:EQLSN:NMVRS:SXGXH, TVPKPXX:VPQQL:EPLP:EQLSN:NMVRS:AXGXH, AVPKAXX:VPQKL:EPLP:EQLSN:NMVRS:AXGXH, KVGKAXX:VPQKL:EPLP:EQLSN:EGMSVRS:XGXR, KASKAXX:VPQKL:EPLP:EQLSN:GMVRS:EXGXR, GSAGPXX:VPQKM:EPLP:EQLSN:GMVRS:RXGXS, AAPASXX:VPQRL:EPLP:EQLSN:DMVRS:AXGXR, STPPTXX:VPQRL:EPLP:EQLSN:DMVRS:SXGXR, HVPKPXX:VPQKL:EPLP:EQLSN:NMVRS:SXGXH, RVPSTXX:VPQKT:EPLP:EQLSN:MIVRS:XGXL, ASASPXX:VPQDL:EPLP:EQLSN:MIVRS:XKXS, ASASPXX:VPQDL:EPLP:EQLSN:MVVRS:XKXS, KIPKAXX:VPTEL:EPLP:EQLSN:DMVVE:GXGXR, GIPEPXX:VPEKM:EPLP:EQLSN:NMTVE:SXAXR, SIPKAXX:VPTEL:EPLP:EQLSN:EMVVE:GXGXR, HVTKPTX:APTKL:EPLP:EQLSN:NMVVR:SXGXH, YVPKPXX:APTKL:EPLP:EQLSN:NMVVR:SXGXH, TVPKPXX:APTQL:EPLP:EQLSN:NMVVR:AXGXH, AVPKAXX:APTKL:EPLP:EQLSN:NMVVK:AXGXH, KVGKAXX:VPTKL:EPLP:EQLSN:EGMSVAE:XGXR, KASKAXX:VPTKL:EPLP:EQLSN:GMAVS:EXGXR, GSAGPXX:TPTKM:EPLP:EQLSN:GMVVD:RXGXS, AAPASXX:VPARL:EPLP:EQLSN:DMVVE:AXGXR, STPPTXX:VPTRL:EPLP:EQLSN:DMVVE:SXGXR, HVPKPXX:APTKL:EPLP:EQLSN:NMVVR:SXGXH, RVPSTXX:APVKT:EPLP:EQLSN:MIVEE:XGXL, ASASPXX:VSQDL:EPLP:EQLSN:MIVKS:XKXS, ASASPXX:VPQDL:EPLP:EQLSN:MVVKS:XKXS, NDEGLEX:VPTEE:EPLP:EQLSN:FLQHN:KXEXR, NDEGLEX:VPTGQ:EPLP:EQLSN:LEEHS:QXEXR, SSVKXQP:SRVHH:EPLP:EQLSN:RLEEH:LEXAXA, RNVQXRP:TQVQL:EPLP:EQLSN:TLEDH:LAXKXE, KIPKAXX:VSQEL:EPLT:EQLSN:DMVKS:GXGXR, GIPEPXX:VSQKM:EPLT:EQLSN:NMVKS:SXAXR, SIPKAXX:VSQEL:EPLT:EQLSN:EMVKS:GXGXR, HVTKPTX:VSQKL:EPLT:EQLSN:NMVKS:SXGXH, YVPKPXX:VSQKL:EPLT:EQLSN:NMVKS:SXGXH, TVPKPXX:VSQQL:EPLT:EQLSN:NMVKS:AXGXH, AVPKAXX:VSQKL:EPLT:EQLSN:NMVKS:AXGXH, KVGKAXX:VSQKL:EPLT:EQLSN:EGMSVKS:XGXR, KASKAXX:VSQKL:EPLT:EQLSN:GMVKS:EXGXR, GSAGPXX:VSQKM:EPLT:EQLSN:GMVKS:RXGXS, AAPASXX:VSQRL:EPLT:EQLSN:DMVKS:AXGXR, STPPTXX:VSQRL:EPLT:EQLSN:DMVKS:SXGXR, HVPKPXX:VSQKL:EPLT:EQLSN:NMVKS:SXGXH, RVPSTXX:VSQKT:EPLT:EQLSN:MIVKS:XGXL, ASAAPXX:VSQAL:EPLT:EQLSN:MIVKS:XKXS, ASASPXX:VSQDL:EPLT:EQLSN:MVVKS:XKXS, KIPKAXX:VPTEL:EPLT:EQLSN:DMVVE:GXGXR, GIPEPXX:VPEKM:EPLT:EQLSN:NMTVE:SXAXR, SIPKAXX:VPTEL:EPLT:EQLSN:EMVVE:GXGXR, HVTKPTX:APTKL:EPLT:EQLSN:NMVVR:SXGXH, YVPKPXX:APTKL:EPLT:EQLSN:NMVVR:SXGXH, TVPKPXX:APTQL:EPLT:EQLSN:NMVVR:AXGXH, AVPKAXX:APTKL:EPLT:EQLSN:NMVVK:AXGXH, KVGKAXX:VPTKL:EPLT:EQLSN:EGMSVAE:XGXR, KASKAXX:VPTKL:EPLT:EQLSN:GMAVS:EXGXR, GSAGPXX:TPTKM:EPLT:EQLSN:GMVVD:RXGXS, AAPASXX:VPARL:EPLT:EQLSN:DMVVE:AXGXR, STPPTXX:VPTRL:EPLT:EQLSN:DMVVE:SXGXR, HVPKPXX:APTKL:EPLT:EQLSN:NMVVR:SXGXH, RVPSTXX:APVKT:EPLT:EQLSN:MIVEE:XGXL, ASAAPXX:VPQAL:EPLT:EQLSN:MIVRS:XKXS, NDEGLEX:VPTEE:EPLT:EQLSN:FLQHN:KXEXR, NDEGLEX:VPTGQ:EPLT:EQLSN:LEEHS:QXEXR, SSVKXQP:SRVHH:EPLT:EQLSN:RLEEH:LEXAXA, RNVQXRP:TQVQL:EPLT:EQLSN:TLEDH:LAXKXE, KIPKAXX:VPQEL:EPLT:EQLSN:DMVKS:GXGXR, GIPEPXX:VPQKM:EPLT:EQLSN:NMVKS:SXAXR, SIPKAXX:VPQEL:EPLT:EQLSN:EMVKS:GXGXR, HVTKPTX:VPQKL:EPLT:EQLSN:NMVKS:SXGXH, YVPKPXX:VPQKL:EPLT:EQLSN:NMVKS:SXGXH, TVPKPXX:VPQQL:EPLT:EQLSN:NMVKS:AXGXH, AVPKAXX:VPQKL:EPLT:EQLSN:NMVKS:AXGXH, KVGKAXX:VPQKL:EPLT:EQLSN:EGMSVKS:XGXR, KASKAXX:VPQKL:EPLT:EQLSN:GMVKS:EXGXR, GSAGPXX:VPQKM:EPLT:EQLSN:GMVKS:RXGXS, AAPASXX:VPQRL:EPLT:EQLSN:DMVKS:AXGXR, STPPTXX:VPQRL:EPLT:EQLSN:DMVKS:SXGXR, HVPKPXX:VPQKL:EPLT:EQLSN:NMVKS:SXGXH, RVPSTXX:VPQKT:EPLT:EQLSN:MIVKS:XGXL, ASAAPXX:VPQAL:EPLT:EQLSN:MIVKS:XKXS, ASASPXX:VPQDL:EPLT:EQLSN:MIVKS:XKXS, NDEGLEX:VPTGQ:SNIT:IGEMS:LEQHN:QXEXR, KIPKAXX:VPTEL:SNIT:IGEMS:DMVVE:GXGXR, GIPEPXX:VPEKM:SNIT:IGEMS:NMTVE:SXAXR, SIPKAXX:VPTEL:SNIT:IGEMS:EMVVE:GXGXR, HVTKPTX:APTKL:SNIT:IGEMS:NMVVR:SXGXH, YVPKPXX:APTKL:SNIT:IGEMS:NMVVR:SXGXH, TVPKPXX:APTQL:SNIT:IGEMS:NMVVR:AXGXH, AVPKAXX:APTKL:SNIT:IGEMS:NMVVK:AXGXH, KVGKAXX:VPTKL:SNIT:IGEMS:EGMSVAE:XGXR, KASKAXX:VPTKL:SNIT:IGEMS:GMAVS:EXGXR, GSAGPXX:TPTKM:SNIT:IGEMS:GMVVD:RXGXS, AAPASXX:VPARL:SNIT:IGEMS:DMVVE:AXGXR, STPPTXX:VPTRL:SNIT:IGEMS:DMVVE:SXGXR, HVPKPXX:APTKL:SNIT:IGEMS:NMVVR:SXGXH, RVPSTXX:APVKT:SNIT:IGEMS:MIVEE:XGXL, ASAAPXX:VPQAL:SNIT:IGEMS:MIVRS:XKXS, ASASPXX:VSQDL:SNIT:IGEMS:MIVKS:XKXS, ASASPXX:VPQDL:SNIT:IGEMS:MVVKS:XKXS, NDEGLEX:VPTGQ:SNIT:IGEMS:LEEHS:QXEXR, SSVKXQP:SRVHH:SNIT:IGEMS:RLEEH:LEXAXA, RNVQXRP:TQVQL:SNIT:IGEMS:TLEDH:LAXKXE, NDEGLEX:VPTEE:SNIT:LGEMS:FLEHS:KXEXR, KIPKAXX:VPTEL:SNIT:LGEMS:DMVVE:GXGXR, GIPEPXX:VPEKM:SNIT:LGEMS:NMTVE:SXAXR, SIPKAXX:VPTEL:SNIT:LGEMS:EMVVE:GXGXR, HVTKPTX:APTKL:SNIT:LGEMS:NMVVR:SXGXH, YVPKPXX:APTKL:SNIT:LGEMS:NMVVR:SXGXH, TVPKPXX:APTQL:SNIT:LGEMS:NMVVR:AXGXH, AVPKAXX:APTKL:SNIT:LGEMS:NMVVK:AXGXH, KVGKAXX:VPTKL:SNIT:LGEMS:EGMSVAE:XGXR, KASKAXX:VPTKL:SNIT:LGEMS:GMAVS:EXGXR, GSAGPXX:TPTKM:SNIT:LGEMS:GMVVD:RXGXS, AAPASXX:VPARL:SNIT:LGEMS:DMVVE:AXGXR, STPPTXX:VPTRL:SNIT:LGEMS:DMVVE:SXGXR, HVPKPXX:APTKL:SNIT:LGEMS:NMVVR:SXGXH, RVPSTXX:APVKT:SNIT:LGEMS:MIVEE:XGXL, ASAAPXX:VPQAL:SNIT:LGEMS:MIVRS:XKXS, ASASPXX:VSQDL:SNIT:LGEMS:MIVKS:XKXS, ASASPXX:VPQDL:SNIT:LGEMS:MVVKS:XKXS, NDEGLEX:VPTEE:SNIT:LGEMS:FLQHN:KXEXR, SSVKXQP:SRVHH:SNIT:LGEMS:RLEEH:LEXAXA, RNVQXRP:TQVQL:SNIT:LGEMS:TLEDH:LAXKXE, RNVQXRP:SRVQL:RSVK:KEVQV:TLEEH:LAXKXE, KIPKAXX:VPTEL:RSVK:KEVQV:DMVVE:GXGXR, GIPEPXX:VPEKM:RSVK:KEVQV:NMTVE:SXAXR, SIPKAXX:VPTEL:RSVK:KEVQV:EMVVE:GXGXR, HVTKPTX:APTKL:RSVK:KEVQV:NMVVR:SXGXH, YVPKPXX:APTKL:RSVK:KEVQV:NMVVR:SXGXH, TVPKPXX:APTQL:RSVK:KEVQV:NMVVR:AXGXH, AVPKAXX:APTKL:RSVK:KEVQV:NMVVK:AXGXH, KVGKAXX:VPTKL:RSVK:KEVQV:EGMSVAE:XGXR, KASKAXX:VPTKL:RSVK:KEVQV:GMAVS:EXGXR, GSAGPXX:TPTKM:RSVK:KEVQV:GMVVD:RXGXS, AAPASXX:VPARL:RSVK:KEVQV:DMVVE:AXGXR, STPPTXX:VPTRL:RSVK:KEVQV:DMVVE:SXGXR, HVPKPXX:APTKL:RSVK:KEVQV:NMVVR:SXGXH, RVPSTXX:APVKT:RSVK:KEVQV:MIVEE:XGXL, ASAAPXX:VPQAL:RSVK:KEVQV:MIVRS:XKXS, ASASPXX:VSQDL:RSVK:KEVQV:MIVKS:XKXS, ASASPXX:VPQDL:RSVK:KEVQV:MVVKS:XKXS, NDEGLEX:VPTEE:RSVK:KEVQV:FLQHN:KXEXR, NDEGLEX:VPTGQ:RSVK:KEVQV:LEEHS:QXEXR, RNVQXRP:TQVQL:RSVK:KEVQV:TLEDH:LAXKXE, SSVKXQP:TQVHH:RPVQ:KKATV:RLEDH:LEXAXA, KIPKAXX:VPTEL:RPVQ:KKATV:DMVVE:GXGXR, GIPEPXX:VPEKM:RPVQ:KKATV:NMTVE:SXAXR, SIPKAXX:VPTEL:RPVQ:KKATV:EMVVE:GXGXR, HVTKPTX:APTKL:RPVQ:KKATV:NMVVR:SXGXH, YVPKPXX:APTKL:RPVQ:KKATV:NMVVR:SXGXH, TVPKPXX:APTQL:RPVQ:KKATV:NMVVR:AXGXH, AVPKAXX:APTKL:RPVQ:KKATV:NMVVK:AXGXH, KVGKAXX:VPTKL:RPVQ:KKATV:EGMSVAE:XGXR, KASKAXX:VPTKL:RPVQ:KKATV:GMAVS:EXGXR, GSAGPXX:TPTKM:RPVQ:KKATV:GMVVD:RXGXS, AAPASXX:VPARL:RPVQ:KKATV:DMVVE:AXGXR, STPPTXX:VPTRL:RPVQ:KKATV:DMVVE:SXGXR, HVPKPXX:APTKL:RPVQ:KKATV:NMVVR:SXGXH, RVPSTXX:APVKT:RPVQ:KKATV:MIVEE:XGXL, ASAAPXX:VPQAL:RPVQ:KKATV:MIVRS:XKXS, ASASPXX:VSQDL:RPVQ:KKATV:MIVKS:XKXS, ASASPXX:VPQDL:RPVQ:KKATV:MVVKS:XKXS, NDEGLEX:VPTEE:RPVQ:KKATV:FLQHN:KXEXR, NDEGLEX:VPTGQ:RPVQ:KKATV:LEEHS:QXEXR and SSVKXQP:SRVHH:RPVQ:KKATV:RLEEH:LEXAXA.

[0442] In particular, in certain embodiments, the hexaplet PEP7:PEP5:PEP12:PEP2:PEP6:PEP8 is selected from the group consisting of GIPEPXX:VPTKM:SAIS-AA¹⁷-LYL:LKNYQ:NMVVE:SXAXR, SIPKAXX:VPTEL:SAIS-AA¹⁷-LYL:LKNYQ:EMVVE:GXGXR, HVTKPTX:VPTKL:SAIS-AA¹⁷-LYL:LKNYQ:NMVVE:SXGXH, YVPKPXX:VPTKL:SAIS-AA¹⁷-LYL:LKNYQ:NMVVE:SXGXH, TVPKPXX:VPTQL:SAIS-AA¹⁷-LYL:LKNYQ:NMVVE:AXGXH, AVPKAXX:VPTKL:SAIS-AA¹⁷-LYL:LKNYQ:NMVVE:AXGXH, KVGKAXX:VPTKL:SAIS-AA¹⁷-LYL:LKNYQ:EGMSVVE:XGXR, KASKAXX:VPTKL:SAIS-AA¹⁷-LYL:LKNYQ:GMVVE:EXGXR, GSAG PXX:VPTKM:SAIS-AA¹⁷-LYL:LKNYQ:GMVVE:RXGXS, AAPASXX:VPTRL:SAIS-AA¹⁷-LYL:LKNYQ:DMVVE:AXGXR, STPPTXX:VPTRL:SAIS-AA¹⁷-LYL:LKNYQ:DMVVE:SXGXR, HVPKPXX:VPTKL:SAIS-AA¹⁷-LYL:LKNYQ:NMVVE:SXGXH, RVPSTXX:VPTKT:SAIS-AA¹⁷-LYL:LKNYQ:MIVVE:XGXL, ASAAPXX:VPTAL:SAIS-AA¹⁷-LYL:LKNYQ:MIVVE:XKXS, ASASPXX:VPTDL:SAIS-AA¹⁷-LYL:LKNYQ:MIVVE:XKXS, ASASPXX:VPTDL:SAIS-AA¹⁷-LYL:LKNYQ:MVVVE:XKXS, NDEGLEX:VPTEE:SAIS-AA¹⁷-LYL:LKNYQ:FLVVE:KXEXR, NDEGLEX:VPTGQ:SAIS-AA¹⁷-LYL:LKNYQ:LEVVE:QXEXR, SSVKXQP:VPTHH:SAIS-AA¹⁷-LYL:LKNYQ:RLVVE:LEXAXA, RNVQXRP:VPTQL:SAIS-AA¹⁷-LYL:LKNYQ:TLVVE:LAXKXE, GIPEPXX:VPEKM:SAIS-AA¹⁷-LYL:LKNYQ:NMTVE:SXAXR, HVTKPTX:APTKL:SAIS-AA¹⁷-LYL:LKNYQ:NMVVR:SXGXH, YVPKPXX:APTKL:SAIS-AA¹⁷-LYL:LKNYQ:NMVVR:SXGXH, TVPKPXX:APTQL:SAIS-AA¹⁷-LYL:LKNYQ:NMVVR:AXGXH, AVPKAXX:APTKL:SAIS-AA¹⁷-LYL:LKNYQ:NMVVK:AXGXH, KVGKAXX:VPTKL:SAIS-AA¹⁷-LYL:LKNYQ:EGMSVAE:XGXR, KASKAXX:VPTKL:SAIS-AA¹⁷-LYL:LKNYQ:GMAVS:EXGXR, GSAGPXX:TPTKM:SAIS-AA¹⁷-LYL:LKNYQ:GMVVD:RXGXS, AAPASXX:VPARL:SAIS-AA¹⁷-LYL:LKNYQ:DMVVE:AXGXR, HVPKPXX:APTKL:SAIS-AA¹⁷-LYL:LKNYQ:NMVVR:SXGXH, RVPSTXX:APVKT:SAIS-AA¹⁷-LYL:LKNYQ:MIVEE:XGXL, ASAAPXX:VPQAL:SAIS-AA¹⁷-LYL:LKNYQ:MIVRS:XKXS, ASASPXX:VSQDL:SAIS-AA¹⁷-LYL:LKNYQ:MIVKS:XKXS, ASASPXX:VPQDL:SAIS-AA¹⁷-LYL:LKNYQ:MVVKS:XKXS, NDEGLEX:VPTEE:SAIS-AA¹⁷-LYL:LKNYQ:FLQHN:KXEXR, NDEGLEX:VPTGQ:SAIS-AA¹⁷-LYL:LKNYQ:LEEHS:QXEXR, SSVKXQP:SRVHH:SAIS-AA¹⁷-LYL:LKNYQ:RLEEH:LEXAXA, RNVQXRP:TQVQL:SAIS-AA¹⁷-LYL:LKNYQ:TLEDH:LAXKXE, KIPKAXX:VPEEL:SSLS-AA¹⁷-LFF:LKVYP:DMTVE:GXGXR, SIPKAXX:VPEEL:SSLS-AA¹⁷-LFF:LKVYP:EMTVE:GXGXR, HVTKPTX:VPEKL:SSLS-AA¹⁷-LFF:LKVYP:NMTVE:SXGXH, YVPKPXX:VPEKL:SSLS-AA¹⁷-LFF:LKVYP:NMTVE:SXGXH, TVPKPXX:VPEQL:SSLS-AA¹⁷-LFF:LKVYP:NMTVE:AXGXH, AVPKAXX:VPEKL:SSLS-AA¹⁷-LFF:LKVYP:NMTVE:AXGXH, KVGKAXX:VPEKL:SSLS-AA¹⁷-LFF:LKVYP:EGMSTVE:XGXR, KASKAXX:VPEKL:SSLS-AA¹⁷-LFF:LKVYP:GMTVE:EXGXR, GSAGPXX:VPEKM:SSLS-AA¹⁷-LFF:LKVYP:GMTVE:RXGXS, AAPASXX:VPERL:SSLS-AA¹⁷-LFF:LKVYP:DMTVE:AXGXR, STPPTXX:VPERL:SSLS-AA¹⁷-LFF:LKVYP:DMTVE:SXGXR, HVPKPXX:VPEKL:SSLS-AA¹⁷-LFF:LKVYP:NMTVE:SXGXH, RVPSTXX:VPEKT:SSLS-AA¹⁷-LFF:LKVYP:MITVE:XGXL, ASAAPXX:VPEAL:SSLS-AA¹⁷-LFF:LKVYP:MITVE:XKXS, ASASPXX:VPEDL:SSLS-AA¹⁷-LFF:LKVYP:MITVE:XKXS, ASASPXX:VPEDL:SSLS-AA¹⁷-LFF:LKVYP:MVTVE:XKXS, NDEGLEX:VPEEE:SSLS-AA¹⁷-LFF:LKVYP:FLTVE:KXEXR, NDEGLEX:VPEGQ:SSLS-AA¹⁷-LFF:LKVYP:LETVE:QXEXR, SSVKXQP:VPEHH:SSLS-AA¹⁷-LFF:LKVYP:RLTVE:LEXAXA, RNVQXRP:VPEQL:SSLS-AA¹⁷-LFF:LKVYP:TLTVE:LAXKXE, KIPKAXX:VPTEL:SSLS-AA¹⁷-LFF:LKVYP:DMVVE:GXGXR, SIPKAXX:VPTEL:SSLS-AA¹⁷-LFF:LKVYP:EMVVE:GXGXR, HVTKPTX:APTKL:SSLS-AA¹⁷-LFF:LKVYP:NMVVR:SXGXH, YVPKPXX:APTKL:SSLS-AA¹⁷-LFF:LKVYP:NMVVR:SXGXH, TVPKPXX:APTQL:SSLS-AA¹⁷-LFF:LKVYP:NMVVR:AXGXH, AVPKAXX:APTKL:SSLS-AA¹⁷-LFF:LKVYP:NMVVK:AXGXH, KVGKAXX:VPTKL:SSLS-AA¹⁷-LFF:LKVYP:EGMSVAE:XGXR, KASKAXX:VPTKL:SSLS-AA¹⁷-LFF:LKVYP:GMAVS:EXGXR, GSAGPXX:TPTKM:SSLS-AA¹⁷-LFF:LKVYP:GMVVD:RXGXS, AAPASXX:VPARL:SSLS-AA¹⁷-LFF:LKVYP:DMVVE:AXGXR, STPPTXX:VPTRL:SSLS-AA¹⁷-LFF:LKVYP:DMVVE:SXGXR, HVPKPXX:APTKL:SSLS-AA¹⁷-LFF:LKVYP:NMVVR:SXGXH, RVPSTXX:APVKT:SSLS-AA¹⁷-LFF:LKVYP:MIVEE:XGXL, ASAAPXX:VPQAL:SSLS-AA¹⁷-LFF:LKVYP:MIVRS:XKXS, ASASPXX:VSQDL:SSLS-AA¹⁷-LFF:LKVYP:MIVKS:XKXS, ASASPXX:VPQDL:SSLS-AA¹⁷-LFF:LKVYP:MVVKS:XKXS, NDEGLEX:VPTEE:SSLS-AA¹⁷-LFF:LKVYP:FLQHN:KXEXR, NDEGLEX:VPTGQ:SSLS-AA¹⁷-LFF:LKVYP:LEEHS:QXEXR, SSVKXQP:SRVHH:SSLS-AA¹⁷-LFF:LKVYP:RLEEH:LEXAXA, RNVQXRP:TQVQL:SSLS-AA¹⁷-LFF:LKVYP:TLEDH:LAXKXE, KIPKAXX:VPTEL:SAIS-AA¹⁷-LYL:LKNYQ:DMVVE:GXGXR, KIPKAXX:APTEL:NAIS-AA¹⁷-LYF:LKKYR:DMVVR:GXGXR, GIPEPXX:APTKM:NAIS-AA¹⁷-LYF:LKKYR:NMVVR:SXAXR, SIPKAXX:APTEL:NAIS-AA¹⁷-LYF:LKKYR:EMVVR:GXGXR, YVPKPXX:APTKL:NAIS-AA¹⁷-LYF:LKKYR:NMVVR:SXGXH, TVPKPXX:APTQL:NAIS-AA¹⁷-LYF:LKKYR:NMVVR:AXGXH, AVPKAXX:APTKL:NAIS-AA¹⁷-LYF:LKKYR:NMVVR:AXGXH, KVGKAXX:APTKL:NAIS-AA¹⁷-LYF:LKKYR:EGMSVVR:XGXR, KASKAXX:APTKL:NAIS-AA¹⁷-LYF:LKKYR:GMVVR:EXGXR, GSAGPXX:APTKM:NAIS-AA¹⁷-LYF:LKKYR:GMVVR:RXGXS, AAPASXX:APTRL:NAIS-AA¹⁷-LYF:LKKYR:DMVVR:AXGXR, STPPTXX:APTRL:NAIS-AA¹⁷-LYF:LKKYR:DMVVR:SXGXR, HVPKPXX:APTKL:NAIS-AA¹⁷-LYF:LKKYR:NMVVR:SXGXH, RVPSTXX:APTKT:NAIS-AA¹⁷-LYF:LKKYR: MIVVR:XGXL, ASAAPXX:APTAL:NAIS-AA¹⁷-LYF:LKKYR:MIVVR:XKXS, ASASPXX:APTDL:NAIS-AA¹⁷-LYF:LKKYR:MIVVR:XKXS, ASASPXX:APTDL:NAIS-AA¹⁷-LYF:LKKYR:MVVVR:XKXS, NDEGLEX:APTEE:NAIS-AA¹⁷-LYF:LKKYR:FLVVR:KXEXR, NDEGLEX:APTGQ:NAIS-AA¹⁷-LYF:LKKYR:LEVVR:QXEXR, SSVKXQP:APTHH:NAIS-AA¹⁷-LYF:LKKYR:RLVVR:LEXAXA, RNVQXRP:APTQL:NAIS-AA¹⁷-LYF:LKKYR:TLVVR:LAXKXE, KIPKAXX:VPTEL:NAIS-AA¹⁷-LYF:LKKYR:DMVVE:GXGXR, GIPEPXX:VPEKM:NAIS-AA¹⁷-LYF:LKKYR:NMTVE:SXAXR, SIPKAXX:VPTEL:NAIS-AA¹⁷-LYF:LKKYR:EMVVE:GXGXR, AVPKAXX:APTKL:NAIS-AA¹⁷-LYF:LKKYR:NMVVK:AXGXH, KVGKAXX:VPTKL:NAIS-AA¹⁷-LYF:LKKYR:EGMSVAE:XGXR, KASKAXX:VPTKL:NAIS-AA¹⁷-LYF:LKKYR:GMAVS:EXGXR, GSAGPXX:TPTKM:NAIS-AA¹⁷-LYF:LKKYR:GMVVD:RXGXS, AAPASXX:VPARL:NAIS-AA¹⁷-LYF:LKKYR:DMVVE:AXGXR, STPPTXX:VPTRL:NAIS-AA¹⁷-LYF:LKKYR:DMVVE:SXGXR, RVPSTXX:APVKT:NAIS-AA¹⁷-LYF:LKKYR:MIVEE:XGXL, ASAAPXX:VPQAL:NAIS-AA¹⁷-LYF:LKKYR:MIVRS:XKXS, ASASPXX:VSQDL:NAIS-AA¹⁷-LYF:LKKYR:MIVKS:XKXS, ASASPXX:VPQDL:NAIS-AA¹⁷-LYF:LKKYR:MVVKS:XKXS, NDEGLEX:VPTEE:NAIS-AA¹⁷-LYF:LKKYR:FLQHN:KXEXR, NDEGLEX:VPTGQ:NAIS-AA¹⁷-LYF:LKKYR:LEEHS:QXEXR, SSVKXQP:SRVHH:NAIS-AA¹⁷-LYF:LKKYR:RLEEH:LEXAXA, RNVQXRP:TQVQL:NAIS-AA¹⁷-LYF:LKKYR:TLEDH:LAXKXE, HVTKPTX:APTKL:NAIS-AA¹⁷-LYF:LKKYR:NMVVR:SXGXH, KIPKAXX:APTEL:SATS-AA¹⁷-LYY:LRKHR:DMVVK:GXGXR, GIPEPXX:APTKM:SATS-AA¹⁷-LYY:LRKHR:NMVVK:SXAXR, SIPKAXX:APTEL:SATS-AA¹⁷-LYY:LRKHR:EMVVK:GXGXR, HVTKPTX:APTKL:SATS-AA¹⁷-LYY:LRKHR:NMVVK:SXGXH, YVPKPXX:APTKL:SATS-AA¹⁷-LYY:LRKHR:NMVVK:SXGXH, TVPKPXX:APTQL:SATS-AA¹⁷-LYY:LRKHR:NMVVK:AXGXH, KVGKAXX:APTKL:SATS-AA¹⁷-LYY:LRKHR:EGMSVVK:XGXR, KASKAXX:APTKL:SATS-AA¹⁷-LYY:LRKHR:GMVVK:EXGXR, GSAGPXX:APTKM:SATS-AA¹⁷-LYY:LRKHR:GMVVK:RXGXS, AAPASXX:APTRL:SATS-AA¹⁷-LYY:LRKHR:DMVVK:AXGXR, STPPTXX:APTRL:SATS-AA¹⁷-LYY:LRKHR:DMVVK:SXGXR, HVPKPXX:APTKL:SATS-AA¹⁷-LYY:LRKHR:NMVVK:SXGXH, RVPSTXX:APTKT:SATS-AA¹⁷-LYY:LRKHR:MIVVK:XGXL, ASAAPXX:APTAL:SATS-AA¹⁷-LYY:LRKHR:MIVVK:XKXS, ASASPXX:APTDL:SATS-AA¹⁷-LYY:LRKHR:MIVVK:XKXS, ASASPXX:APTDL:SATS-AA¹⁷-LYY:LRKHR:MVVVK:XKXS, NDEGLEX:APTEE:SATS-AA¹⁷-LYY:LRKHR:FLVVK:KXEXR, NDEGLEX:APTGQ:SATS-AA¹⁷-LYY:LRKHR:LEVVK:QXEXR, SSVKXQP:APTHH:SATS-AA¹⁷-LYY:LRKHR:RLVVK:LEXAXA, RNVQXRP:APTQL:SATS-AA¹⁷-LYY:LRKHR:TLVVK:LAXKXE, KIPKAXX:VPTEL:SATS-AA¹⁷-LYY:LRKHR:DMVVE:GXGXR, GIPEPXX:VPEKM:SATS-AA¹⁷-LYY:LRKHR:NMTVE:SXAXR, SIPKAXX:VPTEL:SATS-AA¹⁷-LYY:LRKHR:EMVVE:GXGXR, HVTKPTX:APTKL:SATS-AA¹⁷-LYY:LRKHR:NMVVR:SXGXH, YVPKPXX:APTKL:SATS-AA¹⁷-LYY:LRKHR:NMVVR: SXGXH, TVPKPXX:APTQL:SATS-AA¹⁷-LYY:LRKHR:NMVVR:AXGXH, KVGKAXX:VPTKL:SATS-AA¹⁷-LYY:LRKHR:EGMSVAE:XGXR, KASKAXX:VPTKL:SATS-AA¹⁷-LYY:LRKHR:GMAVS:EXGXR, GSAGPXX:TPTKM:SATS-AA¹⁷-LYY:LRKHR:GMVVD:RXGXS, AAPASXX:VPARL:SATS-AA¹⁷-LYY:LRKHR:DMVVE:AXGXR, STPPTXX:VPTRL:SATS-AA¹⁷-LYY:LRKHR:DMVVE:SXGXR, HVPKPXX:APTKL:SATS-AA¹⁷-LYY:LRKHR:NMVVR:SXGXH, RVPSTXX:APVKT:SATS-AA¹⁷-LYY:LRKHR:MIVEE:XGXL, ASAAPXX:VPQAL:SATS-AA¹⁷-LYY:LRKHR:MIVRS:XKXS, ASASPXX:VSQDL:SATS-AA¹⁷-LYY:LRKHR:MIVKS:XKXS, ASASPXX:VPQDL:SATS-AA¹⁷-LYY:LRKHR:MVVKS:XKXS, NDEGLEX:VPTEE:SATS-AA¹⁷-LYY:LRKHR:FLQHN:KXEXR, NDEGLEX:VPTGQ:SATS-AA¹⁷-LYY:LRKHR:LEEHS:QXEXR, SSVKXQP:SRVHH:SATS-AA¹⁷-LYY:LRKHR:RLEEH:LEXAXA, RNVQXRP:TQVQL:SATS-AA¹⁷-LYY:LRKHR:TLEDH:LAXKXE, KIPKAXX:VPTEL:SPIS-AA¹⁷-LYK:LKYHY:DMVAE:GXGXR, GIPEPXX:VPTKM:SPIS-AA¹⁷-LYK:LKYHY:NMVAE:SXAXR, SIPKAXX:VPTEL:SPIS-AA¹⁷-LYK:LKYHY:EMVAE:GXGXR, HVTKPTX:VPTKL:SPIS-AA¹⁷-LYK:LKYHY:NMVAE:SXGXH, YVPKPXX:VPTKL:SPIS-AA¹⁷-LYK:LKYHY:NMVAE:SXGXH, TVPKPXX:VPTQL:SPIS-AA¹⁷-LYK:LKYHY:NMVAE:AXGXH, AVPKAXX:VPTKL:SPIS-AA¹⁷-LYK:LKYHY:NMVAE:AXGXH, KASKAXX:VPTKL:SPIS-AA¹⁷-LYK:LKYHY:GMVAE:EXGXR, GSAGPXX:VPTKM:SPIS-AA¹⁷-LYK:LKYHY:GMVAE:RXGXS, AAPASXX:VPTRL:SPIS-AA¹⁷-LYK:LKYHY:DMVAE:AXGXR, STPPTXX:VPTRL:SPIS-AA¹⁷-LYK:LKYHY:DMVAE:SXGXR, HVPKPXX:VPTKL:SPIS-AA¹⁷-LYK:LKYHY:NMVAE:SXGXH, RVPSTXX:VPTKT:SPIS-AA¹⁷-LYK:LKYHY:MIVAE:XGXL, ASAAPXX:VPTAL:SPIS-AA¹⁷-LYK:LKYHY:MIVAE:XKXS, ASASPXX:VPTDL:SPIS-AA¹⁷-LYK:LKYHY:MIVAE:XKXS, ASASPXX:VPTDL:SPIS-AA¹⁷-LYK:LKYHY:MVVAE:XKXS, NDEGLEX:VPTEE:SPIS-AA¹⁷-LYK:LKYHY:FLVAE:KXEXR, NDEGLEX:VPTGQ:SPIS-AA¹⁷-LYK:LKYHY:LEVAE:QXEXR, SSVKXQP:VPTHH:SPIS-AA¹⁷-LYK:LKYHY:RLVAE:LEXAXA, RNVQXRP:VPTQL:SPIS-AA¹⁷-LYK:LKYHY:TLVAE:LAXKXE, KIPKAXX:VPTEL:SPIS-AA¹⁷-LYK:LKYHY:DMVVE:GXGXR, GIPEPXX:VPEKM:SPIS-AA¹⁷-LYK:LKYHY:NMTVE:SXAXR, SIPKAXX:VPTEL:SPIS-AA¹⁷-LYK:LKYHY:EMVVE:GXGXR, HVTKPTX:APTKL:SPIS-AA¹⁷-LYK:LKYHY:NMVVR:SXGXH, YVPKPXX:APTKL:SPIS-AA¹⁷-LYK:LKYHY:NMVVR:SXGXH, TVPKPXX:APTQL:SPIS-AA¹⁷-LYK:LKYHY:NMVVR:AXGXH, AVPKAXX:APTKL:SPIS-AA¹⁷-LYK:LKYHY:NMVVK:AXGXH, KASKAXX:VPTKL:SPIS-AA¹⁷-LYK:LKYHY:GMAVS:EXGXR, GSAGPXX:TPTKM:SPIS-AA¹⁷-LYK:LKYHY:GMVVD:RXGXS, AAPASXX:VPARL:SPIS-AA¹⁷-LYK:LKYHY:DMVVE:AXGXR, STPPTXX:VPTRL:SPIS-AA¹⁷-LYK:LKYHY:DMVVE:SXGXR, HVPKPXX:APTKL:SPIS-AA¹⁷-LYK:LKYHY:NMVVR:SXGXH, RVPSTXX:APVKT:SPIS-AA¹⁷-LYK:LKYHY:MIVEE:XGXL, ASAAPXX:VPQAL:SPIS-AA¹⁷-LYK:LKYHY:MIVRS:XKXS, ASASPXX:VSQDL:SPIS-AA¹⁷-LYK:LKYHY:MIVKS:XKXS, ASASPXX:VPQDL:SPIS-AA¹⁷-LYK:LKYHY:MVVKS:XKXS, NDEGLEX:VPTEE:SPIS-AA¹⁷-LYK:LKYHY:FLQHN:KXEXR, NDEGLEX:VPTGQ:SPIS-AA¹⁷-LYK:LKYHY:LEEHS:QXEXR, SSVKXQP:SRVHH:SPIS-AA¹⁷-LYK:LKYHY:RLEEH:LEXAXA, RNVQXRP:TQVQL:SPIS-AA¹⁷-LYK:LKYHY:TLEDH:LAXKXE, KIPKAXX:VPTEL:EPIS-AA¹⁷-LYL:KFKYE:DMAVS:GXGXR, GIPEPXX:VPTKM:EPIS-AA¹⁷-LYL:KFKYE:NMAVS:SXAXR, SIPKAXX:VPTEL:EPIS-AA¹⁷-LYL:KFKYE:EMAVS:GXGXR, HVTKPTX:VPTKL:EPIS-AA¹⁷-LYL:KFKYE:NMAVS:SXGXH, YVPKPXX:VPTKL:EPIS-AA¹⁷-LYL:KFKYE:NMAVS:SXGXH, TVPKPXX:VPTQL:EPIS-AA¹⁷-LYL:KFKYE:NMAVS:AXGXH, AVPKAXX:VPTKL:EPIS-AA¹⁷-LYL:KFKYE:NMAVS:AXGXH, KVGKAXX:VPTKL:EPIS-AA¹⁷-LYL:KFKYE:EGMSAVS:XGXR, GSAGPXX:VPTKM:EPIS-AA¹⁷-LYL:KFKYE:GMAVS:RXGXS, AAPASXX:VPTRL:EPIS-AA¹⁷-LYL:KFKYE:DMAVS:AXGXR, STPPTXX:VPTRL:EPIS-AA¹⁷-LYL:KFKYE:DMAVS:SXGXR, HVPKPXX:VPTKL:EPIS-AA¹⁷-LYL:KFKYE:NMAVS:SXGXH, RVPSTXX:VPTKT:EPIS-AA¹⁷-LYL:KFKYE:MIAVS:XGXL, ASAAPXX:VPTAL:EPIS-AA¹⁷-LYL:KFKYE:MIAVS:XKXS, ASASPXX:VPTDL:EPIS-AA¹⁷-LYL:KFKYE:MIAVS:XKXS, ASASPXX:VPTDL:EPIS-AA¹⁷-LYL:KFKYE:MVAVS:XKXS, NDEGLEX:VPTEE:EPIS-AA¹⁷-LYL:KFKYE:FLAVS:KXEXR, NDEGLEX:VPTGQ:EPIS-AA¹⁷-LYL:KFKYE:LEAVS:QXEXR, SSVKXQP:VPTHH:EPIS-AA¹⁷-LYL:KFKYE:RLAVS:LEXAXA, RNVQXRP:VPTQL:EPIS-AA¹⁷-LYL:KFKYE:TLAVS:LAXKXE, KIPKAXX:VPTEL:EPIS-AA¹⁷-LYL:KFKYE:DMVVE:GXGXR, GIPEPXX:VPEKM:EPIS-AA¹⁷-LYL:KFKYE:NMTVE:SXAXR, SIPKAXX:VPTEL:EPIS-AA¹⁷-LYL:KFKYE:EMVVE:GXGXR, HVTKPTX:APTKL:EPIS-AA¹⁷-LYL:KFKYE:NMVVR:SXGXH, YVPKPXX:APTKL:EPIS-AA¹⁷-LYL:KFKYE:NMVVR:SXGXH, TVPKPXX:APTQL:EPIS-AA¹⁷-LYL:KFKYE:NMVVR:AXGXH, AVPKAXX:APTKL:EPIS-AA¹⁷-LYL:KFKYE:NMVVK:AXGXH, KVG KAXX:VPTKL:EPIS-AA¹⁷-LYL:KFKYE:EGMSVAE:XGXR, GSAGPXX:TPTKM:EPIS-AA¹⁷-LYL:KFKYE:GMVVD:RXGXS, AAPASXX:VPARL:EPIS-AA¹⁷-LYL:KFKYE:DMVVE:AXGXR, STPPTXX:VPTRL:EPIS-AA¹⁷-LYL:KFKYE:DMVVE:SXGXR, HVPKPXX:APTKL:EPIS-AA¹⁷-LYL:KFKYE:NMVVR:SXGXH, RVPSTXX:APVKT:EPIS-AA¹⁷-LYL:KFKYE:MIVEE:XGXL, ASAAPXX:VPQAL:EPIS-AA¹⁷-LYL:KFKYE:MIVRS:XKXS, ASASPXX:VSQDL:EPIS-AA¹⁷-LYL:KFKYE:MIVKS:XKXS, ASASPXX:VPQDL:EPIS-AA¹⁷-LYL:KFKYE:MVVKS:XKXS, NDEGLEX:VPTEE:EPIS-AA¹⁷-LYL:KFKYE:FLQHN:KXEXR, NDEGLEX:VPTGQ:EPIS-AA¹⁷-LYL:KFKYE:LEEHS:QXEXR, SSVKXQP:SRVHH:EPIS-AA¹⁷-LYL:KFKYE:RLEEH:LEXAXA, RNVQXRP:TQVQL:EPIS-AA¹⁷-LYL:KFKYE:TLEDH:LAXKXE, KIPKAXX:TPTEL:SPIN-AA¹⁷-LYF:YGKIP:DMVVD:GXGXR, GIPEPXX:TPTKM:SPIN-AA¹⁷-LYF:YGKIP:NMVVD:SXAXR, SIPKAXX:TPTEL:SPIN-AA¹⁷-LYF:YGKIP:EMVVD:GXGXR, HVTKPTX:TPTKL:SPIN-AA¹⁷-LYF:YGKIP:NMVVD:SXGXH, YVPKPXX:TPTKL:SPIN-AA¹⁷-LYF:YGKIP:NMVVD:SXGXH, TVPKPXX:TPTQL:SPIN-AA¹⁷-LYF:YGKIP:NMVVD:AXGXH, AVPKAXX:TPTKL:SPIN-AA¹⁷-LYF:YGKIP:NMVVD:AXGXH, KVGKAXX:TPTKL:SPIN-AA¹⁷-LYF:YGKIP:EGMSVVD:XGXR, KASKAXX:TPTKL:SPIN-AA¹⁷-LYF:YGKIP:GMVVD:EXGXR, AAPASXX:TPTRL:SPIN-AA¹⁷-LYF:YGKIP:DMVVD:AXGXR, STPPTXX:TPTRL:SPIN-AA¹⁷-LYF:YGKIP:DMVVD:SXGXR, HVPKPXX:TPTKL:SPIN-AA¹⁷-LYF:YGKIP:NMVVD:SXGXH, RVPSTXX:TPTKT:SPIN-AA¹⁷-LYF:YGKIP:MIVVD:XGXL, ASAAPXX:TPTAL:SPIN-AA¹⁷-LYF:YGKIP:MIVVD:XKXS, ASASPXX:TPTDL:SPIN-AA¹⁷-LYF:YGKIP:MIVVD:XKXS, ASASPXX:TPTDL:SPIN-AA¹⁷-LYF:YGKIP:MVVVD:XKXS, NDEGLEX:TPTEE:SPIN-AA¹⁷-LYF:YGKIP:FLVVD:KXEXR, NDEGLEX:TPTGQ:SPIN-AA¹⁷-LYF:YGKIP:LEVVD:QXEXR, SSVKXQP:TPTHH:SPIN-AA¹⁷-LYF:YGKIP:RLVVD:LEXAXA, RNVQXRP:TPTQL:SPIN-AA¹⁷-LYF:YGKIP:TLVVD:LAXKXE, KIPKAXX:VPTEL:SPIN-AA¹⁷-LYF:YGKIP:DMVVE:GXGXR, GIPEPXX:VPEKM:SPIN-AA¹⁷-LYF:YGKIP:NMTVE:SXAXR, SIPKAXX:VPTEL:SPIN-AA¹⁷-LYF:YGKIP:EMVVE:GXGXR, HVTKPTX:APTKL:SPIN-AA¹⁷-LYF:YGKIP:NMVVR:SXGXH, YVPKPXX:APTKL:SPIN-AA¹⁷-LYF:YGKIP:NMVVR:SXGXH, TVPKPXX:APTQL:SPIN-AA¹⁷-LYF:YGKIP:NMVVR:AXGXH, AVPKAXX:APTKL:SPIN-AA¹⁷-LYF:YGKIP:NMVVK:AXGXH, KVGKAXX:VPTKL:SPIN-AA¹⁷-LYF:YGKIP:EGMSVAE:XGXR, KASKAXX:VPTKL:SPI N-AA¹⁷-LYF:YGKIP:GMAVS:EXGXR, AAPASXX:VPARL:SPIN-AA¹⁷-LYF:YGKIP:DMVVE:AXGXR, STPPTXX:VPTRL:SPIN-AA¹⁷-LYF:YGKIP:DMVVE:SXGXR, HVPKPXX:APTKL:SPIN-AA¹⁷-LYF:YGKIP:NMVVR:SXGXH, RVPSTXX:APVKT:SPIN-AA¹⁷-LYF:YGKIP:MIVEE:XGXL, ASAAPXX:VPQAL:SPIN-AA¹⁷-LYF:YGKIP:MIVRS:XKXS, ASASPXX:VSQDL:SPIN-AA¹⁷-LYF:YGKIP:MIVKS:XKXS, ASASPXX:VPQDL:SPIN-AA¹⁷-LYF:YGKIP:MVVKS:XKXS, NDEGLEX:VPTEE:SPIN-AA¹⁷-LYF:YGKIP:FLQHN:KXEXR, NDEGLEX:VPTGQ:SPIN-AA¹⁷-LYF:YGKIP:LEEHS:QXEXR, SSVKXQP:SRVHH:SPIN-AA¹⁷-LYF:YGKIP:RLEEH:LEXAXA, RNVQXRP:TQVQL:SPIN-AA¹⁷-LYF:YGKIP:TLEDH:LAXKXE, KIPKAXX:VPAEL:SPIS-AA¹⁷-LYI:YKQYE:DMVVE:GXGXR, GIPEPXX:VPAKM:SPIS-AA¹⁷-LYI:YKQYE:NMVVE:SXAXR, SIPKAXX:VPAEL:SPIS-AA¹⁷-LYI:YKQYE:EMVVE:GXGXR, HVTKPTX:VPAKL:SPIS-AA¹⁷-LYI:YKQYE:NMVVE:SXGXH, YVPKPXX:VPAKL:SPIS-AA¹⁷-LYI:YKQYE:NMVVE:SXGXH, TVPKPXX:VPAQL:SPIS-AA¹⁷-LYI:YKQYE:NMVVE:AXGXH, AVPKAXX:VPAKL:SPIS-AA¹⁷-LYI:YKQYE:NMVVE:AXGXH, KVGKAXX:VPAKL:SPIS-AA¹⁷-LYI:YKQYE:EGMSVVE:XGXR, KASKAXX:VPAKL:SPIS-AA¹⁷-LYI:YKQYE:GMVVE:EXGXR, GSAGPXX:VPAKM:SPIS-AA¹⁷-LYI:YKQYE:GMVVE:RXGXS, STPPTXX:VPARL:SPIS-AA¹⁷-LYI:YKQYE:DMVVE:SXGXR, HVPKPXX:VPAKL:SPIS-AA¹⁷-LYI:YKQYE:NMVVE:SXGXH, RVPSTXX:VPAKT:SPIS-AA¹⁷-LYI:YKQYE:MIVVE:XGXL, ASAAPXX:VPAAL:SPIS-AA¹⁷-LYI:YKQYE:MIVVE:XKXS, ASASPXX:VPADL:SPIS-AA¹⁷-LYI:YKQYE:MIVVE:XKXS, ASASPXX:VPADL:SPIS-AA¹⁷-LYI:YKQYE:MVVVE:XKXS, NDEGLEX:VPAEE:SPIS-AA¹⁷-LYI:YKQYE:FLVVE:KXEXR, NDEGLEX:VPAGQ:SPIS-AA¹⁷-LYI:YKQYE:LEVVE:QXEXR, SSVKXQP:VPAHH:SPIS-AA¹⁷-LYI:YKQYE:RLVVE:LEXAXA, RNVQXRP:VPAQL:SPIS-AA¹⁷-LYI:YKQYE:TLVVE:LAXKXE, KIPKAXX:VPTEL:SPIS-AA¹⁷-LYI:YKQYE:DMVVE:GXGXR, GIPEPXX:VPEKM:SPIS-AA¹⁷-LYI:YKQYE:NMTVE:SXAXR, SIPKAXX:VPTEL:SPIS-AA¹⁷-LYI:YKQYE:EMVVE:GXGXR, HVTKPTX:APTKL:SPIS-AA¹⁷-LYI:YKQYE:NMVVR:SXGXH, YVPKPXX:APTKL:SPIS-AA¹⁷-LYI:YKQYE:NMVVR:SXGXH, TVPKPXX:APTQL:SPIS-AA¹⁷-LYI:YKQYE:NMVVR:AXGXH, AVPKAXX:APTKL:SPIS-AA¹⁷-LYI:YKQYE:NMVVK:AXGXH, KVGKAXX:VPTKL:SPIS-AA¹⁷-LYI:YKQYE:EGMSVAE:XGXR, KASKAXX:VPTKL:SPIS-AA¹⁷-LYI:YKQYE:GMAVS:EXGXR, GSAGPXX:TPTKM:SPIS-AA¹⁷-LYI:YKQYE:GMVVD:RXGXS, STPPTXX:VPTRL:SPIS-AA¹⁷-LYI:YKQYE:DMVVE:SXGXR, HVPKPXX:APTKL:SPIS-AA¹⁷-LYI:YKQYE:NMVVR:SXGXH, RVPSTXX:APVKT:SPIS-AA¹⁷-LYI:YKQYE:MIVEE:XGXL, ASAAPXX:VPQAL:SPIS-AA¹⁷-LYI:YKQYE:MIVRS:XKXS, ASASPXX:VSQDL:SPIS-AA¹⁷-LYI:YKQYE:MIVKS:XKXS, ASASPXX:VPQDL:SPIS-AA¹⁷-LYI:YKQYE:MVVKS:XKXS, NDEGLEX:VPTEE:SPIS-AA¹⁷-LYI:YKQYE:FLQHN:KXEXR, NDEGLEX:VPTGQ:SPIS-AA¹⁷-LYI:YKQYE:LEEHS:QXEXR, SSVKXQP:SRVHH:SPIS-AA¹⁷-LYI:YKQYE:RLEEH:LEXAXA, RNVQXRP:TQVQL:SPIS-AA¹⁷-LYI:YKQYE:TLEDH:LAXKXE, KIPKAXX:VPTEL:SPIS-AA¹⁷-LFI:YKQYE:DMVVE:GXGXR, GIPEPXX:VPTKM:SPIS-AA¹⁷-LFI:YKQYE:NMVVE:SXAXR, SIPKAXX:VPTEL:SPIS-AA¹⁷-LFI:YKQYE:EMVVE:GXGXR, HVTKPTX:VPTKL:SPIS-AA¹⁷-LFI:YKQYE:NMVVE:SXGXH, YVPKPXX:VPTKL:SPIS-AA¹⁷-LFI:YKQYE:NMVVE:SXGXH, TVPKPXX:VPTQL:SPIS-AA¹⁷-LFI:YKQYE:NMVVE:AXGXH, AVPKAXX:VPTKL:SPIS-AA¹⁷-LFI:YKQYE:NMVVE:AXGXH, KVGKAXX:VPTKL:SPIS-AA¹⁷-LFI:YKQYE:EGMSVVE:XGXR, KASKAXX:VPTKL:SPIS-AA¹⁷-LFI:YKQYE:GMVVE:EXGXR, GSAGPXX:VPTKM:SPIS-AA¹⁷-LFI:YKQYE:GMVVE:RXGXS, AAPASXX:VPTRL:SPIS-AA¹⁷-LFI:YKQYE:DMVVE:AXGXR, HVPKPXX:VPTKL:SPIS-AA¹⁷-LFI:YKQYE:NMVVE: :SXGXH, RVPSTXX:VPTKT:SPIS-AA¹⁷-LFI:YKQYE:MIVVE:XGXL, ASAAPXX:VPTAL:SPIS-AA¹⁷-LFI:YKQYE:MIVVE:XKXS, ASASPXX:VPTDL:SPIS-AA¹⁷-LFI:YKQYE:MIVVE:XKXS, ASASPXX:VPTDL:SPIS-AA¹⁷-LFI:YKQYE:MVVVE:XKXS, NDEGLEX:VPTEE:SPIS-AA¹⁷-LFI:YKQYE:FLVVE:KXEXR, NDEGLEX:VPTGQ:SPIS-AA¹⁷-LFI:YKQYE:LEVVE:QXEXR, SSVKXQP:VPTHH:SPIS-AA¹⁷-LFI:YKQYE:RLVVE:LEXAXA, RNVQXRP:VPTQL:SPIS-AA¹⁷-LFI:YKQYE:TLVVE:LAXKXE, GIPEPXX:VPEKM:SPIS-AA¹⁷-LFI:YKQYE:NMTVE:SXAXR, HVTKPTX:APTKL:SPIS-AA¹⁷-LFI:YKQYE:NMVVR:SXGXH, YVPKPXX:APTKL:SPIS-AA¹⁷-LFI:YKQYE:NMVVR:SXGXH, TVPKPXX:APTQL:SPIS-AA¹⁷-LFI:YKQYE:NMVVR:AXGXH, AVPKAXX:APTKL:SPIS-AA¹⁷-LFI:YKQYE:NMVVK:AXGXH, KVGKAXX:VPTKL:SPIS-AA¹⁷-LFI:YKQYE:EGMSVAE:XGXR, KASKAXX:VPTKL:SPIS-AA¹⁷-LFI:YKQYE:GMAVS:EXGXR, GSAGPXX:TPTKM:SPIS-AA¹⁷-LFI:YKQYE:GMVVD:RXGXS, AAPASXX:VPARL:SPIS-AA¹⁷-LFI:YKQYE:DMVVE:AXGXR, HVPKPXX:APTKL:SPIS-AA¹⁷-LFI:YKQYE:NMVVR:SXGXH, RVPSTXX:APVKT:SPIS-AA¹⁷-LFI:YKQYE:MIVEE:XGXL, ASAAPXX:VPQAL:SPIS-AA¹⁷-LFI:YKQYE:MIVRS:XKXS, ASASPXX:VSQDL:SPIS-AA¹⁷-LFI:YKQYE:MIVKS:XKXS, ASASPXX:VPQDL:SPIS-AA¹⁷-LFI:YKQYE:MVVKS:XKXS, NDEGLEX:VPTEE:SPIS-AA¹⁷-LFI:YKQYE:FLQHN:KXEXR, NDEGLEX:VPTGQ:SPIS-AA¹⁷-LFI:YKQYE:LEEHS:QXEXR, SSVKXQP:SRVHH:SPIS-AA¹⁷-LFI:YKQYE:RLEEH:LEXAXA, RNVQXRP:TQVQL:SPIS-AA¹⁷-LFI:YKQYE:TLEDH:LAXKXE, KIPKAXX:APVEL:KPLS-AA¹⁷-LYV:DHHKD:DMVEE:GXGXR, GIPEPXX:APVKM:KPLS-AA¹⁷-LYV:DHHKD:NMVEE:SXAXR, SIPKAXX:APVEL:KPLS-AA¹⁷-LYV:DHHKD:EMVEE:GXGXR, HVTKPTX:APVKL:KPLS-AA¹⁷-LYV:DHHKD:NMVEE:SXGXH, YVPKPXX:APVKL:KPLS-AA¹⁷-LYV:DHHKD:NMVEE:SXGXH, TVPKPXX:APVQL:KPLS-AA¹⁷-LYV:DHHKD:NMVEE:AXGXH, AVPKAXX:APVKL:KPLS-AA¹⁷-LYV:DHHKD:NMVEE:AXGXH, KVGKAXX:APVKL:KPLS-AA¹⁷-LYV:DHHKD:EGMSVEE:XGXR, KASKAXX:APVKL:KPLS-AA¹⁷-LYV:DHHKD:GMVEE:EXGXR, GSAGPXX:APVKM:KPLS-AA¹⁷-LYV:DHHKD:GMVEE:RXGXS, AAPASXX:APVRL:KPLS-AA¹⁷-LYV:DHHKD:DMVEE:AXGXR, STPPTXX:APVRL:KPLS-AA¹⁷-LYV:DHHKD:DMVEE:SXGXR, HVPKPXX:APVKL:KPLS-AA¹⁷-LYV:DHHKD:NMVEE:SXGXH, ASAAPXX:APVAL:KPLS-AA¹⁷-LYV:DHHKD:MIVEE:XKXS, ASASPXX:APVDL:KPLS-AA¹⁷-LYV:DHHKD:MIVEE:XKXS, ASASPXX:APVDL:KPLS-AA¹⁷-LYV:DHHKD:MVVEE:XKXS, NDEGLEX:APVEE:KPLS-AA¹⁷-LYV:DHHKD:FLVEE:KXEXR, NDEGLEX:APVGQ:KPLS-AA¹⁷-LYV:DHHKD:LEVEE:QXEXR, SSVKXQP:APVHH:KPLS-AA¹⁷-LYV:DHHKD:RLVEE:LEXAXA, RNVQXRP:APVQL:KPLS-AA¹⁷-LYV:DHHKD:TLVEE:LAXKXE, KIPKAXX:VPTEL:KPLS-AA¹⁷-LYV:DHHKD:DMVVE:GXGXR, GIPEPXX:VPEKM:KPLS-AA¹⁷-LYV:DHHKD:NMTVE:SXAXR, SIPKAXX:VPTEL:KPLS-AA¹⁷-LYV:DHHKD:EMVVE:GXGXR, HVTKPTX:APTKL:KPLS-AA¹⁷-LYV:DHHKD:NMVVR:SXGXH, YVPKPXX:APTKL:KPLS-AA¹⁷-LYV:DHHKD:NMVVR:SXGXH, TVPKPXX:APTQL:KPLS-AA¹⁷-LYV:DHHKD:NMVVR:AXGXH, AVPKAXX:APTKL:KPLS-AA¹⁷-LYV:DHHKD:NMVVK:AXGXH, KVGKAXX:VPTKL:KPLS-AA¹⁷-LYV:DHHKD:EGMSVAE:XGXR, KASKAXX:VPTKL:KPLS-AA¹⁷-LYV:DHHKD:GMAVS:EXGXR, GSAGPXX:TPTKM:KPLS-AA¹⁷-LYV:DHHKD:GMVVD:RXGXS, AAPASXX:VPARL:KPLS-AA¹⁷-LYV:DHHKD:DMVVE:AXGXR, STPPTXX:VPTRL:KPLS-AA¹⁷-LYV:DHHKD:DMVVE:SXGXR, HVPKPXX:APTKL:KPLS-AA¹⁷-LYV:DHHKD:NMVVR:SXGXH, ASAAPXX:VPQAL:KPLS-AA¹⁷-LYV:DHHKD:MIVRS:XKXS, ASASPXX:VSQDL:KPLS-AA¹⁷-LYV:DHHKD:MIVKS:XKXS, ASASPXX:VPQDL:KPLS-AA¹⁷-LYV:DHHKD:MVVKS:XKXS, NDEGLEX:VPTEE:KPLS-AA¹⁷-LYV:DHHKD:FLQHN:KXEXR, NDEGLEX:VPTGQ:KPLS-AA¹⁷-LYV:DHHKD:LEEHS:QXEXR, SSVKXQP:SRVHH:KPLS-AA¹⁷-LYV:DHHKD:RLEEH:LEXAXA, RNVQXRP:TQVQL:KPLS-AA¹⁷-LYV:DHHKD:TLEDH:LAXKXE, KIPKAXX:VPQEL:EPLP-AA¹⁷-VYY:EQLSN:DMVRS:GXGXR, GIPEPXX:VPQKM:EPLP-AA¹⁷-VYY:EQLSN:NMVRS:SXAXR, SIPKAXX:VPQEL:EPLP-AA¹⁷-VYY:EQLSN:EMVRS:GXGXR, HVTKPTX:VPQKL:EPLP-AA¹⁷-VYY:EQLSN:NMVRS:SXGXH, YVPKPXX:VPQKL:EPLP-AA¹⁷-VYY:EQLSN:NMVRS:SXGXH, TVPKPXX:VPQQL:EPLP-AA¹⁷-VYY:EQLSN:NMVRS:AXGXH, AVPKAXX:VPQKL:EPLP-AA¹⁷-VYY:EQLSN:NMVRS:AXGXH, KVGKAXX:VPQKL:EPLP-AA¹⁷-VYY:EQLSN:EGMSVRS:XGXR, KASKAXX:VPQKL:EPLP-AA¹⁷-VYY:EQLSN:GMVRS:EXGXR, GSAGPXX:VPQKM:EPLP-AA¹⁷-VYY:EQLSN:GMVRS:RXGXS, AAPASXX:VPQRL:EPLP-AA¹⁷-VYY:EQLSN:DMVRS:AXGXR, STPPTXX:VPQRL:EPLP-AA¹⁷-VYY:EQLSN:DMVRS:SXGXR, HVPKPXX:VPQKL:EPLP-AA¹⁷-VYY:EQLSN:NMVRS:SXGXH, RVPSTXX:VPQKT:EPLP-AA¹⁷-VYY:EQLSN:MIVRS:XGXL, ASASPXX:VPQDL:EPLP-AA¹⁷-VYY:EQLSN:MIVRS:XKXS, ASASPXX:VPQDL:EPLP-AA¹⁷-VYY:EQLSN:MVVRS:XKXS, NDEGLEX:VPQEE:EPLP-AA¹⁷-VYY:EQLSN:FLVRS:KXEXR, NDEGLEX:VPQGQ:EPLP-AA¹⁷-VYY:EQLSN:LEVRS:QXEXR, SSVKXQP:VPQHH:EPLP-AA¹⁷-VYY:EQLSN:RLVRS:LEXAXA, RNVQXRP:VPQQL:EPLP-AA¹⁷-VYY:EQLSN:TLVRS:LAXKXE, KIPKAXX:VPTEL:EPLP-AA¹⁷-VYY:EQLSN:DMVVE:GXGXR, GIPEPXX:VPEKM:EPLP-AA¹⁷-VYY:EQLSN:NMTVE:SXAXR, SIPKAXX:VPTEL:EPLP-AA¹⁷-VYY:EQLSN:EMVVE:GXGXR, HVTKPTX:APTKL:EPLP-AA¹⁷-VYY:EQLSN:NMVVR:SXGXH, YVPKPXX:APTKL:EPLP-AA¹⁷-VYY:EQLSN:NMVVR:SXGXH, TVPKPXX:APTQL:EPLP-AA¹⁷-VYY:EQLSN:NMVVR:AXGXH, AVPKAXX:APTKL:EPLP-AA¹⁷-VYY:EQLSN:NMVVK:AXGXH, KVGKAXX:VPTKL:EPLP-AA¹⁷-VYY:EQLSN:EGMSVAE:XGXR, KASKAXX:VPTKL:EPLP-AA¹⁷-VYY:EQLSN:GMAVS:EXGXR, GSAGPXX:TPTKM:EPLP-AA¹⁷-VYY:EQLSN:GMVVD:RXGXS, AAPASXX:VPARL:EPLP-AA¹⁷-VYY:EQLSN:DMVVE:AXGXR, STPPTXX:VPTRL:EPLP-AA¹⁷-VYY:EQLSN:DMVVE:SXGXR, HVPKPXX:APTKL:EPLP-AA¹⁷-VYY:EQLSN:NMVVR:SXGXH, RVPSTXX:APVKT:EPLP-AA¹⁷-VYY:EQLSN:MIVEE:XGXL, ASASPXX:VSQDL:EPLP-AA¹⁷-VYY:EQLSN:MIVKS:XKXS, ASASPXX:VPQDL:EPLP-AA¹⁷-VYY:EQLSN:MVVKS:XKXS, NDEGLEX:VPTEE:EPLP-AA¹⁷-VYY:EQLSN:FLQHN:KXEXR, NDEGLEX:VPTGQ:EPLP-AA¹⁷-VYY:EQLSN:LEEHS:QXEXR, SSVKXQP:SRVHH:EPLP-AA¹⁷-VYY:EQLSN:RLEEH:LEXAXA, RNVQXRP:TQVQL:EPLP-AA¹⁷-VYY:EQLSN:TLEDH:LAXKXE, KIPKAXX:VSQEL:EPLT-AA¹⁷-LYY:EQLSN:DMVKS:GXGXR, GIPEPXX:VSQKM:EPLT-AA¹⁷-LYY:EQLSN:NMVKS:SXAXR, SIPKAXX:VSQEL:EPLT-AA¹⁷-LYY:EQLSN:EMVKS:GXGXR, HVTKPTX:VSQKL:EPLT-AA¹⁷-LYY:EQLSN:NMVKS:SXGXH, YVPKPXX:VSQKL:EPLT-AA¹⁷-LYY:EQLSN:NMVKS:SXGXH, TVPKPXX:VSQQL:EPLT-AA¹⁷-LYY:EQLSN:NMVKS:AXGXH, AVPKAXX:VSQKL:EPLT-AA¹⁷-LYY:EQLSN:NMVKS:AXGXH, KVGKAXX:VSQKL:EPLT-AA¹⁷-LYY:EQLSN:EGMSVKS:XGXR, KASKAXX:VSQKL:EPLT-AA¹⁷-LYY:EQLSN:GMVKS:EXGXR, GSAGPXX:VSQKM:EPLT-AA¹⁷-LYY:EQLSN:GMVKS:RXGXS, AAPASXX:VSQRL:EPLT-AA¹⁷-LYY:EQLSN:DMVKS:AXGXR, STPPTXX:VSQRL:EPLT-AA¹⁷-LYY:EQLSN:DMVKS:SXGXR, HVPKPXX:VSQKL:EPLT-AA¹⁷-LYY:EQLSN:NMVKS:SXGXH, RVPSTXX:VSQKT:EPLT-AA¹⁷-LYY:EQLSN:MIVKS:XGXL, ASAAPXX:VSQAL:EPLT-AA¹⁷-LYY:EQLSN:MIVKS:XKXS, ASASPXX:VSQDL:EPLT-AA¹⁷-LYY:EQLSN:MVVKS:XKXS, NDEGLEX:VSQEE:EPLT-AA¹⁷-LYY:EQLSN:FLVKS:KXEXR, NDEGLEX:VSQGQ:EPLT-AA¹⁷-LYY:EQLSN:LEVKS:QXEXR, SSVKXQP:VSQHH:EPLT-AA¹⁷-LYY:EQLSN:RLVKS:LEXAXA, RNVQXRP:VSQQL:EPLT-AA¹⁷-LYY:EQLSN:TLVKS:LAXKXE, KIPKAXX:VPTEL:EPLT-AA¹⁷-LYY:EQLSN:DMVVE:GXGXR, GIPEPXX:VPEKM:EPLT-AA¹⁷-LYY:EQLSN:NMTVE:SXAXR, SIPKAXX:VPTEL:EPLT-AA¹⁷-LYY:EQLSN:EMVVE:GXGXR, HVTKPTX:APTKL:EPLT-AA¹⁷-LYY:EQLSN:NMVVR:SXGXH, YVPKPXX:APTKL:EPLT-AA¹⁷-LYY:EQLSN:NMVVR:SXGXH, TVPKPXX:APTQL:EPLT-AA¹⁷-LYY:EQLSN:NMVVR:AXGXH, AVPKAXX:APTKL:EPLT-AA¹⁷-LYY:EQLSN:NMVVK:AXGXH, KVGKAXX:VPTKL:EPLT-AA¹⁷-LYY:EQLSN:EGMSVAE:XGXR, KASKAXX:VPTKL:EPLT-AA¹⁷-LYY:EQLSN:GMAVS:EXGXR, GSAGPXX:TPTKM:EPLT-AA¹⁷-LYY:EQLSN:GMVVD:RXGXS, AAPASXX:VPARL:EPLT-AA¹⁷-LYY:EQLSN:DMVVE:AXGXR, STPPTXX:VPTRL:EPLT-AA¹⁷-LYY:EQLSN:DMVVE:SXGXR, HVPKPXX:APTKL:EPLT-AA¹⁷-LYY:EQLSN:NMVVR:SXGXH, RVPSTXX:APVKT:EPLT-AA¹⁷-LYY:EQLSN:MIVEE:XGXL, ASAAPXX:VPQAL:EPLT-AA¹⁷-LYY:EQLSN:MIVRS:XKXS, ASASPXX:VPQDL:EPLT-AA¹⁷-LYY:EQLSN:MVVKS:XKXS, NDEGLEX:VPTEE:EPLT-AA¹⁷-LYY:EQLSN:FLQHN:KXEXR, NDEGLEX:VPTGQ:EPLT-AA¹⁷-LYY:EQLSN:LEEHS:QXEXR, SSVKXQP:SRVHH:EPLT-AA¹⁷-LYY:EQLSN:RLEEH:LEXAXA, RNVQXRP:TQVQL:EPLT-AA¹⁷-LYY:EQLSN:TLEDH:LAXKXE, KIPKAXX:VPQEL:EPLT-AA¹⁷-LYY:EQLSN:DMVKS:GXGXR, GIPEPXX:VPQKM:EPLT-AA¹⁷-LYY:EQLSN:NMVKS:SXAXR, SIPKAXX:VPQEL:EPLT-AA¹⁷-LYY:EQLSN:EMVKS:GXGXR, HVTKPTX:VPQKL:EPLT-AA¹⁷-LYY:EQLSN:NMVKS:SXGXH, YVPKPXX:VPQKL:EPLT-AA¹⁷-LYY:EQLSN:NMVKS:SXGXH, TVPKPXX:VPQQL:EPLT-AA¹⁷-LYY:EQLSN:NMVKS:AXGXH, AVPKAXX:VPQKL:EPLT-AA¹⁷-LYY:EQLSN:NMVKS:AXGXH, KVGKAXX:VPQKL:EPLT-AA¹⁷-LYY:EQLSN:EGMSVKS:XGXR, KASKAXX:VPQKL:EPLT-AA¹⁷-LYY:EQLSN:GMVKS:EXGXR, GSAGPXX:VPQKM:EPLT-AA¹⁷-LYY:EQLSN:GMVKS:RXGXS, AAPASXX:VPQRL:EPLT-AA¹⁷-LYY:EQLSN:DMVKS:AXGXR, STPPTXX:VPQRL:EPLT-AA¹⁷-LYY:EQLSN:DMVKS:SXGXR, HVPKPXX:VPQKL:EPLT-AA¹⁷-LYY:EQLSN:NMVKS:SXGXH, RVPSTXX:VPQKT:EPLT-AA¹⁷-LYY:EQLSN:MIVKS:XGXL, ASAAPXX:VPQAL:EPLT-AA¹⁷-LYY:EQLSN:MIVKS:XKXS, ASASPXX:VPQDL:EPLT-AA¹⁷-LYY:EQLSN:MIVKS:XKXS, NDEGLEX:VPQEE:EPLT-AA¹⁷-LYY:EQLSN:FLVKS:KXEXR, NDEGLEX:VPQGQ:EPLT-AA¹⁷-LYY:EQLSN:LEVKS:QXEXR, SSVKXQP:VPQHH:EPLT-AA¹⁷-LYY:EQLSN:RLVKS:LEXAXA, RNVQXRP:VPQQL:EPLT-AA¹⁷-LYY:EQLSN:TLVKS:LAXKXE, ASASPXX:VSQDL:EPLT-AA¹⁷-LYY:EQLSN:MIVKS:XKXS, KIPKAXX:VPTEL:SNIT-AA¹⁷-QIM:IGEMS:DMQHN:GXGXR, GIPEPXX:VPTKM:SNIT-AA¹⁷-QIM:IGEMS:NMQHN:SXAXR, SIPKAXX:VPTEL:SNIT-AA¹⁷-QIM:IGEMS:EMQHN:GXGXR, HVTKPTX:VPTKL:SNIT-AA¹⁷-QIM:IGEMS:NMQHN:SXGXH, YVPKPXX:VPTKL:SNIT-AA¹⁷-QIM:IGEMS:NMQHN:SXGXH, TVPKPXX:VPTQL:SNIT-AA¹⁷-QIM:IGEMS:NMQHN:AXGXH, AVPKAXX:VPTKL:SNIT-AA¹⁷-QIM:IGEMS:NMQHN:AXGXH, KVGKAXX:VPTKL:SNIT-AA¹⁷-QIM:IGEMS:EGMSQHN:XGXR, KASKAXX:VPTKL:SNIT-AA¹⁷-QIM:IGEMS:GMQHN:EXGXR, GSAGPXX:VPTKM:SNIT-AA¹⁷⁷-QIM:IGEMS:GMQHN:RXGXS, AAPASXX:VPTRL:SNIT-AA¹⁷-QIM:IGEMS:DMQHN:AXGXR, STPPTXX:VPTRL:SNIT-AA¹⁷-QIM:IGEMS:DMQHN:SXGXR, HVPKPXX:VPTKL:SNIT-AA¹⁷-QIM:IGEMS:NMQHN:SXGXH, RVPSTXX:VPTKT:SNIT-AA¹⁷-QIM:IGEMS:MIQHN:XGXL, ASAAPXX:VPTAL:SNIT-AA¹⁷-QIM:IGEMS:MIQHN:XKXS, ASASPXX:VPTDL:SNIT-AA¹⁷-QIM:IGEMS:MIQHN:XKXS, ASASPXX:VPTDL:SNIT-AA¹⁷-QIM:IGEMS:MVQHN:XKXS, NDEGLEX:VPTGQ:SNIT-AA¹⁷-QIM:IGEMS:LEQHN:QXEXR, NDEGLEX:VPTEE:SNIT-AA¹⁷-QIM:IGEMS:FLQHN:KXEXR, SSVKXQP:VPTHH:SNIT-AA¹⁷-QIM:IGEMS:RLQHN:LEXAXA, RNVQXRP:VPTQL:SNIT-AA¹⁷-QIM:IGEMS:TLQHN:LAXKXE, KIPKAXX:VPTEL:SNIT-AA¹⁷-QIM:IGEMS:DMVVE:GXGXR, GIPEPXX:VPEKM:SNIT-AA¹⁷-QIM:IGEMS:NMTVE:SXAXR, SIPKAXX:VPTEL:SNIT-AA¹⁷-QIM:IGEMS:EMVVE:GXGXR, HVTKPTX:APTKL:SNIT-AA¹⁷-QIM:IGEMS:NMWR:SXGXH, YVPKPXX:APTKL:SNIT-AA¹⁷-QIM:IGEMS:NMVVR:SXGXH, TVPKPXX:APTQL:SNIT-AA¹⁷-QIM:IGEMS:NMVVR:AXGXH, AVPKAXX:APTKL:SNIT-AA¹⁷-QIM:IGEMS:NMVVK:AXGXH, KVGKAXX:VPTKL:SNIT-AA¹⁷-QIM:IGEMS:EGMSVAE:XGXR, KASKAXX:VPTKL:SNIT-AA¹⁷-QIM:IGEMS:GMAVS:EXGXR, GSAGPXX:TPTKM:SNIT-AA¹⁷-QIM:IGEMS:GMVVD:RXGXS, AAPASXX:VPARL:SNIT-AA¹⁷-QIM:IGEMS:DMVVE:AXGXR, STPPTXX:VPTRL:SNIT-AA¹⁷-QIM:IGEMS:DMVVE:SXGXR, HVPKPXX:APTKL:SNIT-AA¹⁷-QIM:IGEMS:NMVVR:SXGXH, RVPSTXX:APVKT:SNIT-AA¹⁷-QIM:IGEMS:MIVEE:XGXL, ASAAPXX:VPQAL:SNIT-AA¹⁷-QIM:IGEMS:MIVRS:XKXS, ASASPXX:VSQDL:SNIT-AA¹⁷-QIM:IGEMS:MIVKS:XKXS, ASASPXX:VPQDL:SNIT-AA¹⁷-QIM:IGEMS:MVVKS:XKXS, NDEGLEX:VPTGQ:SNIT-AA¹⁷-QIM:IGEMS:LEEHS:QXEXR, SSVKXQP:SRVHH:SNIT-AA¹⁷-QIM:IGEMS:RLEEH:LEXAXA, RNVQXRP:TQVQL:SNIT-AA¹⁷-QIM:IGEMS:TLEDH:LAXKXE, KIPKAXX:VPTEL:SNIT-AA¹⁷-QIM:LGEMS:DMEHS:GXGXR, GIPEPXX:VPTKM:SNIT-AA¹⁷-QIM:LGEMS:NMEHS:SXAXR, SIPKAXX:VPTEL:SNIT-AA¹⁷-QIM:LGEMS:EMEHS:GXGXR, HVTKPTX:VPTKL:SNIT-AA¹⁷-QIM:LGEMS:NMEHS:SXGXH, YVPKPXX:VPTKL:SNIT-AA¹⁷-QIM:LGEMS:NMEHS:SXGXH, TVPKPXX:VPTQL:SNIT-AA¹⁷-QIM:LGEMS:NMEHS:AXGXH, AVPKAXX:VPTKL:SNIT-AA¹⁷-QIM:LGEMS:NMEHS:AXGXH, KVGKAXX:VPTKL:SNIT-AA¹⁷-QIM:LGEMS:EGMSEHS:XGXR, KASKAXX:VPTKL:SNIT-AA¹⁷-QIM:LGEMS:GMEHS:EXGXR, GSAGPXX:VPTKM:SNIT-AA¹⁷-QIM:LGEMS:GMEHS:RXGXS, AAPASXX:VPTRL:SNIT-AA¹⁷-QIM:LGEMS:DMEHS:AXGXR, STPPTXX:VPTRL:SNIT-AA¹⁷-QIM:LGEMS:DMEHS:SXGXR, HVPKPXX:VPTKL:SNIT-AA¹⁷-QIM:LGEMS:NMEHS:SXGXH, RVPSTXX:VPTKT:SNIT-AA¹⁷-QIM:LGEMS:MIEHS:XGXL, ASAAPXX:VPTAL:SNIT-AA¹⁷-QIM:LGEMS:MIEHS:XKXS, ASASPXX:VPTDL:SNIT-AA¹⁷-QIM:LGEMS:MIEHS:XKXS, ASASPXX:VPTDL:SNIT-AA¹⁷-QIM:LGEMS:MVEHS:XKXS, NDEGLEX:VPTEE:SNIT-AA¹⁷-QIM:LGEMS:FLEHS:KXEXR, SSVKXQP:VPTHH:SNIT-AA¹⁷-QIM:LGEMS:RLEHS:LEXAXA, RNVQXRP:VPTQL:SNIT-AA¹⁷-QIM:LGEMS:TLEHS:LAXKXE, KIPKAXX:VPTEL:SNIT-AA¹⁷-QIM:LGEMS:DMVVE:GXGXR, GIPEPXX:VPEKM:SNIT-AA¹⁷-QIM:LGEMS:NMTVE:SXAXR, SIPKAXX:VPTEL:SNIT-AA¹⁷-QIM:LGEMS:EMVVE:GXGXR, HVTKPTX:APTKL:SNIT-AA¹⁷-QIM:LGEMS:NMVVR:SXGXH, YVPKPXX:APTKL:SNIT-AA¹⁷-QIM:LGEMS:NMVVR:SXGXH, TVPKPXX:APTQL:SNIT-AA¹⁷-QIM:LGEMS:NMVVR:AXGXH, AVPKAXX:APTKL:SNIT-AA¹⁷-QIM:LGEMS:NMVVK:AXGXH, KVGKAXX:VPTKL:SNIT-AA¹⁷-QIM:LGEMS:EGMSVAE:XGXR, KASKAXX:VPTKL:SNIT-AA¹⁷-QIM:LGEMS:GMAVS:EXGXR, GSAGPXX:TPTKM:SNIT-AA¹⁷-QIM:LGEMS:GMVVD:RXGXS, AAPASXX:VPARL:SNIT-AA¹⁷-QIM:LGEMS:DMVVE:AXGXR, STPPTXX:VPTRL:SNIT-AA¹⁷-QIM:LGEMS:DMVVE:SXGXR, HVPKPXX:APTKL:SNIT-AA¹⁷-QIM:LGEMS:NMVVR:SXGXH, RVPSTXX:APVKT:SNIT-AA¹⁷-QIM:LGEMS:MIVEE:XGXL, ASAAPXX:VPQAL:SNIT-AA¹⁷-QIM:LGEMS:MIVRS:XKXS, ASASPXX:VSQDL:SNIT-AA¹⁷-QIM:LGEMS:MIVKS:XKXS, ASASPXX:VPQDL:SNIT-AA¹⁷-QIM:LGEMS:MVVKS:XKXS, NDEGLEX:VPTEE:SNIT-AA¹⁷-QIM:LGEMS:FLQHN:KXEXR, SSVKXQP:SRVHH:SNIT-AA¹⁷-QIM:LGEMS:RLEEH:LEXAXA, RNVQXRP:TQVQL:SNIT-AA¹⁷-QIM:LGEMS:TLEDH:LAXKXE, KIPKAXX:SRVEL:RSVK-AA¹⁷-AKV:KEVQV:DMEEH:GXGXR, GIPEPXX:SRVKM:RSVK-AA¹⁷-AKV:KEVQV:NMEEH:SXAXR, SIPKAXX:SRVEL:RSVK-AA¹⁷-AKV:KEVQV:EMEEH:GXGXR, HVTKPTX:SRVKL:RSVK-AA¹⁷-AKV:KEVQV:NMEEH:SXGXH, YVPKPXX:SRVKL:RSVK-AA¹⁷-AKV:KEVQV:NMEEH:SXGXH, TVPKPXX:SRVQL:RSVK-AA¹⁷-AKV:KEVQV:NMEEH:AXGXH, AVPKAXX:SRVKL:RSVK-AA¹⁷-AKV:KEVQV:NM EEH:AXGXH, KVGKAXX:SRVKL:RSVK-AA¹⁷-AKV:KEVQV:EGMSEEH:XGXR, KASKAXX:SRVKL:RSVK-AA¹⁷-AKV:KEVQV:GMEEH:EXGXR, GSAGPXX:SRVKM:RSVK-AA¹⁷-AKV:KEVQV:GMEEH:RXGXS, AAPASXX:SRVRL:RSVK-AA¹⁷-AKV:KEVQV:DMEEH:AXGXR, STPPTXX:SRVRL:RSVK-AA¹⁷-AKV:KEVQV:DMEEH:SXGXR, HVPKPXX:SRVKL:RSVK-AA¹⁷-AKV:KEVQV:NMEEH:SXGXH, RVPSTXX:SRVKT:RSVK-AA¹⁷-AKV:KEVQV:MIEEH:XGXL, ASAAPXX:SRVAL:RSVK-AA¹⁷-AKV:KEVQV:MIEEH:XKXS, ASASPXX:SRVDL:RSVK-AA¹⁷-AKV:KEVQV:MIEEH:XKXS, ASASPXX:SRVD L:RSVK-AA¹⁷-AKV:KEVQV:MVEEH:XKXS, NDEGLEX:SRVEE:RSVK-AA¹⁷-AKV:KEVQV:FLEEH:KXEXR, NDEGLEX:SRVGQ:RSVK-AA¹⁷-AKV:KEVQV:LEEEH:QXEXR, RNVQXRP:SRVQL:RSVK-AA¹⁷-AKV:KEVQV:TLEEH:LAXKXE, KIPKAXX:VPTEL:RSVK-AA¹⁷-AKV:KEVQV:DMVVE:GXGXR, GIPEPXX:VPEKM:RSVK-AA¹⁷-AKV:KEVQV:NMTVE:SXAXR, S IPKAXX:VPTEL:RSVK-AA¹⁷-AKV:KEVQV:EMVVE:GXGXR, HVTKPTX:APTKL:RSVK-AA¹⁷-AKV:KEVQV:NMVVR:SXGXH, YVPKPXX:APTKL:RSVK-AA¹⁷-AKV:KEVQV:NMVVR:SXGXH, TVPKPXX:APTQL:RSVK-AA¹⁷-AKV:KEVQV:NMVVR:AXGXH, AVPKAXX:APTKL:RSVK-AA¹⁷-AKV:KEVQV:NMVVK:AXGXH, KVGKAXX:VPTKL:RSVK-AA¹⁷-AKV:KEVQV:EGMSVAE:XGXR, KASKAXX:VPTKL:RSVK-AA¹⁷-AKV:KEVQV:GMAVS:EXGXR, GSAGPXX:TPTKM:RSVK-AA¹⁷-AKV:KEVQV:GMVVD:RXGXS, AAPASXX:VPARL:RSVK-AA¹⁷-AKV:KEVQV:DMVVE:AXGXR, STPPTXX:VPTRL:RSVK-AA¹⁷-AKV:KEVQV:DMVVE:SXGXR, HVPKPXX:APTKL:RSVK-AA¹⁷-AKV:KEVQV:NMVVR:SXGXH, RVPSTXX:APVKT:RSVK-AA¹⁷-AKV:KEVQV:MIVEE:XGXL, ASAAPXX:VPQAL:RSVK-AA¹⁷-AKV:KEVQV:MIVRS:XKXS, ASASPXX:VSQDL:RSVK-AA¹⁷-AKV:KEVQV:MIVKS:XKXS, ASASPXX:VPQDL:RSVK-AA¹⁷-AKV:KEVQV: MVVKS:XKXS, NDEGLEX:VPTEE:RSVK-AA¹⁷-AKV:KEVQV:FLQHN:KXEXR, NDEGLEX:VPTGQ:RSVK-AA¹⁷-AKV:KEVQV:LEEHS:QXEXR, RNVQXRP:TQVQL:RSVK-AA¹⁷-AKV:KEVQV:TLEDH:LAXKXE, KI PKAXX:TQVEL:RPVQ-AA¹⁷-RKI:KKATV:DMEDH:GXGXR, GIPEPXX:TQVKM:RPVQ-AA¹⁷-RKI:KKATV:NMEDH:SXAXR, SIPKAXX:TQVEL:RPVQ-AA¹⁷-RKI:KKATV:EMEDH:GXGXR, HVTKPTX:TQVKL:RPVQ-AA¹⁷-RKI:KKATV:NMEDH:SXGXH, YVPKPXX:TQVKL:RPVQ-AA¹⁷-RKI:KKATV:NMEDH:SXGXH, TVPKPXX:TQVQL:RPVQ-AA¹⁷-RKI:KKATV:NMEDH:AXGXH, AVPKAXX:TQVKL:RPVQ-AA¹⁷-RKI:KKATV:NMEDH:AXGXH, KVGKAXX:TQVKL:RPVQ-AA¹⁷-RKI:KKATV:EGMSEDH:XGXR, KASKAXX:TQVKL:RPVQ-AA¹⁷-RKI:KKATV:GMEDH:EXGXR, GSAGPXX:TQVKM:RPVQ-AA¹⁷-RKI:KKATV:GMEDH:RXGXS, AAPASXX:TQVRL:RPVQ-AA¹⁷-RKI:KKATV:DMEDH:AXGXR, STPPTXX:TQVRL:RPVQ-AA¹⁷-RKI:KKATV:DMEDH:SXGXR, HVPKPXX:TQVKL:RPVQ-AA¹⁷-RKI:KKATV:NMEDH:SXGXH, RVPSTXX:TQVKT:RPVQ-AA¹⁷-RKI:KKATV:MIEDH:XGXL, ASAAPXX:TQVAL:RPVQ-AA¹⁷-RKI:KKATV:MIEDH:XKXS, ASASPXX:TQVDL:RPVQ-AA¹⁷-RKI:KKATV:MIEDH:XKXS, ASASPXX:TQVDL:RPVQ-AA¹⁷-RKI:KKATV:MVEDH:XKXS, NDEGLEX:TQVEE:RPVQ-AA¹⁷-RKI:KKATV:FLEDH:KXEXR, NDEGLEX:TQVGQ:RPVQ-AA¹⁷-RKI:KKATV:LEEDH:QXEXR, SSVKXQP:TQVHH:RPVQ-AA¹⁷-RKI:KKATV:RLEDH:LEXAXA, KIPKAXX:VPTEL:RPVQ-AA¹⁷-RKI:KKATV:DMVVE:GXGXR, GIPEPXX:VPEKM:RPVQ-AA¹⁷-RKI:KKATV:NMTVE:SXAXR, SIPKAXX:VPTEL:RPVQ-AA¹⁷-RKI:KKATV:EMVVE:GXGXR, HVTKPTX:APTKL:RPVQ-AA¹⁷-RKI:KKATV:NMVVR:SXGXH, YVPKPXX:APTKL:RPVQ-AA¹⁷-RKI:KKATV:NMVVR:SXGXH, TVPKPXX:APTQL:RPVQ-AA¹⁷-RKI:KKATV:NMVVR:AXGXH, AVPKAXX:APTKL:RPVQ-AA¹⁷-RKI:KKATV:NMVVK:AXGXH, KVGKAXX:VPTKL:RPVQ-AA¹⁷-RKI:KKATV:EGMSVAE:XGXR, KASKAXX:VPTKL:RPVQ-AA¹⁷-RKI:KKATV:GMAVS:EXGXR, GSAGPXX:TPTKM:RPVQ-AA¹⁷-RKI:KKATV:GMVVD:RXGXS, AAPASXX:VPARL:RPVQ-AA¹⁷-RKI:KKATV:DMVVE:AXGXR, STPPTXX:VPTRL:RPVQ-AA¹⁷-RKI:KKATV:DMVVE:SXGXR, HVPKPXX:APTKL:RPVQ-AA¹⁷-RKI:KKATV:NMVVR:SXGXH, RVPSTXX:APVKT:RPVQ-AA¹⁷-RKI:KKATV:MIVEE:XGXL, ASAAPXX:VPQAL:RPVQ-AA¹⁷-RKI:KKATV:MIVRS:XKXS, ASASPXX:VSQDL:RPVQ-AA¹⁷-RKI:KKATV:MIVKS:XKXS, ASASPXX:VPQDL:RPVQ-AA¹⁷-RKI:KKATV:MVVKS:XKXS, NDEGLEX:VPTEE:RPVQ-AA¹⁷-RKI:KKATV:FLQHN:KXEXR, NDEGLEX:VPTGQ:RPVQ-AA¹⁷-RKI:KKATV:LEEHS:QXEXR and SSVKXQP:SRVHH:RPVQ-AA¹⁷-RKI:KKATV:RLEEH:LEXAXA; and wherein AA¹⁷ is selected from the group consisting of G, A, V, L, I, P, F, M, W, T and S (in particular is selected from the group consisting of M, I, L, V and T). More particularly, the hexaplet PEP7:PEP5:PEP12:PEP2:PEP6:PEP8 is selected from the group consisting of GIPEPXX:VPTKM:SAIS-AA17-LYL:LKNYQ:NMVVE:SXAXR, HVTKPTX:VPTKL:SAIS-AA17-LYL:LKNYQ:NMVVE:SXGXH, YVPKPXX:VPTKL:SAIS-AA17-LYL:LKNYQ:NMVVE:SXGXH, TVPKPXX:VPTQL:SAIS-AA17-LYL:LKNYQ:NMVVE:AXGXH, AVPKAXX:VPTKL:SAIS-AA17-LYL:LKNYQ:NMVVE:AXGXH, KVGKAXX:VPTKL:SAIS-AA17-LYL:LKNYQ:EGMSVVE:XGXR, KASKAXX:VPTKL:SAIS-AA17-LYL:LKNYQ:GMVVE:EXGXR, GSAG PXX:VPTKM:SAIS-AA17-LYL:LKNYQ:GMVVE:RXGXS, AAPASXX:VPTRL:SAIS-AA17-LYL:LKNYQ:DMVVE:AXGXR, STPPTXX:VPTRL:SAIS-AA17-LYL:LKNYQ:DMVVE:SXGXR, HVPKPXX:VPTKL:SAIS-AA17-LYL:LKNYQ:NMVVE:SXGXH, RVPSTXX:VPTKT:SAIS-AA17-LYL:LKNYQ:MIVVE:XGXL, ASAAPXX:VPTAL:SAIS-AA17-LYL:LKNYQ:MIVVE:XKXS, ASASPXX:VPTDL:SAIS-AA17-LYL:LKNYQ:MIVVE:XKXS, ASASPXX:VPTDL:SAIS-AA17-LYL:LKNYQ:MVVVE:XKXS, GIPEPXX:VPEKM:SAIS-AA17-LYL:LKNYQ:NMTVE:SXAXR, HVTKPTX:APTKL:SAIS-AA17-LYL:LKNYQ:NMVVR:SXGXH, YVPKPXX:APTKL:SAIS-AA17-LYL:LKNYQ:NMVVR:SXGXH, TVPKPXX:APTQL:SAIS-AA17-LYL:LKNYQ:NMVVR:AXGXH, AVPKAXX:APTKL:SAIS-AA17-LYL:LKNYQ:NMVVK:AXGXH, KVGKAXX:VPTKL:SAIS-AA17-LYL:LKNYQ:EGMSVAE:XGXR, KASKAXX:VPTKL:SAIS-AA17-LYL:LKNYQ:GMAVS:EXGXR, GSAGPXX:TPTKM:SAIS-AA17-LYL:LKNYQ:GMVVD:RXGXS, AAPASXX:VPARL:SAIS-AA17-LYL:LKNYQ:DMVVE:AXGXR, HVPKPXX:APTKL:SAIS-AA¹⁷-LYL:LKNYQ:NMVVR:SXGXH, RVPSTXX:APVKT:SAIS-AA17-LYL:LKNYQ:MIVEE:XGXL, ASAAPXX:VPQAL:SAIS-AA17-LYL:LKNYQ:MIVRS:XKXS, ASASPXX:VSQDL:SAIS-AA17-LYL:LKNYQ:MIVKS:XKXS, ASASPXX:VPQDL:SAIS-AA17-LYL:LKNYQ:MVVKS:XKXS, NDEGLEX:VPTEE:SAIS-AA17-LYL:LKNYQ:FLQHN:KXEXR, NDEGLEX:VPTGQ:SAIS-AA17-LYL:LKNYQ:LEEHS:QXEXR, SSVKXQP:SRVHH:SAIS-AA17-LYL:LKNYQ:RLEEH:LEXAXA, RNVQXRP:TQVQL:SAIS-AA17-LYL:LKNYQ:TLEDH:LAXKXE, KIPKAXX:VPEEL:SSLS-AA17-LFF:LKVYP:DMTVE:GXGXR, SIPKAXX:VPEEL:SSLS-AA17-LFF:LKVYP:EMTVE:GXGXR, HVTKPTX:VPEKL:SSLS-AA17-LFF:LKVYP:NMTVE:SXGXH, YVPKPXX:VPEKL:SSLS-AA17-LFF:LKVYP:NMTVE:SXGXH, TVPKPXX:VPEQL:SSLS-AA17-LFF:LKVYP:NMTVE:AXGXH, AVPKAXX:VPEKL:SSLS-AA17-LFF:LKVYP:NMTVE:AXGXH, KVGKAXX:VPEKL:SSLS-AA17-LFF:LKVYP:EGMSTVE:XGXR, KASKAXX:VPEKL:SSLS-AA17-LFF:LKVYP:GMTVE:EXGXR, GSAGPXX:VPEKM:SSLS-AA17-LFF:LKVYP:GMTVE:RXGXS, AAPASXX:VPERL:SSLS-AA17-LFF:LKVYP:DMTVE:AXGXR, STPPTXX:VPERL:SSLS-AA17-LFF:LKVYP:DMTVE:SXGXR, HVPKPXX:VPEKL:SSLS-AA17-LFF:LKVYP:NMTVE:SXGXH, RVPSTXX:VPEKT:SSLS-AA17-LFF:LKVYP:MITVE:XGXL, ASAAPXX:VPEAL:SSLS-AA17-LFF:LKVYP:MITVE:XKXS, ASASPXX:VPEDL:SSLS-AA17-LFF:LKVYP:MITVE:XKXS, ASASPXX:VPEDL:SSLS-AA17-LFF:LKVYP:MVTVE:XKXS, KIPKAXX:VPTEL:SSLS-AA17-LFF:LKVYP:DMVVE:GXGXR, SIPKAXX:VPTEL:SSLS-AA17-LFF:LKVYP:EMVVE:GXGXR, HVTKPTX:APTKL:SSLS-AA17-LFF:LKVYP:NMVVR:SXGXH, YVPKPXX:APTKL:SSLS-AA17-LFF:LKVYP:NMVVR:SXGXH, TVPKPXX:APTQL:SSLS-AA17-LFF:LKVYP:NMVVR:AXGXH, AVPKAXX:APTKL:SSLS-AA17-LFF:LKVYP:NMVVK:AXGXH, KVGKAXX:VPTKL:SSLS-AA17-LFF:LKVYP:EGMSVAE:XGXR, KASKAXX:VPTKL:SSLS-AA17-LFF:LKVYP:GMAVS:EXGXR, GSAGPXX:TPTKM:SSLS-AA17-LFF:LKVYP:GMVVD:RXGXS, AAPASXX:VPARL:SSLS-AA17-LFF:LKVYP:DMVVE:AXGXR, STPPTXX:VPTRL:SSLS-AA17-LFF:LKVYP:DMVVE:SXGXR, HVPKPXX:APTKL:SSLS-AA17-LFF:LKVYP:NMVVR:SXGXH, RVPSTXX:APVKT:SSLS-AA17-LFF:LKVYP:MIVEE:XGXL, ASAAPXX:VPQAL:SSLS-AA17-LFF:LKVYP:MIVRS:XKXS, ASASPXX:VSQDL:SSLS-AA17-LFF:LKVYP:MIVKS:XKXS, ASASPXX:VPQDL:SSLS-AA17-LFF:LKVYP:MVVKS:XKXS, NDEGLEX:VPTEE:SSLS-AA17-LFF:LKVYP:FLQHN:KXEXR, NDEGLEX:VPTGQ:SSLS-AA17-LFF:LKVYP:LEEHS:QXEXR, SSVKXQP:SRVHH:SSLS-AA17-LFF:LKVYP:RLEEH:LEXAXA, RNVQXRP:TQVQL:SSLS-AA17-LFF:LKVYP:TLEDH:LAXKXE, KIPKAXX:APTEL:NAIS-AA17-LYF:LKKYR:DMVVR:GXGXR, GIPEPXX:APTKM:NAIS-AA17-LYF:LKKYR:NMVVR:SXAXR, SIPKAXX:APTEL:NAIS-AA17-LYF:LKKYR:EMVVR:GXGXR, AVPKAXX:APTKL:NAIS-AA17-LYF:LKKYR:NMVVR:AXGXH, KVGKAXX:APTKL:NAIS-AA17-LYF:LKKYR:EGMSVVR:XGXR, KASKAXX:APTKL:NAIS-AA17-LYF:LKKYR:GMVVR:EXGXR, GSAGPXX:APTKM:NAIS-AA17-LYF:LKKYR:GMVVR:RXGXS, AAPASXX:APTRL:NAIS-AA17-LYF:LKKYR:DMVVR:AXGXR, STPPTXX:APTRL:NAIS-AA17-LYF:LKKYR:DMVVR:SXGXR, RVPSTXX:APTKT:NAIS-AA17-LYF:LKKYR:MIVVR:XGXL, ASAAPXX:APTAL:NAIS-AA17-LYF:LKKYR:MIVVR:XKXS, ASASPXX:APTDL:NAIS-AA17-LYF:LKKYR:MIVVR:XKXS, ASASPXX:APTDL:NAIS-AA17-LYF:LKKYR:MVVVR:XKXS, KIPKAXX:VPTEL:NAIS-AA17-LYF:LKKYR:DMVVE:GXGXR, GIPEPXX:VPEKM:NAIS-AA17-LYF:LKKYR:NMTVE:SXAXR, SIPKAXX:VPTEL:NAIS-AA17-LYF:LKKYR:EMVVE:GXGXR, AVPKAXX:APTKL:NAIS-AA17-LYF:LKKYR:NMVVK:AXGXH, KVG KAXX:VPTKL:NAIS-AA17-LYF:LKKYR:EGMSVAE:XGXR, KASKAXX:VPTKL:NAIS-AA17-LYF:LKKYR:GMAVS:EXGXR, GSAG PXX:TPTKM:NAIS-AA17-LYF:LKKYR:GMVVD:RXGXS, AAPASXX:VPARL:NAIS-AA17-LYF:LKKYR:DMVVE:AXGXR, STPPTXX:VPTRL:NAIS-AA17-LYF:LKKYR:DMVVE:SXGXR, RVPSTXX:APVKT:NAIS-AA17-LYF:LKKYR:MIVEE:XGXL, ASAAPXX:VPQAL:NAIS-AA17-LYF:LKKYR:MIVRS:XKXS, ASASPXX:VSQDL:NAIS-AA17-LYF:LKKYR:MIVKS:XKXS, ASASPXX:VPQDL:NAIS-AA17-LYF:LKKYR:MVVKS:XKXS, NDEGLEX:VPTEE:NAIS-AA17-LYF:LKKYR:FLQHN:KXEXR, NDEGLEX:VPTGQ:NAIS-AA17-LYF:LKKYR:LEEHS:QXEXR, SSVKXQP:SRVHH:NAIS-AA17-LYF:LKKYR:RLEEH:LEXAXA, RNVQXRP:TQVQL:NAIS-AA17-LYF:LKKYR:TLEDH:LAXKXE, KIPKAXX:APTEL:SATS-AA17-LYY:LRKHR:DMVVK:GXGXR, GIPEPXX:APTKM:SATS-AA17-LYY:LRKHR:NMVVK:SXAXR, SIPKAXX:APTEL:SATS-AA17-LYY:LRKHR:EMVVK:GXGXR, HVTKPTX:APTKL:SATS-AA17-LYY:LRKHR:NMVVK:SXGXH, YVPKPXX:APTKL:SATS-AA17-LYY:LRKHR:NMVVK:SXGXH, TVPKPXX:APTQL:SATS-AA17-LYY:LRKHR:NMVVK:AXGXH, KVGKAXX:APTKL:SATS-AA17-LYY:LRKHR:EGMSVVK:XGXR, KASKAXX:APTKL:SATS-AA17-LYY:LRKHR:GMVVK:EXGXR, GSAGPXX:APTKM:SATS-AA17-LYY:LRKHR:GMVVK:RXGXS, AAPASXX:APTRL:SATS-AA17-LYY:LRKHR:DMVVK:AXGXR, STPPTXX:APTRL:SATS-AA17-LYY:LRKHR:DMVVK:SXGXR, HVPKPXX:APTKL:SATS-AA17-LYY:LRKHR:NMVVK:SXGXH, RVPSTXX:APTKT:SATS-AA17-LYY:LRKHR:MIVVK:XGXL, ASAAPXX:APTAL:SATS-AA17-LYY:LRKHR:MIVVK:XKXS, ASASPXX:APTDL:SATS-AA17-LYY:LRKHR:MIVVK:XKXS, ASASPXX:APTDL:SATS-AA17-LYY:LRKHR: MVVVK:XKXS, KIPKAXX:VPTEL:SATS-AA17-LYY:LRKHR:DMVVE:GXGXR, GIPEPXX:VPEKM:SATS-AA17-LYY:LRKHR:NMTVE:SXAXR, SIPKAXX:VPTEL:SATS-AA17-LYY:LRKHR:EMVVE:GXGXR, HVTKPTX:APTKL:SATS-AA17-LYY:LRKHR:NMVVR:SXGXH, YVPKPXX:APTKL:SATS-AA17-LYY:LRKHR:NMVVR:SXGXH, TVPKPXX:APTQL:SATS-AA17-LYY:LRKHR:NMVVR:AXGXH, KVGKAXX:VPTKL:SATS-AA17-LYY:LRKHR:EGMSVAE:XGXR, KASKAXX:VPTKL:SATS-AA17-LYY:LRKHR:GMAVS:EXGXR, GSAGPXX:TPTKM:SATS-AA17-LYY:LRKHR:GMVVD:RXGXS, AAPASXX:VPARL:SATS-AA17-LYY:LRKHR:DMVVE:AXGXR, STPPTXX:VPTRL:SATS-AA17-LYY:LRKHR:DMVVE:SXGXR, HVPKPXX:APTKL:SATS-AA17-LYY:LRKHR:NMVVR:SXGXH, RVPSTXX:APVKT:SATS-AA17-LYY:LRKHR:MIVEE:XGXL, ASAAPXX:VPQAL:SATS-AA17-LYY:LRKHR:MIVRS:XKXS, ASASPXX:VSQDL:SATS-AA17-LYY:LRKHR:MIVKS:XKXS, ASASPXX:VPQDL:SATS-AA17-LYY:LRKHR:MVVKS:XKXS, NDEGLEX:VPTEE:SATS-AA17-LYY:LRKHR:FLQHN:KXEXR, NDEGLEX:VPTGQ:SATS-AA17-LYY:LRKHR:LEEHS:QXEXR, SSVKXQP:SRVHH:SATS-AA17-LYY:LRKHR:RLEEH:LEXAXA, RNVQXRP:TQVQL:SATS-AA17-LYY:LRKHR:TLEDH:LAXKXE, KIPKAXX:VPTEL:SPIS-AA17-LYK:LKYHY:DMVAE:GXGXR, GIPEPXX:VPTKM:SPIS-AA17-LYK:LKYHY:NMVAE:SXAXR, SIPKAXX:VPTEL:SPIS-AA17-LYK:LKYHY:EMVAE:GXGXR, HVTKPTX:VPTKL:SPIS-AA17-LYK:LKYHY:NMVAE:SXGXH, YVPKPXX:VPTKL:SPIS-AA17-LYK:LKYHY:NMVAE:SXGXH, TVPKPXX:VPTQL:SPIS-AA17-LYK:LKYHY:NMVAE:AXGXH, AVPKAXX:VPTKL:SPIS-AA17-LYK:LKYHY:NMVAE:AXGXH, KASKAXX:VPTKL:SPIS-AA17-LYK:LKYHY:GMVAE:EXGXR, GSAGPXX:VPTKM:SPIS-AA17-LYK:LKYHY:GMVAE:RXGXS, AAPASXX:VPTRL:SPIS-AA17-LYK:LKYHY:DMVAE:AXGXR, STPPTXX:VPTRL:SPIS-AA17-LYK:LKYHY:DMVAE:SXGXR, HVPKPXX:VPTKL:SPIS-AA17-LYK:LKYHY:NMVAE:SXGXH, RVPSTXX:VPTKT:SPIS-AA17-LYK:LKYHY:MIVAE:XGXL, ASAAPXX:VPTAL:SPIS-AA17-LYK:LKYHY:MIVAE:XKXS, ASASPXX:VPTDL:SPIS-AA17-LYK:LKYHY:MIVAE:XKXS, ASASPXX:VPTDL:SPIS-AA17-LYK:LKYHY:MVVAE:XKXS, KIPKAXX:VPTEL:SPIS-AA17-LYK:LKYHY:DMVVE:GXGXR, GIPEPXX:VPEKM:SPIS-AA17-LYK:LKYHY:NMTVE:SXAXR, SIPKAXX:VPTEL:SPIS-AA17-LYK:LKYHY:EMVVE:GXGXR, HVTKPTX:APTKL:SPIS-AA17-LYK:LKYHY:NMVVR:SXGXH, YVPKPXX:APTKL:SPIS-AA17-LYK:LKYHY:NMVVR:SXGXH, TVPKPXX:APTQL:SPIS-AA17-LYK:LKYHY:NMVVR:AXGXH, AVPKAXX:APTKL:SPIS-AA17-LYK:LKYHY:NMVVK:AXGXH, KASKAXX:VPTKL:SPIS-AA17-LYK:LKYHY:GMAVS:EXGXR, GSAGPXX:TPTKM:SPIS-AA17-LYK:LKYHY:GMVVD:RXGXS, AAPASXX:VPARL:SPIS-AA17-LYK:LKYHY:DMVVE:AXGXR, STPPTXX:VPTRL:SPIS-AA17-LYK:LKYHY:DMVVE:SXGXR, HVPKPXX:APTKL:SPIS-AA17-LYK:LKYHY:NMVVR:SXGXH, RVPSTXX:APVKT:SPIS-AA17-LYK:LKYHY:MIVEE:XGXL, ASAAPXX:VPQAL:SPIS-AA17-LYK:LKYHY:MIVRS:XKXS, ASASPXX:VSQDL:SPIS-AA17-LYK:LKYHY:MIVKS:XKXS, ASASPXX:VPQDL:SPIS-AA17-LYK:LKYHY:MVVKS:XKXS, NDEGLEX:VPTEE:SPIS-AA17-LYK:LKYHY:FLQHN:KXEXR, NDEGLEX:VPTGQ:SPIS-AA17-LYK:LKYHY:LEEHS:QXEXR, SSVKXQP:SRVHH:SPIS-AA17-LYK:LKYHY:RLEEH:LEXAXA, RNVQXRP:TQVQL:SPIS-AA17-LYK:LKYHY:TLEDH:LAXKXE, KIPKAXX:VPTEL:EPIS-AA17-LYL:KFKYE:DMAVS:GXGXR, GIPEPXX:VPTKM:EPIS-AA17-LYL:KFKYE:NMAVS:SXAXR, SIPKAXX:VPTEL:EPIS-AA17-LYL:KFKYE:EMAVS:GXGXR, HVTKPTX:VPTKL:EPIS-AA17-LYL:KFKYE:NMAVS:SXGXH, YVPKPXX:VPTKL:EPIS-AA17-LYL:KFKYE:NMAVS:SXGXH, TVPKPXX:VPTQL:EPIS-AA17-LYL:KFKYE:NMAVS:AXGXH, AVPKAXX:VPTKL:EPIS-AA17-LYL:KFKYE:NMAVS:AXGXH, KVGKAXX:VPTKL:EPIS-AA17-LYL:KFKYE:EGMSAVS:XGXR, GSAGPXX:VPTKM:EPIS-AA17-LYL:KFKYE:GMAVS:RXGXS, AAPASXX:VPTRL:EPIS-AA17-LYL:KFKYE:DMAVS:AXGXR, STPPTXX:VPTRL:EPIS-AA17-LYL:KFKYE:DMAVS:SXGXR, HVPKPXX:VPTKL:EPIS-AA17-LYL:KFKYE:NMAVS:SXGXH, RVPSTXX:VPTKT:EPIS-AA17-LYL:KFKYE:MIAVS:XGXL, ASAAPXX:VPTAL:EPIS-AA17-LYL:KFKYE:MIAVS:XKXS, ASASPXX:VPTDL:EPIS-AA17-LYL:KFKYE:MIAVS:XKXS, ASASPXX:VPTDL:EPIS-AA17-LYL:KFKYE:MVAVS:XKXS, KIPKAXX:VPTEL:EPIS-AA17-LYL:KFKYE:DMVVE:GXGXR, GIPEPXX:VPEKM:EPIS-AA17-LYL:KFKYE:NMTVE:SXAXR, SIPKAXX:VPTEL:EPIS-AA17-LYL:KFKYE:EMVVE:GXGXR, HVTKPTX:APTKL:EPIS-AA17-LYL:KFKYE:NMVVR:SXGXH, YVPKPXX:APTKL:EPIS-AA17-LYL:KFKYE:NMVVR:SXGXH, TVPKPXX:APTQL:EPIS-AA17-LYL:KFKYE:NMVVR:AXGXH, AVPKAXX:APTKL:EPIS-AA17-LYL:KFKYE:NMVVK:AXGXH, KVGKAXX:VPTKL:EPIS-AA17-LYL:KFKYE:EGMSVAE:XGXR, GSAGPXX:TPTKM:EPIS-AA17-LYL:KFKYE:GMVVD:RXGXS, AAPASXX:VPARL:EPIS-AA17-LYL:KFKYE:DMVVE:AXGXR, STPPTXX:VPTRL:EPIS-AA17-LYL:KFKYE:DMVVE:SXGXR, HVPKPXX:APTKL:EPIS-AA17-LYL:KFKYE:NMVVR:SXGXH, RVPSTXX:APVKT:EPIS-AA17-LYL:KFKYE:MIVEE:XGXL, ASAAPXX:VPQAL:EPIS-AA17-LYL:KFKYE:MIVRS:XKXS, ASASPXX:VSQDL:EPIS-AA17-LYL:KFKYE:MIVKS:XKXS, ASASPXX:VPQDL:EPIS-AA17-LYL:KFKYE:MVVKS:XKXS, NDEGLEX:VPTEE:EPIS-AA17-LYL:KFKYE:FLQHN:KXEXR, NDEGLEX:VPTGQ:EPIS-AA17-LYL:KFKYE:LEEHS:QXEXR, SSVKXQP:SRVHH:EPIS-AA17-LYL:KFKYE:RLEEH:LEXAXA, RNVQXRP:TQVQL:EPIS-AA17-LYL:KFKYE:TLEDH:LAXKXE, KIPKAXX:TPTEL:SPIN-AA17-LYF:YGKIP:DMVVD:GXGXR, GIPEPXX:TPTKM:SPIN-AA17-LYF:YGKIP:NMVVD:SXAXR, SIPKAXX:TPTEL:SPIN-AA17-LYF:YGKIP:EMVVD:GXGXR, HVTKPTX:TPTKL:SPIN-AA17-LYF:YGKIP:NMVVD:SXGXH, YVPKPXX:TPTKL:SPIN-AA17-LYF:YGKIP:NMVVD:SXGXH, TVPKPXX:TPTQL:SPIN-AA17-LYF:YGKIP:NMVVD:AXGXH, AVPKAXX:TPTKL:SPIN-AA17-LYF:YGKIP:NMVVD:AXGXH, KVGKAXX:TPTKL:SPIN-AA17-LYF:YGKIP:EGMSVVD:XGXR, KASKAXX:TPTKL:SPIN-AA17-LYF:YGKIP:GMVVD:EXGXR, AAPASXX:TPTRL:SPIN-AA17-LYF:YGKIP:DMVVD:AXGXR, STPPTXX:TPTRL:SPIN-AA17-LYF:YGKIP:DMVVD:SXGXR, HVPKPXX:TPTKL:SPIN-AA17-LYF:YGKIP:NMVVD:SXGXH, RVPSTXX:TPTKT:SPI N-AA17-LYF:YGKIP:MIVVD:XGXL, ASAAPXX:TPTAL:SPIN-AA17-LYF:YGKIP:MIVVD:XKXS, ASASPXX:TPTDL:SPIN-AA17-LYF:YGKIP:MIVVD:XKXS, ASASPXX:TPTDL:SPIN-AA17-LYF:YGKIP:MVVVD:XKXS, KIPKAXX:VPTEL:SPIN-AA17-LYF:YGKIP:DMVVE:GXGXR, GIPEPXX:VPEKM:SPIN-AA17-LYF:YGKIP:NMTVE:SXAXR, SIPKAXX:VPTEL:SPIN-AA17-LYF:YGKIP:EMVVE:GXGXR, HVTKPTX:APTKL:SPIN-AA17-LYF:YGKIP:NMVVR:SXGXH, YVPKPXX:APTKL:SPIN-AA17-LYF:YGKIP:NMVVR:SXGXH, TVPKPXX:APTQL:SPIN-AA17-LYF:YGKIP:NMVVR:AXGXH, AVPKAXX:APTKL:SPIN-AA17-LYF:YGKIP:NMVVK:AXGXH, KVGKAXX:VPTKL:SPIN-AA17-LYF:YGKIP:EGMSVAE:XGXR, KASKAXX:VPTKL:SPI N-AA17-LYF:YGKIP:GMAVS:EXGXR, AAPASXX:VPARL:SPIN-AA17-LYF:YGKIP:DMVVE:AXGXR, STPPTXX:VPTRL:SPIN-AA17-LYF:YGKIP:DMVVE:SXGXR, HVPKPXX:APTKL:SPIN-AA17-LYF:YGKIP:NMVVR:SXGXH, RVPSTXX:APVKT:SPIN-AA17-LYF:YGKIP:MIVEE:XGXL, ASAAPXX:VPQAL:SPIN-AA17-LYF:YGKIP:MIVRS:XKXS, ASASPXX:VSQDL:SPIN-AA17-LYF:YGKIP:MIVKS:XKXS, ASASPXX:VPQDL:SPIN-AA17-LYF:YGKIP:MVVKS:XKXS, NDEGLEX:VPTEE:SPIN-AA17-LYF:YGKIP:FLQHN:KXEXR, NDEGLEX:VPTGQ:SPIN-AA17-LYF:YGKIP:LEEHS:QXEXR, SSVKXQP:SRVHH:SPIN-AA17-LYF:YGKIP:RLEEH:LEXAXA, RNVQXRP:TQVQL:SPIN-AA17-LYF:YGKIP:TLEDH:LAXKXE, KIPKAXX:VPAEL:SPIS-AA17-LYI:YKQYE:DMVVE:GXGXR, GIPEPXX:VPAKM:SPIS-AA17-LYI:YKQYE:NMVVE:SXAXR, SIPKAXX:VPAEL:SPIS-AA17-LYI:YKQYE:EMVVE:GXGXR, HVTKPTX:VPAKL:SPIS-AA17-LYI:YKQYE:NMVVE:SXGXH, YVPKPXX:VPAKL:SPIS-AA17-LYI:YKQYE:NMVVE:SXGXH, TVPKPXX:VPAQL:SPIS-AA17-LYI:YKQYE:NMVVE:AXGXH, AVPKAXX:VPAKL:SPIS-AA17-LYI:YKQYE:NMVVE:AXGXH, KVGKAXX:VPAKL:SPIS-AA17-LYI:YKQYE:EGMSVVE:XGXR, KASKAXX:VPAKL:SPIS-AA17-LYI:YKQYE:GMVVE:EXGXR, GSAGPXX:VPAKM:SPIS-AA17-LYI:YKQYE:GMVVE:RXGXS, STPPTXX:VPARL:SPIS-AA17-LYI:YKQYE:DMVVE:SXGXR, HVPKPXX:VPAKL:SPIS-AA17-LYI:YKQYE:NMVVE:SXGXH, RVPSTXX:VPAKT:SPIS-AA17-LYI:YKQYE:MIVVE:XGXL, ASAAPXX:VPAAL:SPIS-AA17-LYI:YKQYE:MIVVE:XKXS, ASASPXX:VPADL:SPIS-AA17-LYI:YKQYE:MIVVE:XKXS, ASASPXX:VPADL:SPIS-AA17-LYI:YKQYE:MVVVE:XKXS, KIPKAXX:VPTEL:SPIS-AA17-LYI:YKQYE:DMVVE:GXGXR, GIPEPXX:VPEKM:SPIS-AA17-LYI:YKQYE:NMTVE:SXAXR, SIPKAXX:VPTEL:SPIS-AA17-LYI:YKQYE:EMVVE:GXGXR, HVTKPTX:APTKL:SPIS-AA17-LYI:YKQYE:NMVVR:SXGXH, YVPKPXX:APTKL:SPIS-AA17-LYI:YKQYE:NMVVR:SXGXH, TVPKPXX:APTQL:SPIS-AA17-LYI:YKQYE:NMVVR:AXGXH, AVPKAXX:APTKL:SPIS-AA17-LYI:YKQYE:NMVVK:AXGXH, KVGKAXX:VPTKL:SPIS-AA17-LYI:YKQYE:EGMSVAE:XGXR, KASKAXX:VPTKL:SPIS-AA17-LYI:YKQYE:GMAVS:EXGXR, GSAGPXX:TPTKM:SPIS-AA17-LYI:YKQYE:GMVVD:RXGXS, STPPTXX:VPTRL:SPIS-AA17-LYI:YKQYE:DMVVE:SXGXR, HVPKPXX:APTKL:SPIS-AA17-LYI:YKQYE:NMVVR:SXGXH, RVPSTXX:APVKT:SPIS-AA17-LYI:YKQYE:MIVEE:XGXL, ASAAPXX:VPQAL:SPIS-AA17-LYI:YKQYE:MIVRS:XKXS, ASASPXX:VSQDL:SPIS-AA17-LYI:YKQYE:MIVKS:XKXS, ASASPXX:VPQDL:SPIS-AA17-LYI:YKQYE:MVVKS:XKXS, NDEGLEX:VPTEE:SPIS-AA17-LYI:YKQYE:FLQHN:KXEXR, NDEGLEX:VPTGQ:SPIS-AA17-LYI:YKQYE:LEEHS:QXEXR, SSVKXQP:SRVHH:SPIS-AA17-LYI:YKQYE:RLEEH:LEXAXA, RNVQXRP:TQVQL:SPIS-AA17-LYI:YKQYE:TLEDH:LAXKXE, KIPKAXX:VPTEL:SPIS-AA17-LFI:YKQYE:DMVVE:GXGXR, GIPEPXX:VPTKM:SPIS-AA17-LFI:YKQYE:NMVVE:SXAXR, SIPKAXX:VPTEL:SPIS-AA17-LFI:YKQYE:EMVVE:GXGXR, HVTKPTX:VPTKL:SPIS-AA17-LFI:YKQYE:NMVVE:SXGXH, YVPKPXX:VPTKL:SPIS-AA17-LFI:YKQYE:NMVVE:SXGXH, TVPKPXX:VPTQL:SPIS-AA17-LFI:YKQYE:NMVVE:AXGXH, AVPKAXX:VPTKL:SPIS-AA17-LFI:YKQYE:NMVVE:AXGXH, KVGKAXX:VPTKL:SPIS-AA17-LFI:YKQYE:EGMSVVE:XGXR, KASKAXX:VPTKL:SPIS-AA17-LFI:YKQYE:GMVVE:EXGXR, GSAGPXX:VPTKM:SPIS-AA17-LFI:YKQYE:GMVVE:RXGXS, AAPASXX:VPTRL:SPIS-AA17-LFI:YKQYE:DMVVE:AXGXR, HVPKPXX:VPTKL:SPIS-AA17-LFI:YKQYE:NMVVE:SXGXH, RVPSTXX:VPTKT:SPIS-AA17-LFI:YKQYE:MIVVE:XGXL, ASAAPXX:VPTAL:SPIS-AA17-LFI:YKQYE:MIVVE:XKXS, ASASPXX:VPTDL:SPIS-AA17-LFI:YKQYE:MIVVE:XKXS, ASASPXX:VPTDL:SPIS-AA17-LFI:YKQYE:MVVVE:XKXS, GIPEPXX:VPEKM:SPIS-AA17-LFI:YKQYE:NMTVE:SXAXR, HVTKPTX:APTKL:SPIS-AA17-LFI:YKQYE:NMVVR:SXGXH, YVPKPXX:APTKL:SPIS-AA17-LFI:YKQYE:NMVVR:SXGXH, TVPKPXX:APTQL:SPIS-AA17-LFI:YKQYE:NMVVR:AXGXH, AVPKAXX:APTKL:SPIS-AA17-LFI:YKQYE:NMVVK:AXGXH, KVGKAXX:VPTKL:SPIS-AA17-LFI:YKQYE:EGMSVAE:XGXR, KASKAXX:VPTKL:SPIS-AA17-LFI:YKQYE:GMAVS:EXGXR, GSAGPXX:TPTKM:SPIS-AA17-LFI:YKQYE:GMVVD:RXGXS, AAPASXX:VPARL:SPIS-AA17-LFI:YKQYE:DMVVE:AXGXR, HVPKPXX:APTKL:SPIS-AA17-LFI:YKQYE:NMVVR:SXGXH, RVPSTXX:APVKT:SPIS-AA17-LFI:YKQYE:MIVEE:XGXL, ASAAPXX:VPQAL:SPIS-AA17-LFI:YKQYE:MIVRS:XKXS, ASASPXX:VSQDL:SPIS-AA17-LFI:YKQYE:MIVKS:XKXS, ASASPXX:VPQDL:SPIS-AA17-LFI:YKQYE:MVVKS:XKXS, NDEGLEX:VPTEE:SPIS-AA17-LFI:YKQYE:FLQHN:KXEXR, NDEGLEX:VPTGQ:SPIS-AA17-LFI:YKQYE:LEEHS:QXEXR, SSVKXQP:SRVHH:SPIS-AA17-LFI:YKQYE:RLEEH:LEXAXA, RNVQXRP:TQVQL:SPIS-AA17-LFI:YKQYE:TLEDH:LAXKXE, KIPKAXX:APVEL:KPLS-AA17-LYV:DHHKD:DMVEE:GXGXR, GIPEPXX:APVKM:KPLS-AA17-LYV:DHHKD:NMVEE:SXAXR, SIPKAXX:APVEL:KPLS-AA17-LYV:DHHKD:EMVEE:GXGXR, HVTKPTX:APVKL:KPLS-AA17-LYV:DHHKD:NMVEE:SXGXH, YVPKPXX:APVKL:KPLS-AA17-LYV:DHHKD:NMVEE:SXGXH, TVPKPXX:APVQL:KPLS-AA17-LYV:DHHKD:NMVEE:AXGXH, AVPKAXX:APVKL:KPLS-AA17-LYV:DHHKD:NMVEE:AXGXH, KVGKAXX:APVKL:KPLS-AA17-LYV:DHHKD:EGMSVEE:XGXR, KASKAXX:APVKL:KPLS-AA17-LYV:DHHKD:GMVEE:EXGXR, GSAGPXX:APVKM:KPLS-AA17-LYV:DHHKD:GMVEE:RXGXS, AAPASXX:APVRL:KPLS-AA17-LYV:DHHKD:DMVEE:AXGXR, STPPTXX:APVRL:KPLS-AA17-LYV:DHHKD:DMVEE:SXGXR, HVPKPXX:APVKL:KPLS-AA17-LYV:DHHKD:NMVEE:SXGXH, ASAAPXX:APVAL:KPLS-AA17-LYV:DHHKD:MIVEE:XKXS, ASASPXX:APVDL:KPLS-AA17-LYV:DHHKD:MIVEE:XKXS, ASASPXX:APVDL:KPLS-AA17-LYV:DHHKD:MVVEE:XKXS, KIPKAXX:VPTEL:KPLS-AA17-LYV:DHHKD:DMVVE:GXGXR, GIPEPXX:VPEKM:KPLS-AA17-LYV:DHHKD:NMTVE:SXAXR, SIPKAXX:VPTEL:KPLS-AA17-LYV:DHHKD:EMVVE:GXGXR, HVTKPTX:APTKL:KPLS-AA17-LYV:DHHKD:NMVVR:SXGXH, YVPKPXX:APTKL:KPLS-AA17-LYV:DHHKD:NMVVR:SXGXH, TVPKPXX:APTQL:KPLS-AA17-LYV:DHHKD:NMVVR:AXGXH, AVPKAXX:APTKL:KPLS-AA17-LYV:DHHKD:NMVVK:AXGXH, KVGKAXX:VPTKL:KPLS-AA17-LYV:DHHKD:EGMSVAE:XGXR, KASKAXX:VPTKL:KPLS-AA17-LYV:DHHKD:GMAVS:EXGXR, GSAGPXX:TPTKM:KPLS-AA17-LYV:DHHKD:GMVVD:RXGXS, AAPASXX:VPARL:KPLS-AA17-LYV:DHHKD:DMVVE:AXGXR, STPPTXX:VPTRL:KPLS-AA17-LYV:DHHKD:DMVVE:SXGXR, HVPKPXX:APTKL:KPLS-AA17-LYV:DHHKD:NMVVR:SXGXH, ASAAPXX:VPQAL:KPLS-AA17-LYV:DHHKD:MIVRS:XKXS, ASASPXX:VSQDL:KPLS-AA17-LYV:DHHKD:MIVKS:XKXS, ASASPXX:VPQDL:KPLS-AA17-LYV:DHHKD:MVVKS:XKXS, NDEGLEX:VPTEE:KPLS-AA17-LYV:DHHKD:FLQHN:KXEXR, NDEGLEX:VPTGQ:KPLS-AA17-LYV:DHHKD:LEEHS:QXEXR, SSVKXQP:SRVHH:KPLS-AA17-LYV:DHHKD:RLEEH:LEXAXA, RNVQXRP:TQVQL:KPLS-AA17-LYV:DHHKD:TLEDH:LAXKXE, KIPKAXX:VPQEL:EPLP-AA17-VYY:EQLSN:DMVRS:GXGXR, GIPEPXX:VPQKM:EPLP-AA17-VYY:EQLSN:NMVRS:SXAXR, SIPKAXX:VPQEL:EPLP-AA17-VYY:EQLSN:EMVRS:GXGXR, HVTKPTX:VPQKL:EPLP-AA17-VYY:EQLSN:NMVRS:SXGXH, YVPKPXX:VPQKL:EPLP-AA17-VYY:EQLSN:NMVRS:SXGXH, TVPKPXX:VPQQL:EPLP-AA17-VYY:EQLSN:NMVRS:AXGXH, AVPKAXX:VPQKL:EPLP-AA17-VYY:EQLSN:NMVRS:AXGXH, KVGKAXX:VPQKL:EPLP-AA17-VYY:EQLSN:EGMSVRS:XGXR, KASKAXX:VPQKL:EPLP-AA17-VYY:EQLSN:GMVRS:EXGXR, GSAGPXX:VPQKM:EPLP-AA17-VYY:EQLSN:GMVRS:RXGXS, AAPASXX:VPQRL:EPLP-AA17-VYY:EQLSN:DMVRS:AXGXR, STPPTXX:VPQRL:EPLP-AA17-VYY:EQLSN:DMVRS:SXGXR, HVPKPXX:VPQKL:EPLP-AA17-VYY:EQLSN:NMVRS:SXGXH, RVPSTXX:VPQKT:EPLP-AA17-VYY:EQLSN:MIVRS:XGXL, ASASPXX:VPQDL:EPLP-AA17-VYY:EQLSN:MIVRS:XKXS, ASASPXX:VPQDL:EPLP-AA17-VYY:EQLSN:MVVRS:XKXS, KIPKAXX:VPTEL:EPLP-AA17-VYY:EQLSN:DMVVE:GXGXR, GIPEPXX:VPEKM:EPLP-AA17-VYY:EQLSN:NMTVE:SXAXR, SIPKAXX:VPTEL:EPLP-AA17-VYY:EQLSN:EMVVE:GXGXR, HVTKPTX:APTKL:EPLP-AA17-VYY:EQLSN:NMVVR:SXGXH, YVPKPXX:APTKL:EPLP-AA17-VYY:EQLSN:NMVVR:SXGXH, TVPKPXX:APTQL:EPLP-AA17-VYY:EQLSN:NMVVR:AXGXH, AVPKAXX:APTKL:EPLP-AA17-VYY:EQLSN:NMVVK:AXGXH, KVGKAXX:VPTKL:EPLP-AA17-VYY:EQLSN:EGMSVAE:XGXR, KASKAXX:VPTKL:EPLP-AA17-VYY:EQLSN:GMAVS:EXGXR, GSAGPXX:TPTKM:EPLP-AA17-VYY:EQLSN:GMVVD:RXGXS, AAPASXX:VPARL:EPLP-AA17-VYY:EQLSN:DMVVE:AXGXR, STPPTXX:VPTRL:EPLP-AA17-VYY:EQLSN:DMVVE:SXGXR, HVPKPXX:APTKL:EPLP-AA17-VYY:EQLSN:NMVVR:SXGXH, RVPSTXX:APVKT:EPLP-AA17-VYY:EQLSN:MIVEE:XGXL, ASASPXX:VSQDL:EPLP-AA17-VYY:EQLSN:MIVKS:XKXS, ASASPXX:VPQDL:EPLP-AA17-VYY:EQLSN:MVVKS:XKXS, NDEGLEX:VPTEE:EPLP-AA17-VYY:EQLSN:FLQHN:KXEXR, NDEGLEX:VPTGQ:EPLP-AA17-VYY:EQLSN:LEEHS:QXEXR, SSVKXQP:SRVHH:EPLP-AA17-VYY:EQLSN:RLEEH:LEXAXA, RNVQXRP:TQVQL:EPLP-AA17-VYY:EQLSN:TLEDH:LAXKXE, KIPKAXX:VSQEL:EPLT-AA17-LYY:EQLSN:DMVKS:GXGXR, GIPEPXX:VSQKM:EPLT-AA17-LYY:EQLSN:NMVKS:SXAXR, SIPKAXX:VSQEL:EPLT-AA17-LYY:EQLSN:EMVKS:GXGXR, HVTKPTX:VSQKL:EPLT-AA17-LYY:EQLSN:NMVKS:SXGXH, YVPKPXX:VSQKL:EPLT-AA17-LYY:EQLSN:NMVKS:SXGXH, TVPKPXX:VSQQL:EPLT-AA17-LYY:EQLSN:NMVKS:AXGXH, AVPKAXX:VSQKL:EPLT-AA17-LYY:EQLSN:NMVKS:AXGXH, KVGKAXX:VSQKL:EPLT-AA17-LYY:EQLSN:EGMSVKS:XGXR, KASKAXX:VSQKL:EPLT-AA17-LYY:EQLSN:GMVKS:EXGXR, GSAGPXX:VSQKM:EPLT-AA17-LYY:EQLSN:GMVKS:RXGXS, AAPASXX:VSQRL:EPLT-AA17-LYY:EQLSN:DMVKS:AXGXR, STPPTXX:VSQRL:EPLT-AA17-LYY:EQLSN:DMVKS:SXGXR, HVPKPXX:VSQKL:EPLT-AA17-LYY:EQLSN:NMVKS:SXGXH, RVPSTXX:VSQKT:EPLT-AA17-LYY:EQLSN:MIVKS:XGXL, ASAAPXX:VSQAL:EPLT-AA17-LYY:EQLSN:MIVKS:XKXS, ASASPXX:VSQDL:EPLT-AA17-LYY:EQLSN:MVVKS:XKXS, KIPKAXX:VPTEL:EPLT-AA17-LYY:EQLSN:DMVVE:GXGXR, GIPEPXX:VPEKM:EPLT-AA17-LYY:EQLSN:NMTVE:SXAXR, SIPKAXX:VPTEL:EPLT-AA17-LYY:EQLSN:EMVVE:GXGXR, HVTKPTX:APTKL:EPLT-AA17-LYY:EQLSN:NMVVR:SXGXH, YVPKPXX:APTKL:EPLT-AA17-LYY:EQLSN:NMVVR:SXGXH, TVPKPXX:APTQL:EPLT-AA17-LYY:EQLSN:NMVVR:AXGXH, AVPKAXX:APTKL:EPLT-AA17-LYY:EQLSN:NMVVK:AXGXH, KVGKAXX:VPTKL:EPLT-AA17-LYY:EQLSN:EGMSVAE:XGXR, KASKAXX:VPTKL:EPLT-AA17-LYY:EQLSN:GMAVS:EXGXR, GSAGPXX:TPTKM:EPLT-AA17-LYY:EQLSN:GMVVD:RXGXS, AAPASXX:VPARL:EPLT-AA17-LYY:EQLS N:DMVVE:AXGXR, STPPTXX:VPTRL:EPLT-AA17-LYY:EQLSN:DMVVE:SXGXR, HVPKPXX:APTKL:EPLT-AA17-LYY:EQLSN:NMVVR:SXGXH, RVPSTXX:APVKT:EPLT-AA17-LYY:EQLSN:MIVEE:XGXL, ASAAPXX:VPQAL:EPLT-AA17-LYY:EQLSN:MIVRS:XKXS, NDEGLEX:VPTEE:EPLT-AA17-LYY:EQLSN:FLQHN:KXEXR, NDEGLEX:VPTGQ:EPLT-AA17-LYY:EQLSN:LEEHS:QXEXR, SSVKXQP:SRVHH:EPLT-AA17-LYY:EQLSN:RLEEH:LEXAXA, RNVQXRP:TQVQL:EPLT-AA17-LYY:EQLSN:TLEDH:LAXKXE, KIPKAXX:VPQEL:EPLT-AA17-LYY:EQLSN:DMVKS:GXGXR, GIPEPXX:VPQKM:EPLT-AA17-LYY:EQLSN:NMVKS:SXAXR, SIPKAXX:VPQEL:EPLT-AA17-LYY:EQLSN:EMVKS:GXGXR, HVTKPTX:VPQKL:EPLT-AA17-LYY:EQLSN:NMVKS:SXGXH, YVPKPXX:VPQKL:EPLT-AA17-LYY:EQLSN:NMVKS:SXGXH, TVPKPXX:VPQQL:EPLT-AA17-LYY:EQLSN:NMVKS:AXGXH, AVPKAXX:VPQKL:EPLT-AA17-LYY:EQLSN:NMVKS:AXGXH, KVGKAXX:VPQKL:EPLT-AA17-LYY:EQLSN:EGMSVKS:XGXR, KASKAXX:VPQKL:EPLT-AA17-LYY:EQLSN:GMVKS:EXGXR, GSAGPXX:VPQKM:EPLT-AA17-LYY:EQLSN:GMVKS:RXGXS, AAPASXX:VPQRL:EPLT-AA17-LYY:EQLSN:DMVKS:AXGXR, STPPTXX:VPQRL:EPLT-AA17-LYY:EQLSN:DMVKS:SXGXR, HVPKPXX:VPQKL:EPLT-AA17-LYY:EQLSN:NMVKS:SXGXH, RVPSTXX:VPQKT:EPLT-AA17-LYY:EQLSN:MIVKS:XGXL, ASAAPXX:VPQAL:EPLT-AA17-LYY:EQLSN:MIVKS:XKXS, ASASPXX:VPQDL:EPLT-AA17-LYY:EQLSN:MIVKS:XKXS, NDEGLEX:VPTGQ:SNIT-AA17-QIM:IGEMS:LEQHN:QXEXR, KIPKAXX:VPTEL:SNIT-AA17-QIM:IGEMS:DMVVE:GXGXR, GIPEPXX:VPEKM:SNIT-AA17-QIM:IGEMS:NMTVE:SXAXR, SIPKAXX:VPTEL:SNIT-AA17-QIM:IGEMS:EMVVE:GXGXR, HVTKPTX:APTKL:SNIT-AA17-QIM:IGEMS:NMVVR:SXGXH, YVPKPXX:APTKL:SNIT-AA17-QIM:IGEMS:NMVVR:SXGXH, TVPKPXX:APTQL:SNIT-AA17-QIM:IGEMS:NMVVR:AXGXH, AVPKAXX:APTKL:SNIT-AA17-QIM:IGEMS:NMVVK:AXGXH, KVGKAXX:VPTKL:SNIT-AA17-QIM:IGEMS:EGMSVAE:XGXR, KASKAXX:VPTKL:SNIT-AA17-QIM:IGEMS:GMAVS:EXGXR, GSAGPXX:TPTKM:SNIT-AA17-QIM:IGEMS:GMVVD:RXGXS, AAPASXX:VPARL:SNIT-AA17-QIM:IGEMS:DMVVE:AXGXR, STPPTXX:VPTRL:SNIT-AA17-QIM:IGEMS:DMVVE:SXGXR, HVPKPXX:APTKL:SNIT-AA17-QIM:IGEMS:NMVVR:SXGXH, RVPSTXX:APVKT:SNIT-AA17-QIM:IGEMS:MIVEE:XGXL, ASAAPXX:VPQAL:SNIT-AA17-QIM:IGEMS:MIVRS:XKXS, ASASPXX:VSQDL:SNIT-AA17-QIM:IGEMS:MIVKS:XKXS, ASASPXX:VPQDL:SNIT-AA17-QIM:IGEMS:MVVKS:XKXS, NDEGLEX:VPTGQ:SNIT-AA17-QIM:IGEMS:LEEHS:QXEXR, SSVKXQP:SRVHH:SNIT-AA17-QIM:IGEMS:RLEEH:LEXAXA, RNVQXRP:TQVQL:SNIT-AA17-QIM:IGEMS:TLEDH:LAXKXE, NDEGLEX:VPTEE:SNIT-AA17-QIM:LGEMS:FLEHS:KXEXR, KIPKAXX:VPTEL:SNIT-AA17-QIM:LGEMS:DMVVE:GXGXR, GIPEPXX:VPEKM:SNIT-AA17-QIM:LGEMS:NMTVE:SXAXR, SIPKAXX:VPTEL:SNIT-AA17-QIM:LGEMS:EMVVE:GXGXR, HVTKPTX:APTKL:SNIT-AA17-QIM:LGEMS:NMVVR:SXGXH, YVPKPXX:APTKL:SNIT-AA17-QIM:LGEMS:NMVVR:SXGXH, TVPKPXX:APTQL:SNIT-AA17-QIM:LGEMS:NMVVR:AXGXH, AVPKAXX:APTKL:SNIT-AA17-QIM:LGEMS:NMVVK:AXGXH, KVGKAXX:VPTKL:SNIT-AA17-QIM:LGEMS:EGMSVAE:XGXR, KASKAXX:VPTKL:SNIT-AA17-QIM:LGEMS:GMAVS:EXGXR, GSAGPXX:TPTKM:SNIT-AA17-QIM:LGEMS:GMVVD:RXGXS, AAPASXX:VPARL:SNIT-AA17-QIM:LGEMS:DMVVE:AXGXR, STPPTXX:VPTRL:SNIT-AA17-QIM:LGEMS:DMVVE:SXGXR, HVPKPXX:APTKL:SNIT-AA17-QIM:LGEMS:NMVVR:SXGXH, RVPSTXX:APVKT:SNIT-AA17-QIM:LGEMS:MIVEE:XGXL, ASAAPXX:VPQAL:SNIT-AA17-QIM:LGEMS:MIVRS:XKXS, ASASPXX:VSQDL:SNIT-AA17-QIM:LGEMS:MIVKS:XKXS, ASASPXX:VPQDL:SNIT-AA17-QIM:LGEMS:MVVKS:XKXS, NDEGLEX:VPTEE:SNIT-AA17-QIM:LGEMS:FLQHN:KXEXR, SSVKXQP:SRVHH:SNIT-AA17-QIM:LGEMS:RLEEH:LEXAXA, RNVQXRP:TQVQL:SNIT-AA17-QIM:LGEMS:TLEDH:LAXKXE, RNVQXRP:SRVQL:RSVK-AA17-AKV:KEVQV:TLEEH:LAXKXE, KIPKAXX:VPTEL:RSVK-AA17-AKV:KEVQV:DMVVE:GXGXR, GIPEPXX:VPEKM:RSVK-AA17-AKV:KEVQV:NMTVE:SXAXR, SIPKAXX:VPTEL:RSVK-AA17-AKV:KEVQV:EMVVE:GXGXR, HVTKPTX:APTKL:RSVK-AA17-AKV:KEVQV:NMVVR:SXGXH, YVPKPXX:APTKL:RSVK-AA17-AKV:KEVQV:NMVVR:SXGXH, TVPKPXX:APTQL:RSVK-AA17-AKV:KEVQV:NMVVR:AXGXH, AVPKAXX:APTKL:RSVK-AA17-AKV:KEVQV:NMVVK:AXGXH, KVGKAXX:VPTKL:RSVK-AA17-AKV:KEVQV:EGMSVAE:XGXR, KASKAXX:VPTKL:RSVK-AA17-AKV:KEVQV:GMAVS:EXGXR, GSAGPXX:TPTKM:RSVK-AA17-AKV:KEVQV:GMVVD:RXGXS, AAPASXX:VPARL:RSVK-AA17-AKV:KEVQV:DMVVE:AXGXR, STPPTXX:VPTRL:RSVK-AA17-AKV:KEVQV:DMVVE:SXGXR, HVPKPXX:APTKL:RSVK-AA17-AKV:KEVQV:NMVVR:SXGXH, RVPSTXX:APVKT:RSVK-AA17-AKV:KEVQV:MIVEE:XGXL, ASAAPXX:VPQAL:RSVK-AA17-AKV:KEVQV:MIVRS:XKXS, ASASPXX:VSQDL:RSVK-AA17-AKV:KEVQV:MIVKS:XKXS, ASASPXX:VPQDL:RSVK-AA17-AKV:KEVQV:MVVKS:XKXS, NDEGLEX:VPTEE:RSVK-AA17-AKV:KEVQV:FLQHN:KXEXR, N DEGLEX:VPTGQ:RSVK-AA17-AKV:KEVQV:LEEHS:QXEXR, RNVQXRP:TQVQL:RSVK-AA17-AKV:KEVQV:TLEDH:LAXKXE, SSVKXQP:TQVH H:RPVQ-AA17-RKI:KKATV:RLEDH:LEXAXA, KIPKAXX:VPTEL:RPVQ-AA17-RKI:KKATV:DMVVE:GXGXR, GIPEPXX:VPEKM:RPVQ-AA17-RKI:KKATV:NMTVE:SXAXR, SIPKAXX:VPTEL:RPVQ-AA17-RKI:KKATV:EMVVE:GXGXR, HVTKPTX:APTKL:RPVQ-AA17-RKI:KKATV:NMVVR:SXGXH, YVPKPXX:APTKL:RPVQ-AA17-RKI:KKATV:NMVVR:SXGXH, TVPKPXX:APTQL:RPVQ-AA17-RKI:KKATV:NMVVR:AXGXH, AVPKAXX:APTKL:RPVQ-AA17-RKI:KKATV:NMVVK:AXGXH, KVGKAXX:VPTKL:RPVQ-AA17-RKI:KKATV:EGMSVAE:XGXR, KASKAXX:VPTKL:RPVQ-AA17-RKI:KKATV:GMAVS:EXGXR, GSAGPXX:TPTKM:RPVQ-AA17-RKI:KKATV:GMVVD:RXGXS, AAPASXX:VPARL:RPVQ-AA17-RKI:KKATV:DMVVE:AXGXR, STPPTXX:VPTRL:RPVQ-AA17-RKI:KKATV:DMVVE:SXGXR, HVPKPXX:APTKL:RPVQ-AA17-RKI:KKATV:NMVVR:SXGXH, RVPSTXX:APVKT:RPVQ-AA17-RKI:KKATV:MIVEE:XGXL, ASAAPXX:VPQAL:RPVQ-AA17-RKI:KKATV:MIVRS:XKXS, ASASPXX:VSQDL:RPVQ-AA17-RKI:KKATV:MIVKS:XKXS, ASASPXX:VPQDL:RPVQ-AA17-RKI:KKATV: MVVKS:XKXS, N DEGLEX:VPTEE:RPVQ-AA17-RKI:KKATV:FLQHN:KXEXR, NDEGLEX:VPTGQ:RPVQ-AA17-RKI:KKATV:LEEHS:QXEXR and SSVKXQP:SRVHH:RPVQ-AA17-RKI:KKATV:RLEEH:LEXAXA; and wherein AA¹⁷ is selected from the group consisting of G, A, V, L, I, P, F, M, W, T and S (in particular is selected from the group consisting of M, I, L, V and T).

[0443] In particular, in certain embodiments, the heptuplet PEP7:PEP3:PEP1:LINKER:PEP2:PEP4:PEP8 is selected from the group consisting of GIPEPXX:VPT:SAIS:DENKNVV:LKNYQ:VVE:SXAXR, SIPKAXX:VPT:SAIS:DEYDKVV:LKNYQ:VVE:GXGXR, HVTKPTX:VPT:SAIS:DDSSNVI:LKNYQ:VVE:SXGXH, YVPKPXX:VPT:SAIS:DDSSNVI:LKNYQ:VVE:SXGXH, TVPKPXX:VPT:SAIS:DDSSNVI:LKNYQ:VVE:AXGXH, AVPKAXX:VPT:SAIS:DSSNNVI:LKNYQ:VVE:AXGXH, KVGKAXX:VPT:SAIS:DDMGVPT:LKNYQ:VVE:XGXR, KASKAXX:VPT:SAIS:DKGVVTY:LKNYQ:VVE:EXGXR, GSAGPXX:VPT:SAIS:NDKQQII:LKNYQ:VVE:RXGXS, AAPASXX:VPT:SAIS:DAANNVV:LKNYQ:VVE:AXGXR, STPPTXX:VPT:SAIS:DSANNVV:LKNYQ:VVE:SXGXR, HVPKPXX:VPT:SAIS:DDSSNVI:LKNYQ:VVE:SXGXH, RVPSTXX:VPT:SAIS:DNGRVLL:LKNYQ:VVE:XGXL, ASAAPXX:VPT:SAIS:VGRKPKV:LKNYQ:VVE:XKXS, ASASPXX:VPT:SAIS:IGKTPKI:LKNYQ:VVE:XKXS, ASASPXX:VPT:SAIS:VGRTPKV:LKNYQ:VVE:XKXS, NDEGLEX:VPT:SAIS:RIKPHQGQH:LKNYQ:VVE:KXEXR, NDEGLEX:VPT:SAIS:RIKPHQGQH:LKNYQ:VVE:QXEXR, SSVKXQP:VPT:SAIS:EYVRKKPKL:LKNYQ:VVE:LEXAXA, RNVQXRP:VPT:SAIS:EIVRKKPIF:LKNYQ:VVE:LAXKXE, GIPEPXX:VPE:SAIS:DENKNVV:LKNYQ:TVE:SXAXR, HVTKPTX:APT:SAIS:DDSSNVI:LKNYQ:VVR:SXGXH, YVPKPXX:APT:SAIS:DDSSNVI:LKNYQ:VVR:SXGXH, TVPKPXX:APT:SAIS:DDSSNVI:LKNYQ:VVR:AXGXH, AVPKAXX:APT:SAIS:DSSNNVI:LKNYQ:VVK:AXGXH, KVGKAXX:VPT:SAIS:DDMGVPT:LKNYQ:VAE:XGXR, KASKAXX:VPT:SAIS:DKGVVTY:LKNYQ:AVS:EXGXR, GSAGPXX:TPT:SAIS:NDKQQII:LKNYQ:VVD:RXGXS, AAPASXX:VPA:SAIS:DAANNVV:LKNYQ:VVE:AXGXR, HVPKPXX:APT:SAIS:DDSSNVI:LKNYQ:VVR:SXGXH, RVPSTXX:APV:SAIS:DNGRVLL:LKNYQ:VEE:XGXL, ASAAPXX:VPQ:SAIS:VGRKPKV:LKNYQ:VRS:XKXS, ASASPXX:VSQ:SAIS:IGKTPKI:LKNYQ:VKS:XKXS, ASASPXX:VPQ:SAIS:VGRTPKV:LKNYQ:VKS:XKXS, NDEGLEX:VPT:SAIS:RIKPHQGQH:LKNYQ:QHN:KXEXR, NDEGLEX:VPT:SAIS:RIKPHQGQH:LKNYQ:EHS:QXEXR, SSVKXQP:SRV:SAIS:EYVRKKPKL:LKNYQ:EEH:LEXAXA, RNVQXRP:TQV:SAIS:EIVRKKPIF:LKNYQ:EDH:LAXKXE, KIPKAXX:VPE:SSLS:DENEKVV:LKVYP:TVE:GXGXR, SIPKAXX:VPE:SSLS:DEYDKVV:LKVYP:TVE:GXGXR, HVTKPTX:VPE:SSLS:DDSSNVI:LKVYP:TVE:SXGXH, YVPKPXX:VPE:SSLS:DDSSNVI:LKVYP:TVE:SXGXH, TVPKPXX:VPE:SSLS:DDSSNVI:LKVYP:TVE:AXGXH, AVPKAXX:VPE:SSLS:DSSNNVI:LKVYP:TVE:AXGXH, KVGKAXX:VPE:SSLS:DDMGVPT:LKVYP:TVE:XGXR, KASKAXX:VPE:SSLS:DKGVVTY:LKVYP:TVE:EXGXR, GSAGPXX:VPE:SSLS:NDKQQII:LKVYP:TVE:RXGXS, AAPASXX:VPE:SSLS:DAANNVV:LKVYP:TVE:AXGXR, STPPTXX:VPE:SSLS:DSANNVV:LKVYP:TVE:SXGXR, HVPKPXX:VPE:SSLS:DDSSNVI:LKVYP:TVE:SXGXH, RVPSTXX:VPE:SSLS:DNGRVLL:LKVYP:TVE:XGXL, ASAAPXX:VPE:SSLS:VGRKPKV:LKVYP:TVE:XKXS, ASASPXX:VPE:SSLS:IGKTPKI:LKVYP:TVE:XKXS, ASASPXX:VPE:SSLS:VGRTPKV:LKVYP:TVE:XKXS, NDEGLEX:VPE:SSLS:RIKPHQGQH:LKVYP:TVE:KXEXR, NDEGLEX:VPE:SSLS:RIKPHQGQH:LKVYP:TVE:QXEXR, SSVKXQP:VPE:SSLS:EYVRKKPKL:LKVYP:TVE:LEXAXA, RNVQXRP:VPE:SSLS:EIVRKKPIF:LKVYP:TVE:LAXKXE, KIPKAXX:VPT:SSLS:DENEKVV:LKVYP:VVE:GXGXR, SIPKAXX:VPT:SSLS:DEYDKVV:LKVYP:VVE:GXGXR, HVTKPTX:APT:SSLS:DDSSNVI:LKVYP:VVR:SXGXH, YVPKPXX:APT:SSLS:DDSSNVI:LKVYP:VVR:SXGXH, TVPKPXX:APT:SSLS:DDSSNVI:LKVYP:VVR:AXGXH, AVPKAXX:APT:SSLS:DSSNNVI:LKVYP:VVK:AXGXH, KVGKAXX:VPT:SSLS:DDMGVPT:LKVYP:VAE:XGXR, KASKAXX:VPT:SSLS:DKGVVTY:LKVYP:AVS:EXGXR, GSAGPXX:TPT:SSLS:NDKQQII:LKVYP:VVD:RXGXS, AAPASXX:VPA:SSLS:DAANNVV:LKVYP:VVE:AXGXR, STPPTXX:VPT:SSLS:DSANNVV:LKVYP:VVE:SXGXR, HVPKPXX:APT:SSLS:DDSSNVI:LKVYP:VVR:SXGXH, RVPSTXX:APV:SSLS:DNGRVLL:LKVYP:VEE:XGXL, ASAAPXX:VPQ:SSLS:VGRKPKV:LKVYP:VRS:XKXS, ASASPXX:VSQ:SSLS:IGKTPKI:LKVYP:VKS:XKXS, ASASPXX:VPQ:SSLS:VGRTPKV:LKVYP:VKS:XKXS, NDEGLEX:VPT:SSLS:RIKPHQGQH:LKVYP:QHN:KXEXR, NDEGLEX:VPT:SSLS:RIKPHQGQH:LKVYP:EHS:QXEXR, SSVKXQP:SRV:SSLS:EYVRKKPKL:LKVYP:EEH:LEXAXA, RNVQXRP:TQV:SSLS:EIVRKKPIF:LKVYP:EDH:LAXKXE, KIPKAXX:VPT:SAIS:DENEKVV:LKNYQ:VVE:GXGXR, KIPKAXX:APT:NAIS:DENEKVV:LKKYR:VVR:GXGXR, GIPEPXX:APT:NAIS:DENKNVV:LKKYR:VVR:SXAXR, SIPKAXX:APT:NAIS:DEYDKVV:LKKYR:VVR:GXGXR, YVPKPXX:APT:NAIS:DDSSNVI:LKKYR:VVR:SXGXH, TVPKPXX:APT:NAIS:DDSSNVI:LKKYR:VVR:AXGXH, AVPKAXX:APT:NAIS:DSSNNVI:LKKYR:VVR:AXGXH, KVGKAXX:APT:NAIS:DDMGVPT:LKKYR:VVR:XGXR, KASKAXX:APT:NAIS:DKGVVTY:LKKYR:VVR:EXGXR, GSAGPXX:APT:NAIS:NDKQQII:LKKYR:VVR:RXGXS, AAPASXX:APT:NAIS:DAANNVV:LKKYR:VVR:AXGXR, STPPTXX:APT:NAIS:DSANNVV:LKKYR:VVR:SXGXR, HVPKPXX:APT:NAIS:DDSSNVI:LKKYR:VVR:SXGXH, RVPSTXX:APT:NAIS:DNGRVLL:LKKYR:VVR:XGXL, ASAAPXX:APT:NAIS:VGRKPKV:LKKYR:VVR:XKXS, ASASPXX:APT:NAIS:IGKTPKI:LKKYR:VVR:XKXS, ASASPXX:APT:NAIS:VGRTPKV:LKKYR:VVR:XKXS, NDEGLEX:APT:NAIS:RIKPHQGQH:LKKYR:VVR:KXEXR, NDEGLEX:APT:NAIS:RIKPHQGQH:LKKYR:VVR:QXEXR, SSVKXQP:APT:NAIS:EYVRKKPKL:LKKYR:VVR:LEXAXA, RNVQXRP:APT:NAIS:EIVRKKPIF:LKKYR:VVR:LAXKXE, KIPKAXX:VPT:NAIS:DENEKVV:LKKYR:VVE:GXGXR, GIPEPXX:VPE:NAIS:DENKNVV:LKKYR:TVE:SXAXR, SIPKAXX:VPT:NAIS:DEYDKVV:LKKYR:VVE:GXGXR, AVPKAXX:APT:NAIS:DSSNNVI:LKKYR:VVK:AXGXH, KVGKAXX:VPT:NAIS:DDMGVPT:LKKYR:VAE:XGXR, KASKAXX:VPT:NAIS:DKGVVTY:LKKYR:AVS:EXGXR, GSAGPXX:TPT:NAIS:NDKQQII:LKKYR:VVD:RXGXS, AAPASXX:VPA:NAIS:DAANNVV:LKKYR:VVE:AXGXR, STPPTXX:VPT:NAIS:DSANNVV:LKKYR:VVE:SXGXR, RVPSTXX:APV:NAIS:DNGRVLL:LKKYR:VEE:XGXL, ASAAPXX:VPQ:NAIS:VGRKPKV:LKKYR:VRS:XKXS, ASASPXX:VSQ:NAIS:IGKTPKI:LKKYR:VKS:XKXS, ASASPXX:VPQ:NAIS:VGRTPKV:LKKYR:VKS:XKXS, NDEGLEX:VPT:NAIS:RIKPHQGQH:LKKYR:QHN:KXEXR, NDEGLEX:VPT:NAIS:RIKPHQGQH:LKKYR:EHS:QXEXR, SSVKXQP:SRV:NAIS:EYVRKKPKL:LKKYR:EEH:LEXAXA, RNVQXRP:TQV:NAIS:EIVRKKPIF:LKKYR:EDH:LAXKXE, HVTKPTX:APT:NAIS:DDSSNVI:LKKYR:VVR:SXGXH, KIPKAXX:APT:SATS:DENEKVV:LRKHR:VVK:GXGXR, GIPEPXX:APT:SATS:DENKNVV:LRKHR:VVK:SXAXR, SIPKAXX:APT:SATS:DEYDKVV:LRKHR:VVK:GXGXR, HVTKPTX:APT:SATS:DDSSNVI:LRKHR:VVK:SXGXH, YVPKPXX:APT:SATS:DDSSNVI:LRKHR:VVK:SXGXH, TVPKPXX:APT:SATS:DDSSNVI:LRKHR:VVK:AXGXH, KVGKAXX:APT:SATS:DDMGVPT:LRKHR:VVK:XGXR, KASKAXX:APT:SATS:DKGVVTY:LRKHR:VVK:EXGXR, GSAGPXX:APT:SATS:NDKQQII:LRKHR:VVK:RXGXS, AAPASXX:APT:SATS:DAANNVV:LRKHR:VVK:AXGXR, STPPTXX:APT:SATS:DSANNVV:LRKHR:VVK:SXGXR, HVPKPXX:APT:SATS:DDSSNVI:LRKHR:VVK:SXGXH, RVPSTXX:APT:SATS:DNGRVLL:LRKHR:VVK:XGXL, ASAAPXX:APT:SATS:VGRKPKV:LRKHR:VVK:XKXS, ASASPXX:APT:SATS:IGKTPKI:LRKHR:VVK:XKXS, ASASPXX:APT:SATS:VGRTPKV:LRKHR:VVK:XKXS, NDEGLEX:APT:SATS:RIKPHQGQH:LRKHR:VVK:KXEXR, NDEGLEX:APT:SATS:RIKPHQGQH:LRKHR:VVK:QXEXR, SSVKXQP:APT:SATS:EYVRKKPKL:LRKHR:VVK:LEXAXA, RNVQXRP:APT:SATS:EIVRKKPIF:LRKHR:VVK:LAXKXE, KIPKAXX:VPT:SATS:DENEKVV:LRKHR:VVE:GXGXR, GIPEPXX:VPE:SATS:DENKNVV:LRKHR:TVE:SXAXR, SIPKAXX:VPT:SATS:DEYDKVV:LRKHR:VVE:GXGXR, HVTKPTX:APT:SATS:DDSSNVI:LRKHR:VVR:SXGXH, YVPKPXX:APT:SATS:DDSSNVI:LRKHR:VVR:SXGXH, TVPKPXX:APT:SATS:DDSSNVI:LRKHR:VVR:AXGXH, KVGKAXX:VPT:SATS:DDMGVPT:LRKHR:VAE:XGXR, KASKAXX:VPT:SATS:DKGVVTY:LRKHR:AVS:EXGXR, GSAGPXX:TPT:SATS:NDKQQII:LRKHR:VVD:RXGXS, AAPASXX:VPA:SATS:DAANNVV:LRKHR:VVE:AXGXR, STPPTXX:VPT:SATS:DSANNVV:LRKHR:VVE:SXGXR, HVPKPXX:APT:SATS:DDSSNVI:LRKHR:VVR:SXGXH, RVPSTXX:APV:SATS:DNGRVLL:LRKHR:VEE:XGXL, ASAAPXX:VPQ:SATS:VGRKPKV:LRKHR:VRS:XKXS, ASASPXX:VSQ:SATS:IGKTPKI:LRKHR:VKS:XKXS, ASASPXX:VPQ:SATS:VGRTPKV:LRKHR:VKS:XKXS, NDEGLEX:VPT:SATS:RIKPHQGQH:LRKHR:QHN:KXEXR, NDEGLEX:VPT:SATS:RIKPHQGQH:LRKHR:EHS:QXEXR, SSVKXQP:SRV:SATS:EYVRKKPKL:LRKHR:EEH:LEXAXA, RNVQXRP:TQV:SATS:EIVRKKPIF:LRKHR:EDH:LAXKXE, KIPKAXX:VPT:SPIS:DENEKVV:LKYHY:VAE:GXGXR, GIPEPXX:VPT:SPIS:DENKNVV:LKYHY:VAE:SXAXR, SIPKAXX:VPT:SPIS:DEYDKVV:LKYHY:VAE:GXGXR, HVTKPTX:VPT:SPIS:DDSSNVI:LKYHY:VAE:SXGXH, YVPKPXX:VPT:SPIS:DDSSNVI:LKYHY:VAE:SXGXH, TVPKPXX:VPT:SPIS:DDSSNVI:LKYHY:VAE:AXGXH, AVPKAXX:VPT:SPIS:DSSNNVI:LKYHY:VAE:AXGXH, KASKAXX:VPT:SPIS:DKGVVTY:LKYHY:VAE:EXGXR, GSAGPXX:VPT:SPIS:NDKQQII:LKYHY:VAE:RXGXS, AAPASXX:VPT:SPIS:DAANNVV:LKYHY:VAE:AXGXR, STPPTXX:VPT:SPIS:DSANNVV:LKYHY:VAE:SXGXR, HVPKPXX:VPT:SPIS:DDSSNVI:LKYHY:VAE:SXGXH, RVPSTXX:VPT:SPIS:DNGRVLL:LKYHY:VAE:XGXL, ASAAPXX:VPT:SPIS:VGRKPKV:LKYHY:VAE:XKXS, ASASPXX:VPT:SPIS:IGKTPKI:LKYHY:VAE:XKXS, ASASPXX:VPT:SPIS:VGRTPKV:LKYHY:VAE:XKXS, NDEGLEX:VPT:SPIS:RIKPHQGQH:LKYHY:VAE:KXEXR, NDEGLEX:VPT:SPIS:RIKPHQGQH:LKYHY:VAE:QXEXR, SSVKXQP:VPT:SPIS:EYVRKKPKL:LKYHY:VAE:LEXAXA, RNVQXRP:VPT:SPIS:EIVRKKPIF:LKYHY:VAE:LAXKXE, KIPKAXX:VPT:SPIS:DENEKVV:LKYHY:VVE:GXGXR, GIPEPXX:VPE:SPIS:DENKNVV:LKYHY:TVE:SXAXR, SIPKAXX:VPT:SPIS:DEYDKVV:LKYHY:VVE:GXGXR, HVTKPTX:APT:SPIS:DDSSNVI:LKYHY:VVR:SXGXH, YVPKPXX:APT:SPIS:DDSSNVI:LKYHY:VVR:SXGXH, TVPKPXX:APT:SPIS:DDSSNVI:LKYHY:VVR:AXGXH, AVPKAXX:APT:SPIS:DSSNNVI:LKYHY:VVK:AXGXH, KASKAXX:VPT:SPIS:DKGVVTY:LKYHY:AVS:EXGXR, GSAGPXX:TPT:SPIS:NDKQQII:LKYHY:VVD:RXGXS, AAPASXX:VPA:SPIS:DAANNVV:LKYHY:VVE:AXGXR, STPPTXX:VPT:SPIS:DSANNVV:LKYHY:VVE:SXGXR, HVPKPXX:APT:SPIS:DDSSNVI:LKYHY:VVR:SXGXH, RVPSTXX:APV:SPIS:DNGRVLL:LKYHY:VEE:XGXL, ASAAPXX:VPQ:SPIS:VGRKPKV:LKYHY:VRS:XKXS, ASASPXX:VSQ:SPIS:IGKTPKI:LKYHY:VKS:XKXS, ASASPXX:VPQ:SPIS:VGRTPKV:LKYHY:VKS:XKXS, NDEGLEX:VPT:SPIS:RIKPHQGQH:LKYHY:QHN:KXEXR, NDEGLEX:VPT:SPIS:RIKPHQGQH:LKYHY:EHS:QXEXR, SSVKXQP:SRV:SPIS:EYVRKKPKL:LKYHY:EEH:LEXAXA, RNVQXRP:TQV:SPIS:EIVRKKPIF:LKYHY:EDH:LAXKXE, KIPKAXX:VPT:EPIS:DENEKVV:KFKYE:AVS:GXGXR, GIPEPXX:VPT:EPIS:DENKNVV:KFKYE:AVS:SXAXR, SIPKAXX:VPT:EPIS:DEYDKVV:KFKYE:AVS:GXGXR, HVTKPTX:VPT:EPIS:DDSSNVI:KFKYE:AVS:SXGXH, YVPKPXX:VPT:EPIS:DDSSNVI:KFKYE:AVS:SXGXH, TVPKPXX:VPT:EPIS:DDSSNVI:KFKYE:AVS:AXGXH, AVPKAXX:VPT:EPIS:DSSNNVI:KFKYE:AVS:AXGXH, KVGKAXX:VPT:EPIS:DDMGVPT:KFKYE:AVS:XGXR, GSAGPXX:VPT:EPIS:NDKQQII:KFKYE:AVS:RXGXS, AAPASXX:VPT:EPIS:DAANNVV:KFKYE:AVS:AXGXR, STPPTXX:VPT:EPIS:DSANNVV:KFKYE:AVS:SXGXR, HVPKPXX:VPT:EPIS:DDSSNVI:KFKYE:AVS:SXGXH, RVPSTXX:VPT:EPIS:DNGRVLL:KFKYE:AVS:XGXL, ASAAPXX:VPT:EPIS:VGRKPKV:KFKYE:AVS:XKXS, ASASPXX:VPT:EPIS:IGKTPKI:KFKYE:AVS:XKXS, ASASPXX:VPT:EPIS:VGRTPKV:KFKYE:AVS:XKXS, NDEGLEX:VPT:EPIS:RIKPHQGQH:KFKYE:AVS:KXEXR, NDEGLEX:VPT:EPIS:RIKPHQGQH:KFKYE:AVS:QXEXR, SSVKXQP:VPT:EPIS:EYVRKKPKL:KFKYE:AVS:LEXAXA, RNVQXRP:VPT:EPIS:EIVRKKPIF:KFKYE:AVS:LAXKXE, KIPKAXX:VPT:EPIS:DENEKVV:KFKYE:VVE:GXGXR, GIPEPXX:VPE:EPIS:DENKNVV:KFKYE:TVE:SXAXR, SIPKAXX:VPT:EPIS:DEYDKVV:KFKYE:VVE:GXGXR, HVTKPTX:APT:EPIS:DDSSNVI:KFKYE:VVR:SXGXH, YVPKPXX:APT:EPIS:DDSSNVI:KFKYE:VVR:SXGXH, TVPKPXX:APT:EPIS:DDSSNVI:KFKYE:VVR:AXGXH, AVPKAXX:APT:EPIS:DSSNNVI:KFKYE:VVK:AXGXH, KVGKAXX:VPT:EPIS:DDMGVPT:KFKYE:VAE:XGXR, GSAGPXX:TPT:EPIS:NDKQQII:KFKYE:VVD:RXGXS, AAPASXX:VPA:EPIS:DAANNVV:KFKYE:VVE:AXGXR, STPPTXX:VPT:EPIS:DSANNVV:KFKYE:VVE:SXGXR, HVPKPXX:APT:EPIS:DDSSNVI:KFKYE:VVR:SXGXH, RVPSTXX:APV:EPIS:DNGRVLL:KFKYE:VEE:XGXL, ASAAPXX:VPQ:EPIS:VGRKPKV:KFKYE:VRS:XKXS, ASASPXX:VSQ:EPIS:IGKTPKI:KFKYE:VKS:XKXS, ASASPXX:VPQ:EPIS:VGRTPKV:KFKYE:VKS:XKXS, NDEGLEX:VPT:EPIS:RIKPHQGQH:KFKYE:QHN:KXEXR, NDEGLEX:VPT:EPIS:RIKPHQGQH:KFKYE:EHS:QXEXR, SSVKXQP:SRV:EPIS:EYVRKKPKL:KFKYE:EEH:LEXAXA, RNVQXRP:TQV:EPIS:EIVRKKPIF:KFKYE:EDH:LAXKXE, KIPKAXX:TPT:SPIN:DENEKVV:YGKIP:VVD:GXGXR, GIPEPXX:TPT:SPIN:DENKNVV:YGKIP:VVD:SXAXR, SIPKAXX:TPT:SPIN:DEYDKVV:YGKIP:VVD:GXGXR, HVTKPTX:TPT:SPIN:DDSSNVI:YGKIP:VVD:SXGXH, YVPKPXX:TPT:SPIN:DDSSNVI:YGKIP:VVD:SXGXH, TVPKPXX:TPT:SPIN:DDSSNVI:YGKIP:VVD:AXGXH, AVPKAXX:TPT:SPIN:DSSNNVI:YGKIP:VVD:AXGXH, KVGKAXX:TPT:SPIN:DDMGVPT:YGKIP:VVD:XGXR, KASKAXX:TPT:SPIN:DKGVVTY:YGKIP:VVD:EXGXR, AAPASXX:TPT:SPIN:DAANNVV:YGKIP:VVD:AXGXR, STPPTXX:TPT:SPIN:DSANNVV:YGKIP:VVD:SXGXR, HVPKPXX:TPT:SPIN:DDSSNVI:YGKIP:VVD:SXGXH, RVPSTXX:TPT:SPIN:DNGRVLL:YGKIP:VVD:XGXL, ASAAPXX:TPT:SPIN:VGRKPKV:YGKIP:VVD:XKXS, ASASPXX:TPT:SPIN:IGKTPKI:YGKIP:VVD:XKXS, ASASPXX:TPT:SPIN:VGRTPKV:YGKIP:VVD:XKXS, NDEGLEX:TPT:SPIN:RIKPHQGQH:YGKIP:VVD:KXEXR, NDEGLEX:TPT:SPIN:RIKPHQGQH:YGKIP:VVD:QXEXR, SSVKXQP:TPT:SPIN:EYVRKKPKL:YGKIP:VVD:LEXAXA, RNVQXRP:TPT:SPIN:EIVRKKPIF:YGKIP:VVD:LAXKXE, KIPKAXX:VPT:SPIN:DENEKVV:YGKIP:VVE:GXGXR, GIPEPXX:VPE:SPIN:DENKNVV:YGKIP:TVE:SXAXR, SIPKAXX:VPT:SPIN:DEYDKVV:YGKIP:VVE:GXGXR, HVTKPTX:APT:SPIN:DDSSNVI:YGKIP:VVR:SXGXH, YVPKPXX:APT:SPIN:DDSSNVI:YGKIP:VVR:SXGXH, TVPKPXX:APT:SPIN:DDSSNVI:YGKIP:VVR:AXGXH, AVPKAXX:APT:SPIN:DSSNNVI:YGKIP:VVK:AXGXH, KVGKAXX:VPT:SPIN:DDMGVPT:YGKIP:VAE:XGXR, KASKAXX:VPT:SPIN:DKGVVTY:YGKIP:AVS:EXGXR, AAPASXX:VPA:SPIN:DAANNVV:YGKIP:VVE:AXGXR, STPPTXX:VPT:SPIN:DSANNVV:YGKIP:VVE:SXGXR, HVPKPXX:APT:SPIN:DDSSNVI:YGKIP:VVR:SXGXH, RVPSTXX:APV:SPIN:DNGRVLL:YGKIP:VEE:XGXL, ASAAPXX:VPQ:SPIN:VGRKPKV:YGKIP:VRS:XKXS, ASASPXX:VSQ:SPIN:IGKTPKI:YGKIP:VKS:XKXS, ASASPXX:VPQ:SPIN:VGRTPKV:YGKIP:VKS:XKXS, NDEGLEX:VPT:SPIN:RIKPHQGQH:YGKIP:QHN:KXEXR, NDEGLEX:VPT:SPIN:RIKPHQGQH:YGKIP:EHS:QXEXR, SSVKXQP:SRV:SPIN:EYVRKKPKL:YGKIP:EEH:LEXAXA, RNVQXRP:TQV:SPIN:EIVRKKPIF:YGKIP:EDH:LAXKXE, KIPKAXX:VPA:SPIS:DENEKVV:YKQYE:VVE:GXGXR, GIPEPXX:VPA:SPIS:DENKNVV:YKQYE:VVE:SXAXR, SIPKAXX:VPA:SPIS:DEYDKVV:YKQYE:VVE:GXGXR, HVTKPTX:VPA:SPIS:DDSSNVI:YKQYE:VVE:SXGXH, YVPKPXX:VPA:SPIS:DDSSNVI:YKQYE:VVE:SXGXH, TVPKPXX:VPA:SPIS:DDSSNVI:YKQYE:VVE:AXGXH, AVPKAXX:VPA:SPIS:DSSNNVI:YKQYE:VVE:AXGXH, KVGKAXX:VPA:SPIS:DDMGVPT:YKQYE:VVE:XGXR, KASKAXX:VPA:SPIS:DKGVVTY:YKQYE:VVE:EXGXR, GSAGPXX:VPA:SPIS:NDKQQII:YKQYE:VVE:RXGXS, STPPTXX:VPA:SPIS:DSANNVV:YKQYE:VVE:SXGXR, HVPKPXX:VPA:SPIS:DDSSNVI:YKQYE:VVE:SXGXH, RVPSTXX:VPA:SPIS:DNGRVLL:YKQYE:VVE:XGXL, ASAAPXX:VPA:SPIS:VGRKPKV:YKQYE:VVE:XKXS, ASASPXX:VPA:SPIS:IGKTPKI:YKQYE:VVE:XKXS, ASASPXX:VPA:SPIS:VGRTPKV:YKQYE:VVE:XKXS, NDEGLEX:VPA:SPIS:RIKPHQGQH:YKQYE:VVE:KXEXR, NDEGLEX:VPA:SPIS:RIKPHQGQH:YKQYE:VVE:QXEXR, SSVKXQP:VPA:SPIS:EYVRKKPKL:YKQYE:VVE:LEXAXA, RNVQXRP:VPA:SPIS:EIVRKKPIF:YKQYE:VVE:LAXKXE, KIPKAXX:VPT:SPIS:DENEKVV:YKQYE:VVE:GXGXR, GIPEPXX:VPE:SPIS:DENKNVV:YKQYE:TVE:SXAXR, SIPKAXX:VPT:SPIS:DEYDKVV:YKQYE:VVE:GXGXR, HVTKPTX:APT:SPIS:DDSSNVI:YKQYE:VVR:SXGXH, YVPKPXX:APT:SPIS:DDSSNVI:YKQYE:VVR:SXGXH, TVPKPXX:APT:SPIS:DDSSNVI:YKQYE:VVR:AXGXH, AVPKAXX:APT:SPIS:DSSNNVI:YKQYE:VVK:AXGXH, KVGKAXX:VPT:SPIS:DDMGVPT:YKQYE:VAE:XGXR, KASKAXX:VPT:SPIS:DKGVVTY:YKQYE:AVS:EXGXR, GSAGPXX:TPT:SPIS:NDKQQII:YKQYE:VVD:RXGXS, STPPTXX:VPT:SPIS:DSANNVV:YKQYE:VVE:SXGXR, HVPKPXX:APT:SPIS:DDSSNVI:YKQYE:VVR:SXGXH, RVPSTXX:APV:SPIS:DNGRVLL:YKQYE:VEE:XGXL, ASAAPXX:VPQ:SPIS:VGRKPKV:YKQYE:VRS:XKXS, ASASPXX:VSQ:SPIS:IGKTPKI:YKQYE:VKS:XKXS, ASASPXX:VPQ:SPIS:VGRTPKV:YKQYE:VKS:XKXS, NDEGLEX:VPT:SPIS:RIKPHQGQH:YKQYE:QHN:KXEXR, NDEGLEX:VPT:SPIS:RIKPHQGQH:YKQYE:EHS:QXEXR, SSVKXQP:SRV:SPIS:EYVRKKPKL:YKQYE:EEH:LEXAXA, RNVQXRP:TQV:SPIS:EIVRKKPIF:YKQYE:EDH:LAXKXE, GIPEPXX:VPT:SPIS:DENKNVV:YKQYE:VVE:SXAXR, HVTKPTX:VPT:SPIS:DDSSNVI:YKQYE:VVE:SXGXH, YVPKPXX:VPT:SPIS:DDSSNVI:YKQYE:VVE:SXGXH, TVPKPXX:VPT:SPIS:DDSSNVI:YKQYE:VVE:AXGXH, AVPKAXX:VPT:SPIS:DSSNNVI:YKQYE:VVE:AXGXH, KVGKAXX:VPT:SPIS:DDMGVPT:YKQYE:VVE:XGXR, KASKAXX:VPT:SPIS:DKGVVTY:YKQYE:VVE:EXGXR, GSAGPXX:VPT:SPIS:NDKQQII:YKQYE:VVE:RXGXS, AAPASXX:VPT:SPIS:DAANNVV:YKQYE:VVE:AXGXR, HVPKPXX:VPT:SPIS:DDSSNVI:YKQYE:VVE:SXGXH, RVPSTXX:VPT:SPIS:DNGRVLL:YKQYE:VVE:XGXL, ASAAPXX:VPT:SPIS:VGRKPKV:YKQYE:VVE:XKXS, ASASPXX:VPT:SPIS:IGKTPKI:YKQYE:VVE:XKXS, ASASPXX:VPT:SPIS:VGRTPKV:YKQYE:VVE:XKXS, NDEGLEX:VPT:SPIS:RIKPHQGQH:YKQYE:VVE:KXEXR, NDEGLEX:VPT:SPIS:RIKPHQGQH:YKQYE:VVE:QXEXR, SSVKXQP:VPT:SPIS:EYVRKKPKL:YKQYE:VVE:LEXAXA, RNVQXRP:VPT:SPIS:EIVRKKPIF:YKQYE:VVE:LAXKXE, AAPASXX:VPA:SPIS:DAANNVV:YKQYE:VVE:AXGXR, KIPKAXX:APV:KPLS:DENEKVV:DHHKD:VEE:GXGXR, GIPEPXX:APV:KPLS:DENKNVV:DHHKD:VEE:SXAXR, SIPKAXX:APV:KPLS:DEYDKVV:DHHKD:VEE:GXGXR, HVTKPTX:APV:KPLS:DDSSNVI:DHHKD:VEE:SXGXH, YVPKPXX:APV:KPLS:DDSSNVI:DHHKD:VEE:SXGXH, TVPKPXX:APV:KPLS:DDSSNVI:DHHKD:VEE:AXGXH, AVPKAXX:APV:KPLS:DSSNNVI:DHHKD:VEE:AXGXH, KVGKAXX:APV:KPLS:DDMGVPT:DHHKD:VEE:XGXR, KASKAXX:APV:KPLS:DKGVVTY:DHHKD:VEE:EXGXR, GSAGPXX:APV:KPLS:NDKQQII:DHHKD:VEE:RXGXS, AAPASXX:APV:KPLS:DAANNVV:DHHKD:VEE:AXGXR, STPPTXX:APV:KPLS:DSANNVV:DHHKD:VEE:SXGXR, HVPKPXX:APV:KPLS:DDSSNVI:DHHKD:VEE:SXGXH, ASAAPXX:APV:KPLS:VGRKPKV:DHHKD:VEE:XKXS, ASASPXX:APV:KPLS:IGKTPKI:DHHKD:VEE:XKXS, ASASPXX:APV:KPLS:VGRTPKV:DHHKD:VEE:XKXS, NDEGLEX:APV:KPLS:RIKPHQGQH:DHHKD:VEE:KXEXR, NDEGLEX:APV:KPLS:RIKPHQGQH:DHHKD:VEE:QXEXR, SSVKXQP:APV:KPLS:EYVRKKPKL:DHHKD:VEE:LEXAXA, RNVQXRP:APV:KPLS:EIVRKKPIF:DHHKD:VEE:LAXKXE, KIPKAXX:VPT:KPLS:DENEKVV:DHHKD:VVE:GXGXR, GIPEPXX:VPE:KPLS:DENKNVV:DHHKD:TVE:SXAXR, SIPKAXX:VPT:KPLS:DEYDKVV:DHHKD:VVE:GXGXR, HVTKPTX:APT:KPLS:DDSSNVI:DHHKD:VVR:SXGXH, YVPKPXX:APT:KPLS:DDSSNVI:DHHKD:VVR:SXGXH, TVPKPXX:APT:KPLS:DDSSNVI:DHHKD:VVR:AXGXH, AVPKAXX:APT:KPLS:DSSNNVI:DHHKD:VVK:AXGXH, KVGKAXX:VPT:KPLS:DDMGVPT:DHHKD:VAE:XGXR, KASKAXX:VPT:KPLS:DKGVVTY:DHHKD:AVS:EXGXR, GSAGPXX:TPT:KPLS:NDKQQII:DHHKD:VVD:RXGXS, AAPASXX:VPA:KPLS:DAANNVV:DHHKD:VVE:AXGXR, STPPTXX:VPT:KPLS:DSANNVV:DHHKD:VVE:SXGXR, HVPKPXX:APT:KPLS:DDSSNVI:DHHKD:VVR:SXGXH, ASAAPXX:VPQ:KPLS:VGRKPKV:DHHKD:VRS:XKXS, ASASPXX:VSQ:KPLS:IGKTPKI:DHHKD:VKS:XKXS, ASASPXX:VPQ:KPLS:VGRTPKV:DHHKD:VKS:XKXS, NDEGLEX:VPT:KPLS:RIKPHQGQH:DHHKD:QHN:KXEXR, NDEGLEX:VPT:KPLS:RIKPHQGQH:DHHKD:EHS:QXEXR, SSVKXQP:SRV:KPLS:EYVRKKPKL:DHHKD:EEH:LEXAXA, RNVQXRP:TQV:KPLS:EIVRKKPIF:DHHKD:EDH:LAXKXE, KIPKAXX:VPQ:EPLP:DENEKVV:EQLSN:VRS:GXGXR, GIPEPXX:VPQ:EPLP:DENKNVV:EQLSN:VRS:SXAXR, SIPKAXX:VPQ:EPLP:DEYDKVV:EQLSN:VRS:GXGXR, HVTKPTX:VPQ:EPLP:DDSSNVI:EQLSN:VRS:SXGXH, YVPKPXX:VPQ:EPLP:DDSSNVI:EQLSN:VRS:SXGXH, TVPKPXX:VPQ:EPLP:DDSSNVI:EQLSN:VRS:AXGXH, AVPKAXX:VPQ:EPLP:DSSNNVI:EQLSN:VRS:AXGXH, KVGKAXX:VPQ:EPLP:DDMGVPT:EQLSN:VRS:XGXR, KASKAXX:VPQ:EPLP:DKGVVTY:EQLSN:VRS:EXGXR, GSAGPXX:VPQ:EPLP:NDKQQII:EQLSN:VRS:RXGXS, AAPASXX:VPQ:EPLP:DAANNVV:EQLSN:VRS:AXGXR, STPPTXX:VPQ:EPLP:DSANNVV:EQLSN:VRS:SXGXR, HVPKPXX:VPQ:EPLP:DDSSNVI:EQLSN:VRS:SXGXH, RVPSTXX:VPQ:EPLP:DNGRVLL:EQLSN:VRS:XGXL, ASASPXX:VPQ:EPLP:IGKTPKI:EQLSN:VRS:XKXS, ASASPXX:VPQ:EPLP:VGRTPKV:EQLSN:VRS:XKXS, NDEGLEX:VPQ:EPLP:RIKPHQGQH:EQLSN:VRS:KXEXR, NDEGLEX:VPQ:EPLP:RIKPHQGQH:EQLSN:VRS:QXEXR, SSVKXQP:VPQ:EPLP:EYVRKKPKL:EQLSN:VRS:LEXAXA, RNVQXRP:VPQ:EPLP:EIVRKKPIF:EQLSN:VRS:LAXKXE, KIPKAXX:VPT:EPLP:DENEKVV:EQLSN:VVE:GXGXR, GIPEPXX:VPE:EPLP:DENKNVV:EQLSN:TVE:SXAXR, SIPKAXX:VPT:EPLP:DEYDKVV:EQLSN:VVE:GXGXR, HVTKPTX:APT:EPLP:DDSSNVI:EQLSN:VVR:SXGXH, YVPKPXX:APT:EPLP:DDSSNVI:EQLSN:VVR:SXGXH, TVPKPXX:APT:EPLP:DDSSNVI:EQLSN:VVR:AXGXH, AVPKAXX:APT:EPLP:DSSNNVI:EQLSN:VVK:AXGXH, KVGKAXX:VPT:EPLP:DDMGVPT:EQLSN:VAE:XGXR, KASKAXX:VPT:EPLP:DKGVVTY:EQLSN:AVS:EXGXR, GSAGPXX:TPT:EPLP:NDKQQII:EQLSN:VVD:RXGXS, AAPASXX:VPA:EPLP:DAANNVV:EQLSN:VVE:AXGXR, STPPTXX:VPT:EPLP:DSANNVV:EQLSN:VVE:SXGXR, HVPKPXX:APT:EPLP:DDSSNVI:EQLSN:VVR:SXGXH, RVPSTXX:APV:EPLP:DNGRVLL:EQLSN:VEE:XGXL, ASASPXX:VSQ:EPLP:IGKTPKI:EQLSN:VKS:XKXS, ASASPXX:VPQ:EPLP:VGRTPKV:EQLSN:VKS:XKXS, NDEGLEX:VPT:EPLP:RIKPHQGQH:EQLSN:QHN:KXEXR, NDEGLEX:VPT:EPLP:RIKPHQGQH:EQLSN:EHS:QXEXR, SSVKXQP:SRV:EPLP:EYVRKKPKL:EQLSN:EEH:LEXAXA, RNVQXRP:TQV:EPLP:EIVRKKPIF:EQLSN:EDH:LAXKXE, KIPKAXX:VSQ:EPLT:DENEKVV:EQLSN:VKS:GXGXR, GIPEPXX:VSQ:EPLT:DENKNVV:EQLSN:VKS:SXAXR, SIPKAXX:VSQ:EPLT:DEYDKVV:EQLSN:VKS:GXGXR, HVTKPTX:VSQ:EPLT:DDSSNVI:EQLSN:VKS:SXGXH, YVPKPXX:VSQ:EPLT:DDSSNVI:EQLSN:VKS:SXGXH, TVPKPXX:VSQ:EPLT:DDSSNVI:EQLSN:VKS:AXGXH, AVPKAXX:VSQ:EPLT:DSSNNVI:EQLSN:VKS:AXGXH, KVGKAXX:VSQ:EPLT:DDMGVPT:EQLSN:VKS:XGXR, KASKAXX:VSQ:EPLT:DKGVVTY:EQLSN:VKS:EXGXR, GSAGPXX:VSQ:EPLT:NDKQQII:EQLSN:VKS:RXGXS, AAPASXX:VSQ:EPLT:DAANNVV:EQLSN:VKS:AXGXR, STPPTXX:VSQ:EPLT:DSANNVV:EQLSN:VKS:SXGXR, HVPKPXX:VSQ:EPLT:DDSSNVI:EQLSN:VKS:SXGXH, RVPSTXX:VSQ:EPLT:DNGRVLL:EQLSN:VKS:XGXL, ASAAPXX:VSQ:EPLT:VGRKPKV:EQLSN:VKS:XKXS, ASASPXX:VSQ:EPLT:VGRTPKV:EQLSN:VKS:XKXS, NDEGLEX:VSQ:EPLT:RIKPHQGQH:EQLSN:VKS:KXEXR, NDEGLEX:VSQ:EPLT:RIKPHQGQH:EQLSN:VKS:QXEXR, SSVKXQP:VSQ:EPLT:EYVRKKPKL:EQLSN:VKS:LEXAXA, RNVQXRP:VSQ:EPLT:EIVRKKPIF:EQLSN:VKS:LAXKXE, KIPKAXX:VPT:EPLT:DENEKVV:EQLSN:VVE:GXGXR, GIPEPXX:VPE:EPLT:DENKNVV:EQLSN:TVE:SXAXR, SIPKAXX:VPT:EPLT:DEYDKVV:EQLSN:VVE:GXGXR, HVTKPTX:APT:EPLT:DDSSNVI:EQLSN:VVR:SXGXH, YVPKPXX:APT:EPLT:DDSSNVI:EQLSN:VVR:SXGXH, TVPKPXX:APT:EPLT:DDSSNVI:EQLSN:VVR:AXGXH, AVPKAXX:APT:EPLT:DSSNNVI:EQLSN:VVK:AXGXH, KVGKAXX:VPT:EPLT:DDMGVPT:EQLSN:VAE:XGXR, KASKAXX:VPT:EPLT:DKGVVTY:EQLSN:AVS:EXGXR, GSAGPXX:TPT:EPLT:NDKQQII:EQLSN:VVD:RXGXS, AAPASXX:VPA:EPLT:DAANNVV:EQLSN:VVE:AXGXR, STPPTXX:VPT:EPLT:DSANNVV:EQLSN:VVE:SXGXR, HVPKPXX:APT:EPLT:DDSSNVI:EQLSN:VVR:SXGXH, RVPSTXX:APV:EPLT:DNGRVLL:EQLSN:VEE:XGXL, ASAAPXX:VPQ:EPLT:VGRKPKV:EQLSN:VRS:XKXS, ASASPXX:VPQ:EPLT:VGRTPKV:EQLSN:VKS:XKXS, NDEGLEX:VPT:EPLT:RIKPHQGQH:EQLSN:QHN:KXEXR, NDEGLEX:VPT:EPLT:RIKPHQGQH:EQLSN:EHS:QXEXR, SSVKXQP:SRV:EPLT:EYVRKKPKL:EQLSN:EEH:LEXAXA, RNVQXRP:TQV:EPLT:EIVRKKPIF:EQLSN:EDH:LAXKXE, KIPKAXX:VPQ:EPLT:DENEKVV:EQLSN:VKS:GXGXR, GIPEPXX:VPQ:EPLT:DENKNVV:EQLSN:VKS:SXAXR, SIPKAXX:VPQ:EPLT:DEYDKVV:EQLSN:VKS:GXGXR, HVTKPTX:VPQ:EPLT:DDSSNVI:EQLSN:VKS:SXGXH, YVPKPXX:VPQ:EPLT:DDSSNVI:EQLSN:VKS:SXGXH, TVPKPXX:VPQ:EPLT:DDSSNVI:EQLSN:VKS:AXGXH, AVPKAXX:VPQ:EPLT:DSSNNVI:EQLSN:VKS:AXGXH, KVGKAXX:VPQ:EPLT:DDMGVPT:EQLSN:VKS:XGXR, KASKAXX:VPQ:EPLT:DKGVVTY:EQLSN:VKS:EXGXR, GSAGPXX:VPQ:EPLT:NDKQQII:EQLSN:VKS:RXGXS, AAPASXX:VPQ:EPLT:DAANNVV:EQLSN:VKS:AXGXR, STPPTXX:VPQ:EPLT:DSANNVV:EQLSN:VKS:SXGXR, HVPKPXX:VPQ:EPLT:DDSSNVI:EQLSN:VKS:SXGXH, RVPSTXX:VPQ:EPLT:DNGRVLL:EQLSN:VKS:XGXL, ASAAPXX:VPQ:EPLT:VGRKPKV:EQLSN:VKS:XKXS, ASASPXX:VPQ:EPLT:IGKTPKI:EQLSN:VKS:XKXS, NDEGLEX:VPQ:EPLT:RIKPHQGQH:EQLSN:VKS:KXEXR, NDEGLEX:VPQ:EPLT:RIKPHQGQH:EQLSN:VKS:QXEXR, SSVKXQP:VPQ:EPLT:EYVRKKPKL:EQLSN:VKS:LEXAXA, RNVQXRP:VPQ:EPLT:EIVRKKPIF:EQLSN:VKS:LAXKXE, ASASPXX:VSQ:EPLT:IGKTPKI:EQLSN:VKS:XKXS, KIPKAXX:VPT:SNIT:DENEKVV:IGEMS:QHN:GXGXR, GIPEPXX:VPT:SNIT:DENKNVV:IGEMS:QHN:SXAXR, SIPKAXX:VPT:SNIT:DEYDKVV:IGEMS:QHN:GXGXR, HVTKPTX:VPT:SNIT:DDSSNVI:IGEMS:QHN:SXGXH, YVPKPXX:VPT:SNIT:DDSSNVI:IGEMS:QHN:SXGXH, TVPKPXX:VPT:SNIT:DDSSNVI:IGEMS:QHN:AXGXH, AVPKAXX:VPT:SNIT:DSSNNVI:IGEMS:QHN:AXGXH, KVGKAXX:VPT:SNIT:DDMGVPT:IGEMS:QHN:XGXR, KASKAXX:VPT:SNIT:DKGVVTY:IGEMS:QHN:EXGXR, GSAGPXX:VPT:SNIT:NDKQQII:IGEMS:QHN:RXGXS, AAPASXX:VPT:SNIT:DAANNVV:IGEMS:QHN:AXGXR, STPPTXX:VPT:SNIT:DSANNVV:IGEMS:QHN:SXGXR, HVPKPXX:VPT:SNIT:DDSSNVI:IGEMS:QHN:SXGXH, RVPSTXX:VPT:SNIT:DNGRVLL:IGEMS:QHN:XGXL, ASAAPXX:VPT:SNIT:VGRKPKV:IGEMS:QHN:XKXS, ASASPXX:VPT:SNIT:IGKTPKI:IGEMS:QH N:XKXS, ASASPXX:VPT:SNIT:VGRTPKV:IGEMS:QHN:XKXS, NDEGLEX:VPT:SNIT:RIKPHQGQH:IGEMS:QHN:QXEXR, NDEGLEX:VPT:SNIT:RIKPHQGQH:IGEMS:QHN:KXEXR, SSVKXQP:VPT:SNIT:EYVRKKPKL:IGEMS:QHN:LEXAXA, RNVQXRP:VPT:SNIT:EIVRKKPIF:IGEMS:QHN:LAXKXE, KIPKAXX:VPT:SNIT:DENEKVV:IGEMS:VVE:GXGXR, GIPEPXX:VPE:SNIT:DENKNVV:IGEMS:TVE:SXAXR, SIPKAXX:VPT:SNIT:DEYDKVV:IGEMS:VVE:GXGXR, HVTKPTX:APT:SNIT:DDSSNVI:IGEMS:VVR:SXGXH, YVPKPXX:APT:SNIT:DDSSNVI:IGEMS:VVR:SXGXH, TVPKPXX:APT:SNIT:DDSSNVI:IGEMS:VVR:AXGXH, AVPKAXX:APT:SNIT:DSSNNVI:IGEMS:VVK:AXGXH, KVGKAXX:VPT:SNIT:DDMGVPT:IGEMS:VAE:XGXR, KASKAXX:VPT:SNIT:DKGVVTY:IGEMS:AVS:EXGXR, GSAGPXX:TPT:SNIT:NDKQQII:IGEMS:VVD:RXGXS, AAPASXX:VPA:SNIT:DAANNVV:IGEMS:VVE:AXGXR, STPPTXX:VPT:SNIT:DSANNVV:IGEMS:VVE:SXGXR, HVPKPXX:APT:SNIT:DDSSNVI:IGEMS:VVR:SXGXH, RVPSTXX:APV:SNIT:DNGRVLL:IGEMS:VEE:XGXL, ASAAPXX:VPQ:SNIT:VGRKPKV:IGEMS:VRS:XKXS, ASASPXX:VSQ:SNIT:IGKTPKI:IGEMS:VKS:XKXS, ASASPXX:VPQ:SNIT:VGRTPKV:IGEMS:VKS:XKXS, NDEGLEX:VPT:SNIT:RIKPHQGQH:IGEMS:EHS:QXEXR, SSVKXQP:SRV:SNIT:EYVRKKPKL:IGEMS:EEH:LEXAXA, RNVQXRP:TQV:SNIT:EIVRKKPIF:IGEMS:EDH:LAXKXE, KIPKAXX:VPT:SNIT:DENEKVV:LGEMS:EHS:GXGXR, GIPEPXX:VPT:SNIT:DENKNVV:LGEMS:EHS:SXAXR, SIPKAXX:VPT:SNIT:DEYDKVV:LGEMS:EHS:GXGXR, HVTKPTX:VPT:SNIT:DDSSNVI:LGEMS:EHS:SXGXH, YVPKPXX:VPT:SNIT:DDSSNVI:LGEMS:EHS:SXGXH, TVPKPXX:VPT:SNIT:DDSSNVI:LGEMS:EHS:AXGXH, AVPKAXX:VPT:SNIT:DSSNNVI:LGEMS:EHS:AXGXH, KVGKAXX:VPT:SNIT:DDMGVPT:LGEMS:EHS:XGXR, KASKAXX:VPT:SNIT:DKGVVTY:LGEMS:EHS:EXGXR, GSAGPXX:VPT:SNIT:NDKQQII:LGEMS:EHS:RXGXS, AAPASXX:VPT:SNIT:DAANNVV:LGEMS:EHS:AXGXR, STPPTXX:VPT:SNIT:DSANNVV:LGEMS:EHS:SXGXR, HVPKPXX:VPT:SNIT:DDSSNVI:LGEMS:EHS:SXGXH, RVPSTXX:VPT:SNIT:DNGRVLL:LGEMS:EHS:XGXL, ASAAPXX:VPT:SNIT:VGRKPKV:LGEMS:EHS:XKXS, ASASPXX:VPT:SNIT:IGKTPKI:LGEMS:EHS:XKXS, ASASPXX:VPT:SNIT:VGRTPKV:LGEMS:EHS:XKXS, NDEGLEX:VPT:SNIT:RIKPHQGQH:LGEMS:EHS:KXEXR, SSVKXQP:VPT:SNIT:EYVRKKPKL:LGEMS:EHS:LEXAXA, RNVQXRP:VPT:SNIT:EIVRKKPIF:LGEMS:EHS:LAXKXE, KIPKAXX:VPT:SNIT:DENEKVV:LGEMS:VVE:GXGXR, GIPEPXX:VPE:SNIT:DENKNVV:LGEMS:TVE:SXAXR, SIPKAXX:VPT:SNIT:DEYDKVV:LGEMS:VVE:GXGXR, HVTKPTX:APT:SNIT:DDSSNVI:LGEMS:VVR:SXGXH, YVPKPXX:APT:SNIT:DDSSNVI:LGEMS:VVR:SXGXH, TVPKPXX:APT:SNIT:DDSSNVI:LGEMS:VVR:AXGXH, AVPKAXX:APT:SNIT:DSSNNVI:LGEMS:VVK:AXGXH, KVGKAXX:VPT:SNIT:DDMGVPT:LGEMS:VAE:XGXR, KASKAXX:VPT:SNIT:DKGVVTY:LGEMS:AVS:EXGXR, GSAGPXX:TPT:SNIT:NDKQQII:LGEMS:VVD:RXGXS, AAPASXX:VPA:SNIT:DAANNVV:LGEMS:VVE:AXGXR, STPPTXX:VPT:SNIT:DSANNVV:LGEMS:VVE:SXGXR, HVPKPXX:APT:SNIT:DDSSNVI:LGEMS:VVR:SXGXH, RVPSTXX:APV:SNIT:DNGRVLL:LGEMS:VEE:XGXL, ASAAPXX:VPQ:SNIT:VGRKPKV:LGEMS:VRS:XKXS, ASASPXX:VSQ:SNIT:IGKTPKI:LGEMS:VKS:XKXS, ASASPXX:VPQ:SNIT:VGRTPKV:LGEMS:VKS:XKXS, NDEGLEX:VPT:SNIT:RIKPHQGQH:LGEMS:QHN:KXEXR, SSVKXQP:SRV:SNIT:EYVRKKPKL:LGEMS:EEH:LEXAXA, RNVQXRP:TQV:SNIT:EIVRKKPIF:LGEMS:EDH:LAXKXE, KIPKAXX:SRV:RSVK:DENEKVV:KEVQV:EEH:GXGXR, GIPEPXX:SRV:RSVK:DENKNVV:KEVQV:EEH:SXAXR, SIPKAXX:SRV:RSVK:DEYDKVV:KEVQV:EEH:GXGXR, HVTKPTX:SRV:RSVK:DDSSNVI:KEVQV:EEH:SXGXH, YVPKPXX:SRV:RSVK:DDSSNVI:KEVQV:EEH:SXGXH, TVPKPXX:SRV:RSVK:DDSSNVI:KEVQV:EEH:AXGXH, AVPKAXX:SRV:RSVK:DSSNNVI:KEVQV:EEH:AXGXH, KVGKAXX:SRV:RSVK:DDMGVPT:KEVQV:EEH:XGXR, KASKAXX:SRV:RSVK:DKGVVTY:KEVQV:EEH:EXGXR, GSAGPXX:SRV:RSVK:NDKQQII:KEVQV:EEH:RXGXS, AAPASXX:SRV:RSVK:DAANNVV:KEVQV:EEH:AXGXR, STPPTXX:SRV:RSVK:DSANNVV:KEVQV:EEH:SXGXR, HVPKPXX:SRV:RSVK:DDSSNVI:KEVQV:EEH:SXGXH, RVPSTXX:SRV:RSVK:DNGRVLL:KEVQV:EEH:XGXL, ASAAPXX:SRV:RSVK:VGRKPKV:KEVQV:EEH:XKXS, ASASPXX:SRV:RSVK:IGKTPKI:KEVQV:EEH:XKXS, ASASPXX:SRV:RSVK:VGRTPKV:KEVQV:EEH:XKXS, NDEGLEX:SRV:RSVK:RIKPHQGQH:KEVQV:EEH:KXEXR, NDEGLEX:SRV:RSVK:RIKPHQGQH:KEVQV:EEH:QXEXR, RNVQXRP:SRV:RSVK:EIVRKKPIF:KEVQV:EEH:LAXKXE, KIPKAXX:VPT:RSVK:DENEKVV:KEVQV:VVE:GXGXR, GIPEPXX:VPE:RSVK:DENKNVV:KEVQV:TVE:SXAXR, SIPKAXX:VPT:RSVK:DEYDKVV:KEVQV:VVE:GXGXR, HVTKPTX:APT:RSVK:DDSSNVI:KEVQV:VVR:SXGXH, YVPKPXX:APT:RSVK:DDSSNVI:KEVQV:VVR:SXGXH, TVPKPXX:APT:RSVK:DDSSNVI:KEVQV:VVR:AXGXH, AVPKAXX:APT:RSVK:DSSNNVI:KEVQV:VVK:AXGXH, KVGKAXX:VPT:RSVK:DDMGVPT:KEVQV:VAE:XGXR, KASKAXX:VPT:RSVK:DKGVVTY:KEVQV:AVS:EXGXR, GSAGPXX:TPT:RSVK:NDKQQII:KEVQV:VVD:RXGXS, AAPASXX:VPA:RSVK:DAANNVV:KEVQV:VVE:AXGXR, STPPTXX:VPT:RSVK:DSANNVV:KEVQV:VVE:SXGXR, HVPKPXX:APT:RSVK:DDSSNVI:KEVQV:VVR:SXGXH, RVPSTXX:APV:RSVK:DNGRVLL:KEVQV:VEE:XGXL, ASAAPXX:VPQ:RSVK:VGRKPKV:KEVQV:VRS:XKXS, ASASPXX:VSQ:RSVK:IGKTPKI:KEVQV:VKS:XKXS, ASASPXX:VPQ:RSVK:VGRTPKV:KEVQV:VKS:XKXS, NDEGLEX:VPT:RSVK:RIKPHQGQH:KEVQV:QHN:KXEXR, NDEGLEX:VPT:RSVK:RIKPHQGQH:KEVQV:EHS:QXEXR, RNVQXRP:TQV:RSVK:EIVRKKPIF:KEVQV:EDH:LAXKXE, KIPKAXX:TQV:RPVQ:DENEKVV:KKATV:EDH:GXGXR, GIPEPXX:TQV:RPVQ:DENKNVV:KKATV:EDH:SXAXR, SIPKAXX:TQV:RPVQ:DEYDKVV:KKATV:EDH:GXGXR, HVTKPTX:TQV:RPVQ:DDSSNVI:KKATV:EDH:SXGXH, YVPKPXX:TQV:RPVQ:DDSSNVI:KKATV:EDH:SXGXH, TVPKPXX:TQV:RPVQ:DDSSNVI:KKATV:EDH:AXGXH, AVPKAXX:TQV:RPVQ:DSSNNVI:KKATV:EDH:AXGXH, KVGKAXX:TQV:RPVQ:DDMGVPT:KKATV:EDH:XGXR, KASKAXX:TQV:RPVQ:DKGVVTY:KKATV:EDH:EXGXR, GSAGPXX:TQV:RPVQ:NDKQQII:KKATV:EDH:RXGXS, AAPASXX:TQV:RPVQ:DAANNVV:KKATV:EDH:AXGXR, STPPTXX:TQV:RPVQ:DSANNVV:KKATV:EDH:SXGXR, HVPKPXX:TQV:RPVQ:DDSSNVI:KKATV:EDH:SXGXH, RVPSTXX:TQV:RPVQ:DNGRVLL:KKATV:EDH:XGXL, ASAAPXX:TQV:RPVQ:VGRKPKV:KKATV:EDH:XKXS, ASASPXX:TQV:RPVQ:IGKTPKI:KKATV:EDH:XKXS, ASASPXX:TQV:RPVQ:VGRTPKV:KKATV:EDH:XKXS, NDEGLEX:TQV:RPVQ:RIKPHQGQH:KKATV:EDH:KXEXR, NDEGLEX:TQV:RPVQ:RIKPHQGQH:KKATV:EDH:QXEXR, SSVKXQP:TQV:RPVQ:EYVRKKPKL:KKATV:EDH:LEXAXA, KIPKAXX:VPT:RPVQ:DENEKVV:KKATV:VVE:GXGXR, GIPEPXX:VPE:RPVQ:DENKNVV:KKATV:TVE:SXAXR, SIPKAXX:VPT:RPVQ:DEYDKVV:KKATV:VVE:GXGXR, HVTKPTX:APT:RPVQ:DDSSNVI:KKATV:VVR:SXGXH, YVPKPXX:APT:RPVQ:DDSSNVI:KKATV:VVR:SXGXH, TVPKPXX:APT:RPVQ:DDSSNVI:KKATV:VVR:AXGXH, AVPKAXX:APT:RPVQ:DSSNNVI:KKATV:VVK:AXGXH, KVGKAXX:VPT:RPVQ:DDMGVPT:KKATV:VAE:XGXR, KASKAXX:VPT:RPVQ:DKGVVTY:KKATV:AVS:EXGXR, GSAGPXX:TPT:RPVQ:NDKQQII:KKATV:VVD:RXGXS, AAPASXX:VPA:RPVQ:DAANN W:KKATV:VVE:AXGXR, STPPTXX:VPT:RPVQ:DSANNVV:KKATV:VVE:SXGXR, HVPKPXX:APT:RPVQ:DDSSNVI:KKATV:VVR:SXGXH, RVPSTXX:APV:RPVQ:DNGRVLL:KKATV:VEE:XGXL, ASAAPXX:VPQ:RPVQ:VGRKPKV:KKATV:VRS:XKXS, ASASPXX:VSQ:RPVQ:IGKTPKI:KKATV:VKS:XKXS, ASASPXX:VPQ:RPVQ:VGRTPKV:KKATV:VKS:XKXS, NDEGLEX:VPT:RPVQ:RIKPHQGQH:KKATV:QHN:KXEXR, NDEGLEX:VPT:RPVQ:RIKPHQGQH:KKATV:EHS:QXEXR and SSVKXQP:SRV:RPVQ:EYVRKKPKL:KKATV:EEH:LEXAXA. More particularly, in certain embodiments, the heptuplet PEP7:PEP3:PEP1:LINKER:PEP2:PEP4:PEP8 is selected from the group consisting of GIPEPXX:VPT:SAIS:DENKNVV:LKNYQ:VVE:SXAXR, HVTKPTX:VPT:SAIS:DDSSNVI:LKNYQ:VVE:SXGXH, YVPKPXX:VPT:SAIS:DDSSNVI:LKNYQ:VVE:SXGXH, TVPKPXX:VPT:SAIS:DDSSNVI:LKNYQ:VVE:AXGXH, AVPKAXX:VPT:SAIS:DSSNNVI:LKNYQ:VVE:AXGXH, KVGKAXX:VPT:SAIS:DDMGVPT:LKNYQ:VVE:XGXR, KASKAXX:VPT:SAIS:DKGVVTY:LKNYQ:VVE:EXGXR, GSAGPXX:VPT:SAIS:NDKQQII:LKNYQ:VVE:RXGXS, AAPASXX:VPT:SAIS:DAANNVV:LKNYQ:VVE:AXGXR, STPPTXX:VPT:SAIS:DSANNVV:LKNYQ:VVE:SXGXR, HVPKPXX:VPT:SAIS:DDSSNVI:LKNYQ:VVE:SXGXH, RVPSTXX:VPT:SAIS:DNGRVLL:LKNYQ:VVE:XGXL, ASAAPXX:VPT:SAIS:VGRKPKV:LKNYQ:VVE:XKXS, ASASPXX:VPT:SAIS:IGKTPKI:LKNYQ:VVE:XKXS, ASASPXX:VPT:SAIS:VGRTPKV:LKNYQ:VVE:XKXS, GIPEPXX:VPE:SAIS:DENKNVV:LKNYQ:TVE:SXAXR, HVTKPTX:APT:SAIS:DDSSNVI:LKNYQ:VVR:SXGXH, YVPKPXX:APT:SAIS:DDSSNVI:LKNYQ:VVR:SXGXH, TVPKPXX:APT:SAIS:DDSSNVI:LKNYQ:VVR:AXGXH, AVPKAXX:APT:SAIS:DSSNNVI:LKNYQ:VVK:AXGXH, KVGKAXX:VPT:SAIS:DDMGVPT:LKNYQ:VAE:XGXR, KASKAXX:VPT:SAIS:DKGVVTY:LKNYQ:AVS:EXGXR, GSAGPXX:TPT:SAIS:NDKQQII:LKNYQ:VVD:RXGXS, AAPASXX:VPA:SAIS:DAANNVV:LKNYQ:VVE:AXGXR, HVPKPXX:APT:SAIS:DDSSNVI:LKNYQ:VVR:SXGXH, RVPSTXX:APV:SAIS:DNGRVLL:LKNYQ:VEE:XGXL, ASAAPXX:VPQ:SAIS:VGRKPKV:LKNYQ:VRS:XKXS, ASASPXX:VSQ:SAIS:IGKTPKI:LKNYQ:VKS:XKXS, ASASPXX:VPQ:SAIS:VGRTPKV:LKNYQ:VKS:XKXS, NDEGLEX:VPT:SAIS:RIKPHQGQH:LKNYQ:QHN:KXEXR, NDEGLEX:VPT:SAIS:RIKPHQGQH:LKNYQ:EHS:QXEXR, SSVKXQP:SRV:SAIS:EYVRKKPKL:LKNYQ:EEH:LEXAXA, RNVQXRP:TQV:SAIS:EIVRKKPIF:LKNYQ:EDH:LAXKXE, KIPKAXX:VPE:SSLS:DENEKVV:LKVYP:TVE:GXGXR, SIPKAXX:VPE:SSLS:DEYDKVV:LKVYP:TVE:GXGXR, HVTKPTX:VPE:SSLS:DDSSNVI:LKVYP:TVE:SXGXH, YVPKPXX:VPE:SSLS:DDSSNVI:LKVYP:TVE:SXGXH, TVPKPXX:VPE:SSLS:DDSSNVI:LKVYP:TVE:AXGXH, AVPKAXX:VPE:SSLS:DSSNNVI:LKVYP:TVE:AXGXH, KVGKAXX:VPE:SSLS:DDMGVPT:LKVYP:TVE:XGXR, KASKAXX:VPE:SSLS:DKGVVTY:LKVYP:TVE:EXGXR, GSAGPXX:VPE:SSLS:NDKQQII:LKVYP:TVE:RXGXS, AAPASXX:VPE:SSLS:DAANNVV:LKVYP:TVE:AXGXR, STPPTXX:VPE:SSLS:DSANNVV:LKVYP:TVE:SXGXR, HVPKPXX:VPE:SSLS:DDSSNVI:LKVYP:TVE:SXGXH, RVPSTXX:VPE:SSLS:DNGRVLL:LKVYP:TVE:XGXL, ASAAPXX:VPE:SSLS:VGRKPKV:LKVYP:TVE:XKXS, ASASPXX:VPE:SSLS:IGKTPKI:LKVYP:TVE:XKXS, ASASPXX:VPE:SSLS:VGRTPKV:LKVYP:TVE:XKXS, KIPKAXX:VPT:SSLS:DENEKVV:LKVYP:VVE:GXGXR, SIPKAXX:VPT:SSLS:DEYDKVV:LKVYP:VVE:GXGXR, HVTKPTX:APT:SSLS:DDSSNVI:LKVYP:VVR:SXGXH, YVPKPXX:APT:SSLS:DDSSNVI:LKVYP:VVR:SXGXH, TVPKPXX:APT:SSLS:DDSSNVI:LKVYP:VVR:AXGXH, AVPKAXX:APT:SSLS:DSSNNVI:LKVYP:VVK:AXGXH, KVGKAXX:VPT:SSLS:DDMGVPT:LKVYP:VAE:XGXR, KASKAXX:VPT:SSLS:DKGVVTY:LKVYP:AVS:EXGXR, GSAGPXX:TPT:SSLS:NDKQQII:LKVYP:VVD:RXGXS, AAPASXX:VPA:SSLS:DAANNVV:LKVYP:VVE:AXGXR, STPPTXX:VPT:SSLS:DSANNVV:LKVYP:VVE:SXGXR, HVPKPXX:APT:SSLS:DDSSNVI:LKVYP:VVR:SXGXH, RVPSTXX:APV:SSLS:DNGRVLL:LKVYP:VEE:XGXL, ASAAPXX:VPQ:SSLS:VGRKPKV:LKVYP:VRS:XKXS, ASASPXX:VSQ:SSLS:IGKTPKI:LKVYP:VKS:XKXS, ASASPXX:VPQ:SSLS:VGRTPKV:LKVYP:VKS:XKXS, NDEGLEX:VPT:SSLS:RIKPHQGQH:LKVYP:QHN:KXEXR, NDEGLEX:VPT:SSLS:RIKPHQGQH:LKVYP:EHS:QXEXR, SSVKXQP:SRV:SSLS:EYVRKKPKL:LKVYP:EEH:LEXAXA, RNVQXRP:TQV:SSLS:EIVRKKPIF:LKVYP:EDH:LAXKXE, KIPKAXX:APT:NAIS:DENEKVV:LKKYR:VVR:GXGXR, GIPEPXX:APT:NAIS:DENKNVV:LKKYR:VVR:SXAXR, SIPKAXX:APT:NAIS:DEYDKVV:LKKYR:VVR:GXGXR, AVPKAXX:APT:NAIS:DSSNNVI:LKKYR:VVR:AXGXH, KVGKAXX:APT:NAIS:DDMGVPT:LKKYR:VVR:XGXR, KASKAXX:APT:NAIS:DKGVVTY:LKKYR:VVR:EXGXR, GSAGPXX:APT:NAIS:NDKQQII:LKKYR:VVR:RXGXS, AAPASXX:APT:NAIS:DAANNVV:LKKYR:VVR:AXGXR, STPPTXX:APT:NAIS:DSANNVV:LKKYR:VVR:SXGXR, RVPSTXX:APT:NAIS:DNGRVLL:LKKYR:VVR:XGXL, ASAAPXX:APT:NAIS:VGRKPKV:LKKYR:VVR:XKXS, ASASPXX:APT:NAIS:IGKTPKI:LKKYR:VVR:XKXS, ASASPXX:APT:NAIS:VGRTPKV:LKKYR:VVR:XKXS, KIPKAXX:VPT:NAIS:DENEKVV:LKKYR:VVE:GXGXR, GIPEPXX:VPE:NAIS:DENKNVV:LKKYR:TVE:SXAXR, SIPKAXX:VPT:NAIS:DEYDKVV:LKKYR:VVE:GXGXR, AVPKAXX:APT:NAIS:DSSNNVI:LKKYR:VVK:AXGXH, KVGKAXX:VPT:NAIS:DDMGVPT:LKKYR:VAE:XGXR, KASKAXX:VPT:NAIS:DKGVVTY:LKKYR:AVS:EXGXR, GSAGPXX:TPT:NAIS:NDKQQII:LKKYR:VVD:RXGXS, AAPASXX:VPA:NAIS:DAANNVV:LKKYR:VVE:AXGXR, STPPTXX:VPT:NAIS:DSANNVV:LKKYR:VVE:SXGXR, RVPSTXX:APV:NAIS:DNGRVLL:LKKYR:VEE:XGXL, ASAAPXX:VPQ:NAIS:VGRKPKV:LKKYR:VRS:XKXS, ASASPXX:VSQ:NAIS:IGKTPKI:LKKYR:VKS:XKXS, ASASPXX:VPQ:NAIS:VGRTPKV:LKKYR:VKS:XKXS, NDEGLEX:VPT:NAIS:RIKPHQGQH:LKKYR:QHN:KXEXR, NDEGLEX:VPT:NAIS:RIKPHQGQH:LKKYR:EHS:QXEXR, SSVKXQP:SRV:NAIS:EYVRKKPKL:LKKYR:EEH:LEXAXA, RNVQXRP:TQV:NAIS:EIVRKKPIF:LKKYR:EDH:LAXKXE, KIPKAXX:APT:SATS:DENEKVV:LRKHR:VVK:GXGXR, GIPEPXX:APT:SATS:DENKNVV:LRKHR:VVK:SXAXR, SIPKAXX:APT:SATS:DEYDKVV:LRKHR:VVK:GXGXR, HVTKPTX:APT:SATS:DDSSNVI:LRKHR:VVK:SXGXH, YVPKPXX:APT:SATS:DDSSNVI:LRKHR:VVK:SXGXH, TVPKPXX:APT:SATS:DDSSNVI:LRKHR:VVK:AXGXH, KVGKAXX:APT:SATS:DDMGVPT:LRKHR:VVK:XGXR, KASKAXX:APT:SATS:DKGVVTY:LRKHR:VVK:EXGXR, GSAGPXX:APT:SATS:NDKQQII:LRKHR:VVK:RXGXS, AAPASXX:APT:SATS:DAANNVV:LRKHR:VVK:AXGXR, STPPTXX:APT:SATS:DSANNVV:LRKHR:VVK:SXGXR, HVPKPXX:APT:SATS:DDSSNVI:LRKHR:VVK:SXGXH, RVPSTXX:APT:SATS:DNGRVLL:LRKHR:VVK:XGXL, ASAAPXX:APT:SATS:VGRKPKV:LRKHR:VVK:XKXS, ASASPXX:APT:SATS:IGKTPKI:LRKHR:VVK:XKXS, ASASPXX:APT:SATS:VGRTPKV:LRKHR:VVK:XKXS, KIPKAXX:VPT:SATS:DENEKVV:LRKHR:VVE:GXGXR, GIPEPXX:VPE:SATS:DENKNVV:LRKHR:TVE:SXAXR, SIPKAXX:VPT:SATS:DEYDKVV:LRKHR:VVE:GXGXR, HVTKPTX:APT:SATS:DDSSNVI:LRKHR:VVR:SXGXH, YVPKPXX:APT:SATS:DDSSNVI:LRKHR:VVR:SXGXH, TVPKPXX:APT:SATS:DDSSNVI:LRKHR:VVR:AXGXH, KVGKAXX:VPT:SATS:DDMGVPT:LRKHR:VAE:XGXR, KASKAXX:VPT:SATS:DKGVVTY:LRKHR:AVS:EXGXR, GSAGPXX:TPT:SATS:NDKQQII:LRKHR:VVD:RXGXS, AAPASXX:VPA:SATS:DAANNVV:LRKHR:VVE:AXGXR, STPPTXX:VPT:SATS:DSANNVV:LRKHR:VVE:SXGXR, HVPKPXX:APT:SATS:DDSSNVI:LRKHR:VVR:SXGXH, RVPSTXX:APV:SATS:DNGRVLL:LRKHR:VEE:XGXL, ASAAPXX:VPQ:SATS:VGRKPKV:LRKHR:VRS:XKXS, ASASPXX:VSQ:SATS:IGKTPKI:LRKHR:VKS:XKXS, ASASPXX:VPQ:SATS:VGRTPKV:LRKHR:VKS:XKXS, NDEGLEX:VPT:SATS:RIKPHQGQH:LRKHR:QHN:KXEXR, NDEGLEX:VPT:SATS:RIKPHQGQH:LRKHR:EHS:QXEXR, SSVKXQP:SRV:SATS:EYVRKKPKL:LRKHR:EEH:LEXAXA, RNVQXRP:TQV:SATS:EIVRKKPIF:LRKHR:EDH:LAXKXE, KIPKAXX:VPT:SPIS:DENEKVV:LKYHY:VAE:GXGXR, GIPEPXX:VPT:SPIS:DENKNVV:LKYHY:VAE:SXAXR, SIPKAXX:VPT:SPIS:DEYDKVV:LKYHY:VAE:GXGXR, HVTKPTX:VPT:SPIS:DDSSNVI:LKYHY:VAE:SXGXH, YVPKPXX:VPT:SPIS:DDSSNVI:LKYHY:VAE:SXGXH, TVPKPXX:VPT:SPIS:DDSSNVI:LKYHY:VAE:AXGXH, AVPKAXX:VPT:SPIS:DSSNNVI:LKYHY:VAE:AXGXH, KASKAXX:VPT:SPIS:DKGVVTY:LKYHY:VAE:EXGXR, GSAGPXX:VPT:SPIS:NDKQQII:LKYHY:VAE:RXGXS, AAPASXX:VPT:SPIS:DAANNVV:LKYHY:VAE:AXGXR, STPPTXX:VPT:SPIS:DSANNVV:LKYHY:VAE:SXGXR, HVPKPXX:VPT:SPIS:DDSSNVI:LKYHY:VAE:SXGXH, RVPSTXX:VPT:SPIS:DNGRVLL:LKYHY:VAE:XGXL, ASAAPXX:VPT:SPIS:VGRKPKV:LKYHY:VAE:XKXS, ASASPXX:VPT:SPIS:IGKTPKI:LKYHY:VAE:XKXS, ASASPXX:VPT:SPIS:VGRTPKV:LKYHY:VAE:XKXS, KIPKAXX:VPT:SPIS:DENEKVV:LKYHY:VVE:GXGXR, GIPEPXX:VPE:SPIS:DENKNVV:LKYHY:TVE:SXAXR, SIPKAXX:VPT:SPIS:DEYDKVV:LKYHY:VVE:GXGXR, HVTKPTX:APT:SPIS:DDSSNVI:LKYHY:VVR:SXGXH, YVPKPXX:APT:SPIS:DDSSNVI:LKYHY:VVR:SXGXH, TVPKPXX:APT:SPIS:DDSSNVI:LKYHY:VVR:AXGXH, AVPKAXX:APT:SPIS:DSSNNVI:LKYHY:VVK:AXGXH, KASKAXX:VPT:SPIS:DKGVVTY:LKYHY:AVS:EXGXR, GSAGPXX:TPT:SPIS:NDKQQII:LKYHY:VVD:RXGXS, AAPASXX:VPA:SPIS:DAANNVV:LKYHY:VVE:AXGXR, STPPTXX:VPT:SPIS:DSANNVV:LKYHY:VVE:SXGXR, HVPKPXX:APT:SPIS:DDSSNVI:LKYHY:VVR:SXGXH, RVPSTXX:APV:SPIS:DNGRVLL:LKYHY:VEE:XGXL, ASAAPXX:VPQ:SPIS:VGRKPKV:LKYHY:VRS:XKXS, ASASPXX:VSQ:SPIS:IGKTPKI:LKYHY:VKS:XKXS, ASASPXX:VPQ:SPIS:VGRTPKV:LKYHY:VKS:XKXS, NDEGLEX:VPT:SPIS:RIKPHQGQH:LKYHY:QHN:KXEXR, NDEGLEX:VPT:SPIS:RIKPHQGQH:LKYHY:EHS:QXEXR, SSVKXQP:SRV:SPIS:EYVRKKPKL:LKYHY:EEH:LEXAXA, RNVQXRP:TQV:SPIS:EIVRKKPIF:LKYHY:EDH:LAXKXE, KIPKAXX:VPT:EPIS:DENEKVV:KFKYE:AVS:GXGXR, GIPEPXX:VPT:EPIS:DENKNVV:KFKYE:AVS:SXAXR, SIPKAXX:VPT:EPIS:DEYDKVV:KFKYE:AVS:GXGXR, HVTKPTX:VPT:EPIS:DDSSNVI:KFKYE:AVS:SXGXH, YVPKPXX:VPT:EPIS:DDSSNVI:KFKYE:AVS:SXGXH, TVPKPXX:VPT:EPIS:DDSSNVI:KFKYE:AVS:AXGXH, AVPKAXX:VPT:EPIS:DSSNNVI:KFKYE:AVS:AXGXH, KVGKAXX:VPT:EPIS:DDMGVPT:KFKYE:AVS:XGXR, GSAGPXX:VPT:EPIS:NDKQQII:KFKYE:AVS:RXGXS, AAPASXX:VPT:EPIS:DAANNVV:KFKYE:AVS:AXGXR, STPPTXX:VPT:EPIS:DSANNVV:KFKYE:AVS:SXGXR, HVPKPXX:VPT:EPIS:DDSSNVI:KFKYE:AVS:SXGXH, RVPSTXX:VPT:EPIS:DNGRVLL:KFKYE:AVS:XGXL, ASAAPXX:VPT:EPIS:VGRKPKV:KFKYE:AVS:XKXS, ASASPXX:VPT:EPIS:IGKTPKI:KFKYE:AVS:XKXS, ASASPXX:VPT:EPIS:VGRTPKV:KFKYE:AVS:XKXS, KIPKAXX:VPT:EPIS:DENEKVV:KFKYE:VVE:GXGXR, GIPEPXX:VPE:EPIS:DENKNVV:KFKYE:TVE:SXAXR, SIPKAXX:VPT:EPIS:DEYDKVV:KFKYE:VVE:GXGXR, HVTKPTX:APT:EPIS:DDSSNVI:KFKYE:VVR:SXGXH, YVPKPXX:APT:EPIS:DDSSNVI:KFKYE:VVR:SXGXH, TVPKPXX:APT:EPIS:DDSSNVI:KFKYE:VVR:AXGXH, AVPKAXX:APT:EPIS:DSSNNVI:KFKYE:VVK:AXGXH, KVGKAXX:VPT:EPIS:DDMGVPT:KFKYE:VAE:XGXR, GSAGPXX:TPT:EPIS:NDKQQII:KFKYE:VVD:RXGXS, AAPASXX:VPA:EPIS:DAANNVV:KFKYE:VVE:AXGXR, STPPTXX:VPT:EPIS:DSANNVV:KFKYE:VVE:SXGXR, HVPKPXX:APT:EPIS:DDSSNVI:KFKYE:VVR:SXGXH, RVPSTXX:APV:EPIS:DNGRVLL:KFKYE:VEE:XGXL, ASAAPXX:VPQ:EPIS:VGRKPKV:KFKYE:VRS:XKXS, ASASPXX:VSQ:EPIS:IGKTPKI:KFKYE:VKS:XKXS, ASASPXX:VPQ:EPIS:VGRTPKV:KFKYE:VKS:XKXS, NDEGLEX:VPT:EPIS:RIKPHQGQH:KFKYE:QHN:KXEXR, NDEGLEX:VPT:EPIS:RIKPHQGQH:KFKYE:EHS:QXEXR, SSVKXQP:SRV:EPIS:EYVRKKPKL:KFKYE:EEH:LEXAXA, RNVQXRP:TQV:EPIS:EIVRKKPIF:KFKYE:EDH:LAXKXE, KIPKAXX:TPT:SPIN:DENEKVV:YGKIP:VVD:GXGXR, GIPEPXX:TPT:SPIN:DENKNVV:YGKIP:VVD:SXAXR, SIPKAXX:TPT:SPIN:DEYDKVV:YGKIP:VVD:GXGXR, HVTKPTX:TPT:SPIN:DDSSNVI:YGKIP:VVD:SXGXH, YVPKPXX:TPT:SPIN:DDSSNVI:YGKIP:VVD:SXGXH, TVPKPXX:TPT:SPIN:DDSSNVI:YGKIP:VVD:AXGXH, AVPKAXX:TPT:SPIN:DSSNNVI:YGKIP:VVD:AXGXH, KVGKAXX:TPT:SPIN:DDMGVPT:YGKIP:VVD:XGXR, KASKAXX:TPT:SPIN:DKGVVTY:YGKIP:VVD:EXGXR, AAPASXX:TPT:SPIN:DAANNVV:YGKIP:VVD:AXGXR, STPPTXX:TPT:SPIN:DSANNVV:YGKIP:VVD:SXGXR, HVPKPXX:TPT:SPIN:DDSSNVI:YGKIP:VVD:SXGXH, RVPSTXX:TPT:SPIN:DNGRVLL:YGKIP:VVD:XGXL, ASAAPXX:TPT:SPIN:VGRKPKV:YGKIP:VVD:XKXS, ASASPXX:TPT:SPIN:IGKTPKI:YGKIP:VVD:XKXS, ASASPXX:TPT:SPIN:VGRTPKV:YGKIP:VVD:XKXS, KIPKAXX:VPT:SPIN:DENEKVV:YGKIP:VVE:GXGXR, GIPEPXX:VPE:SPIN:DENKNVV:YGKIP:TVE:SXAXR, SIPKAXX:VPT:SPIN:DEYDKVV:YGKIP:VVE:GXGXR, HVTKPTX:APT:SPIN:DDSSNVI:YGKIP:VVR:SXGXH, YVPKPXX:APT:SPIN:DDSSNVI:YGKIP:VVR:SXGXH, TVPKPXX:APT:SPIN:DDSSNVI:YGKIP:VVR:AXGXH, AVPKAXX:APT:SPIN:DSSNNVI:YGKIP:VVK:AXGXH, KVGKAXX:VPT:SPIN:DDMGVPT:YGKIP:VAE:XGXR, KASKAXX:VPT:SPIN:DKGVVTY:YGKIP:AVS:EXGXR, AAPASXX:VPA:SPIN:DAANNVV:YGKIP:VVE:AXGXR, STPPTXX:VPT:SPIN:DSANNVV:YGKIP:VVE:SXGXR, HVPKPXX:APT:SPIN:DDSSNVI:YGKIP:VVR:SXGXH, RVPSTXX:APV:SPIN:DNGRVLL:YGKIP:VEE:XGXL, ASAAPXX:VPQ:SPIN:VGRKPKV:YGKIP:VRS:XKXS, ASASPXX:VSQ:SPIN:IGKTPKI:YGKIP:VKS:XKXS, ASASPXX:VPQ:SPIN:VGRTPKV:YGKIP:VKS:XKXS, NDEGLEX:VPT:SPIN:RIKPHQGQH:YGKIP:QHN:KXEXR, NDEGLEX:VPT:SPIN:RIKPHQGQH:YGKIP:EHS:QXEXR, SSVKXQP:SRV:SPIN:EYVRKKPKL:YGKIP:EEH:LEXAXA, RNVQXRP:TQV:SPIN:EIVRKKPIF:YGKIP:EDH:LAXKXE, KIPKAXX:VPA:SPIS:DENEKVV:YKQYE:VVE:GXGXR, GIPEPXX:VPA:SPIS:DENKNVV:YKQYE:VVE:SXAXR, SIPKAXX:VPA:SPIS:DEYDKVV:YKQYE:VVE:GXGXR, HVTKPTX:VPA:SPIS:DDSSNVI:YKQYE:VVE:SXGXH, YVPKPXX:VPA:SPIS:DDSSNVI:YKQYE:VVE:SXGXH, TVPKPXX:VPA:SPIS:DDSSNVI:YKQYE:VVE:AXGXH, AVPKAXX:VPA:SPIS:DSSNNVI:YKQYE:VVE:AXGXH, KVGKAXX:VPA:SPIS:DDMGVPT:YKQYE:VVE:XGXR, KASKAXX:VPA:SPIS:DKGVVTY:YKQYE:VVE:EXGXR, GSAGPXX:VPA:SPIS:NDKQQII:YKQYE:VVE:RXGXS, STPPTXX:VPA:SPIS:DSANNVV:YKQYE:VVE:SXGXR, HVPKPXX:VPA:SPIS:DDSSNVI:YKQYE:VVE:SXGXH, RVPSTXX:VPA:SPIS:DNGRVLL:YKQYE:VVE:XGXL, ASAAPXX:VPA:SPIS:VGRKPKV:YKQYE:VVE:XKXS, ASASPXX:VPA:SPIS:IGKTPKI:YKQYE:VVE:XKXS, ASASPXX:VPA:SPIS:VGRTPKV:YKQYE:VVE:XKXS, KIPKAXX:VPT:SPIS:DENEKVV:YKQYE:VVE:GXGXR, GIPEPXX:VPE:SPIS:DENKNVV:YKQYE:TVE:SXAXR, SIPKAXX:VPT:SPIS:DEYDKVV:YKQYE:VVE:GXGXR, HVTKPTX:APT:SPIS:DDSSNVI:YKQYE:VVR:SXGXH, YVPKPXX:APT:SPIS:DDSSNVI:YKQYE:VVR:SXGXH, TVPKPXX:APT:SPIS:DDSSNVI:YKQYE:VVR:AXGXH, AVPKAXX:APT:SPIS:DSSNNVI:YKQYE:VVK:AXGXH, KVGKAXX:VPT:SPIS:DDMGVPT:YKQYE:VAE:XGXR, KASKAXX:VPT:SPIS:DKGVVTY:YKQYE:AVS:EXGXR, GSAGPXX:TPT:SPIS:NDKQQII:YKQYE:VVD:RXGXS, STPPTXX:VPT:SPIS:DSANNVV:YKQYE:VVE:SXGXR, HVPKPXX:APT:SPIS:DDSSNVI:YKQYE:VVR:SXGXH, RVPSTXX:APV:SPIS:DNGRVLL:YKQYE:VEE:XGXL, ASAAPXX:VPQ:SPIS:VGRKPKV:YKQYE:VRS:XKXS, ASASPXX:VSQ:SPIS:IGKTPKI:YKQYE:VKS:XKXS, ASASPXX:VPQ:SPIS:VGRTPKV:YKQYE:VKS:XKXS, NDEGLEX:VPT:SPIS:RIKPHQGQH:YKQYE:QHN:KXEXR, NDEGLEX:VPT:SPIS:RIKPHQGQH:YKQYE:EHS:QXEXR, SSVKXQP:SRV:SPIS:EYVRKKPKL:YKQYE:EEH:LEXAXA, RNVQXRP:TQV:SPIS:EIVRKKPIF:YKQYE:EDH:LAXKXE, GIPEPXX:VPT:SPIS:DENKNVV:YKQYE:VVE:SXAXR, HVTKPTX:VPT:SPIS:DDSSNVI:YKQYE:VVE:SXGXH, YVPKPXX:VPT:SPIS:DDSSNVI:YKQYE:VVE:SXGXH, TVPKPXX:VPT:SPIS:DDSSNVI:YKQYE:VVE:AXGXH, AVPKAXX:VPT:SPIS:DSSNNVI:YKQYE:VVE:AXGXH, KVGKAXX:VPT:SPIS:DDMGVPT:YKQYE:VVE:XGXR, KASKAXX:VPT:SPIS:DKGVVTY:YKQYE:VVE:EXGXR, GSAGPXX:VPT:SPIS:NDKQQII:YKQYE:VVE:RXGXS, AAPASXX:VPT:SPIS:DAANNVV:YKQYE:VVE:AXGXR, HVPKPXX:VPT:SPIS:DDSSNVI:YKQYE:VVE:SXGXH, RVPSTXX:VPT:SPIS:DNGRVLL:YKQYE:VVE:XGXL, ASAAPXX:VPT:SPIS:VGRKPKV:YKQYE:VVE:XKXS, ASASPXX:VPT:SPIS:IGKTPKI:YKQYE:VVE:XKXS, ASASPXX:VPT:SPIS:VGRTPKV:YKQYE:VVE:XKXS, AAPASXX:VPA:SPIS:DAANNVV:YKQYE:VVE:AXGXR, KIPKAXX:APV:KPLS:DENEKVV:DHHKD:VEE:GXGXR, GIPEPXX:APV:KPLS:DENKNVV:DHHKD:VEE:SXAXR, SIPKAXX:APV:KPLS:DEYDKVV:DHHKD:VEE:GXGXR, HVTKPTX:APV:KPLS:DDSSNVI:DHHKD:VEE:SXGXH, YVPKPXX:APV:KPLS:DDSSNVI:DHHKD:VEE:SXGXH, TVPKPXX:APV:KPLS:DDSSNVI:DHHKD:VEE:AXGXH, AVPKAXX:APV:KPLS:DSSNNVI:DHHKD:VEE:AXGXH, KVGKAXX:APV:KPLS:DDMGVPT:DHHKD:VEE:XGXR, KASKAXX:APV:KPLS:DKGVVTY:DHHKD:VEE:EXGXR, GSAGPXX:APV:KPLS:NDKQQII:DHHKD:VEE:RXGXS, AAPASXX:APV:KPLS:DAANNVV:DHHKD:VEE:AXGXR, STPPTXX:APV:KPLS:DSANNVV:DHHKD:VEE:SXGXR, HVPKPXX:APV:KPLS:DDSSNVI:DHHKD:VEE:SXGXH, ASAAPXX:APV:KPLS:VGRKPKV:DHHKD:VEE:XKXS, ASASPXX:APV:KPLS:IGKTPKI:DHHKD:VEE:XKXS, ASASPXX:APV:KPLS:VGRTPKV:DHHKD:VEE:XKXS, KIPKAXX:VPT:KPLS:DENEKVV:DHHKD:VVE:GXGXR, GIPEPXX:VPE:KPLS:DENKNVV:DHHKD:TVE:SXAXR, SIPKAXX:VPT:KPLS:DEYDKVV:DHHKD:VVE:GXGXR, HVTKPTX:APT:KPLS:DDSSNVI:DHHKD:VVR:SXGXH, YVPKPXX:APT:KPLS:DDSSNVI:DHHKD:VVR:SXGXH, TVPKPXX:APT:KPLS:DDSSNVI:DHHKD:VVR:AXGXH, AVPKAXX:APT:KPLS:DSSNNVI:DHHKD:VVK:AXGXH, KVGKAXX:VPT:KPLS:DDMGVPT:DHHKD:VAE:XGXR, KASKAXX:VPT:KPLS:DKGVVTY:DHHKD:AVS:EXGXR, GSAGPXX:TPT:KPLS:NDKQQII:DHHKD:VVD:RXGXS, AAPASXX:VPA:KPLS:DAANNVV:DHHKD:VVE:AXGXR, STPPTXX:VPT:KPLS:DSANNVV:DHHKD:VVE:SXGXR, HVPKPXX:APT:KPLS:DDSSNVI:DHHKD:VVR:SXGXH, ASAAPXX:VPQ:KPLS:VGRKPKV:DHHKD:VRS:XKXS, ASASPXX:VSQ:KPLS:IGKTPKI:DHHKD:VKS:XKXS, ASASPXX:VPQ:KPLS:VGRTPKV:DHHKD:VKS:XKXS, NDEGLEX:VPT:KPLS:RIKPHQGQH:DHHKD:QHN:KXEXR, NDEGLEX:VPT:KPLS:RIKPHQGQH:DHHKD:EHS:QXEXR, SSVKXQP:SRV:KPLS:EYVRKKPKL:DHHKD:EEH:LEXAXA, RNVQXRP:TQV:KPLS:EIVRKKPIF:DHHKD:EDH:LAXKXE, KIPKAXX:VPQ:EPLP:DENEKVV:EQLSN:VRS:GXGXR, GIPEPXX:VPQ:EPLP:DENKNVV:EQLSN:VRS:SXAXR, SIPKAXX:VPQ:EPLP:DEYDKVV:EQLSN:VRS:GXGXR, HVTKPTX:VPQ:EPLP:DDSSNVI:EQLSN:VRS:SXGXH, YVPKPXX:VPQ:EPLP:DDSSNVI:EQLSN:VRS:SXGXH, TVPKPXX:VPQ:EPLP:DDSSNVI:EQLSN:VRS:AXGXH, AVPKAXX:VPQ:EPLP:DSSNNVI:EQLSN:VRS:AXGXH, KVGKAXX:VPQ:EPLP:DDMGVPT:EQLSN:VRS:XGXR, KASKAXX:VPQ:EPLP:DKGVVTY:EQLSN:VRS:EXGXR, GSAGPXX:VPQ:EPLP:NDKQQII:EQLSN:VRS:RXGXS, AAPASXX:VPQ:EPLP:DAANNVV:EQLSN:VRS:AXGXR, STPPTXX:VPQ:EPLP:DSANNVV:EQLSN:VRS:SXGXR, HVPKPXX:VPQ:EPLP:DDSSNVI:EQLSN:VRS:SXGXH, RVPSTXX:VPQ:EPLP:DNGRVLL:EQLSN:VRS:XGXL, ASASPXX:VPQ:EPLP:IGKTPKI:EQLSN:VRS:XKXS, ASASPXX:VPQ:EPLP:VGRTPKV:EQLSN:VRS:XKXS, KIPKAXX:VPT:EPLP:DENEKVV:EQLSN:VVE:GXGXR, GIPEPXX:VPE:EPLP:DENKNVV:EQLSN:TVE:SXAXR, SIPKAXX:VPT:EPLP:DEYDKVV:EQLSN:VVE:GXGXR, HVTKPTX:APT:EPLP:DDSSNVI:EQLSN:VVR:SXGXH, YVPKPXX:APT:EPLP:DDSSNVI:EQLSN:VVR:SXGXH, TVPKPXX:APT:EPLP:DDSSNVI:EQLSN:VVR:AXGXH, AVPKAXX:APT:EPLP:DSSNNVI:EQLSN:VVK:AXGXH, KVGKAXX:VPT:EPLP:DDMGVPT:EQLSN:VAE:XGXR, KASKAXX:VPT:EPLP:DKGVVTY:EQLSN:AVS:EXGXR, GSAGPXX:TPT:EPLP:NDKQQII:EQLSN:VVD:RXGXS, AAPASXX:VPA:EPLP:DAANNVV:EQLSN:VVE:AXGXR, STPPTXX:VPT:EPLP:DSANNVV:EQLSN:VVE:SXGXR, HVPKPXX:APT:EPLP:DDSSNVI:EQLSN:VVR:SXGXH, RVPSTXX:APV:EPLP:DNGRVLL:EQLSN:VEE:XGXL, ASASPXX:VSQ:EPLP:IGKTPKI:EQLSN:VKS:XKXS, ASASPXX:VPQ:EPLP:VGRTPKV:EQLSN:VKS:XKXS, NDEGLEX:VPT:EPLP:RIKPHQGQH:EQLSN:QHN:KXEXR, NDEGLEX:VPT:EPLP:RIKPHQGQH:EQLSN:EHS:QXEXR, SSVKXQP:SRV:EPLP:EYVRKKPKL:EQLSN:EEH:LEXAXA, RNVQXRP:TQV:EPLP:EIVRKKPIF:EQLSN:EDH:LAXKXE, KIPKAXX:VSQ:EPLT:DENEKVV:EQLSN:VKS:GXGXR, GIPEPXX:VSQ:EPLT:DENKNVV:EQLSN:VKS:SXAXR, SIPKAXX:VSQ:EPLT:DEYDKVV:EQLSN:VKS:GXGXR, HVTKPTX:VSQ:EPLT:DDSSNVI:EQLSN:VKS:SXGXH, YVPKPXX:VSQ:EPLT:DDSSNVI:EQLSN:VKS:SXGXH, TVPKPXX:VSQ:EPLT:DDSSNVI:EQLSN:VKS:AXGXH, AVPKAXX:VSQ:EPLT:DSSNNVI:EQLSN:VKS:AXGXH, KVGKAXX:VSQ:EPLT:DDMGVPT:EQLSN:VKS:XGXR, KASKAXX:VSQ:EPLT:DKGVVTY:EQLSN:VKS:EXGXR, GSAGPXX:VSQ:EPLT:NDKQQII:EQLSN:VKS:RXGXS, AAPASXX:VSQ:EPLT:DAANNVV:EQLSN:VKS:AXGXR, STPPTXX:VSQ:EPLT:DSANNVV:EQLSN:VKS:SXGXR, HVPKPXX:VSQ:EPLT:DDSSNVI:EQLSN:VKS:SXGXH, RVPSTXX:VSQ:EPLT:DNGRVLL:EQLSN:VKS:XGXL, ASAAPXX:VSQ:EPLT:VGRKPKV:EQLSN:VKS:XKXS, ASASPXX:VSQ:EPLT:VGRTPKV:EQLSN:VKS:XKXS, KIPKAXX:VPT:EPLT:DENEKVV:EQLSN:VVE:GXGXR, GIPEPXX:VPE:EPLT:DENKNVV:EQLSN:TVE:SXAXR, SIPKAXX:VPT:EPLT:DEYDKVV:EQLSN:VVE:GXGXR, HVTKPTX:APT:EPLT:DDSSNVI:EQLSN:VVR:SXGXH, YVPKPXX:APT:EPLT:DDSSNVI:EQLSN:VVR:SXGXH, TVPKPXX:APT:EPLT:DDSSNVI:EQLSN:VVR:AXGXH, AVPKAXX:APT:EPLT:DSSNNVI:EQLSN:VVK:AXGXH, KVGKAXX:VPT:EPLT:DDMGVPT:EQLSN:VAE:XGXR, KASKAXX:VPT:EPLT:DKGVVTY:EQLSN:AVS:EXGXR, GSAGPXX:TPT:EPLT:NDKQQII:EQLSN:VVD:RXGXS, AAPASXX:VPA:EPLT:DAANNVV:EQLSN:VVE:AXGXR, STPPTXX:VPT:EPLT:DSANNVV:EQLSN:VVE:SXGXR, HVPKPXX:APT:EPLT:DDSSNVI:EQLSN:VVR:SXGXH, RVPSTXX:APV:EPLT:DNGRVLL:EQLSN:VEE:XGXL, ASAAPXX:VPQ:EPLT:VGRKPKV:EQLSN:VRS:XKXS, NDEGLEX:VPT:EPLT:RIKPHQGQH:EQLSN:QHN:KXEXR, NDEGLEX:VPT:EPLT:RIKPHQGQH:EQLSN:EHS:QXEXR, SSVKXQP:SRV:EPLT:EYVRKKPKL:EQLSN:EEH:LEXAXA, RNVQXRP:TQV:EPLT:EIVRKKPIF:EQLSN:EDH:LAXKXE, KIPKAXX:VPQ:EPLT:DENEKVV:EQLSN:VKS:GXGXR, GIPEPXX:VPQ:EPLT:DENKNVV:EQLSN:VKS:SXAXR, SIPKAXX:VPQ:EPLT:DEYDKVV:EQLSN:VKS:GXGXR, HVTKPTX:VPQ:EPLT:DDSSNVI:EQLSN:VKS:SXGXH, YVPKPXX:VPQ:EPLT:DDSSNVI:EQLSN:VKS:SXGXH, TVPKPXX:VPQ:EPLT:DDSSNVI:EQLSN:VKS:AXGXH, AVPKAXX:VPQ:EPLT:DSSNNVI:EQLSN:VKS:AXGXH, KVGKAXX:VPQ:EPLT:DDMGVPT:EQLSN:VKS:XGXR, KASKAXX:VPQ:EPLT:DKGVVTY:EQLSN:VKS:EXGXR, GSAGPXX:VPQ:EPLT:NDKQQII:EQLSN:VKS:RXGXS, AAPASXX:VPQ:EPLT:DAANNVV:EQLSN:VKS:AXGXR, STPPTXX:VPQ:EPLT:DSANNVV:EQLSN:VKS:SXGXR, HVPKPXX:VPQ:EPLT:DDSSNVI:EQLSN:VKS:SXGXH, RVPSTXX:VPQ:EPLT:DNGRVLL:EQLSN:VKS:XGXL, ASAAPXX:VPQ:EPLT:VGRKPKV:EQLSN:VKS:XKXS, ASASPXX:VPQ:EPLT:IGKTPKI:EQLSN:VKS:XKXS, NDEGLEX:VPT:SNIT:RIKPHQGQH:IGEMS:QHN:QXEXR, KIPKAXX:VPT:SNIT:DENEKVV:IGEMS:VVE:GXGXR, GIPEPXX:VPE:SNIT:DENKNVV:IGEMS:TVE:SXAXR, SIPKAXX:VPT:SNIT:DEYDKVV:IGEMS:VVE:GXGXR, HVTKPTX:APT:SNIT:DDSSNVI:IGEMS:VVR:SXGXH, YVPKPXX:APT:SNIT:DDSSNVI:IGEMS:VVR:SXGXH, TVPKPXX:APT:SNIT:DDSSNVI:IGEMS:VVR:AXGXH, AVPKAXX:APT:SNIT:DSSNNVI:IGEMS:VVK:AXGXH, KVGKAXX:VPT:SNIT:DDMGVPT:IGEMS:VAE:XGXR, KASKAXX:VPT:SNIT:DKGVVTY:IGEMS:AVS:EXGXR, GSAGPXX:TPT:SNIT:NDKQQII:IGEMS:VVD:RXGXS, AAPASXX:VPA:SNIT:DAANNVV:IGEMS:VVE:AXGXR, STPPTXX:VPT:SNIT:DSANNVV:IGEMS:VVE:SXGXR, HVPKPXX:APT:SNIT:DDSSNVI:IGEMS:VVR:SXGXH, RVPSTXX:APV:SNIT:DNGRVLL:IGEMS:VEE:XGXL, ASAAPXX:VPQ:SNIT:VGRKPKV:IGEMS:VRS:XKXS, ASASPXX:VSQ:SNIT:IGKTPKI:IGEMS:VKS:XKXS, ASASPXX:VPQ:SNIT:VGRTPKV:IGEMS:VKS:XKXS, NDEGLEX:VPT:SNIT:RIKPHQGQH:IGEMS:EHS:QXEXR, SSVKXQP:SRV:SNIT:EYVRKKPKL:IGEMS:EEH:LEXAXA, RNVQXRP:TQV:SNIT:EIVRKKPIF:IGEMS:EDH:LAXKXE, NDEGLEX:VPT:SNIT:RIKPHQGQH:LGEMS:EHS:KXEXR, KIPKAXX:VPT:SNIT:DENEKVV:LGEMS:VVE:GXGXR, GIPEPXX:VPE:SNIT:DENKNVV:LGEMS:TVE:SXAXR, SIPKAXX:VPT:SNIT:DEYDKVV:LGEMS:VVE:GXGXR, HVTKPTX:APT:SNIT:DDSSNVI:LGEMS:VVR:SXGXH, YVPKPXX:APT:SNIT:DDSSNVI:LGEMS:VVR:SXGXH, TVPKPXX:APT:SNIT:DDSSNVI:LGEMS:VVR:AXGXH, AVPKAXX:APT:SNIT:DSSNNVI:LGEMS:VVK:AXGXH, KVGKAXX:VPT:SNIT:DDMGVPT:LGEMS:VAE:XGXR, KASKAXX:VPT:SNIT:DKGVVTY:LGEMS:AVS:EXGXR, GSAGPXX:TPT:SNIT:NDKQQII:LGEMS:VVD:RXGXS, AAPASXX:VPA:SNIT:DAANNVV:LGEMS:VVE:AXGXR, STPPTXX:VPT:SNIT:DSANNVV:LGEMS:VVE:SXGXR, HVPKPXX:APT:SNIT:DDSSNVI:LGEMS:VVR:SXGXH, RVPSTXX:APV:SNIT:DNGRVLL:LGEMS:VEE:XGXL, ASAAPXX:VPQ:SNIT:VGRKPKV:LGEMS:VRS:XKXS, ASASPXX:VSQ:SNIT:IGKTPKI:LGEMS:VKS:XKXS, ASASPXX:VPQ:SNIT:VGRTPKV:LGEMS:VKS:XKXS, NDEGLEX:VPT:SNIT:RIKPHQGQH:LGEMS:QHN:KXEXR, SSVKXQP:SRV:SNIT:EYVRKKPKL:LGEMS:EEH:LEXAXA, RNVQXRP:TQV:SNIT:EIVRKKPIF:LGEMS:EDH:LAXKXE, RNVQXRP:SRV:RSVK:EIVRKKPIF:KEVQV:EEH:LAXKXE, KIPKAXX:VPT:RSVK:DENEKVV:KEVQV:VVE:GXGXR, GIPEPXX:VPE:RSVK:DENKNVV:KEVQV:TVE:SXAXR, SIPKAXX:VPT:RSVK:DEYDKVV:KEVQV:VVE:GXGXR, HVTKPTX:APT:RSVK:DDSSNVI:KEVQV:VVR:SXGXH, YVPKPXX:APT:RSVK:DDSSNVI:KEVQV:VVR:SXGXH, TVPKPXX:APT:RSVK:DDSSNVI:KEVQV:VVR:AXGXH, AVPKAXX:APT:RSVK:DSSNNVI:KEVQV:VVK:AXGXH, KVGKAXX:VPT:RSVK:DDMGVPT:KEVQV:VAE:XGXR, KASKAXX:VPT:RSVK:DKGVVTY:KEVQV:AVS:EXGXR, GSAGPXX:TPT:RSVK:NDKQQII:KEVQV:VVD:RXGXS, AAPASXX:VPA:RSVK:DAANNVV:KEVQV:VVE:AXGXR, STPPTXX:VPT:RSVK:DSANNVV:KEVQV:VVE:SXGXR, HVPKPXX:APT:RSVK:DDSSNVI:KEVQV:VVR:SXGXH, RVPSTXX:APV:RSVK:DNGRVLL:KEVQV:VEE:XGXL, ASAAPXX:VPQ:RSVK:VGRKPKV:KEVQV:VRS:XKXS, ASASPXX:VSQ:RSVK:IGKTPKI:KEVQV:VKS:XKXS, ASASPXX:VPQ:RSVK:VGRTPKV:KEVQV:VKS:XKXS, NDEGLEX:VPT:RSVK:RIKPHQGQH:KEVQV:QHN:KXEXR, NDEGLEX:VPT:RSVK:RIKPHQGQH:KEVQV:EHS:QXEXR, RNVQXRP:TQV:RSVK:EIVRKKPIF:KEVQV:EDH:LAXKXE, SSVKXQP:TQV:RPVQ:EYVRKKPKL:KKATV:EDH:LEXAXA, KIPKAXX:VPT:RPVQ:DENEKVV:KKATV:VVE:GXGXR, GIPEPXX:VPE:RPVQ:DENKNVV:KKATV:TVE:SXAXR, SIPKAXX:VPT:RPVQ:DEYDKVV:KKATV:VVE:GXGXR, HVTKPTX:APT:RPVQ:DDSSNVI:KKATV:VVR:SXGXH, YVPKPXX:APT:RPVQ:DDSSNVI:KKATV:VVR:SXGXH, TVPKPXX:APT:RPVQ:DDSSNVI:KKATV:VVR:AXGXH, AVPKAXX:APT:RPVQ:DSSNNVI:KKATV:VVK:AXGXH, KVGKAXX:VPT:RPVQ:DDMGVPT:KKATV:VAE:XGXR, KASKAXX:VPT:RPVQ:DKGVVTY:KKATV:AVS:EXGXR, GSAGPXX:TPT:RPVQ:NDKQQII:KKATV:VVD:RXGXS, AAPASXX:VPA:RPVQ:DAAN N W:KKATV:VVE:AXGXR, STPPTXX:VPT:RPVQ:DSANNVV:KKATV:VVE:SXGXR, HVPKPXX:APT:RPVQ:DDSSNVI:KKATV:VVR:SXGXH, RVPSTXX:APV:RPVQ:DNGRVLL:KKATV:VEE:XGXL, ASAAPXX:VPQ:RPVQ:VGRKPKV:KKATV:VRS:XKXS, ASASPXX:VSQ:RPVQ:IGKTPKI:KKATV:VKS:XKXS, ASASPXX:VPQ:RPVQ:VGRTPKV:KKATV:VKS:XKXS, NDEGLEX:VPT:RPVQ:RIKPHQGQH:KKATV:QHN:KXEXR, NDEGLEX:VPT:RPVQ:RIKPHQGQH:KKATV:EHS:QXEXR and SSVKXQP:SRV:RPVQ:EYVRKKPKL:KKATV:EEH:LEXAXA.

[0444] In particular, in certain embodiments, the heptuplet PEP7:PEP3:PEP12:LINKER:PEP2:PEP4:PEP8 is selected from the group consisting of GIPEPXX:VPT:SAIS-AA¹⁷-LYL:DENKNVV:LKNYQ:VVE:SXAXR, SIPKAXX:VPT:SAIS-AA¹⁷-LYL:DEYDKVV:LKNYQ:VVE:GXGXR, HVTKPTX:VPT:SAIS-AA¹⁷-LYL:DDSSNVI:LKNYQ:VVE:SXGXH, YVPKPXX:VPT:SAIS-AA¹⁷-LYL:DDSSNVI:LKNYQ:VVE:SXGXH, TVPKPXX:VPT:SAIS-AA¹⁷-LYL:DDSSNVI:LKNYQ:VVE:AXGXH, AVPKAXX:VPT:SAIS-AA¹⁷-LYL:DSSNNVI:LKNYQ:VVE:AXGXH, KVGKAXX:VPT:SAIS-AA¹⁷-LYL:DDMGVPT:LKNYQ:VVE:XGXR, KASKAXX:VPT:SAIS-AA¹⁷-LYL:DKGVVTY:LKNYQ:VVE:EXGXR, GSAGPXX:VPT:SAIS-AA¹⁷-LYL:NDKQQII:LKNYQ:VVE:RXGXS, AAPASXX:VPT:SAIS-AA¹⁷-LYL:DAANNVV:LKNYQ:VVE:AXGXR, STPPTXX:VPT:SAIS-AA¹⁷-LYL:DSANNVV:LKNYQ:VVE:SXGXR, HVPKPXX:VPT:SAIS-AA¹⁷-LYL:DDSSNVI:LKNYQ:VVE:SXGXH, RVPSTXX:VPT:SAIS-AA¹⁷-LYL:DNGRVLL:LKNYQ:VVE:XGXL, ASAAPXX:VPT:SAIS-AA¹⁷-LYL:VGRKPKV:LKNYQ:VVE:XKXS, ASASPXX:VPT:SAIS-AA¹⁷-LYL:IGKTPKI:LKNYQ:VVE:XKXS, ASASPXX:VPT:SAIS-AA¹⁷-LYL:VGRTPKV:LKNYQ:VVE:XKXS, NDEGLEX:VPT:SAIS-AA¹⁷-LYL:RIKPHQGQH:LKNYQ:VVE:KXEXR, NDEGLEX:VPT:SAIS-AA¹⁷-LYL:RIKPHQGQH:LKNYQ:VVE:QXEXR, SSVKXQP:VPT:SAIS-AA¹⁷-LYL:EYVRKKPKL:LKNYQ:VVE:LEXAXA, RNVQXRP:VPT:SAIS-AA¹⁷-LYL:EIVRKKPIF:LKNYQ:VVE:LAXKXE, GIPEPXX:VPE:SAIS-AA¹⁷-LYL:DENKNVV:LKNYQ:TVE:SXAXR, HVTKPTX:APT:SAIS-AA¹⁷-LYL:DDSSNVI:LKNYQ:VVR:SXGXH, YVPKPXX:APT:SAIS-AA¹⁷-LYL:DDSSNVI:LKNYQ:VVR:SXGXH, TVPKPXX:APT:SAIS-AA¹⁷-LYL:DDSSNVI:LKNYQ:VVR:AXGXH, AVPKAXX:APT:SAIS-AA¹⁷-LYL:DSSNNVI:LKNYQ:VVK:AXGXH, KVGKAXX:VPT:SAIS-AA¹⁷-LYL:DDMGVPT:LKNYQ:VAE:XGXR, KASKAXX:VPT:SAIS-AA¹⁷-LYL:DKGVVTY:LKNYQ:AVS:EXGXR, GSAGPXX:TPT:SAIS-AA¹⁷-LYL:N DKQQII:LKNYQ:VVD:RXGXS, AAPASXX:VPA:SAIS-AA¹⁷-LYL:DAANNVV:LKNYQ:VVE:AXGXR, HVPKPXX:APT:SAIS-AA¹⁷-LYL:DDSSNVI:LKNYQ:VVR:SXGXH, RVPSTXX:APV:SAIS-AA¹⁷-LYL:DNGRVLL:LKNYQ:VEE:XGXL, ASAAPXX:VPQ:SAIS-AA¹⁷-LYL:VGRKPKV:LKNYQ:VRS:XKXS, ASASPXX:VSQ:SAIS-AA¹⁷-LYL:IGKTPKI:LKNYQ:VKS:XKXS, ASASPXX:VPQ:SAIS-AA¹⁷-LYL:VGRTPKV:LKNYQ:VKS:XKXS, NDEGLEX:VPT:SAIS-AA¹⁷-LYL:RIKPHQGQH:LKNYQ:QHN:KXEXR, NDEGLEX:VPT:SAIS-AA¹⁷-LYL:RIKPHQGQH:LKNYQ:EHS:QXEXR, SSVKXQP:SRV:SAIS-AA¹⁷-LYL:EYVRKKPKL:LKNYQ:EEH:LEXAXA, RNVQXRP:TQV:SAIS-AA¹⁷-LYL:EIVRKKPIF:LKNYQ:EDH:LAXKXE, KIPKAXX:VPE:SSLS-AA¹⁷-LFF:DENEKVV:LKVYP:TVE:GXGXR, SIPKAXX:VPE:SSLS-AA¹⁷-LFF:DEYDKVV:LKVYP:TVE:GXGXR, HVTKPTX:VPE:SSLS-AA¹⁷-LFF:DDSSNVI:LKVYP:TVE:SXGXH, YVPKPXX:VPE:SSLS-AA¹⁷-LFF:DDSSNVI:LKVYP:TVE:SXGXH, TVPKPXX:VPE:SSLS-AA¹⁷-LFF:DDSSNVI:LKVYP:TVE:AXGXH, AVPKAXX:VPE:SSLS-AA¹⁷-LFF:DSSNNVI:LKVYP:TVE:AXGXH, KVGKAXX:VPE:SSLS-AA¹⁷-LFF:DDMGVPT:LKVYP:TVE:XGXR, KASKAXX:VPE:SSLS-AA¹⁷-LFF:DKGVVTY:LKVYP:TVE:EXGXR, GSAGPXX:VPE:SSLS-AA¹⁷-LFF:NDKQQII:LKVYP:TVE:RXGXS, AAPASXX:VPE:SSLS-AA¹⁷-LFF:DAANNVV:LKVYP:TVE:AXGXR, STPPTXX:VPE:SSLS-AA¹⁷-LFF:DSANNVV:LKVYP:TVE:SXGXR, HVPKPXX:VPE:SSLS-AA¹⁷-LFF:DDSSNVI:LKVYP:TVE:SXGXH, RVPSTXX:VPE:SSLS-AA¹⁷-LFF:DNGRVLL:LKVYP:TVE:XGXL, ASAAPXX:VPE:SSLS-AA¹⁷-LFF:VGRKPKV:LKVYP:TVE:XKXS, ASASPXX:VPE:SSLS-AA¹⁷-LFF:IGKTPKI:LKVYP:TVE:XKXS, ASASPXX:VPE:SSLS-AA¹⁷-LFF:VGRTPKV:LKVYP:TVE:XKXS, NDEGLEX:VPE:SSLS-AA¹⁷-LFF:RIKPHQGQH:LKVYP:TVE:KXEXR, NDEGLEX:VPE:SSLS-AA¹⁷-LFF:RIKPHQGQH:LKVYP:TVE:QXEXR, SSVKXQP:VPE:SSLS-AA¹⁷-LFF:EYVRKKPKL:LKVYP:TVE:LEXAXA, RNVQXRP:VPE:SSLS-AA¹⁷-LFF:EIVRKKPIF:LKVYP:TVE:LAXKXE, KIPKAXX:VPT:SSLS-AA¹⁷-LFF:DENEKVV:LKVYP:VVE:GXGXR, SIPKAXX:VPT:SSLS-AA¹⁷-LFF:DEYDKVV:LKVV:LKVYP:VVE:GXGXR, HVTKPTX:APT:SSLS-AA¹⁷-LFF:DDSSNVI:LKVYP:VVR:SXGXH, YVPKPXX:APT:SSLS-AA¹⁷-LFF:DDSSNVI:LKVYP:VVR:SXGXH, TVPKPXX:APT:SSLS-AA¹⁷-LFF:DDSSNVI:LKVYP:VVR:AXGXH, AVPKAXX:APT:SSLS-AA¹⁷-LFF:DSSNNVI:LKVYP:VVK:AXGXH, KVGKAXX:VPT:SSLS-AA¹⁷-LFF:DDMGVPT:LKVYP:VAE:XGXR, KASKAXX:VPT:SSLS-AA¹⁷-LFF:DKGVVTY:LKVYP:AVS:EXGXR, GSAGPXX:TPT:SSLS-AA¹⁷-LFF:NDKQQII:LKVYP:VVD:RXGXS, AAPASXX:VPA:SSLS-AA¹⁷-LFF:DAANNVV:LKVYP:VVE:AXGXR, STPPTXX:VPT:SSLS-AA¹⁷-LFF:DSANNVV:LKVYP:VVE:SXGXR, HVPKPXX:APT:SSLS-AA¹⁷-LFF:DDSSNVI:LKVYP:VVR:SXGXH, RVPSTXX:APV:SSLS-AA¹⁷-LFF:DNGRVLL:LKVYP:VEE:XGXL, ASAAPXX:VPQ:SSLS-AA¹⁷-LFF:VGRKPKV:LKVYP:VRS:XKXS, ASASPXX:VSQ:SSLS-AA¹⁷-LFF:IGKTPKI:LKVYP:VKS:XKXS, ASASPXX:VPQ:SSLS-AA¹⁷-LFF:VGRTPKV:LKV:LKVYP:VKS:XKXS, NDEGLEX:VPT:SSLS-AA¹⁷-LFF:RIKPHQGQH:LKVYP:QHN:KXEXR, NDEGLEX:VPT:SSLS-AA¹⁷-LFF:RIKPHQGQH:LKVYP:EHS:QXEXR, SSVKXQP:SRV:SSLS-AA¹⁷-LFF:EYVRKKPKL:LKVYP:EEH:LEXAXA, RNVQXRP:TQV:SSLS-AA¹⁷-LFF:EIVRKKPIF:LKVYP:EDH:LAXKXE, KIPKAXX:VPT:SAIS-AA¹⁷-LYL:DENEKVV:LKNYQ:VVE:GXGXR, KIPKAXX:APT:NAIS-AA¹⁷-LYF:DENEKVV:LKKYR:VVR:GXGXR, GIPEPXX:APT:NAIS-AA¹⁷-LYF:DENKNVV:LKKYR:VVR:SXAXR, SIPKAXX:APT:NAIS-AA¹⁷-LYF:DEYDKVV:LKKYR:VVR:GXGXR, YVPKPXX:APT:NAIS-AA¹⁷-LYF:DDSSNVI:LKKYR:VVR:SXGXH, TVPKPXX:APT:NAIS-AA¹⁷-LYF:DDSSNVI:LKKYR:VVR:AXGXH, AVPKAXX:APT:NAIS-AA¹⁷-LYF:DSSNNVI:LKKYR:VVR:AXGXH, KVGKAXX:APT:NAIS-AA¹⁷-LYF:DDMGVPT:LKKYR:VVR:XGXR, KASKAXX:APT:NAIS-AA¹⁷-LYF:DKGVVTY:LKKYR:VVR:EXGXR, GSAGPXX:APT:NAIS-AA¹⁷-LYF:NDKQQII:LKKYR:VVR:RXGXS, AAPASXX:APT:NAIS-AA¹⁷-LYF:DAANNVV:LKKYR:VVR:AXGXR, STPPTXX:APT:NAIS-AA¹⁷-LYF:DSANNVV:LKKYR:VVR:SXGXR, HVPKPXX:APT:NAIS-AA¹⁷-LYF:DDSSNVI:LKKYR:VVR:SXGXH, RVPSTXX:APT:NAIS-AA¹⁷-LYF:DNGRVLL:LKKYR:VVR:XGXL, ASAAPXX:APT:NAIS-AA¹⁷-LYF:VGRKPKV:LKKYR:VVR:XKXS, ASASPXX:APT:NAIS-AA¹⁷-LYF:IGKTPKI:LKKYR:VVR:XKXS, ASASPXX:APT:NAIS-AA¹⁷-LYF:VGRTPKV:LKKYR:VVR:XKXS, NDEGLEX:APT:NAIS-AA¹⁷-LYF:RIKPHQGQH:LKKYR:VVR:KXEXR, NDEGLEX:APT:NAIS-AA¹⁷-LYF:RIKPHQGQH:LKKYR:VVR:QXEXR, SSVKXQP:APT:NAIS-AA¹⁷-LYF:EYVRKKPKL:LKKYR:VVR:LEXAXA, RNVQXRP:APT:NAIS-AA¹⁷-LYF:EIVRKKPIF:LKKYR:VVR:LAXKXE, KIPKAXX:VPT:NAIS-AA¹⁷-LYF:DENEKVV:LKKYR:VVE:GXGXR, GIPEPXX:VPE:NAIS-AA¹⁷-LYF:DENKNVV:LKKYR:TVE:SXAXR, SIPKAXX:VPT:NAIS-AA¹⁷-LYF:DEYDKVV:LKKYR:VVE:GXGXR, AVPKAXX:APT:NAIS-AA¹⁷-LYF:DSSNNVI:LKKYR:VVK:AXGXH, KVGKAXX:VPT:NAIS-AA¹⁷-LYF:DDMGVPT:LKKYR:VAE:XGXR, KASKAXX:VPT:NAIS-AA¹⁷-LYF:DKGVVTY:LKKYR:AVS:EXGXR, GSAGPXX:TPT:NAIS-AA¹⁷-LYF:NDKQQII:LKKYR:VVD:RXGXS, AAPASXX:VPA:NAIS-AA¹⁷-LYF:DAANNVV:LKKYR:VVE:AXGXR, STPPTXX:VPT:NAIS-AA¹⁷-LYF:DSANNVV:LKKYR:VVE:SXGXR, RVPSTXX:APV:NAIS-AAT-LYF:DNGRVLL:LKKYR:VEE:XGXL, ASAAPXX:VPQ:NAIS-AA¹⁷-LYF:VGRKPKV:LKKYR:VRS:XKXS, ASASPXX:VSQ:NAIS-AA¹⁷-LYF:IGKTPKI:LKKYR:VKS:XKXS, ASASPXX:VPQ:NAIS-AA¹⁷-LYF:VGRTPKV:LKKYR:VKS:XKXS, NDEGLEX:VPT:NAIS-AA¹⁷-LYF:RIKPHQGQH:LKKYR:QHN:KXEXR, NDEGLEX:VPT:NAIS-AA¹⁷-LYF:RIKPHQGQH:LKKYR:EHS:QXEXR, SSVKXQP:SRV:NAIS-AA¹⁷-LYF:EYVRKKPKL:LKKYR:EEH:LEXAXA, RNVQXRP:TQV:NAIS-AA¹⁷-LYF:EIVRKKPIF:LKKYR:EDH:LAXKXE, HVTKPTX:APT:NAIS-AA¹⁷-LYF:DDSSNVI:LKKYR:VVR:SXGXH, KIPKAXX:APT:SATS-AA¹⁷-LYY:DENEKVV:LRKHR:VVK:GXGXR, GIPEPXX:APT:SATS-AA¹⁷-LYY:DENKNVV:LRKHR:VVK:SXAXR, SIPKAXX:APT:SATS-AA¹⁷-LYY:DEYDKVV:LRKHR:VVK:GXGXR, HVTKPTX:APT:SATS-AA¹⁷-LYY:DDSSNVI:LRKHR:VVK:SXGXH, YVPKPXX:APT:SATS-AA¹⁷-LYY:DDSSNVI:LRKHR:VVK:SXGXH, TVPKPXX:APT:SATS-AA¹⁷-LYY:DDSSNVI:LRKHR:VVK:AXGXH, KVGKAXX:APT:SATS-AA¹⁷-LYY:DDMGVPT:LRKHR:VVK:XGXR, KASKAXX:APT:SATS-AA¹⁷-LYY:DKGVVTY:LRKHR:VVK:EXGXR, GSAGPXX:APT:SATS-AA¹⁷-LYY:NDKQQII:LRKHR:VVK:RXGXS, AAPASXX:APT:SATS-AA¹⁷-LYY:DAANNVV:LRKHR:VVK:AXGXR, STPPTXX:APT:SATS-AA¹⁷-LYY:DSANNVV:LRKHR:VVK:SXGXR, HVPKPXX:APT:SATS-AA¹⁷-LYY:DDSSNVI:LRKHR:VVK:SXGXH, RVPSTXX:APT:SATS-AA¹⁷-LYY:DNGRVLL:LRKHR:VVK:XGXL, ASAAPXX:APT:SATS-AA¹⁷-LYY:VGRKPKV:LRKHR:VVK:XKXS, ASASPXX:APT:SATS-AA¹⁷-LYY:IGKTPKI:LRKHR:VVK:XKXS, ASASPXX:APT:SATS-AA¹⁷-LYY:VGRTPKV:LRKHR:VVK:XKXS, NDEGLEX:APT:SATS-AA¹⁷-LYY:RIKPHQGQH:LRKHR:VVK:KXEXR, NDEGLEX:APT:SATS-AA¹⁷-LYY:RIKPHQGQH:LRKHR:VVK:QXEXR, SSVKXQP:APT:SATS-AA¹⁷-LYY:EYVRKKPKL:LRKHR:VVK:LEXAXA, RNVQXRP:APT:SATS-AA¹⁷-LYY:EIVRKKPIF:LRKHR:VVK:LAXKXE, KIPKAXX:VPT:SATS-AA¹⁷-LYY:DENEKVV:LRKHR:VVE:GXGXR, GIPEPXX:VPE:SATS-AA¹⁷-LYY:DENKNVV:LRKHR:TVE:SXAXR, SIPKAXX:VPT:SATS-AA¹⁷-LYY:DEYDKVV:LRKHR:VVE:GXGXR, HVTKPTX:APT:SATS-AA¹⁷-LYY:DDSSNVI:LRKHR:VVR:SXGXH, YVPKPXX:APT:SATS-AA¹⁷-LYY:DDSSNVI:LRKHR:VVR:SXGXH, TVPKPXX:APT:SATS-AA¹⁷-LYY:DDSSNVI:LRKHR:VVR:AXGXH, KVG KAXX:VPT:SATS-AA¹⁷-LYY:DDMGVPT:LRKHR:VAE:XGXR, KASKAXX:VPT:SATS-AA¹⁷-LYY:DKGVVTY:LRKHR:AVS:EXGXR, GSAGPXX:TPT:SATS-AA¹⁷-LYY:NDKQQII:LRKHR:VVD:RXGXS, AAPASXX:VPA:SATS-AA¹⁷-LYY:DAANNVV:LRKHR:VVE:AXGXR, STPPTXX:VPT:SATS-AA¹⁷-LYY:DSANNVV:LRKHR:VVE:SXGXR, HVPKPXX:APT:SATS-AA¹⁷-LYY:DDSSNVI:LRKHR:VVR:SXGXH, RVPSTXX:APV:SATS-AA¹⁷-LYY:DNGRVLL:LRKHR:VEE:XGXL, ASAAPXX:VPQ:SATS-AA¹⁷-LYY:VGRKPKV:LRKHR:VRS:XKXS, ASASPXX:VSQ:SATS-AA¹⁷-LYY:IGKTPKI:LRKHR:VKS:XKXS, ASASPXX:VPQ:SATS-AA¹⁷-LYY:VGRTPKV:LRKHR:VKS:XKXS, NDEGLEX:VPT:SATS-AA¹⁷-LYY:RIKPHQGQH:LRKHR:QHN:KXEXR, NDEGLEX:VPT:SATS-AA¹⁷-LYY:RIKPHQGQH:LRKHR:EHS:QXEXR, SSVKXQP:SRV:SATS-AA¹⁷-LYY:EYVRKKPKL:LRKHR:EEH:LEXAXA, RNVQXRP:TQV:SATS-AA¹⁷-LYY:EIVRKKPIF:LRKHR:EDH:LAXKXE, KIPKAXX:VPT:SPIS-AA¹⁷-LYK:DENEKVV:LKYHY:VAE:GXGXR, GIPEPXX:VPT:SPIS-AA¹⁷-LYK:DENKNVV:LKYHY:VAE:SXAXR, SIPKAXX:VPT:SPIS-AA¹⁷-LYK:DEYDKVV:LKYHY:VAE:GXGXR, HVTKPTX:VPT:SPIS-AA¹⁷-LYK:DDSSNVI:LKYHY:VAE:SXGXH, YVPKPXX:VPT:SPIS-AA¹⁷-LYK:DDSSNVI:LKYHY:VAE:SXGXH, TVPKPXX:VPT:SPIS-AA¹⁷-LYK:DDSSNVI:LKYHY:VAE:AXGXH, AVPKAXX:VPT:SPIS-AA¹⁷-LYK:DSSNNVI:LKYHY:VAE:AXGXH, KASKAXX:VPT:SPIS-AA¹⁷-LYK:DKGVVTY:LKYHY:VAE:EXGXR, GSAGPXX:VPT:SPIS-AA¹⁷-LYK:NDKQQII:LKYHY:VAE:RXGXS, AAPASXX:VPT:SPIS-AA¹⁷-LYK:DAANNVV:LKYHY:VAE:AXGXR, STPPTXX:VPT:SPIS-AA¹⁷-LYK:DSANNVV:LKYHY:VAE:SXGXR, HVPKPXX:VPT:SPIS-AA¹⁷-LYK:DDSSNVI:LKYHY:VAE:SXGXH, RVPSTXX:VPT:SPIS-AA¹⁷-LYK:DNGRVLL:LKYHY:VAE:XGXL, ASAAPXX:VPT:SPIS-AA¹⁷-LYK:VGRKPKV:LKYHY:VAE:XKXS, ASASPXX:VPT:SPIS-AA¹⁷-LYK:IGKTPKI:LKYHY:VAE:XKXS, ASASPXX:VPT:SPIS-AA¹⁷-LYK:VGRTPKV:LKYHY:VAE:XKXS, NDEGLEX:VPT:SPIS-AA¹⁷-LYK:RIKPHQGQH:LKYHY:VAE:KXEXR, NDEGLEX:VPT:SPIS-AA¹⁷-LYK:RIKPHQGQH:LKYHY:VAE:QXEXR, SSVKXQP:VPT:SPIS-AA¹⁷-LYK:EYVRKKPKL:LKYHY:VAE:LEXAXA, RNVQXRP:VPT:SPIS-AA¹⁷-LYK:EIVRKKPIF:LKYHY:VAE:LAXKXE, KIPKAXX:VPT:SPIS-AA¹⁷-LYK:DENEKVV:LKYHY:VVE:GXGXR, GIPEPXX:VPE:SPIS-AA¹⁷-LYK:DENKNVV:LKYHY:TVE:SXAXR, SIPKAXX:VPT:SPIS-AA¹⁷-LYK:DEYDKVV:LKYHY:VVE:GXGXR, HVTKPTX:APT:SPIS-AA¹⁷-LYK:DDSSNVI:LKYHY:VVR:SXGXH, YVPKPXX:APT:SPIS-AA¹⁷-LYK:DDSSNVI:LKYHY:VVR:SXGXH, TVPKPXX:APT:SPIS-AA¹⁷-LYK:DDSSNVI:LKYHY:VVR:AXGXH, AVPKAXX:APT:SPIS-AA¹⁷-LYK:DSSNNVI:LKYHY:VVK:AXGXH, KASKAXX:VPT:SPIS-AA¹⁷-LYK:DKGVVTY:LKYHY:AVS:EXGXR, GSAGPXX:TPT:SPIS-AA¹⁷-LYK:NDKQQII:LKYHY:VVD:RXGXS, AAPASXX:VPA:SPIS-AA¹⁷-LYK:DAANNVV:LKYHY:VVE:AXGXR, STPPTXX:VPT:SPIS-AA¹⁷-LYK:DSANNVV:LKYHY:VVE:SXGXR, HVPKPXX:APT:SPIS-AA¹⁷-LYK:DDSSNVI:LKYHY:VVR:SXGXH, RVPSTXX:APV:SPIS-AA¹⁷-LYK:DNGRVLL:LKYHY:VEE:XGXL, ASAAPXX:VPQ:SPIS-AA¹⁷-LYK:VGRKPKV:LKYHY:VRS:XKXS, ASASPXX:VSQ:SPIS-AA¹⁷-LYK:IGKTPKI:LKYHY:VKS:XKXS, ASASPXX:VPQ:SPIS-AA¹⁷-LYK:VGRTPKV:LKYHY:VKS:XKXS, NDEGLEX:VPT:SPIS-AA¹⁷-LYK:RIKPHQGQH:LKYHY:QHN:KXEXR, NDEGLEX:VPT:SPIS-AA¹⁷-LYK:RIKPHQGQH:LKYHY:EHS:QXEXR, SSVKXQP:SRV:SPIS-AA¹⁷-LYK:EYVRKKPKL:LKYHY:EEH:LEXAXA, RNVQXRP:TQV:SPIS-AA¹⁷-LYK:EIVRKKPIF:LKYHY:EDH:LAXKXE, KIPKAXX:VPT:EPIS-AA¹⁷-LYL:DENEKVV:KFKYE:AVS:GXGXR, GIPEPXX:VPT:EPIS-AA¹⁷-LYL:DENKNVV:KFKYE:AVS:SXAXR, SIPKAXX:VPT:EPIS-AA¹⁷-LYL:DEYDKVV:KFKYE:AVS:GXGXR, HVTKPTX:VPT:EPIS-AA¹⁷-LYL:DDSSNVI:KFKYE:AVS:SXGXH, YVPKPXX:VPT:EPIS-AA¹⁷-LYL:DDSSNVI:KFKYE:AVS:SXGXH, TVPKPXX:VPT:EPIS-AA¹⁷-LYL:DDSSNVI:KFKYE:AVS:AXGXH, AVPKAXX:VPT:EPIS-AA¹⁷-LYL:DSSNNVI:KFKYE:AVS:AXGXH, KVGKAXX:VPT:EPIS-AA¹⁷-LYL:DDMGVPT:KFKYE:AVS:XGXR, GSAGPXX:VPT:EPIS-AA¹⁷-LYL:NDKQQII:KFKYE:AVS:RXGXS, AAPASXX:VPT:EPIS-AA¹⁷-LYL:DAANNVV:KFKYE:AVS:AXGXR, STPPTXX:VPT:EPIS-AA¹⁷-LYL:DSANNVV:KFKYE:AVS:SXGXR, HVPKPXX:VPT:EPIS-AA¹⁷-LYL:DDSSNVI:KFKYE:AVS:SXGXH, RVPSTXX:VPT:EPIS-AA¹⁷-LYL:DNGRVLL:KFKYE:AVS:XGXL, ASAAPXX:VPT:EPIS-AA¹⁷-LYL:VGRKPKV:KFKYE:AVS:XKXS, ASASPXX:VPT:EPIS-AA¹⁷-LYL:IGKTPKI:KFKYE:AVS:XKXS, ASASPXX:VPT:EPIS-AA¹⁷-LYL:VGRTPKV:KFKYE:AVS:XKXS, NDEGLEX:VPT:EPIS-AA¹⁷-LYL:RIKPHQGQH:KFKYE:AVS:KXEXR, NDEGLEX:VPT:EPIS-AA¹⁷-LYL:RIKPHQGQH:KFKYE:AVS:QXEXR, SSVKXQP:VPT:EPIS-AA¹⁷-LYL:EYVRKKPKL:KFKYE:AVS:LEXAXA, RNVQXRP:VPT:EPIS-AA¹⁷-LYL:EIVRKKPIF:KFKYE:AVS:LAXKXE, KIPKAXX:VPT:EPIS-AA¹⁷-LYL:DENEKVV:KFKYE:VVE:GXGXR, GIPEPXX:VPE:EPIS-AA¹⁷-LYL:DENKNVV:KFKYE:TVE:SXAXR, SIPKAXX:VPT:EPIS-AA¹⁷-LYL:DEYDKVV:KFKYE:VVE:GXGXR, HVTKPTX:APT:EPIS-AA¹⁷-LYL:DDSSNVI:KFKYE:VVR:SXGXH, YVPKPXX:APT:EPIS-AA¹⁷-LYL:DDSSNVI:KFKYE:VVR:SXGXH, TVPKPXX:APT:EPIS-AA¹⁷-LYL:DDSSNVI:KFKYE:VVR:AXGXH, AVPKAXX:APT:EPIS-AA¹⁷-LYL:DSSNNVI:KFKYE:VVK:AXGXH, KVGKAXX:VPT:EPIS-AA¹⁷-LYL:DDMGVPT:KFKYE:VAE:XGXR, GSAGPXX:TPT:EPIS-AA¹⁷-LYL:NDKQQII:KFKYE:VVD:RXGXS, AAPASXX:VPA:EPIS-AA¹⁷-LYL:DAANNVV:KFKYE:VVE:AXGXR, STPPTXX:VPT:EPIS-AA¹⁷-LYL:DSANNVV:KFKYE:VVE:SXGXR, HVPKPXX:APT:EPIS-AA¹⁷-LYL:DDSSNVI:KFKYE:VVR:SXGXH, RVPSTXX:APV:EPIS-AA¹⁷-LYL:DNGRVLL:KFKYE:VEE:XGXL, ASAAPXX:VPQ:EPIS-AA¹⁷-LYL:VGRKPKV:KFKYE:VRS:XKXS, ASASPXX:VSQ:EPIS-AA¹⁷-LYL:IGKTPKI:KFKYE:VKS:XKXS, ASASPXX:VPQ:EPIS-AA¹⁷-LYL:VGRTPKV:KFKYE:VKS:XKXS, NDEGLEX:VPT:EPIS-AA¹⁷-LYL:RIKPHQGQH:KFKYE:QHN:KXEXR, NDEGLEX:VPT:EPIS-AA¹⁷-LYL:RIKPHQGQH:KFKYE:EHS:QXEXR, SSVKXQP:SRV:EPIS-AA¹⁷-LYL:EYVRKKPKL:KFKYE:EEH:LEXAXA, RNVQXRP:TQV:EPIS-AA¹⁷-LYL:EIVRKKPIF:KFKYE:EDH:LAXKXE, KIPKAXX:TPT:SPIN-AA¹⁷-LYF:DENEKVV:YGKIP:VVD:GXGXR, GIPEPXX:TPT:SPIN-AA¹⁷-LYF:DENKNVV:YGKIP:VVD:SXAXR, SIPKAXX:TPT:SPIN-AA¹⁷-LYF:DEYDKVV:YGKIP:VVD:GXGXR, HVTKPTX:TPT:SPIN-AA¹⁷-LYF:DDSSNVI:YGKIP:VVD:SXGXH, YVPKPXX:TPT:SPIN-AA¹⁷-LYF:DDSSNVI:YGKIP:VVD:SXGXH, TVPKPXX:TPT:SPIN-AA¹⁷-LYF:DDSSNVI:YGKIP:VVD:AXGXH, AVPKAXX:TPT:SPIN-AA¹⁷-LYF:DSSNNVI:YGKIP:VVD:AXGXH, KVGKAXX:TPT:SPIN-AA¹⁷-LYF:DDMGVPT:YGKIP:VVD:XGXR, KASKAXX:TPT:SPIN-AA¹⁷-LYF:DKGVVTY:YGKIP:VVD:EXGXR, AAPASXX:TPT:SPIN-AA¹⁷-LYF:DAANNVV:YGKIP:VVD:AXGXR, STPPTXX:TPT:SPIN-AA¹⁷-LYF:DSANNVV:YGKIP:VVD:SXGXR, HVPKPXX:TPT:SPIN-AA¹⁷-LYF:DDSSNVI:YGKIP:VVD:SXGXH, RVPSTXX:TPT:SPIN-AA¹⁷-LYF:DNGRVLL:YGKIP:VVD:XGXL, ASAAPXX:TPT:SPIN-AA¹⁷-LYF:VGRKPKV:YGKIP:VVD:XKXS, ASASPXX:TPT:SPIN-AA¹⁷-LYF:IGKTPKI:YGKIP:VVD:XKXS, ASASPXX:TPT:SPIN-AA¹⁷-LYF:VGRTPKV:YGKIP:VVD:XKXS, NDEGLEX:TPT:SPIN-AA¹⁷-LYF:RIKPHQGQH:YGKIP:VVD:KXEXR, NDEGLEX:TPT:SPIN-AA¹⁷-LYF:RIKPHQGQH:YGKIP:VVD:QXEXR, SSVKXQP:TPT:SPIN-AA¹⁷-LYF:EYVRKKPKL:YGKIP:VVD:LEXAXA, RNVQXRP:TPT:SPIN-AA¹⁷-LYF:EIVRKKPIF:YGKIP:VVD:LAXKXE, KIPKAXX:VPT:SPIN-AA¹⁷-LYF:DENEKVV:YGKIP:VVE:GXGXR, GIPEPXX:VPE:SPIN-AA¹⁷-LYF:DENKNVV:YGKIP:TVE:SXAXR, SIPKAXX:VPT:SPIN-AA¹⁷-LYF:DEYDKVV:YGKIP:VVE:GXGXR, HVTKPTX:APT:SPIN-AA¹⁷-LYF:DDSSNVI:YGKIP:VVR:SXGXH, YVPKPXX:APT:SPIN-AA¹⁷-LYF:DDSSNVI:YGKIP:VVR:SXGXH, TVPKPXX:APT:SPIN-AA¹⁷-LYF:DDSSNVI:YGKIP:VVR:AXGXH, AVPKAXX:APT:SPIN-AA¹⁷-LYF:DSSNNVI:YGKIP:VVK:AXGXH, KVGKAXX:VPT:SPIN-AA¹⁷-LYF:DDMGVPT:YGKIP:VAE:XGXR, KASKAXX:VPT:SPIN-AA¹⁷-LYF:DKGVVTY:YGKIP:AVS:EXGXR, AAPASXX:VPA:SPIN-AA¹⁷-LYF:DAANNVV:YGKIP:VVE:AXGXR, STPPTXX:VPT:SPIN-AA¹⁷-LYF:DSANNVV:YGKIP:VVE:SXGXR, HVPKPXX:APT:SPIN-AA¹⁷-LYF:DDSSNVI:YGKIP:VVR:SXGXH, RVPSTXX:APV:SPIN-AA¹⁷-LYF:DNGRVLL:YGKIP:VEE:XGXL, ASAAPXX:VPQ:SPIN-AA¹⁷-LYF:VGRKPKV:YGKIP:VRS:XKXS, ASASPXX:VSQ:SPIN-AA¹⁷-LYF:IGKTPKI:YGKIP:VKS:XKXS, ASASPXX:VPQ:SPIN-AA¹⁷-LYF:VGRTPKV:YGKIP:VKS:XKXS, NDEGLEX:VPT:SPIN-AA¹⁷-LYF:RIKPHQGQH:YGKIP:QHN:KXEXR, NDEGLEX:VPT:SPIN-AA¹⁷-LYF:RIKPHQGQH:YGKIP:EHS:QXEXR, SSVKXQP:SRV:SPIN-AA¹⁷-LYF:EYVRKKPKL:YGKIP:EEH:LEXAXA, RNVQXRP:TQV:SPIN-AA¹⁷-LYF:EIVRKKPIF:YGKIP:EDH:LAXKXE, KIPKAXX:VPA:SPIS-AA¹⁷-LYI:DENEKVV:YKQYE:VVE:GXGXR, GIPEPXX:VPA:SPIS-AA¹⁷-LYI:DENKNVV:YKQYE:VVE:SXAXR, SIPKAXX:VPA:SPIS-AA¹⁷-LYI:DEYDKVV:YKQYE:VVE:GXGXR, HVTKPTX:VPA:SPIS-AA¹⁷-LYI:DDSSNVI:YKQYE:VVE:SXGXH, YVPKPXX:VPA:SPIS-AA¹⁷-LYI:DDSSNVI:YKQYE:VVE:SXGXH, TVPKPXX:VPA:SPIS-AA¹⁷-LYI:DDSSNVI:YKQYE:VVE:AXGXH, AVPKAXX:VPA:SPIS-AA¹⁷-LYI:DSSNNVI:YKQYE:VVE:AXGXH, KVGKAXX:VPA:SPIS-AA¹⁷-LYI:DDMGVPT:YKQYE:VVE:XGXR, KASKAXX:VPA:SPIS-AA¹⁷-LYI:DKGVVTY:YKQYE:VVE:EXGXR, GSAGPXX:VPA:SPIS-AA¹⁷-LYI:NDKQQII:YKQYE:VVE:RXGXS, STPPTXX:VPA:SPIS-AA¹⁷-LYI:DSANNVV:YKQYE:VVE:SXGXR, HVPKPXX:VPA:SPIS-AA¹⁷-LYI:DDSSNVI:YKQYE:VVE:SXGXH, RVPSTXX:VPA:SPIS-AA¹⁷-LYI:DNGRVLL:YKQYE:VVE:XGXL, ASAAPXX:VPA:SPIS-AA¹⁷-LYI:VGRKPKV:YKQYE:VVE:XKXS, ASASPXX:VPA:SPIS-AA¹⁷-LYI:IGKTPKI:YKQYE:VVE:XKXS, ASASPXX:VPA:SPIS-AA¹⁷-LYI:VGRTPKV:YKQYE:VVE:XKXS, NDEGLEX:VPA:SPIS-AA¹⁷-LYI:RIKPHQGQH:YKQYE:VVE:KXEXR, NDEGLEX:VPA:SPIS-AA¹⁷-LYI:RIKPHQGQH:YKQYE:VVE:QXEXR, SSVKXQP:VPA:SPIS-AA¹⁷-LYI:EYVRKKPKL:YKQYE:VVE:LEXAXA, RNVQXRP:VPA:SPIS-AA¹⁷-LYI:EIVRKKPIF:YKQYE:VVE:LAXKXE, KIPKAXX:VPT:SPIS-AA¹⁷-LYI:DENEKVV:YKQYE:VVE:GXGXR, GIPEPXX:VPE:SPIS-AA¹⁷-LYI:DENKNVV:YKQYE:TVE:SXAXR, SIPKAXX:VPT:SPIS-AA¹⁷-LYI:DEYDKVV:YKQYE:VVE:GXGXR, HVTKPTX:APT:SPIS-AA¹⁷-LYI:DDSSNVI:YKQYE:VVR:SXGXH, YVPKPXX:APT:SPIS-AA¹⁷-LYI:DDSSNVI:YKQYE:VVR:SXGXH, TVPKPXX:APT:SPIS-AA¹⁷-LYI:DDSSNVI:YKQYE:VVR:AXGXH, AVPKAXX:APT:SPIS-AA¹⁷-LYI:DSSNNVI:YKQYE:VVK:AXGXH, KVGKAXX:VPT:SPIS-AA¹⁷-LYI:DDMGVPT:YKQYE:VAE:XGXR, KASKAXX:VPT:SPIS-AA¹⁷-LYI:DKGVVTY:YKQYE:AVS:EXGXR, GSAGPXX:TPT:SPIS-AA¹⁷-LYI:NDKQQII:YKQYE:VVD:RXGXS, STPPTXX:VPT:SPIS-AA¹⁷-LYI:DSANNVV:YKQYE:VVE:SXGXR, HVPKPXX:APT:SPIS-AA¹⁷-LYI:DDSSNVI:YKQYE:VVR:SXGXH, RVPSTXX:APV:SPIS-AA¹⁷-LYI:DNGRVLL:YKQYE:VEE:XGXL, ASAAPXX:VPQ:SPIS-AA¹⁷-LYI:VGRKPKV:YKQYE:VRS:XKXS, ASASPXX:VSQ:SPIS-AA¹⁷-LYI:IGKTPKI:YKQYE:VKS:XKXS, ASASPXX:VPQ:SPIS-AA¹⁷-LYI:VGRTPKV:YKQYE:VKS:XKXS, NDEGLEX:VPT:SPIS-AA¹⁷-LYI:RIKPHQGQH:YKQYE:QHN:KXEXR, NDEGLEX:VPT:SPIS-AA¹⁷-LYI:RIKPHQGQH:YKQYE:EHS:QXEXR, SSVKXQP:SRV:SPIS-AA¹⁷-LYI:EYVRKKPKL:YKQYE:EEH:LEXAXA, RNVQXRP:TQV:SPIS-AA¹⁷-LYI:EIVRKKPIF:YKQYE:EDH:LAXKXE, KIPKAXX:VPT:SPIS-AA¹⁷-LFI:DENEKVV:YKQYE:VVE:GXGXR, GIPEPXX:VPT:SPIS-AA¹⁷-LFI:DENKNVV:YKQYE:VVE:SXAXR, SIPKAXX:VPT:SPIS-AA¹⁷-LFI:DEYDKVV:YKQYE:VVE:GXGXR, HVTKPTX:VPT:SPIS-AA¹⁷-LFI:DDSSNVI:YKQYE:VVE:SXGXH, YVPKPXX:VPT:SPIS-AA¹⁷-LFI:DDSSNVI:YKQYE:VVE:SXGXH, TVPKPXX:VPT:SPIS-AA¹⁷-LFI:DDSSNVI:YKQYE:VVE:AXGXH, AVPKAXX:VPT:SPIS-AA¹⁷-LFI:DSSNNVI:YKQYE:VVE:AXGXH, KVGKAXX:VPT:SPIS-AA¹⁷-LFI:DDMGVPT:YKQYE:VVE:XGXR, KASKAXX:VPT:SPIS-AA¹⁷-LFI:DKGVVTY:YKQYE:VVE:EXGXR, GSAGPXX:VPT:SPIS-AA¹⁷-LFI:NDKQQII:YKQYE:VVE:RXGXS, AAPASXX:VPT:SPIS-AA¹⁷-LFI:DAANNVV:YKQYE:VVE:AXGXR, HVPKPXX:VPT:SPIS-AA¹⁷-LFI:DDSSNVI:YKQYE:VVE:SXGXH, RVPSTXX:VPT:SPIS-AA¹⁷-LFI:DNGRVLL:YKQYE:VVE:XGXL, ASAAPXX:VPT:SPIS-AA¹⁷-LFI:VGRKPKV:YKQYE:VVE:XKXS, ASASPXX:VPT:SPIS-AA¹⁷-LFI:IGKTPKI:YKQYE:VVE:XKXS, ASASPXX:VPT:SPIS-AA¹⁷-LFI:VGRTPKV:YKQYE:VVE:XKXS, NDEGLEX:VPT:SPIS-AA¹⁷-LFI:RIKPHQGQH:YKQYE:VVE:KXEXR, NDEGLEX:VPT:SPIS-AA¹⁷-LFI:RIKPHQGQH:YKQYE:VVE:QXEXR, SSVKXQP:VPT:SPIS-AA¹⁷-LFI:EYVRKKPKL:YKQYE:VVE:LEXAXA, RNVQXRP:VPT:SPIS-AA¹⁷-LFI:EIVRKKPIF:YKQYE:VVE:LAXKXE, GIPEPXX:VPE:SPIS-AA¹⁷-LFI:DENKNVV:YKQYE:TVE:SXAXR, HVTKPTX:APT:SPIS-AA¹⁷-LFI:DDSSNVI:YKQYE:VVR:SXGXH, YVPKPXX:APT:SPIS-AA¹⁷-LFI:DDSSNVI:YKQYE:VVR:SXGXH, TVPKPXX:APT:SPIS-AA¹⁷-LFI:DDSSNVI:YKQYE:VVR:AXGXH, AVPKAXX:APT:SPIS-AA¹⁷-LFI:DSSNNVI:YKQYE:VVK:AXGXH, KVGKAXX:VPT:SPIS-AA¹⁷-LFI:DDMGVPT:YKQYE:VAE:XGXR, KASKAXX:VPT:SPIS-AA¹⁷-LFI:DKGVVTY:YKQYE:AVS:EXGXR, GSAGPXX:TPT:SPIS-AA¹⁷-LFI:NDKQQII:YKQYE:VVD:RXGXS, AAPASXX:VPA:SPIS-AA¹⁷-LFI:DAANNVV:YKQYE:VVE:AXGXR, HVPKPXX:APT:SPIS-AA¹⁷-LFI:DDSSNVI:YKQYE:VVR:SXGXH, RVPSTXX:APV:SPIS-AA¹⁷-LFI:DNGRVLL:YKQYE:VEE:XGXL, ASAAPXX:VPQ:SPIS-AA¹⁷-LFI:VGRKPKV:YKQYE:VRS:XKXS, ASASPXX:VSQ:SPIS-AA¹⁷-LFI:IGKTPKI:YKQYE:VKS:XKXS, ASASPXX:VPQ:SPIS-AA¹⁷-LFI:VGRTPKV:YKQYE:VKS:XKXS, NDEGLEX:VPT:SPIS-AA¹⁷-LFI:RIKPHQGQH:YKQYE:QHN:KXEXR, NDEGLEX:VPT:SPIS-AA¹⁷-LFI:RIKPHQGQH:YKQYE:EHS:QXEXR, SSVKXQP:SRV:SPIS-AA¹⁷-LFI:EYVRKKPKL:YKQYE:EEH:LEXAXA, RNVQXRP:TQV:SPIS-AA¹⁷-LFI:EIVRKKPIF:YKQYE:EDH:LAXKXE, KIPKAXX:APV:KPLS-AA¹⁷-LYV:DENEKVV:DHHKD:VEE:GXGXR, GIPEPXX:APV:KPLS-AA¹⁷-LYV:DENKNVV:DHHKD:VEE:SXAXR, SIPKAXX:APV:KPLS-AA¹⁷-LYV:DEYDKVV:DHHKD:VEE:GXGXR, HVTKPTX:APV:KPLS-AA¹⁷-LYV:DDSSNVI:DHHKD:VEE:SXGXH, YVPKPXX:APV:KPLS-AA¹⁷-LYV:DDSSNVI:DHHKD:VEE:SXGXH, TVPKPXX:APV:KPLS-AA¹⁷-LYV:DDSSNVI:DHHKD:VEE:AXGXH, AVPKAXX:APV:KPLS-AA¹⁷-LYV:DSSNNVI:DHHKD:VEE:AXGXH, KVGKAXX:APV:KPLS-AA¹⁷-LYV:DDMGVPT:DHHKD:VEE:XGXR, KASKAXX:APV:KPLS-AA¹⁷-LYV:DKGVVTY:DHHKD:VEE:EXGXR, GSAGPXX:APV:KPLS-AA¹⁷-LYV:NDKQQII:DHHKD:VEE:RXGXS, AAPASXX:APV:KPLS-AA¹⁷-LYV:DAANNVV:DHHKD:VEE:AXGXR, STPPTXX:APV:KPLS-AA¹⁷-LYV:DSANNVV:DHHKD:VEE:SXGXR, HVPKPXX:APV:KPLS-AA¹⁷-LYV:DDSSNVI:DHHKD:VEE:SXGXH, ASAAPXX:APV:KPLS-AA¹⁷-LYV:VGRKPKV:DHHKD:VEE:XKXS, ASASPXX:APV:KPLS-AA¹⁷-LYV:IGKTPKI:DHHKD:VEE:XKXS, ASASPXX:APV:KPLS-AA¹⁷-LYV:VGRTPKV:DHHKD:VEE:XKXS, NDEGLEX:APV:KPLS-AA¹⁷-LYV:RIKPHQGQH:DHHKD:VEE:KXEXR, NDEGLEX:APV:KPLS-AA¹⁷-LYV:RIKPHQGQH:DHHKD:VEE:QXEXR, SSVKXQP:APV:KPLS-AA¹⁷-LYV:EYVRKKPKL:DHHKD:VEE:LEXAXA, RNVQXRP:APV:KPLS-AA¹⁷-LYV:EIVRKKPIF:DHHKD:VEE:LAXKXE, KIPKAXX:VPT:KPLS-AA¹⁷-LYV:DENEKVV:DHHKD:VVE:GXGXR, GIPEPXX:VPE:KPLS-AA¹⁷-LYV:DENKNVV:DHHKD:TVE:SXAXR, SIPKAXX:VPT:KPLS-AA¹⁷-LYV:DEYDKVV:DHHKD:VVE:GXGXR, HVTKPTX:APT:KPLS-AA¹⁷-LYV:DDSSNVI:DHHKD:VVR:SXGXH, YVPKPXX:APT:KPLS-AA¹⁷-LYV:DDSSNVI:DHHKD:VVR:SXGXH, TVPKPXX:APT:KPLS-AA¹⁷-LYV:DDSSNVI:DHHKD:VVR:AXGXH, AVPKAXX:APT:KPLS-AA¹⁷-LYV:DSSNNVI:DHHKD:VVK:AXGXH, KVGKAXX:VPT:KPLS-AA¹⁷-LYV:DDMGVPT:DHHKD:VAE:XGXR, KASKAXX:VPT:KPLS-AA¹⁷-LYV:DKGVVTY:DHHKD:AVS:EXGXR, GSAGPXX:TPT:KPLS-AA¹⁷-LYV:NDKQQII:DHHKD:VVD:RXGXS, AAPASXX:VPA:KPLS-AA¹⁷-LYV:DAANNVV:DHHKD:VVE:AXGXR, STPPTXX:VPT:KPLS-AA¹⁷-LYV:DSANNVV:DHHKD:VVE:SXGXR, HVPKPXX:APT:KPLS-AA¹⁷-LYV:DDSSNVI:DHHKD:VVR:SXGXH, ASAAPXX:VPQ:KPLS-AA¹⁷-LYV:VGRKPKV:DHHKD:VRS:XKXS, ASASPXX:VSQ:KPLS-AA¹⁷-LYV:IGKTPKI:DHHKD:VKS:XKXS, ASASPXX:VPQ:KPLS-AA¹⁷-LYV:VGRTPKV:DHHKD:VKS:XKXS, NDEGLEX:VPT:KPLS-AA¹⁷-LYV:RIKPHQGQH:DHHKD:QHN:KXEXR, NDEGLEX:VPT:KPLS-AA¹⁷-LYV:RIKPHQGQH:DHHKD:EHS:QXEXR, SSVKXQP:SRV:KPLS-AA¹⁷-LYV:EYVRKKPKL:DHHKD:EEH:LEXAXA, RNVQXRP:TQV:KPLS-AA¹⁷-LYV:EIVRKKPIF:DHHKD:EDH:LAXKXE, KIPKAXX:VPQ:EPLP-AA¹⁷-VYY:DENEKVV:EQLSN:VRS:GXGXR, GIPEPXX:VPQ:EPLP-AA¹⁷-VYY:DENKNVV:EQLSN:VRS:SXAXR, SIPKAXX:VPQ:EPLP-AA¹⁷-VYY:DEYDKVV:EQLSN:VRS:GXGXR, HVTKPTX:VPQ:EPLP-AA¹⁷-VYY:DDSSNVI:EQLSN:VRS:SXGXH, YVPKPXX:VPQ:EPLP-AA¹⁷-VYY:DDSSNVI:EQLSN:VRS:SXGXH, TVPKPXX:VPQ:EPLP-AA¹⁷-VYY:DDSSNVI:EQLSN:VRS:AXGXH, AVPKAXX:VPQ:EPLP-AA¹⁷-VYY:DSSNNVI:EQLSN:VRS:AXGXH, KVGKAXX:VPQ:EPLP-AA¹⁷-VYY:DDMGVPT:EQLSN:VRS:XGXR, KASKAXX:VPQ:EPLP-AA¹⁷-VYY:DKGVVTY:EQLSN:VRS:EXGXR, GSAGPXX:VPQ:EPLP-AA¹⁷-VYY:NDKQQII:EQLSN:VRS:RXGXS, AAPASXX:VPQ:EPLP-AA¹⁷-VYY:DAANNVV:EQLSN:VRS:AXGXR, STPPTXX:VPQ:EPLP-AA¹⁷-VYY:DSANNVV:EQLSN:VRS:SXGXR, HVPKPXX:VPQ:EPLP-AA¹⁷-VYY:DDSSNVI:EQLSN:VRS:SXGXH, RVPSTXX:VPQ:EPLP-AA¹⁷-VYY:DNGRVLL:EQLSN:VRS:XGXL, ASASPXX:VPQ:EPLP-AA¹⁷-VYY:IGKTPKI:EQLSN:VRS:XKXS, ASASPXX:VPQ:EPLP-AA¹⁷-VYY:VGRTPKV:EQLSN:VRS:XKXS, NDEGLEX:VPQ:EPLP-AA¹⁷-VYY:RIKPHQGQH:EQLSN:VRS:KXEXR, NDEGLEX:VPQ:EPLP-AA¹⁷-VYY:RIKPHQGQH:EQLSN:VRS:QXEXR, SSVKXQP:VPQ:EPLP-AA¹⁷-VYY:EYVRKKPKL:EQLSN:VRS:LEXAXA, RNVQXRP:VPQ:EPLP-AA¹⁷-VYY:EIVRKKPIF:EQLSN:VRS:LAXKXE, KIPKAXX:VPT:EPLP-AA¹⁷-VYY:DENEKVV:EQLSN:VVE:GXGXR, GIPEPXX:VPE:EPLP-AA¹⁷-VYY:DENKNVV:EQLSN:TVE:SXAXR, SIPKAXX:VPT:EPLP-AA¹⁷-VYY:DEYDKVV:EQLSN:VVE:GXGXR, HVTKPTX:APT:EPLP-AA¹⁷-VYY:DDSSNVI:EQLSN:VVR:SXGXH, YVPKPXX:APT:EPLP-AA¹⁷-VYY:DDSSNVI:EQLSN:VVR:SXGXH, TVPKPXX:APT:EPLP-AA¹⁷-VYY:DDSSNVI:EQLSN:VVR:AXGXH, AVPKAXX:APT:EPLP-AA¹⁷-VYY:DSSNNVI:EQLSN:VVK:AXGXH, KVGKAXX:VPT:EPLP-AA¹⁷-VYY:DDMGVPT:EQLSN:VAE:XGXR, KASKAXX:VPT:EPLP-AA¹⁷-VYY:DKGVVTY:EQLSN:AVS:EXGXR, GSAGPXX:TPT:EPLP-AA¹⁷-VYY:NDKQQII:EQLSN:VVD:RXGXS, AAPASXX:VPA:EPLP-AA¹⁷-VYY:DAANNVV:EQLSN:VVE:AXGXR, STPPTXX:VPT:EPLP-AA¹⁷-VYY:DSANNVV:EQLSN:VVE:SXGXR, HVPKPXX:APT:EPLP-AA¹⁷-VYY:DDSSNVI:EQLSN:VVR:SXGXH, RVPSTXX:APV:EPLP-AA¹⁷-VYY:DNGRVLL:EQLSN:VEE:XGXL, ASASPXX:VSQ:EPLP-AA¹⁷-VYY:IGKTPKI:EQLSN:VKS:XKXS, ASASPXX:VPQ:EPLP-AA¹⁷-VYY:VGRTPKV:EQLSN:VKS:XKXS, NDEGLEX:VPT:EPLP-AA¹⁷-VYY:RIKPHQGQH:EQLSN:QHN:KXEXR, NDEGLEX:VPT:EPLP-AA¹⁷-VYY:RIKPHQGQH:EQLSN:EHS:QXEXR, SSVKXQP:SRV:EPLP-AA¹⁷-VYY:EYVRKKPKL:EQLSN:EEH:LEXAXA, RNVQXRP:TQV:EPLP-AA¹⁷-VYY:EIVRKKPIF:EQLSN:EDH:LAXKXE, KIPKAXX:VSQ:EPLT-AA¹⁷-LYY:DENEKVV:EQLSN:VKS:GXGXR, GIPEPXX:VSQ:EPLT-AA¹⁷-LYY:DENKNVV:EQLSN:VKS:SXAXR, SIPKAXX:VSQ:EPLT-AA¹⁷-LYY:DEYDKVV:EQLSN:VKS:GXGXR, HVTKPTX:VSQ:EPLT-AA¹⁷-LYY:DDSSNVI:EQLSN:VKS:SXGXH, YVPKPXX:VSQ:EPLT-AA¹⁷-LYY:DDSSNVI:EQLSN:VKS:SXGXH, TVPKPXX:VSQ:EPLT-AA¹⁷-LYY:DDSSNVI:EQLSN:VKS:AXGXH, AVPKAXX:VSQ:EPLT-AA¹⁷-LYY:DSSNNVI:EQLSN:VKS:AXGXH, KVGKAXX:VSQ:EPLT-AA¹⁷-LYY:DDMGVPT:EQLSN:VKS:XGXR, KASKAXX:VSQ:EPLT-AA¹⁷-LYY:DKGVVTY:EQLSN:VKS:EXGXR, GSAGPXX:VSQ:EPLT-AA¹⁷-LYY:NDKQQII:EQLSN:VKS:RXGXS, AAPASXX:VSQ:EPLT-AA¹⁷-LYY:DAANNVV:EQLSN:VKS:AXGXR, STPPTXX:VSQ:EPLT-AA¹⁷-LYY:DSANNVV:EQLSN:VKS:SXGXR, HVPKPXX:VSQ:EPLT-AA¹⁷-LYY:DDSSNVI:EQLSN:VKS:SXGXH, RVPSTXX:VSQ:EPLT-AA¹⁷-LYY:DNGRVLL:EQLSN:VKS:XGXL, ASAAPXX:VSQ:EPLT-AA¹⁷-LYY:VGRKPKV:EQLSN:VKS:XKXS, ASASPXX:VSQ:EPLT-AA¹⁷-LYY:VGRTPKV:EQLSN:VKS:XKXS, NDEGLEX:VSQ:EPLT-AA¹⁷-LYY:RIKPHQGQH:EQLSN:VKS:KXEXR, NDEGLEX:VSQ:EPLT-AA¹⁷-LYY:RIKPHQGQH:EQLSN:VKS:QXEXR, SSVKXQP:VSQ:EPLT-AA¹⁷-LYY:EYVRKKPKL:EQLSN:VKS:LEXAXA, RNVQXRP:VSQ:EPLT-AA¹⁷-LYY:EIVRKKPIF:EQLSN:VKS:LAXKXE, KIPKAXX:VPT:EPLT-AA¹⁷-LYY:DENEKVV:EQLSN:VVE:GXGXR, GIPEPXX:VPE:EPLT-AA¹⁷-LYY:DENKNVV:EQLSN:TVE:SXAXR, SIPKAXX:VPT:EPLT-AA¹⁷-LYY:DEYDKVV:EQLSN:VVE:GXGXR, HVTKPTX:APT:EPLT-AA¹⁷-LYY:DDSSNVI:EQLSN:VVR:SXGXH, YVPKPXX:APT:EPLT-AA¹⁷-LYY:DDSSNVI:EQLSN:VVR:SXGXH, TVPKPXX:APT:EPLT-AA¹⁷-LYY:DDSSNVI:EQLSN:VVR:AXGXH, AVPKAXX:APT:EPLT-AA¹⁷-LYY:DSSNNVI:EQLSN:VVK:AXGXH, KVGKAXX:VPT:EPLT-AA¹⁷-LYY:DDMGVPT:EQLSN:VAE:XGXR, KASKAXX:VPT:EPLT-AA¹⁷-LYY:DKGVVTY:EQLSN:AVS:EXGXR, GSAGPXX:TPT:EPLT-AA¹⁷-LYY:NDKQQII:EQLSN:VVD:RXGXS, AAPASXX:VPA:EPLT-AA¹⁷-LYY:DAANNVV:EQLSN:VVE:AXGXR, STPPTXX:VPT:EPLT-AA¹⁷-LYY:DSANNVV:EQLSN:VVE:SXGXR, HVPKPXX:APT:EPLT-AA¹⁷-LYY:DDSSNVI:EQLSN:VVR:SXGXH, RVPSTXX:APV:EPLT-AA¹⁷-LYY:DNGRVLL:EQLSN:VEE:XGXL, ASAAPXX:VPQ:EPLT-AA¹⁷-LYY:VGRKPKV:EQLSN:VRS:XKXS, ASASPXX:VPQ:EPLT-AA¹⁷-LYY:VGRTPKV:EQLSN:VKS:XKXS, NDEGLEX:VPT:EPLT-AA¹⁷-LYY:RIKPHQGQH:EQLSN:QHN:KXEXR, NDEGLEX:VPT:EPLT-AA¹⁷-LYY:RIKPHQGQH:EQLSN:EHS:QXEXR, SSVKXQP:SRV:EPLT-AA¹⁷-LYY:EYVRKKPKL:EQLSN:EEH:LEXAXA, RNVQXRP:TQV:EPLT-AA¹⁷-LYY:EIVRKKPIF:EQLSN:EDH:LAXKXE, KIPKAXX:VPQ:EPLT-AA¹⁷-LYY:DENEKVV:EQLSN:VKS:GXGXR, GIPEPXX:VPQ:EPLT-AA¹⁷-LYY:DENKNVV:EQLSN:VKS:SXAXR, SIPKAXX:VPQ:EPLT-AA¹⁷-LYY:DEYDKVV:EQLSN:VKS:GXGXR, HVTKPTX:VPQ:EPLT-AA¹⁷-LYY:DDSSNVI:EQLSN:VKS:SXGXH, YVPKPXX:VPQ:EPLT-AA¹⁷-LYY:DDSSNVI:EQLSN:VKS:SXGXH, TVPKPXX:VPQ:EPLT-AA¹⁷-LYY:DDSSNVI:EQLSN:VKS:AXGXH, AVPKAXX:VPQ:EPLT-AA¹⁷-LYY:DSSNNVI:EQLSN:VKS:AXGXH, KVGKAXX:VPQ:EPLT-AA¹⁷-LYY:DDMGVPT:EQLSN:VKS:XGXR, KASKAXX:VPQ:EPLT-AA¹⁷-LYY:DKGVVTY:EQLSN:VKS:EXGXR, GSAGPXX:VPQ:EPLT-AA¹⁷-LYY:NDKQQII:EQLSN:VKS:RXGXS, AAPASXX:VPQ:EPLT-AA¹⁷-LYY:DAANNVV:EQLSN:VKS:AXGXR, STPPTXX:VPQ:EPLT-AA¹⁷-LYY:DSANNVV:EQLSN:VKS:SXGXR, HVPKPXX:VPQ:EPLT-AA¹⁷-LYY:DDSSNVI:EQLSN:VKS:SXGXH, RVPSTXX:VPQ:EPLT-AA¹⁷-LYY:DNGRVLL:EQLSN:VKS:XGXL, ASAAPXX:VPQ:EPLT-AA¹⁷-LYY:VGRKPKV:EQLSN:VKS:XKXS, ASASPXX:VPQ:EPLT-AA¹⁷-LYY:IGKTPKI:EQLSN:VKS:XKXS, NDEGLEX:VPQ:EPLT-AA¹⁷-LYY:RIKPHQGQH:EQLSN:VKS:KXEXR, NDEGLEX:VPQ:EPLT-AA¹⁷-LYY:RIKPHQGQH:EQLSN:VKS:QXEXR, SSVKXQP:VPQ:EPLT-AA¹⁷-LYY:EYVRKKPKL:EQLSN:VKS:LEXAXA, RNVQXRP:VPQ:EPLT-AA¹⁷-LYY:EIVRKKPIF:EQLSN:VKS:LAXKXE, ASASPXX:VSQ:EPLT-AA¹⁷-LYY:IGKTPKI:EQLSN:VKS:XKXS, KIPKAXX:VPT:SNIT-AA¹⁷-QIM:DENEKVV:IGEMS:QHN:GXGXR, GIPEPXX:VPT:SNIT-AA¹⁷-QIM:DENKNVV:IGEMS:QHN:SXAXR, SIPKAXX:VPT:SNIT-AA¹⁷-QIM:DEYDKVV:IGEMS:QHN:GXGXR, HVTKPTX:VPT:SNIT-AA¹⁷-QIM:DDSSNVI:IGEMS:QHN:SXGXH, YVPKPXX:VPT:SNIT-AA¹⁷-QIM:DDSSNVI:IGEMS:QHN:SXGXH, TVPKPXX:VPT:SNIT-AA¹⁷-QIM:DDSSNVI:IGEMS:QHN:AXGXH, AVPKAXX:VPT:SNIT-AA¹⁷-QIM:DSSNNVI:IGEMS:QHN:AXGXH, KVGKAXX:VPT:SNIT-AA¹⁷-QIM:DDMGVPT:IGEMS:QHN:XGXR, KASKAXX:VPT:SNIT-AA¹⁷-QIM:DKGVVTY:IGEMS:QHN:EXGXR, GSAGPXX:VPT:SNIT-AA¹⁷-QIM:NDKQQII:IGEMS:QHN:RXGXS, AAPASXX:VPT:SNIT-AA¹⁷-QIM:DAANNVV:IGEMS:QHN:AXGXR, STPPTXX:VPT:SNIT-AA¹⁷-QIM:DSANNVV:IGEMS:QHN:SXGXR, HVPKPXX:VPT:SNIT-AA¹⁷-QIM:DDSSNVI:IGEMS:QHN:SXGXH, RVPSTXX:VPT:SNIT-AA¹⁷-QIM:DNGRVLL:IGEMS:QHN:XGXL, ASAAPXX:VPT:SNIT-AA¹⁷-QIM:VGRKPKV:IGEMS:QHN:XKXS, ASASPXX:VPT:SNIT-AA¹⁷-QIM:IGKTPKI:IGEMS:QHN:XKXS, ASASPXX:VPT:SNIT-AA¹⁷-QIM:VGRTPKV:IGEMS:QHN:XKXS, NDEGLEX:VPT:SNIT-AA¹⁷-QIM:RIKPHQGQH:IGEMS:QHN:QXEXR, NDEGLEX:VPT:SNIT-AA¹⁷-QIM:RIKPHQGQH:IGEMS:QHN:KXEXR, SSVKXQP:VPT:SNIT-AA¹⁷-QIM:EYVRKKPKL:IGEMS:QHN:LEXAXA, RNVQXRP:VPT:SNIT-AA¹⁷-QIM:EIVRKKPIF:IGEMS:QHN:LAXKXE, KIPKAXX:VPT:SNIT-AA¹⁷-QIM:DENEKVV:IGEMS:VVE:GXGXR, GIPEPXX:VPE:SNIT-AA¹⁷-QIM:DENKNVV:IGEMS:TVE:SXAXR, SIPKAXX:VPT:SNIT-AA¹⁷-QIM:DEYDKVV:IGEMS:VVE:GXGXR, HVTKPTX:APT:SNIT-AA¹⁷-QIM:DDSSNVI:IGEMS:VVR:SXGXH, YVPKPXX:APT:SNIT-AA¹⁷-QIM:DDSSNVI:IGEMS:VVR:SXGXH, TVPKPXX:APT:SNIT-AA¹⁷-QIM:DDSSNVI:IGEMS:VVR:AXGXH, AVPKAXX:APT:SNIT-AA¹⁷-QIM:DSSNNVI:IGEMS:VVK:AXGXH, KVGKAXX:VPT:SNIT-AA¹⁷-QIM:DDMGVPT:IGEMS:VAE:XGXR, KASKAXX:VPT:SNIT-AA¹⁷-QIM:DKGVVTY:IGEMS:AVS:EXGXR, GSAGPXX:TPT:SNIT-AA¹⁷-QIM:NDKQQII:IGEMS:VVD:RXGXS, AAPASXX:VPA:SNIT-AA¹⁷-QIM:DAANNVV:IGEMS:VVE:AXGXR, STPPTXX:VPT:SNIT-AA¹⁷-QIM:DSANNVV:IGEMS:VVE:SXGXR, HVPKPXX:APT:SNIT-AA¹⁷-QIM:DDSSNVI:IGEMS:VVR:SXGXH, RVPSTXX:APV:SNIT-AA¹⁷-QIM:DNGRVLL:IGEMS:VEE:XGXL, ASAAPXX:VPQ:SNIT-AA¹⁷-QIM:VGRKPKV:IGEMS:VRS:XKXS, ASASPXX:VSQ:SNIT-AA¹⁷-QIM:IGKTPKI:IGEMS:VKS:XKXS, ASASPXX:VPQ:SNIT-AA¹⁷-QIM:VGRTPKV:IGEMS:VKS:XKXS, NDEGLEX:VPT:SNIT-AA¹⁷-QIM:RIKPHQGQH:IGEMS:EHS:QXEXR, SSVKXQP:SRV:SNIT-AA¹⁷-QIM:EYVRKKPKL:IGEMS:EEH:LEXAXA, RNVQXRP:TQV:SNIT-AA¹⁷-QIM:EIVRKKPIF:IGEMS:EDH:LAXKXE, KIPKAXX:VPT:SNIT-AA¹⁷-QIM:DENEKVV:LGEMS:EHS:GXGXR, GIPEPXX:VPT:SNIT-AA¹⁷-QIM:DENKNVV:LGEMS:EHS:SXAXR, SIPKAXX:VPT:SNIT-AA¹⁷-QIM:DEYDKVV:LGEMS:EHS:GXGXR, HVTKPTX:VPT:SNIT-AA¹⁷-QIM:DDSSNVI:LGEMS:EHS:SXGXH, YVPKPXX:VPT:SNIT-AA¹⁷-QIM:DDSSNVI:LGEMS:EHS:SXGXH, TVPKPXX:VPT:SNIT-AA¹⁷-QIM:DDSSNVI:LGEMS:EHS:AXGXH, AVPKAXX:VPT:SNIT-AA¹⁷-QIM:DSSNNVI:LGEMS:EHS:AXGXH, KVGKAXX:VPT:SNIT-AA¹⁷-QIM:DDMGVPT:LGEMS:EHS:XGXR, KASKAXX:VPT:SNIT-AA¹⁷-QIM:DKGVVTY:LGEMS:EHS:EXGXR, GSAGPXX:VPT:SNIT-AA¹⁷-QIM:NDKQQII:LGEMS:EHS:RXGXS, AAPASXX:VPT:SNIT-AA¹⁷-QIM:DAANNVV:LGEMS:EHS:AXGXR, STPPTXX:VPT:SNIT-AA¹⁷-QIM:DSANNVV:LGEMS:EHS:SXGXR, HVPKPXX:VPT:SNIT-AA¹⁷-QIM:DDSSNVI:LGEMS:EHS:SXGXH, RVPSTXX:VPT:SNIT-AA¹⁷-QIM:DNGRVLL:LGEMS:EHS:XGXL, ASAAPXX:VPT:SNIT-AA¹⁷-QIM:VGRKPKV:LGEMS:EHS:XKXS, ASASPXX:VPT:SNIT-AA¹⁷-QIM:IGKTPKI:LGEMS:EHS:XKXS, ASASPXX:VPT:SNIT-AA¹⁷-QIM:VGRTPKV:LGEMS:EHS:XKXS, NDEGLEX:VPT:SNIT-AA¹⁷-QIM:RIKPHQGQH:LGEMS:EHS:KXEXR, SSVKXQP:VPT:SNIT-AA¹⁷-QIM:EYVRKKPKL:LGEMS:EHS:LEXAXA, RNVQXRP:VPT:SNIT-AA¹⁷-QIM:EIVRKKPIF:LGEMS:EHS:LAXKXE, KIPKAXX:VPT:SNIT-AA¹⁷-QIM:DENEKVV:LGEMS:VVE:GXGXR, GIPEPXX:VPE:SNIT-AA¹⁷-QIM:DENKNVV:LGEMS:TVE:SXAXR, SIPKAXX:VPT:SNIT-AA¹⁷-QIM:DEYDKVV:LGEMS:VVE:GXGXR, HVTKPTX:APT:SNIT-AA¹⁷-QIM:DDSSNVI:LGEMS:VVR:SXGXH, YVPKPXX:APT:SNIT-AA¹⁷-QIM:DDSSNVI:LGEMS:VVR:SXGXH, TVPKPXX:APT:SNIT-AA¹⁷-QIM:DDSSNVI:LGEMS:VVR:AXGXH, AVPKAXX:APT:SNIT-AA¹⁷-QIM:DSSNNVI:LGEMS:VVK:AXGXH, KVGKAXX:VPT:SNIT-AA¹⁷-QIM:DDMGVPT:LGEMS:VAE:XGXR, KASKAXX:VPT:SNIT-AA¹⁷-QIM:DKGVVTY:LGEMS:AVS:EXGXR, GSAGPXX:TPT:SNIT-AA¹⁷-QIM:NDKQQII:LGEMS:VVD:RXGXS, AAPASXX:VPA:SNIT-AA¹⁷-QIM:DAANNVV:LGEMS:VVE:AXGXR, STPPTXX:VPT:SNIT-AA¹⁷-QIM:DSANNVV:LGEMS:VVE:SXGXR, HVPKPXX:APT:SNIT-AA¹⁷-QIM:DDSSNVI:LGEMS:VVR:SXGXH, RVPSTXX:APV:SNIT-AA¹⁷-QIM:DNGRVLL:LGEMS:VEE:XGXL, ASAAPXX:VPQ:SNIT-AA¹⁷-QIM:VGRKPKV:LGEMS:VRS:XKXS, ASASPXX:VSQ:SNIT-AA¹⁷-QIM:IGKTPKI:LGEMS:VKS:XKXS, ASASPXX:VPQ:SNIT-AA¹⁷-QIM:VGRTPKV:LGEMS:VKS:XKXS, NDEGLEX:VPT:SNIT-AA¹⁷-QIM:RIKPHQGQH:LGEMS:QHN:KXEXR, SSVKXQP:SRV:SNIT-AA¹⁷-QIM:EYVRKKPKL:LGEMS:EEH:LEXAXA, RNVQXRP:TQV:SNIT-AA¹⁷-QIM:EIVRKKPIF:LGEMS:EDH:LAXKXE, KIPKAXX:SRV:RSVK-AA¹⁷-AKV:DENEKVV:KEVQV:EEH:GXGXR, GIPEPXX:SRV:RSVK-AA¹⁷-AKV:DENKNVV:KEVQV:EEH:SXAXR, SIPKAXX:SRV:RSVK-AA¹⁷-AKV:DEYDKVV:KEVQV:EEH:GXGXR, HVTKPTX:SRV:RSVK-AA¹⁷-AKV:DDSSNVI:KEVQV:EEH:SXGXH, YVPKPXX:SRV:RSVK-AA¹⁷-AKV:DDSSNVI:KEVQV:EEH:SXGXH, TVPKPXX:SRV:RSVK-AA¹⁷-AKV:DDSSNVI:KEVQV:EEH:AXGXH, AVPKAXX:SRV:RSVK-AA¹⁷-AKV:DSSNNVI:KEVQV:EEH:AXGXH, KVGKAXX:SRV:RSVK-AA¹⁷-AKV:DDMGVPT:KEVQV:EEH:XGXR, KASKAXX:SRV:RSVK-AA¹⁷-AKV:DKGVVTY:KEVQV:EEH:EXGXR, GSAGPXX:SRV:RSVK-AA¹⁷-AKV:NDKQQII:KEVQV:EEH:RXGXS, AAPASXX:SRV:RSVK-AA¹⁷-AKV:DAANNVV:KEVQV:EEH:AXGXR, STPPTXX:SRV:RSVK-AA¹⁷-AKV:DSANNVV:KEVQV:EEH:SXGXR, HVPKPXX:SRV:RSVK-AA¹⁷-AKV:DDSSNVI:KEVQV:EEH:SXGXH, RVPSTXX:SRV:RSVK-AA¹⁷-AKV:DNGRVLL:KEVQV:EEH:XGXL, ASAAPXX:SRV:RSVK-AA¹⁷-AKV:VGRKPKV:KEVQV:EEH:XKXS, ASASPXX:SRV:RSVK-AA¹⁷-AKV:IGKTPKI:KEVQV:EEH:XKXS, ASASPXX:SRV:RSVK-AA¹⁷-AKV:VGRTPKV:KEVQV:EEH:XKXS, NDEGLEX:SRV:RSVK-AA¹⁷-AKV:RIKPHQGQH:KEVQV:EEH:KXEXR, NDEGLEX:SRV:RSVK-AA¹⁷-AKV:RIKPHQGQH:KEVQV:EEH:QXEXR, RNVQXRP:SRV:RSVK-AA¹⁷-AKV:EIVRKKPIF:KEVQV:EEH:LAXKXE, KIPKAXX:VPT:RSVK-AA¹⁷-AKV:DENEKVV:KEVQV:VVE:GXGXR, GIPEPXX:VPE:RSVK-AA¹⁷-AKV:DENKNVV:KEVQV:TVE:SXAXR, SIPKAXX:VPT:RSVK-AA¹⁷-AKV:DEYDKVV:KEVQV:VVE:GXGXR, HVTKPTX:APT:RSVK-AA¹⁷-AKV:DDSSNVI:KEVQV:VVR:SXGXH, YVPKPXX:APT:RSVK-AA¹⁷-AKV:DDSSNVI:KEVQV:VVR:SXGXH, TVPKPXX:APT:RSVK-AA¹⁷-AKV:DDSSNVI:KEVQV:VVR:AXGXH, AVPKAXX:APT:RSVK-AA¹⁷-AKV:DSSNNVI:KEVQV:VVK:AXGXH, KVGKAXX:VPT:RSVK-AA¹⁷-AKV:DDMGVPT:KEVQV:VAE:XGXR, KASKAXX:VPT:RSVK-AA¹⁷-AKV:DKGVVTY:KEVQV:AVS:EXGXR, GSAGPXX:TPT:RSVK-AA¹⁷-AKV:N DKQQII:KEVQV:VVD:RXGXS, AAPASXX:VPA:RSVK-AA¹⁷-AKV:DAANNVV:KEVQV:VVE:AXGXR, STPPTXX:VPT:RSVK-AA¹⁷-AKV:DSANNVV:KEVQV:VVE:SXGXR, HVPKPXX:APT:RSVK-AA¹⁷-AKV:DDSSNVI:KEVQV:VVR:SXGXH, RVPSTXX:APV:RSVK-AA¹⁷-AKV:DNGRVLL:KEVQV:VEE:XGXL, ASAAPXX:VPQ:RSVK-AA¹⁷-AKV:VGRKPKV:KEVQV:VRS:XKXS, ASASPXX:VSQ:RSVK-AA¹⁷-AKV:IGKTPKI:KEVQV:VKS:XKXS, ASASPXX:VPQ:RSVK-AA¹⁷-AKV:VGRTPKV:KEVQV:VKS:XKXS, NDEGLEX:VPT:RSVK-AA¹⁷-AKV:RIKPHQGQH:KEVQV:QHN:KXEXR, NDEGLEX:VPT:RSVK-AA¹⁷-AKV:RIKPHQGQH:KEVQV:EHS:QXEXR, RNVQXRP:TQV:RSVK-AA¹⁷-AKV:EIVRKKPIF:KEVQV:EDH:LAXKXE, KIPKAXX:TQV:RPVQ-AA¹⁷-RKI:DENEKVV:KKATV:EDH:GXGXR, GIPEPXX:TQV:RPVQ-AA¹⁷-RKI:DENKNVV:KKATV:EDH:SXAXR, SIPKAXX:TQV:RPVQ-AA¹⁷-RKI:DEYDKVV:KKATV:EDH:GXGXR, HVTKPTX:TQV:RPVQ-AA¹⁷-RKI:DDSSNVI:KKATV:EDH:SXGXH, YVPKPXX:TQV:RPVQ-AA¹⁷-RKI:DDSSNVI:KKATV:EDH:SXGXH, TVPKPXX:TQV:RPVQ-AA¹⁷-RKI:DDSSNVI:KKATV:EDH:AXGXH, AVPKAXX:TQV:RPVQ-AA¹⁷-RKI:DSSNNVI:KKATV:EDH:AXGXH, KVGKAXX:TQV:RPVQ-AA¹⁷-RKI:DDMGVPT:KKATV:EDH:XGXR, KASKAXX:TQV:RPVQ-AA¹⁷-RKI:DKGVVTY:KKATV:EDH:EXGXR, GSAGPXX:TQV:RPVQ-AA¹⁷-RKI:NDKQQII:KKATV:EDH:RXGXS, AAPASXX:TQV:RPVQ-AA¹⁷-RKI:DAANNVV:KKATV:EDH:AXGXR, STPPTXX:TQV:RPVQ-AA¹⁷-RKI:DSANNVV:KKATV:EDH:SXGXR, HVPKPXX:TQV:RPVQ-AA¹⁷-RKI:DDSSNVI:KKATV:EDH:SXGXH, RVPSTXX:TQV:RPVQ-AA¹⁷-RKI:DNGRVLL:KKATV:EDH:XGXL, ASAAPXX:TQV:RPVQ-AA¹⁷-RKI:VGRKPKV:KKATV:EDH:XKXS, ASASPXX:TQV:RPVQ-AA¹⁷-RKI:IGKTPKI:KKATV:EDH:XKXS, ASASPXX:TQV:RPVQ-AA¹⁷-RKI:VGRTPKV:KKATV:EDH:XKXS, NDEGLEX:TQV:RPVQ-AA¹⁷-RKI:RIKPHQGQH:KKATV:EDH:KXEXR, NDEGLEX:TQV:RPVQ-AA¹⁷-RKI:RIKPHQGQH:KKATV:EDH:QXEXR, SSVKXQP:TQV:RPVQ-AA¹⁷-RKI:EYVRKKPKL:KKATV:EDH:LEXAXA, KIPKAXX:VPT:RPVQ-AA¹⁷-RKI:DENEKVV:KKATV:VVE:GXGXR, GIPEPXX:VPE:RPVQ-AA¹⁷-RKI:DENKNVV:KKATV:TVE:SXAXR, SIPKAXX:VPT:RPVQ-AA¹⁷-RKI:DEYDKVV:KKATV:VVE:GXGXR, HVTKPTX:APT:RPVQ-AA¹⁷-RKI:DDSSNVI:KKATV:VVR:SXGXH, YVPKPXX:APT:RPVQ-AA¹⁷-RKI:DDSSNVI:KKATV:VVR:SXGXH, TVPKPXX:APT:RPVQ-AA¹⁷-RKI:DDSSNVI:KKATV:VVR:AXGXH, AVPKAXX:APT:RPVQ-AA¹⁷-RKI:DSSNNVI:KKATV:VVK:AXGXH, KVGKAXX:VPT:RPVQ-AA¹⁷-RKI:DDMGVPT:KKATV:VAE:XGXR, KASKAXX:VPT:RPVQ-AA¹⁷-RKI:DKGVVTY:KKATV:AVS:EXGXR, GSAGPXX:TPT:RPVQ-AA¹⁷-RKI:NDKQQII:KKATV:WD:RXGXS, AAPASXX:VPA:RPVQ-AA¹⁷-RKI:DAANNVV:KKATV:VVE:AXGXR, STPPTXX:VPT:RPVQ-AA¹⁷-RKI:DSANNVV:KKATV:VVE:SXGXR, HVPKPXX:APT:RPVQ-AA¹⁷-RKI:DDSSNVI:KKATV:VVR:SXGXH, RVPSTXX:APV:RPVQ-AA¹⁷-RKI:DNGRVLL:KKATV:VEE:XGXL, ASAAPXX:VPQ:RPVQ-AA¹⁷-RKI:VGRKPKV:KKATV:VRS:XKXS, ASASPXX:VSQ:RPVQ-AA¹⁷-RKI:IGKTPKI:KKATV:VKS:XKXS, ASASPXX:VPQ:RPVQ-AA¹⁷-RKI:VGRTPKV:KKATV:VKS:XKXS, NDEGLEX:VPT:RPVQ-AA¹⁷-RKI:RIKPHQGQH:KKATV:QHN:KXEXR, NDEGLEX:VPT:RPVQ-AA¹⁷-RKI:RIKPHQGQH:KKATV:EHS:QXEXR and SSVKXQP:SRV:RPVQ-AA¹⁷-RKI:EYVRKKPKL:KKATV:EEH:LEXAXA; and wherein AA¹⁷ is selected from the group consisting of G, A, V, L, I, P, F, M, W, T and S (in particular is selected from the group consisting of M, I, L, V and T). More particularly, the heptuplet PEP7:PEP3:PEP12:LINKER:PEP2:PEP4:PEP8 is selected from the group consisting of GIPEPXX:VPT:SAIS-AA¹⁷-LYL:DENKNVV:LKNYQ:VVE:SXAXR, HVTKPTX:VPT:SAIS-AA¹⁷-LYL:DDSSNVI:LKNYQ:VVE:SXGXH, YVPKPXX:VPT:SAIS-AA¹⁷-LYL:DDSSNVI:LKNYQ:VVE:SXGXH, TVPKPXX:VPT:SAIS-AA¹⁷-LYL:DDSSNVI:LKNYQ:VVE:AXGXH, AVPKAXX:VPT:SAIS-AA¹⁷-LYL:DSSNNVI:LKNYQ:VVE:AXGXH, KVGKAXX:VPT:SAIS-AA¹⁷-LYL:DDMGVPT:LKNYQ:VVE:XGXR, KASKAXX:VPT:SAIS-AA¹⁷-LYL:DKGVVTY:LKNYQ:VVE:EXGXR, GSAGPXX:VPT:SAIS-AA¹⁷-LYL:NDKQQII:LKNYQ:VVE:RXGXS, AAPASXX:VPT:SAIS-AA¹⁷-LYL:DAANNVV:LKNYQ:VVE:AXGXR, STPPTXX:VPT:SAIS-AA¹⁷-LYL:DSANNVV:LKNYQ:VVE:SXGXR, HVPKPXX:VPT:SAIS-AA¹⁷-LYL:DDSSNVI:LKNYQ:VVE:SXGXH, RVPSTXX:VPT:SAIS-AA¹⁷-LYL:DNGRVLL:LKNYQ:VVE:XGXL, ASAAPXX:VPT:SAIS-AA¹⁷-LYL:VGRKPKV:LKNYQ:VVE:XKXS, ASASPXX:VPT:SAIS-AA¹⁷-LYL:IGKTPKI:LKNYQ:VVE:XKXS, ASASPXX:VPT:SAIS-AA¹⁷-LYL:VGRTPKV:LKNYQ:VVE:XKXS, GIPEPXX:VPE:SAIS-AA¹⁷-LYL:DENKNVV:LKNYQ:TVE:SXAXR, HVTKPTX:APT:SAIS-AA¹⁷-LYL:DDSSNVI:LKNYQ:VVR:SXGXH, YVPKPXX:APT:SAIS-AA¹⁷-LYL:DDSSNVI:LKNYQ:VVR:SXGXH, TVPKPXX:APT:SAIS-AA¹⁷-LYL:DDSSNVI:LKNYQ:VVR:AXGXH, AVPKAXX:APT:SAIS-AA¹⁷-LYL:DSSNNVI:LKNYQ:VVK:AXGXH, KVGKAXX:VPT:SAIS-AA¹⁷-LYL:DDMGVPT:LKNYQ:VAE:XGXR, KASKAXX:VPT:SAIS-AA¹⁷-LYL:DKGVVTY:LKNYQ:AVS:EXGXR, GSAGPXX:TPT:SAIS-AA¹⁷-LYL:NDKQQII:LKNYQ:VVD:RXGXS, AAPASXX:VPA:SAIS-AA¹⁷-LYL:DAANNVV:LKNYQ:VVE:AXGXR, HVPKPXX:APT:SAIS-AA¹⁷-LYL:DDSSNVI:LKNYQ:VVR:SXGXH, RVPSTXX:APV:SAIS-AA¹⁷-LYL:DNGRVLL:LKNYQ:VEE:XGXL, ASAAPXX:VPQ:SAIS-AA¹⁷-LYL:VGRKPKV:LKNYQ:VRS:XKXS, ASASPXX:VSQ:SAIS-AA¹⁷-LYL:IGKTPKI:LKNYQ:VKS:XKXS, ASASPXX:VPQ:SAIS-AA¹⁷-LYL:VGRTPKV:LKNYQ:VKS:XKXS, NDEGLEX:VPT:SAIS-AA¹⁷-LYL:RIKPHQGQH:LKNYQ:QHN:KXEXR, NDEGLEX:VPT:SAIS-AA¹⁷-LYL:RIKPHQGQH:LKNYQ:EHS:QXEXR, SSVKXQP:SRV:SAIS-AA¹⁷-LYL:EYVRKKPKL:LKNYQ:EEH:LEXAXA, RNVQXRP:TQV:SAIS-AA¹⁷-LYL:EIVRKKPIF:LKNYQ:EDH:LAXKXE, KIPKAXX:VPE:SSLS-AA¹⁷-LFF:DENEKVV:LKVYP:TVE:GXGXR, SIPKAXX:VPE:SSLS-AA¹⁷-LFF:DEYDKVV:LKVYP:TVE:GXGXR, HVTKPTX:VPE:SSLS-AA¹⁷-LFF:DDSSNVI:LKVYP:TVE:SXGXH, YVPKPXX:VPE:SSLS-AA¹⁷-LFF:DDSSNVI:LKVYP:TVE:SXGXH, TVPKPXX:VPE:SSLS-AA¹⁷-LFF:DDSSNVI:LKVYP:TVE:AXGXH, AVPKAXX:VPE:SSLS-AA¹⁷-LFF:DSSNNVI:LKVYP:TVE:AXGXH, KVGKAXX:VPE:SSLS-AA¹⁷-LFF:DDMGVPT:LKVYP:TVE:XGXR, KASKAXX:VPE:SSLS-AA¹⁷-LFF:DKGVVTY:LKVYP:TVE:EXGXR, GSAGPXX:VPE:SSLS-AA¹⁷-LFF:NDKQQII:LKVYP:TVE:RXGXS, AAPASXX:VPE:SSLS-AA¹⁷-LFF:DAANNVV:LKVYP:TVE:AXGXR, STPPTXX:VPE:SSLS-AA¹⁷-LFF:DSANNVV:LKVYP:TVE:SXGXR, HVPKPXX:VPE:SSLS-AA¹⁷-LFF:DDSSNVI:LKVYP:TVE:SXGXH, RVPSTXX:VPE:SSLS-AA¹⁷-LFF:DNGRVLL:LKVYP:TVE:XGXL, ASAAPXX:VPE:SSLS-AA¹⁷-LFF:VGRKPKV:LKVYP:TVE:XKXS, ASASPXX:VPE:SSLS-AA¹⁷-LFF:IGKTPKI:LKVYP:TVE:XKXS, ASASPXX:VPE:SSLS-AA¹⁷-LFF:VGRTPKV:LKVYP:TVE:XKXS, KIPKAXX:VPT:SSLS-AA¹⁷-LFF:DENEKVV:LKVYP:VVE:GXGXR, SIPKAXX:VPT:SSLS-AA¹⁷-LFF:DEYDKVV:LKVV:LKVYP:VVE:GXGXR, HVTKPTX:APT:SSLS-AA¹⁷-LFF:DDSSNVI:LKVYP:VVR:SXGXH, YVPKPXX:APT:SSLS-AA¹⁷-LFF:DDSSNVI:LKVYP:VVR:SXGXH, TVPKPXX:APT:SSLS-AA¹⁷-LFF:DDSSNVI:LKVYP:VVR:AXGXH, AVPKAXX:APT:SSLS-AA¹⁷-LFF:DSSNNVI:LKVYP:VVK:AXGXH, KVGKAXX:VPT:SSLS-AA¹⁷-LFF:DDMGVPT:LKVYP:VAE:XGXR, KASKAXX:VPT:SSLS-AA¹⁷-LFF:DKGVVTY:LKVYP:AVS:EXGXR, GSAGPXX:TPT:SSLS-AA¹⁷-LFF:NDKQQII:LKVYP:VVD:RXGXS, AAPASXX:VPA:SSLS-AA¹⁷-LFF:DAANNVV:LKVYP:VVE:AXGXR, STPPTXX:VPT:SSLS-AA¹⁷-LFF:DSANNVV:LKVYP:VVE:SXGXR, HVPKPXX:APT:SSLS-AA¹⁷-LFF:DDSSNVI:LKVYP:VVR:SXGXH, RVPSTXX:APV:SSLS-AA¹⁷-LFF:DNGRVLL:LKVYP:VEE:XGXL, ASAAPXX:VPQ:SSLS-AA¹⁷-LFF:VGRKPKV:LKVYP:VRS:XKXS, ASASPXX:VSQ:SSLS-AA¹⁷-LFF:IGKTPKI:LKVYP:VKS:XKXS, ASASPXX:VPQ:SSLS-AA¹⁷-LFF:VGRTPKV:LKVYP:VKS:XKXS, NDEGLEX:VPT:SSLS-AA¹⁷-LFF:RIKPHQGQH:LKVYP:QHN:KXEXR, NDEGLEX:VPT:SSLS-AA¹⁷-LFF:RIKPHQGQH:LKVYP:EHS:QXEXR, SSVKXQP:SRV:SSLS-AA¹⁷-LFF:EYVRKKPKL:LKVYP:EEH:LEXAXA, RNVQXRP:TQV:SSLS-AA¹⁷-LFF:EIVRKKPIF:LKVYP:EDH:LAXKXE, KIPKAXX:APT:NAIS-AA¹⁷-LYF:DENEKVV:LKKYR:VVR:GXGXR, GIPEPXX:APT:NAIS-AA¹⁷-LYF:DENKNVV:LKKYR:VVR:SXAXR, SIPKAXX:APT:NAIS-AA¹⁷-LYF:DEYDKVV:LKKYR:VVR:GXGXR, AVPKAXX:APT:NAIS-AA¹⁷-LYF:DSSNNVI:LKKYR:VVR:AXGXH, KVGKAXX:APT:NAIS-AA¹⁷-LYF:DDMGVPT:LKKYR:VVR:XGXR, KASKAXX:APT:NAIS-AA¹⁷-LYF:DKGVVTY:LKKYR:VVR:EXGXR, GSAGPXX:APT:NAIS-AA¹⁷-LYF:NDKQQII:LKKYR:VVR:RXGXS, AAPASXX:APT:NAIS-AA¹⁷-LYF:DAANNVV:LKKYR:VVR:AXGXR, STPPTXX:APT:NAIS-AA¹⁷-LYF:DSANNVV:LKKYR:VVR:SXGXR, RVPSTXX:APT:NAIS-AA¹⁷-LYF:DNGRVLL:LKKYR:VVR:XGXL, ASAAPXX:APT:NAIS-AA¹⁷-LYF:VGRKPKV:LKKYR:VVR:XKXS, ASASPXX:APT:NAIS-AA¹⁷-LYF:IGKTPKI:LKKYR:VVR:XKXS, ASASPXX:APT:NAIS-AA¹⁷-LYF:VGRTPKV:LKKYR:VVR:XKXS, KIPKAXX:VPT:NAIS-AA¹⁷-LYF:DENEKVV:LKKYR:VVE:GXGXR, GIPEPXX:VPE:NAIS-AA¹⁷-LYF:DENKNVV:LKKYR:TVE:SXAXR, SIPKAXX:VPT:NAIS-AA¹⁷-LYF:DEYDKVV:LKKYR:VVE:GXGXR, AVPKAXX:APT:NAIS-AA¹⁷-LYF:DSSNNVI:LKKYR:VVK:AXGXH, KVGKAXX:VPT:NAIS-AA¹⁷-LYF:DDMGVPT:LKKYR:VAE:XGXR, KASKAXX:VPT:NAIS-AA¹⁷-LYF:DKGVVTY:LKKYR:AVS:EXGXR, GSAGPXX:TPT:NAIS-AA¹⁷-LYF:NDKQQII:LKKYR:VVD:RXGXS, AAPASXX:VPA:NAIS-AA¹⁷-LYF:DAANNVV:LKKYR:VVE:AXGXR, STPPTXX:VPT:NAIS-AA¹⁷-LYF:DSANNVV:LKKYR:VVE:SXGXR, RVPSTXX:APV:NAIS-AA¹⁷-LYF:DNGRVLL:LKKYR:VEE:XGXL, ASAAPXX:VPQ:NAIS-AA¹⁷-LYF:VGRKPKV:LKKYR:VRS:XKXS, ASASPXX:VSQ:NAIS-AA¹⁷-LYF:IGKTPKI:LKKYR:VKS:XKXS, ASASPXX:VPQ:NAIS-AA¹⁷-LYF:VGRTPKV:LKKYR:VKS:XKXS, NDEGLEX:VPT:NAIS-AA¹⁷-LYF:RIKPHQGQH:LKKYR:QHN:KXEXR, NDEGLEX:VPT:NAIS-AA¹⁷-LYF:RIKPHQGQH:LKKYR:EHS:QXEXR, SSVKXQP:SRV:NAIS-AA¹⁷-LYF:EYVRKKPKL:LKKYR:EEH:LEXAXA, RNVQXRP:TQV:NAIS-AA¹⁷-LYF:EIVRKKPIF:LKKYR:EDH:LAXKXE, KIPKAXX:APT:SATS-AA¹⁷-LYY:DENEKVV:LRKHR:VVK:GXGXR, GIPEPXX:APT:SATS-AA¹⁷-LYY:DENKNVV:LRKHR:VVK:SXAXR, SIPKAXX:APT:SATS-AA¹⁷-LYY:DEYDKVV:LRKHR:VVK:GXGXR, HVTKPTX:APT:SATS-AA¹⁷-LYY:DDSSNVI:LRKHR:VVK:SXGXH, YVPKPXX:APT:SATS-AA¹⁷-LYY:DDSSNVI:LRKHR:VVK:SXGXH, TVPKPXX:APT:SATS-AA¹⁷-LYY:DDSSNVI:LRKHR:VVK:AXGXH, KVGKAXX:APT:SATS-AA¹⁷-LYY:DDMGVPT:LRKHR:VVK:XGXR, KASKAXX:APT:SATS-AA¹⁷-LYY:DKGVVTY:LRKHR:VVK:EXGXR, GSAGPXX:APT:SATS-AA¹⁷-LYY:NDKQQII:LRKHR:VVK:RXGXS, AAPASXX:APT:SATS-AA¹⁷-LYY:DAANNVV:LRKHR:VVK:AXGXR, STPPTXX:APT:SATS-AA¹⁷-LYY:DSANNVV:LRKHR:VVK:SXGXR, HVPKPXX:APT:SATS-AA¹⁷-LYY:DDSSNVI:LRKHR:VVK:SXGXH, RVPSTXX:APT:SATS-AA¹⁷-LYY:DNGRVLL:LRKHR:VVK:XGXL, ASAAPXX:APT:SATS-AA¹⁷-LYY:VGRKPKV:LRKHR:VVK:XKXS, ASASPXX:APT:SATS-AA¹⁷-LYY:IGKTPKI:LRKHR:VVK:XKXS, ASASPXX:APT:SATS-AA¹⁷-LYY:VGRTPKV:LRKHR:VVK:XKXS, KIPKAXX:VPT:SATS-AA¹⁷-LYY:DENEKVV:LRKHR:VVE:GXGXR, GIPEPXX:VPE:SATS-AA¹⁷-LYY:DENKNVV:LRKHR:TVE:SXAXR, SIPKAXX:VPT:SATS-AA¹⁷-LYY:DEYDKVV:LRKHR:VVE:GXGXR, HVTKPTX:APT:SATS-AA¹⁷-LYY:DDSSNVI:LRKHR:VVR:SXGXH, YVPKPXX:APT:SATS-AA¹⁷-LYY:DDSSNVI:LRKHR:VVR:SXGXH, TVPKPXX:APT:SATS-AA¹⁷-LYY:DDSSNVI:LRKHR:VVR:AXGXH, KVGKAXX:VPT:SATS-AA¹⁷-LYY:DDMGVPT:LRKHR:VAE:XGXR, KASKAXX:VPT:SATS-AA¹⁷-LYY:DKGVVTY:LRKHR:AVS:EXGXR, GSAGPXX:TPT:SATS-AA¹⁷-LYY:NDKQQII:LRKHR:VVD:RXGXS, AAPASXX:VPA:SATS-AA¹⁷-LYY:DAANNVV:LRKHR:VVE:AXGXR, STPPTXX:VPT:SATS-AA¹⁷-LYY:DSANNVV:LRKHR:VVE:SXGXR, HVPKPXX:APT:SATS-AA¹⁷-LYY:DDSSNVI:LRKHR:VVR:SXGXH, RVPSTXX:APV:SATS-AA¹⁷-LYY:DNGRVLL:LRKHR:VEE:XGXL, ASAAPXX:VPQ:SATS-AA¹⁷-LYY:VGRKPKV:LRKHR:VRS:XKXS, ASASPXX:VSQ:SATS-AA¹⁷-LYY:IGKTPKI:LRKHR:VKS:XKXS, ASASPXX:VPQ:SATS-AA¹⁷-LYY:VGRTPKV:LRKHR:VKS:XKXS, NDEGLEX:VPT:SATS-AA¹⁷-LYY:RIKPHQGQH:LRKHR:QHN:KXEXR, NDEGLEX:VPT:SATS-AA¹⁷-LYY:RIKPHQGQH:LRKHR:EHS:QXEXR, SSVKXQP:SRV:SATS-AA¹⁷-LYY:EYVRKKPKL:LRKHR:EEH:LEXAXA, RNVQXRP:TQV:SATS-AA¹⁷-LYY:EIVRKKPIF:LRKHR:EDH:LAXKXE, KIPKAXX:VPT:SPIS-AA¹⁷-LYK:DENEKVV:LKYHY:VAE:GXGXR, GIPEPXX:VPT:SPIS-AA¹⁷-LYK:DENKNVV:LKYHY:VAE:SXAXR, SIPKAXX:VPT:SPIS-AA¹⁷-LYK:DEYDKVV:LKYHY:VAE:GXGXR, HVTKPTX:VPT:SPIS-AA¹⁷-LYK:DDSSNVI:LKYHY:VAE:SXGXH, YVPKPXX:VPT:SPIS-AA¹⁷-LYK:DDSSNVI:LKYHY:VAE:SXGXH, TVPKPXX:VPT:SPIS-AA¹⁷-LYK:DDSSNVI:LKYHY:VAE:AXGXH, AVPKAXX:VPT:SPIS-AA¹⁷-LYK:DSSNNVI:LKYHY:VAE:AXGXH, KASKAXX:VPT:SPIS-AA¹⁷-LYK:DKGVVTY:LKYHY:VAE:EXGXR, GSAGPXX:VPT:SPIS-AA¹⁷-LYK:NDKQQII:LKYHY:VAE:RXGXS, AAPASXX:VPT:SPIS-AA¹⁷-LYK:DAANNVV:LKYHY:VAE:AXGXR, STPPTXX:VPT:SPIS-AA¹⁷-LYK:DSANNVV:LKYHY:VAE:SXGXR, HVPKPXX:VPT:SPIS-AA¹⁷-LYK:DDSSNVI:LKYHY:VAE:SXGXH, RVPSTXX:VPT:SPIS-AA¹⁷-LYK:DNGRVLL:LKYHY:VAE:XGXL, ASAAPXX:VPT:SPIS-AA¹⁷-LYK:VGRKPKV:LKYHY:VAE:XKXS, ASASPXX:VPT:SPIS-AA¹⁷-LYK:IGKTPKI:LKYHY:VAE:XKXS, ASASPXX:VPT:SPIS-AA¹⁷-LYK:VGRTPKV:LKYHY:VAE:XKXS, KIPKAXX:VPT:SPIS-AA¹⁷-LYK:DENEKVV:LKYHY:VVE:GXGXR, GIPEPXX:VPE:SPIS-AA¹⁷-LYK:DENKNVV:LKYHY:TVE:SXAXR, SIPKAXX:VPT:SPIS-AA¹⁷-LYK:DEYDKVV:LKYHY:VVE:GXGXR, HVTKPTX:APT:SPIS-AA¹⁷-LYK:DDSSNVI:LKYHY:VVR:SXGXH, YVPKPXX:APT:SPIS-AA¹⁷-LYK:DDSSNVI:LKYHY:VVR:SXGXH, TVPKPXX:APT:SPIS-AA¹⁷-LYK:DDSSNVI:LKYHY:VVR:AXGXH, AVPKAXX:APT:SPIS-AA¹⁷-LYK:DSSNNVI:LKYHY:VVK:AXGXH, KASKAXX:VPT:SPIS-AA¹⁷-LYK:DKGVVTY:LKYHY:AVS:EXGXR, GSAGPXX:TPT:SPIS-AA¹⁷-LYK:NDKQQII:LKYHY:VVD:RXGXS, AAPASXX:VPA:SPIS-AA¹⁷-LYK:DAANNVV:LKYHY:VVE:AXGXR, STPPTXX:VPT:SPIS-AA¹⁷-LYK:DSANNVV:LKYHY:VVE:SXGXR, HVPKPXX:APT:SPIS-AA¹⁷-LYK:DDSSNVI:LKYHY:VVR:SXGXH, RVPSTXX:APV:SPIS-AA¹⁷-LYK:DNGRVLL:LKYHY:VEE:XGXL, ASAAPXX:VPQ:SPIS-AA¹⁷-LYK:VGRKPKV:LKYHY:VRS:XKXS, ASASPXX:VSQ:SPIS-AA¹⁷-LYK:IGKTPKI:LKYHY:VKS:XKXS, ASASPXX:VPQ:SPIS-AA¹⁷-LYK:VGRTPKV:LKYHY:VKS:XKXS, NDEGLEX:VPT:SPIS-AA¹⁷-LYK:RIKPHQGQH:LKYHY:QHN:KXEXR, NDEGLEX:VPT:SPIS-AA¹⁷-LYK:RIKPHQGQH:LKYHY:EHS:QXEXR, SSVKXQP:SRV:SPIS-AA¹⁷-LYK:EYVRKKPKL:LKYHY:EEH:LEXAXA, RNVQXRP:TQV:SPIS-AA¹⁷-LYK:EIVRKKPIF:LKYHY:EDH:LAXKXE, KIPKAXX:VPT:EPIS-AA¹⁷-LYL:DENEKVV:KFKYE:AVS:GXGXR, GIPEPXX:VPT:EPIS-AA¹⁷-LYL:DENKNVV:KFKYE:AVS:SXAXR, SIPKAXX:VPT:EPIS-AA¹⁷-LYL:DEYDKVV:KFKYE:AVS:GXGXR, HVTKPTX:VPT:EPIS-AA¹⁷-LYL:DDSSNVI:KFKYE:AVS:SXGXH, YVPKPXX:VPT:EPIS-AA¹⁷-LYL:DDSSNVI:KFKYE:AVS:SXGXH, TVPKPXX:VPT:EPIS-AA¹⁷-LYL:DDSSNVI:KFKYE:AVS:AXGXH, AVPKAXX:VPT:EPIS-AA¹⁷-LYL:DSSNNVI:KFKYE:AVS:AXGXH, KVGKAXX:VPT:EPIS-AA¹⁷-LYL:DDMGVPT:KFKYE:AVS:XGXR, GSAGPXX:VPT:EPIS-AA¹⁷-LYL:NDKQQII:KFKYE:AVS:RXGXS, AAPASXX:VPT:EPIS-AA¹⁷-LYL:DAANNVV:KFKYE:AVS:AXGXR, STPPTXX:VPT:EPIS-AA¹⁷-LYL:DSANNVV:KFKYE:AVS:SXGXR, HVPKPXX:VPT:EPIS-AA¹⁷-LYL:DDSSNVI:KFKYE:AVS:SXGXH, RVPSTXX:VPT:EPIS-AA¹⁷-LYL:DNGRVLL:KFKYE:AVS:XGXL, ASAAPXX:VPT:EPIS-AA¹⁷-LYL:VGRKPKV:KFKYE:AVS:XKXS, ASASPXX:VPT:EPIS-AA¹⁷-LYL:IGKTPKI:KFKYE:AVS:XKXS, ASASPXX:VPT:EPIS-AA¹⁷-LYL:VGRTPKV:KFKYE:AVS:XKXS, KIPKAXX:VPT:EPIS-AA¹⁷-LYL:DENEKVV:KFKYE:VVE:GXGXR, GIPEPXX:VPE:EPIS-AA¹⁷-LYL:DENKNVV:KFKYE:TVE:SXAXR, SIPKAXX:VPT:EPIS-AA¹⁷-LYL:DEYDKVV:KFKYE:VVE:GXGXR, HVTKPTX:APT:EPIS-AA¹⁷-LYL:DDSSNVI:KFKYE:VVR:SXGXH, YVPKPXX:APT:EPIS-AA¹⁷-LYL:DDSSNVI:KFKYE:VVR:SXGXH, TVPKPXX:APT:EPIS-AA¹⁷-LYL:DDSSNVI:KFKYE:VVR:AXGXH, AVPKAXX:APT:EPIS-AA¹⁷-LYL:DSSNNVI:KFKYE:VVK:AXGXH, KVGKAXX:VPT:EPIS-AA¹⁷-LYL:DDMGVPT:KFKYE:VAE:XGXR, GSAGPXX:TPT:EPIS-AA¹⁷-LYL:NDKQQII:KFKYE:VVD:RXGXS, AAPASXX:VPA:EPIS-AA¹⁷-LYL:DAANNVV:KFKYE:WE:AXGXR, STPPTXX:VPT:EPIS-AA¹⁷-LYL:DSANNVV:KFKYE:VVE:SXGXR, HVPKPXX:APT:EPIS-AA¹⁷-LYL:DDSSNVI:KFKYE:VVR:SXGXH, RVPSTXX:APV:EPIS-AA¹⁷-LYL:DNGRVLL:KFKYE:VEE:XGXL, ASAAPXX:VPQ:EPIS-AA¹⁷-LYL:VGRKPKV:KFKYE:VRS:XKXS, ASASPXX:VSQ:EPIS-AA¹⁷-LYL:IGKTPKI:KFKYE:VKS:XKXS, ASASPXX:VPQ:EPIS-AA¹⁷-LYL:VGRTPKV:KFKYE:VKS:XKXS, NDEGLEX:VPT:EPIS-AA¹⁷-LYL:RIKPHQGQH:KFKYE:QHN:KXEXR, NDEGLEX:VPT:EPIS-AA¹⁷-LYL:RIKPHQGQH:KFKYE:EHS:QXEXR, SSVKXQP:SRV:EPIS-AA¹⁷-LYL:EYVRKKPKL:KFKYE:EEH:LEXAXA, RNVQXRP:TQV:EPIS-AA¹⁷-LYL:EIVRKKPIF:KFKYE:EDH:LAXKXE, KIPKAXX:TPT:SPIN-AA¹⁷-LYF:DENEKVV:YGKIP:VVD:GXGXR, GIPEPXX:TPT:SPIN-AA¹⁷-LYF:DENKNVV:YGKIP:VVD:SXAXR, SIPKAXX:TPT:SPIN-AA¹⁷-LYF:DEYDKVV:YGKIP:VVD:GXGXR, HVTKPTX:TPT:SPIN-AA¹⁷-LYF:DDSSNVI:YGKIP:VVD:SXGXH, YVPKPXX:TPT:SPIN-AA¹⁷-LYF:DDSSNVI:YGKIP:VVD:SXGXH, TVPKPXX:TPT:SPIN-AA¹⁷-LYF:DDSSNVI:YGKIP:VVD:AXGXH, AVPKAXX:TPT:SPIN-AA¹⁷-LYF:DSSNNVI:YGKIP:VVD:AXGXH, KVGKAXX:TPT:SPIN-AA¹⁷-LYF:DDMGVPT:YGKIP:VVD:XGXR, KASKAXX:TPT:SPIN-AA¹⁷-LYF:DKGVVTY:YGKIP:VVD:EXGXR, AAPASXX:TPT:SPIN-AA¹⁷-LYF:DAANNVV:YGKIP:VVD:AXGXR, STPPTXX:TPT:SPIN-AA¹⁷-LYF:DSANNVV:YGKIP:VVD:SXGXR, HVPKPXX:TPT:SPIN-AA¹⁷-LYF:DDSSNVI:YGKIP:VVD:SXGXH, RVPSTXX:TPT:SPIN-AA¹⁷-LYF:DNGRVLL:YGKIP:VVD:XGXL, ASAAPXX:TPT:SPIN-AA¹⁷-LYF:VGRKPKV:YGKIP:VVD:XKXS, ASASPXX:TPT:SPIN-AA¹⁷-LYF:IGKTPKI:YGKIP:VVD:XKXS, ASASPXX:TPT:SPIN-AA¹⁷-LYF:VGRTPKV:YGKIP:VVD:XKXS, KIPKAXX:VPT:SPIN-AA¹⁷-LYF:DENEKVV:YGKIP:VVE:GXGXR, GIPEPXX:VPE:SPIN-AA¹⁷-LYF:DENKNVV:YGKIP:TVE:SXAXR, SIPKAXX:VPT:SPIN-AA¹⁷-LYF:DEYDKVV:YGKIP:VVE:GXGXR, HVTKPTX:APT:SPIN-AA¹⁷-LYF:DDSSNVI:YGKIP:VVR:SXGXH, YVPKPXX:APT:SPIN-AA¹⁷-LYF:DDSSNVI:YGKIP:VVR:SXGXH, TVPKPXX:APT:SPIN-AA¹⁷-LYF:DDSSNVI:YGKIP:VVR:AXGXH, AVPKAXX:APT:SPIN-AA¹⁷-LYF:DSSNNVI:YGKIP:VVK:AXGXH, KVGKAXX:VPT:SPIN-AA¹⁷-LYF:DDMGVPT:YGKIP:VAE:XGXR, KASKAXX:VPT:SPIN-AA¹⁷-LYF:DKGVVTY:YGKIP:AVS:EXGXR, AAPASXX:VPA:SPIN-AA¹⁷-LYF:DAANNVV:YGKIP:VVE:AXGXR, STPPTXX:VPT:SPIN-AA¹⁷-LYF:DSANNVV:YGKIP:VVE:SXGXR, HVPKPXX:APT:SPIN-AA¹⁷-LYF:DDSSNVI:YGKIP:VVR:SXGXH, RVPSTXX:APV:SPIN-AA¹⁷-LYF:DNGRVLL:YGKIP:VEE:XGXL, ASAAPXX:VPQ:SPIN-AA¹⁷-LYF:VGRKPKV:YGKIP:VRS:XKXS, ASASPXX:VSQ:SPIN-AA¹⁷-LYF:IGKTPKI:YGKIP:VKS:XKXS, ASASPXX:VPQ:SPIN-AA¹⁷-LYF:VGRTPKV:YGKIP:VKS:XKXS, NDEGLEX:VPT:SPIN-AA¹⁷-LYF:RIKPHQGQH:YGKIP:QHN:KXEXR, NDEGLEX:VPT:SPIN-AA¹⁷-LYF:RIKPHQGQH:YGKIP:EHS:QXEXR, SSVKXQP:SRV:SPIN-AA¹⁷-LYF:EYVRKKPKL:YGKIP:EEH:LEXAXA, RNVQXRP:TQV:SPIN-AA¹⁷-LYF:EIVRKKPIF:YGKIP:EDH:LAXKXE, KIPKAXX:VPA:SPIS-AA¹⁷-LYI:DENEKVV:YKQYE:VVE:GXGXR, GIPEPXX:VPA:SPIS-AA¹⁷-LYI:DENKNVV:YKQYE:VVE:SXAXR, SIPKAXX:VPA:SPIS-AA¹⁷-LYI:DEYDKVV:YKQYE:VVE:GXGXR, HVTKPTX:VPA:SPIS-AA¹⁷-LYI:DDSSNVI:YKQYE:VVE:SXGXH, YVPKPXX:VPA:SPIS-AA¹⁷-LYI:DDSSNVI:YKQYE:VVE:SXGXH, TVPKPXX:VPA:SPIS-AA¹⁷-LYI:DDSSNVI:YKQYE:VVE:AXGXH, AVPKAXX:VPA:SPIS-AA¹⁷-LYI:DSSNNVI:YKQYE:VVE:AXGXH, KVGKAXX:VPA:SPIS-AA¹⁷-LYI:DDMGVPT:YKQYE:VVE:XGXR, KASKAXX:VPA:SPIS-AA¹⁷-LYI:DKGVVTY:YKQYE:VVE:EXGXR, GSAGPXX:VPA:SPIS-AA¹⁷-LYI:NDKQQII:YKQYE:VVE:RXGXS, STPPTXX:VPA:SPIS-AA¹⁷-LYI:DSANNVV:YKQYE:VVE:SXGXR, HVPKPXX:VPA:SPIS-AA¹⁷-LYI:DDSSNVI:YKQYE:VVE:SXGXH, RVPSTXX:VPA:SPIS-AA¹⁷-LYI:DNGRVLL:YKQYE:VVE:XGXL, ASAAPXX:VPA:SPIS-AA¹⁷-LYI:VGRKPKV:YKQYE:VVE:XKXS, ASASPXX:VPA:SPIS-AA¹⁷-LYI:IGKTPKI:YKQYE:VVE:XKXS, ASASPXX:VPA:SPIS-AA¹⁷-LYI:VGRTPKV:YKQYE:VVE:XKXS, KIPKAXX:VPT:SPIS-AA¹⁷-LYI:DENEKVV:YKQYE:VVE:GXGXR, GIPEPXX:VPE:SPIS-AA¹⁷-LYI:DENKNVV:YKQYE:TVE:SXAXR, SIPKAXX:VPT:SPIS-AA¹⁷-LYI:DEYDKVV:YKQYE:VVE:GXGXR, HVTKPTX:APT:SPIS-AA¹⁷-LYI:DDSSNVI:YKQYE:VVR:SXGXH, YVPKPXX:APT:SPIS-AA¹⁷-LYI:DDSSNVI:YKQYE:VVR:SXGXH, TVPKPXX:APT:SPIS-AA¹⁷-LYI:DDSSNVI:YKQYE:VVR:AXGXH, AVPKAXX:APT:SPIS-AA¹⁷-LYI:DSSNNVI:YKQYE:VVK:AXGXH, KVGKAXX:VPT:SPIS-AA¹⁷-LYI:DDMGVPT:YKQYE:VAE:XGXR, KASKAXX:VPT:SPIS-AA¹⁷-LYI:DKGVVTY:YKQYE:AVS:EXGXR, GSAGPXX:TPT:SPIS-AA¹⁷-LYI:NDKQQII:YKQYE:VVD:RXGXS, STPPTXX:VPT:SPIS-AA¹⁷-LYI:DSANNVV:YKQYE:VVE:SXGXR, HVPKPXX:APT:SPIS-AA¹⁷-LYI:DDSSNVI:YKQYE:VVR:SXGXH, RVPSTXX:APV:SPIS-AA¹⁷-LYI:DNGRVLL:YKQYE:VEE:XGXL, ASAAPXX:VPQ:SPIS-AA¹⁷-LYI:VGRKPKV:YKQYE:VRS:XKXS, ASASPXX:VSQ:SPIS-AA¹⁷-LYI:IGKTPKI:YKQYE:VKS:XKXS, ASASPXX:VPQ:SPIS-AA¹⁷-LYI:VGRTPKV:YKQYE:VKS:XKXS, NDEGLEX:VPT:SPIS-AA¹⁷-LYI:RIKPHQGQH:YKQYE:QHN:KXEXR, NDEGLEX:VPT:SPIS-AA¹⁷-LYI:RIKPHQGQH:YKQYE:EHS:QXEXR, SSVKXQP:SRV:SPIS-AA¹⁷-LYI:EYVRKKPKL:YKQYE:EEH:LEXAXA, RNVQXRP:TQV:SPIS-AA¹⁷-LYI:EIVRKKPIF:YKQYE:EDH:LAXKXE, KIPKAXX:VPT:SPIS-AA¹⁷-LFI:DENEKVV:YKQYE:VVE:GXGXR, GIPEPXX:VPT:SPIS-AA¹⁷-LFI:DENKNVV:YKQYE:VVE:SXAXR, SIPKAXX:VPT:SPIS-AA¹⁷-LFI:DEYDKVV:YKQYE:VVE:GXGXR, HVTKPTX:VPT:SPIS-AA¹⁷-LFI:DDSSNVI:YKQYE:VVE:SXGXH, YVPKPXX:VPT:SPIS-AA¹⁷-LFI:DDSSNVI:YKQYE:VVE:SXGXH, TVPKPXX:VPT:SPIS-AA¹⁷-LFI:DDSSNVI:YKQYE:VVE:AXGXH, AVPKAXX:VPT:SPIS-AA¹⁷-LFI:DSSNNVI:YKQYE:VVE:AXGXH, KVGKAXX:VPT:SPIS-AA¹⁷-LFI:DDMGVPT:YKQYE:VVE:XGXR, KASKAXX:VPT:SPIS-AA¹⁷-LFI:DKGVVTY:YKQYE:VVE:EXGXR, GSAGPXX:VPT:SPIS-AA¹⁷-LFI:NDKQQII:YKQYE:VVE:RXGXS, AAPASXX:VPT:SPIS-AA¹⁷-LFI:DAANNVV:YKQYE:VVE:AXGXR, HVPKPXX:VPT:SPIS-AA¹⁷-LFI:DDSSNVI:YKQYE:VVE:SXGXH, RVPSTXX:VPT:SPIS-AA¹⁷-LFI:DNGRVLL:YKQYE:VVE:XGXL, ASAAPXX:VPT:SPIS-AA¹⁷-LFI:VGRKPKV:YKQYE:VVE:XKXS, ASASPXX:VPT:SPIS-AA¹⁷-LFI:IGKTPKI:YKQYE:VVE:XKXS, ASASPXX:VPT:SPIS-AA¹⁷-LFI:VGRTPKV:YKQYE:VVE:XKXS, GIPEPXX:VPE:SPIS-AA¹⁷-LFI:DENKNVV:YKQYE:TVE:SXAXR, HVTKPTX:APT:SPIS-AA¹⁷-LFI:DDSSNVI:YKQYE:VVR:SXGXH, YVPKPXX:APT:SPIS-AA¹⁷-LFI:DDSSNVI:YKQYE:VVR:SXGXH, TVPKPXX:APT:SPIS-AA¹⁷-LFI:DDSSNVI:YKQYE:VVR:AXGXH, AVPKAXX:APT:SPIS-AA¹⁷-LFI:DSSNNVI:YKQYE:VVK:AXGXH, KVGKAXX:VPT:SPIS-AA¹⁷-LFI:DDMGVPT:YKQYE:VAE:XGXR, KASKAXX:VPT:SPIS-AA¹⁷-LFI:DKGVVTY:YKQYE:AVS:EXGXR, GSAGPXX:TPT:SPIS-AA¹⁷-LFI:NDKQQII:YKQYE:VVD:RXGXS, AAPASXX:VPA:SPIS-AA¹⁷-LFI:DAANNVV:YKQYE:VVE:AXGXR, HVPKPXX:APT:SPIS-AA¹⁷-LFI:DDSSNVI:YKQYE:VVR:SXGXH, RVPSTXX:APV:SPIS-AA¹⁷-LFI:DNGRVLL:YKQYE:VEE:XGXL, ASAAPXX:VPQ:SPIS-AA¹⁷-LFI:VGRKPKV:YKQYE:VRS:XKXS, ASASPXX:VSQ:SPIS-AA¹⁷-LFI:IGKTPKI:YKQYE:VKS:XKXS, ASASPXX:VPQ:SPIS-AA¹⁷-LFI:VGRTPKV:YKQYE:VKS:XKXS, NDEGLEX:VPT:SPIS-AA¹⁷-LFI:RIKPHQGQH:YKQYE:QHN:KXEXR, NDEGLEX:VPT:SPIS-AA¹⁷-LFI:RIKPHQGQH:YKQYE:EHS:QXEXR, SSVKXQP:SRV:SPIS-AA¹⁷-LFI:EYVRKKPKL:YKQYE:EEH:LEXAXA, RNVQXRP:TQV:SPIS-AA¹⁷-LFI:EIVRKKPIF:YKQYE:EDH:LAXKXE, KIPKAXX:APV:KPLS-AA¹⁷-LYV:DENEKVV:DHHKD:VEE:GXGXR, GIPEPXX:APV:KPLS-AA¹⁷-LYV:DENKNVV:DHHKD:VEE:SXAXR, SIPKAXX:APV:KPLS-AA¹⁷-LYV:DEYDKVV:DHHKD:VEE:GXGXR, HVTKPTX:APV:KPLS-AA¹⁷-LYV:DDSSNVI:DHHKD:VEE:SXGXH, YVPKPXX:APV:KPLS-AA¹⁷-LYV:DDSSNVI:DHHKD:VEE:SXGXH, TVPKPXX:APV:KPLS-AA¹⁷-LYV:DDSSNVI:DHHKD:VEE:AXGXH, AVPKAXX:APV:KPLS-AA¹⁷-LYV:DSSNNVI:DHHKD:VEE:AXGXH, KVGKAXX:APV:KPLS-AA¹⁷-LYV:DDMGVPT:DHHKD:VEE:XGXR, KASKAXX:APV:KPLS-AA¹⁷-LYV:DKGVVTY:DHHKD:VEE:EXGXR, GSAGPXX:APV:KPLS-AA¹⁷-LYV:NDKQQII:DHHKD:VEE:RXGXS, AAPASXX:APV:KPLS-AA¹⁷-LYV:DAANNVV:DHHKD:VEE:AXGXR, STPPTXX:APV:KPLS-AA¹⁷-LYV:DSANNVV:DHHKD:VEE:SXGXR, HVPKPXX:APV:KPLS-AA¹⁷-LYV:DDSSNVI:DHHKD:VEE:SXGXH, ASAAPXX:APV:KPLS-AA¹⁷-LYV:VGRKPKV:DHHKD:VEE:XKXS, ASASPXX:APV:KPLS-AA¹⁷-LYV:IGKTPKI:DHHKD:VEE:XKXS, ASASPXX:APV:KPLS-AA¹⁷-LYV:VGRTPKV:DHHKD:VEE:XKXS, KIPKAXX:VPT:KPLS-AA¹⁷-LYV:DENEKVV:DHHKD:VVE:GXGXR, GIPEPXX:VPE:KPLS-AA¹⁷-LYV:DENKNVV:DHHKD:TVE:SXAXR, SIPKAXX:VPT:KPLS-AA¹⁷-LYV:DEYDKVV:DHHKD:VVE:GXGXR, HVTKPTX:APT:KPLS-AA¹⁷-LYV:DDSSNVI:DHHKD:VVR:SXGXH, YVPKPXX:APT:KPLS-AA¹⁷-LYV:DDSSNVI:DHHKD:VVR:SXGXH, TVPKPXX:APT:KPLS-AA¹⁷-LYV:DDSSNVI:DHHKD:VVR:AXGXH, AVPKAXX:APT:KPLS-AA¹⁷-LYV:DSSNNVI:DHHKD:VVK:AXGXH, KVGKAXX:VPT:KPLS-AA¹⁷-LYV:DDMGVPT:DHHKD:VAE:XGXR, KASKAXX:VPT:KPLS-AA¹⁷-LYV:DKGVVTY:DHHKD:AVS:EXGXR, GSAGPXX:TPT:KPLS-AA¹⁷-LYV:NDKQQII:DHHKD:VVD:RXGXS, AAPASXX:VPA:KPLS-AA¹⁷-LYV:DAANNVV:DHHKD:VVE:AXGXR, STPPTXX:VPT:KPLS-AA¹⁷-LYV:DSANNVV:DHHKD:VVE:SXGXR, HVPKPXX:APT:KPLS-AA¹⁷-LYV:DDSSNVI:DHHKD:VVR:SXGXH, ASAAPXX:VPQ:KPLS-AA¹⁷-LYV:VGRKPKV:DHHKD:VRS:XKXS, ASASPXX:VSQ:KPLS-AA¹⁷-LYV:IGKTPKI:DHHKD:VKS:XKXS, ASASPXX:VPQ:KPLS-AA¹⁷-LYV:VGRTPKV:DHHKD:VKS:XKXS, NDEGLEX:VPT:KPLS-AA¹⁷-LYV:RIKPHQGQH:DHHKD:QHN:KXEXR, NDEGLEX:VPT:KPLS-AA¹⁷-LYV:RIKPHQGQH:DHHKD:EHS:QXEXR, SSVKXQP:SRV:KPLS-AA¹⁷-LYV:EYVRKKPKL:DHHKD:EEH:LEXAXA, RNVQXRP:TQV:KPLS-AA¹⁷-LYV:EIVRKKPIF:DHHKD:EDH:LAXKXE, KIPKAXX:VPQ:EPLP-AA¹⁷-VYY:DENEKVV:EQLSN:VRS:GXGXR, GIPEPXX:VPQ:EPLP-AA¹⁷-VYY:DENKNVV:EQLSN:VRS:SXAXR, SIPKAXX:VPQ:EPLP-AA¹⁷-VYY:DEYDKVV:EQLSN:VRS:GXGXR, HVTKPTX:VPQ:EPLP-AA¹⁷-VYY:DDSSNVI:EQLSN:VRS:SXGXH, YVPKPXX:VPQ:EPLP-AA¹⁷-VYY:DDSSNVI:EQLSN:VRS:SXGXH, TVPKPXX:VPQ:EPLP-AA¹⁷-VYY:DDSSNVI:EQLSN:VRS:AXGXH, AVPKAXX:VPQ:EPLP-AA¹⁷-VYY:DSSNNVI:EQLSN:VRS:AXGXH, KVGKAXX:VPQ:EPLP-AA¹⁷-VYY:DDMGVPT:EQLSN:VRS:XGXR, KASKAXX:VPQ:EPLP-AA¹⁷-VYY:DKGVVTY:EQLSN:VRS:EXGXR, GSAGPXX:VPQ:EPLP-AA¹⁷-VYY:NDKQQII:EQLSN:VRS:RXGXS, AAPASXX:VPQ:EPLP-AA¹⁷-VYY:DAANNVV:EQLSN:VRS:AXGXR, STPPTXX:VPQ:EPLP-AA¹⁷-VYY:DSANNVV:EQLSN:VRS:SXGXR, HVPKPXX:VPQ:EPLP-AA¹⁷-VYY:DDSSNVI:EQLSN:VRS:SXGXH, RVPSTXX:VPQ:EPLP-AA¹⁷-VYY:DNGRVLL:EQLSN:VRS:XGXL, ASASPXX:VPQ:EPLP-AA¹⁷-VYY:IGKTPKI:EQLSN:VRS:XKXS, ASASPXX:VPQ:EPLP-AA¹⁷-VYY:VGRTPKV:EQLSN:VRS:XKXS, KIPKAXX:VPT:EPLP-AA¹⁷-VYY:DENEKVV:EQLSN:VVE:GXGXR, GIPEPXX:VPE:EPLP-AA¹⁷-VYY:DENKNVV:EQLSN:TVE:SXAXR, SIPKAXX:VPT:EPLP-AA¹⁷-VYY:DEYDKVV:EQLSN:VVE:GXGXR, HVTKPTX:APT:EPLP-AA¹⁷-VYY:DDSSNVI:EQLSN:VVR:SXGXH, YVPKPXX:APT:EPLP-AA¹⁷-VYY:DDSSNVI:EQLSN:VVR:SXGXH, TVPKPXX:APT:EPLP-AA¹⁷-VYY:DDSSNVI:EQLSN:VVR:AXGXH, AVPKAXX:APT:EPLP-AA¹⁷-VYY:DSSNNVI:EQLSN:VVK:AXGXH, KVGKAXX:VPT:EPLP-AA¹⁷-VYY:DDMGVPT:EQLSN:VAE:XGXR, KASKAXX:VPT:EPLP-AA¹⁷-VYY:DKGVVTY:EQLSN:AVS:EXGXR, GSAGPXX:TPT:EPLP-AA¹⁷-VYY:NDKQQII:EQLSN:VVD:RXGXS, AAPASXX:VPA:EPLP-AA¹⁷-VYY:DAANNVV:EQLSN:VVE:AXGXR, STPPTXX:VPT:EPLP-AA¹⁷-VYY:DSANNVV:EQLSN:VVE:SXGXR, HVPKPXX:APT:EPLP-AA¹⁷-VYY:DDSSNVI:EQLSN:VVR:SXGXH RVPSTXX:APV:EPLP-AA¹⁷-VYY:DNGRVLL:EQLSN:VEE:XGXL, ASASPXX:VSQ:EPLP-AA¹⁷-VYY:IGKTPKI:EQLSN:VKS:XKXS, ASASPXX:VPQ:EPLP-AA¹⁷-VYY:VGRTPKV:EQLSN:VKS:XKXS, NDEGLEX:VPT:EPLP-AA¹⁷-VYY:RIKPHQGQH:EQLSN:QHN:KXEXR, NDEGLEX:VPT:EPLP-AA¹⁷-VYY:RIKPHQGQH:EQLSN:EHS:QXEXR, SSVKXQP:SRV:EPLP-AA¹⁷-VYY:EYVRKKPKL:EQLSN:EEH:LEXAXA, RNVQXRP:TQV:EPLP-AA¹⁷-VYY:EIVRKKPIF:EQLSN:EDH:LAXKXE, KIPKAXX:VSQ:EPLT-AA¹⁷-LYY:DENEKVV:EQLSN:VKS:GXGXR, GIPEPXX:VSQ:EPLT-AA¹⁷-LYY:DENKNVV:EQLSN:VKS:SXAXR, SIPKAXX:VSQ:EPLT-AA¹⁷-LYY:DEYDKVV:EQLSN:VKS:GXGXR, HVTKPTX:VSQ:EPLT-AA¹⁷-LYY:DDSSNVI:EQLSN:VKS:SXGXH, YVPKPXX:VSQ:EPLT-AA¹⁷-LYY:DDSSNVI:EQLSN:VKS:SXGXH, TVPKPXX:VSQ:EPLT-AA¹⁷-LYY:DDSSNVI:EQLSN:VKS:AXGXH, AVPKAXX:VSQ:EPLT-AA¹⁷-LYY:DSSNNVI:EQLSN:VKS:AXGXH, KVGKAXX:VSQ:EPLT-AA¹⁷-LYY:DDMGVPT:EQLSN:VKS:XGXR, KASKAXX:VSQ:EPLT-AA¹⁷-LYY:DKGVVTY:EQLSN:VKS:EXGXR, GSAGPXX:VSQ:EPLT-AA¹⁷-LYY:NDKQQII:EQLSN:VKS:RXGXS, AAPASXX:VSQ:EPLT-AA¹⁷-LYY:DAANNVV:EQLSN:VKS:AXGXR, STPPTXX:VSQ:EPLT-AA¹⁷-LYY:DSANNVV:EQLSN:VKS:SXGXR, HVPKPXX:VSQ:EPLT-AA¹⁷-LYY:DDSSNVI:EQLSN:VKS:SXGXH, RVPSTXX:VSQ:EPLT-AA¹⁷-LYY:DNGRVLL:EQLSN:VKS:XGXL, ASAAPXX:VSQ:EPLT-AA¹⁷-LYY:VGRKPKV:EQLSN:VKS:XKXS, ASASPXX:VSQ:EPLT-AA¹⁷-LYY:VGRTPKV:EQLSN:VKS:XKXS, KIPKAXX:VPT:EPLT-AA¹⁷-LYY:DENEKVV:EQLSN:VVE:GXGXR, GIPEPXX:VPE:EPLT-AA¹⁷-LYY:DENKNVV:EQLSN:TVE:SXAXR, SIPKAXX:VPT:EPLT-AA¹⁷-LYY:DEYDKVV:EQLSN:VVE:GXGXR, HVTKPTX:APT:EPLT-AA¹⁷-LYY:DDSSNVI:EQLSN:VVR:SXGXH, YVPKPXX:APT:EPLT-AA¹⁷-LYY:DDSSNVI:EQLSN:VVR:SXGXH, TVPKPXX:APT:EPLT-AA¹⁷-LYY:DDSSNVI:EQLSN:VVR:AXGXH, AVPKAXX:APT:EPLT-AA¹⁷-LYY:DSSNNVI:EQLSN:VVK:AXGXH, KVGKAXX:VPT:EPLT-AA¹⁷-LYY:DDMGVPT:EQLSN:VAE:XGXR, KASKAXX:VPT:EPLT-AA¹⁷-LYY:DKGVVTY:EQLSN:AVS:EXGXR, GSAGPXX:TPT:EPLT-AA¹⁷-LYY:NDKQQII:EQLSN:VVD:RXGXS, AAPASXX:VPA:EPLT-AA¹⁷-LYY:DAANNVV:EQLSN:VVE:AXGXR, STPPTXX:VPT:EPLT-AA¹⁷-LYY:DSANNVV:EQLSN:VVE:SXGXR, HVPKPXX:APT:EPLT-AA¹⁷-LYY:DDSSNVI:EQLSN:VVR:SXGXH, RVPSTXX:APV:EPLT-AA¹⁷-LYY:DNGRVLL:EQLSN:VEE:XGXL, ASAAPXX:VPQ:EPLT-AA¹⁷-LYY:VGRKPKV:EQLSN:VRS:XKXS, NDEGLEX:VPT:EPLT-AA¹⁷-LYY:RIKPHQGQH:EQLSN:QHN:KXEXR, NDEGLEX:VPT:EPLT-AA¹⁷-LYY:RIKPHQGQH:EQLSN:EHS:QXEXR, SSVKXQP:SRV:EPLT-AA¹⁷-LYY:EYVRKKPKL:EQLSN:EEH:LEXAXA, RNVQXRP:TQV:EPLT-AA¹⁷-LYY:EIVRKKPIF:EQLSN:EDH:LAXKXE, KIPKAXX:VPQ:EPLT-AA¹⁷-LYY:DENEKVV:EQLSN:VKS:GXGXR, GIPEPXX:VPQ:EPLT-AA¹⁷-LYY:DENKNVV:EQLSN:VKS:SXAXR, SIPKAXX:VPQ:EPLT-AA¹⁷-LYY:DEYDKVV:EQLSN:VKS:GXGXR, HVTKPTX:VPQ:EPLT-AA¹⁷-LYY:DDSSNVI:EQLSN:VKS:SXGXH, YVPKPXX:VPQ:EPLT-AA¹⁷-LYY:DDSSNVI:EQLSN:VKS:SXGXH, TVPKPXX:VPQ:EPLT-AA¹⁷-LYY:DDSSNVI:EQLSN:VKS:AXGXH, AVPKAXX:VPQ:EPLT-AA¹⁷-LYY:DSSNNVI:EQLSN:VKS:AXGXH, KVGKAXX:VPQ:EPLT-AA¹⁷-LYY:DDMGVPT:EQLSN:VKS:XGXR, KASKAXX:VPQ:EPLT-AA¹⁷-LYY:DKGVVTY:EQLSN:VKS:EXGXR, GSAGPXX:VPQ:EPLT-AA¹⁷-LYY:NDKQQII:EQLSN:VKS:RXGXS, AAPASXX:VPQ:EPLT-AA¹⁷-LYY:DAANNVV:EQLSN:VKS:AXGXR, STPPTXX:VPQ:EPLT-AA¹⁷-LYY:DSANNVV:EQLSN:VKS:SXGXR, HVPKPXX:VPQ:EPLT-AA¹⁷-LYY:DDSSNVI:EQLSN:VKS:SXGXH, RVPSTXX:VPQ:EPLT-AA¹⁷-LYY:DNGRVLL:EQLSN:VKS:XGXL, ASAAPXX:VPQ:EPLT-AA¹⁷-LYY:VGRKPKV:EQLSN:VKS:XKXS, ASASPXX:VPQ:EPLT-AA¹⁷-LYY:IGKTPKI:EQLSN:VKS:XKXS, NDEGLEX:VPT:SNIT-AA¹⁷-QIM:RIKPHQGQH:IGEMS:QHN:QXEXR, KIPKAXX:VPT:SNIT-AA¹⁷-QIM:DENEKVV:IGEMS:VVE:GXGXR, GIPEPXX:VPE:SNIT-AA¹⁷-QIM:DENKNVV:IGEMS:TVE:SXAXR, SIPKAXX:VPT:SNIT-AA¹⁷-QIM:DEYDKVV:IGEMS:VVE:GXGXR, HVTKPTX:APT:SNIT-AA¹⁷-QIM:DDSSNVI:IGEMS:VVR:SXGXH, YVPKPXX:APT:SNIT-AA¹⁷-QIM:DDSSNVI:IGEMS:VVR:SXGXH, TVPKPXX:APT:SNIT-AA¹⁷-QIM:DDSSNVI:IGEMS:VVR:AXGXH, AVPKAXX:APT:SNIT-AA¹⁷-QIM:DSSNNVI:IGEMS:VVK:AXGXH, KVGKAXX:VPT:SNIT-AA¹⁷-QIM:DDMGVPT:IGEMS:VAE:XGXR, KASKAXX:VPT:SNIT-AA¹⁷-QIM:DKGVVTY:IGEMS:AVS:EXGXR, GSAGPXX:TPT:SNIT-AA¹⁷-QIM:NDKQQII:IGEMS:VVD:RXGXS, AAPASXX:VPA:SNIT-AA¹⁷-QIM:DAANNVV:IGEMS:VVE:AXGXR, STPPTXX:VPT:SNIT-AA¹⁷-QIM:DSANNVV:IGEMS:VVE:SXGXR, HVPKPXX:APT:SNIT-AA¹⁷-QIM:DDSSNVI:IGEMS:VVR:SXGXH, RVPSTXX:APV:SNIT-AA¹⁷-QIM:DNGRVLL:IGEMS:VEE:XGXL, ASAAPXX:VPQ:SNIT-AA¹⁷-QIM:VGRKPKV:IGEMS:VRS:XKXS, ASASPXX:VSQ:SNIT-AA¹⁷-QIM:IGKTPKI:IGEMS:VKS:XKXS, ASASPXX:VPQ:SNIT-AA¹⁷-QIM:VGRTPKV:IGEMS:VKS:XKXS, NDEGLEX:VPT:SNIT-AA¹⁷-QIM:RIKPHQGQH:IGEMS:EHS:QXEXR, SSVKXQP:SRV:SNIT-AA¹⁷-QIM:EYVRKKPKL:IGEMS:EEH:LEXAXA, RNVQXRP:TQV:SNIT-AA¹⁷-QIM:EIVRKKPIF:IGEMS:EDH:LAXKXE, NDEGLEX:VPT:SNIT-AA¹⁷-QIM:RIKPHQGQH:LGEMS:EHS:KXEXR, KIPKAXX:VPT:SNIT-AA¹⁷-QIM:DENEKVV:LGEMS:VVE:GXGXR, GIPEPXX:VPE:SNIT-AA¹⁷-QIM:DENKNVV:LGEMS:TVE:SXAXR, SIPKAXX:VPT:SNIT-AA¹⁷-QIM:DEYDKVV:LGEMS:VVE:GXGXR, HVTKPTX:APT:SNIT-AA¹⁷-QIM:DDSSNVI:LGEMS:VVR:SXGXH, YVPKPXX:APT:SNIT-AA¹⁷-QIM:DDSSNVI:LGEMS:VVR:SXGXH, TVPKPXX:APT:SNIT-AA¹⁷-QIM:DDSSNVI:LGEMS:VVR:AXGXH, AVPKAXX:APT:SNIT-AA¹⁷-QIM:DSSNNVI:LGEMS:VVK:AXGXH, KVGKAXX:VPT:SNIT-AA¹⁷-QIM:DDMGVPT:LGEMS:VAE:XGXR, KASKAXX:VPT:SNIT-AA¹⁷-QIM:DKGVVTY:LGEMS:AVS:EXGXR, GSAGPXX:TPT:SNIT-AA¹⁷-QIM:NDKQQII:LGEMS:VVD:RXGXS, AAPASXX:VPA:SNIT-AA¹⁷-QIM:DAANNVV:LGEMS:VVE:AXGXR, STPPTXX:VPT:SNIT-AA¹⁷-QIM:DSANNVV:LGEMS:VVE:SXGXR, HVPKPXX:APT:SNIT-AA¹⁷-QIM:DDSSNVI:LGEMS:VVR:SXGXH, RVPSTXX:APV:SNIT-AA¹⁷-QIM:DNGRVLL:LGEMS:VEE:XGXL, ASAAPXX:VPQ:SNIT-AA¹⁷-QIM:VGRKPKV:LGEMS:VRS:XKXS, ASASPXX:VSQ:SNIT-AA¹⁷-QIM:IGKTPKI:LGEMS:VKS:XKXS, ASASPXX:VPQ:SNIT-AA¹⁷-QIM:VGRTPKV:LGEMS:VKS:XKXS, NDEGLEX:VPT:SNIT-AA¹⁷-QIM:RIKPHQGQH:LGEMS:QHN:KXEXR, SSVKXQP:SRV:SNIT-AA¹⁷-QIM:EYVRKKPKL:LGEMS:EEH:LEXAXA, RNVQXRP:TQV:SNIT-AA¹⁷-QIM:EIVRKKPIF:LGEMS:EDH:LAXKXE, RNVQXRP:SRV:RSVK-AA¹⁷-AKV:EIVRKKPIF:KEVQV:EEH:LAXKXE, KIPKAXX:VPT:RSVK-AA¹⁷-AKV:DENEKVV:KEVQV:VVE:GXGXR, GIPEPXX:VPE:RSVK-AA¹⁷-AKV:DENKNVV:KEVQV:TVE:SXAXR, SIPKAXX:VPT:RSVK-AA¹⁷-AKV:DEYDKVV:KEVQV:VVE:GXGXR, HVTKPTX:APT:RSVK-AA¹⁷-AKV:DDSSNVI:KEVQV:VVR:SXGXH, YVPKPXX:APT:RSVK-AA¹⁷-AKV:DDSSNVI:KEVQV:VVR:SXGXH, TVPKPXX:APT:RSVK-AA¹⁷-AKV:DDSSNVI:KEVQV:VVR:AXGXH, AVPKAXX:APT:RSVK-AA¹⁷-AKV:DSSNNVI:KEVQV:VVK:AXGXH, KVGKAXX:VPT:RSVK-AA¹⁷-AKV:DDMGVPT:KEVQV:VAE:XGXR, KASKAXX:VPT:RSVK-AA¹⁷-AKV:DKGVVTY:KEVQV:AVS:EXGXR, GSAGPXX:TPT:RSVK-AA¹⁷-AKV:N DKQQII:KEVQV:VVD:RXGXS, AAPASXX:VPA:RSVK-AA¹⁷-AKV:DAANNVV:KEVQV:VVE:AXGXR, STPPTXX:VPT:RSVK-AA¹⁷-AKV:DSANNVV:KEVQV:VVE:SXGXR, HVPKPXX:APT:RSVK-AA¹⁷-AKV:DDSSNVI:KEVQV:VVR:SXGXH, RVPSTXX:APV:RSVK-AA¹⁷-AKV:DNGRVLL:KEVQV:VEE:XGXL, ASAAPXX:VPQ:RSVK-AA¹⁷-AKV:VGRKPKV:KEVQV:VRS:XKXS, ASASPXX:VSQ:RSVK-AA¹⁷-AKV:IGKTPKI:KEVQV:VKS:XKXS, ASASPXX:VPQ:RSVK-AA¹⁷-AKV:VGRTPKV:KEVQV:VKS:XKXS, NDEGLEX:VPT:RSVK-AA¹⁷-AKV:RIKPHQGQH:KEVQV:QHN:KXEXR, NDEGLEX:VPT:RSVK-AA¹⁷-AKV:RIKPHQGQH:KEVQV:EHS:QXEXR, RNVQXRP:TQV:RSVK-AA¹⁷-AKV:EIVRKKPIF:KEVQV:EDH:LAXKXE, SSVKXQP:TQV:RPVQ-AA¹⁷-RKI:EYVRKKPKL:KKATV:EDH:LEXAXA, KIPKAXX:VPT:RPVQ-AA¹⁷-RKI:DENEKVV:KKATV:VVE:GXGXR, GIPEPXX:VPE:RPVQ-AA¹⁷-RKI:DENKNVV:KKATV:TVE:SXAXR, SIPKAXX:VPT:RPVQ-AA¹⁷-RKI:DEYDKVV:KKATV:VVE:GXGXR, HVTKPTX:APT:RPVQ-AA¹⁷-RKI:DDSSNVI:KKATV:VVR:SXGXH, YVPKPXX:APT:RPVQ-AA¹⁷-RKI:DDSSNVI:KKATV:VVR:SXGXH, TVPKPXX:APT:RPVQ-AA¹⁷-RKI:DDSSNVI:KKATV:VVR:AXGXH, AVPKAXX:APT:RPVQ-AA¹⁷-RKI:DSSNNVI:KKATV:VVK:AXGXH, KVGKAXX:VPT:RPVQ-AA¹⁷-RKI:DDMGVPT:KKATV:VAE:XGXR, KASKAXX:VPT:RPVQ-AA¹⁷-RKI:DKGVVTY:KKATV:AVS:EXGXR, GSAGPXX:TPT:RPVQ-AA¹⁷-RKI:NDKQQII:KKATV:WD:RXGXS, AAPASXX:VPA:RPVQ-AA¹⁷-RKI:DAANNVV:KKATV:VVE:AXGXR, STPPTXX:VPT:RPVQ-AA¹⁷-RKI:DSANNVV:KKATV:VVE:SXGXR, HVPKPXX:APT:RPVQ-AA¹⁷-RKI:DDSSNVI:KKATV:VVR:SXGXH, RVPSTXX:APV:RPVQ-AA¹⁷-RKI:DNGRVLL:KKATV:VEE:XGXL, ASAAPXX:VPQ:RPVQ-AA¹⁷-RKI:VGRKPKV:KKATV:VRS:XKXS, ASASPXX:VSQ:RPVQ-AA¹⁷-RKI:IGKTPKI:KKATV:VKS:XKXS, ASASPXX:VPQ:RPVQ-AA¹⁷-RKI:VGRTPKV:KKATV:VKS:XKXS, NDEGLEX:VPT:RPVQ-AA¹⁷-RKI:RIKPHQGQH:KKATV:QHN:KXEXR, NDEGLEX:VPT:RPVQ-AA¹⁷-RKI:RIKPHQGQH:KKATV:EHS:QXEXR and SSVKXQP:SRV:RPVQ-AA¹⁷-RKI:EYVRKKPKL:KKATV:EEH:LEXAXA; and wherein AA¹⁷ is selected from the group consisting of G, A, V, L, I, P, F, M, W, T and S (in particular is selected from the group consisting of M, I, L, V and T).

[0445] In particular, in certain embodiments, the heptuplet PEP7:PEP5:PEP1:LINKER:PEP2:PEP6:PEP8 is selected from the group consisting of GIPEPXX:VPTKM:SAIS:DENKNVV:LKNYQ:NMVVE:SXAXR, SIPKAXX:VPTEL:SAIS:DEYDKVV:LKNYQ:EMVVE:GXGXR, HVTKPTX:VPTKL:SAIS:DDSSNVI:LKNYQ:NMVVE:SXGXH, YVPKPXX:VPTKL:SAIS:DDSSNVI:LKNYQ:NMVVE:SXGXH, TVPKPXX:VPTQL:SAIS:DDSSNVI:LKNYQ:NMVVE:AXGXH, AVPKAXX:VPTKL:SAIS:DSSNNVI:LKNYQ:NMVVE:AXGXH, KVGKAXX:VPTKL:SAIS:DDMGVPT:LKNYQ:EGMSVVE:XGXR, KASKAXX:VPTKL:SAIS:DKGVVTY:LKNYQ:GMVVE:EXGXR, GSAGPXX:VPTKM:SAIS:NDKQQII:LKNYQ:GMVVE:RXGXS, AAPASXX:VPTRL:SAIS:DAANNVV:LKNYQ:DMVVE:AXGXR, STPPTXX:VPTRL:SAIS:DSANNVV:LKNYQ:DMVVE:SXGXR, HVPKPXX:VPTKL:SAIS:DDSSNVI:LKNYQ:NMVVE:SXGXH, RVPSTXX:VPTKT:SAIS:DNGRVLL:LKNYQ:MIVVE:XGXL, ASAAPXX:VPTAL:SAIS:VGRKPKV:LKNYQ:MIVVE:XKXS, ASASPXX:VPTDL:SAIS:IGKTPKI:LKNYQ:MIVVE:XKXS, ASASPXX:VPTDL:SAIS:VGRTPKV:LKNYQ:MVVVE:XKXS, NDEGLXS:VPTEE:SAIS:RIKPHQGQH:LKNYQ:FLVVE:KXEXR, NDEGLXS:VPTGQ:SAIS:RIKPHQGQH:LKNYQ:LEVVE:QXEXR, SSVKXQP:VPTHH:SAIS:EYVRKKPKL:LKNYQ:RLVVE:LEXAXA, RNVQXRP:VPTQL:SAIS:EIVRKKPIF:LKNYQ:TLVVE:LAXKXE, GIPEPXX:VPEKM:SAIS:DENKNVV:LKNYQ:NMTVE:SXAXR, HVTKPTX:APTKL:SAIS:DDSSNVI:LKNYQ:NMVVR:SXGXH, YVPKPXX:APTKL:SAIS:DDSSNVI:LKNYQ:NMVVR:SXGXH, TVPKPXX:APTQL:SAIS:DDSSNVI:LKNYQ:NMVVR:AXGXH, AVPKAXX:APTKL:SAIS:DSSNNVI:LKNYQ:NMVVK:AXGXH, KVGKAXX:VPTKL:SAIS:DDMGVPT:LKNYQ:EGMSVAE:XGXR, KASKAXX:VPTKL:SAIS:DKGVVTY:LKNYQ:GMAVS:EXGXR, GSAGPXX:TPTKM:SAIS:NDKQQII:LKNYQ:GMVVD:RXGXS, AAPASXX:VPARL:SAIS:DAANNVV:LKNYQ:DMVVE:AXGXR, HVPKPXX:APTKL:SAIS:DDSSNVI:LKNYQ:NMVVR:SXGXH, RVPSTXX:APVKT:SAIS:DNGRVLL:LKNYQ:MIVEE:XGXL, ASAAPXX:VPQAL:SAIS:VGRKPKV:LKNYQ:MIVRS:XKXS, ASASPXX:VSQDL:SAIS:IGKTPKI:LKNYQ:MIVKS:XKXS, ASASPXX:VPQDL:SAIS:VGRTPKV:LKNYQ:MVVKS:XKXS, NDEGLXS:VPTEE:SAIS:RIKPHQGQH:LKNYQ:FLQHN:KXEXR, NDEGLXS:VPTGQ:SAIS:RIKPHQGQH:LKNYQ:LEEHS:QXEXR, SSVKXQP:SRVHH:SAIS:EYVRKKPKL:LKNYQ:RLEEH:LEXAXA, RNVQXRP:TQVQL:SAIS:EIVRKKPIF:LKNYQ:TLEDH:LAXKXE, KIPKAXX:VPEEL:SSLS:DENEKVV:LKVYP:DMTVE:GXGXR, SIPKAXX:VPEEL:SSLS:DEYDKVV:LKVYP:EMTVE:GXGXR, HVTKPTX:VPEKL:SSLS:DDSSNVI:LKVYP:NMTVE:SXGXH, YVPKPXX:VPEKL:SSLS:DDSSNVI:LKVYP:NMTVE:SXGXH, TVPKPXX:VPEQL:SSLS:DDSSNVI:LKVYP:NMTVE:AXGXH, AVPKAXX:VPEKL:SSLS:DSSNNVI:LKVYP:NMTVE:AXGXH, KVGKAXX:VPEKL:SSLS:DDMGVPT:LKVYP:EGMSTVE:XGXR, KASKAXX:VPEKL:SSLS:DKGVVTY:LKVYP:GMTVE:EXGXR, GSAGPXX:VPEKM:SSLS:NDKQQII:LKVYP:GMTVE:RXGXS, AAPASXX:VPERL:SSLS:DAANNVV:LKVYP:DMTVE:AXGXR, STPPTXX:VPERL:SSLS:DSANNVV:LKVYP:DMTVE:SXGXR, HVPKPXX:VPEKL:SSLS:DDSSNVI:LKVYP:NMTVE:SXGXH, RVPSTXX:VPEKT:SSLS:DNGRVLL:LKVYP:MITVE:XGXL, ASAAPXX:VPEAL:SSLS:VGRKPKV:LKVYP:MITVE:XKXS, ASASPXX:VPED L:SSLS:IGKTPKI:LKVYP:MITVE:XKXS, ASASPXX:VPEDL:SSLS:VGRTPKV:LKVYP:MVTVE:XKXS, NDEGLXS:VPEEE:SSLS:RIKPHQGQH:LKVYP:FLTVE:KXEXR, NDEGLXS:VPEGQ:SSLS:RIKPHQGQH:LKVYP:LETVE:QXEXR, SSVKXQP:VPEHH:SSLS:EYVRKKPKL:LKVYP:RLTVE:LEXAXA, RNVQXRP:VPEQL:SSLS:EIVRKKPIF:LKVYP:TLTVE:LAXKXE, KIPKAXX:VPTEL:SSLS:DENEKVV:LKVYP:DMVVE:GXGXR, SIPKAXX:VPTEL:SSLS:DEYDKVV:LKVYP:EMVVE:GXGXR, HVTKPTX:APTKL:SSLS:DDSSNVI:LKVYP:NMVVR:SXGXH, YVPKPXX:APTKL:SSLS:DDSSNVI:LKVYP:NMVVR:SXGXH, TVPKPXX:APTQL:SSLS:DDSSNVI:LKVYP:NMVVR:AXGXH, AVPKAXX:APTKL:SSLS:DSSNNVI:LKVYP:NMVVK:AXGXH, KVGKAXX:VPTKL:SSLS:DDMGVPT:LKVYP:EGMSVAE:XGXR, KASKAXX:VPTKL:SSLS:DKGVVTY:LKVYP:GMAVS:EXGXR, GSAGPXX:TPTKM:SSLS:NDKQQII:LKVYP:GMVVD:RXGXS, AAPASXX:VPARL:SSLS:DAANNVV:LKVYP:DMVVE:AXGXR, STPPTXX:VPTRL:SSLS:DSANNVV:LKVYP:DMVVE:SXGXR, HVPKPXX:APTKL:SSLS:DDSSNVI:LKVYP:NMVVR:SXGXH, RVPSTXX:APVKT:SSLS:DNGRVLL:LKVYP:MIVEE:XGXL, ASAAPXX:VPQAL:SSLS:VGRKPKV:LKVYP:MIVRS:XKXS, ASASPXX:VSQDL:SSLS:IGKTPKI:LKVYP:MIVKS:XKXS, ASASPXX:VPQDL:SSLS:VGRTPKV:LKVYP:MVVKS:XKXS, NDEGLXS:VPTEE:SSLS:RIKPHQGQH:LKVYP:FLQHN:KXEXR, NDEGLXS:VPTGQ:SSLS:RIKPHQGQH:LKVYP:LEEHS:QXEXR, SSVKXQP:SRVHH:SSLS:EYVRKKPKL:LKVYP:RLEEH:LEXAXA, RNVQXRP:TQVQL:SSLS:EIVRKKPIF:LKVYP:TLEDH:LAXKXE, KIPKAXX:VPTEL:SAIS:DENEKVV:LKNYQ:DMVVE:GXGXR, KIPKAXX:APTEL:NAIS:DENEKVV:LKKYR:DMVVR:GXGXR, GIPEPXX:APTKM:NAIS:DENKNVV:LKKYR:NMVVR:SXAXR, SIPKAXX:APTEL:NAIS:DEYDKVV:LKKYR:EMVVR:GXGXR, YVPKPXX:APTKL:NAIS:DDSSNVI:LKKYR:NMVVR:SXGXH, TVPKPXX:APTQL:NAIS:DDSSNVI:LKKYR:NMVVR:AXGXH, AVPKAXX:APTKL:NAIS:DSSNNVI:LKKYR:NMVVR:AXGXH, KVGKAXX:APTKL:NAIS:DDMGVPT:LKKYR:EGMSVVR:XGXR, KASKAXX:APTKL:NAIS:DKGVVTY:LKKYR:GMVVR:EXGXR, GSAGPXX:APTKM:NAIS:NDKQQII:LKKYR:GMVVR:RXGXS, AAPASXX:APTRL:NAIS:DAANNVV:LKKYR:DMVVR:AXGXR, STPPTXX:APTRL:NAIS:DSANNVV:LKKYR:DMVVR:SXGXR, HVPKPXX:APTKL:NAIS:DDSSNVI:LKKYR:NMVVR:SXGXH, RVPSTXX:APTKT:NAIS:DNGRVLL:LKKYR:MIVVR:XGXL, ASAAPXX:APTAL:NAIS:VGRKPKV:LKKYR:MIVVR:XKXS, ASASPXX:APTDL:NAIS:IGKTPKI:LKKYR:MIVVR:XKXS, ASASPXX:APTDL:NAIS:VGRTPKV:LKKYR:MVVVR:XKXS, NDEGLXS:APTEE:NAIS:RIKPHQGQH:LKKYR:FLVVR:KXEXR, NDEGLXS:APTGQ:NAIS:RIKPHQGQH:LKKYR:LEVVR:QXEXR, SSVKXQP:APTHH:NAIS:EYVRKKPKL:LKKYR:RLVVR:LEXAXA, RNVQXRP:APTQL:NAIS:EIVRKKPIF:LKKYR:TLVVR:LAXKXE, KIPKAXX:VPTEL:NAIS:DENEKVV:LKKYR:DMVVE:GXGXR, GIPEPXX:VPEKM:NAIS:DENKNVV:LKKYR:NMTVE:SXAXR, SIPKAXX:VPTEL:NAIS:DEYDKVV:LKKYR:EMVVE:GXGXR, AVPKAXX:APTKL:NAIS:DSSNNVI:LKKYR:NMVVK:AXGXH, KVGKAXX:VPTKL:NAIS:DDMGVPT:LKKYR:EGMSVAE:XGXR, KASKAXX:VPTKL:NAIS:DKGVVTY:LKKYR:GMAVS:EXGXR, GSAGPXX:TPTKM:NAIS:NDKQQII:LKKYR:GMVVD:RXGXS, AAPASXX:VPARL:NAIS:DAANNVV:LKKYR:DMVVE:AXGXR, STPPTXX:VPTRL:NAIS:DSANNVV:LKKYR:DMVVE:SXGXR, RVPSTXX:APVKT:NAIS:DNGRVLL:LKKYR:MIVEE:XGXL, ASAAPXX:VPQAL:NAIS:VGRKPKV:LKKYR:MIVRS:XKXS, ASASPXX:VSQDL:NAIS:IGKTPKI:LKKYR:MIVKS:XKXS, ASASPXX:VPQDL:NAIS:VGRTPKV:LKKYR:MVVKS:XKXS, NDEGLXS:VPTEE:NAIS:RIKPHQGQH:LKKYR:FLQHN:KXEXR, NDEGLXS:VPTGQ:NAIS:RIKPHQGQH:LKKYR:LEEHS:QXEXR, SSVKXQP:SRVHH:NAIS:EYVRKKPKL:LKKYR:RLEEH:LEXAXA, RNVQXRP:TQVQL:NAIS:EIVRKKPIF:LKKYR:TLEDH:LAXKXE, HVTKPTX:APTKL:NAIS:DDSSNVI:LKKYR:NMVVR:SXGXH, KIPKAXX:APTEL:SATS:DENEKVV:LRKHR:DMVVK:GXGXR, GIPEPXX:APTKM:SATS:DENKNVV:LRKHR:NMVVK:SXAXR, SIPKAXX:APTEL:SATS:DEYDKVV:LRKHR:EMVVK:GXGXR, HVTKPTX:APTKL:SATS:DDSSNVI:LRKHR:NMVVK:SXGXH, YVPKPXX:APTKL:SATS:DDSSNVI:LRKHR:NMVVK:SXGXH, TVPKPXX:APTQL:SATS:DDSSNVI:LRKHR:NMVVK:AXGXH, KVGKAXX:APTKL:SATS:DDMGVPT:LRKHR:EGMSVVK:XGXR, KASKAXX:APTKL:SATS:DKGVVTY:LRKHR:GMVVK:EXGXR, GSAGPXX:APTKM:SATS:NDKQQII:LRKHR:GMVVK:RXGXS, AAPASXX:APTRL:SATS:DAANNVV:LRKHR:DMVVK:AXGXR, STPPTXX:APTRL:SATS:DSANNVV:LRKHR:DMVVK:SXGXR, HVPKPXX:APTKL:SATS:DDSSNVI:LRKHR:NMVVK:SXGXH, RVPSTXX:APTKT:SATS:DN GRVLL:LRKHR:MIVVK:XGXL, ASAAPXX:APTAL:SATS:VGRKPKV:LRKHR:MIVVK:XKXS, ASASPXX:APTDL:SATS:IGKTPKI:LRKHR:MIVVK:XKXS, ASASPXX:APTDL:SATS:VGRTPKV:LRKHR:MVVVK:XKXS, NDEGLXS:APTEE:SATS:RIKPHQGQH:LRKHR:FLVVK:KXEXR, NDEGLXS:APTGQ:SATS:RIKPHQGQH:LRKHR:LEVVK:QXEXR, SSVKXQP:APTHH:SATS:EYVRKKPKL:LRKHR:RLVVK:LEXAXA, RNVQXRP:APTQL:SATS:EIVRKKPIF:LRKHR:TLWK:LAXKXE, KIPKAXX:VPTEL:SATS:DENEKVV:LRKHR:DMVVE:GXGXR, GIPEPXX:VPEKM:SATS:DENKNVV:LRKHR:NMTVE:SXAXR, SIPKAXX:VPTEL:SATS:DEYDKVV:LRKHR:EMVVE:GXGXR, HVTKPTX:APTKL:SATS:DDSSNVI:LRKHR:NMVVR:SXGXH, YVPKPXX:APTKL:SATS:DDSSNVI:LRKHR:NMVVR:SXGXH, TVPKPXX:APTQL:SATS:DDSSNVI:LRKHR:NMVVR:AXGXH, KVGKAXX:VPTKL:SATS:DDMGVPT:LRKHR:EGMSVAE:XGXR, KASKAXX:VPTKL:SATS:DKGVVTY:LRKHR:GMAVS:EXGXR, GSAGPXX:TPTKM:SATS:NDKQQII:LRKHR:GMVVD:RXGXS, AAPASXX:VPARL:SATS:DAANNVV:LRKHR:DMVVE:AXGXR, STPPTXX:VPTRL:SATS:DSANNVV:LRKHR:DMVVE:SXGXR, HVPKPXX:APTKL:SATS:DDSSNVI:LRKHR:NMVVR:SXGXH, RVPSTXX:APVKT:SATS:DNGRVLL:LRKHR:MIVEE:XGXL, ASAAPXX:VPQAL:SATS:VGRKPKV:LRKHR:MIVRS:XKXS, ASASPXX:VSQDL:SATS:IGKTPKI:LRKHR:MIVKS:XKXS, ASASPXX:VPQDL:SATS:VGRTPKV:LRKHR:MVVKS:XKXS, NDEGLXS:VPTEE:SATS:RIKPHQGQH:LRKHR:FLQHN:KXEXR, NDEGLXS:VPTGQ:SATS:RIKPHQGQH:LRKHR:LEEHS:QXEXR, SSVKXQP:SRVHH:SATS:EYVRKKPKL:LRKHR:RLEEH:LEXAXA, RNVQXRP:TQVQL:SATS:EIVRKKPIF:LRKHR:TLEDH:LAXKXE, KIPKAXX:VPTEL:SPIS:DENEKVV:LKYHY:DMVAE:GXGXR, GIPEPXX:VPTKM:SPIS:DENKNVV:LKYHY:NMVAE:SXAXR, SIPKAXX:VPTEL:SPIS:DEYDKVV:LKYHY:EMVAE:GXGXR, HVTKPTX:VPTKL:SPIS:DDSSNVI:LKYHY:NMVAE:SXGXH, YVPKPXX:VPTKL:SPIS:DDSSNVI:LKYHY:NMVAE:SXGXH, TVPKPXX:VPTQL:SPIS:DDSSNVI:LKYHY:NMVAE:AXGXH, AVPKAXX:VPTKL:SPIS:DSSNNVI:LKYHY:NMVAE:AXGXH, KASKAXX:VPTKL:SPIS:DKGVVTY:LKYHY:GMVAE:EXGXR, GSAGPXX:VPTKM:SPIS:NDKQQII:LKYHY:GMVAE:RXGXS, AAPASXX:VPTRL:SPIS:DAANNVV:LKYHY:DMVAE:AXGXR, STPPTXX:VPTRL:SPIS:DSANNVV:LKYHY:DMVAE:SXGXR, HVPKPXX:VPTKL:SPIS:DDSSNVI:LKYHY:NMVAE:SXGXH, RVPSTXX:VPTKT:SPIS:DNGRVLL:LKYHY:MIVAE:XGXL, ASAAPXX:VPTAL:SPIS:VGRKPKV:LKYHY:MIVAE:XKXS, ASASPXX:VPTDL:SPIS:IGKTPKI:LKYHY:MIVAE:XKXS, ASASPXX:VPTDL:SPIS:VGRTPKV:LKYHY:MVVAE:XKXS, NDEGLXS:VPTEE:SPIS:RIKPHQGQH:LKYHY:FLVAE:KXEXR, NDEGLXS:VPTGQ:SPIS:RIKPHQGQH:LKYHY:LEVAE:QXEXR, SSVKXQP:VPTHH:SPIS:EYVRKKPKL:LKYHY:RLVAE:LEXAXA, RNVQXRP:VPTQL:SPIS:EIVRKKPIF:LKYHY:TLVAE:LAXKXE, KIPKAXX:VPTEL:SPIS:DENEKVV:LKYHY:DMVVE:GXGXR, GIPEPXX:VPEKM:SPIS:DENKNVV:LKYHY:NMTVE:SXAXR, SIPKAXX:VPTEL:SPIS:DEYDKVV:LKYHY:EMVVE:GXGXR, HVTKPTX:APTKL:SPIS:DDSSNVI:LKYHY:NMVVR:SXGXH, YVPKPXX:APTKL:SPIS:DDSSNVI:LKYHY:NMVVR:SXGXH, TVPKPXX:APTQL:SPIS:DDSSNVI:LKYHY:NMVVR:AXGXH, AVPKAXX:APTKL:SPIS:DSSNNVI:LKYHY:NMVVK:AXGXH, KASKAXX:VPTKL:SPIS:DKGVVTY:LKYHY:GMAVS:EXGXR, GSAGPXX:TPTKM:SPIS:NDKQQII:LKYHY:GMVVD:RXGXS, AAPASXX:VPARL:SPIS:DAANNVV:LKYHY:DMVVE:AXGXR, STPPTXX:VPTRL:SPIS:DSANNVV:LKYHY:DMVVE:SXGXR, HVPKPXX:APTKL:SPIS:DDSSNVI:LKYHY:NMVVR:SXGXH, RVPSTXX:APVKT:SPIS:DNGRVLL:LKYHY:MIVEE:XGXL, ASAAPXX:VPQAL:SPIS:VGRKPKV:LKYHY:MIVRS:XKXS, ASASPXX:VSQDL:SPIS:IGKTPKI:LKYHY:MIVKS:XKXS, ASASPXX:VPQDL:SPIS:VGRTPKV:LKYHY:MVVKS:XKXS, NDEGLXS:VPTEE:SPIS:RIKPHQGQH:LKYHY:FLQHN:KXEXR, NDEGLXS:VPTGQ:SPIS:RIKPHQGQH:LKYHY:LEEHS:QXEXR, SSVKXQP:SRVHH:SPIS:EYVRKKPKL:LKYHY:RLEEH:LEXAXA, RNVQXRP:TQVQL:SPIS:EIVRKKPIF:LKYHY:TLEDH:LAXKXE, KIPKAXX:VPTEL:EPIS:DENEKVV:KFKYE:DMAVS:GXGXR, GIPEPXX:VPTKM:EPIS:DENKNVV:KFKYE:NMAVS:SXAXR, SIPKAXX:VPTEL:EPIS:DEYDKVV:KFKYE:EMAVS:GXGXR, HVTKPTX:VPTKL:EPIS:DDSSNVI:KFKYE:NMAVS:SXGXH, YVPKPXX:VPTKL:EPIS:DDSSNVI:KFKYE:NMAVS:SXGXH, TVPKPXX:VPTQL:EPIS:DDSSNVI:KFKYE:NMAVS:AXGXH, AVPKAXX:VPTKL:EPIS:DSSNNVI:KFKYE:NMAVS:AXGXH, KVGKAXX:VPTKL:EPIS:DDMGVPT:KFKYE:EGMSAVS:XGXR, GSAGPXX:VPTKM:EPIS:NDKQQII:KFKYE:GMAVS:RXGXS, AAPASXX:VPTRL:EPIS:DAANNVV:KFKYE:DMAVS:AXGXR, STPPTXX:VPTRL:EPIS:DSANNVV:KFKYE:DMAVS:SXGXR, HVPKPXX:VPTKL:EPIS:DDSSNVI:KFKYE:NMAVS:SXGXH, RVPSTXX:VPTKT:EPIS:DNGRVLL:KFKYE:MIAVS:XGXL, ASAAPXX:VPTAL:EPIS:VGRKPKV:KFKYE:MIAVS:XKXS, ASASPXX:VPTDL:EPIS:IGKTPKI:KFKYE:MIAVS:XKXS, ASASPXX:VPTDL:EPIS:VGRTPKV:KFKYE:MVAVS:XKXS, NDEGLXS:VPTEE:EPIS:RIKPHQGQH:KFKYE:FLAVS:KXEXR, NDEGLXS:VPTGQ:EPIS:RIKPHQGQH:KFKYE:LEAVS:QXEXR, SSVKXQP:VPTHH:EPIS:EYVRKKPKL:KFKYE:RLAVS:LEXAXA, RNVQXRP:VPTQL:EPIS:EIVRKKPIF:KFKYE:TLAVS:LAXKXE, KIPKAXX:VPTEL:EPIS:DENEKVV:KFKYE:DMVVE:GXGXR, GIPEPXX:VPEKM:EPIS:DENKNVV:KFKYE:NMTVE:SXAXR, SIPKAXX:VPTEL:EPIS:DEYDKVV:KFKYE:EMVVE:GXGXR, HVTKPTX:APTKL:EPIS:DDSSNVI:KFKYE:NMVVR:SXGXH, YVPKPXX:APTKL:EPIS:DDSSNVI:KFKYE:NMVVR:SXGXH, TVPKPXX:APTQL:EPIS:DDSSNVI:KFKYE:NMVVR:AXGXH, AVPKAXX:APTKL:EPIS:DSSNNVI:KFKYE:NMVVK:AXGXH, KVGKAXX:VPTKL:EPIS:DDMGVPT:KFKYE:EGMSVAE:XGXR, GSAGPXX:TPTKM:EPIS:NDKQQII:KFKYE:GMVVD:RXGXS, AAPASXX:VPARL:EPIS:DAANNVV:KFKYE:DMVVE:AXGXR, STPPTXX:VPTRL:EPIS:DSANNVV:KFKYE:DMVVE:SXGXR, HVPKPXX:APTKL:EPIS:DDSSNVI:KFKYE:NMVVR:SXGXH, RVPSTXX:APVKT:EPIS:DNGRVLL:KFKYE:MIVEE:XGXL, ASAAPXX:VPQAL:EPIS:VGRKPKV:KFKYE:MIVRS:XKXS, ASASPXX:VSQDL:EPIS:IGKTPKI:KFKYE:MIVKS:XKXS, ASASPXX:VPQDL:EPIS:VGRTPKV:KFKYE:MVVKS:XKXS, NDEGLXS:VPTEE:EPIS:RIKPHQGQH:KFKYE:FLQHN:KXEXR, NDEGLXS:VPTGQ:EPIS:RIKPHQGQH:KFKYE:LEEHS:QXEXR, SSVKXQP:SRVHH:EPIS:EYVRKKPKL:KFKYE:RLEEH:LEXAXA, RNVQXRP:TQVQL:EPIS:EIVRKKPIF:KFKYE:TLEDH:LAXKXE, KIPKAXX:TPTEL:SPIN:DENEKVV:YGKIP:DMVVD:GXGXR, GIPEPXX:TPTKM:SPIN:DENKNVV:YGKIP:NMVVD:SXAXR, SIPKAXX:TPTEL:SPIN:DEYDKVV:YGKIP:EMVVD:GXGXR, HVTKPTX:TPTKL:SPIN:DDSSNVI:YGKIP:NMVVD:SXGXH, YVPKPXX:TPTKL:SPIN:DDSSNVI:YGKIP:NMWD:SXGXH, TVPKPXX:TPTQL:SPIN:DDSSNVI:YGKIP:NMVVD:AXGXH, AVPKAXX:TPTKL:SPIN:DSSNNVI:YGKIP:NMWD:AXGXH, KVGKAXX:TPTKL:SPIN:DDMGVPT:YGKIP:EGMSVVD:XGXR, KASKAXX:TPTKL:SPIN:DKGVVTY:YGKIP:GMVVD:EXGXR, AAPASXX:TPTRL:SPIN:DAANNVV:YGKIP:DMVVD:AXGXR, STPPTXX:TPTRL:SPIN:DSANNVV:YGKIP:DMVVD:SXGXR, HVPKPXX:TPTKL:SPIN:DDSSNVI:YGKIP:NMVVD:SXGXH, RVPSTXX:TPTKT:SPIN:DNGRVLL:YGKIP:MIVVD:XGXL, ASAAPXX:TPTAL:SPIN:VGRKPKV:YGKIP:MIVVD:XKXS, ASASPXX:TPTDL:SPIN:IGKTPKI:YGKIP:MIVVD:XKXS, ASASPXX:TPTDL:SPIN:VGRTPKV:YGKIP:MVVVD:XKXS, NDEGLXS:TPTEE:SPIN:RIKPHQGQH:YGKIP:FLVVD:KXEXR, NDEGLXS:TPTGQ:SPIN:RIKPHQGQH:YGKIP:LEVVD:QXEXR, SSVKXQP:TPTHH:SPIN:EYVRKKPKL:YGKIP:RLVVD:LEXAXA, RNVQXRP:TPTQL:SPIN:EIVRKKPIF:YGKIP:TLVVD:LAXKXE, KIPKAXX:VPTEL:SPIN:DENEKVV:YGKIP:DMWE:GXGXR, GIPEPXX:VPEKM:SPIN:DENKNVV:YGKIP:NMTVE:SXAXR, SIPKAXX:VPTEL:SPIN:DEYDKVV:YGKIP:EMVVE:GXGXR, HVTKPTX:APTKL:SPIN:DDSSNVI:YGKIP:NMWR:SXGXH, YVPKPXX:APTKL:SPIN:DDSSNVI:YGKIP:NMVVR:SXGXH, TVPKPXX:APTQL:SPIN:DDSSNVI:YGKIP:NMVVR:AXGXH, AVPKAXX:APTKL:SPIN:DSSNNVI:YGKIP:NMVVK:AXGXH, KVGKAXX:VPTKL:SPIN:DDMGVPT:YGKIP:EGMSVAE:XGXR, KASKAXX:VPTKL:SPIN:DKGVVTY:YGKIP:GMAVS:EXGXR, AAPASXX:VPARL:SPIN:DAANNVV:YGKIP:DMVVE:AXGXR, STPPTXX:VPTRL:SPIN:DSANNVV:YGKIP:DMVVE:SXGXR, HVPKPXX:APTKL:SPIN:DDSSNVI:YGKIP:NMVVR:SXGXH, RVPSTXX:APVKT:SPIN:DNGRVLL:YGKIP:MIVEE:XGXL, ASAAPXX:VPQAL:SPIN:VGRKPKV:YGKIP:MIVRS:XKXS, ASASPXX:VSQDL:SPIN:IGKTPKI:YGKIP:MIVKS:XKXS, ASASPXX:VPQDL:SPIN:VGRTPKV:YGKIP:MVVKS:XKXS, NDEGLXS:VPTEE:SPIN:RIKPHQGQH:YGKIP:FLQHN:KXEXR, NDEGLXS:VPTGQ:SPIN:RIKPHQGQH:YGKIP:LEEHS:QXEXR, SSVKXQP:SRVHH:SPIN:EYVRKKPKL:YGKIP:RLEEH:LEXAXA, RNVQXRP:TQVQL:SPIN:EIVRKKPIF:YGKIP:TLEDH:LAXKXE, KIPKAXX:VPAEL:SPIS:DENEKVV:YKQYE:DMVVE:GXGXR, GIPEPXX:VPAKM:SPIS:DENKNVV:YKQYE:NMVVE:SXAXR, SIPKAXX:VPAEL:SPIS:DEYDKVV:YKQYE:EMVVE:GXGXR, HVTKPTX:VPAKL:SPIS:DDSSNVI:YKQYE:NMVVE:SXGXH, YVPKPXX:VPAKL:SPIS:DDSSNVI:YKQYE:NMVVE:SXGXH, TVPKPXX:VPAQL:SPIS:DDSSNVI:YKQYE:NMVVE:AXGXH, AVPKAXX:VPAKL:SPIS:DSSNNVI:YKQYE:NMVVE:AXGXH, KVGKAXX:VPAKL:SPIS:DDMGVPT:YKQYE:EGMSVVE:XGXR, KASKAXX:VPAKL:SPIS:DKGVVTY:YKQYE:GMVVE:EXGXR, GSAGPXX:VPAKM:SPIS:NDKQQII:YKQYE:GMVVE:RXGXS, STPPTXX:VPARL:SPIS:DSANNVV:YKQYE:DMVVE:SXGXR, HVPKPXX:VPAKL:SPIS:DDSSNVI:YKQYE:NMVVE:SXGXH, RVPSTXX:VPAKT:SPIS:DNGRVLL:YKQYE:MIVVE:XGXL, ASAAPXX:VPAAL:SPIS:VGRKPKV:YKQYE:MIVVE:XKXS, ASASPXX:VPADL:SPIS:IGKTPKI:YKQYE:MIVVE:XKXS, ASASPXX:VPADL:SPIS:VGRTPKV:YKQYE:MVVVE:XKXS, NDEGLXS:VPAEE:SPIS:RIKPHQGQH:YKQYE:FLVVE:KXEXR, NDEGLXS:VPAGQ:SPIS:RIKPHQGQH:YKQYE:LEVVE:QXEXR, SSVKXQP:VPAHH:SPIS:EYVRKKPKL:YKQYE:RLVVE:LEXAXA, RNVQXRP:VPAQL:SPIS:EIVRKKPIF:YKQYE:TLVVE:LAXKXE, KIPKAXX:VPTEL:SPIS:DENEKVV:YKQYE:DMVVE:GXGXR, GIPEPXX:VPEKM:SPIS:DENKNVV:YKQYE:NMTVE:SXAXR, SIPKAXX:VPTEL:SPIS:DEYDKVV:YKQYE:EMVVE:GXGXR, HVTKPTX:APTKL:SPIS:DDSSNVI:YKQYE:NMVVR:SXGXH, YVPKPXX:APTKL:SPIS:DDSSNVI:YKQYE:NMVVR:SXGXH, TVPKPXX:APTQL:SPIS:DDSSNVI:YKQYE:NMVVR:AXGXH, AVPKAXX:APTKL:SPIS:DSSNNVI:YKQYE:NMVVK:AXGXH, KVGKAXX:VPTKL:SPIS:DDMGVPT:YKQYE:EGMSVAE:XGXR, KASKAXX:VPTKL:SPIS:DKGVVTY:YKQYE:GMAVS:EXGXR, GSAGPXX:TPTKM:SPIS:NDKQQII:YKQYE:GMVVD:RXGXS, STPPTXX:VPTRL:SPIS:DSANNVV:YKQYE:DMVVE:SXGXR, HVPKPXX:APTKL:SPIS:DDSSNVI:YKQYE:NMVVR:SXGXH, RVPSTXX:APVKT:SPIS:DNGRVLL:YKQYE:MIVEE:XGXL, ASAAPXX:VPQAL:SPIS:VGRKPKV:YKQYE:MIVRS:XKXS, ASASPXX:VSQDL:SPIS:IGKTPKI:YKQYE:MIVKS:XKXS, ASASPXX:VPQDL:SPIS:VGRTPKV:YKQYE:MVVKS:XKXS, NDEGLXS:VPTEE:SPIS:RIKPHQGQH:YKQYE:FLQHN:KXEXR, NDEGLXS:VPTGQ:SPIS:RIKPHQGQH:YKQYE:LEEHS:QXEXR, SSVKXQP:SRVHH:SPIS:EYVRKKPKL:YKQYE:RLEEH:LEXAXA, RNVQXRP:TQVQL:SPIS:EIVRKKPIF:YKQYE:TLEDH:LAXKXE, GIPEPXX:VPTKM:SPIS:DENKNVV:YKQYE:NMVVE:SXAXR, HVTKPTX:VPTKL:SPIS:DDSSNVI:YKQYE:NMVVE:SXGXH, YVPKPXX:VPTKL:SPIS:DDSSNVI:YKQYE:NMVVE:SXGXH, TVPKPXX:VPTQL:SPIS:DDSSNVI:YKQYE:NMVVE:AXGXH, AVPKAXX:VPTKL:SPIS:DSSNNVI:YKQYE:NMVVE:AXGXH, KVGKAXX:VPTKL:SPIS:DDMGVPT:YKQYE:EGMSVVE:XGXR, KASKAXX:VPTKL:SPIS:DKGVVTY:YKQYE:GMVVE:EXGXR, GSAGPXX:VPTKM:SPIS:NDKQQII:YKQYE:GMVVE:RXGXS, AAPASXX:VPTRL:SPIS:DAANNVV:YKQYE:DMVVE:AXGXR, HVPKPXX:VPTKL:SPIS:DDSSNVI:YKQYE:NMVVE:SXGXH, RVPSTXX:VPTKT:SPIS:DNGRVLL:YKQYE:MIVVE:XGXL, ASAAPXX:VPTAL:SPIS:VGRKPKV:YKQYE:MIVVE:XKXS, ASASPXX:VPTDL:SPIS:IGKTPKI:YKQYE:MIVVE:XKXS, ASASPXX:VPTDL:SPIS:VGRTPKV:YKQYE:MVVVE:XKXS, NDEGLXS:VPTEE:SPIS:RIKPHQGQH:YKQYE:FLVVE:KXEXR, NDEGLXS:VPTGQ:SPIS:RIKPHQGQH:YKQYE:LEVVE:QXEXR, SSVKXQP:VPTHH:SPIS:EYVRKKPKL:YKQYE:RLVVE:LEXAXA, RNVQXRP:VPTQL:SPIS:EIVRKKPIF:YKQYE:TLVVE:LAXKXE, AAPASXX:VPARL:SPIS:DAANNVV:YKQYE:DMVVE:AXGXR, KIPKAXX:APVEL:KPLS:DENEKVV:DHHKD:DMVEE:GXGXR, GIPEPXX:APVKM:KPLS:DENKNVV:DHHKD:NMVEE:SXAXR, SIPKAXX:APVEL:KPLS:DEYDKVV:DHHKD:EMVEE:GXGXR, HVTKPTX:APVKL:KPLS:DDSSNVI:DHHKD:NMVEE:SXGXH, YVPKPXX:APVKL:KPLS:DDSSNVI:DHHKD:NMVEE:SXGXH, TVPKPXX:APVQL:KPLS:DDSSNVI:DHHKD:NMVEE:AXGXH, AVPKAXX:APVKL:KPLS:DSSNNVI:DHHKD:NMVEE:AXGXH, KVGKAXX:APVKL:KPLS:DDMGVPT:DHHKD:EGMSVEE:XGXR, KASKAXX:APVKL:KPLS:DKGVVTY:DHHKD:GMVEE:EXGXR, GSAGPXX:APVKM:KPLS:NDKQQII:DHHKD:GMVEE:RXGXS, AAPASXX:APVRL:KPLS:DAANNVV:DHHKD:DMVEE:AXGXR, STPPTXX:APVRL:KPLS:DSANNVV:DHHKD:DMVEE:SXGXR, HVPKPXX:APVKL:KPLS:DDSSNVI:DHHKD:NMVEE:SXGXH, ASAAPXX:APVAL:KPLS:VGRKPKV:DHHKD:MIVEE:XKXS, ASASPXX:APVDL:KPLS:IGKTPKI:DHHKD:MIVEE:XKXS, ASASPXX:APVDL:KPLS:VGRTPKV:DHHKD:MVVEE:XKXS, NDEGLXS:APVEE:KPLS:RIKPHQGQH:DHHKD:FLVEE:KXEXR, NDEGLXS:APVGQ:KPLS:RIKPHQGQH:DHHKD:LEVEE:QXEXR, SSVKXQP:APVHH:KPLS:EYVRKKPKL:DHHKD:RLVEE:LEXAXA, RNVQXRP:APVQL:KPLS:EIVRKKPIF:DHHKD:TLVEE:LAXKXE, KIPKAXX:VPTEL:KPLS:DENEKVV:DHHKD:DMVVE:GXGXR, GIPEPXX:VPEKM:KPLS:DENKNVV:DHHKD:NMTVE:SXAXR, SIPKAXX:VPTEL:KPLS:DEYDKVV:DHHKD:EMVVE:GXGXR, HVTKPTX:APTKL:KPLS:DDSSNVI:DHHKD:NMVVR:SXGXH, YVPKPXX:APTKL:KPLS:DDSSNVI:DHHKD:NMVVR:SXGXH, TVPKPXX:APTQL:KPLS:DDSSNVI:DHHKD:NMVVR:AXGXH, AVPKAXX:APTKL:KPLS:DSSNNVI:DHHKD:NMVVK:AXGXH, KVGKAXX:VPTKL:KPLS:DDMGVPT:DHHKD:EGMSVAE:XGXR, KASKAXX:VPTKL:KPLS:DKGVVTY:DHHKD:GMAVS:EXGXR, GSAGPXX:TPTKM:KPLS:NDKQQII:DHHKD:GMVVD:RXGXS, AAPASXX:VPARL:KPLS:DAANNVV:DHHKD:DMVVE:AXGXR, STPPTXX:VPTRL:KPLS:DSANNVV:DHHKD:DMVVE:SXGXR, HVPKPXX:APTKL:KPLS:DDSSNVI:DHHKD:NMVVR:SXGXH, ASAAPXX:VPQAL:KPLS:VGRKPKV:DHHKD:MIVRS:XKXS, ASASPXX:VSQDL:KPLS:IGKTPKI:DHHKD:MIVKS:XKXS, ASASPXX:VPQDL:KPLS:VGRTPKV:DHHKD:MVVKS:XKXS, NDEGLXS:VPTEE:KPLS:RIKPHQGQH:DHHKD:FLQHN:KXEXR, NDEGLXS:VPTGQ:KPLS:RIKPHQGQH:DHHKD:LEEHS:QXEXR, SSVKXQP:SRVHH:KPLS:EYVRKKPKL:DHHKD:RLEEH:LEXAXA, RNVQXRP:TQVQL:KPLS:EIVRKKPIF:DHHKD:TLEDH:LAXKXE, KIPKAXX:VPQEL:EPLP:DENEKVV:EQLSN:DMVRS:GXGXR, GIPEPXX:VPQKM:EPLP:DENKNVV:EQLSN:NMVRS:SXAXR, SIPKAXX:VPQEL:EPLP:DEYDKVV:EQLSN:EMVRS:GXGXR, HVTKPTX:VPQKL:EPLP:DDSSNVI:EQLSN:NMVRS:SXGXH, YVPKPXX:VPQKL:EPLP:DDSSNVI:EQLSN:NMVRS:SXGXH, TVPKPXX:VPQQL:EPLP:DDSSNVI:EQLSN:NMVRS:AXGXH, AVPKAXX:VPQKL:EPLP:DSSNNVI:EQLSN:NMVRS:AXGXH, KVGKAXX:VPQKL:EPLP:DDMGVPT:EQLSN:EGMSVRS:XGXR, KASKAXX:VPQKL:EPLP:DKGVVTY:EQLSN:GMVRS:EXGXR, GSAGPXX:VPQKM:EPLP:NDKQQII:EQLSN:GMVRS:RXGXS, AAPASXX:VPQRL:EPLP:DAANNVV:EQLSN:DMVRS:AXGXR, STPPTXX:VPQRL:EPLP:DSANNVV:EQLSN:DMVRS:SXGXR, HVPKPXX:VPQKL:EPLP:DDSSNVI:EQLSN:NMVRS:SXGXH, RVPSTXX:VPQKT:EPLP:DNGRVLL:EQLSN:MIVRS:XGXL, ASASPXX:VPQDL:EPLP:IGKTPKI:EQLSN:MIVRS:XKXS, ASASPXX:VPQDL:EPLP:VGRTPKV:EQLSN:MVVRS:XKXS, NDEGLXS:VPQEE:EPLP:RIKPHQGQH:EQLSN:FLVRS:KXEXR, NDEGLXS:VPQGQ:EPLP:RIKPHQGQH:EQLSN:LEVRS:QXEXR, SSVKXQP:VPQHH:EPLP:EYVRKKPKL:EQLSN:RLVRS:LEXAXA, RNVQXRP:VPQQL:EPLP:EIVRKKPIF:EQLSN:TLVRS:LAXKXE, KIPKAXX:VPTEL:EPLP:DENEKVV:EQLSN:DMVVE:GXGXR, GIPEPXX:VPEKM:EPLP:DENKNVV:EQLSN:NMTVE:SXAXR, SIPKAXX:VPTEL:EPLP:DEYDKVV:EQLSN:EMVVE:GXGXR, HVTKPTX:APTKL:EPLP:DDSSNVI:EQLSN:NMVVR:SXGXH, YVPKPXX:APTKL:EPLP:DDSSNVI:EQLSN:NMVVR:SXGXH, TVPKPXX:APTQL:EPLP:DDSSNVI:EQLSN:NMVVR:AXGXH, AVPKAXX:APTKL:EPLP:DSSNNVI:EQLSN:NMVVK:AXGXH, KVGKAXX:VPTKL:EPLP:DDMGVPT:EQLSN:EGMSVAE:XGXR, KASKAXX:VPTKL:EPLP:DKGVVTY:EQLSN:GMAVS:EXGXR, GSAGPXX:TPTKM:EPLP:NDKQQII:EQLSN:GMVVD:RXGXS, AAPASXX:VPARL:EPLP:DAANNVV:EQLSN:DMVVE:AXGXR, STPPTXX:VPTRL:EPLP:DSANNVV:EQLSN:DMVVE:SXGXR, HVPKPXX:APTKL:EPLP:DDSSNVI:EQLSN:NMVVR:SXGXH, RVPSTXX:APVKT:EPLP:DNGRVLL:EQLSN:MIVEE:XGXL, ASASPXX:VSQDL:EPLP:IGKTPKI:EQLSN:MIVKS:XKXS, ASASPXX:VPQDL:EPLP:VGRTPKV:EQLSN:MVVKS:XKXS, NDEGLXS:VPTEE:EPLP:RIKPHQGQH:EQLSN:FLQHN:KXEXR, NDEGLXS:VPTGQ:EPLP:RIKPHQGQH:EQLSN:LEEHS:QXEXR, SSVKXQP:SRVHH:EPLP:EYVRKKPKL:EQLSN:RLEEH:LEXAXA, RNVQXRP:TQVQL:EPLP:EIVRKKPIF:EQLSN:TLEDH:LAXKXE, KIPKAXX:VSQEL:EPLT:DENEKVV:EQLSN:DMVKS:GXGXR, GIPEPXX:VSQKM:EPLT:DENKNVV:EQLSN:NMVKS:SXAXR, SIPKAXX:VSQEL:EPLT:DEYDKVV:EQLSN:EMVKS:GXGXR, HVTKPTX:VSQKL:EPLT:DDSSNVI:EQLSN:NMVKS:SXGXH, YVPKPXX:VSQKL:EPLT:DDSSNVI:EQLSN:NMVKS:SXGXH, TVPKPXX:VSQQL:EPLT:DDSSNVI:EQLSN:NMVKS:AXGXH, AVPKAXX:VSQKL:EPLT:DSSNNVI:EQLSN:NMVKS:AXGXH, KVGKAXX:VSQKL:EPLT:DDMGVPT:EQLSN:EGMSVKS:XGXR, KASKAXX:VSQKL:EPLT:DKGVVTY:EQLSN:GMVKS:EXGXR, GSAGPXX:VSQKM:EPLT:NDKQQII:EQLSN:GMVKS:RXGXS, AAPASXX:VSQRL:EPLT:DAANNVV:EQLSN:DMVKS:AXGXR, STPPTXX:VSQRL:EPLT:DSANNVV:EQLSN:DMVKS:SXGXR, HVPKPXX:VSQKL:EPLT:DDSSNVI:EQLSN:NMVKS:SXGXH, RVPSTXX:VSQKT:EPLT:DNGRVLL:EQLSN:MIVKS:XGXL, ASAAPXX:VSQAL:EPLT:VGRKPKV:EQLSN:MIVKS:XKXS, ASASPXX:VSQDL:EPLT:VGRTPKV:EQLSN:MVVKS:XKXS, NDEGLXS:VSQEE:EPLT:RIKPHQGQH:EQLSN:FLVKS:KXEXR, NDEGLXS:VSQGQ:EPLT:RIKPHQGQH:EQLSN:LEVKS:QXEXR, SSVKXQP:VSQHH:EPLT:EYVRKKPKL:EQLSN:RLVKS:LEXAXA, RNVQXRP:VSQQL:EPLT:EIVRKKPIF:EQLSN:TLVKS:LAXKXE, KIPKAXX:VPTEL:EPLT:DENEKVV:EQLSN:DMVVE:GXGXR, GIPEPXX:VPEKM:EPLT:DENKNVV:EQLSN:NMTVE:SXAXR, SIPKAXX:VPTEL:EPLT:DEYDKVV:EQLSN:EMVVE:GXGXR, HVTKPTX:APTKL:EPLT:DDSSNVI:EQLSN:NMVVR:SXGXH, YVPKPXX:APTKL:EPLT:DDSSNVI:EQLSN:NMVVR:SXGXH, TVPKPXX:APTQL:EPLT:DDSSNVI:EQLSN:NMVVR:AXGXH, AVPKAXX:APTKL:EPLT:DSSNNVI:EQLSN:NMVVK:AXGXH, KVGKAXX:VPTKL:EPLT:DDMGVPT:EQLSN:EGMSVAE:XGXR, KASKAXX:VPTKL:EPLT:DKGVVTY:EQLSN:GMAVS:EXGXR, GSAGPXX:TPTKM:EPLT:NDKQQII:EQLSN:GMVVD:RXGXS, AAPASXX:VPARL:EPLT:DAANNVV:EQLSN:DMVVE:AXGXR, STPPTXX:VPTRL:EPLT:DSANNVV:EQLSN:DMVVE:SXGXR, HVPKPXX:APTKL:EPLT:DDSSNVI:EQLSN:NMVVR:SXGXH, RVPSTXX:APVKT:EPLT:DNGRVLL:EQLSN:MIVEE:XGXL, ASAAPXX:VPQAL:EPLT:VGRKPKV:EQLSN:MIVRS:XKXS, ASASPXX:VPQDL:EPLT:VGRTPKV:EQLSN:MVVKS:XKXS, NDEGLXS:VPTEE:EPLT:RIKPHQGQH:EQLSN:FLQHN:KXEXR, NDEGLXS:VPTGQ:EPLT:RIKPHQGQH:EQLSN:LEEHS:QXEXR, SSVKXQP:SRVHH:EPLT:EYVRKKPKL:EQLSN:RLEEH:LEXAXA, RNVQXRP:TQVQL:EPLT:EIVRKKPIF:EQLSN:TLEDH:LAXKXE, KIPKAXX:VPQEL:EPLT:DENEKVV:EQLSN:DMVKS:GXGXR, GIPEPXX:VPQKM:EPLT:DENKNVV:EQLSN:NMVKS:SXAXR, SIPKAXX:VPQEL:EPLT:DEYDKVV:EQLSN:EMVKS:GXGXR, HVTKPTX:VPQKL:EPLT:DDSSNVI:EQLSN:NMVKS:SXGXH, YVPKPXX:VPQKL:EPLT:DDSSNVI:EQLSN:NMVKS:SXGXH, TVPKPXX:VPQQL:EPLT:DDSSNVI:EQLSN:NMVKS:AXGXH, AVPKAXX:VPQKL:EPLT:DSSNNVI:EQLSN:NMVKS:AXGXH, KVGKAXX:VPQKL:EPLT:DDMGVPT:EQLSN:EGMSVKS:XGXR, KASKAXX:VPQKL:EPLT:DKGVVTY:EQLSN:GMVKS:EXGXR, GSAGPXX:VPQKM:EPLT:NDKQQII:EQLSN:GMVKS:RXGXS, AAPASXX:VPQRL:EPLT:DAANNVV:EQLSN:DMVKS:AXGXR, STPPTXX:VPQRL:EPLT:DSANNVV:EQLSN:DMVKS:SXGXR, HVPKPXX:VPQKL:EPLT:DDSSNVI:EQLSN:NMVKS:SXGXH, RVPSTXX:VPQKT:EPLT:DNGRVLL:EQLSN:MIVKS:XGXL, ASAAPXX:VPQAL:EPLT:VGRKPKV:EQLSN:MIVKS:XKXS, ASASPXX:VPQDL:EPLT:IGKTPKI:EQLSN:MIVKS:XKXS, NDEGLXS:VPQEE:EPLT:RIKPHQGQH:EQLSN:FLVKS:KXEXR, NDEGLXS:VPQGQ:EPLT:RIKPHQGQH:EQLSN:LEVKS:QXEXR, SSVKXQP:VPQHH:EPLT:EYVRKKPKL:EQLSN:RLVKS:LEXAXA, RNVQXRP:VPQQL:EPLT:EIVRKKPIF:EQLSN:TLVKS:LAXKXE, ASASPXX:VSQDL:EPLT:IGKTPKI:EQLSN:MIVKS:XKXS, KIPKAXX:VPTEL:SNIT:DENEKVV:IGEMS:DMQHN:GXGXR, GIPEPXX:VPTKM:SNIT:DENKNVV:IGEMS:NMQHN:SXAXR, SIPKAXX:VPTEL:SNIT:DEYDKVV:IGEMS:EMQHN:GXGXR, HVTKPTX:VPTKL:SNIT:DDSSNVI:IGEMS:NMQHN:SXGXH, YVPKPXX:VPTKL:SNIT:DDSSNVI:IGEMS:NMQHN:SXGXH, TVPKPXX:VPTQL:SNIT:DDSSNVI:IGEMS:NMQHN:AXGXH, AVPKAXX:VPTKL:SNIT:DSSNNVI:IGEMS:NMQHN:AXGXH, KVGKAXX:VPTKL:SNIT:DDMGVPT:IGEMS:EGMSQHN:XGXR, KASKAXX:VPTKL:SNIT:DKGVVTY:IGEMS:GMQHN:EXGXR, GSAGPXX:VPTKM:SNIT:NDKQQII:IGEMS:GMQHN:RXGXS, AAPASXX:VPTRL:SNIT:DAANNVV:IGEMS:DMQHN:AXGXR, STPPTXX:VPTRL:SNIT:DSANNVV:IGEMS:DMQHN:SXGXR, HVPKPXX:VPTKL:SNIT:DDSSNVI:IGEMS:NMQHN:SXGXH, RVPSTXX:VPTKT:SNIT:DNGRVLL:IGEMS:MIQHN:XGXL, ASAAPXX:VPTAL:SNIT:VGRKPKV:IGEMS:MIQHN:XKXS, ASASPXX:VPTDL:SNIT:IGKTPKI:IGEMS:MIQHN:XKXS, ASASPXX:VPTDL:SNIT:VGRTPKV:IGEMS:MVQHN:XKXS, NDEGLXS:VPTGQ:SNIT:RIKPHQGQH:IGEMS:LEQHN:QXEXR, NDEGLXS:VPTEE:SNIT:RIKPHQGQH:IGEMS:FLQHN:KXEXR, SSVKXQP:VPTHH:SNIT:EYVRKKPKL:IGEMS:RLQHN:LEXAXA, RNVQXRP:VPTQL:SNIT:EIVRKKPIF:IGEMS:TLQHN:LAXKXE, KIPKAXX:VPTEL:SNIT:DENEKVV:IGEMS:DMVVE:GXGXR, GIPEPXX:VPEKM:SNIT:DENKNVV:IGEMS:NMTVE:SXAXR, SIPKAXX:VPTEL:SNIT:DEYDKVV:IGEMS:EMVVE:GXGXR, HVTKPTX:APTKL:SNIT:DDSSNVI:IGEMS:NMVVR:SXGXH, YVPKPXX:APTKL:SNIT:DDSSNVI:IGEMS:NMVVR:SXGXH, TVPKPXX:APTQL:SNIT:DDSSNVI:IGEMS:NMVVR:AXGXH, AVPKAXX:APTKL:SNIT:DSSNNVI:IGEMS:NMVVK:AXGXH, KVGKAXX:VPTKL:SNIT:DDMGVPT:IGEMS:EGMSVAE:XGXR, KASKAXX:VPTKL:SNIT:DKGVVTY:IGEMS:GMAVS:EXGXR, GSAGPXX:TPTKM:SNIT:NDKQQII:IGEMS:GMVVD:RXGXS, AAPASXX:VPARL:SNIT:DAANNVV:IGEMS:DMVVE:AXGXR, STPPTXX:VPTRL:SNIT:DSANNVV:IGEMS:DMVVE:SXGXR, HVPKPXX:APTKL:SNIT:DDSSNVI:IGEMS:NMVVR:SXGXH, RVPSTXX:APVKT:SNIT:DNGRVLL:IGEMS:MIVEE:XGXL, ASAAPXX:VPQAL:SNIT:VGRKPKV:IGEMS:MIVRS:XKXS, ASASPXX:VSQDL:SNIT:IGKTPKI:IGEMS:MIVKS:XKXS, ASASPXX:VPQDL:SNIT:VGRTPKV:IGEMS:MWKS:XKXS, NDEGLXS:VPTGQ:SNIT:RIKPHQGQH:IGEMS:LEEHS:QXEXR, SSVKXQP:SRVHH:SNIT:EYVRKKPKL:IGEMS:RLEEH:LEXAXA, RNVQXRP:TQVQL:SNIT:EIVRKKPIF:IGEMS:TLEDH:LAXKXE, KIPKAXX:VPTEL:SNIT:DENEKVV:LGEMS:DMEHS:GXGXR, GIPEPXX:VPTKM:SNIT:DENKNVV:LGEMS:NMEHS:SXAXR, SIPKAXX:VPTEL:SNIT:DEYDKVV:LGEMS:EMEHS:GXGXR, HVTKPTX:VPTKL:SNIT:DDSSNVI:LGEMS:NMEHS:SXGXH, YVPKPXX:VPTKL:SNIT:DDSSNVI:LGEMS:NMEHS:SXGXH, TVPKPXX:VPTQL:SNIT:DDSSNVI:LGEMS:NMEHS:AXGXH, AVPKAXX:VPTKL:SNIT:DSSNNVI:LGEMS:NMEHS:AXGXH, KVGKAXX:VPTKL:SNIT:DDMGVPT:LGEMS:EGMSEHS:XGXR, KASKAXX:VPTKL:SNIT:DKGVVTY:LGEMS:GMEHS:EXGXR, GSAGPXX:VPTKM:SNIT:NDKQQII:LGEMS:GMEHS:RXGXS, AAPASXX:VPTRL:SNIT:DAANNVV:LGEMS:DMEHS:AXGXR, STPPTXX:VPTRL:SNIT:DSANNVV:LGEMS:DMEHS:SXGXR, HVPKPXX:VPTKL:SNIT:DDSSNVI:LGEMS:NMEHS:SXGXH, RVPSTXX:VPTKT:SNIT:DNGRVLL:LGEMS:MIEHS:XGXL, ASAAPXX:VPTAL:SNIT:VGRKPKV:LGEMS:MIEHS:XKXS, ASASPXX:VPTDL:SNIT:IGKTPKI:LGEMS:MIEHS:XKXS, ASASPXX:VPTDL:SNIT:VGRTPKV:LGEMS:MVEHS:XKXS, NDEGLXS:VPTEE:SNIT:RIKPHQGQH:LGEMS:FLEHS:KXEXR, SSVKXQP:VPTHH:SNIT:EYVRKKPKL:LGEMS:RLEHS:LEXAXA, RNVQXRP:VPTQL:SNIT:EIVRKKPIF:LGEMS:TLEHS:LAXKXE, KIPKAXX:VPTEL:SNIT:DENEKVV:LGEMS:DMVVE:GXGXR, GIPEPXX:VPEKM:SNIT:DENKNVV:LGEMS:NMTVE:SXAXR, SIPKAXX:VPTEL:SNIT:DEYDKVV:LGEMS:EMVVE:GXGXR, HVTKPTX:APTKL:SNIT:DDSSNVI:LGEMS:NMVVR:SXGXH, YVPKPXX:APTKL:SNIT:DDSSNVI:LGEMS:NMVVR:SXGXH, TVPKPXX:APTQL:SNIT:DDSSNVI:LGEMS:NMVVR:AXGXH, AVPKAXX:APTKL:SNIT:DSSNNVI:LGEMS:NMVVK:AXGXH, KVGKAXX:VPTKL:SNIT:DDMGVPT:LGEMS:EGMSVAE:XGXR, KASKAXX:VPTKL:SNIT:DKGVVTY:LGEMS:GMAVS:EXGXR, GSAGPXX:TPTKM:SNIT:NDKQQII:LGEMS:GMVVD:RXGXS, AAPASXX:VPARL:SNIT:DAANNVV:LGEMS:DMVVE:AXGXR, STPPTXX:VPTRL:SNIT:DSANNVV:LGEMS:DMVVE:SXGXR, HVPKPXX:APTKL:SNIT:DDSSNVI:LGEMS:NMVVR:SXGXH, RVPSTXX:APVKT:SNIT:DNGRVLL:LGEMS:MIVEE:XGXL, ASAAPXX:VPQAL:SNIT:VGRKPKV:LGEMS:MIVRS:XKXS, ASASPXX:VSQDL:SNIT:IGKTPKI:LGEMS:MIVKS:XKXS, ASASPXX:VPQDL:SNIT:VGRTPKV:LGEMS:MVVKS:XKXS, NDEGLXS:VPTEE:SNIT:RIKPHQGQH:LGEMS:FLQHN:KXEXR, SSVKXQP:SRVHH:SNIT:EYVRKKPKL:LGEMS:RLEEH:LEXAXA, RNVQXRP:TQVQL:SNIT:EIVRKKPIF:LGEMS:TLEDH:LAXKXE, KIPKAXX:SRVEL:RSVK:DENEKVV:KEVQV:DMEEH:GXGXR, GIPEPXX:SRVKM:RSVK:DENKNVV:KEVQV:NMEEH:SXAXR, SIPKAXX:SRVEL:RSVK:DEYDKVV:KEVQV:EMEEH:GXGXR, HVTKPTX:SRVKL:RSVK:DDSSNVI:KEVQV:NMEEH:SXGXH, YVPKPXX:SRVKL:RSVK:DDSSNVI:KEVQV:NMEEH:SXGXH, TVPKPXX:SRVQL:RSVK:DDSSNVI:KEVQV:NMEEH:AXGXH, AVPKAXX:SRVKL:RSVK:DSSNNVI:KEVQV:NMEEH:AXGXH, KVGKAXX:SRVKL:RSVK:DDMGVPT:KEVQV:EGMSEEH:XGXR, KASKAXX:SRVKL:RSVK:DKGVVTY:KEVQV:GMEEH:EXGXR, GSAGPXX:SRVKM:RSVK:NDKQQII:KEVQV:GMEEH:RXGXS, AAPASXX:SRVRL:RSVK:DAANNVV:KEVQV:DMEEH:AXGXR, STPPTXX:SRVRL:RSVK:DSANNVV:KEVQV:DMEEH:SXGXR, HVPKPXX:SRVKL:RSVK:DDSSNVI:KEVQV:NMEEH:SXGXH, RVPSTXX:SRVKT:RSVK:DNGRVLL:KEVQV:MIEEH:XGXL, ASAAPXX:SRVAL:RSVK:VGRKPKV:KEVQV:MIEEH:XKXS, ASASPXX:SRVDL:RSVK:IGKTPKI:KEVQV:MIEEH:XKXS, ASASPXX:SRVDL:RSVK:VGRTPKV:KEVQV:MVEEH:XKXS, NDEGLXS:SRVEE:RSVK:RIKPHQGQH:KEVQV:FLEEH:KXEXR, NDEGLXS:SRVGQ:RSVK:RIKPHQGQH:KEVQV:LEEEH:QXEXR, RNVQXRP:SRVQL:RSVK:EIVRKKPIF:KEVQV:TLEEH:LAXKXE, KIPKAXX:VPTEL:RSVK:DENEKVV:KEVQV:DMVVE:GXGXR, GIPEPXX:VPEKM:RSVK:DENKNVV:KEVQV:NMTVE:SXAXR, SIPKAXX:VPTEL:RSVK:DEYDKVV:KEVQV:EMVVE:GXGXR, HVTKPTX:APTKL:RSVK:DDSSNVI:KEVQV:NMVVR:SXGXH, YVPKPXX:APTKL:RSVK:DDSSNVI:KEVQV:NMVVR:SXGXH, TVPKPXX:APTQL:RSVK:DDSSNVI:KEVQV:NMVVR:AXGXH, AVPKAXX:APTKL:RSVK:DSSNNVI:KEVQV:NMVVK:AXGXH, KVGKAXX:VPTKL:RSVK:DDMGVPT:KEVQV:EGMSVAE:XGXR, KASKAXX:VPTKL:RSVK:DKGVVTY:KEVQV:GMAVS:EXGXR, GSAGPXX:TPTKM:RSVK:NDKQQII:KEVQV:GMVVD:RXGXS, AAPASXX:VPARL:RSVK:DAANNVV:KEVQV:DMVVE:AXGXR, STPPTXX:VPTRL:RSVK:DSANNVV:KEVQV:DMVVE:SXGXR, HVPKPXX:APTKL:RSVK:DDSSNVI:KEVQV:NMVVR:SXGXH, RVPSTXX:APVKT:RSVK:DNGRVLL:KEVQV:MIVEE:XGXL, ASAAPXX:VPQAL:RSVK:VGRKPKV:KEVQV:MIVRS:XKXS, ASASPXX:VSQDL:RSVK:IGKTPKI:KEVQV:MIVKS:XKXS, ASASPXX:VPQDL:RSVK:VGRTPKV:KEVQV:MVVKS:XKXS, NDEGLXS:VPTEE:RSVK:RIKPHQGQH:KEVQV:FLQHN:KXEXR, NDEGLXS:VPTGQ:RSVK:RIKPHQGQH:KEVQV:LEEHS:QXEXR, RNVQXRP:TQVQL:RSVK:EIVRKKPIF:KEVQV:TLEDH:LAXKXE, KIPKAXX:TQVEL:RPVQ:DENEKVV:KKATV:DMEDH:GXGXR, GIPEPXX:TQVKM:RPVQ:DENKNVV:KKATV:NMEDH:SXAXR, SIPKAXX:TQVEL:RPVQ:DEYDKVV:KKATV:EMEDH:GXGXR, HVTKPTX:TQVKL:RPVQ:DDSSNVI:KKATV:NMEDH:SXGXH, YVPKPXX:TQVKL:RPVQ:DDSSNVI:KKATV:NMEDH:SXGXH, TVPKPXX:TQVQL:RPVQ:DDSSNVI:KKATV:NMEDH:AXGXH, AVPKAXX:TQVKL:RPVQ:DSSNNVI:KKATV:NMEDH:AXGXH, KVGKAXX:TQVKL:RPVQ:DDMGVPT:KKATV:EGMSEDH:XGXR, KASKAXX:TQVKL:RPVQ:DKGVVTY:KKATV:GMEDH:EXGXR, GSAGPXX:TQVKM:RPVQ:NDKQQII:KKATV:GMEDH:RXGXS, AAPASXX:TQVRL:RPVQ:DAANNVV:KKATV:DMEDH:AXGXR, STPPTXX:TQVRL:RPVQ:DSANNVV:KKATV:DMEDH:SXGXR, HVPKPXX:TQVKL:RPVQ:DDSSNVI:KKATV:NMEDH:SXGXH, RVPSTXX:TQVKT:RPVQ:DNGRVLL:KKATV:MIEDH:XGXL, ASAAPXX:TQVAL:RPVQ:VGRKPKV:KKATV:MIEDH:XKXS, ASASPXX:TQVDL:RPVQ:IGKTPKI:KKATV:MIEDH:XKXS, ASASPXX:TQVDL:RPVQ:VGRTPKV:KKATV:MVEDH:XKXS, NDEGLXS:TQVEE:RPVQ:RIKPHQGQH:KKATV:FLEDH:KXEXR, NDEGLXS:TQVGQ:RPVQ:RIKPHQGQH:KKATV:LEEDH:QXEXR, SSVKXQP:TQVHH:RPVQ:EYVRKKPKL:KKATV:RLEDH:LEXAXA, KIPKAXX:VPTEL:RPVQ:DENEKVV:KKATV:DMVVE:GXGXR, GIPEPXX:VPEKM:RPVQ:DENKNVV:KKATV:NMTVE:SXAXR, SIPKAXX:VPTEL:RPVQ:DEYDKVV:KKATV:EMVVE:GXGXR, HVTKPTX:APTKL:RPVQ:DDSSNVI:KKATV:NMVVR:SXGXH, YVPKPXX:APTKL:RPVQ:DDSSNVI:KKATV:NMVVR:SXGXH, TVPKPXX:APTQL:RPVQ:DDSSNVI:KKATV:NMVVR:AXGXH, AVPKAXX:APTKL:RPVQ:DSSNNVI:KKATV:NMVVK:AXGXH, KVGKAXX:VPTKL:RPVQ:DDMGVPT:KKATV:EGMSVAE:XGXR, KASKAXX:VPTKL:RPVQ:DKGVVTY:KKATV:GMAVS:EXGXR, GSAGPXX:TPTKM:RPVQ:NDKQQII:KKATV:GMVVD:RXGXS, AAPASXX:VPARL:RPVQ:DAANNVV:KKATV:DMVVE:AXGXR, STPPTXX:VPTRL:RPVQ:DSANNVV:KKATV:DMVVE:SXGXR, HVPKPXX:APTKL:RPVQ:DDSSNVI:KKATV:NMVVR:SXGXH, RVPSTXX:APVKT:RPVQ:DNGRVLL:KKATV:MIVEE:XGXL, ASAAPXX:VPQAL:RPVQ:VGRKPKV:KKATV:MIVRS:XKXS, ASASPXX:VSQDL:RPVQ:IGKTPKI:KKATV:MIVKS:XKXS, ASASPXX:VPQDL:RPVQ:VGRTPKV:KKATV:MVVKS:XKXS, NDEGLXS:VPTEE:RPVQ:RIKPHQGQH:KKATV:FLQHN:KXEXR, NDEGLXS:VPTGQ:RPVQ:RIKPHQGQH:KKATV:LEEHS:QXEXR, SSVKXQP:SRVHH:RPVQ:EYVRKKPKL:KKATV:RLEEH:LEXAXA. More particularly, the heptuplet PEP7:PEP5:PEP1:LINKER:PEP2:PEP6:PEP8 is selected from the group consisting of GIPEPXX:VPTKM:SAIS:DENKNVV:LKNYQ:NMVVE:SXAXR, HVTKPTX:VPTKL:SAIS:DDSSNVI:LKNYQ:NMVVE:SXGXH, YVPKPXX:VPTKL:SAIS:DDSSNVI:LKNYQ:NMVVE:SXGXH, TVPKPXX:VPTQL:SAIS:DDSSNVI:LKNYQ:NMVVE:AXGXH, AVPKAXX:VPTKL:SAIS:DSSNNVI:LKNYQ:NMVVE:AXGXH, KVGKAXX:VPTKL:SAIS:DDMGVPT:LKNYQ:EGMSVVE:XGXR, KASKAXX:VPTKL:SAIS:DKGVVTY:LKNYQ:GMVVE:EXGXR, GSAGPXX:VPTKM:SAIS:NDKQQII:LKNYQ:GMVVE:RXGXS, AAPASXX:VPTRL:SAIS:DAANNVV:LKNYQ:DMVVE:AXGXR, STPPTXX:VPTRL:SAIS:DSANNVV:LKNYQ:DMVVE:SXGXR, HVPKPXX:VPTKL:SAIS:DDSSNVI:LKNYQ:NMVVE:SXGXH, RVPSTXX:VPTKT:SAIS:DNGRVLL:LKNYQ:MIVVE:XGXL, ASAAPXX:VPTAL:SAIS:VGRKPKV:LKNYQ:MIVVE:XKXS, ASASPXX:VPTDL:SAIS:IGKTPKI:LKNYQ:MIVVE:XKXS, ASASPXX:VPTDL:SAIS:VGRTPKV:LKNYQ:MVVVE:XKXS, GIPEPXX:VPEKM:SAIS:DENKNVV:LKNYQ:NMTVE:SXAXR, HVTKPTX:APTKL:SAIS:DDSSNVI:LKNYQ:NMVVR:SXGXH, YVPKPXX:APTKL:SAIS:DDSSNVI:LKNYQ:NMVVR:SXGXH, TVPKPXX:APTQL:SAIS:DDSSNVI:LKNYQ:NMVVR:AXGXH, AVPKAXX:APTKL:SAIS:DSSNNVI:LKNYQ:NMVVK:AXGXH, KVGKAXX:VPTKL:SAIS:DDMGVPT:LKNYQ:EGMSVAE:XGXR, KASKAXX:VPTKL:SAIS:DKGVVTY:LKNYQ:GMAVS:EXGXR, GSAGPXX:TPTKM:SAIS:NDKQQII:LKNYQ:GMVVD:RXGXS, AAPASXX:VPARL:SAIS:DAANNVV:LKNYQ:DMVVE:AXGXR, HVPKPXX:APTKL:SAIS:DDSSNVI:LKNYQ:NMVVR:SXGXH, RVPSTXX:APVKT:SAIS:DNGRVLL:LKNYQ:MIVEE:XGXL, ASAAPXX:VPQAL:SAIS:VGRKPKV:LKNYQ:MIVRS:XKXS, ASASPXX:VSQDL:SAIS:IGKTPKI:LKNYQ:MIVKS:XKXS, ASASPXX:VPQDL:SAIS:VGRTPKV:LKNYQ:MVVKS:XKXS, NDEGLEX:VPTEE:SAIS:RIKPHQGQH:LKNYQ:FLQHN:KXEXR, NDEGLEX:VPTGQ:SAIS:RIKPHQGQH:LKNYQ:LEEHS:QXEXR, SSVKXQP:SRVHH:SAIS:EYVRKKPKL:LKNYQ:RLEEH:LEXAXA, RNVQXRP:TQVQL:SAIS:EIVRKKPIF:LKNYQ:TLEDH:LAXKXE, KIPKAXX:VPEEL:SSLS:DENEKVV:LKVYP:DMTVE:GXGXR, SIPKAXX:VPEEL:SSLS:DEYDKVV:LKVYP:EMTVE:GXGXR, HVTKPTX:VPEKL:SSLS:DDSSNVI:LKVYP:NMTVE:SXGXH, YVPKPXX:VPEKL:SSLS:DDSSNVI:LKVYP:NMTVE:SXGXH, TVPKPXX:VPEQL:SSLS:DDSSNVI:LKVYP:NMTVE:AXGXH, AVPKAXX:VPEKL:SSLS:DSSNNVI:LKVYP:NMTVE:AXGXH, KVGKAXX:VPEKL:SSLS:DDMGVPT:LKVYP:EGMSTVE:XGXR, KASKAXX:VPEKL:SSLS:DKGVVTY:LKVYP:GMTVE:EXGXR, GSAGPXX:VPEKM:SSLS:NDKQQII:LKVYP:GMTVE:RXGXS, AAPASXX:VPERL:SSLS:DAANNVV:LKVYP:DMTVE:AXGXR, STPPTXX:VPERL:SSLS:DSANNVV:LKVYP:DMTVE:SXGXR, HVPKPXX:VPEKL:SSLS:DDSSNVI:LKVYP:NMTVE:SXGXH, RVPSTXX:VPEKT:SSLS:DNGRVLL:LKVYP:MITVE:XGXL, ASAAPXX:VPEAL:SSLS:VGRKPKV:LKVYP:MITVE:XKXS, ASASPXX:VPED L:SSLS:IGKTPKI:LKVYP:MITVE:XKXS, ASASPXX:VPEDL:SSLS:VGRTPKV:LKVYP:MVTVE:XKXS, KIPKAXX:VPTEL:SSLS:DENEKVV:LKVYP:DMVVE:GXGXR, SIPKAXX:VPTEL:SSLS:DEYDKVV:LKVYP:EMVVE:GXGXR, HVTKPTX:APTKL:SSLS:DDSSNVI:LKVYP:NMVVR:SXGXH, YVPKPXX:APTKL:SSLS:DDSSNVI:LKVYP:NMVVR:SXGXH, TVPKPXX:APTQL:SSLS:DDSSNVI:LKVYP:NMVVR:AXGXH, AVPKAXX:APTKL:SSLS:DSSNNVI:LKVYP:NMVVK:AXGXH, KVGKAXX:VPTKL:SSLS:DDMGVPT:LKVYP:EGMSVAE:XGXR, KASKAXX:VPTKL:SSLS:DKGVVTY:LKVYP:GMAVS:EXGXR, GSAGPXX:TPTKM:SSLS:NDKQQII:LKVYP:GMVVD:RXGXS, AAPASXX:VPARL:SSLS:DAANNVV:LKVYP:DMWE:AXGXR, STPPTXX:VPTRL:SSLS:DSANNVV:LKVYP:DMVVE:SXGXR, HVPKPXX:APTKL:SSLS:DDSSNVI:LKVYP:NMVVR:SXGXH, RVPSTXX:APVKT:SSLS:DNGRVLL:LKVYP:MIVEE:XGXL, ASAAPXX:VPQAL:SSLS:VGRKPKV:LKVYP:MIVRS:XKXS, ASASPXX:VSQDL:SSLS:IGKTPKI:LKVYP:MIVKS:XKXS, ASASPXX:VPQDL:SSLS:VGRTPKV:LKVYP:MVVKS:XKXS, NDEGLEX:VPTEE:SSLS:RIKPHQGQH:LKVYP:FLQHN:KXEXR, NDEGLEX:VPTGQ:SSLS:RIKPHQGQH:LKVYP:LEEHS:QXEXR, SSVKXQP:SRVHH:SSLS:EYVRKKPKL:LKVYP:RLEEH:LEXAXA, RNVQXRP:TQVQL:SSLS:EIVRKKPIF:LKVYP:TLEDH:LAXKXE, KIPKAXX:APTEL:NAIS:DENEKVV:LKKYR:DMVVR:GXGXR, GIPEPXX:APTKM:NAIS:DENKNVV:LKKYR:NMVVR:SXAXR, SIPKAXX:APTEL:NAIS:DEYDKVV:LKKYR:EMVVR:GXGXR, AVPKAXX:APTKL:NAIS:DSSNNVI:LKKYR:NMVVR:AXGXH, KVGKAXX:APTKL:NAIS:DDMGVPT:LKKYR:EGMSVVR:XGXR, KASKAXX:APTKL:NAIS:DKGVVTY:LKKYR:GMVVR:EXGXR, GSAGPXX:APTKM:NAIS:NDKQQII:LKKYR:GMVVR:RXGXS, AAPASXX:APTRL:NAIS:DAANNVV:LKKYR:DMVVR:AXGXR, STPPTXX:APTRL:NAIS:DSANNVV:LKKYR:DMVVR:SXGXR, RVPSTXX:APTKT:NAIS:DNGRVLL:LKKYR:MIVVR:XGXL, ASAAPXX:APTAL:NAIS:VGRKPKV:LKKYR:MIVVR:XKXS, ASASPXX:APTDL:NAIS:IGKTPKI:LKKYR:MIVVR:XKXS, ASASPXX:APTDL:NAIS:VGRTPKV:LKKYR:MVVVR:XKXS, KIPKAXX:VPTEL:NAIS:DENEKVV:LKKYR:DMVVE:GXGXR, GIPEPXX:VPEKM:NAIS:DENKNVV:LKKYR:NMTVE:SXAXR, SIPKAXX:VPTEL:NAIS:DEYDKVV:LKKYR:EMVVE:GXGXR, AVPKAXX:APTKL:NAIS:DSSNNVI:LKKYR:NMVVK:AXGXH, KVGKAXX:VPTKL:NAIS:DDMGVPT:LKKYR:EGMSVAE:XGXR, KASKAXX:VPTKL:NAIS:DKGVVTY:LKKYR:GMAVS:EXGXR, GSAGPXX:TPTKM:NAIS:NDKQQII:LKKYR:GMVVD:RXGXS, AAPASXX:VPARL:NAIS:DAANNVV:LKKYR:DMVVE:AXGXR, STPPTXX:VPTRL:NAIS:DSANNVV:LKKYR:DMVVE:SXGXR, RVPSTXX:APVKT:NAIS:DNGRVLL:LKKYR:MIVEE:XGXL, ASAAPXX:VPQAL:NAIS:VGRKPKV:LKKYR:MIVRS:XKXS, ASASPXX:VSQDL:NAIS:IGKTPKI:LKKYR:MIVKS:XKXS, ASASPXX:VPQDL:NAIS:VGRTPKV:LKKYR:MVVKS:XKXS, NDEGLEX:VPTEE:NAIS:RIKPHQGQH:LKKYR:FLQHN:KXEXR, NDEGLEX:VPTGQ:NAIS:RIKPHQGQH:LKKYR:LEEHS:QXEXR, SSVKXQP:SRVHH:NAIS:EYVRKKPKL:LKKYR:RLEEH:LEXAXA, RNVQXRP:TQVQL:NAIS:EIVRKKPIF:LKKYR:TLEDH:LAXKXE, KIPKAXX:APTEL:SATS:DENEKVV:LRKHR:DMVVK:GXGXR, GIPEPXX:APTKM:SATS:DENKNVV:LRKHR:NMVVK:SXAXR, SIPKAXX:APTEL:SATS:DEYDKVV:LRKHR:EMVVK:GXGXR, HVTKPTX:APTKL:SATS:DDSSNVI:LRKHR:NMVVK:SXGXH, YVPKPXX:APTKL:SATS:DDSSNVI:LRKHR:NMVVK:SXGXH, TVPKPXX:APTQL:SATS:DDSSNVI:LRKHR:NMVVK:AXGXH, KVGKAXX:APTKL:SATS:DDMGVPT:LRKHR:EGMSVVK:XGXR, KASKAXX:APTKL:SATS:DKGVVTY:LRKHR:GMVVK:EXGXR, GSAGPXX:APTKM:SATS:NDKQQII:LRKHR:GMVVK:RXGXS, AAPASXX:APTRL:SATS:DAANNVV:LRKHR:DMVVK:AXGXR, STPPTXX:APTRL:SATS:DSANNVV:LRKHR:DMVVK:SXGXR, HVPKPXX:APTKL:SATS:DDSSNVI:LRKHR:NMVVK:SXGXH, RVPSTXX:APTKT:SATS:DNGRVLL:LRKHR:MIVVK:XGXL, ASAAPXX:APTAL:SATS:VGRKPKV:LRKHR:MIVVK:XKXS, ASASPXX:APTDL:SATS:IGKTPKI:LRKHR:MIVVK:XKXS, ASASPXX:APTDL:SATS:VGRTPKV:LRKHR:MVVVK:XKXS, KIPKAXX:VPTEL:SATS:DENEKVV:LRKHR:DMVVE:GXGXR, GIPEPXX:VPEKM:SATS:DENKNVV:LRKHR:NMTVE:SXAXR, SIPKAXX:VPTEL:SATS:DEYDKVV:LRKHR:EMVVE:GXGXR, HVTKPTX:APTKL:SATS:DDSSNVI:LRKHR:NMVVR:SXGXH, YVPKPXX:APTKL:SATS:DDSSNVI:LRKHR:NMVVR:SXGXH, TVPKPXX:APTQL:SATS:DDSSNVI:LRKHR:NMVVR:AXGXH, KVGKAXX:VPTKL:SATS:DDMGVPT:LRKHR:EGMSVAE:XGXR, KASKAXX:VPTKL:SATS:DKGVVTY:LRKHR:GMAVS:EXGXR, GSAGPXX:TPTKM:SATS:NDKQQII:LRKHR:GMVVD:RXGXS, AAPASXX:VPARL:SATS:DAANNVV:LRKHR:DMVVE:AXGXR, STPPTXX:VPTRL:SATS:DSANNVV:LRKHR:DMVVE:SXGXR, HVPKPXX:APTKL:SATS:DDSSNVI:LRKHR:NMVVR:SXGXH, RVPSTXX:APVKT:SATS:DNGRVLL:LRKHR:MIVEE:XGXL, ASAAPXX:VPQAL:SATS:VGRKPKV:LRKHR:MIVRS:XKXS, ASASPXX:VSQDL:SATS:IGKTPKI:LRKHR:MIVKS:XKXS, ASASPXX:VPQDL:SATS:VGRTPKV:LRKHR:MVVKS:XKXS, NDEGLEX:VPTEE:SATS:RIKPHQGQH:LRKHR:FLQHN:KXEXR, NDEGLEX:VPTGQ:SATS:RIKPHQGQH:LRKHR:LEEHS:QXEXR, SSVKXQP:SRVHH:SATS:EYVRKKPKL:LRKHR:RLEEH:LEXAXA, RNVQXRP:TQVQL:SATS:EIVRKKPIF:LRKHR:TLEDH:LAXKXE, KIPKAXX:VPTEL:SPIS:DENEKVV:LKYHY:DMVAE:GXGXR, GIPEPXX:VPTKM:SPIS:DENKNVV:LKYHY:NMVAE:SXAXR, SIPKAXX:VPTEL:SPIS:DEYDKVV:LKYHY:EMVAE:GXGXR, HVTKPTX:VPTKL:SPIS:DDSSNVI:LKYHY:NMVAE:SXGXH, YVPKPXX:VPTKL:SPIS:DDSSNVI:LKYHY:NMVAE:SXGXH, TVPKPXX:VPTQL:SPIS:DDSSNVI:LKYHY:NMVAE:AXGXH, AVPKAXX:VPTKL:SPIS:DSSNNVI:LKYHY:NMVAE:AXGXH, KASKAXX:VPTKL:SPIS:DKGVVTY:LKYHY:GMVAE:EXGXR, GSAGPXX:VPTKM:SPIS:NDKQQII:LKYHY:GMVAE:RXGXS, AAPASXX:VPTRL:SPIS:DAANNVV:LKYHY:DMVAE:AXGXR, STPPTXX:VPTRL:SPIS:DSANNVV:LKYHY:DMVAE:SXGXR, HVPKPXX:VPTKL:SPIS:DDSSNVI:LKYHY:NMVAE:SXGXH, RVPSTXX:VPTKT:SPIS:DNGRVLL:LKYHY:MIVAE:XGXL, ASAAPXX:VPTAL:SPIS:VGRKPKV:LKYHY:MIVAE:XKXS, ASASPXX:VPTDL:SPIS:IGKTPKI:LKYHY:MIVAE:XKXS, ASASPXX:VPTDL:SPIS:VGRTPKV:LKYHY:MVVAE:XKXS, KIPKAXX:VPTEL:SPIS:DENEKVV:LKYHY:DMVVE:GXGXR, GIPEPXX:VPEKM:SPIS:DENKNVV:LKYHY:NMTVE:SXAXR, SIPKAXX:VPTEL:SPIS:DEYDKVV:LKYHY:EMVVE:GXGXR, HVTKPTX:APTKL:SPIS:DDSSNVI:LKYHY:NMVVR:SXGXH, YVPKPXX:APTKL:SPIS:DDSSNVI:LKYHY:NMVVR:SXGXH, TVPKPXX:APTQL:SPIS:DDSSNVI:LKYHY:NMVVR:AXGXH, AVPKAXX:APTKL:SPIS:DSSNNVI:LKYHY:NMVVK:AXGXH, KASKAXX:VPTKL:SPIS:DKGVVTY:LKYHY:GMAVS:EXGXR, GSAGPXX:TPTKM:SPIS:NDKQQII:LKYHY:GMVVD:RXGXS, AAPASXX:VPARL:SPIS:DAANNVV:LKYHY:DMVVE:AXGXR, STPPTXX:VPTRL:SPIS:DSANNVV:LKYHY:DMVVE:SXGXR, HVPKPXX:APTKL:SPIS:DDSSNVI:LKYHY:NMVVR:SXGXH, RVPSTXX:APVKT:SPIS:DNGRVLL:LKYHY:MIVEE:XGXL, ASAAPXX:VPQAL:SPIS:VGRKPKV:LKYHY:MIVRS:XKXS, ASASPXX:VSQDL:SPIS:IGKTPKI:LKYHY:MIVKS:XKXS, ASASPXX:VPQDL:SPIS:VGRTPKV:LKYHY:MVVKS:XKXS, NDEGLEX:VPTEE:SPIS:RIKPHQGQH:LKYHY:FLQHN:KXEXR, NDEGLEX:VPTGQ:SPIS:RIKPHQGQH:LKYHY:LEEHS:QXEXR, SSVKXQP:SRVHH:SPIS:EYVRKKPKL:LKYHY:RLEEH:LEXAXA, RNVQXRP:TQVQL:SPIS:EIVRKKPIF:LKYHY:TLEDH:LAXKXE, KIPKAXX:VPTEL:EPIS:DENEKVV:KFKYE:DMAVS:GXGXR, GIPEPXX:VPTKM:EPIS:DENKNVV:KFKYE:NMAVS:SXAXR, SIPKAXX:VPTEL:EPIS:DEYDKVV:KFKYE:EMAVS:GXGXR, HVTKPTX:VPTKL:EPIS:DDSSNVI:KFKYE:NMAVS:SXGXH, YVPKPXX:VPTKL:EPIS:DDSSNVI:KFKYE:NMAVS:SXGXH, TVPKPXX:VPTQL:EPIS:DDSSNVI:KFKYE:NMAVS:AXGXH, AVPKAXX:VPTKL:EPIS:DSSNNVI:KFKYE:NMAVS:AXGXH, KVGKAXX:VPTKL:EPIS:DDMGVPT:KFKYE:EGMSAVS:XGXR, GSAGPXX:VPTKM:EPIS:NDKQQII:KFKYE:GMAVS:RXGXS, AAPASXX:VPTRL:EPIS:DAANNVV:KFKYE:DMAVS:AXGXR, STPPTXX:VPTRL:EPIS:DSANNVV:KFKYE:DMAVS:SXGXR, HVPKPXX:VPTKL:EPIS:DDSSNVI:KFKYE:NMAVS:SXGXH, RVPSTXX:VPTKT:EPIS:DNGRVLL:KFKYE:MIAVS:XGXL, ASAAPXX:VPTAL:EPIS:VGRKPKV:KFKYE:MIAVS:XKXS, ASASPXX:VPTDL:EPIS:IGKTPKI:KFKYE:MIAVS:XKXS, ASASPXX:VPTDL:EPIS:VGRTPKV:KFKYE:MVAVS:XKXS, KIPKAXX:VPTEL:EPIS:DENEKVV:KFKYE:DMVVE:GXGXR, GIPEPXX:VPEKM:EPIS:DENKNVV:KFKYE:NMTVE:SXAXR, SIPKAXX:VPTEL:EPIS:DEYDKVV:KFKYE:EMVVE:GXGXR, HVTKPTX:APTKL:EPIS:DDSSNVI:KFKYE:NMVVR:SXGXH, YVPKPXX:APTKL:EPIS:DDSSNVI:KFKYE:NMVVR:SXGXH, TVPKPXX:APTQL:EPIS:DDSSNVI:KFKYE:NMVVR:AXGXH, AVPKAXX:APTKL:EPIS:DSSNNVI:KFKYE:NMVVK:AXGXH, KVGKAXX:VPTKL:EPIS:DDMGVPT:KFKYE:EGMSVAE:XGXR, GSAGPXX:TPTKM:EPIS:NDKQQII:KFKYE:GMVVD:RXGXS, AAPASXX:VPARL:EPIS:DAANNVV:KFKYE:DMVVE:AXGXR, STPPTXX:VPTRL:EPIS:DSANNVV:KFKYE:DMVVE:SXGXR, HVPKPXX:APTKL:EPIS:DDSSNVI:KFKYE:NMVVR:SXGXH, RVPSTXX:APVKT:EPIS:DNGRVLL:KFKYE:MIVEE:XGXL, ASAAPXX:VPQAL:EPIS:VGRKPKV:KFKYE:MIVRS:XKXS, ASASPXX:VSQDL:EPIS:IGKTPKI:KFKYE:MIVKS:XKXS, ASASPXX:VPQDL:EPIS:VGRTPKV:KFKYE:MVVKS:XKXS, NDEGLEX:VPTEE:EPIS:RIKPHQGQH:KFKYE:FLQHN:KXEXR, NDEGLEX:VPTGQ:EPIS:RIKPHQGQH:KFKYE:LEEHS:QXEXR, SSVKXQP:SRVHH:EPIS:EYVRKKPKL:KFKYE:RLEEH:LEXAXA, RNVQXRP:TQVQL:EPIS:EIVRKKPIF:KFKYE:TLEDH:LAXKXE, KIPKAXX:TPTEL:SPIN:DENEKVV:YGKIP:DMVVD:GXGXR, GIPEPXX:TPTKM:SPIN:DENKNVV:YGKIP:NMVVD:SXAXR, SIPKAXX:TPTEL:SPIN:DEYDKVV:YGKIP:EMVVD:GXGXR, HVTKPTX:TPTKL:SPIN:DDSSNVI:YGKIP:NMVVD:SXGXH, YVPKPXX:TPTKL:SPIN:DDSSNVI:YGKIP:NMWD:SXGXH, TVPKPXX:TPTQL:SPIN:DDSSNVI:YGKIP:NMVVD:AXGXH, AVPKAXX:TPTKL:SPIN:DSSNNVI:YGKIP:NMWD:AXGXH, KVGKAXX:TPTKL:SPIN:DDMGVPT:YGKIP:EGMSVVD:XGXR, KASKAXX:TPTKL:SPIN:DKGVVTY:YGKIP:GMVVD:EXGXR, AAPASXX:TPTRL:SPIN:DAANNVV:YGKIP:DMVVD:AXGXR, STPPTXX:TPTRL:SPIN:DSANNVV:YGKIP:DMVVD:SXGXR, HVPKPXX:TPTKL:SPIN:DDSSNVI:YGKIP:NMVVD:SXGXH, RVPSTXX:TPTKT:SPIN:DNGRVLL:YGKIP:MIVVD:XGXL, ASAAPXX:TPTAL:SPIN:VGRKPKV:YGKIP:MIVVD:XKXS, ASASPXX:TPTDL:SPIN:IGKTPKI:YGKIP:MIVVD:XKXS, ASASPXX:TPTDL:SPIN:VGRTPKV:YGKIP:MVVVD:XKXS, KIPKAXX:VPTEL:SPIN:DENEKVV:YGKIP:DMWE:GXGXR, GIPEPXX:VPEKM:SPIN:DENKNVV:YGKIP:NMTVE:SXAXR, SIPKAXX:VPTEL:SPIN:DEYDKVV:YGKIP:EMVVE:GXGXR, HVTKPTX:APTKL:SPIN:DDSSNVI:YGKIP:NMVVR:SXGXH, YVPKPXX:APTKL:SPIN:DDSSNVI:YGKIP:NMVVR:SXGXH, TVPKPXX:APTQL:SPIN:DDSSNVI:YGKIP:NMVVR:AXGXH, AVPKAXX:APTKL:SPIN:DSSNNVI:YGKIP:NMVVK:AXGXH, KVGKAXX:VPTKL:SPIN:DDMGVPT:YGKIP:EGMSVAE:XGXR, KASKAXX:VPTKL:SPIN:DKGVVTY:YGKIP:GMAVS:EXGXR, AAPASXX:VPARL:SPIN:DAANNVV:YGKIP:DMVVE:AXGXR, STPPTXX:VPTRL:SPIN:DSANNVV:YGKIP:DMVVE:SXGXR, HVPKPXX:APTKL:SPIN:DDSSNVI:YGKIP:NMVVR:SXGXH, RVPSTXX:APVKT:SPIN:DNGRVLL:YGKIP:MIVEE:XGXL, ASAAPXX:VPQAL:SPIN:VGRKPKV:YGKIP:MIVRS:XKXS, ASASPXX:VSQDL:SPIN:IGKTPKI:YGKIP:MIVKS:XKXS, ASASPXX:VPQDL:SPIN:VGRTPKV:YGKIP:MVVKS:XKXS, NDEGLEX:VPTEE:SPIN:RIKPHQGQH:YGKIP:FLQHN:KXEXR, NDEGLEX:VPTGQ:SPIN:RIKPHQGQH:YGKIP:LEEHS:QXEXR, SSVKXQP:SRVHH:SPIN:EYVRKKPKL:YGKIP:RLEEH:LEXAXA, RNVQXRP:TQVQL:SPIN:EIVRKKPIF:YGKIP:TLEDH:LAXKXE, KIPKAXX:VPAEL:SPIS:DENEKVV:YKQYE:DMVVE:GXGXR, GIPEPXX:VPAKM:SPIS:DENKNVV:YKQYE:NMVVE:SXAXR, SIPKAXX:VPAEL:SPIS:DEYDKVV:YKQYE:EMVVE:GXGXR, HVTKPTX:VPAKL:SPIS:DDSSNVI:YKQYE:NMVVE:SXGXH, YVPKPXX:VPAKL:SPIS:DDSSNVI:YKQYE:NMVVE:SXGXH, TVPKPXX:VPAQL:SPIS:DDSSNVI:YKQYE:NMVVE:AXGXH, AVPKAXX:VPAKL:SPIS:DSSNNVI:YKQYE:NMVVE:AXGXH, KVGKAXX:VPAKL:SPIS:DDMGVPT:YKQYE:EGMSVVE:XGXR, KASKAXX:VPAKL:SPIS:DKGVVTY:YKQYE:GMVVE:EXGXR, GSAGPXX:VPAKM:SPIS:NDKQQII:YKQYE:GMVVE:RXGXS, STPPTXX:VPARL:SPIS:DSANNVV:YKQYE:DMVVE:SXGXR, HVPKPXX:VPAKL:SPIS:DDSSNVI:YKQYE:NMVVE:SXGXH, RVPSTXX:VPAKT:SPIS:DNGRVLL:YKQYE:MIVVE:XGXL, ASAAPXX:VPAAL:SPIS:VGRKPKV:YKQYE:MIVVE:XKXS, ASASPXX:VPADL:SPIS:IGKTPKI:YKQYE:MIVVE:XKXS, ASASPXX:VPAD L:SPIS:VGRTPKV:YKQYE:MVVVE:XKXS, KIPKAXX:VPTEL:SPIS:DENEKVV:YKQYE:DMVVE:GXGXR, GIPEPXX:VPEKM:SPIS:DENKNVV:YKQYE:NMTVE:SXAXR, SIPKAXX:VPTEL:SPIS:DEYDKVV:YKQYE:EMVVE:GXGXR, HVTKPTX:APTKL:SPIS:DDSSNVI:YKQYE:NMVVR:SXGXH, YVPKPXX:APTKL:SPIS:DDSSNVI:YKQYE:NMVVR:SXGXH, TVPKPXX:APTQL:SPIS:DDSSNVI:YKQYE:NMVVR:AXGXH, AVPKAXX:APTKL:SPIS:DSSNNVI:YKQYE:NMVVK:AXGXH, KVGKAXX:VPTKL:SPIS:DDMGVPT:YKQYE:EGMSVAE:XGXR, KASKAXX:VPTKL:SPIS:DKGVVTY:YKQYE:GMAVS:EXGXR, GSAGPXX:TPTKM:SPIS:NDKQQII:YKQYE:GMVVD:RXGXS, STPPTXX:VPTRL:SPIS:DSANNVV:YKQYE:DMVVE:SXGXR, HVPKPXX:APTKL:SPIS:DDSSNVI:YKQYE:NMVVR:SXGXH, RVPSTXX:APVKT:SPIS:DNGRVLL:YKQYE:MIVEE:XGXL, ASAAPXX:VPQAL:SPIS:VGRKPKV:YKQYE:MIVRS:XKXS, ASASPXX:VSQDL:SPIS:IGKTPKI:YKQYE:MIVKS:XKXS, ASASPXX:VPQDL:SPIS:VGRTPKV:YKQYE:MVVKS:XKXS, NDEGLEX:VPTEE:SPIS:RIKPHQGQH:YKQYE:FLQHN:KXEXR, NDEGLEX:VPTGQ:SPIS:RIKPHQGQH:YKQYE:LEEHS:QXEXR, SSVKXQP:SRVHH:SPIS:EYVRKKPKL:YKQYE:RLEEH:LEXAXA, RNVQXRP:TQVQL:SPIS:EIVRKKPIF:YKQYE:TLEDH:LAXKXE, GIPEPXX:VPTKM:SPIS:DENKNVV:YKQYE:NMVVE:SXAXR, HVTKPTX:VPTKL:SPIS:DDSSNVI:YKQYE:NMVVE:SXGXH, YVPKPXX:VPTKL:SPIS:DDSSNVI:YKQYE:NMVVE:SXGXH, TVPKPXX:VPTQL:SPIS:DDSSNVI:YKQYE:NMVVE:AXGXH, AVPKAXX:VPTKL:SPIS:DSSNNVI:YKQYE:NMVVE:AXGXH, KVGKAXX:VPTKL:SPIS:DDMGVPT:YKQYE:EGMSVVE:XGXR, KASKAXX:VPTKL:SPIS:DKGVVTY:YKQYE:GMVVE:EXGXR, GSAGPXX:VPTKM:SPIS:NDKQQII:YKQYE:GMVVE:RXGXS, AAPASXX:VPTRL:SPIS:DAANNVV:YKQYE:DMVVE:AXGXR, HVPKPXX:VPTKL:SPIS:DDSSNVI:YKQYE:NMVVE:SXGXH, RVPSTXX:VPTKT:SPIS:DNGRVLL:YKQYE:MIVVE:XGXL, ASAAPXX:VPTAL:SPIS:VGRKPKV:YKQYE:MIVVE:XKXS, ASASPXX:VPTDL:SPIS:IGKTPKI:YKQYE:MIVVE:XKXS, ASASPXX:VPTDL:SPIS:VGRTPKV:YKQYE:MVVVE:XKXS, AAPASXX:VPARL:SPIS:DAANNVV:YKQYE:DMVVE:AXGXR, KIPKAXX:APVEL:KPLS:DENEKVV:DHHKD:DMVEE:GXGXR, GIPEPXX:APVKM:KPLS:DENKNVV:DHHKD:NMVEE:SXAXR, SIPKAXX:APVEL:KPLS:DEYDKVV:DHHKD:EMVEE:GXGXR, HVTKPTX:APVKL:KPLS:DDSSNVI:DHHKD:NMVEE:SXGXH, YVPKPXX:APVKL:KPLS:DDSSNVI:DHHKD:NMVEE:SXGXH, TVPKPXX:APVQL:KPLS:DDSSNVI:DHHKD:NMVEE:AXGXH, AVPKAXX:APVKL:KPLS:DSSNNVI:DHHKD:NMVEE:AXGXH, KVGKAXX:APVKL:KPLS:DDMGVPT:DHHKD:EGMSVEE:XGXR, KASKAXX:APVKL:KPLS:DKGVVTY:DHHKD:GMVEE:EXGXR, GSAGPXX:APVKM:KPLS:NDKQQII:DHHKD:GMVEE:RXGXS, AAPASXX:APVRL:KPLS:DAANNVV:DHHKD:DMVEE:AXGXR, STPPTXX:APVRL:KPLS:DSANNVV:DHHKD:DMVEE:SXGXR, HVPKPXX:APVKL:KPLS:DDSSNVI:DHHKD:NMVEE:SXGXH, ASAAPXX:APVAL:KPLS:VGRKPKV:DHHKD:MIVEE:XKXS, ASASPXX:APVDL:KPLS:IGKTPKI:DHHKD:MIVEE:XKXS, ASASPXX:APVDL:KPLS:VGRTPKV:DHHKD:MVVEE:XKXS, KIPKAXX:VPTEL:KPLS:DENEKVV:DHHKD:DMVVE:GXGXR, GIPEPXX:VPEKM:KPLS:DENKNVV:DHHKD:NMTVE:SXAXR, SIPKAXX:VPTEL:KPLS:DEYDKVV:DHHKD:EMVVE:GXGXR, HVTKPTX:APTKL:KPLS:DDSSNVI:DHHKD:NMVVR:SXGXH, YVPKPXX:APTKL:KPLS:DDSSNVI:DHHKD:NMVVR:SXGXH, TVPKPXX:APTQL:KPLS:DDSSNVI:DHHKD:NMVVR:AXGXH, AVPKAXX:APTKL:KPLS:DSSNNVI:DHHKD:NMVVK:AXGXH, KVGKAXX:VPTKL:KPLS:DDMGVPT:DHHKD:EGMSVAE:XGXR, KASKAXX:VPTKL:KPLS:DKGVVTY:DHHKD:GMAVS:EXGXR, GSAGPXX:TPTKM:KPLS:NDKQQII:DHHKD:GMVVD:RXGXS, AAPASXX:VPARL:KPLS:DAANNVV:DHHKD:DMVVE:AXGXR, STPPTXX:VPTRL:KPLS:DSANNVV:DHHKD:DMVVE:SXGXR, HVPKPXX:APTKL:KPLS:DDSSNVI:DHHKD:NMVVR:SXGXH, ASAAPXX:VPQAL:KPLS:VGRKPKV:DHHKD:MIVRS:XKXS, ASASPXX:VSQDL:KPLS:IGKTPKI:DHHKD:MIVKS:XKXS, ASASPXX:VPQDL:KPLS:VGRTPKV:DHHKD:MVVKS:XKXS, NDEGLEX:VPTEE:KPLS:RIKPHQGQH:DHHKD:FLQHN:KXEXR, NDEGLEX:VPTGQ:KPLS:RIKPHQGQH:DHHKD:LEEHS:QXEXR, SSVKXQP:SRVHH:KPLS:EYVRKKPKL:DHHKD:RLEEH:LEXAXA, RNVQXRP:TQVQL:KPLS:EIVRKKPIF:DHHKD:TLEDH:LAXKXE, KIPKAXX:VPQEL:EPLP:DENEKVV:EQLSN:DMVRS:GXGXR, GIPEPXX:VPQKM:EPLP:DENKNVV:EQLSN:NMVRS:SXAXR, SIPKAXX:VPQEL:EPLP:DEYDKVV:EQLSN:EMVRS:GXGXR, HVTKPTX:VPQKL:EPLP:DDSSNVI:EQLSN:NMVRS:SXGXH, YVPKPXX:VPQKL:EPLP:DDSSNVI:EQLSN:NMVRS:SXGXH, TVPKPXX:VPQQL:EPLP:DDSSNVI:EQLSN:NMVRS:AXGXH, AVPKAXX:VPQKL:EPLP:DSSNNVI:EQLSN:NMVRS:AXGXH, KVGKAXX:VPQKL:EPLP:DDMGVPT:EQLSN:EGMSVRS:XGXR, KASKAXX:VPQKL:EPLP:DKGVVTY:EQLSN:GMVRS:EXGXR, GSAGPXX:VPQKM:EPLP:NDKQQII:EQLSN:GMVRS:RXGXS, AAPASXX:VPQRL:EPLP:DAANNVV:EQLSN:DMVRS:AXGXR, STPPTXX:VPQRL:EPLP:DSANNVV:EQLSN:DMVRS:SXGXR, HVPKPXX:VPQKL:EPLP:DDSSNVI:EQLSN:NMVRS:SXGXH, RVPSTXX:VPQKT:EPLP:DNGRVLL:EQLSN:MIVRS:XGXL, ASASPXX:VPQDL:EPLP:IGKTPKI:EQLSN:MIVRS:XKXS, ASASPXX:VPQDL:EPLP:VGRTPKV:EQLSN:MVVRS:XKXS, KIPKAXX:VPTEL:EPLP:DENEKVV:EQLSN:DMVVE:GXGXR, GIPEPXX:VPEKM:EPLP:DENKNVV:EQLSN:NMTVE:SXAXR, SIPKAXX:VPTEL:EPLP:DEYDKVV:EQLSN:EMVVE:GXGXR, HVTKPTX:APTKL:EPLP:DDSSNVI:EQLSN:NMVVR:SXGXH, YVPKPXX:APTKL:EPLP:DDSSNVI:EQLSN:NMVVR:SXGXH, TVPKPXX:APTQL:EPLP:DDSSNVI:EQLSN:NMVVR:AXGXH, AVPKAXX:APTKL:EPLP:DSSNNVI:EQLSN:NMVVK:AXGXH, KVGKAXX:VPTKL:EPLP:DDMGVPT:EQLSN:EGMSVAE:XGXR, KASKAXX:VPTKL:EPLP:DKGVVTY:EQLSN:GMAVS:EXGXR, GSAGPXX:TPTKM:EPLP:NDKQQII:EQLSN:GMVVD:RXGXS, AAPASXX:VPARL:EPLP:DAANNVV:EQLSN:DMVVE:AXGXR, STPPTXX:VPTRL:EPLP:DSANNVV:EQLSN:DMVVE:SXGXR, HVPKPXX:APTKL:EPLP:DDSSNVI:EQLSN:NMVVR:SXGXH, RVPSTXX:APVKT:EPLP:DNGRVLL:EQLSN:MIVEE:XGXL, ASASPXX:VSQDL:EPLP:IGKTPKI:EQLSN:MIVKS:XKXS, ASASPXX:VPQDL:EPLP:VGRTPKV:EQLSN:MVVKS:XKXS, NDEGLEX:VPTEE:EPLP:RIKPHQGQH:EQLSN:FLQHN:KXEXR, NDEGLEX:VPTGQ:EPLP:RIKPHQGQH:EQLSN:LEEHS:QXEXR, SSVKXQP:SRVHH:EPLP:EYVRKKPKL:EQLSN:RLEEH:LEXAXA, RNVQXRP:TQVQL:EPLP:EIVRKKPIF:EQLSN:TLEDH:LAXKXE, KIPKAXX:VSQEL:EPLT:DENEKVV:EQLSN:DMVKS:GXGXR, GIPEPXX:VSQKM:EPLT:DENKNVV:EQLSN:NMVKS:SXAXR, SIPKAXX:VSQEL:EPLT:DEYDKVV:EQLSN:EMVKS:GXGXR, HVTKPTX:VSQKL:EPLT:DDSSNVI:EQLSN:NMVKS:SXGXH, YVPKPXX:VSQKL:EPLT:DDSSNVI:EQLSN:NMVKS:SXGXH, TVPKPXX:VSQQL:EPLT:DDSSNVI:EQLSN:NMVKS:AXGXH, AVPKAXX:VSQKL:EPLT:DSSNNVI:EQLSN:NMVKS:AXGXH, KVGKAXX:VSQKL:EPLT:DDMGVPT:EQLSN:EGMSVKS:XGXR, KASKAXX:VSQKL:EPLT:DKGVVTY:EQLSN:GMVKS:EXGXR, GSAGPXX:VSQKM:EPLT:NDKQQII:EQLSN:GMVKS:RXGXS, AAPASXX:VSQRL:EPLT:DAANNVV:EQLSN:DMVKS:AXGXR, STPPTXX:VSQRL:EPLT:DSANNVV:EQLSN:DMVKS:SXGXR, HVPKPXX:VSQKL:EPLT:DDSSNVI:EQLSN:NMVKS:SXGXH, RVPSTXX:VSQKT:EPLT:DNGRVLL:EQLSN:MIVKS:XGXL, ASAAPXX:VSQAL:EPLT:VGRKPKV:EQLSN:MIVKS:XKXS, ASASPXX:VSQDL:EPLT:VGRTPKV:EQLSN:MVVKS:XKXS, KIPKAXX:VPTEL:EPLT:DENEKVV:EQLSN:DMVVE:GXGXR, GIPEPXX:VPEKM:EPLT:DENKNVV:EQLSN:NMTVE:SXAXR, SIPKAXX:VPTEL:EPLT:DEYDKVV:EQLSN:EMVVE:GXGXR, HVTKPTX:APTKL:EPLT:DDSSNVI:EQLSN:NMVVR:SXGXH YVPKPXX:APTKL:EPLT:DDSSNVI:EQLSN:NMVVR:SXGXH, TVPKPXX:APTQL:EPLT:DDSSNVI:EQLSN:NMVVR:AXGXH, AVPKAXX:APTKL:EPLT:DSSNNVI:EQLSN:NMVVK:AXGXH, KVGKAXX:VPTKL:EPLT:DDMGVPT:EQLSN:EGMSVAE:XGXR, KASKAXX:VPTKL:EPLT:DKGVVTY:EQLSN:GMAVS:EXGXR, GSAGPXX:TPTKM:EPLT:NDKQQII:EQLSN:GMVVD:RXGXS, AAPASXX:VPARL:EPLT:DAANNVV:EQLSN:DMVVE:AXGXR, STPPTXX:VPTRL:EPLT:DSANNVV:EQLSN:DMVVE:SXGXR, HVPKPXX:APTKL:EPLT:DDSSNVI:EQLSN:NMVVR:SXGXH, RVPSTXX:APVKT:EPLT:DNGRVLL:EQLSN:MIVEE:XGXL, ASAAPXX:VPQAL:EPLT:VGRKPKV:EQLSN:MIVRS:XKXS, NDEGLEX:VPTEE:EPLT:RIKPHQGQH:EQLSN:FLQHN:KXEXR, NDEGLEX:VPTGQ:EPLT:RIKPHQGQH:EQLSN:LEEHS:QXEXR, SSVKXQP:SRVHH:EPLT:EYVRKKPKL:EQLSN:RLEEH:LEXAXA, RNVQXRP:TQVQL:EPLT:EIVRKKPIF:EQLSN:TLEDH:LAXKXE, KIPKAXX:VPQEL:EPLT:DENEKVV:EQLSN:DMVKS:GXGXR, GIPEPXX:VPQKM:EPLT:DENKNVV:EQLSN:NMVKS:SXAXR, SIPKAXX:VPQEL:EPLT:DEYDKVV:EQLSN:EMVKS:GXGXR, HVTKPTX:VPQKL:EPLT:DDSSNVI:EQLSN:NMVKS:SXGXH, YVPKPXX:VPQKL:EPLT:DDSSNVI:EQLSN:NMVKS:SXGXH, TVPKPXX:VPQQL:EPLT:DDSSNVI:EQLSN:NMVKS:AXGXH, AVPKAXX:VPQKL:EPLT:DSSNNVI:EQLSN:NMVKS:AXGXH, KVGKAXX:VPQKL:EPLT:DDMGVPT:EQLSN:EGMSVKS:XGXR, KASKAXX:VPQKL:EPLT:DKGVVTY:EQLSN:GMVKS:EXGXR, GSAGPXX:VPQKM:EPLT:NDKQQII:EQLSN:GMVKS:RXGXS, AAPASXX:VPQRL:EPLT:DAANNVV:EQLSN:DMVKS:AXGXR, STPPTXX:VPQRL:EPLT:DSANNVV:EQLSN:DMVKS:SXGXR, HVPKPXX:VPQKL:EPLT:DDSSNVI:EQLSN:NMVKS:SXGXH, RVPSTXX:VPQKT:EPLT:DNGRVLL:EQLSN:MIVKS:XGXL, ASAAPXX:VPQAL:EPLT:VGRKPKV:EQLSN:MIVKS:XKXS, ASASPXX:VPQDL:EPLT:IGKTPKI:EQLSN:MIVKS:XKXS, NDEGLEX:VPTGQ:SNIT:RIKPHQGQH:IGEMS:LEQHN:QXEXR, KIPKAXX:VPTEL:SNIT:DENEKVV:IGEMS:DMVVE:GXGXR, GIPEPXX:VPEKM:SNIT:DENKNVV:IGEMS:NMTVE:SXAXR, SIPKAXX:VPTEL:SNIT:DEYDKVV:IGEMS:EMVVE:GXGXR, HVTKPTX:APTKL:SNIT:DDSSNVI:IGEMS:NMVVR:SXGXH, YVPKPXX:APTKL:SNIT:DDSSNVI:IGEMS:NMVVR:SXGXH, TVPKPXX:APTQL:SNIT:DDSSNVI:IGEMS:NMVVR:AXGXH, AVPKAXX:APTKL:SNIT:DSSNNVI:IGEMS:NMVVK:AXGXH, KVGKAXX:VPTKL:SNIT:DDMGVPT:IGEMS:EGMSVAE:XGXR, KASKAXX:VPTKL:SNIT:DKGVVTY:IGEMS:GMAVS:EXGXR, GSAGPXX:TPTKM:SNIT:NDKQQII:IGEMS:GMVVD:RXGXS, AAPASXX:VPARL:SNIT:DAANNVV:IGEMS:DMVVE:AXGXR, STPPTXX:VPTRL:SNIT:DSANNVV:IGEMS:DMVVE:SXGXR, HVPKPXX:APTKL:SNIT:DDSSNVI:IGEMS:NMVVR:SXGXH, RVPSTXX:APVKT:SNIT:DNGRVLL:IGEMS:MIVEE:XGXL, ASAAPXX:VPQAL:SNIT:VGRKPKV:IGEMS:MIVRS:XKXS, ASASPXX:VSQDL:SNIT:IGKTPKI:IGEMS:MIVKS:XKXS, ASASPXX:VPQDL:SNIT:VGRTPKV:IGEMS:MWKS:XKXS, NDEGLEX:VPTGQ:SNIT:RIKPHQGQH:IGEMS:LEEHS:QXEXR, SSVKXQP:SRVHH:SNIT:EYVRKKPKL:IGEMS:RLEEH:LEXAXA, RNVQXRP:TQVQL:SNIT:EIVRKKPIF:IGEMS:TLEDH:LAXKXE, NDEGLEX:VPTEE:SNIT:RIKPHQGQH:LGEMS:FLEHS:KXEXR, KIPKAXX:VPTEL:SNIT:DENEKVV:LGEMS:DMVVE:GXGXR, GIPEPXX:VPEKM:SNIT:DENKNVV:LGEMS:NMTVE:SXAXR, SIPKAXX:VPTEL:SNIT:DEYDKVV:LGEMS:EMVVE:GXGXR, HVTKPTX:APTKL:SNIT:DDSSNVI:LGEMS:NMVVR:SXGXH, YVPKPXX:APTKL:SNIT:DDSSNVI:LGEMS:NMVVR:SXGXH, TVPKPXX:APTQL:SNIT:DDSSNVI:LGEMS:NMVVR:AXGXH, AVPKAXX:APTKL:SNIT:DSSNNVI:LGEMS:NMVVK:AXGXH, KVGKAXX:VPTKL:SNIT:DDMGVPT:LGEMS:EGMSVAE:XGXR, KASKAXX:VPTKL:SNIT:DKGVVTY:LGEMS:GMAVS:EXGXR, GSAGPXX:TPTKM:SNIT:NDKQQII:LGEMS:GMVVD:RXGXS, AAPASXX:VPARL:SNIT:DAANNVV:LGEMS:DMVVE:AXGXR, STPPTXX:VPTRL:SNIT:DSANNVV:LGEMS:DMVVE:SXGXR, HVPKPXX:APTKL:SNIT:DDSSNVI:LGEMS:NMVVR:SXGXH, RVPSTXX:APVKT:SNIT:DNGRVLL:LGEMS:MIVEE:XGXL, ASAAPXX:VPQAL:SNIT:VGRKPKV:LGEMS:MIVRS:XKXS, ASASPXX:VSQDL:SNIT:IGKTPKI:LGEMS:MIVKS:XKXS, ASASPXX:VPQDL:SNIT:VGRTPKV:LGEMS:MVVKS:XKXS, NDEGLEX:VPTEE:SNIT:RIKPHQGQH:LGEMS:FLQHN:KXEXR, SSVKXQP:SRVHH:SNIT:EYVRKKPKL:LGEMS:RLEEH:LEXAXA, RNVQXRP:TQVQL:SNIT:EIVRKKPIF:LGEMS:TLEDH:LAXKXE, RNVQXRP:SRVQL:RSVK:EIVRKKPIF:KEVQV:TLEEH:LAXKXE, KIPKAXX:VPTEL:RSVK:DENEKVV:KEVQV:DMVVE:GXGXR, GIPEPXX:VPEKM:RSVK:DENKNVV:KEVQV:NMTVE:SXAXR, SIPKAXX:VPTEL:RSVK:DEYDKVV:KEVQV:EMVVE:GXGXR, HVTKPTX:APTKL:RSVK:DDSSNVI:KEVQV:NMVVR:SXGXH, YVPKPXX:APTKL:RSVK:DDSSNVI:KEVQV:NMVVR:SXGXH, TVPKPXX:APTQL:RSVK:DDSSNVI:KEVQV:NMVVR:AXGXH, AVPKAXX:APTKL:RSVK:DSSNNVI:KEVQV:NMVVK:AXGXH, KVGKAXX:VPTKL:RSVK:DDMGVPT:KEVQV:EGMSVAE:XGXR, KASKAXX:VPTKL:RSVK:DKGVVTY:KEVQV:GMAVS:EXGXR, GSAGPXX:TPTKM:RSVK:NDKQQII:KEVQV:GMVVD:RXGXS, AAPASXX:VPARL:RSVK:DAANNVV:KEVQV:DMVVE:AXGXR, STPPTXX:VPTRL:RSVK:DSANNVV:KEVQV:DMVVE:SXGXR, HVPKPXX:APTKL:RSVK:DDSSNVI:KEVQV:NMVVR:SXGXH, RVPSTXX:APVKT:RSVK:DNGRVLL:KEVQV:MIVEE:XGXL, ASAAPXX:VPQAL:RSVK:VGRKPKV:KEVQV:MIVRS:XKXS, ASASPXX:VSQDL:RSVK:IGKTPKI:KEVQV:MIVKS:XKXS, ASASPXX:VPQDL:RSVK:VGRTPKV:KEVQV:MVVKS:XKXS, NDEGLEX:VPTEE:RSVK:RIKPHQGQH:KEVQV:FLQHN:KXEXR, NDEGLEX:VPTGQ:RSVK:RIKPHQGQH:KEVQV:LEEHS:QXEXR, RNVQXRP:TQVQL:RSVK:EIVRKKPIF:KEVQV:TLEDH:LAXKXE, SSVKXQP:TQVHH:RPVQ:EYVRKKPKL:KKATV:RLEDH:LEXAXA, KIPKAXX:VPTEL:RPVQ:DENEKVV:KKATV:DMVVE:GXGXR, GIPEPXX:VPEKM:RPVQ:DENKNVV:KKATV:NMTVE:SXAXR, SIPKAXX:VPTEL:RPVQ:DEYDKVV:KKATV:EMVVE:GXGXR, HVTKPTX:APTKL:RPVQ:DDSSNVI:KKATV:NMVVR:SXGXH, YVPKPXX:APTKL:RPVQ:DDSSNVI:KKATV:NMVVR:SXGXH, TVPKPXX:APTQL:RPVQ:DDSSNVI:KKATV:NMVVR:AXGXH, AVPKAXX:APTKL:RPVQ:DSSNNVI:KKATV:NMVVK:AXGXH, KVGKAXX:VPTKL:RPVQ:DDMGVPT:KKATV:EGMSVAE:XGXR, KASKAXX:VPTKL:RPVQ:DKGVVTY:KKATV:GMAVS:EXGXR, GSAGPXX:TPTKM:RPVQ:NDKQQII:KKATV:GMVVD:RXGXS, AAPASXX:VPARL:RPVQ:DAANNVV:KKATV:DMVVE:AXGXR, STPPTXX:VPTRL:RPVQ:DSANNVV:KKATV:DMVVE:SXGXR, HVPKPXX:APTKL:RPVQ:DDSSNVI:KKATV:NMVVR:SXGXH, RVPSTXX:APVKT:RPVQ:DNGRVLL:KKATV:MIVEE:XGXL, ASAAPXX:VPQAL:RPVQ:VGRKPKV:KKATV:MIVRS:XKXS, ASASPXX:VSQDL:RPVQ:IGKTPKI:KKATV:MIVKS:XKXS, ASASPXX:VPQDL:RPVQ:VGRTPKV:KKATV:MVVKS:XKXS, NDEGLEX:VPTEE:RPVQ:RIKPHQGQH:KKATV:FLQHN:KXEXR, NDEGLEX:VPTGQ:RPVQ:RIKPHQGQH:KKATV:LEEHS:QXEXR and SSVKXQP:SRVHH:RPVQ:EYVRKKPKL:KKATV:RLEEH:LEXAXA.

[0446] In particular, in certain embodiments, the heptuplet PEP7:PEP5:PEP12:LINKER:PEP2:PEP6:PEP8 is selected from the group consisting of GIPEPXX:VPTKM:SAIS-AA¹⁷-LYL:DENKNVV:LKNYQ:NMVVE:SXAXR, SIPKAXX:VPTEL:SAIS-AA¹⁷-LYL:DEYDKVV:LKNYQ:EMVVE:GXGXR, HVTKPTX:VPTKL:SAIS-AA¹⁷-LYL:DDSSNVI:LKNYQ:NMVVE:SXGXH, YVPKPXX:VPTKL:SAIS-AA¹⁷-LYL:DDSSNVI:LKNYQ:NMVVE:SXGXH, TVPKPXX:VPTQL:SAIS-AA¹⁷-LYL:DDSSNVI:LKNYQ:NMVVE:AXGXH, AVPKAXX:VPTKL:SAIS-AA¹⁷-LYL:DSSNNVI:LKNYQ:NMVVE:AXGXH, KVGKAXX:VPTKL:SAIS-AA¹⁷-LYL:DDMGVPT:LKNYQ:EGMSVVE:XGXR, KASKAXX:VPTKL:SAIS-AA¹⁷-LYL:DKGVVTY:LKNYQ:GMVVE:EXGXR, GSAGPXX:VPTKM:SAIS-AA¹⁷-LYL:NDKQQII:LKNYQ:GMVVE:RXGXS, AAPASXX:VPTRL:SAIS-AA¹⁷-LYL:DAANNVV:LKNYQ:DMVVE:AXGXR, STPPTXX:VPTRL:SAIS-AA¹⁷-LYL:DSANNVV:LKNYQ:DMVVE:SXGXR, HVPKPXX:VPTKL:SAIS-AA¹⁷-LYL:DDSSNVI:LKNYQ:NMVVE:SXGXH, RVPSTXX:VPTKT:SAIS-AA¹⁷-LYL:DNGRVLL:LKNYQ:MIVVE:XGXL, ASAAPXX:VPTAL:SAIS-AA¹⁷-LYL:VGRKPKV:LKNYQ:MIVVE:XKXS, ASASPXX:VPTDL:SAIS-AA¹⁷-LYL:IGKTPKI:LKNYQ:MIVVE:XKXS, ASASPXX:VPTDL:SAIS-AA¹⁷-LYL:VGRTPKV:LKNYQ:MVVVE:XKXS, NDEGLEX:VPTEE:SAIS-AA¹⁷-LYL:RIKPHQGQH:LKNYQ:FLVVE:KXEXR, NDEGLEX:VPTGQ:SAIS-AA¹⁷-LYL:RIKPHQGQH:LKNYQ:LEVVE:QXEXR, SSVKXQP:VPTHH:SAIS-AA¹⁷-LYL:EYVRKKPKL:LKNYQ:RLVVE:LEXAXA, RNVQXRP:VPTQL:SAIS-AA¹⁷-LYL:EIVRKKPIF:LKNYQ:TLVVE:LAXKXE, GIPEPXX:VPEKM:SAIS-AA¹⁷-LYL:DENKNVV:LKNYQ:NMTVE:SXAXR, HVTKPTX:APTKL:SAIS-AA¹⁷-LYL:DDSSNVI:LKNYQ:NMVVR:SXGXH, YVPKPXX:APTKL:SAIS-AA¹⁷-LYL:DDSSNVI:LKNYQ:NMVVR:SXGXH, TVPKPXX:APTQL:SAIS-AA¹⁷-LYL:DDSSNVI:LKNYQ:NMVVR:AXGXH, AVPKAXX:APTKL:SAIS-AA¹⁷-LYL:DSSNNVI:LKNYQ:NMVVK:AXGXH, KVGKAXX:VPTKL:SAIS-AA¹⁷-LYL:DDMGVPT:LKNYQ:EGMSVAE:XGXR, KASKAXX:VPTKL:SAIS-AA¹⁷-LYL:DKGVVTY:LKNYQ:GMAVS:EXGXR, GSAGPXX:TPTKM:SAIS-AA¹⁷-LYL:NDKQQII:LKNYQ:GMVVD:RXGXS, AAPASXX:VPARL:SAIS-AA¹⁷-LYL:DAANNVV:LKNYQ:DMVVE:AXGXR, HVPKPXX:APTKL:SAIS-AA¹⁷-LYL:DDSSNVI:LKNYQ:NMVVR:SXGXH, RVPSTXX:APVKT:SAIS-AA¹⁷-LYL:DNGRVLL:LKNYQ:MIVEE:XGXL, ASAAPXX:VPQAL:SAIS-AA¹⁷-LYL:VGRKPKV:LKNYQ:MIVRS:XKXS, ASASPXX:VSQDL:SAIS-AA¹⁷-LYL:IGKTPKI:LKNYQ:MIVKS:XKXS, ASASPXX:VPQDL:SAIS-AA¹⁷-LYL:VGRTPKV:LKNYQ:MVVKS:XKXS, NDEGLEX:VPTEE:SAIS-AA¹⁷-LYL:RIKPHQGQH:LKNYQ:FLQHN:KXEXR, NDEGLEX:VPTGQ:SAIS-AA¹⁷-LYL:RIKPHQGQH:LKNYQ:LEEHS:QXEXR, SSVKXQP:SRVHH:SAIS-AA¹⁷-LYL:EYVRKKPKL:LKNYQ:RLEEH:LEXAXA, RNVQXRP:TQVQL:SAIS-AA¹⁷-LYL:EIVRKKPIF:LKNYQ:TLEDH:LAXKXE, KIPKAXX:VPEEL:SSLS-AA¹⁷-LFF:DENEKVV:LKVYP:DMTVE:GXGXR, SIPKAXX:VPEEL:SSLS-AA¹⁷-LFF:DEYDKVV:LKVYP:EMTVE:GXGXR, HVTKPTX:VPEKL:SSLS-AA¹⁷-LFF:DDSSNVI:LKVYP:NMTVE:SXGXH, YVPKPXX:VPEKL:SSLS-AA¹⁷-LFF:DDSSNVI:LKVYP:NMTVE:SXGXH, TVPKPXX:VPEQL:SSLS-AA¹⁷-LFF:DDSSNVI:LKVYP:NMTVE:AXGXH, AVPKAXX:VPEKL:SSLS-AA¹⁷-LFF:DSSNNVI:LKVYP:NMTVE:AXGXH, KVGKAXX:VPEKL:SSLS-AA¹⁷-LFF:DDMGVPT:LKVYP:EGMSTVE:XGXR, KASKAXX:VPEKL:SSLS-AA¹⁷-LFF:DKGVVTY:LKVYP:GMTVE:EXGXR, GSAGPXX:VPEKM:SSLS-AA¹⁷-LFF:NDKQQII:LKVYP:GMTVE:RXGXS, AAPASXX:VPERL:SSLS-AA¹⁷-LFF:DAANNVV:LKVYP:DMTVE:AXGXR, STPPTXX:VPERL:SSLS-AA¹⁷-LFF:DSANNVV:LKVYP:DMTVE:SXGXR, HVPKPXX:VPEKL:SSLS-AA¹⁷-LFF:DDSSNVI:LKVYP:NMTVE:SXGXH, RVPSTXX:VPEKT:SSLS-AA¹⁷-LFF:DNGRVLL:LKVYP:MITVE:XGXL, ASAAPXX:VPEAL:SSLS-AA¹⁷-LFF:VGRKPKV:LKVYP:MITVE:XKXS, ASASPXX:VPED L:SSLS-AA¹⁷-LFF:IGKTPKI:LKVYP:MITVE:XKXS, ASASPXX:VPEDL:SSLS-AA¹⁷-LFF:VGRTPKV:LKVYP:MVTVE:XKXS, NDEGLEX:VPEEE:SSLS-AA¹⁷-LFF:RIKPHQGQH:LKVYP:FLTVE:KXEXR, NDEGLEX:VPEGQ:SSLS-AA¹⁷-LFF:RIKPHQGQH:LKVYP:LETVE:QXEXR, SSVKXQP:VPEHH:SSLS-AA¹⁷-LFF:EYVRKKPKL:LKVYP:RLTVE:LEXAXA, RNVQXRP:VPEQL:SSLS-AA¹⁷-LFF:EIVRKKPIF:LKVYP:TLTVE:LAXKXE, KIPKAXX:VPTEL:SSLS-AA¹⁷-LFF:DENEKVV:LKVYP:DMVVE:GXGXR, SIPKAXX:VPTEL:SSLS-AA¹⁷-LFF:DEYDKVV:LKVYP:EMVVE:GXGXR, HVTKPTX:APTKL:SSLS-AA¹⁷-LFF:DDSSNVI:LKVYP:NMVVR:SXGXH, YVPKPXX:APTKL:SSLS-AA¹⁷-LFF:DDSSNVI:LKVYP:NMVVR:SXGXH, TVPKPXX:APTQL:SSLS-AA¹⁷-LFF:DDSSNVI:LKVYP:NMVVR:AXGXH, AVPKAXX:APTKL:SSLS-AA¹⁷-LFF:DSSNNVI:LKVYP:NMVVK:AXGXH, KVGKAXX:VPTKL:SSLS-AA¹⁷-LFF:DDMGVPT:LKVYP:EGMSVAE:XGXR, KASKAXX:VPTKL:SSLS-AA¹⁷-LFF:DKGVVTY:LKVYP:GMAVS:EXGXR, GSAGPXX:TPTKM:SSLS-AA¹⁷-LFF:NDKQQII:LKVYP:GMVVD:RXGXS, AAPASXX:VPARL:SSLS-AA¹⁷-LFF:DAANNVV:LKVYP:DMVVE:AXGXR, STPPTXX:VPTRL:SSLS-AA¹⁷-LFF:DSANNVV:LKVYP:DMVVE:SXGXR, HVPKPXX:APTKL:SSLS-AA¹⁷-LFF:DDSSNVI:LKVYP:NMVVR:SXGXH, RVPSTXX:APVKT:SSLS-AA¹⁷-LFF:DNGRVLL:LKVYP:MIVEE:XGXL, ASAAPXX:VPQAL:SSLS-AA¹⁷-LFF:VGRKPKV:LKVYP:MIVRS:XKXS, ASASPXX:VSQDL:SSLS-AA¹⁷-LFF:IGKTPKI:LKVYP:MIVKS:XKXS, ASASPXX:VPQDL:SSLS-AA¹⁷-LFF:VGRTPKV:LKVYP:MVVKS:XKXS, NDEGLEX:VPTEE:SSLS-AA¹⁷-LFF:RIKPHQGQH:LKVYP:FLQHN:KXEXR, NDEGLEX:VPTGQ:SSLS-AA¹⁷-LFF:RIKPHQGQH:LKVYP:LEEHS:QXEXR, SSVKXQP:SRVHH:SSLS-AA¹⁷-LFF:EYVRKKPKL:LKVYP:RLEEH:LEXAXA, RNVQXRP:TQVQL:SSLS-AA¹⁷-LFF:EIVRKKPIF:LKVYP:TLEDH:LAXKXE, KIPKAXX:VPTEL:SAIS-AA¹⁷-LYL:DENEKVV:LKNYQ:DMVVE:GXGXR, KIPKAXX:APTEL:NAIS-AA¹⁷-LYF:DENEKVV:LKKYR:DMVVR:GXGXR, GIPEPXX:APTKM:NAIS-AA¹⁷-LYF:DENKNVV:LKKYR:NMVVR:SXAXR, SIPKAXX:APTEL:NAIS-AA¹⁷-LYF:DEYDKVV:LKKYR:EMVVR:GXGXR, YVPKPXX:APTKL:NAIS-AA¹⁷-LYF:DDSSNVI:LKKYR:NMVVR:SXGXH, TVPKPXX:APTQL:NAIS-AA¹⁷-LYF:DDSSNVI:LKKYR:NMVVR:AXGXH, AVPKAXX:APTKL:NAIS-AA¹⁷-LYF:DSSNNVI:LKKYR:NMVVR:AXGXH, KVGKAXX:APTKL:NAIS-AA¹⁷-LYF:DDMGVPT:LKKYR:EGMSVVR:XGXR, KASKAXX:APTKL:NAIS-AA¹⁷-LYF:DKGVVTY:LKKYR:GMVVR:EXGXR, GSAGPXX:APTKM:NAIS-AA¹⁷-LYF:NDKQQII:LKKYR:GMVVR:RXGXS, AAPASXX:APTRL:NAIS-AA¹⁷-LYF:DAANNVV:LKKYR:DMVVR:AXGXR, STPPTXX:APTRL:NAIS-AA¹⁷-LYF:DSANNVV:LKKYR:DMVVR:SXGXR, HVPKPXX:APTKL:NAIS-AA¹⁷-LYF:DDSSNVI:LKKYR:NMVVR:SXGXH, RVPSTXX:APTKT:NAIS-AA¹⁷-LYF:DNGRVLL:LKKYR:MIVVR:XGXL, ASAAPXX:APTAL:NAIS-AA¹⁷-LYF:VGRKPKV:LKKYR:MIVVR:XKXS, ASASPXX:APTDL:NAIS-AA¹⁷-LYF:IGKTPKI:LKKYR:MIVVR:XKXS, ASASPXX:APTDL:NAIS-AA¹⁷-LYF:VGRTPKV:LKKYR:MVVVR:XKXS, NDEGLEX:APTEE:NAIS-AA¹⁷-LYF:RIKPHQGQH:LKKYR:FLVVR:KXEXR, NDEGLEX:APTGQ:NAIS-AA¹⁷-LYF:RIKPHQGQH:LKKYR:LEVVR:QXEXR, SSVKXQP:APTHH:NAIS-AA¹⁷-LYF:EYVRKKPKL:LKKYR:RLVVR:LEXAXA, RNVQXRP:APTQL:NAIS-AA¹⁷-LYF:EIVRKKPIF:LKKYR:TLVVR:LAXKXE, KIPKAXX:VPTEL:NAIS-AA¹⁷-LYF:DENEKVV:LKKYR:DMVVE:GXGXR, GIPEPXX:VPEKM:NAIS-AA¹⁷-LYF:DENKNVV:LKKYR:NMTVE:SXAXR, SIPKAXX:VPTEL:NAIS-AA¹⁷-LYF:DEYDKVV:LKKYR:EMVVE:GXGXR, AVPKAXX:APTKL:NAIS-AA¹⁷-LYF:DSSNNVI:LKKYR:NMVVK:AXGXH, KVGKAXX:VPTKL:NAIS-AA¹⁷-LYF:DDMGVPT:LKKYR:EGMSVAE:XGXR, KASKAXX:VPTKL:NAIS-AA¹⁷-LYF:DKGVVTY:LKKYR:GMAVS:EXGXR, GSAGPXX:TPTKM:NAIS-AA¹⁷-LYF:NDKQQII:LKKYR:GMVVD:RXGXS, AAPASXX:VPARL:NAIS-AA¹⁷-LYF:DAANNVV:LKKYR:DMVVE:AXGXR, STPPTXX:VPTRL:NAIS-AA¹⁷-LYF:DSANNVV:LKKYR:DMVVE:SXGXR, RVPSTXX:APVKT:NAIS-AA¹⁷-LYF:DNGRVLL:LKKYR:MIVEE:XGXL, ASAAPXX:VPQAL:NAIS-AA¹⁷-LYF:VGRKPKV:LKKYR:MIVRS:XKXS, ASASPXX:VSQDL:NAIS-AA¹⁷-LYF:IGKTPKI:LKKYR:MIVKS:XKXS, ASASPXX:VPQDL:NAIS-AA¹⁷-LYF:VGRTPKV:LKKYR:MVVKS:XKXS, NDEGLEX:VPTEE:NAIS-AA¹⁷-LYF:RIKPHQGQH:LKKYR:FLQHN:KXEXR, NDEGLEX:VPTGQ:NAIS-AA¹⁷-LYF:RIKPHQGQH:LKKYR:LEEHS:QXEXR, SSVKXQP:SRVHH:NAIS-AA¹⁷-LYF:EYVRKKPKL:LKKYR:RLEEH:LEXAXA, RNVQXRP:TQVQL:NAIS-AA¹⁷-LYF:EIVRKKPIF:LKKYR:TLEDH:LAXKXE, HVTKPTX:APTKL:NAIS-AA¹⁷-LYF:DDSSNVI:LKKYR:NMVVR:SXGXH, KIPKAXX:APTEL:SATS-AA¹⁷-LYY:DENEKVV:LRKHR:DMVVK:GXGXR, GIPEPXX:APTKM:SATS-AA¹⁷-LYY:DENKNVV:LRKHR:NMVVK:SXAXR, SIPKAXX:APTEL:SATS-AA¹⁷-LYY:DEYDKVV:LRKHR:EMVVK:GXGXR, HVTKPTX:APTKL:SATS-AA¹⁷-LYY:DDSSNVI:LRKHR:NMVVK:SXGXH, YVPKPXX:APTKL:SATS-AA¹⁷-LYY:DDSSNVI:LRKHR:NMVVK:SXGXH, TVPKPXX:APTQL:SATS-AA¹⁷-LYY:DDSSNVI:LRKHR:NMVVK:AXGXH, KVGKAXX:APTKL:SATS-AA¹⁷-LYY:DDMGVPT:LRKHR:EGMSVVK:XGXR, KASKAXX:APTKL:SATS-AA¹⁷-LYY:DKGVVTY:LRKHR:GMVVK:EXGXR, GSAGPXX:APTKM:SATS-AA¹⁷-LYY:NDKQQII:LRKHR:GMVVK:RXGXS, AAPASXX:APTRL:SATS-AA¹⁷-LYY:DAANNVV:LRKHR:DMVVK:AXGXR, STPPTXX:APTRL:SATS-AA¹⁷-LYY:DSANNVV:LRKHR:DMVVK:SXGXR, HVPKPXX:APTKL:SATS-AA¹⁷-LYY:DDSSNVI:LRKHR:NMVVK:SXGXH, RVPSTXX:APTKT:SATS-AA¹⁷-LYY:DNGRVLL:LRKHR:MIVVK:XGXL, ASAAPXX:APTAL:SATS-AA¹⁷-LYY:VGRKPKV:LRKHR:MIVVK:XKXS, ASASPXX:APTDL:SATS-AA¹⁷-LYY:IGKTPKI:LRKHR:MIVVK:XKXS, ASASPXX:APTDL:SATS-AA¹⁷-LYY:VGRTPKV:LRKHR:MVVVK:XKXS, NDEGLEX:APTEE:SATS-AA¹⁷-LYY:RIKPHQGQH:LRKHR:FLVVK:KXEXR, NDEGLEX:APTGQ:SATS-AA¹⁷-LYY:RIKPHQGQH:LRKHR:LEVVK:QXEXR, SSVKXQP:APTHH:SATS-AA¹⁷-LYY:EYVRKKPKL:LRKHR:RLVVK:LEXAXA, RNVQXRP:APTQL:SATS-AA¹⁷-LYY:EIVRKKPIF:LRKHR:TLVVK:LAXKXE, KIPKAXX:VPTEL:SATS-AA¹⁷-LYY:DENEKVV:LRKHR:DMVVE:GXGXR, GIPEPXX:VPEKM:SATS-AA¹⁷-LYY:DENKNVV:LRKHR:NMTVE:SXAXR, SIPKAXX:VPTEL:SATS-AA¹⁷-LYY:DEYDKVV:LRKHR:EMVVE:GXGXR, HVTKPTX:APTKL:SATS-AA¹⁷-LYY:DDSSNVI:LRKHR:NMVVR:SXGXH, YVPKPXX:APTKL:SATS-AA¹⁷-LYY:DDSSNVI:LRKHR:NMVVR:SXGXH, TVPKPXX:APTQL:SATS-AA¹⁷-LYY:DDSSNVI:LRKHR:NMVVR:AXGXH, KVGKAXX:VPTKL:SATS-AA¹⁷-LYY:DDMGVPT:LRKHR:EGMSVAE:XGXR, KASKAXX:VPTKL:SATS-AA¹⁷-LYY:DKGVVTY:LRKHR:GMAVS:EXGXR, GSAGPXX:TPTKM:SATS-AA¹⁷-LYY:NDKQQII:LRKHR:GMVVD:RXGXS, AAPASXX:VPARL:SATS-AA¹⁷-LYY:DAANNVV:LRKHR:DMVVE:AXGXR, STPPTXX:VPTRL:SATS-AA¹⁷-LYY:DSANNVV:LRKHR:DMVVE:SXGXR, HVPKPXX:APTKL:SATS-AA¹⁷-LYY:DDSSNVI:LRKHR:NMVVR:SXGXH, RVPSTXX:APVKT:SATS-AA¹⁷-LYY:DNGRVLL:LRKHR:MIVEE:XGXL, ASAAPXX:VPQAL:SATS-AA¹⁷-LYY:VGRKPKV:LRKHR:MIVRS:XKXS, ASASPXX:VSQDL:SATS-AA¹⁷-LYY:IGKTPKI:LRKHR:MIVKS:XKXS, ASASPXX:VPQDL:SATS-AA¹⁷-LYY:VGRTPKV:LRKHR:MVVKS:XKXS, NDEGLEX:VPTEE:SATS-AA¹⁷-LYY:RIKPHQGQH:LRKHR:FLQHN:KXEXR, NDEGLEX:VPTGQ:SATS-AA¹⁷-LYY:RIKPHQGQH:LRKHR:LEEHS:QXEXR, SSVKXQP:SRVHH:SATS-AA¹⁷-LYY:EYVRKKPKL:LRKHR:RLEEH:LEXAXA, RNVQXRP:TQVQL:SATS-AA¹⁷-LYY:EIVRKKPIF:LRKHR:TLEDH:LAXKXE, KIPKAXX:VPTEL:SPIS-AA¹⁷-LYK:DENEKVV:LKYHY:DMVAE:GXGXR, GIPEPXX:VPTKM:SPIS-AA¹⁷-LYK:DENKNVV:LKYHY:NMVAE:SXAXR, SIPKAXX:VPTEL:SPIS-AA¹⁷-LYK:DEYDKVV:LKYHY:EMVAE:GXGXR, HVTKPTX:VPTKL:SPIS-AA¹⁷-LYK:DDSSNVI:LKYHY:NMVAE:SXGXH, YVPKPXX:VPTKL:SPIS-AA¹⁷-LYK:DDSSNVI:LKYHY:NMVAE:SXGXH, TVPKPXX:VPTQL:SPIS-AA¹⁷-LYK:DDSSNVI:LKYHY:NMVAE:AXGXH, AVPKAXX:VPTKL:SPIS-AA¹⁷-LYK:DSSNNVI:LKYHY:NMVAE:AXGXH, KASKAXX:VPTKL:SPIS-AA¹⁷-LYK:DKGVVTY:LKYHY:GMVAE:EXGXR, GSAGPXX:VPTKM:SPIS-AA¹⁷-LYK:NDKQQII:LKYHY:GMVAE:RXGXS, AAPASXX:VPTRL:SPIS-AA¹⁷-LYK:DAANNVV:LKYHY:DMVAE:AXGXR, STPPTXX:VPTRL:SPIS-AA¹⁷-LYK:DSANNVV:LKYHY:DMVAE:SXGXR, HVPKPXX:VPTKL:SPIS-AA¹⁷-LYK:DDSSNVI:LKYHY:NMVAE:SXGXH, RVPSTXX:VPTKT:SPIS-AA¹⁷-LYK:DNGRVLL:LKYHY:MIVAE:XGXL, ASAAPXX:VPTAL:SPIS-AA¹⁷-LYK:VGRKPKV:LKYHY:MIVAE:XKXS, ASASPXX:VPTDL:SPIS-AA¹⁷-LYK:IGKTPKI:LKYHY:MIVAE:XKXS, ASASPXX:VPTDL:SPIS-AA¹⁷-LYK:VGRTPKV:LKYHY:MVVAE:XKXS, NDEGLEX:VPTEE:SPIS-AA¹⁷-LYK:RIKPHQGQH:LKYHY:FLVAE:KXEXR, NDEGLEX:VPTGQ:SPIS-AA¹⁷-LYK:RIKPHQGQH:LKYHY:LEVAE:QXEXR, SSVKXQP:VPTHH:SPIS-AA¹⁷-LYK:EYVRKKPKL:LKYHY:RLVAE:LEXAXA, RNVQXRP:VPTQL:SPIS-AA¹⁷-LYK:EIVRKKPIF:LKYHY:TLVAE:LAXKXE, KIPKAXX:VPTEL:SPIS-AA¹⁷-LYK:DENEKVV:LKYHY:DMVVE:GXGXR, GIPEPXX:VPEKM:SPIS-AA¹⁷-LYK:DENKNVV:LKYHY:NMTVE:SXAXR, SIPKAXX:VPTEL:SPIS-AA¹⁷-LYK:DEYDKVV:LKYHY:EMVVE:GXGXR, HVTKPTX:APTKL:SPIS-AA¹⁷-LYK:DDSSNVI:LKYHY:NMVVR:SXGXH, YVPKPXX:APTKL:SPIS-AA¹⁷-LYK:DDSSNVI:LKYHY:NMVVR:SXGXH, TVPKPXX:APTQL:SPIS-AA¹⁷-LYK:DDSSNVI:LKYHY:NMVVR:AXGXH, AVPKAXX:APTKL:SPIS-AA¹⁷-LYK:DSSNNVI:LKYHY:NMVVK:AXGXH, KASKAXX:VPTKL:SPIS-AA¹⁷-LYK:DKGVVTY:LKYHY:GMAVS:EXGXR, GSAGPXX:TPTKM:SPIS-AA¹⁷-LYK:NDKQQII:LKYHY:GMVVD:RXGXS, AAPASXX:VPARL:SPIS-AA¹⁷-LYK:DAANNVV:LKYHY:DMVVE:AXGXR, STPPTXX:VPTRL:SPIS-AA¹⁷-LYK:DSANNVV:LKYHY:DMVVE:SXGXR, HVPKPXX:APTKL:SPIS-AA¹⁷-LYK:DDSSNVI:LKYHY:NMVVR:SXGXH, RVPSTXX:APVKT:SPIS-AA¹⁷-LYK:DNGRVLL:LKYHY:MIVEE:XGXL, ASAAPXX:VPQAL:SPIS-AA¹⁷-LYK:VGRKPKV:LKYHY:MIVRS:XKXS, ASASPXX:VSQDL:SPIS-AA¹⁷-LYK:IGKTPKI:LKYHY:MIVKS:XKXS, ASASPXX:VPQDL:SPIS-AA¹⁷-LYK:VGRTPKV:LKYHY:MVVKS:XKXS, NDEGLEX:VPTEE:SPIS-AA¹⁷-LYK:RIKPHQGQH:LKYHY:FLQHN:KXEXR, NDEGLEX:VPTGQ:SPIS-AA¹⁷-LYK:RIKPHQGQH:LKYHY:LEEHS:QXEXR, SSVKXQP:SRVHH:SPIS-AA¹⁷-LYK:EYVRKKPKL:LKYHY:RLEEH:LEXAXA, RNVQXRP:TQVQL:SPIS-AA¹⁷-LYK:EIVRKKPIF:LKYHY:TLEDH:LAXKXE, KIPKAXX:VPTEL:EPIS-AA¹⁷-LYL:DENEKVV:KFKYE:DMAVS:GXGXR, GIPEPXX:VPTKM:EPIS-AA¹⁷-LYL:DENKNVV:KFKYE:NMAVS:SXAXR, SIPKAXX:VPTEL:EPIS-AA¹⁷-LYL:DEYDKVV:KFKYE:EMAVS:GXGXR, HVTKPTX:VPTKL:EPIS-AA¹⁷-LYL:DDSSNVI:KFKYE:NMAVS:SXGXH, YVPKPXX:VPTKL:EPIS-AA¹⁷-LYL:DDSSNVI:KFKYE:NMAVS:SXGXH, TVPKPXX:VPTQL:EPIS-AA¹⁷-LYL:DDSSNVI:KFKYE:NMAVS:AXGXH, AVPKAXX:VPTKL:EPIS-AA¹⁷-LYL:DSSNNVI:KFKYE:NMAVS:AXGXH, KVGKAXX:VPTKL:EPIS-AA¹⁷-LYL:DDMGVPT:KFKYE:EGMSAVS:XGXR, GSAGPXX:VPTKM:EPIS-AA¹⁷-LYL:NDKQQII:KFKYE:GMAVS:RXGXS, AAPASXX:VPTRL:EPIS-AA¹⁷-LYL:DAANNVV:KFKYE:DMAVS:AXGXR, STPPTXX:VPTRL:EPIS-AA¹⁷-LYL:DSANNVV:KFKYE:DMAVS:SXGXR, HVPKPXX:VPTKL:EPIS-AA¹⁷-LYL:DDSSNVI:KFKYE:NMAVS:SXGXH, RVPSTXX:VPTKT:EPIS-AA¹⁷-LYL:DNGRVLL:KFKYE:MIAVS:XGXL, ASAAPXX:VPTAL:EPIS-AA¹⁷-LYL:VGRKPKV:KFKYE:MIAVS:XKXS, ASASPXX:VPTDL:EPIS-AA¹⁷-LYL:IGKTPKI:KFKYE:MIAVS:XKXS, ASASPXX:VPTDL:EPIS-AA¹⁷-LYL:VGRTPKV:KFKYE:MVAVS:XKXS, NDEGLEX:VPTEE:EPIS-AA¹⁷-LYL:RIKPHQGQH:KFKYE:FLAVS:KXEXR, NDEGLEX:VPTGQ:EPIS-AA¹⁷-LYL:RIKPHQGQH:KFKYE:LEAVS:QXEXR, SSVKXQP:VPTHH:EPIS-AA¹⁷-LYL:EYVRKKPKL:KFKYE:RLAVS:LEXAXA, RNVQXRP:VPTQL:EPIS-AA¹⁷-LYL:EIVRKKPIF:KFKYE:TLAVS:LAXKXE, KIPKAXX:VPTEL:EPIS-AA¹⁷-LYL:DENEKVV:KFKYE:DMVVE:GXGXR, GIPEPXX:VPEKM:EPIS-AA¹⁷-LYL:DENKNVV:KFKYE:NMTVE:SXAXR, SIPKAXX:VPTEL:EPIS-AA¹⁷-LYL:DEYDKVV:KFKYE:EMVVE:GXGXR, HVTKPTX:APTKL:EPIS-AA¹⁷-LYL:DDSSNVI:KFKYE:NMVVR:SXGXH, YVPKPXX:APTKL:EPIS-AA¹⁷-LYL:DDSSNVI:KFKYE:NMVVR:SXGXH, TVPKPXX:APTQL:EPIS-AA¹⁷-LYL:DDSSNVI:KFKYE:NMVVR:AXGXH, AVPKAXX:APTKL:EPIS-AA¹⁷-LYL:DSSNNVI:KFKYE:NMVVK:AXGXH, KVG KAXX:VPTKL:EPIS-AA¹⁷-LYL:DDMGVPT:KFKYE:EGMSVAE:XGXR, GSAGPXX:TPTKM:EPIS-AA¹⁷-LYL:NDKQQII:KFKYE:GMVVD:RXGXS, AAPASXX:VPARL:EPIS-AA¹⁷-LYL:DAANNVV:KFKYE:DMVVE:AXGXR, STPPTXX:VPTRL:EPIS-AA¹⁷-LYL:DSANNVV:KFKYE:DMVVE:SXGXR, HVPKPXX:APTKL:EPIS-AA¹⁷-LYL:DDSSNVI:KFKYE:NMVVR:SXGXH, RVPSTXX:APVKT:EPIS-AA¹⁷-LYL:DNGRVLL:KFKYE:MIVEE:XGXL, ASAAPXX:VPQAL:EPIS-AA¹⁷-LYL:VGRKPKV:KFKYE:MIVRS:XKXS, ASASPXX:VSQDL:EPIS-AA¹⁷-LYL:IGKTPKI:KFKYE:MIVKS:XKXS, ASASPXX:VPQDL:EPIS-AA¹⁷-LYL:VGRTPKV:KFKYE:MVVKS:XKXS, NDEGLEX:VPTEE:EPIS-AA¹⁷-LYL:RIKPHQGQH:KFKYE:FLQHN:KXEXR, NDEGLEX:VPTGQ:EPIS-AA¹⁷-LYL:RIKPHQGQH:KFKYE:LEEHS:QXEXR, SSVKXQP:SRVHH:EPIS-AA¹⁷-LYL:EYVRKKPKL:KFKYE:RLEEH:LEXAXA, RNVQXRP:TQVQL:EPIS-AA¹⁷-LYL:EIVRKKPIF:KFKYE:TLEDH:LAXKXE, KIPKAXX:TPTEL:SPIN-AA¹⁷-LYF:DENEKVV:YGKIP:DMVVD:GXGXR, GIPEPXX:TPTKM:SPIN-AA¹⁷-LYF:DENKNVV:YGKIP:NMVVD:SXAXR, SIPKAXX:TPTEL:SPIN-AA¹⁷-LYF:DEYDKVV:YGKIP:EMVVD:GXGXR, HVTKPTX:TPTKL:SPIN-AA¹⁷-LYF:DDSSNVI:YGKIP:NMVVD:SXGXH, YVPKPXX:TPTKL:SPIN-AA¹⁷-LYF:DDSSNVI:YGKIP:NMVVD:SXGXH, TVPKPXX:TPTQL:SPIN-AA¹⁷-LYF:DDSSNVI:YGKIP:NMVVD:AXGXH, AVPKAXX:TPTKL:SPIN-AA¹⁷-LYF:DSSNNVI:YGKIP:NMVVD:AXGXH, KVGKAXX:TPTKL:SPIN-AA¹⁷-LYF:DDMGVPT:YGKIP:EGMSVVD:XGXR, KASKAXX:TPTKL:SPIN-AA¹⁷-LYF:DKGVVTY:YGKIP:GMVVD:EXGXR, AAPASXX:TPTRL:SPIN-AA¹⁷-LYF:DAANNVV:YGKIP:DMVVD:AXGXR, STPPTXX:TPTRL:SPIN-AA¹⁷-LYF:DSANNVV:YGKIP:DMVVD:SXGXR, HVPKPXX:TPTKL:SPIN-AA¹⁷-LYF:DDSSNVI:YGKIP:NMVVD:SXGXH, RVPSTXX:TPTKT:SPIN-AA¹⁷-LYF:DNGRVLL:YGKIP:MIVVD:XGXL, ASAAPXX:TPTAL:SPIN-AA¹⁷-LYF:VGRKPKV:YGKIP:MIVVD:XKXS, ASASPXX:TPTDL:SPIN-AA¹⁷-LYF:IGKTPKI:YGKIP:MIVVD:XKXS, ASASPXX:TPTDL:SPIN-AA¹⁷-LYF:VGRTPKV:YGKIP:MVVVD:XKXS, NDEGLEX:TPTEE:SPIN-AA¹⁷-LYF:RIKPHQGQH:YGKIP:FLVVD:KXEXR, NDEGLEX:TPTGQ:SPIN-AA¹⁷-LYF:RIKPHQGQH:YGKIP:LEVVD:QXEXR, SSVKXQP:TPTHH:SPIN-AA¹⁷-LYF:EYVRKKPKL:YGKIP:RLVVD:LEXAXA, RNVQXRP:TPTQL:SPIN-AA¹⁷-LYF:EIVRKKPIF:YGKIP:TLVVD:LAXKXE, KIPKAXX:VPTEL:SPIN-AA¹⁷-LYF:DENEKVV:YGKIP:DMVVE:GXGXR, GIPEPXX:VPEKM:SPIN-AA¹⁷-LYF:DENKNVV:YGKIP:NMTVE:SXAXR, SIPKAXX:VPTEL:SPIN-AA¹⁷-LYF:DEYDKVV:YGKIP:EMVVE:GXGXR, HVTKPTX:APTKL:SPIN-AA¹⁷-LYF:DDSSNVI:YGKIP:NMVVR:SXGXH, YVPKPXX:APTKL:SPIN-AA¹⁷-LYF:DDSSNVI:YGKIP:NMVVR:SXGXH, TVPKPXX:APTQL:SPIN-AA¹⁷-LYF:DDSSNVI:YGKIP:NMVVR:AXGXH, AVPKAXX:APTKL:SPIN-AA¹⁷-LYF:DSSNNVI:YGKIP:NMVVK:AXGXH, KVGKAXX:VPTKL:SPIN-AA¹⁷-LYF:DDMGVPT:YGKIP:EGMSVAE:XGXR, KASKAXX:VPTKL:SPIN-AA¹⁷-LYF:DKGVVTY:YGKIP:GMAVS:EXGXR, AAPASXX:VPARL:SPIN-AA¹⁷-LYF:DAANNVV:YGKIP:DMVVE:AXGXR, STPPTXX:VPTRL:SPIN-AA¹⁷-LYF:DSANNVV:YGKIP:DMVVE:SXGXR, HVPKPXX:APTKL:SPIN-AA¹⁷-LYF:DDSSNVI:YGKIP:NMVVR:SXGXH, RVPSTXX:APVKT:SPIN-AA¹⁷-LYF:DNGRVLL:YGKIP:MIVEE:XGXL, ASAAPXX:VPQAL:SPIN-AA¹⁷-LYF:VGRKPKV:YGKIP:MIVRS:XKXS, ASASPXX:VSQDL:SPIN-AA¹⁷-LYF:IGKTPKI:YGKIP:MIVKS:XKXS, ASASPXX:VPQDL:SPIN-AA¹⁷-LYF:VGRTPKV:YGKIP:MVVKS:XKXS, NDEGLEX:VPTEE:SPIN-AA¹⁷-LYF:RIKPHQGQH:YGKIP:FLQHN:KXEXR, NDEGLEX:VPTGQ:SPIN-AA¹⁷-LYF:RIKPHQGQH:YGKIP:LEEHS:QXEXR, SSVKXQP:SRVHH:SPIN-AA¹⁷-LYF:EYVRKKPKL:YGKIP:RLEEH:LEXAXA, RNVQXRP:TQVQL:SPIN-AA¹⁷-LYF:EIVRKKPIF:YGKIP:TLEDH:LAXKXE, KIPKAXX:VPAEL:SPIS-AA¹⁷-LYI:DENEKVV:YKQYE:DMVVE:GXGXR, GIPEPXX:VPAKM:SPIS-AA¹⁷-LYI:DENKNVV:YKQYE:NMVVE:SXAXR, SIPKAXX:VPAEL:SPIS-AA¹⁷-LYI:DEYDKVV:YKQYE:EMVVE:GXGXR, HVTKPTX:VPAKL:SPIS-AA¹⁷-LYI:DDSSNVI:YKQYE:NMVVE:SXGXH, YVPKPXX:VPAKL:SPIS-AA¹⁷-LYI:DDSSNVI:YKQYE:NMVVE:SXGXH, TVPKPXX:VPAQL:SPIS-AA¹⁷-LYI:DDSSNVI:YKQYE:NMVVE:AXGXH, AVPKAXX:VPAKL:SPIS-AA¹⁷-LYI:DSSNNVI:YKQYE:NMVVE:AXGXH, KVGKAXX:VPAKL:SPIS-AA¹⁷-LYI:DDMGVPT:YKQYE:EGMSVVE:XGXR, KASKAXX:VPAKL:SPIS-AA¹⁷-LYI:DKGVVTY:YKQYE:GMVVE:EXGXR, GSAGPXX:VPAKM:SPIS-AA¹⁷-LYI:NDKQQII:YKQYE:GMVVE:RXGXS, STPPTXX:VPARL:SPIS-AA¹⁷-LYI:DSANNVV:YKQYE:DMVVE:SXGXR, HVPKPXX:VPAKL:SPIS-AA¹⁷-LYI:DDSSNVI:YKQYE:NMVVE:SXGXH, RVPSTXX:VPAKT:SPIS-AA¹⁷-LYI:DNGRVLL:YKQYE:MIVVE:XGXL, ASAAPXX:VPAAL:SPIS-AA¹⁷-LYI:VGRKPKV:YKQYE:MIVVE:XKXS, ASASPXX:VPADL:SPIS-AA¹⁷-LYI:IGKTPKI:YKQYE:MIVVE:XKXS, ASASPXX:VPADL:SPIS-AA¹⁷-LYI:VGRTPKV:YKQYE:MVVVE:XKXS, NDEGLEX:VPAEE:SPIS-AA¹⁷-LYI:RIKPHQGQH:YKQYE:FLVVE:KXEXR, NDEGLEX:VPAGQ:SPIS-AA¹⁷-LYI:RIKPHQGQH:YKQYE:LEVVE:QXEXR, SSVKXQP:VPAHH:SPIS-AA¹⁷-LYI:EYVRKKPKL:YKQYE:RLVVE:LEXAXA, RNVQXRP:VPAQL:SPIS-AA¹⁷-LYI:EIVRKKPIF:YKQYE:TLVVE:LAXKXE, KIPKAXX:VPTEL:SPIS-AA¹⁷-LYI:DENEKVV:YKQYE:DMVVE:GXGXR, GIPEPXX:VPEKM:SPIS-AA¹⁷-LYI:DENKNVV:YKQYE:NMTVE:SXAXR, SIPKAXX:VPTEL:SPIS-AA¹⁷-LYI:DEYDKVV:YKQYE:EMVVE:GXGXR, HVTKPTX:APTKL:SPIS-AA¹⁷-LYI:DDSSNVI:YKQYE:NMVVR:SXGXH, YVPKPXX:APTKL:SPIS-AA¹⁷-LYI:DDSSNVI:YKQYE:NMVVR:SXGXH, TVPKPXX:APTQL:SPIS-AA¹⁷-LYI:DDSSNVI:YKQYE:NMVVR:AXGXH, AVPKAXX:APTKL:SPIS-AA¹⁷-LYI:DSSNNVI:YKQYE:NMVVK:AXGXH, KVGKAXX:VPTKL:SPIS-AA¹⁷-LYI:DDMGVPT:YKQYE:EGMSVAE:XGXR, KASKAXX:VPTKL:SPIS-AA¹⁷-LYI:DKGVVTY:YKQYE:GMAVS:EXGXR, GSAGPXX:TPTKM:SPIS-AA¹⁷-LYI:NDKQQII:YKQYE:GMVVD:RXGXS, STPPTXX:VPTRL:SPIS-AA¹⁷-LYI:DSANNVV:YKQYE:DMVVE:SXGXR, HVPKPXX:APTKL:SPIS-AA¹⁷-LYI:DDSSNVI:YKQYE:NMVVR:SXGXH, RVPSTXX:APVKT:SPIS-AA¹⁷-LYI:DNGRVLL:YKQYE:MIVEE:XGXL, ASAAPXX:VPQAL:SPIS-AA¹⁷-LYI:VGRKPKV:YKQYE:MIVRS:XKXS, ASASPXX:VSQDL:SPIS-AA¹⁷-LYI:IGKTPKI:YKQYE:MIVKS:XKXS, ASASPXX:VPQDL:SPIS-AA¹⁷-LYI:VGRTPKV:YKQYE:MVVKS:XKXS, NDEGLEX:VPTEE:SPIS-AA¹⁷-LYI:RIKPHQGQH:YKQYE:FLQHN:KXEXR, NDEGLEX:VPTGQ:SPIS-AA¹⁷-LYI:RIKPHQGQH:YKQYE:LEEHS:QXEXR, SSVKXQP:SRVHH:SPIS-AA¹⁷-LYI:EYVRKKPKL:YKQYE:RLEEH:LEXAXA, RNVQXRP:TQVQL:SPIS-AA¹⁷-LYI:EIVRKKPIF:YKQYE:TLEDH:LAXKXE, KIPKAXX:VPTEL:SPIS-AA¹⁷-LFI:DENEKVV:YKQYE:DMVVE:GXGXR, GIPEPXX:VPTKM:SPIS-AA¹⁷-LFI:DENKNVV:YKQYE:NMVVE:SXAXR, SIPKAXX:VPTEL:SPIS-AA¹⁷-LFI:DEYDKVV:YKQYE:EMVVE:GXGXR, HVTKPTX:VPTKL:SPIS-AA¹⁷-LFI:DDSSNVI:YKQYE:NMVVE:SXGXH, YVPKPXX:VPTKL:SPIS-AA¹⁷-LFI:DDSSNVI:YKQYE:NMVVE:SXGXH, TVPKPXX:VPTQL:SPIS-AA¹⁷-LFI:DDSSNVI:YKQYE:NMVVE:AXGXH, AVPKAXX:VPTKL:SPIS-AA¹⁷-LFI:DSSNNVI:YKQYE:NMVVE:AXGXH, KVGKAXX:VPTKL:SPIS-AA¹⁷-LFI:DDMGVPT:YKQYE:EGMSVVE:XGXR, KASKAXX:VPTKL:SPIS-AA¹⁷-LFI:DKGVVTY:YKQYE:GMVVE:EXGXR, GSAGPXX:VPTKM:SPIS-AA¹⁷-LFI:NDKQQII:YKQYE:GMVVE:RXGXS, AAPASXX:VPTRL:SPIS-AA¹⁷-LFI:DAANNVV:YKQYE:DMVVE:AXGXR, HVPKPXX:VPTKL:SPIS-AA¹⁷-LFI:DDSSNVI:YKQYE:NMVVE:SXGXH, RVPSTXX:VPTKT:SPIS-AA¹⁷-LFI:DNGRVLL:YKQYE:MIVVEIVVE:XGXL, ASAAPXX:VPTAL:SPIS-AA¹⁷-LFI:VGRKPKV:YKQYE:MIVVE:XKXS, ASASPXX:VPTDL:SPIS-AA¹⁷-LFI:IGKTPKI:YKQYE:MIVVE:XKXS, ASASPXX:VPTDL:SPIS-AA¹⁷-LFI:VGRTPKV:YKQYE:MVVVE:XKXS, NDEGLEX:VPTEE:SPIS-AA¹⁷-LFI:RIKPHQGQH:YKQYE:FLVVE:KXEXR, NDEGLEX:VPTGQ:SPIS-AA¹⁷-LFI:RIKPHQGQH:YKQYE:LEVVE:QXEXR, SSVKXQP:VPTHH:SPIS-AA¹⁷-LFI:EYVRKKPKL:YKQYE:RLVVE:LEXAXA, RNVQXRP:VPTQL:SPIS-AA¹⁷-LFI:EIVRKKPIF:YKQYE:TLVVE:LAXKXE, GIPEPXX:VPEKM:SPIS-AA¹⁷-LFI:DENKNVV:YKQYE:NMTVE:SXAXR, HVTKPTX:APTKL:SPIS-AA¹⁷-LFI:DDSSNVI:YKQYE:NMVVR:SXGXH, YVPKPXX:APTKL:SPIS-AA¹⁷-LFI:DDSSNVI:YKQYE:NMVVR:SXGXH, TVPKPXX:APTQL:SPIS-AA¹⁷-LFI:DDSSNVI:YKQYE:NMVVR:AXGXH, AVPKAXX:APTKL:SPIS-AA¹⁷-LFI:DSSNNVI:YKQYE:NMVVK:AXGXH, KVGKAXX:VPTKL:SPIS-AA¹⁷-LFI:DDMGVPT:YKQYE:EGMSVAE:XGXR, KASKAXX:VPTKL:SPIS-AA¹⁷-LFI:DKGVVTY:YKQYE:GMAVS:EXGXR, GSAGPXX:TPTKM:SPIS-AA¹⁷-LFI:NDKQQII:YKQYE:GMVVD:RXGXS, AAPASXX:VPARL:SPIS-AA¹⁷-LFI:DAANNVV:YKQYE:DMVVE:AXGXR, HVPKPXX:APTKL:SPIS-AA¹⁷-LFI:DDSSNVI:YKQYE:NMVVR:SXGXH, RVPSTXX:APVKT:SPIS-AA¹⁷-LFI:DNGRVLL:YKQYE:MIVEE:XGXL, ASAAPXX:VPQAL:SPIS-AA¹⁷-LFI:VGRKPKV:YKQYE:MIVRS:XKXS, ASASPXX:VSQDL:SPIS-AA¹⁷-LFI:IGKTPKI:YKQYE:MIVKS:XKXS, ASASPXX:VPQDL:SPIS-AA¹⁷-LFI:VGRTPKV:YKQYE:MVVKS:XKXS, NDEGLEX:VPTEE:SPIS-AA¹⁷-LFI:RIKPHQGQH:YKQYE:FLQHN:KXEXR, NDEGLEX:VPTGQ:SPIS-AA¹⁷-LFI:RIKPHQGQH:YKQYE:LEEHS:QXEXR, SSVKXQP:SRVHH:SPIS-AA¹⁷-LFI:EYVRKKPKL:YKQYE:RLEEH:LEXAXA, RNVQXRP:TQVQL:SPIS-AA¹⁷-LFI:EIVRKKPIF:YKQYE:TLEDH:LAXKXE, KIPKAXX:APVEL:KPLS-AA¹⁷-LYV:DENEKVV:DHHKD:DMVEE:GXGXR, GIPEPXX:APVKM:KPLS-AA¹⁷-LYV:DENKNVV:DHHKD:NMVEE:SXAXR, SIPKAXX:APVEL:KPLS-AA¹⁷-LYV:DEYDKVV:DHHKD:EMVEE:GXGXR, HVTKPTX:APVKL:KPLS-AA¹⁷-LYV:DDSSNVI:DHHKD:NMVEE:SXGXH, YVPKPXX:APVKL:KPLS-AA¹⁷-LYV:DDSSNVI:DHHKD:NMVEE:SXGXH, TVPKPXX:APVQL:KPLS-AA¹⁷-LYV:DDSSNVI:DHHKD:NMVEE:AXGXH, AVPKAXX:APVKL:KPLS-AA¹⁷-LYV:DSSNNVI:DHHKD:NMVEE:AXGXH, KVGKAXX:APVKL:KPLS-AA¹⁷-LYV:DDMGVPT:DHHKD:EGMSVEE:XGXR, KASKAXX:APVKL:KPLS-AA¹⁷-LYV:DKGVVTY:DHHKD:GMVEE:EXGXR, GSAGPXX:APVKM:KPLS-AA¹⁷-LYV:NDKQQII:DHHKD:GMVEE:RXGXS, AAPASXX:APVRL:KPLS-AA¹⁷-LYV:DAANNVV:DHHKD:DMVEE:AXGXR, STPPTXX:APVRL:KPLS-AA¹⁷-LYV:DSANNVV:DHHKD:DMVEE:SXGXR, HVPKPXX:APVKL:KPLS-AA¹⁷-LYV:DDSSNVI:DHHKD:NMVEE:SXGXH, ASAAPXX:APVAL:KPLS-AA¹⁷-LYV:VGRKPKV:DHHKD:MIVEE:XKXS, ASASPXX:APVDL:KPLS-AA¹⁷-LYV:IGKTPKI:DHHKD:MIVEE:XKXS, ASASPXX:APVDL:KPLS-AA¹⁷-LYV:VGRTPKV:DHHKD:MVVEE:XKXS, NDEGLEX:APVEE:KPLS-AA¹⁷-LYV:RIKPHQGQH:DHHKD:FLVEE:KXEXR, NDEGLEX:APVGQ:KPLS-AA¹⁷-LYV:RIKPHQGQH:DHHKD:LEVEE:QXEXR, SSVKXQP:APVHH:KPLS-AA¹⁷-LYV:EYVRKKPKL:DHHKD:RLVEE:LEXAXA, RNVQXRP:APVQL:KPLS-AA¹⁷-LYV:EIVRKKPIF:DHHKD:TLVEE:LAXKXE, KIPKAXX:VPTEL:KPLS-AA¹⁷-LYV:DENEKVV:DHHKD:DMVVE:GXGXR, GIPEPXX:VPEKM:KPLS-AA¹⁷-LYV:DENKNVV:DHHKD:NMTVE:SXAXR, SIPKAXX:VPTEL:KPLS-AA¹-LYV:DEYDKVV:DHHKD:EMVVE:GXGXR, HVTKPTX:APTKL:KPLS-AA¹⁷-LYV:DDSSNVI:DHHKD:NMVVR:SXGXH, YVPKPXX:APTKL:KPLS-AA¹⁷-LYV:DDSSNVI:DHHKD:NMVVR:SXGXH, TVPKPXX:APTQL:KPLS-AA¹⁷-LYV:DDSSNVI:DHHKD:NMVVR:AXGXH, AVPKAXX:APTKL:KPLS-AA¹⁷-LYV:DSSNNVI:DHHKD:NMVVK:AXGXH, KVGKAXX:VPTKL:KPLS-AA¹⁷-LYV:DDMGVPT:DHHKD:EGMSVAE:XGXR, KASKAXX:VPTKL:KPLS-AA¹⁷-LYV:DKGVVTY:DHHKD:GMAVS:EXGXR, GSAGPXX:TPTKM:KPLS-AA¹⁷-LYV:NDKQQII:DHHKD:GMVVD:RXGXS, AAPASXX:VPARL:KPLS-AA¹⁷-LYV:DAANNVV:DHHKD:DMVVE:AXGXR, STPPTXX:VPTRL:KPLS-AA¹⁷-LYV:DSANNVV:DHHKD:DMVVE:SXGXR, HVPKPXX:APTKL:KPLS-AA¹⁷-LYV:DDSSNVI:DHHKD:NMVVR:SXGXH, ASAAPXX:VPQAL:KPLS-AA¹⁷-LYV:VGRKPKV:DHHKD:MIVRS:XKXS, ASASPXX:VSQDL:KPLS-AA¹⁷-LYV:IGKTPKI:DHHKD:MIVKS:XKXS, ASASPXX:VPQDL:KPLS-AA¹⁷-LYV:VGRTPKV:DHHKD:MVVKS:XKXS, NDEGLEX:VPTEE:KPLS-AA¹⁷-LYV:RIKPHQGQH:DHHKD:FLQHN:KXEXR, NDEGLEX:VPTGQ:KPLS-AA¹⁷-LYV:RIKPHQGQH:DHHKD:LEEHS:QXEXR, SSVKXQP:SRVHH:KPLS-AA¹⁷-LYV:EYVRKKPKL:DHHKD:RLEEH:LEXAXA, RNVQXRP:TQVQL:KPLS-AA¹⁷-LYV:EIVRKKPIF:DHHKD:TLEDH:LAXKXE, KIPKAXX:VPQEL:EPLP-AA¹⁷-VYY:DENEKVV:EQLSN:DMVRS:GXGXR, GIPEPXX:VPQKM:EPLP-AA¹⁷-VYY:DENKNVV:EQLSN:NMVRS:SXAXR, SIPKAXX:VPQEL:EPLP-AA¹⁷-VYY:DEYDKVV:EQLSN:EMVRS:GXGXR, HVTKPTX:VPQKL:EPLP-AA¹⁷-VYY:DDSSNVI:EQLSN:NMVRS:SXGXH, YVPKPXX:VPQKL:EPLP-AA¹⁷-VYY:DDSSNVI:EQLSN:NMVRS:SXGXH, TVPKPXX:VPQQL:EPLP-AA¹⁷-VYY:DDSSNVI:EQLSN:NMVRS:AXGXH, AVPKAXX:VPQKL:EPLP-AA¹⁷-VYY:DSSNNVI:EQLSN:NMVRS:AXGXH, KVGKAXX:VPQKL:EPLP-AA¹⁷-VYY:DDMGVPT:EQLSN:EGMSVRS:XGXR, KASKAXX:VPQKL:EPLP-AA¹⁷-VYY:DKGVVTY:EQLSN:GMVRS:EXGXR, GSAGPXX:VPQKM:EPLP-AA¹⁷-VYY:NDKQQII:EQLSN:GMVRS:RXGXS, AAPASXX:VPQRL:EPLP-AA¹⁷-VYY:DAANNVV:EQLSN:DMVRS:AXGXR, STPPTXX:VPQRL:EPLP-AA¹⁷-VYY:DSANNVV:EQLSN:DMVRS:SXGXR, HVPKPXX:VPQKL:EPLP-AA¹⁷-VYY:DDSSNVI:EQLSN:NMVRS:SXGXH, RVPSTXX:VPQKT:EPLP-AA¹⁷-VYY:DNGRVLL:EQLSN:MIVRS:XGXL, ASASPXX:VPQDL:EPLP-AA¹⁷-VYY:IGKTPKI:EQLSN:MIVRS:XKXS, ASASPXX:VPQDL:EPLP-AA¹⁷-VYY:VGRTPKV:EQLSN:MVVRS:XKXS, N DEGLEX:VPQEE:EPLP-AA¹⁷-VYY:RIKPHQGQH:EQLSN:FLVRS:KXEXR, NDEGLEX:VPQGQ:EPLP-AA¹⁷-VYY:RIKPHQGQH:EQLSN:LEVRS:QXEXR, SSVKXQP:VPQHH:EPLP-AA¹⁷-VYY:EYVRKKPKL:EQLSN:RLVRS:LEXAXA, RNVQXRP:VPQQL:EPLP-AA¹⁷-VYY:EIVRKKPIF:EQLSN:TLVRS:LAXKXE, KIPKAXX:VPTEL:EPLP-AA¹⁷-VYY:DENEKVV:EQLSN:DMVVE:GXGXR, GIPEPXX:VPEKM:EPLP-AA¹⁷-VYY:DENKNVV:EQLSN:NMTVE:SXAXR, SIPKAXX:VPTEL:EPLP-AA¹⁷-VYY:DEYDKVV:EQLSN:EMVVE:GXGXR, HVTKPTX:APTKL:EPLP-AA¹⁷-VYY:DDSSNVI:EQLSN:NMVVR:SXGXH, YVPKPXX:APTKL:EPLP-AA¹⁷-VYY:DDSSNVI:EQLSN:NMVVR:SXGXH, TVPKPXX:APTQL:EPLP-AA¹⁷-VYY:DDSSNVI:EQLSN:NMVVR:AXGXH, AVPKAXX:APTKL:EPLP-AA¹⁷-VYY:DSSNNVI:EQLSN:NMVVK:AXGXH, KVGKAXX:VPTKL:EPLP-AA¹⁷-VYY:DDMGVPT:EQLSN:EGMSVAE:XGXR, KASKAXX:VPTKL:EPLP-AA¹⁷-VYY:DKGVVTY:EQLSN:GMAVS:EXGXR, GSAGPXX:TPTKM:EPLP-AA¹⁷-VYY:NDKQQII:EQLSN:GMVVD:RXGXS, AAPASXX:VPARL:EPLP-AA¹⁷-VYY:DAANNVV:EQLSN:DMVVE:AXGXR, STPPTXX:VPTRL:EPLP-AA¹⁷-VYY:DSANNVV:EQLSN:DMVVE:SXGXR, HVPKPXX:APTKL:EPLP-AA¹⁷-VYY:DDSSNVI:EQLSN:NMVVR:SXGXH, RVPSTXX:APVKT:EPLP-AA¹⁷-VYY:DNGRVLL:EQLSN:MIVEE:XGXL, ASASPXX:VSQDL:EPLP-AA¹⁷-VYY:IGKTPKI:EQLSN:MIVKS:XKXS, ASASPXX:VPQDL:EPLP-AA¹⁷-VYY:VGRTPKV:EQLSN:MVVKS:XKXS, NDEGLEX:VPTEE:EPLP-AA¹⁷-VYY:RIKPHQGQH:EQLSN:FLQHN:KXEXR, NDEGLEX:VPTGQ:EPLP-AA¹⁷-VYY:RIKPHQGQH:EQLSN:LEEHS:QXEXR, SSVKXQP:SRVHH:EPLP-AA¹⁷-VYY:EYVRKKPKL:EQLSN:RLEEH:LEXAXA, RNVQXRP:TQVQL:EPLP-AA¹⁷-VYY:EIVRKKPIF:EQLSN:TLEDH:LAXKXE, KIPKAXX:VSQEL:EPLT-AA¹⁷-LYY:DENEKVV:EQLSN:DMVKS:GXGXR, GIPEPXX:VSQKM:EPLT-AA¹⁷-LYY:DENKNVV:EQLSN:NMVKS:SXAXR, SIPKAXX:VSQEL:EPLT-AA¹⁷-LYY:DEYDKVV:EQLSN:EMVKS:GXGXR, HVTKPTX:VSQKL:EPLT-AA¹⁷-LYY:DDSSNVI:EQLSN:NMVKS:SXGXH, YVPKPXX:VSQKL:EPLT-AA¹⁷-LYY:DDSSNVI:EQLSN:NMVKS:SXGXH, TVPKPXX:VSQQL:EPLT-AA¹⁷-LYY:DDSSNVI:EQLSN:NMVKS:AXGXH, AVPKAXX:VSQKL:EPLT-AA¹⁷-LYY:DSSNNVI:EQLSN:NMVKS:AXGXH, KVGKAXX:VSQKL:EPLT-AA¹⁷-LYY:DDMGVPT:EQLSN:EGMSVKS:XGXR, KASKAXX:VSQKL:EPLT-AA¹⁷-LYY:DKGVVTY:EQLSN:GMVKS:EXGXR, GSAGPXX:VSQKM:EPLT-AA¹⁷-LYY:NDKQQII:EQLSN:GMVKS:RXGXS, AAPASXX:VSQRL:EPLT-AA¹⁷-LYY:DAANNVV:EQLSN:DMVKS:AXGXR, STPPTXX:VSQRL:EPLT-AA¹⁷-LYY:DSANNVV:EQLSN:DMVKS:SXGXR, HVPKPXX:VSQKL:EPLT-AA¹⁷-LYY:DDSSNVI:EQLSN:NMVKS:SXGXH, RVPSTXX:VSQKT:EPLT-AA¹⁷-LYY:DNGRVLL:EQLSN:MIVKS:XGXL, ASAAPXX:VSQAL:EPLT-AA¹⁷-LYY:VGRKPKV:EQLSN:MIVKS:XKXS, ASASPXX:VSQDL:EPLT-AA¹⁷-LYY:VGRTPKV:EQLSN:MVVKS:XKXS, NDEGLEX:VSQEE:EPLT-AA¹⁷-LYY:RIKPHQGQH:EQLSN:FLVKS:KXEXR, NDEGLEX:VSQGQ:EPLT-AA¹⁷-LYY:RIKPHQGQH:EQLSN:LEVKS:QXEXR, SSVKXQP:VSQHH:EPLT-AA¹⁷-LYY:EYVRKKPKL:EQLSN:RLVKS:LEXAXA, RNVQXRP:VSQQL:EPLT-AA¹⁷-LYY:EIVRKKPIF:EQLSN:TLVKS:LAXKXE, KIPKAXX:VPTEL:EPLT-AA¹⁷-LYY:DENEKVV:EQLSN:DMVVE:GXGXR, GIPEPXX:VPEKM:EPLT-AA¹⁷-LYY:DENKNVV:EQLSN:NMTVE:SXAXR, SIPKAXX:VPTEL:EPLT-AA¹⁷-LYY:DEYDKVV:EQLSN:EMVVE:GXGXR, HVTKPTX:APTKL:EPLT-AA¹⁷-LYY:DDSSNVI:EQLSN:NMVVR:SXGXH, YVPKPXX:APTKL:EPLT-AA¹⁷-LYY:DDSSNVI:EQLSN:NMVVR:SXGXH, TVPKPXX:APTQL:EPLT-AA¹⁷-LYY:DDSSNVI:EQLSN:NMVVR:AXGXH, AVPKAXX:APTKL:EPLT-AA¹⁷-LYY:DSSNNVI:EQLSN:NMVVK:AXGXH, KVGKAXX:VPTKL:EPLT-AA¹⁷-LYY:DDMGVPT:EQLSN:EGMSVAE:XGXR, KASKAXX:VPTKL:EPLT-AA¹⁷-LYY:DKGVVTY:EQLSN:GMAVS:EXGXR, GSAGPXX:TPTKM:EPLT-AA¹⁷-LYY:NDKQQII:EQLSN:GMVVD:RXGXS, AAPASXX:VPARL:EPLT-AA¹⁷-LYY:DAANNVV:EQLSN:DMVVE:AXGXR, STPPTXX:VPTRL:EPLT-AA¹⁷-LYY:DSANNVV:EQLSN:DMVVE:SXGXR, HVPKPXX:APTKL:EPLT-AA¹⁷-LYY:DDSSNVI:EQLSN:NMVVR:SXGXH, RVPSTXX:APVKT:EPLT-AA¹⁷-LYY:DNGRVLL:EQLSN:MIVEE:XGXL, ASAAPXX:VPQAL:EPLT-AA¹⁷-LYY:VGRKPKV:EQLSN:MIVRS:XKXS, ASASPXX:VPQDL:EPLT-AA¹⁷-LYY:VGRTPKV:EQLSN:MVVKS:XKXS, NDEGLEX:VPTEE:EPLT-AA¹⁷-LYY:RIKPHQGQH:EQLSN:FLQHN:KXEXR, NDEGLEX:VPTGQ:EPLT-AA¹⁷-LYY:RIKPHQGQH:EQLSN:LEEHS:QXEXR, SSVKXQP:SRVHH:EPLT-AA¹⁷-LYY:EYVRKKPKL:EQLSN:RLEEH:LEXAXA, RNVQXRP:TQVQL:EPLT-AA¹⁷-LYY:EIVRKKPIF:EQLSN:TLEDH:LAXKXE, KIPKAXX:VPQEL:EPLT-AA¹⁷-LYY:DENEKVV:EQLSN:DMVKS:GXGXR, GIPEPXX:VPQKM:EPLT-AA¹⁷-LYY:DENKNVV:EQLSN:NMVKS:SXAXR, SIPKAXX:VPQEL:EPLT-AA¹⁷-LYY:DEYDKVV:EQLSN:EMVKS:GXGXR, HVTKPTX:VPQKL:EPLT-AA¹⁷-LYY:DDSSNVI:EQLSN:NMVKS:SXGXH, YVPKPXX:VPQKL:EPLT-AA¹⁷-LYY:DDSSNVI:EQLSN:NMVKS:SXGXH, TVPKPXX:VPQQL:EPLT-AA¹⁷-LYY:DDSSNVI:EQLSN:NMVKS:AXGXH, AVPKAXX:VPQKL:EPLT-AA¹⁷-LYY:DSSNNVI:EQLSN:NMVKS:AXGXH, KVGKAXX:VPQKL:EPLT-AA¹⁷-LYY:DDMGVPT:EQLSN:EGMSVKS:XGXR, KASKAXX:VPQKL:EPLT-AA¹⁷-LYY:DKGVVTY:EQLSN:GMVKS:EXGXR, GSAGPXX:VPQKM:EPLT-AA¹⁷-LYY:NDKQQII:EQLSN:GMVKS:RXGXS, AAPASXX:VPQRL:EPLT-AA¹⁷-LYY:DAANNVV:EQLSN:DMVKS:AXGXR, STPPTXX:VPQRL:EPLT-AA¹⁷-LYY:DSANNVV:EQLSN:DMVKS:SXGXR, HVPKPXX:VPQKL:EPLT-AA¹⁷-LYY:DDSSNVI:EQLSN:NMVKS:SXGXH, RVPSTXX:VPQKT:EPLT-AA¹⁷-LYY:DNGRVLL:EQLSN:MIVKS:XGXL, ASAAPXX:VPQAL:EPLT-AA¹⁷-LYY:VGRKPKV:EQLSN:MIVKS:XKXS, ASASPXX:VPQDL:EPLT-AA¹⁷-LYY:IGKTPKI:EQLSN:MIVKS:XKXS, NDEGLEX:VPQEE:EPLT-AA¹⁷-LYY:RIKPHQGQH:EQLSN:FLVKS:KXEXR, NDEGLEX:VPQGQ:EPLT-AA¹⁷-LYY:RIKPHQGQH:EQLSN:LEVKS:QXEXR, SSVKXQP:VPQHH:EPLT-AA¹⁷-LYY:EYVRKKPKL:EQLSN:RLVKS:LEXAXA, RNVQXRP:VPQQL:EPLT-AA¹⁷-LYY:EIVRKKPIF:EQLSN:TLVKS:LAXKXE, ASASPXX:VSQDL:EPLT-AA¹⁷-LYY:IGKTPKI:EQLSN:MIVKS:XKXS, KIPKAXX:VPTEL:SNIT-AA¹⁷-QIM:DENEKVV:IGEMS:DMQHN:GXGXR, GIPEPXX:VPTKM:SNIT-AA¹⁷-QIM:DENKNVV:IGEMS:NMQHN:SXAXR, SIPKAXX:VPTEL:SNIT-AA¹⁷-QIM:DEYDKVV:IGEMS:EMQHN:GXGXR, HVTKPTX:VPTKL:SNIT-AA¹⁷-QIM:DDSSNVI:IGEMS:NMQHN:SXGXH, YVPKPXX:VPTKL:SNIT-AA¹⁷-QIM:DDSSNVI:IGEMS:NMQHN:SXGXH, TVPKPXX:VPTQL:SNIT-AA¹⁷-QIM:DDSSNVI:IGEMS:NMQHN:AXGXH, AVPKAXX:VPTKL:SNIT-AA¹⁷-QIM:DSSNNVI:IGEMS:NMQHN:AXGXH, KVGKAXX:VPTKL:SNIT-AA¹⁷-QIM:DDMGVPT:IGEMS:EGMSQHN:XGXR, KASKAXX:VPTKL:SNIT-AA¹⁷-QIM:DKGVVTY:IGEMS:GMQHN:EXGXR, GSAGPXX:VPTKM:SNIT-AA¹⁷-QIM:NDKQQII:IGEMS:GMQHN:RXGXS, AAPASXX:VPTRL:SNIT-AA¹⁷-QIM:DAANNVV:IGEMS:DMQHN:AXGXR, STPPTXX:VPTRL:SNIT-AA¹⁷-QIM:DSANNVV:IGEMS:DMQHN:SXGXR, HVPKPXX:VPTKL:SNIT-AA¹⁷-QIM:DDSSNVI:IGEMS:NMQHN:SXGXH, RVPSTXX:VPTKT:SNIT-AA¹⁷-QIM:DNGRVLL:IGEMS:MIQHN:XGXL, ASAAPXX:VPTAL:SNIT-AA¹⁷-QIM:VGRKPKV:IGEMS:MIQHN:XKXS, ASASPXX:VPTDL:SNIT-AA¹⁷-QIM:IGKTPKI:IGEMS:MIQHN:XKXS, ASASPXX:VPTDL:SNIT-AA¹⁷-QIM:VGRTPKV:IGEMS:MVQHN:XKXS, NDEGLEX:VPTGQ:SNIT-AA¹⁷-QIM:RIKPHQGQH:IGEMS:LEQHN:QXEXR, NDEGLEX:VPTEE:SNIT-AA¹⁷-QIM:RIKPHQGQH:IGEMS:FLQHN:KXEXR, SSVKXQP:VPTHH:SNIT-AA¹⁷-QIM:EYVRKKPKL:IGEMS:RLQHN:LEXAXA, RNVQXRP:VPTQL:SNIT-AA¹⁷-QIM:EIVRKKPIF:IGEMS:TLQHN:LAXKXE, KIPKAXX:VPTEL:SNIT-AA¹⁷-QIM:DENEKVV:IGEMS:DMVVE:GXGXR, GIPEPXX:VPEKM:SNIT-AA¹⁷-QIM:DENKNVV:IGEMS:NMTVE:SXAXR, SIPKAXX:VPTEL:SNIT-AA¹⁷-QIM:DEYDKVV:IGEMS:EMVVE:GXGXR, HVTKPTX:APTKL:SNIT-AA¹⁷-QIM:DDSSNVI:IGEMS:NMVVR:SXGXH, YVPKPXX:APTKL:SNIT-AA¹⁷-QIM:DDSSNVI:IGEMS:NMVVR:SXGXH, TVPKPXX:APTQL:SNIT-AA¹⁷-QIM:DDSSNVI:IGEMS:NMVVR:AXGXH, AVPKAXX:APTKL:SNIT-AA¹⁷-QIM:DSSNNVI:IGEMS:NMVVK:AXGXH, KVGKAXX:VPTKL:SNIT-AA¹⁷-QIM:DDMGVPT:IGEMS:EGMSVAE:XGXR, KASKAXX:VPTKL:SNIT-AA¹⁷-QIM:DKGVVTY:IGEMS:GMAVS:EXGXR, GSAGPXX:TPTKM:SNIT-AA¹⁷-QIM:NDKQQII:IGEMS:GMVVD:RXGXS, AAPASXX:VPARL:SNIT-AA¹⁷-QIM:DAANNVV:IGEMS:DMVVE:AXGXR, STPPTXX:VPTRL:SNIT-AA¹⁷-QIM:DSANNVV:IGEMS:DMVVE:SXGXR, HVPKPXX:APTKL:SNIT-AA¹⁷-QIM:DDSSNVI:IGEMS:NMVVR:SXGXH, RVPSTXX:APVKT:SNIT-AA¹⁷-QIM:DNGRVLL:IGEMS:MIVEE:XGXL, ASAAPXX:VPQAL:SNIT-AA¹⁷-QIM:VGRKPKV:IGEMS:MIVRS:XKXS, ASASPXX:VSQDL:SNIT-AA¹⁷-QIM:IGKTPKI:IGEMS:MIVKS:XKXS, ASASPXX:VPQDL:SNIT-AA¹⁷-QIM:VGRTPKV:IGEMS:MVVKS:XKXS, NDEGLEX:VPTGQ:SNIT-AA¹⁷-QIM:RIKPHQGQH:IGEMS:LEEHS:QXEXR, SSVKXQP:SRVHH:SNIT-AA¹⁷-QIM:EYVRKKPKL:IGEMS:RLEEH:LEXAXA, RNVQXRP:TQVQL:SNIT-AA¹⁷-QIM:EIVRKKPIF:IGEMS:TLEDH:LAXKXE, KIPKAXX:VPTEL:SNIT-AA¹⁷-QIM:DENEKVV:LGEMS:DMEHS:GXGXR, GIPEPXX:VPTKM:SNIT-AA¹⁷-QIM:DENKNVV:LGEMS:NMEHS:SXAXR, SIPKAXX:VPTEL:SNIT-AA¹⁷-QIM:DEYDKVV:LGEMS:EMEHS:GXGXR, HVTKPTX:VPTKL:SNIT-AA¹⁷-QIM:DDSSNVI:LGEMS:NMEHS:SXGXH, YVPKPXX:VPTKL:SNIT-AA¹⁷-QIM:DDSSNVI:LGEMS:NMEHS:SXGXH, TVPKPXX:VPTQL:SNIT-AA¹⁷-QIM:DDSSNVI:LGEMS:NMEHS:AXGXH, AVPKAXX:VPTKL:SNIT-AA¹⁷-QIM:DSSNNVI:LGEMS:NMEHS:AXGXH, KVGKAXX:VPTKL:SNIT-AA¹⁷-QIM:DDMGVPT:LGEMS:EGMSEHS:XGXR, KASKAXX:VPTKL:SNIT-AA¹⁷-QIM:DKGVVTY:LGEMS:GMEHS:EXGXR, GSAGPXX:VPTKM:SNIT-AA¹⁷-QIM:NDKQQII:LGEMS:GMEHS:RXGXS, AAPASXX:VPTRL:SNIT-AA¹⁷-QIM:DAANNVV:LGEMS:DMEHS:AXGXR, STPPTXX:VPTRL:SNIT-AA¹⁷-QIM:DSANNVV:LGEMS:DMEHS:SXGXR, HVPKPXX:VPTKL:SNIT-AA¹⁷-QIM:DDSSNVI:LGEMS:NMEHS:SXGXH, RVPSTXX:VPTKT:SNIT-AA¹⁷-QIM:DNGRVLL:LGEMS:MIEHS:XGXL, ASAAPXX:VPTAL:SNIT-AA¹⁷-QIM:VGRKPKV:LGEMS:MIEHS:XKXS, ASASPXX:VPTDL:SNIT-AA¹⁷-QIM:IGKTPKI:LGEMS:MIEHS:XKXS, ASASPXX:VPTDL:SNIT-AA¹⁷-QIM:VGRTPKV:LGEMS:MVEHS:XKXS, NDEGLEX:VPTEE:SNIT-AA¹⁷-QIM:RIKPHQGQH:LGEMS:FLEHS:KXEXR, SSVKXQP:VPTHH:SNIT-AA¹⁷-QIM:EYVRKKPKL:LGEMS:RLEHS:LEXAXA, RNVQXRP:VPTQL:SNIT-AA¹⁷-QIM:EIVRKKPIF:LGEMS:TLEHS:LAXKXE, KIPKAXX:VPTEL:SNIT-AA¹⁷-QIM:DENEKVV:LGEMS:DMVVE:GXGXR, GIPEPXX:VPEKM:SNIT-AA¹⁷-QIM:DENKNVV:LGEMS:NMTVE:SXAXR, SIPKAXX:VPTEL:SNIT-AA¹⁷-QIM:DEYDKVV:LGEMS:EMVVE:GXGXR, HVTKPTX:APTKL:SNIT-AA¹⁷-QIM:DDSSNVI:LGEMS:NMVVR:SXGXH, YVPKPXX:APTKL:SNIT-AA¹⁷-QIM:DDSSNVI:LGEMS:NMVVR:SXGXH, TVPKPXX:APTQL:SNIT-AA¹⁷-QIM:DDSSNVI:LGEMS:NMVVR:AXGXH, AVPKAXX:APTKL:SNIT-AA¹⁷-QIM:DSSNNVI:LGEMS:NMVVK:AXGXH, KVG KAXX:VPTKL:SNIT-AA¹⁷-QIM:DDMGVPT:LGEMS:EGMSVAE:XGXR, KASKAXX:VPTKL:SNIT-AA¹⁷-QIM:DKGVVTY:LGEMS:GMAVS:EXGXR, GSAGPXX:TPTKM:SNIT-AA¹⁷-QIM:NDKQQII:LGEMS:GMVVD:RXGXS, AAPASXX:VPARL:SNIT-AA¹⁷-QIM:DAANNVV:LGEMS:DMVVE:AXGXR, STPPTXX:VPTRL:SNIT-AA¹⁷-QIM:DSANNVV:LGEMS:DMVVE:SXGXR, HVPKPXX:APTKL:SNIT-AA¹⁷-QIM:DDSSNVI:LGEMS:NMVVR:SXGXH, RVPSTXX:APVKT:SNIT-AA¹⁷-QIM:DNGRVLL:LGEMS:MIVEE:XGXL, ASAAPXX:VPQAL:SNIT-AA¹⁷-QIM:VGRKPKV:LGEMS:MIVRS:XKXS, ASASPXX:VSQDL:SNIT-AA¹⁷-QIM:IGKTPKI:LGEMS:MIVKS:XKXS, ASASPXX:VPQDL:SNIT-AA¹⁷-QIM:VGRTPKV:LGEMS:MVVKS:XKXS, NDEGLEX:VPTEE:SNIT-AA¹⁷-QIM:RIKPHQGQH:LGEMS:FLQHN:KXEXR, SSVKXQP:SRVHH:SNIT-AA¹⁷-QIM:EYVRKKPKL:LGEMS:RLEEH:LEXAXA, RNVQXRP:TQVQL:SNIT-AA¹⁷-QIM:EIVRKKPIF:LGEMS:TLEDH:LAXKXE, KIPKAXX:SRVEL:RSVK-AA¹⁷-AKV:DENEKVV:KEVQV:DMEEH:GXGXR, GIPEPXX:SRVKM:RSVK-AA¹⁷-AKV:DENKNVV:KEVQV:NMEEH:SXAXR, SIPKAXX:SRVEL:RSVK-AA¹⁷-AKV:DEYDKVV:KEVQV:EMEEH:GXGXR, HVTKPTX:SRVKL:RSVK-AA¹⁷-AKV:DDSSNVI:KEVQV:NMEEH:SXGXH, YVPKPXX:SRVKL:RSVK-AA¹⁷-AKV:DDSSNVI:KEVQV:NMEEH:SXGXH, TVPKPXX:SRVQL:RSVK-AA¹⁷-AKV:DDSSNVI:KEVQV:NMEEH:AXGXH, AVPKAXX:SRVKL:RSVK-AA¹⁷-AKV:DSSNNVI:KEVQV:NMEEH:AXGXH, KVGKAXX:SRVKL:RSVK-AA¹⁷-AKV:DDMGVPT:KEVQV:EGMSEEH:XGXR, KASKAXX:SRVKL:RSVK-AA¹⁷-AKV:DKGVVTY:KEVQV:GMEEH:EXGXR, GSAGPXX:SRVKM:RSVK-AA¹⁷-AKV:NDKQQII:KEVQV:GMEEH:RXGXS, AAPASXX:SRVRL:RSVK-AA¹⁷-AKV:DAANNVV:KEVQV:DMEEH:AXGXR, STPPTXX:SRVRL:RSVK-AA¹⁷-AKV:DSANNVV:KEVQV:DMEEH:SXGXR, HVPKPXX:SRVKL:RSVK-AA¹⁷-AKV:DDSSNVI:KEVQV:NMEEH:SXGXH, RVPSTXX:SRVKT:RSVK-AA¹⁷-AKV:DNGRVLL:KEVQV:MIEEH:XGXL, ASAAPXX:SRVAL:RSVK-AA¹⁷-AKV:VGRKPKV:KEVQV:MIEEH:XKXS, ASASPXX:SRVDL:RSVK-AA¹⁷-AKV:IGKTPKI:KEVQV:MIEEH:XKXS, ASASPXX:SRVDL:RSVK-AA¹⁷-AKV:VGRTPKV:KEVQV:MVEEH:XKXS, NDEGLEX:SRVEE:RSVK-AA¹⁷-AKV:RIKPHQGQH:KEVQV:FLEEH:KXEXR, NDEGLEX:SRVGQ:RSVK-AA¹⁷-AKV:RIKPHQGQH:KEVQV:LEEEH:QXEXR, RNVQXRP:SRVQL:RSVK-AA¹⁷-AKV:EIVRKKPIF:KEVQV:TLEEH:LAXKXE, KIPKAXX:VPTEL:RSVK-AA¹⁷-AKV:DENEKVV:KEVQV:DMVVE:GXGXR, GIPEPXX:VPEKM:RSVK-AA¹⁷-AKV:DENKNVV:KEVQV:NMTVE:SXAXR, SIPKAXX:VPTEL:RSVK-AA¹⁷-AKV:DEYDKVV:KEVQV:EMVVE:GXGXR, HVTKPTX:APTKL:RSVK-AA¹⁷-AKV:DDSSNVI:KEVQV:NMVVR:SXGXH, YVPKPXX:APTKL:RSVK-AA¹⁷-AKV:DDSSNVI:KEVQV:NMVVR:SXGXH, TVPKPXX:APTQL:RSVK-AA¹⁷-AKV:DDSSNVI:KEVQV:NMVVR:AXGXH, AVPKAXX:APTKL:RSVK-AA¹⁷-AKV:DSSNNVI:KEVQV:NMVVK:AXGXH, KVGKAXX:VPTKL:RSVK-AA¹⁷-AKV:DDMGVPT:KEVQV:EGMSVAE:XGXR, KASKAXX:VPTKL:RSVK-AA¹⁷-AKV:DKGVVTY:KEVQV:GMAVS:EXGXR, GSAG PXX:TPTKM:RSVK-AA¹⁷-AKV:NDKQQII:KEVQV:GMVVD:RXGXS, AAPASXX:VPARL:RSVK-AA¹⁷-AKV:DAANNVV:KEVQV:DMVVE:AXGXR, STPPTXX:VPTRL:RSVK-AA¹⁷-AKV:DSANNVV:KEVQV:DMVVE:SXGXR, HVPKPXX:APTKL:RSVK-AA¹⁷-AKV:DDSSNVI:KEVQV:NMVVR:SXGXH, RVPSTXX:APVKT:RSVK-AA¹⁷-AKV:DNGRVLL:KEVQV:MIVEE:XGXL, ASAAPXX:VPQAL:RSVK-AA¹⁷-AKV:VGRKPKV:KEVQV:MIVRS:XKXS, ASASPXX:VSQDL:RSVK-AA¹⁷-AKV:IGKTPKI:KEVQV:MIVKS:XKXS, ASASPXX:VPQDL:RSVK-AA¹⁷-AKV:VGRTPKV:KEVQV:MVVKS:XKXS, NDEGLEX:VPTEE:RSVK-AA¹⁷-AKV:RIKPHQGQH:KEVQV:FLQHN:KXEXR, NDEGLEX:VPTGQ:RSVK-AA¹⁷-AKV:RIKPHQGQH:KEVQV:LEEHS:QXEXR, RNVQXRP:TQVQL:RSVK-AA¹⁷-AKV:EIVRKKPIF:KEVQV:TLEDH:LAXKXE, KI PKAXX:TQVEL:RPVQ-AA¹⁷-RKI:DENEKVV:KKATV:DMEDH:GXGXR, GIPEPXX:TQVKM:RPVQ-AA¹⁷-RKI:DENKNVV:KKATV:NMEDH:SXAXR, SIPKAXX:TQVEL:RPVQ-AA¹⁷-RKI:DEYDKVV:KKATV:EMEDH:GXGXR, HVTKPTX:TQVKL:RPVQ-AA¹⁷-RKI:DDSSNVI:KKATV:NMEDH:SXGXH, YVPKPXX:TQVKL:IRPVQ-AA¹⁷-RKI:DDSSNVI:KKATV:NMEDH:SXGXH, TVPKPXX:TQVQL:RPVQ-AA¹⁷-RKI:DDSSNVI:KKATV:NMEDH:AXGXH, AVPKAXX:TQVKL:RPVQ-AA¹⁷-RKI:DSSNNVI:KKATV:NMEDH:AXGXH, KVGKAXX:TQVKL:RPVQ-AA¹⁷-RKI:DDMGVPT:KKATV:EGMSEDH:XGXR, KASKAXX:TQVKL:RPVQ-AA¹⁷-RKI:DKGVVTY:KKATV:GMEDH:EXGXR, GSAGPXX:TQVKM:RPVQ-AA¹⁷-RKI:NDKQQII:KKATV:GMEDH:RXGXS, AAPASXX:TQVRL:RPVQ-AA¹⁷-RKI:DAANNVV:KKATV:DMEDH:AXGXR, STPPTXX:TQVRL:RPVQ-AA¹⁷-RKI:DSANNVV:KKATV:DMEDH:SXGXR, HVPKPXX:TQVKL:RPVQ-AA¹⁷-RKI:DDSSNVI:KKATV:NMEDH:SXGXH, RVPSTXX:TQVKT:RPVQ-AA¹⁷-RKI:DNGRVLL:KKATV:MIEDH:XGXL, ASAAPXX:TQVAL:RPVQ-AA¹⁷-RKI:VGRKPKV:KKATV:MIEDH:XKXS, ASASPXX:TQVDL:RPVQ-AA¹⁷-RKI:IGKTPKI:KKATV:MIEDH:XKXS, ASASPXX:TQVDL:RPVQ-AA¹⁷-RKI:VGRTPKV:KKATV:MVEDH:XKXS, NDEGLEX:TQVEE:RPVQ-AA¹⁷-RKI:RIKPHQGQH:KKATV:FLEDH:KXEXR, NDEGLEX:TQVGQ:RPVQ-AA¹⁷-RKI:RIKPHQGQH:KKATV:LEEDH:QXEXR, SSVKXQP:TQVHH:RPVQ-AA¹⁷-RKI:EYVRKKPKL:KKATV:RLEDH:LEXAXA, KIPKAXX:VPTEL:RPVQ-AA¹⁷-RKI:DENEKVV:KKATV:DMVVE:GXGXR, GIPEPXX:VPEKM:RPVQ-AA¹⁷-RKI:DENKNVV:KKATV:NMTVE:SXAXR, SIPKAXX:VPTEL:RPVQ-AA¹⁷-RKI:DEYDKVV:KKATV:EMVVE:GXGXR, HVTKPTX:APTKL:RPVQ-AA¹⁷-RKI:DDSSNVI:KKATV:NMVVR:SXGXH, YVPKPXX:APTKL:RPVQ-AA¹⁷-RKI:DDSSNVI:KKATV:NMVVR:SXGXH, TVPKPXX:APTQL:RPVQ-AA¹⁷-RKI:DDSSNVI:KKATV:NMVVR:AXGXH, AVPKAXX:APTKL:RPVQ-AA¹⁷-RKI:DSSNNVI:KKATV:NMVVK:AXGXH, KVGKAXX:VPTKL:RPVQ-AA¹⁷-RKI:DDMGVPT:KKATV:EGMSVAE:XGXR, KASKAXX:VPTKL:RPVQ-AA¹⁷-RKI:DKGVVTY:KKATV:GMAVS:EXGXR, GSAGPXX:TPTKM:RPVQ-AA¹⁷-RKI:NDKQQII:KKATV:GMVVD:RXGXS, AAPASXX:VPARL:RPVQ-AA¹⁷-RKI:DAANNVV:KKATV:DMVVE:AXGXR, STPPTXX:VPTRL:RPVQ-AA¹⁷-RKI:DSANNVV:KKATV:DMVVE:SXGXR, HVPKPXX:APTKL:RPVQ-AA¹⁷-RKI:DDSSNVI:KKATV:NMVVR:SXGXH, RVPSTXX:APVKT:RPVQ-AA¹⁷-RKI:DNGRVLL:KKATV:MIVEE:XGXL, ASAAPXX:VPQAL:RPVQ-AA¹⁷-RKI:VGRKPKV:KKATV:MIVRS:XKXS, ASASPXX:VSQDL:RPVQ-AA¹⁷-RKI:IGKTPKI:KKATV:MIVKS:XKXS, ASASPXX:VPQDL:RPVQ-AA¹⁷-RKI:VGRTPKV:KKATV:MVVKS:XKXS, NDEGLEX:VPTEE:RPVQ-AA¹⁷-RKI:RIKPHQGQH:KKATV:FLQHN:KXEXR, NDEGLEX:VPTGQ:RPVQ-AA¹⁷-RKI:RIKPHQGQH:KKATV:LEEHS:QXEXR and SSVKXQP:SRVHH:RPVQ-AA¹⁷-RKI:EYVRKKPKL:KKATV:RLEEH:LEXAXA; and wherein AA¹⁷ is selected from the group consisting of G, A, V, L, I, P, F, M, W, T and S (in particular is selected from the group consisting of M, I, L, V and T). More particularly, the heptuplet PEP7:PEP5:PEP12:LINKER:PEP2:PEP6:PEP8 is selected from the group consisting of GIPEPXX:VPTKM:SAIS-AA¹⁷-LYL:DENKNVV:LKNYQ:NMVVE:SXAXR, HVTKPTX:VPTKL:SAIS-AA¹⁷-LYL:DDSSNVI:LKNYQ:NMVVE:SXGXH, YVPKPXX:VPTKL:SAIS-AA¹⁷-LYL:DDSSNVI:LKNYQ:NMVVE:SXGXH, TVPKPXX:VPTQL:SAIS-AA¹⁷-LYL:DDSSNVI:LKNYQ:NMVVE:AXGXH, AVPKAXX:VPTKL:SAIS-AA¹⁷-LYL:DSSNNVI:LKNYQ:NMVVE:AXGXH, KVGKAXX:VPTKL:SAIS-AA¹⁷-LYL:DDMGVPT:LKNYQ:EGMSVVE:XGXR, KASKAXX:VPTKL:SAIS-AA¹⁷-LYL:DKGVVTY:LKNYQ:GMVVE:EXGXR, GSAGPXX:VPTKM:SAIS-AA¹⁷-LYL:NDKQQII:LKNYQ:GMVVE:RXGXS, AAPASXX:VPTRL:SAIS-AA¹⁷-LYL:DAANNVV:LKNYQ:DMVVE:AXGXR, STPPTXX:VPTRL:SAIS-AA¹⁷-LYL:DSANNVV:LKNYQ:DMVVE:SXGXR, HVPKPXX:VPTKL:SAIS-AA¹⁷-LYL:DDSSNVI:LKNYQ:NMVVE:SXGXH, RVPSTXX:VPTKT:SAIS-AA¹⁷-LYL:DNGRVLL:LKNYQ:MIVVE:XGXL, ASAAPXX:VPTAL:SAIS-AA¹⁷-LYL:VGRKPKV:LKNYQ:MIVVE:XKXS, ASASPXX:VPTDL:SAIS-AA¹⁷-LYL:IGKTPKI:LKNYQ:MIVVE:XKXS, ASASPXX:VPTDL:SAIS-AA¹⁷-LYL:VGRTPKV:LKNYQ:MVVVE:XKXS, GIPEPXX:VPEKM:SAIS-AA¹⁷-LYL:DENKNVV:LKNYQ:NMTVE:SXAXR, HVTKPTX:APTKL:SAIS-AA¹⁷-LYL:DDSSNVI:LKNYQ:NMVVR:SXGXH, YVPKPXX:APTKL:SAIS-AA¹⁷-LYL:DDSSNVI:LKNYQ:NMVVR:SXGXH, TVPKPXX:APTQL:SAIS-AA¹⁷-LYL:DDSSNVI:LKNYQ:NMVVR:AXGXH, AVPKAXX:APTKL:SAIS-AA¹⁷-LYL:DSSNNVI:LKNYQ:NMVVK:AXGXH, KVGKAXX:VPTKL:SAIS-AA¹⁷-LYL:DDMGVPT:LKNYQ:EGMSVAE:XGXR, KASKAXX:VPTKL:SAIS-AA¹⁷-LYL:DKGVVTY:LKNYQ:GMAVS:EXGXR, GSAGPXX:TPTKM:SAIS-AA¹⁷-LYL:NDKQQII:LKNYQ:GMVVD:RXGXS, AAPASXX:VPARL:SAIS-AA¹⁷-LYL:DAANNVV:LKNYQ:DMVVE:AXGXR, HVPKPXX:APTKL:SAIS-AA¹⁷-LYL:DDSSNVI:LKNYQ:NMVVR:SXGXH, RVPSTXX:APVKT:SAIS-AA¹⁷-LYL:DNGRVLL:LKNYQ:MIVEE:XGXL, ASAAPXX:VPQAL:SAIS-AA¹⁷-LYL:VGRKPKV:LKNYQ:MIVRS:XKXS, ASASPXX:VSQDL:SAIS-AA¹⁷-LYL:IGKTPKI:LKNYQ:MIVKS:XKXS, ASASPXX:VPQDL:SAIS-AA¹⁷-LYL:VGRTPKV:LKNYQ:MVVKS:XKXS, NDEGLEX:VPTEE:SAIS-AA¹⁷-LYL:RIKPHQGQH:LKNYQ:FLQHN:KXEXR, NDEGLEX:VPTGQ:SAIS-AA¹⁷-LYL:RIKPHQGQH:LKNYQ:LEEHS:QXEXR, SSVKXQP:SRVHH:SAIS-AA¹⁷-LYL:EYVRKKPKL:LKNYQ:RLEEH:LEXAXA, RNVQXRP:TQVQL:SAIS-AA¹⁷-LYL:EIVRKKPIF:LKNYQ:TLEDH:LAXKXE, KIPKAXX:VPEEL:SSLS-AA¹⁷-LFF:DENEKVV:LKVYP:DMTVE:GXGXR, SIPKAXX:VPEEL:SSLS-AA¹⁷-LFF:DEYDKVV:LKVYP:EMTVE:GXGXR, HVTKPTX:VPEKL:SSLS-AA¹⁷-LFF:DDSSNVI:LKVYP:NMTVE:SXGXH, YVPKPXX:VPEKL:SSLS-AA¹⁷-LFF:DDSSNVI:LKVYP:NMTVE:SXGXH, TVPKPXX:VPEQL:SSLS-AA¹⁷-LFF:DDSSNVI:LKVYP:NMTVE:AXGXH, AVPKAXX:VPEKL:SSLS-AA¹⁷-LFF:DSSNNVI:LKVYP:NMTVE:AXGXH, KVGKAXX:VPEKL:SSLS-AA¹⁷-LFF:DDMGVPT:LKVYP:EGMSTVE:XGXR, KASKAXX:VPEKL:SSLS-AA¹⁷-LFF:DKGVVTY:LKVYP:GMTVE:EXGXR, GSAGPXX:VPEKM:SSLS-AA¹⁷-LFF:NDKQQII:LKVYP:GMTVE:RXGXS, AAPASXX:VPERL:SSLS-AA¹⁷-LFF:DAANNVV:LKVYP:DMTVE:AXGXR, STPPTXX:VPERL:SSLS-AA¹⁷-LFF:DSANNVV:LKVYP:DMTVE:SXGXR, HVPKPXX:VPEKL:SSLS-AA¹⁷-LFF:DDSSNVI:LKVYP:NMTVE:SXGXH, RVPSTXX:VPEKT:SSLS-AA¹⁷-LFF:DNGRVLL:LKVYP:MITVE:XGXL, ASAAPXX:VPEAL:SSLS-AA¹⁷-LFF:VGRKPKV:LKVYP:MITVE:XKXS, ASASPXX:VPED L:SSLS-AA¹⁷-LFF:IGKTPKI:LKVYP:MITVE:XKXS, ASASPXX:VPEDL:SSLS-AA¹⁷-LFF:VGRTPKV:LKVYP:MVTVE:XKXS, KIPKAXX:VPTEL:SSLS-AA¹⁷-LFF:DENEKVV:LKVYP:DMVVE:GXGXR, SIPKAXX:VPTEL:SSLS-AA¹⁷-LFF:DEYDKVV:LKVYP:EMVVE:GXGXR, HVTKPTX:APTKL:SSLS-AA¹⁷-LFF:DDSSNVI:LKVYP:NMVVR:SXGXH, YVPKPXX:APTKL:SSLS-AA¹⁷-LFF:DDSSNVI:LKVYP:NMVVR:SXGXH, TVPKPXX:APTQL:SSLS-AA¹⁷-LFF:DDSSNVI:LKVYP:NMVVR:AXGXH, AVPKAXX:APTKL:SSLS-AA¹⁷-LFF:DSSNNVI:LKVYP:NMVVK:AXGXH, KVGKAXX:VPTKL:SSLS-AA¹⁷-LFF:DDMGVPT:LKVYP:EGMSVAE:XGXR, KASKAXX:VPTKL:SSLS-AA¹⁷-LFF:DKGVVTY:LKVYP:GMAVS:EXGXR, GSAGPXX:TPTKM:SSLS-AA¹⁷-LFF:NDKQQII:LKVYP:GMVVD:RXGXS, AAPASXX:VPARL:SSLS-AA¹⁷-LFF:DAANNVV:LKVYP:DMVVE:AXGXR, STPPTXX:VPTRL:SSLS-AA¹⁷-LFF:DSANNVV:LKVYP:DMVVE:SXGXR, HVPKPXX:APTKL:SSLS-AA¹⁷-LFF:DDSSNVI:LKVYP:NMVVR:SXGXH, RVPSTXX:APVKT:SSLS-AA¹⁷-LFF:DNGRVLL:LKVYP:MIVEE:XGXL, ASAAPXX:VPQAL:SSLS-AA¹⁷-LFF:VGRKPKV:LKVYP:MIVRS:XKXS, ASASPXX:VSQD L:SSLS-AA¹⁷-LFF:IGKTPKI:LKVYP:MIVKS:XKXS, ASASPXX:VPQDL:SSLS-AA¹⁷-LFF:VGRTPKV:LKVYP:MVVKS:XKXS, NDEGLEX:VPTEE:SSLS-AA¹⁷-LFF:RIKPHQGQH:LKVYP:FLQHN:KXEXR, NDEGLEX:VPTGQ:SSLS-AA¹⁷-LFF:RIKPHQGQH:LKVYP:LEEHS:QXEXR, SSVKXQP:SRVHH:SSLS-AA¹⁷-LFF:EYVRKKPKL:LKVYP:RLEEH:LEXAXA, RNVQXRP:TQVQL:SSLS-AA¹⁷-LFF:EIVRKKPIF:LKVYP:TLEDH:LAXKXE, KIPKAXX:APTEL:NAIS-AA¹⁷-LYF:DENEKVV:LKKYR:DMVVR:GXGXR, GIPEPXX:APTKM:NAIS-AA¹⁷-LYF:DENKNVV:LKKYR:NMVVR:SXAXR, SIPKAXX:APTEL:NAIS-AA¹⁷-LYF:DEYDKVV:LKKYR:EMVVR:GXGXR, AVPKAXX:APTKL:NAIS-AA¹⁷-LYF:DSSNNVI:LKKYR:NMVVR:AXGXH, KVGKAXX:APTKL:NAIS-AA¹⁷-LYF:DDMGVPT:LKKYR:EGMSVVR:XGXR, KASKAXX:APTKL:NAIS-AA¹⁷-LYF:DKGVVTY:LKKYR:GMVVR:EXGXR, GSAGPXX:APTKM:NAIS-AA¹⁷-LYF:NDKQQII:LKKYR:GMVVR:RXGXS, AAPASXX:APTRL:NAIS-AA¹⁷-LYF:DAANNVV:LKKYR:DMVVR:AXGXR, STPPTXX:APTRL:NAIS-AA¹⁷-LYF:DSANNVV:LKKYR:DMVVR:SXGXR, RVPSTXX:APTKT:NAIS-AA¹⁷-LYF:DNGRVLL:LKKYR:MIVVR:XGXL, ASAAPXX:APTAL:NAIS-AA¹⁷-LYF:VGRKPKV:LKKYR:MIVVR:XKXS, ASASPXX:APTDL:NAIS-AA¹⁷-LYF:IGKTPKI:LKKYR:MIVVR:XKXS, ASASPXX:APTDL:NAIS-AA¹⁷-LYF:VGRTPKV:LKKYR:MVVVR:XKXS, KIPKAXX:VPTEL:NAIS-AA¹⁷-LYF:DENEKVV:LKKYR:DMVVE:GXGXR, GIPEPXX:VPEKM:NAIS-AA¹⁷-LYF:DENKNVV:LKKYR:NMTVE:SXAXR, SIPKAXX:VPTEL:NAIS-AA¹⁷-LYF:DEYDKVV:LKKYR:EMVVE:GXGXR, AVPKAXX:APTKL:NAIS-AA¹⁷-LYF:DSSNNVI:LKKYR:NMVVK:AXGXH, KVGKAXX:VPTKL:NAIS-AA¹⁷-LYF:DDMGVPT:LKKYR:EGMSVAE:XGXR, KASKAXX:VPTKL:NAIS-AA¹⁷-LYF:DKGVVTY:LKKYR:GMAVS:EXGXR, GSAGPXX:TPTKM:NAIS-AA¹⁷-LYF:NDKQQII:LKKYR:GMVVD:RXGXS, AAPASXX:VPARL:NAIS-AA¹⁷-LYF:DAANNVV:LKKYR:DMVVE:AXGXR, STPPTXX:VPTRL:NAIS-AA¹⁷-LYF:DSANNVV:LKKYR:DMVVE:SXGXR, RVPSTXX:APVKT:NAIS-AA¹⁷-LYF:DNGRVLL:LKKYR:MIVEE:XGXL, ASAAPXX:VPQAL:NAIS-AA¹⁷-LYF:VGRKPKV:LKKYR:MIVRS:XKXS, ASASPXX:VSQDL:NAIS-AA¹⁷-LYF:IGKTPKI:LKKYR:MIVKS:XKXS, ASASPXX:VPQDL:NAIS-AA¹⁷-LYF:VGRTPKV:LKKYR:MVVKS:XKXS, NDEGLEX:VPTEE:NAIS-AA¹⁷-LYF:RIKPHQGQH:LKKYR:FLQHN:KXEXR, NDEGLEX:VPTGQ:NAIS-AA¹⁷-LYF:RIKPHQGQH:LKKYR:LEEHS:QXEXR, SSVKXQP:SRVHH:NAIS-AA¹⁷-LYF:EYVRKKPKL:LKK YR:RLEEH:LEXAXA, RNVQXRP:TQVQL:NAIS-AA¹⁷-LYF:EIVRKKPIF:LKKYR:TLEDH:LAXKXE, KIPKAXX:APTEL:SATS-AA¹⁷-LYY:DENEKVV:LRKHR:DMVVK:GXGXR, GIPEPXX:APTKM:SATS-AA¹⁷-LYY:DENKNVV:LRKHR:NMVVK:SXAXR, SIPKAXX:APTEL:SATS-AA¹⁷-LYY:DEYDKVV:LRKHR:EMVVK:GXGXR, HVTKPTX:APTKL:SATS-AA¹⁷-LYY:DDSSNVI:LRKHR:NMVVK:SXGXH, YVPKPXX:APTKL:SATS-AA¹⁷-LYY:DDSSNVI:LRKHR:NMVVK:SXGXH, TVPKPXX:APTQL:SATS-AA¹⁷-LYY:DDSSNVI:LRKHR:NMVVK:AXGXH, KVGKAXX:APTKL:SATS-AA¹⁷-LYY:DDMGVPT:LRKHR:EGMSVVK:XGXR, KASKAXX:APTKL:SATS-AA¹⁷-LYY:DKGVVTY:LRKHR:GMVVK:EXGXR, GSAGPXX:APTKM:SATS-AA¹⁷-LYY:NDKQQII:LRKHR:GMVVK:RXGXS, AAPASXX:APTRL:SATS-AA¹⁷-LYY:DAANNVV:LRKHR:DMVVK:AXGXR, STPPTXX:APTRL:SATS-AA¹⁷-LYY:DSANNVV:LRKHR:DMVVK:SXGXR, HVPKPXX:APTKL:SATS-AA¹⁷-LYY:DDSSNVI:LRKHR:NMVVK:SXGXH, RVPSTXX:APTKT:SATS-AA¹⁷-LYY:DNGRVLL:LRKHR:MIVVK:XGXL, ASAAPXX:APTAL:SATS-AA¹⁷-LYY:VGRKPKV:LRKHR:MIVVK:XKXS, ASASPXX:APTDL:SATS-AA¹⁷-LYY:IGKTPKI:LRKHR:MIVVK:XKXS, ASASPXX:APTDL:SATS-AA¹⁷-LYY:VGRTPKV:LRKHR: MVVVK:XKXS, KIPKAXX:VPTEL:SATS-AA¹⁷-LYY:DENEKVV:LRKHR:DMVVE:GXGXR, GIPEPXX:VPEKM:SATS-AA¹⁷-LYY:DENKNVV:LRKHR:NMTVE:SXAXR, SIPKAXX:VPTEL:SATS-AA¹⁷-LYY:DEYDKVV:LRKHR:EMVVE:GXGXR, HVTKPTX:APTKL:SATS-AA¹⁷-LYY:DDSSNVI:LRKHR:NMVVR:SXGXH, YVPKPXX:APTKL:SATS-AA¹⁷-LYY:DDSSNVI:LRKHR:NMVVR:SXGXH, TVPKPXX:APTQL:SATS-AA¹⁷-LYY:DDSSNVI:LRKHR:NMVVR:AXGXH, KVGKAXX:VPTKL:SATS-AA¹⁷-LYY:DDMGVPT:LRKHR:EGMSVAE:XGXR, KASKAXX:VPTKL:SATS-AA¹⁷-LYY:DKGVVTY:LRKHR:GMAVS:EXGXR, GSAGPXX:TPTKM:SATS-AA¹⁷-LYY:NDKQQII:LRKHR:GMVVD:RXGXS, AAPASXX:VPARL:SATS-AA¹⁷-LYY:DAANNVV:LRKHR:DMVVE:AXGXR, STPPTXX:VPTRL:SATS-AA¹⁷-LYY:DSANNVV:LRKHR:DMVVE:SXGXR, HVPKPXX:APTKL:SATS-AA¹⁷-LYY:DDSSNVI:LRKHR:NMVVR:SXGXH, RVPSTXX:APVKT:SATS-AA¹⁷-LYY:DNGRVLL:LRKHR:MIVEE:XGXL, ASAAPXX:VPQAL:SATS-AA¹⁷-LYY:VGRKPKV:LRKHR:MIVRS:XKXS, ASASPXX:VSQDL:SATS-AA¹⁷-LYY:IGKTPKI:LRKHR:MIVKS:XKXS, ASASPXX:VPQDL:SATS-AA¹⁷-LYY:VGRTPKV:LRKHR:MVVKS:XKXS, NDEGLEX:VPTEE:SATS-AA¹⁷-LYY:RIKPHQGQH:LRKHR:FLQHN:KXEXR, NDEGLEX:VPTGQ:SATS-AA¹⁷-LYY:RIKPHQGQH:LRKHR:LEEHS:QXEXR, SSVKXQP:SRVHH:SATS-AA¹⁷-LYY:EYVRKKPKL:LRKHR:RLEEH:LEXAXA, RNVQXRP:TQVQL:SATS-AA¹⁷-LYY:EIVRKKPIF:LRKHR:TLEDH:LAXKXE, KIPKAXX:VPTEL:SPIS-AA¹⁷-LYK:DENEKVV:LKYHY:DMVAE:GXGXR, GIPEPXX:VPTKM:SPIS-AA¹⁷-LYK:DENKNVV:LKYHY:NMVAE:SXAXR, SIPKAXX:VPTEL:SPIS-AA¹⁷-LYK:DEYDKVV:LKYHY:EMVAE:GXGXR, HVTKPTX:VPTKL:SPIS-AA¹⁷-LYK:DDSSNVI:LKYHY:NMVAE:SXGXH, YVPKPXX:VPTKL:SPIS-AA¹⁷-LYK:DDSSNVI:LKYHY:NMVAE:SXGXH, TVPKPXX:VPTQL:SPIS-AA¹⁷-LYK:DDSSNVI:LKYHY:NMVAE:AXGXH, AVPKAXX:VPTKL:SPIS-AA¹⁷-LYK:DSSNNVI:LKYHY:NMVAE:AXGXH, KASKAXX:VPTKL:SPIS-AA¹⁷-LYK:DKGVVTY:LKYHY:GMVAE:EXGXR, GSAGPXX:VPTKM:SPIS-AA¹⁷-LYK:NDKQQII:LKYHY:GMVAE:RXGXS, AAPASXX:VPTRL:SPIS-AA¹⁷-LYK:DAANNVV:LKYHY:DMVAE:AXGXR, STPPTXX:VPTRL:SPIS-AA¹⁷-LYK:DSANNVV:LKYHY:DMVAE:SXGXR, HVPKPXX:VPTKL:SPIS-AA¹⁷-LYK:DDSSNVI:LKYHY:NMVAE:SXGXH, RVPSTXX:VPTKT:SPIS-AA¹⁷-LYK:DNGRVLL:LKYHY:MIVAE:XGXL, ASAAPXX:VPTAL:SPIS-AA¹⁷-LYK:VGRKPKV:LKYHY:MIVAE:XKXS, ASASPXX:VPTDL:SPIS-AA¹⁷-LYK:IGKTPKI:LKYHY:MIVAE:XKXS, ASASPXX:VPTDL:SPIS-AA¹⁷-LYK:VGRTPKV:LKYHY:MVVAE:XKXS, KIPKAXX:VPTEL:SPIS-AA¹⁷-LYK:DENEKVV:LKYHY:DMVVE:GXGXR, GIPEPXX:VPEKM:SPIS-AA¹⁷-LYK:DENKNVV:LKYHY:NMTVE:SXAXR, SIPKAXX:VPTEL:SPIS-AA¹⁷-LYK:DEYDKVV:LKYHY:EMVVE:GXGXR, HVTKPTX:APTKL:SPIS-AA¹⁷-LYK:DDSSNVI:LKYHY:NMVVR:SXGXH, YVPKPXX:APTKL:SPIS-AA¹⁷-LYK:DDSSNVI:LKYHY:NMVVR:SXGXH, TVPKPXX:APTQL:SPIS-AA¹⁷-LYK:DDSSNVI:LKYHY:NMVVR:AXGXH, AVPKAXX:APTKL:SPIS-AA⁷-LYK:DSSNNVI:LKYHY:NMVVK:AXGXH, KASKAXX:VPTKL:SPIS-AA¹⁷-LYK:DKGVVTY:LKYHY:GMAVS:EXGXR, GSAGPXX:TPTKM:SPIS-AA¹⁷-LYK:NDKQQII:LKYHY:GMVVD:RXGXS, AAPASXX:VPARL:SPIS-AA¹⁷-LYK:DAANNVV:LKYHY:DMVVE:AXGXR, STPPTXX:VPTRL:SPIS-AA¹⁷-LYK:DSANNVV:LKYHY:DMVVE:SXGXR, HVPKPXX:APTKL:SPIS-AA¹⁷-LYK:DDSSNVI:LKYHY:NMVVR:SXGXH, RVPSTXX:APVKT:SPIS-AA¹⁷-LYK:DNGRVLL:LKYHY:MIVEE:XGXL, ASAAPXX:VPQAL:SPIS-AA¹⁷-LYK:VGRKPKV:LKYHY:MIVRS:XKXS, ASASPXX:VSQDL:SPIS-AA¹⁷-LYK:IGKTPKI:LKYHY:MIVKS:XKXS, ASASPXX:VPQDL:SPIS-AA¹⁷-LYK:VGRTPKV:LKYHY:MVVKS:XKXS, NDEGLEX:VPTEE:SPIS-AA¹⁷-LYK:RIKPHQGQH:LKYHY:FLQHN:KXEXR, NDEGLEX:VPTGQ:SPIS-AA¹⁷-LYK:RIKPHQGQH:LKYHY:LEEHS:QXEXR, SSVKXQP:SRVHH:SPIS-AA¹⁷-LYK:EYVRKKPKL:LKYHY:RLEEH:LEXAXA, RNVQXRP:TQVQL:SPIS-AA¹⁷-LYK:EIVRKKPIF:LKYHY:TLEDH:LAXKXE, KIPKAXX:VPTEL:EPIS-AA¹⁷-LYL:DENEKVV:KFKYE:DMAVS:GXGXR, GIPEPXX:VPTKM:EPIS-AA¹⁷-LYL:DENKNVV:KFKYE:NMAVS:SXAXR, SIPKAXX:VPTEL:EPIS-AA¹⁷-LYL:DEYDKVV:KFKYE:EMAVS:GXGXR, HVTKPTX:VPTKL:EPIS-AA¹⁷-LYL:DDSSNVI:KFKYE:NMAVS:SXGXH, YVPKPXX:VPTKL:EPIS-AA¹⁷-LYL:DDSSNVI:KFKYE:NMAVS:SXGXH, TVPKPXX:VPTQL:EPIS-AA¹⁷-LYL:DDSSNVI:KFKYE:NMAVS:AXGXH, AVPKAXX:VPTKL:EPIS-AA¹⁷-LYL:DSSNNVI:KFKYE:NMAVS:AXGXH, KVGKAXX:VPTKL:EPIS-AA¹⁷-LYL:DDMGVPT:KFKYE:EGMSAVS:XGXR, GSAGPXX:VPTKM:EPIS-AA¹⁷-LYL:NDKQQII:KFKYE:GMAVS:RXGXS, AAPASXX:VPTRL:EPIS-AA¹⁷-LYL:DAANNVV:KFKYE:DMAVS:AXGXR, STPPTXX:VPTRL:EPIS-AA¹⁷-LYL:DSANNVV:KFKYE:DMAVS:SXGXR, HVPKPXX:VPTKL:EPIS-AA¹⁷-LYL:DDSSNVI:KFKYE:NMAVS:SXGXH, RVPSTXX:VPTKT:EPIS-AA¹⁷-LYL:DNGRVLL:KFKYE:MIAVS:XGXL, ASAAPXX:VPTAL:EPIS-AA¹⁷-LYL:VGRKPKV:KFKYE:MIAVS:XKXS, ASASPXX:VPTDL:EPIS-AA¹⁷-LYL:IGKTPKI:KFKYE:MIAVS:XKXS, ASASPXX:VPTDL:EPIS-AA¹⁷-LYL:VGRTPKV:KFKYE:MVAVS:XKXS, KIPKAXX:VPTEL:EPIS-AA¹⁷-LYL:DENEKVV:KFKYE:DMVVE:GXGXR, GIPEPXX:VPEKM:EPIS-AA¹⁷-LYL:DENKNVV:KFKYE:NMTVE:SXAXR, SIPKAXX:VPTEL:EPIS-AA¹⁷-LYL:DEYDKVV:KFKYE:EMVVE:GXGXR, HVTKPTX:APTKL:EPIS-AA¹⁷-LYL:DDSSNVI:KFKYE:NMVVR:SXGXH, YVPKPXX:APTKL:EPIS-AA¹⁷-LYL:DDSSNVI:KFKYE:NMVVR:SXGXH, TVPKPXX:APTQL:EPIS-AA¹⁷-LYL:DDSSNVI:KFKYE:NMVVR:AXGXH, AVPKAXX:APTKL:EPIS-AA¹⁷-LYL:DSSNNVI:KFKYE:NMVVK:AXGXH, KVGKAXX:VPTKL:EPIS-AA¹⁷-LYL:DDMGVPT:KFKYE:EGMSVAE:XGXR, GSAGPXX:TPTKM:EPIS-AA¹⁷-LYL:NDKQQII:KFKYE:GMVVD:RXGXS, AAPASXX:VPARL:EPIS-AA¹⁷-LYL:DAANNVV:KFKYE:DMVVE:AXGXR, STPPTXX:VPTRL:EPIS-AA¹⁷-LYL:DSANNVV:KFKYE:DMVVE:SXGXR, HVPKPXX:APTKL:EPIS-AA¹⁷-LYL:DDSSNVI:KFKYE:NMVVR:SXGXH, RVPSTXX:APVKT:EPIS-AA¹⁷-LYL:DNGRVLL:KFKYE:MIVEE:XGXL, ASAAPXX:VPQAL:EPIS-AA¹⁷-LYL:VGRKPKV:KFKYE:MIVRS:XKXS, ASASPXX:VSQDL:EPIS-AA¹⁷-LYL:IGKTPKI:KFKYE:MIVKS:XKXS, ASASPXX:VPQDL:EPIS-AA¹⁷-LYL:VGRTPKV:KFKYE:MVVKS:XKXS, NDEGLEX:VPTEE:EPIS-AA¹⁷-LYL:RIKPHQGQH:KFKYE:FLQHN:KXEXR, NDEGLEX:VPTGQ:EPIS-AA¹⁷-LYL:RIKPHQGQH:KFKYE:LEEHS:QXEXR, SSVKXQP:SRVHH:EPIS-AA¹⁷-LYL:EYVRKKPKL:KFKYE:RLEEH:LEXAXA, RNVQXRP:TQVQL:EPIS-AA¹⁷-LYL:EIVRKKPIF:KFKYE:TLEDH:LAXKXE, KIPKAXX:TPTEL:SPIN-AA¹⁷-LYF:DENEKVV:YGKIP:DMVVD:GXGXR, GIPEPXX:TPTKM:SPIN-AA¹⁷-LYF:DENKNVV:YGKIP:NMVVD:SXAXR, SIPKAXX:TPTEL:SPIN-AA¹⁷-LYF:DEYDKVV:YGKIP:EMVVD:GXGXR, HVTKPTX:TPTKL:SPIN-AA¹⁷-LYF:DDSSNVI:YGKIP:NMVVD:SXGXH, YVPKPXX:TPTKL:SPIN-AA¹⁷-LYF:DDSSNVI:YGKIP:NMVVD:SXGXH, TVPKPXX:TPTQL:SPIN-AA¹⁷-LYF:DDSSNVI:YGKIP:NMVVD:AXGXH, AVPKAXX:TPTKL:SPIN-AA¹⁷-LYF:DSSNNVI:YGKIP:NMVVD:AXGXH, KVGKAXX:TPTKL:SPIN-AA¹⁷-LYF:DDMGVPT:YGKIP:EGMSVVD:XGXR, KASKAXX:TPTKL:SPIN-AA¹⁷-LYF:DKGVVTY:YGKIP:GMVVD:EXGXR, AAPASXX:TPTRL:SPIN-AA¹⁷-LYF:DAANNVV:YGKIP:DMVVD:AXGXR, STPPTXX:TPTRL:SPIN-AA¹⁷-LYF:DSANNVV:YGKIP:DMVVD:SXGXR, HVPKPXX:TPTKL:SPIN-AA¹⁷-LYF:DDSSNVI:YGKIP:NMVVD:SXGXH, RVPSTXX:TPTKT:SPIN-AA¹⁷-LYF:DNGRVLL:YGKIP:MIVVD:XGXL, ASAAPXX:TPTAL:SPIN-AA¹⁷-LYF:VGRKPKV:YGKIP:MIVVD:XKXS, ASASPXX:TPTDL:SPIN-AA¹⁷-LYF:IGKTPKI:YGKIP:MIVVD:XKXS, ASASPXX:TPTDL:SPIN-AA¹⁷-LYF:VGRTPKV:YGKIP:MVVVD:XKXS, KIPKAXX:VPTEL:SPIN-AA¹⁷-LYF:DENEKVV:YGKIP:DMVVE:GXGXR, GIPEPXX:VPEKM:SPIN-AA¹⁷-LYF:DENKNVV:YGKIP:NMTVE:SXAXR, SIPKAXX:VPTEL:SPIN-AA¹⁷-LYF:DEYDKVV:YGKIP:EMVVE:GXGXR, HVTKPTX:APTKL:SPIN-AA¹⁷-LYF:DDSSNVI:YGKIP:NMVVR:SXGXH, YVPKPXX:APTKL:SPIN-AA¹⁷-LYF:DDSSNVI:YGKIP:NMVVR:SXGXH, TVPKPXX:APTQL:SPIN-AA¹⁷-LYF:DDSSNVI:YGKIP:NMVVR:AXGXH, AVPKAXX:APTKL:SPIN-AA¹⁷-LYF:DSSNNVI:YGKIP:NMVVK:AXGXH, KVGKAXX:VPTKL:SPIN-AA¹⁷-LYF:DDMGVPT:YGKIP:EGMSVAE:XGXR, KASKAXX:VPTKL:SPIN-AA¹⁷-LYF:DKGVVTY:YGKIP:GMAVS:EXGXR, AAPASXX:VPARL:SPIN-AA¹⁷-LYF:DAANNVV:YGKIP:DMVVE:AXGXR, STPPTXX:VPTRL:SPIN-AA¹⁷-LYF:DSANNVV:YGKIP:DMVVE:SXGXR, HVPKPXX:APTKL:SPIN-AA¹⁷-LYF:DDSSNVI:YGKIP:NMVVR:SXGXH, RVPSTXX:APVKT:SPIN-AA¹⁷-LYF:DNGRVLL:YGKIP:MIVEE:XGXL, ASAAPXX:VPQAL:SPIN-AA¹⁷-LYF:VGRKPKV:YGKIP:MIVRS:XKXS, ASASPXX:VSQDL:SPIN-AA¹⁷-LYF:IGKTPKI:YGKIP:MIVKS:XKXS, ASASPXX:VPQDL:SPIN-AA¹⁷-LYF:VGRTPKV:YGKIP:MVVKS:XKXS, NDEGLEX:VPTEE:SPIN-AA¹⁷-LYF:RIKPHQGQH:YGKIP:FLQHN:KXEXR, NDEGLEX:VPTGQ:SPIN-AA¹⁷-LYF:RIKPHQGQH:YGKIP:LEEHS:QXEXR, SSVKXQP:SRVHH:SPIN-AA¹⁷-LYF:EYVRKKPKL:YGKIP:RLEEH:LEXAXA, RNVQXRP:TQVQL:SPIN-AA⁷-LYF:EIVRKKPIF:YGKIP:TLEDH:LAXKXE, KIPKAXX:VPAEL:SPIS-AA¹⁷-LYI:DENEKVV:YKQYE:DMVVE:GXGXR, GIPEPXX:VPAKM:SPIS-AA¹⁷-LYI:DENKNVV:YKQYE:NMVVE:SXAXR, SIPKAXX:VPAEL:SPIS-AA¹⁷-LYI:DEYDKVV:YKQYE:EMVVE:GXGXR, HVTKPTX:VPAKL:SPIS-AA¹⁷-LYI:DDSSNVI:YKQYE:NMVVE:SXGXH, YVPKPXX:VPAKL:SPIS-AA¹⁷-LYI:DDSSNVI:YKQYE:NMVVE:SXGXH, TVPKPXX:VPAQL:SPIS-AA¹⁷-LYI:DDSSNVI:YKQYE:NMVVE:AXGXH, AVPKAXX:VPAKL:SPIS-AA¹⁷-LYI:DSSNNVI:YKQYE:NMVVE:AXGXH, KVGKAXX:VPAKL:SPIS-AA¹⁷-LYI:DDMGVPT:YKQYE:EGMSVVE:XGXR, KASKAXX:VPAKL:SPIS-AA¹⁷-LYI:DKGVVTY:YKQYE:GMVVE:EXGXR, GSAGPXX:VPAKM:SPIS-AA¹⁷-LYI:NDKQQII:YKQYE:GMVVE:RXGXS, STPPTXX:VPARL:SPIS-AA¹⁷-LYI:DSANNVV:YKQYE:DMVVE:SXGXR, HVPKPXX:VPAKL:SPIS-AA¹⁷-LYI:DDSSNVI:YKQYE:NMVVE:SXGXH, RVPSTXX:VPAKT:SPIS-AA¹⁷-LYI:DNGRVLL:YKQYE:MIVVE:XGXL, ASAAPXX:VPAAL:SPIS-AA¹⁷-LYI:VGRKPKV:YKQYE:MIVVE:XKXS, ASASPXX:VPADL:SPIS-AA¹⁷-LYI:IGKTPKI:YKQYE:MIVVE:XKXS, ASASPXX:VPADL:SPIS-AA¹⁷-LYI:VGRTPKV:YKQYE:MVVVE:XKXS, KIPKAXX:VPTEL:SPIS-AA¹⁷-LYI:DENEKVV:YKQYE:DMVVE:GXGXR, GIPEPXX:VPEKM:SPIS-AA¹⁷-LYI:DENKNVV:YKQYE:NMTVE:SXAXR, SIPKAXX:VPTEL:SPIS-AA¹⁷-LYI:DEYDKVV:YKQYE:EMVVE:GXGXR, HVTKPTX:APTKL:SPIS-AA¹⁷-LYI:DDSSNVI:YKQYE:NMVVR:SXGXH, YVPKPXX:APTKL:SPIS-AA¹⁷-LYI:DDSSNVI:YKQYE:NMVVR:SXGXH, TVPKPXX:APTQL:SPIS-AA¹⁷-LYI:DDSSNVI:YKQYE:NMVVR:AXGXH, AVPKAXX:APTKL:SPIS-AA¹⁷-LYI:DSSNNVI:YKQYE:NMVVK:AXGXH, KVGKAXX:VPTKL:SPIS-AA¹⁷-LYI:DDMGVPT:YKQYE:EGMSVAE:XGXR, KASKAXX:VPTKL:SPIS-AA¹⁷-LYI:DKGVVTY:YKQYE:GMAVS:EXGXR, GSAGPXX:TPTKM:SPIS-AA¹⁷-LYI:NDKQQII:YKQYE:GMVVD:RXGXS, STPPTXX:VPTRL:SPIS-AA¹⁷-LYI:DSANNVV:YKQYE:DMVVE:SXGXR, HVPKPXX:APTKL:SPIS-AA¹⁷-LYI:DDSSNVI:YKQYE:NMVVR:SXGXH, RVPSTXX:APVKT:SPIS-AA¹⁷-LYI:DNGRVLL:YKQYE:MIVEE:XGXL, ASAAPXX:VPQAL:SPIS-AA¹⁷-LYI:VGRKPKV:YKQYE:MIVRS:XKXS, ASASPXX:VSQDL:SPIS-AA¹⁷-LYI:IGKTPKI:YKQYE:MIVKS:XKXS, ASASPXX:VPQDL:SPIS-AA¹⁷-LYI:VGRTPKV:YKQYE:MVVKS:XKXS, NDEGLEX:VPTEE:SPIS-AA¹⁷-LYI:RIKPHQGQH:YKQYE:FLQHN:KXEXR, NDEGLEX:VPTGQ:SPIS-AA¹⁷-LYI:RIKPHQGQH:YKQYE:LEEHS:QXEXR, SSVKXQP:SRVHH:SPIS-AA¹⁷-LYI:EYVRKKPKL:YKQYE:RLEEH:LEXAXA, RNVQXRP:TQVQL:SPIS-AA¹⁷-LYI:EIVRKKPIF:YKQYE:TLEDH:LAXKXE, KIPKAXX:VPTEL:SPIS-AA¹⁷-LFI:DENEKVV:YKQYE:DMVVE:GXGXR, GIPEPXX:VPTKM:SPIS-AA¹⁷-LFI:DENKNVV:YKQYE:NMVVE:SXAXR, SIPKAXX:VPTEL:SPIS-AA¹⁷-LFI:DEYDKVV:YKQYE:EMVVE:GXGXR, HVTKPTX:VPTKL:SPIS-AA¹⁷-LFI:DDSSNVI:YKQYE:NMVVE:SXGXH, YVPKPXX:VPTKL:SPIS-AA¹⁷-LFI:DDSSNVI:YKQYE:NMVVE:SXGXH, TVPKPXX:VPTQL:SPIS-AA¹⁷-LFI:DDSSNVI:YKQYE:NMVVE:AXGXH, AVPKAXX:VPTKL:SPIS-AA¹⁷-LFI:DSSNNVI:YKQYE:NMVVE:AXGXH, KVG KAXX:VPTKL:SPIS-AA¹⁷-LFI:DDMGVPT:YKQYE:EGMSVVE:XGXR, KASKAXX:VPTKL:SPIS-AA¹⁷-LFI:DKGVVTY:YKQYE:GMVVE:EXGXR, GSAGPXX:VPTKM:SPIS-AA¹⁷-LFI:NDKQQII:YKQYE:GMVVE:RXGXS, AAPASXX:VPTRL:SPIS-AA¹⁷-LFI:DAANNVV:YKQYE:DMVVE:AXGXR, HVPKPXX:VPTKL:SPIS-AA¹⁷-LFI:DDSSNVI:YKQYE:NMVVE:SXGXH, RVPSTXX:VPTKT:SPIS-AA¹⁷-LFI:DNGRVLL:YKQYE:MVVEIVVE:XGXL, ASAAPXX:VPTAL:SPIS-AA¹⁷-LFI:VGRKPKV:YKQYE:MIVVE:XKXS, ASASPXX:VPTDL:SPIS-AA¹⁷-LFI:IGKTPKI:YKQYE:MIVVE:XKXS, ASASPXX:VPTDL:SPIS-AA¹⁷-LFI:VGRTPKV:YKQYE:MVVVE:XKXS, GIPEPXX:VPEKM:SPIS-AA¹⁷-LFI:DENKNVV:YKQYE:NMTVE:SXAXR, HVTKPTX:APTKL:SPIS-AA¹⁷-LFI:DDSSNVI:YKQYE:NMVVR:SXGXH, YVPKPXX:APTKL:SPIS-AA¹⁷-LFI:DDSSNVI:YKQYE:NMVVR:SXGXH, TVPKPXX:APTQL:SPIS-AA¹⁷-LFI:DDSSNVI:YKQYE:NMVVR:AXGXH, AVPKAXX:APTKL:SPIS-AA¹⁷-LFI:DSSNNVI:YKQYE:NMVVK:AXGXH, KVGKAXX:VPTKL:SPIS-AA¹-LFI:DDMGVPT:YKQYE:EGMSVAE:XGXR, KASKAXX:VPTKL:SPIS-AA¹⁷-LFI:DKGVVTY:YKQYE:GMAVS:EXGXR, GSAGPXX:TPTKM:SPIS-AA¹⁷-LFI:NDKQQII:YKQYE:GMVVD:RXGXS, AAPASXX:VPARL:SPIS-AA¹⁷-LFI:DAANNVV:YKQYE:DMVVE:AXGXR, HVPKPXX:APTKL:SPIS-AA¹⁷-LFI:DDSSNVI:YKQYE:NMVVR:SXGXH, RVPSTXX:APVKT:SPIS-AA¹⁷-LFI:DNGRVLL:YKQYE:MIVEE:XGXL, ASAAPXX:VPQAL:SPIS-AA¹⁷-LFI:VGRKPKV:YKQYE:MIVRS:XKXS, ASASPXX:VSQDL:SPIS-AA¹⁷-LFI:IGKTPKI:YKQYE:MIV^{KS}:XKXS, ASASPXX:VPQDL:SPIS-AA¹⁷-LFI:VGRTPKV:YKQYE:MVVKS:XKXS, NDEGLEX:VPTEE:SPIS-AA¹⁷-LFI:RIKPHQGQH:YKQYE:FLQHN:KXEXR, NDEGLEX:VPTGQ:SPIS-AA¹⁷-LFI:RIKPHQGQH:YKQYE:LEEHS:QXEXR, SSVKXQP:SRVHH:SPIS-AA¹⁷-LFI:EYVRKKPKL:YKQYE:RLEEH:LEXAXA, RNVQXRP:TQVQL:SPIS-AA¹⁷-LFI:EIVRKKPIF:YKQYE:TLEDH:LAXKXE, KIPKAXX:APVEL:KPLS-AA¹⁷-LYV:DENEKVV:DHHKD:DMVEE:GXGXR, GIPEPXX:APVKM:KPLS-AA¹⁷-LYV:DENKNVV:DHHKD:NMVEE:SXAXR, SIPKAXX:APVEL:KPLS-AA¹⁷-LYV:DEYDKVV:DHHKD:EMVEE:GXGXR, HVTKPTX:APVKL:KPLS-AA¹⁷-LYV:DDSSNVI:DHHKD:NMVEE:SXGXH, YVPKPXX:APVKL:KPLS-AA¹⁷-LYV:DDSSNVI:DHHKD:NMVEE:SXGXH, TVPKPXX:APVQL:KPLS-AA¹⁷-LYV:DDSSNVI:DHHKD:NMVEE:AXGXH, AVPKAXX:APVKL:KPLS-AA¹⁷-LYV:DSSNNVI:DHHKD:NMVEE:AXGXH, KVGKAXX:APVKL:KPLS-AA¹⁷-LYV:DDMGVPT:DHHKD:EGMSVEE:XGXR, KASKAXX:APVKL:KPLS-AA¹⁷-LYV:DKGVVTY:DHHKD:GMVEE:EXGXR, GSAGPXX:APVKM:KPLS-AA¹⁷-LYV:NDKQQII:DHHKD:GMVEE:RXGXS, AAPASXX:APVRL:KPLS-AA¹⁷-LYV:DAANNVV:DHHKD:DMVEE:AXGXR, STPPTXX:APVRL:KPLS-AA¹⁷-LYV:DSANNVV:DHHKD:DMVEE:SXGXR, HVPKPXX:APVKL:KPLS-AA¹⁷-LYV:DDSSNVI:DHHKD:NMVEE:SXGXH, ASAAPXX:APVAL:KPLS-AA¹⁷-LYV:VGRKPKV:DHHKD:MIVEE:XKXS, ASASPXX:APVDL:KPLS-AA¹⁷-LYV:IGKTPKI:DHHKD:MIVEE:XKXS, ASASPXX:APVDL:KPLS-AA¹⁷-LYV:VGRTPKV:DHHKD:MVVEE:XKXS, KIPKAXX:VPTEL:KPLS-AA¹⁷-LYV:DENEKVV:DHHKD:DMVVE:GXGXR, GIPEPXX:VPEKM:KPLS-AA¹⁷-LYV:DENKNVV:DHHKD:NMTVE:SXAXR, SIPKAXX:VPTEL:KPLS-AA¹⁷-LYV:DEYDKVV:DHHKD:EMVVE:GXGXR, HVTKPTX:APTKL:KPLS-AA¹⁷-LYV:DDSSNVI:DHHKD:NMVVR:SXGXH, YVPKPXX:APTKL:KPLS-AA¹⁷-LYV:DDSSNVI:DHHKD:NMVVR:SXGXH, TVPKPXX:APTQL:KPLS-AA¹⁷-LYV:DDSSNVI:DHHKD:NMVVR:AXGXH, AVPKAXX:APTKL:KPLS-AA¹⁷-LYV:DSSNNVI:DHHKD:NMVVK:AXGXH, KVGKAXX:VPTKL:KPLS-AA¹⁷-LYV:DDMGVPT:DHHKD:EGMSVAE:XGXR, KASKAXX:VPTKL:KPLS-AA¹⁷-LYV:DKGVVTY:DHHKD:GMAVS:EXGXR, GSAGPXX:TPTKM:KPLS-AA¹⁷-LYV:NDKQQII:DHHKD:GMVVD:RXGXS, AAPASXX:VPARL:KPLS-AA¹⁷-LYV:DAANNVV:DHHKD:DMVVE:AXGXR, STPPTXX:VPTRL:KPLS-AA¹⁷-LYV:DSANNVV:DHHKD:DMVVE:SXGXR, HVPKPXX:APTKL:KPLS-AA¹⁷-LYV:DDSSNVI:DHHKD:NMVVR:SXGXH, ASAAPXX:VPQAL:KPLS-AA¹⁷-LYV:VGRKPKV:DHHKD:MIVRS:XKXS, ASASPXX:VSQDL:KPLS-AA¹⁷-LYV:IGKTPKI:DHHKD:MIVKS:XKXS, ASASPXX:VPQDL:KPLS-AA¹⁷-LYV:VGRTPKV:DHHKD:MVVKS:XKXS, NDEGLEX:VPTEE:KPLS-AA¹⁷-LYV:RIKPHQGQH:DHHKD:FLQHN:KXEXR, NDEGLEX:VPTGQ:KPLS-AA¹⁷-LYV:RIKPHQGQH:DHHKD:LEEHS:QXEXR, SSVKXQP:SRVHH:KPLS-AA¹⁷-LYV:EYVRKKPKL:DHHKD:RLEEH:LEXAXA, RNVQXRP:TQVQL:KPLS-AA¹⁷-LYV:EIVRKKPIF:DHHKD:TLEDH:LAXKXE, KIPKAXX:VPQEL:EPLP-AA¹⁷-VYY:DENEKVV:EQLSN:DMVRS:GXGXR, GIPEPXX:VPQKM:EPLP-AA¹⁷-VYY:DENKNVV:EQLSN:NMVRS:SXAXR, SIPKAXX:VPQEL:EPLP-AA¹⁷-VYY:DEYDKVV:EQLSN:EMVRS:GXGXR, HVTKPTX:VPQKL:EPLP-AA¹⁷-VYY:DDSSNVI:EQLSN:NMVRS:SXGXH, YVPKPXX:VPQKL:EPLP-AA¹⁷-VYY:DDSSNVI:EQLSN:NMVRS:SXGXH, TVPKPXX:VPQQL:EPLP-AA¹⁷-VYY:DDSSNVI:EQLSN:NMVRS:AXGXH, AVPKAXX:VPQKL:EPLP-AA¹⁷-VYY:DSSNNVI:EQLSN:NMVRS:AXGXH, KVGKAXX:VPQKL:EPLP-AA¹⁷-VYY:DDMGVPT:EQLSN:EGMSVRS:XGXR, KASKAXX:VPQKL:EPLP-AA¹⁷-VYY:DKGVVTY:EQLSN:GMVRS:EXGXR, GSAGPXX:VPQKM:EPLP-AA¹⁷-VYY:NDKQQII:EQLSN:GMVRS:RXGXS, AAPASXX:VPQRL:EPLP-AA¹⁷-VYY:DAANNVV:EQLSN:DMVRS:AXGXR, STPPTXX:VPQRL:EPLP-AA¹⁷-VYY:DSANNVV:EQLSN:DMVRS:SXGXR, HVPKPXX:VPQKL:EPLP-AA¹⁷-VYY:DDSSNVI:EQLSN:NMVRS:SXGXH, RVPSTXX:VPQKT:EPLP-AA¹⁷-VYY:DNGRVLL:EQLSN:MIVRS:XGXL, ASASPXX:VPQDL:EPLP-AA¹⁷-VYY:IGKTPKI:EQLSN:MIVRS:XKXS, ASASPXX:VPQDL:EPLP-AA¹⁷-VYY:VGRTPKV:EQLSN:MVVRS:XKXS, KIPKAXX:VPTEL:EPLP-AA¹⁷-VYY:DENEKVV:EQLSN:DMVVE:GXGXR, GIPEPXX:VPEKM:EPLP-AA¹⁷-VYY:DENKNVV:EQLSN:NMTVE:SXAXR, SIPKAXX:VPTEL:EPLP-AA¹⁷-VYY:DEYDKVV:EQLSN:EMVVE:GXGXR, HVTKPTX:APTKL:EPLP-AA¹⁷-VYY:DDSSNVI:EQLSN:NMVVR:SXGXH, YVPKPXX:APTKL:EPLP-AA¹⁷-VYY:DDSSNVI:EQLSN:NMVVR:SXGXH, TVPKPXX:APTQL:EPLP-AA¹⁷-VYY:DDSSNVI:EQLSN:NMVVR:AXGXH, AVPKAXX:APTKL:EPLP-AA⁷-VYY:DSSNNVI:EQLSN:NMVVK:AXGXH, KVGKAXX:VPTKL:EPLP-AA¹⁷-VYY:DDMGVPT:EQLSN:EGMSVAE:XGXR, KASKAXX:VPTKL:EPLP-AA¹⁷-VYY:DKGVVTY:EQLSN:GMAVS:EXGXR, GSAGPXX:TPTKM:EPLP-AA¹⁷-VYY:NDKQQII:EQLSN:GMVVD:RXGXS, AAPASXX:VPARL:EPLP-AA¹⁷-VYY:DAANNVV:EQLSN:DMVVE:AXGXR, STPPTXX:VPTRL:EPLP-AA¹⁷-VYY:DSANNVV:EQLSN:DMVVE:SXGXR, HVPKPXX:APTKL:EPLP-AA¹⁷-VYY:DDSSNVI:EQLSN:NMVVR:SXGXH, RVPSTXX:APVKT:EPLP-AA¹⁷-VYY:DNGRVLL:EQLSN:MIVEE:XGXL, ASASPXX:VSQDL:EPLP-AA¹⁷-VYY:IGKTPKI:EQLSN:MIVKS:XKXS, ASASPXX:VPQDL:EPLP-AA¹⁷-VYY:VGRTPKV:EQLSN:MVVKS:XKXS, NDEGLEX:VPTEE:EPLP-AA¹⁷-VYY:RIKPHQGQH:EQLSN:FLQHN:KXEXR, NDEGLEX:VPTGQ:EPLP-AA¹⁷-VYY:RIKPHQGQH:EQLSN:LEEHS:QXEXR, SSVKXQP:SRVHH:EPLP-AA¹⁷-VYY:EYVRKKPKL:EQLSN:RLEEH:LEXAXA, RNVQXRP:TQVQL:EPLP-AA¹⁷-VYY:EIVRKKPIF:EQLSN:TLEDH:LAXKXE, KIPKAXX:VSQEL:EPLT-AA¹⁷-LYY:DENEKVV:EQLSN:DMVKS:GXGXR, GIPEPXX:VSQKM:EPLT-AA¹⁷-LYY:DENKNVV:EQLSN:NMVKS:SXAXR, SIPKAXX:VSQEL:EPLT-AA¹⁷-LYY:DEYDKVV:EQLSN:EMVKS:GXGXR, HVTKPTX:VSQKL:EPLT-AA¹⁷-LYY:DDSSNVI:EQLSN:NMVKS:SXGXH, YVPKPXX:VSQKL:EPLT-AA¹⁷-LYY:DDSSNVI:EQLSN:NMVKS:SXGXH, TVPKPXX:VSQQL:EPLT-AA¹⁷-LYY:DDSSNVI:EQLSN:NMVKS:AXGXH, AVPKAXX:VSQKL:EPLT-AA¹⁷-LYY:DSSNNVI:EQLSN:NMVKS:AXGXH, KVGKAXX:VSQKL:EPLT-AA¹⁷-LYY:DDMGVPT:EQLSN:EGMSVKS:XGXR, KASKAXX:VSQKL:EPLT-AA¹⁷-LYY:DKGVVTY:EQLSN:GMVKS:EXGXR, GSAGPXX:VSQKM:EPLT-AA¹⁷-LYY:NDKQQII:EQLSN:GMVKS:RXGXS, AAPASXX:VSQRL:EPLT-AA¹⁷-LYY:DAANNVV:EQLSN:DMVKS:AXGXR, STPPTXX:VSQRL:EPLT-AA¹⁷-LYY:DSANNVV:EQLSN:DMVKS:SXGXR, HVPKPXX:VSQKL:EPLT-AA¹⁷-LYY:DDSSNVI:EQLSN:NMVKS:SXGXH, RVPSTXX:VSQKT:EPLT-AA¹⁷-LYY:DNGRVLL:EQLSN:MIVKS:XGXL, ASAAPXX:VSQAL:EPLT-AA¹⁷-LYY:VGRKPKV:EQLSN:MIVKS:XKXS, ASASPXX:VSQDL:EPLT-AA¹⁷-LYY:VGRTPKV:EQLSN:MVVKS:XKXS, KIPKAXX:VPTEL:EPLT-AA¹⁷-LYY:DENEKVV:EQLSN:DMVVE:GXGXR, GIPEPXX:VPEKM:EPLT-AA¹⁷-LYY:DENKNVV:EQLSN:NMTVE:SXAXR, SIPKAXX:VPTEL:EPLT-AA¹⁷-LYY:DEYDKVV:EQLSN:EMVVE:GXGXR, HVTKPTX:APTKL:EPLT-AA¹⁷-LYY:DDSSNVI:EQLSN:NMVVR:SXGXH, YVPKPXX:APTKL:EPLT-AA¹⁷-LYY:DDSSNVI:EQLSN:NMVVR:SXGXH, TVPKPXX:APTQL:EPLT-AA¹⁷-LYY:DDSSNVI:EQLSN:NMVVR:AXGXH, AVPKAXX:APTKL:EPLT-AA¹⁷-LYY:DSSNNVI:EQLSN:NMVVK:AXGXH, KVGKAXX:VPTKL:EPLT-AA¹⁷-LYY:DDMGVPT:EQLSN:EGMSVAE:XGXR, KASKAXX:VPTKL:EPLT-AA¹⁷-LYY:DKGVVTY:EQLSN:GMAVS:EXGXR, GSAGPXX:TPTKM:EPLT-AA¹⁷-LYY:NDKQQII:EQLSN:GMVVD:RXGXS, AAPASXX:VPARL:EPLT-AA¹⁷-LYY:DAANNVV:EQLSN:DMVVE:AXGXR, STPPTXX:VPTRL:EPLT-AA¹⁷-LYY:DSANNVV:EQLSN:DMVVE:SXGXR, HVPKPXX:APTKL:EPLT-AA¹⁷-LYY:DDSSNVI:EQLSN:NMVVR:SXGXH, RVPSTXX:APVKT:EPLT-AA¹⁷-LYY:DNGRVLL:EQLSN:MIVEE:XGXL, ASAAPXX:VPQAL:EPLT-AA¹⁷-LYY:VGRKPKV:EQLSN:MIVRS:XKXS, NDEGLEX:VPTEE:EPLT-AA¹⁷-LYY:RIKPHQGQH:EQLSN:FLQHN:KXEXR, NDEGLEX:VPTGQ:EPLT-AA¹⁷-LYY:RIKPHQGQH:EQLSN:LEEHS:QXEXR, SSVKXQP:SRVHH:EPLT-AA¹⁷-LYY:EYVRKKPKL:EQLSN:RLEEH:LEXAXA, RNVQXRP:TQVQL:EPLT-AA¹⁷-LYY:EIVRKKPIF:EQLSN:TLEDH:LAXKXE, KIPKAXX:VPQEL:EPLT-AA¹⁷-LYY:DENEKVV:EQLSN:DMVKS:GXGXR, GIPEPXX:VPQKM:EPLT-AA¹⁷-LYY:DENKNVV:EQLSN:NMVKS:SXAXR, SIPKAXX:VPQEL:EPLT-AA¹⁷-LYY:DEYDKVV:EQLSN:EMVKS:GXGXR, HVTKPTX:VPQKL:EPLT-AA¹⁷-LYY:DDSSNVI:EQLSN:NMVKS:SXGXH, YVPKPXX:VPQKL:EPLT-AA¹⁷-LYY:DDSSNVI:EQLSN:NMVKS:SXGXH, TVPKPXX:VPQQL:EPLT-AA¹⁷-LYY:DDSSNVI:EQLSN:NMVKS:AXGXH, AVPKAXX:VPQKL:EPLT-AA¹⁷-LYY:DSSNNVI:EQLSN:NMVKS:AXGXH, KVGKAXX:VPQKL:EPLT-AA¹⁷-LYY:DDMGVPT:EQLSN:EGMSVKS:XGXR, KASKAXX:VPQKL:EPLT-AA¹⁷-LYY:DKGVVTY:EQLSN:GMVKS:EXGXR, GSAGPXX:VPQKM:EPLT-AA¹⁷-LYY:NDKQQII:EQLSN:GMVKS:RXGXS, AAPASXX:VPQRL:EPLT-AA¹⁷-LYY:DAANNVV:EQLSN:DMVKS:AXGXR, STPPTXX:VPQRL:EPLT-AA¹⁷-LYY:DSANNVV:EQLSN:DMVKS:SXGXR, HVPKPXX:VPQKL:EPLT-AA¹⁷-LYY:DDSSNVI:EQLSN:NMVKS:SXGXH, RVPSTXX:VPQKT:EPLT-AA¹⁷-LYY:DNGRVLL:EQLSN:MIVKS:XGXL, ASAAPXX:VPQAL:EPLT-AA¹⁷-LYY:VGRKPKV:EQLSN:MIVKS:XKXS, ASASPXX:VPQDL:EPLT-AA¹⁷-LYY:IGKTPKI:EQLSN:MIVKS:XKXS, NDEGLEX:VPTGQ:SNIT-AA¹⁷-QIM:RIKPHQGQH:IGEMS:LEQHN:QXEXR, KIPKAXX:VPTEL:SNIT-AA¹⁷-QIM:DENEKVV:IGEMS:DMVVE:GXGXR, GIPEPXX:VPEKM:SNIT-AA¹⁷-QIM:DENKNVV:IGEMS:NMTVE:SXAXR, SIPKAXX:VPTEL:SNIT-AA¹⁷-QIM:DEYDKVV:IGEMS:EMVVE:GXGXR, HVTKPTX:APTKL:SNIT-AA¹⁷-QIM:DDSSNVI:IGEMS:NMVVR:SXGXH, YVPKPXX:APTKL:SNIT-AA¹⁷-QIM:DDSSNVI:IGEMS:NMVVR:SXGXH, TVPKPXX:APTQL:SNIT-AA¹⁷-QIM:DDSSNVI:IGEMS:NMVVR:AXGXH, AVPKAXX:APTKL:SNIT-AA¹⁷-QIM:DSSNNVI:IGEMS:NMVVK:AXGXH, KVGKAXX:VPTKL:SNIT-AA¹⁷-QIM:DDMGVPT:IGEMS:EGMSVAE:XGXR, KASKAXX:VPTKL:SNIT-AA¹⁷-QIM:DKGVVTY:IGEMS:GMAVS:EXGXR, GSAGPXX:TPTKM:SNIT-AA¹⁷-QIM:NDKQQII:IGEMS:GMVVD:RXGXS, AAPASXX:VPARL:SNIT-AA¹⁷-QIM:DAANNVV:IGEMS:DMVVE:AXGXR, STPPTXX:VPTRL:SNIT-AA¹⁷-QIM:DSANNVV:IGEMS:DMVVE:SXGXR, HVPKPXX:APTKL:SNIT-AA¹⁷-QIM:DDSSNVI:IGEMS:NMVVR:SXGXH, RVPSTXX:APVKT:SNIT-AA¹⁷-QIM:DNGRVLL:IGEMS:MIVEE:XGXL, ASAAPXX:VPQAL:SNIT-AA¹⁷-QIM:VGRKPKV:IGEMS:MIVRS:XKXS, ASASPXX:VSQDL:SNIT-AA¹⁷-QIM:IGKTPKI:IGEMS:MIVKS:XKXS, ASASPXX:VPQDL:SNIT-AA¹⁷-QIM:VGRTPKV:IGEMS:MVVKS:XKXS, NDEGLEX:VPTGQ:SNIT-AA¹⁷-QIM:RIKPHQGQH:IGEMS:LEEHS:QXEXR, SSVKXQP:SRVHH:SNIT-AA¹⁷-QIM:EYVRKKPKL:IGEMS:RLEEH:LEXAXA, RNVQXRP:TQVQL:SNIT-AA¹⁷-QIM:EIVRKKPIF:IGEMS:TLEDH:LAXKXE, NDEGLEX:VPTEE:SNIT-AA¹⁷-QIM:RIKPHQGQH:LGEMS:FLEHS:KXEXR, KIPKAXX:VPTEL:SNIT-AA¹⁷-QIM:DENEKVV:LGEMS:DMVVE:GXGXR, GIPEPXX:VPEKM:SNIT-AA¹⁷-QIM:DENKNVV:LGEMS:NMTVE:SXAXR, SIPKAXX:VPTEL:SNIT-AA¹⁷-QIM:DEYDKVV:LGEMS:EMVVE:GXGXR, HVTKPTX:APTKL:SNIT-AA¹⁷-QIM:DDSSNVI:LGEMS:NMVVR:SXGXH, YVPKPXX:APTKL:SNIT-AA¹⁷-QIM:DDSSNVI:LGEMS:NMVVR:SXGXH, TVPKPXX:APTQL:SNIT-AA¹⁷-QIM:DDSSNVI:LGEMS:NMVVR:AXGXH, AVPKAXX:APTKL:SNIT-AA¹⁷-QIM:DSSNNVI:LGEMS:NMVVK:AXGXH, KVGKAXX:VPTKL:SNIT-AA¹⁷-QIM:DDMGVPT:LGEMS:EGMSVAE:XGXR, KASKAXX:VPTKL:SNIT-AA¹⁷-QIM:DKGVVTY:LGEMS:GMAVS:EXGXR, GSAGPXX:TPTKM:SNIT-AA¹⁷-QIM:NDKQQII:LGEMS:GMVVD:RXGXS, AAPASXX:VPARL:SNIT-AA¹⁷-QIM:DAANNVV:LGEMS:DMVVE:AXGXR, STPPTXX:VPTRL:SNIT-AA¹⁷-QIM:DSANNVV:LGEMS:DMVVE:SXGXR, HVPKPXX:APTKL:SNIT-AA¹⁷-QIM:DDSSNVI:LGEMS:NMVVR:SXGXH, RVPSTXX:APVKT:SNIT-AA¹⁷-QIM:DNGRVLL:LGEMS:MIVEE:XGXL, ASAAPXX:VPQAL:SNIT-AA¹⁷-QIM:VGRKPKV:LGEMS:MIVRS:XKXS, ASASPXX:VSQDL:SNIT-AA¹⁷-QIM:IGKTPKI:LGEMS:MIVKS:XKXS, ASASPXX:VPQDL:SNIT-AA¹⁷-QIM:VGRTPKV:LGEMS:MVVKS:XKXS, NDEGLEX:VPTEE:SNIT-AA¹⁷-QIM:RIKPHQGQH:LGEMS:FLQHN:KXEXR, SSVKXQP:SRVHH:SNIT-AA¹⁷-QIM:EYVRKKPKL:LGEMS:RLEEH:LEXAXA, RNVQXRP:TQVQL:SNIT-AA¹⁷-QIM:EIVRKKPIF:LGEMS:TLEDH:LAXKXE, RNVQXRP:SRVQL:RSVK-AA¹⁷-AKV:EIVRKKPIF:KEVQV:TLEEH:LAXKXE, KIPKAXX:VPTEL:RSVK-AA¹⁷-AKV:DENEKVV:KEVQV:DMVVE:GXGXR, GIPEPXX:VPEKM:RSVK-AA¹⁷-AKV:DENKNVV:KEVQV:NMTVE:SXAXR, SIPKAXX:VPTEL:RSVK-AA¹⁷-AKV:DEYDKVV:KEVQV:EMVVE:GXGXR, HVTKPTX:APTKL:RSVK-AA¹⁷-AKV:DDSSNVI:KEVQV:NMVVR:SXGXH, YVPKPXX:APTKL:RSVK-AA¹⁷-AKV:DDSSNVI:KEVQV:NMVVR:SXGXH, TVPKPXX:APTQL:RSVK-AA¹⁷-AKV:DDSSNVI:KEVQV:NMVVR:AXGXH, AVPKAXX:APTKL:RSVK-AA¹⁷-AKV:DSSNNVI:KEVQV:NMVVK:AXGXH, KVGKAXX:VPTKL:RSVK-AA¹⁷-AKV:DDMGVPT:KEVQV:EGMSVAE:XGXR, KASKAXX:VPTKL:RSVK-AA¹⁷-AKV:DKGVVTY:KEVQV:GMAVS:EXGXR, GSAGPXX:TPTKM:RSVK-AA¹⁷-AKV:NDKQQII:KEVQV:GMVVD:RXGXS, AAPASXX:VPARL:RSVK-AA¹⁷-AKV:DAANNVV:KEVQV:DMVVE:AXGXR, STPPTXX:VPTRL:RSVK-AA¹⁷-AKV:DSANNVV:KEVQV:DMVVE:SXGXR, HVPKPXX:APTKL:RSVK-AA¹⁷-AKV:DDSSNVI:KEVQV:NMVVR:SXGXH, RVPSTXX:APVKT:RSVK-AA¹⁷-AKV:DNGRVLL:KEVQV:MIVEE:XGXL, ASAAPXX:VPQAL:RSVK-AA¹⁷-AKV:VGRKPKV:KEVQV:MIVRS:XKXS, ASASPXX:VSQDL:RSVK-AA¹⁷-AKV:IGKTPKI:KEVQV:MIVKS:XKXS, ASASPXX:VPQDL:RSVK-AA¹⁷-AKV:VGRTPKV:KEVQV:MVVKS:XKXS, NDEGLEX:VPTEE:RSVK-AA¹⁷-AKV:RIKPHQGQH:KEVQV:FLQHN:KXEXR, NDEGLEX:VPTGQ:RSVK-AA¹⁷-AKV:RIKPHQGQH:KEVQV:LEEHS:QXEXR, RNVQXRP:TQVQL:RSVK-AA¹⁷-AKV:EIVRKKPIF:KEVQV:TLEDH:LAXKXE, SSVKXQP:TQVHH:RPVQ-AA¹⁷-RKI:EYVRKKPKL:KKATV:RLEDH:LEXAXA, KIPKAXX:VPTEL:RPVQ-AA¹⁷-RKI:DENEKVV:KKATV:DMVVE:GXGXR, GIPEPXX:VPEKM:RPVQ-AA¹⁷-RKI:DENKNVV:KKATV:NMTVE:SXAXR, SIPKAXX:VPTEL:RPVQ-AA¹⁷-RKI:DEYDKVV:KKATV:EMVVE:GXGXR, HVTKPTX:APTKL:RPVQ-AA¹⁷-RKI:DDSSNVI:KKATV:NMVVR:SXGXH, YVPKPXX:APTKL:RPVQ-AA¹⁷-RKI:DDSSNVI:KKATV:NMVVR:SXGXH, TVPKPXX:APTQL:RPVQ-AA¹⁷-RKI:DDSSNVI:KKATV:NMVVR:AXGXH, AVPKAXX:APTKL:RPVQ-AA¹⁷-RKI:DSSNNVI:KKATV:NMVVK:AXGXH, KVGKAXX:VPTKL:RPVQ-AA¹⁷-RKI:DDMGVPT:KKATV:EGMSVAE:XGXR, KASKAXX:VPTKL:RPVQ-AA¹⁷-RKI:DKGVVTY:KKATV:GMAVS:EXGXR, GSAGPXX:TPTKM:RPVQ-AA¹⁷-RKI:NDKQQII:KKATV:GMVVD:RXGXS, AAPASXX:VPARL:RPVQ-AA¹⁷-RKI:DAANNVV:KKATV:DMVVE:AXGXR, STPPTXX:VPTRL:RPVQ-AA¹⁷-RKI:DSANNVV:KKATV:DMVVE:SXGXR, HVPKPXX:APTKL:RPVQ-AA¹⁷-RKI:DDSSNVI:KKATV:NMVVR:SXGXH, RVPSTXX:APVKT:RPVQ-AA¹⁷-RKI:DNGRVLL:KKATV:MIVEE:XGXL, ASAAPXX:VPQAL:RPVQ-AA¹⁷-RKI:VGRKPKV:KKATV:MIVRS:XKXS, ASASPXX:VSQDL:RPVQ-AA¹⁷-RKI:IGKTPKI:KKATV:MIVKS:XKXS, ASASPXX:VPQDL:RPVQ-AA¹⁷-RKI:VGRTPKV:KKATV:MVVKS:XKXS, NDEGLEX:VPTEE:RPVQ-AA¹⁷-RKI:RIKPHQGQH:KKATV:FLQHN:KXEXR, NDEGLEX:VPTGQ:RPVQ-AA¹⁷-RKI:RIKPHQGQH:KKATV:LEEHS:QXEXR and SSVKXQP:SRVHH:RPVQ-AA¹⁷-RKI:EYVRKKPKL:KKATV:RLEEH:LEXAXA; and wherein AA¹⁷ is selected from the group consisting of G, A, V, L, I, P, F, M, W, T and S (in particular is selected from the group consisting of M, I, L, V and T).

[0447] In one most particular example, the RMSD value of the three dimensional (3D) atomic coordinates of said GFR-binding compound as defined herein with respect to PEPREF is 2.45 Å (Angstroms) or less, in particular is 2 Å or less, and more particularly is 1.79 Å or less, and wherein PEPREF is the set of 3D atomic coordinates already defined herein (hereinafter may be referred to as “wherein the RMSD is 2.45 Å or less” for the sake of conciseness).

[0448] In one example, said GFR-binding compound is a synthetic molecule as defined herein in the definition section.

[0449] In one particular example, said GFR-binding compound is a synthetic peptide, or a variant or analog thereof, or a peptidomimetic.

[0450] In one most particular example, said GFR-binding compound is a non-cyclic synthetic peptide.

[0451] In one example, a length of said GFR-binding compound, in solution, such as in a physiologically acceptable solvent such as water or PBS, is comprised between about 6 and about 20 nm, preferably between about 6 and about 16 nm, as determined using the standard «3D» procedure described above.

[0452] In one particular example, said GFR-binding compounds may be any one or a plurality of of peptides of SEQ ID NO: 1 to 38199.

[0453] LINKER Suitable for Implementing Non-Cyclic GFR-Compounds' Embodiments

[0454] In one particular example, said LINKER has a Mw comprised between about 28 and about 2,000 Da. In one particular example, said LINKER has a Mw comprised between about 75 and about 2,000 Da. In one particular example, said LINKER has a Mw comprised between about 150 and about 2,000 Da. In one particular example, said LINKER has a Mw comprised between about 150 and about 1,500 Da. In one most particular example, said LINKER has a Mw comprised between about 300 and about 1,000 Da.

[0455] The chemical nature of said LINKER is not meant to be particularly limited and may be any organic molecule capable of covalently connecting two peptide fragments such as PEP(A) and PEP(B) or PEP(C)-PEP12 and PEP2-PEP(D) so long as LINKER provides sufficient spacing between the two elements connected therethrough for these two connected elements to provide or conserve the required recoding activity. LINKER may thus be a peptide, or variant, analog or peptidomimetic thereof, a polysaccharide, a polynucleotide, a saturated or unsaturated hydrocarbon chain, or a mixture thereof.

[0456] For example, in certain embodiments, LINKER is a peptide with 2 to 16 amino acids. In one particular example, LINKER is a peptide with 2 to 10 amino acids. In one particular example, LINKER is a peptide with 2 to 9 amino acids. In one most particular example, LINKER is a peptide with 5 to 9 amino acids.

[0457] Thus, in one particular example, said GFR-binding compound is a peptide, a variant or analog thereof as defined herein, with (exclusively consisting of, or constituted of) between 20 and 60 (in particular between 20 and 50, and more particularly, between 20 and 45) amino acids, of general formula (Ia); wherein one end of LINKER interacts covalently with one end of PEP(A); wherein another end of LINKER interacts covalently with one end of PEP(B); wherein PEP(A) comprises PEP1 or PEP12; wherein PEP(B) comprises PEP2; wherein LINKER is a peptide comprising 2 to 16 amino acids (in particular 2 to 10, 2 to 9, or 5 to 9 amino acids); and, optionally, wherein the RMSD is 2.45 Å or less.

[0458] Thus, in one particular example, said GFR-binding compound is a peptide, a variant or analog thereof as defined herein, with (exclusively consisting of, or constituted of) between 25 and 60 (in particular between 25 and 50, and more particularly, between 25 and 45) amino acids, of general formula (IIa); wherein LINKER is a peptide comprising 2 to 16 amino acids (in particular 2 to 10, 2 to 9, or 5 to 9 amino acids); wherein PEP12 is a peptide with 8 amino acids of formula PEP1-AA¹⁷-PEP11 as already defined herein; wherein PEP1, PEP2, PEP11, PEP(C) and PEP(D) are as already defined herein; wherein AA¹³ and AA²¹ may be both N-terminal amino acids or both C-terminal amino acids; wherein AA²⁵ and AA²⁰ may be both N-terminal amino acids or both C-terminal amino acids; wherein one end of LINKER interacts covalently with one end of PEP12 via AA²⁰; wherein another end of LINKER interacts covalently with PEP2 via AA²¹ wherein one end of PEP(C) interacts covalently with PEP12 via AA¹³; wherein one end of PEP(D) interacts covalently with PEP2 via AA²⁵; and, optionally, wherein the RMSD is 2.45 Å or less.

[0459] In certain embodiments, said GFR-binding compound is a peptidomimetic as defined herein, comprising (consecutively or non consecutively) between 25 and 60 (in particular between 25 and 50, and more particularly, between 25 and 45) amino acids, of general formula (IIa); wherein LINKER is not a peptide but may comprise amino acids or peptides in covalent or non-covalent (preferably covalent) association with other groups or residues other than amino acids or peptides.

[0460] In one particular example, LINKER comprises (or is) a peptide of general formula (XXXV):

*AA²⁰¹-AA²⁰²-AA²⁰³-AA²⁰⁴-AA²⁰⁵-AA²⁰⁶-AA²⁰⁷-AA²⁰⁸-AA²⁰⁹** (XXXV)

[0461] wherein said peptide of formula (XXXV) may be selected from the group consisting of *AA^{III}-AA^{I}-AA^{I}-AA^{II}-AA^{VII}-AA^{XII}-AA^{XII}-AA^{XIII}-AA^{XII}**, *AA^{III}-AA^{I}-AA^{VI}-AA^{II}-AA^{VII}-AA^{XII}-AA^{XIII}**, *AA^{III}-AA^{I}-AA^{I}-AA^{II}-AA^{II}-AA^{XII}-AA^{XII}-AA^{XIII}-AA^{XIII}**. *AA^{III}-AA^{I}-AA^{II}-AA^{II}-AA^{VII}-AA^{XII}-AA^{XII}-AA^{XIII}**, *AA^{III}-AA^{I}-AA^{I}-AA^{II}-AA^{V}-AA^{IV}-AA^{XII}-AA^{XI}-AA^{XII}-AA^{XIII}**, *AA^{III}-AA^{II}-AA^{II}-AA^{II}-AA^{I}-AA^{XI}-AA^{XI}-AA^{XII}-AA^{XIII}-AA^{XIII}**, *AA^{III}-AA^{I}-AA^{I}-AA^{II}-AA^{XI}-AA^{XII}AA^{XI}-AA^{XII}-AA^{XII}**, *AA^{VIII}-AA^{V}-AA^{II}-AA^{II}-AA^{I}-AA^{X}-AA^{XII}-AA^{XII}-AA^{XIII}**, *AA^{V}-AA^{V}-AA^{VI}-AA^{VII}-AA^{XII}-AA^{XII}AA^{XIII}-AA^{XII}**, *AA^{VIII}-AA^{V}-AA^{VI}-AA^{II}-AA^{I}-AA^{XI}-AA^{XI}-AA^{XIII}** and *AA^{V}-AA^{V}-AA^{VI}-AA^{II}-AA^{XI}-AA^{XII}-AA^{XIII}-AA^{AIII}**; wherein AA^{I} is any amino acid as defined herein, AA¹⁷ is any polar amino acid as defined herein, AA^{III} is any acidic amino acid as defined herein, AA^{IV} is any aliphatic amino acid as defined herein, AA^{V} is any apolar amino acid as defined herein, AA^{VI} is any aromatic amino acid as defined herein, AA^{VII} is any basic amino acid as defined herein, AA^{VIII} is L or I as defined herein, AA^{XII} is an amino acid selected from the group consisting of G, A, V, L, I, P, M, K, R, H, Y and E, wherein AA^{XIII} is absent, AA^{II} or AA^{VIII}, preferably absent; and wherein any one of the fragment AA²⁰¹, AA²⁰¹-AA²⁰², AA²⁰¹-AA²⁰²-AA²⁰³, AA²⁰¹-AA²⁰²-AA²⁰³-AA²⁰⁴, AA²⁰¹-AA²⁰²-AA²⁰³-AA²⁰⁴-AA²⁰⁵, AA²⁰¹-AA²⁰²-AA²⁰³-AA²⁰⁴-AA²⁰⁵-AA²⁰⁶-AA²⁰¹-AA²⁰²-AA²⁰³-AA²⁰⁴-AA²⁰⁵-AA²⁰⁶-AA²⁰⁷-AA²⁰³-AA²⁰⁴-AA²⁰⁵-AA²⁰⁶-AA²⁰⁷-AA²⁰⁸-AA²⁰⁹-AA²⁰⁴-AA²⁰⁵-AA²⁰⁶-AA²⁰⁷-AA²⁰⁸-AA²⁰⁹, AA²⁰⁵-AA²⁰⁶-AA²⁰⁷-AA²⁰⁸-AA²⁰⁹, AA²⁰⁶-AA²⁰⁷-AA²⁰⁸-AA²⁰⁹, AA²⁰⁷-AA²⁰⁸-AA²⁰⁹, AA²⁰⁸-AA²⁰⁹ or AA²⁰⁹, may be absent. In the peptides of formula (XXXV), any one of the amino acid labelled “*” or the amino acid labelled “**” is an N-terminal amino acid and the other is a C-terminal amino acid.

[0462] For instance, in the peptide of formula *AA^{III}-AA^{I}-AA^{I}-AA^{II}-AA^{VII}-AA^{XII}-AA^{XIII}-AA^{XIII}-AA^{XIII}-AA^{XIII}** (XXXV-1), AA^{III} occupies position AA²⁰¹, *AA^{I} occupies position AA²⁰², AA^{I} occupies position AA²⁰³, AA^{II} occupies position AA²⁰⁴, AA^{VII} occupies position AA²⁰⁵, AA^{XII} occupies position AA²⁰⁶, AA^{XII} occupies position AA²⁰⁷, AA^{XIII} occupies position AA²⁰⁸ and AA^{XIII}** occupies position AA²⁰⁹.

[0463] Likewise, in the peptide of formula *AA^{V}-AA^{V}-AA^{VII}-AA^{II}-AA^{XII}-AA^{XII}-AA^{XIII}-AA^{XIII}** (XXXV-1) AA^{V} occupies position AA²⁰¹, AA^{V} occupies position AA²⁰², AA^{VII} occupies position AA²⁰³, AA^{II} occupies position AA²⁰⁴-AA^{XII} occupies position AA²⁰⁵, AA^{XII} occupies position AA²⁰⁶, AA^{XIII} occupies position AA²⁰⁷, AA^{XIII} occupies position AA²⁰⁸ and position AA²⁰⁹ is vacant, thus AA²⁰⁸ would be the amino acid which interacts, in certain embodiments, with PEP2 via AA²¹.

[0464] In one example, LINKER may thus be any one of the following peptides:

[0465] *AA²⁰¹-AA²⁰²-AA²⁰³-AA²⁰⁴-AA²⁰⁵-AA²⁰⁶-AA²⁰⁷-AA²⁰⁸** (XXXV-1); *AA²⁰¹-AA²⁰²-AA²⁰³-AA²⁰⁴-AA²⁰⁵-AA²⁰⁶-AA²⁰⁷** (XXXV-2); *AA²⁰¹-AA²⁰²-AA²⁰³-AA²⁰⁴-AA²⁰⁵-AA²⁰⁶** (XXXV-3); *AA²⁰-AA²⁰²-AA²⁰³-AA²⁰⁴-AA²⁰⁵** (XXXV-4); *AA²⁰¹-AA²⁰²-AA²⁰³-AA²⁰⁴** (XXXV-5); *AA²⁰¹-AA²⁰²-AA²⁰³** (XXXV-6); *AA²⁰¹-AA²⁰²** (XXXV-7); *AA²⁰²-AA²⁰³-AA²⁴-AA²⁰⁵-AA²⁰⁶-AA²⁰⁷-AA²⁰⁸-AA²⁰⁹** (XXXV-8); *AA²⁰³-AA²⁰⁴-AA²⁰⁵-AA²⁰⁶-AA²⁰⁷-AA²⁰⁸-AA²⁰⁹** (XXXV-9); *AA²⁰⁴-AA²⁰⁵-AA²⁰⁶-AA²⁰⁷-AA²⁰⁸-AA²⁰⁹** (XXXV-10); *AA²⁰⁵-AA²⁰⁶-AA²⁰⁷-AA²⁰⁸-AA²⁰⁹** (XXXV-11); *AA²⁰⁶-AA²⁰⁷-AA²⁰⁸-AA²⁰⁹** (XXXV-12); *AA²⁰⁷-AA²⁰⁸-AA²⁰⁹** (XXXV-13); *AA²⁰⁸-AA²⁰⁹** (XXXV-14); wherein, for instance, said peptide of formulae (XXXV-1) may thus be selected from the group consisting of *AA^{III}-AA^{I}-AA^{II}-AA^{VII}-AA^{XII}-AA^{XII}-AA^{XIII}-AA^{XIII}**, *AA^{III}-AA^{I}-AA^{VI}-AA^{II}-AA^{VI}-AA^{XII}-AA^{XII}-AA^{XII}**, *AA^{III}-AA^{I}-AA^{I}-AA^{II}-AA^{II}-AA^{XII}-AA^{XII}-AA^{XIII}**, *AA^{III}-AA^{I}-AA^{II}-AA^{II}-AA^{VII}-AA^{XII}-AA^{XII}-AA^{XIII}**, *AA^{III}-AA^{I}-AA^{II}-AA^{IV}-AA^{IV}-AA^{XII}-AA^{XII}-AA^{XIII}**, *AA^{II}-AA^{I}-AA^{II}-AA^{II}-AA^{II}-AA^{XII}-AA^{XII}-AA^{XII}**, *AA^{III}-AA^{III}-AA^{II}-AA^{VII}-AA^{II}-AA^{XII}-AA^{XII}-AA^{XIII}**, *AA^{III}-AA^{I}-AA^{I}-AA^{II}-AA^{I}-AA^{XII}-AA^{XI}-AA^{XI}**, *AA^{V}-AA^{V}-AA^{VII}-AA^{VI}-AA^{XI}-AA^{XII}-AA^{XIII}**, *AA^{VII}-AA^{V}-AA^{VI}-AA^{II}-AA^{XII}-AA^{XII}-AA^{XII}** and *AA^{V}-AA^{V}-AA^{VII}-AA^{II}-AA^{XII}-AA^{XII}-AA^{XIII}**.

[0466] In one particular example, LINKER comprises a peptide of formula (XXXV), (XXXV-2) or (XXXV-4).

[0467] In one example, LINKER comprises (or is) a poly-(aliphatic amino acid) peptide such as poly-alanine peptide (A)ₙ, or a poly-glycine (G)ₙ, n being an integer comprised between 2 and 16, preferably between 2 to 9, such as A-A-A-A-A-A-A-A-A, A-A-A-A-A-A-A, A-A-A-A-A, G-G-G-G-G-G-G-G-G, G-G-G-G-G-G-G or G-G-G-G-G.

[0468] In one particular example, LINKER comprises (or is) a peptide of general formulae (XXXV) to (XXXV-14), more particularly (XXXV), (XXXV-2) or (XXXV-4), or a poly-(aliphatic amino acid), peptide as defined herein.

[0469] For example, in certain embodiments, LINKER is a polysaccharide comprising 2 to 16 saccharides. In one particular example, LINKER is a polysaccharide comprising 2 to 10 saccharides. In one particular example, LINKER is a polysaccharide comprising 2 to 9 saccharides. In one most particular example, LINKER is a polysaccharide comprising 5 to 9 saccharides. Suitable monosaccharides include, but are not limited to, glucose (dextrose), fructose (levulose) and galactose. Monosaccharides are the building blocks of disaccharides (such as sucrose) and polysaccharides (such as celluloses, chitosans, ulvanes and starches). Further, each carbon atom that supports a hydroxyl group (except for the first and last) is chiral, giving rise to a number of isomeric forms all with the same chemical formula. A large number of biologically important modified monosaccharides exists e.g. amino sugars such as Galactosamine, Glucosamine, Sialic acid, N-Acetylglucosamine, and sulfosugars such as Sulfoquinovose. All of these monosaccharide and polysaccharide derivatives may be used as LINKER in the present invention.

[0470] Thus, in one particular example, said GFR-binding compound is a hydride peptidelpolysaccharide peptidomimetic of between 2,000 and 8,000 Da and of general formula (Ia) defined herein; wherein one end of LINKER interacts covalently with one end of PEP(A); wherein another end of LINKER interacts covalently with one end of PEP(B); wherein PEP(A) comprises PEP1 or PEP12; wherein PEP(B) comprises PEP2; wherein LINKER is a polysaccharide comprising 2 to 16 saccharides (in particular 2 to 10, 2 to 9, or 5 to 9 saccharides); and, optionally, wherein the RMSD is 2.45 Å or less.

[0471] Thus, in one particular example, said GFR-binding compound is a hydride peptidelpolysaccharide peptidomimetic of between 2,000 and 8,000 Da and of general formula (IIa); wherein LINKER is a polysaccharide comprising 2 to 16 saccharides (in particular 2 to 10, 2 to 9, or 5 to 9 saccharides); wherein PEP12 is a peptide with 8 amino acids of formula PEP1-AA¹⁷-PEP11 as already defined herein; wherein PEP1, PEP2, PEP11, PEP(C) and PEP(D) are as already defined herein; wherein AA¹³ and AA²¹ may be both N-terminal amino acids or both C-terminal amino acids; wherein AA²⁵ and AA²⁰ may be both N-terminal amino acids or both C-terminal amino acids; wherein one end of LINKER interacts covalently with one end of PEP12 via AA²⁰; wherein another end of LINKER interacts covalently with PEP2 via AA²¹ wherein one end of PEP(C) interacts covalently with PEP12 via AA¹³; wherein one end of PEP(D) interacts covalently with PEP2 via AA²⁵; and, optionally, wherein the RMSD is 2.45 Å or less.

[0472] For example, in certain embodiments, LINKER is a polynucleotide comprising 2 to 16 nucleotides. In one particular example, LINKER is a polynucleotide comprising 2 to 10 nucleotides. In one particular example, LINKER is a polynucleotide comprising 2 to 9 nucleotides. In one most particular example, LINKER is a polynucleotide comprising 5 to 9 nucleotides. Suitable nucleotides include adenine (A), guanine (G), thymine (T), cytosine (C), uracil (U) and derivatives, analogues and/or mimetic thereof.

[0473] Thus, in one particular example, said GFR-binding compound is a hydride peptide/polynucleotide peptidomimetic of between 2,000 and 8,000 Da and of general formula (Ia) defined herein; wherein one end of LINKER interacts covalently with one end of PEP(A); wherein another end of LINKER interacts covalently with one end of PEP(B); wherein PEP(A) comprises PEP1 or PEP12; wherein PEP(B) comprises PEP2; wherein LINKER is a polynucleotide comprising 2 to 16 nucleotides (in particular 2 to 10, 2 to 9, or 5 to 9 nucleotides); and, optionally, wherein the RMSD is 2.45 Å or less.

[0474] Thus, in one particular example, said GFR-binding compound is a hydride peptide/polynucleotide peptidomimetic of between 2,000 and 8,000 Da and of general formula (IIa); wherein LINKER is a polynucleotide comprising 2 to 16 nucleotides (in particular 2 to 10, 2 to 9, or 5 to 9 nucleotides); wherein PEP12 is a peptide with 8 amino acids of formula PEP1-AA¹⁷-PEP11 as already defined herein; wherein PEP1, PEP2, PEP11, PEP(C) and PEP(D) are as already defined herein; wherein AA¹³ and AA²¹ may be both N-terminal amino acids or both C-terminal amino acids; wherein AA²⁵ and AA²⁰ may be both N-terminal amino acids or both C-terminal amino acids; wherein one end of LINKER interacts covalently with one end of PEP12 via AA²⁰; wherein another end of LINKER interacts covalently with PEP2 via AA²¹ wherein one end of PEP(C) interacts covalently with PEP12 via AA¹³; wherein one end of PEP(D) interacts covalently with PEP2 via AA²⁵; and, optionally, wherein the RMSD is 2.45 Å or less.

[0475] For example, in certain embodiments, LINKER is a saturated or unsaturated hydrocarbon chain comprising between 1 and 22, between 1 and 16, between 1 and 12, between 1 and 8 or between 1 and 6 carbon atoms, wherein said hydrocarbon chain is optionally interrupted by one or more non-carbon atom, preferably between 1 and 16, between 1 and 12 or between 1 and 8 non-carbon atoms as appropriate, wherein said non-carbon atom is selected from the group consisting of —O—, —S—, —C(═O), —SO₂—, -N(Ri)(C═O)—, and -N(Ri)-, wherein Ri is selected from the group consisting of a hydrogen atom, a C1-C6 alkyl group and an aryl group, and wherein said hydrocarbon chain is non-substituted or substituted by at least one radical selected from the group consisting of a halogen, a monosaccharide, a poly(1-6)saccharide, a nucleotide, a poly(1-6)nucleotide, a C1-C10 alkyl group and an aryl group.

[0476] Thus, in one particular example, said GFR-binding compound is a hydride peptide/hydrocarbon chain peptidomimetic of between 2,000 and 8,000 Da and of general formula (Ia) defined herein; wherein one end of LINKER interacts covalently with one end of PEP(A); wherein another end of LINKER interacts covalently with one end of PEP(B); wherein PEP(A) comprises PEP1 or PEP12; wherein PEP(B) comprises PEP2; wherein LINKER is a saturated or unsaturated hydrocarbon chain comprising between 1 and 22 as defined herein; and, optionally, wherein the RMSD is 2.45 Å or less.

[0477] Thus, in one particular example, said GFR-binding compound is a hydride peptide/hydrocarbon chain peptidomimetic of between 2,000 and 8,000 Da and of general formula (IIa); wherein LINKER is a saturated or unsaturated hydrocarbon chain comprising between 1 and 22 as defined herein; wherein PEP12 is a peptide with 8 amino acids of formula PEP1-AA¹⁷-PEP11 as already defined herein; wherein PEP1, PEP2, PEP11, PEP(C) and PEP(D) are as already defined herein; wherein AA¹³ and AA²¹ may be both N-terminal amino acids or both C-terminal amino acids; wherein AA²⁵ and AA²⁰ may be both N-terminal amino acids or both C-terminal amino acids; wherein one end of LINKER interacts covalently with one end of PEP12 via AA²⁰; wherein another end of LINKER interacts covalently with PEP2 via AA²¹ wherein one end of PEP(C) interacts covalently with PEP12 via AA¹³; wherein one end of PEP(D) interacts covalently with PEP2 via AA²⁵; and, optionally, wherein the RMSD is 2.45 Å or less.

[0478] In one example, LINKER is a saturated or unsaturated hydrocarbon chain of at most 10 nanometres (nm) in length, preferably at most 8 nm, 6 nm, 4 nm or 2 nm as determined using the standard «2D» procedure described above.

[0479] In one example, such saturated or unsaturated hydrocarbon chains include polyethylene glycol (PEG) or any one of its derivatives.

[0480] More particularly, LINKER is a pentapeptide (five amino acids). More particularly, LINKER is a hexapeptide (six amino acids). More particularly, LINKER is a heptapeptide (seven amino acids). More particularly, LINKER is an octapeptide (eight amino acids). More particularly, LINKER is a nonapeptide (nine amino acids).

[0481] In one particular example, LINKER is a peptide selected from the group consisting of DENEKVV, DENKNVV, DEYDKVV, DDSSNVI, DSSNNVI, DDMGVPT, DKGVVTY, NDKQQII, DAANNVV, DSANNVV, DDSSNVI, DNGRVLL, VGRKPKV, IGKTPKI, VGRTPKV, RIKPHQGQH, EYVRKKPKL, EIVRKKPIF, EYVRKKP, EIVRKKP, polyalanine (A₁₋₉) and polyglycine (G₁₋₉).

[0482] For example, in certain embodiments, the covalent interaction between an end (i.e. one end or the other end) of LINKER or PEP(A) or PEP12 and an N-terminal amino acid, such as AA¹³ or AA²¹, may be created through the chemical reaction between the free amine moiety of the N-terminal amino acid (—NH₂ or —NH₃X, X generally being a halide anion selected from the group consisting of F⁻, Cl⁻ and Br⁻), typically acting as a nucleophile, and an electrophile moiety of LINKER. Such an electrophile moiety includes, but is not limited to, alkyl halides (˜CR₂—X), alcohols (˜CR₂—OH), acid chlorides (˜C(═O)X), esters, (˜C(═O)OR), phosphate (—OP(OR)₃), phosphinate (˜OP(OR)R₂), phosphonates (˜OP(OR)₂R), phosphonite (˜P(OR)₂R) or sulfonic esters (˜SO₂OR). More particularly, this covalent interaction is an amide bond (in particular a peptide bond) formed through conventional peptide synthesis using conventional coupling reagents as already defined herein.

[0483] For example, in certain embodiments, the covalent interaction between an end (i.e. one end or the other end) of LINKER or PEP(B) or PEP2 and a C-terminal amino acid such as AA²⁵ or AA²⁰, may be created through the chemical reaction between the free carboxylic acid moiety of the C-terminal amino acid (˜CO₂H or —CO₂X, X generally being an inorganic cation such as alkaline cations (e.g. Li⁺, Na⁺ or K⁺) or an organic cation such as ammonium cations, typically acting as an electrophile, and a nucleophile moiety of LINKER. Such a nucleophile moiety includes, but is not limited to, alcohols (˜OH), amines (—NH₂), phosphines (˜PR₃), thiols (˜SH). More particularly, this covalent interaction is a peptide bond formed through conventional peptide synthesis using conventional coupling reagents as already defined herein.

[0484] II.2. Cyclic GFR-Binding Compounds

[0485] In one example, said cyclic GFR-binding compound has a molecular weight of less than 5,000 Daltons. In one particular example, said cyclic GFR-binding compound has a molecular weight of less than 4,000 Daltons. In one particular example, said cyclic GFR-binding compound has a molecular weight comprised between 1,500 and 5,000 Daltons. In one particular example, said cyclic GFR-binding compound has a molecular weight comprised between 1,500 and 4,000 Daltons.

[0486] In one example, said cyclic GFR-binding compound has a molecular weight of less than 7,000 Daltons. In one example, said cyclic GFR-binding compound has a molecular weight of less than 6,000 Daltons. In one example, said cyclic GFR-binding compound has a molecular weight of less than 5,000 Daltons. In one particular example, said cyclic GFR-binding compound has a molecular weight comprised between 1,500 and 7,000 Daltons. In one particular example, said cyclic GFR-binding compound has a molecular weight comprised between 1,500 and 6,000 Daltons. In one particular example, said cyclic GFR-binding compound has a molecular weight comprised between 2,000 and 7,000 Daltons. In one particular example, said cyclic GFR-binding compound has a molecular weight comprised between 3,000 and 7,000 Daltons. In one particular example, said cyclic GFR-binding compound has a molecular weight comprised between 4,000 and 7,000 Daltons. In one particular example, said cyclic GFR-binding compound has a molecular weight comprised between 2,000 and 6,000 Daltons. In one particular example, said cyclic GFR-binding compound has a molecular weight comprised between 3,000 and 6,000 Daltons. In one particular example, said cyclic GFR-binding compound has a molecular weight comprised between 4,000 and 6,000 Daltons.

[0487] In one particular example, the growth factor receptor involved in the interaction with said cyclic GFR-binding compound is an epidermal growth factor receptor. In one particular example, the growth factor receptor involved in the interaction with said cyclic GFR-binding compound is a fibroblast growth factor receptor. In one particular example, the growth factor receptor involved in the interaction with said cyclic GFR-binding compound is a vascular endothelial growth factor receptor. In one particular example, the growth factor receptor involved in the interaction with said cyclic GFR-binding compound is a nerve growth factor receptor. In one particular example, the growth factor receptor involved in the interaction with said cyclic GFR-binding compound is a hepatocyte growth factor receptor. In one particular example, the growth factor receptor involved in the interaction with said cyclic GFR-binding compound is a somatomedin or insulin-like growth factor receptor. In one particular example, the growth factor receptor involved in the interaction with said cyclic GFR-binding compound is a platelet-derived growth factor receptor. In one particular example, the growth factor receptor involved in the interaction with said cyclic GFR-binding compound is a protein from the transforming growth factor beta (TGF-β) superfamily.

[0488] In one particular example, the growth factor receptor(s) involved in the interaction with said cyclic GFR-binding compound is (are) preferably selected from epidermal growth factor receptors, fibroblast growth factor receptors, vascular endothelial growth factor receptors, nerve growth factor receptors, hepatocyte growth factor receptors, somatomedin or insulin-like growth factor receptors, platelet-derived growth factor receptors, and transforming growth factor beta (TGF-β) superfamily proteins.

[0489] In one particular example, said cyclic GFR-binding compound is a peptide, or a variant or analog thereof, having growth factor receptor-binding capability or capabilities, with (exclusively consisting of, or constituted of) between 15-60 amino acids, in particular between 15-55 amino acids, more particularly between 19-60 amino acids, and even more particularly between 19-55 amino acids, or between 15-35 amino acids, in particular between 15-30 amino acids, more particularly between 19-35 amino acids, and even more particularly between 19-30 amino acids.

[0490] In one particular example, said cyclic GFR-binding compound is a cyclic peptidomimetic as defined herein, having growth factor receptor-binding capability or capabilities, comprising (consecutively or non consecutively) between 15-60 amino acids, in particular between 15-55 amino acids, more particularly between 19-60 amino acids, and even more particularly between 19-55 amino acids, or between 15-60 amino acids, in particular between 15-55 amino acids, more particularly between 19-60 amino acids, and even more particularly between 19-55 amino acids, or between 15-35 amino acids, in particular between 15-30 amino acids, more particularly between 19-35 amino acids, and even more particularly between 19-30 amino acids; wherein said cyclic GFR-binding compound has a molecular weight comprised between 1,500 and 7,000 Daltons.

[0491] In one particular example, said cyclic GFR-binding compound is a cyclic peptidomimetic as defined herein, having growth factor receptor-binding capability or capabilities, comprising (consecutively or non consecutively) between 15-60 amino acids, in particular between 15-55 amino acids, more particularly between 19-60 amino acids, and even more particularly between 19-55 amino acids, or between 15-35 amino acids, in particular between 15-30 amino acids, more particularly between 19-35 amino acids, and even more particularly between 19-30 amino acids; and containing at least one peptide portion or fragment with between 5-20 amino acids (in particular containing two peptide portions or fragments, each of which with between 5-20 amino acids); wherein said cyclic GFR-binding compound has a molecular weight comprised between 1,500 and 7,000 Daltons.

[0492] In one aspect, the present disclosure provides a cyclic GFR-binding compound, wherein said cyclic GFR-binding compound is a cyclic peptide, a variant or analog thereof, or a cyclic peptidomimetic as defined herein, having growth factor receptor-binding capability or capabilities, having a molecular weight of less than 5,000 Da, in particular of between 1,500 and 7,000 Da.

[0493] In one aspect, the present disclosure provides a cyclic GFR-binding compound, wherein said cyclic GFR-binding compound is a cyclic peptide, a variant or analog thereof, or a cyclic peptidomimetic as defined herein, having growth factor receptor-binding capability or capabilities, with between 15-60 (in particular between 15-55, more particularly between 19-60, and even more particularly between 19-55) amino acids, or between 15-35 (in particular between 15-30, more particularly between 19-35, and even more particularly between 19-30) amino acids, comprising a peptide with four amino acids (PEP1) and a peptide with five amino acids (PEP2).

[0494] In one aspect, the present disclosure provides a cyclic GFR-binding compound, wherein said cyclic GFR-binding compound is a cyclic peptide, a variant or analog thereof, or a cyclic peptidomimetic as defined herein, with between 15-60 (in particular between 15-55, more particularly between 19-60, and even more particularly between 19-55) amino acids, or between 15-35 (in particular between 15-30, more particularly between 19-35, and even more particularly between 19-30) amino acids, comprising a peptide with eight amino acids (PEP12) and a peptide with five amino acids (PEP2).

[0495] In one aspect, the present disclosure provides a cyclic GFR-binding compound, wherein said cyclic GFR-binding compound is a cyclic peptide, a variant or analog thereof, or a cyclic peptidomimetic as defined herein, with between 15-60 (in particular between 15-55, more particularly between 19-60, and even more particularly between 19-55) amino acids, or between 15-35 (in particular between 15-30, more particularly between 19-35, and even more particularly between 19-30) amino acids, comprising a peptide with four amino acids (PEP1) and a peptide with five amino acids (PEP2); wherein said cyclic GFR-binding compound further comprises a peptide with three amino acids (PEP3) and a peptide with three amino acids (PEP4).

[0496] In one aspect, the present disclosure provides a cyclic GFR-binding compound, wherein said cyclic GFR-binding compound is a cyclic peptide, a variant or analog thereof, or a cyclic peptidomimetic as defined herein, with between 15-60 (in particular between 15-55, more particularly between 19-60, and even more particularly between 19-55) amino acids, or between 15-35 (in particular between 15-30, more particularly between 19-35, and even more particularly between 19-30) amino acids, comprising a peptide with eight amino acids (PEP12) and a peptide with five amino acids (PEP2); wherein said cyclic GFR-binding compound further comprises a peptide with three amino acids (PEP3) and a peptide with three amino acids (PEP4).

[0497] In one aspect, the present disclosure provides a cyclic GFR-binding compound, wherein said cyclic GFR-binding compound is a cyclic peptide, a variant or analog thereof, or a cyclic peptidomimetic as defined herein, with between 15-60 (in particular between 15-55, more particularly between 19-60, and even more particularly between 19-55) amino acids, or between 15-35 (in particular between 15-30, more particularly between 19-35, and even more particularly between 19-30) amino acids, comprising a peptide with four amino acids (PEP1) and a peptide with five amino acids (PEP2); wherein said cyclic GFR-binding compound further comprises a peptide with five amino acids (PEP5) and a peptide with between five and seven amino acids (PEP6).

[0498] In one aspect, the present disclosure provides a cyclic GFR-binding compound, wherein said cyclic GFR-binding compound is a cyclic peptide, a variant or analog thereof, or a cyclic peptidomimetic as defined herein, with between 15-60 (in particular between 15-55, more particularly between 19-60, and even more particularly between 19-55) amino acids, or between 15-35 (in particular between 15-30, more particularly between 19-35, and even more particularly between 19-30) amino acids, comprising a peptide with eight amino acids (PEP12) and a peptide with five amino acids (PEP2); wherein said cyclic GFR-binding compound further comprises a peptide with five amino acids (PEP5) and a peptide with between five and seven amino acids (PEP6).

[0499] In one aspect, the present disclosure provides a cyclic GFR-binding compound, wherein said cyclic GFR-binding compound is a cyclic peptide, a variant or analog thereof, or a cyclic peptidomimetic as defined herein, with between 15-60 (in particular between 15-55, more particularly between 19-60, and even more particularly between 19-55) amino acids, or between 15-35 (in particular between 15-30, more particularly between 19-35, and even more particularly between 19-30) amino acids, comprising a peptide with four amino acids (PEP1) and a peptide with five amino acids (PEP2); wherein said cyclic GFR-binding compound further comprises a peptide with between six and twelve amino acids (PEP9) and a peptide with between six and eleven amino acids (PEP10).

[0500] In one aspect, the present disclosure provides a cyclic GFR-binding compound, wherein said cyclic GFR-binding compound is a cyclic peptide, a variant or analog thereof, or a cyclic peptidomimetic as defined herein, with between 15-60 (in particular between 15-55, more particularly between 19-60, and even more particularly between 19-55) amino acids, or between 15-35 (in particular between 15-30, more particularly between 19-35, and even more particularly between 19-30) amino acids, comprising a peptide with eight amino acids (PEP12) and a peptide with five amino acids (PEP2); wherein said cyclic GFR-binding compound further comprises a peptide with between six and twelve amino acids (PEP9) and a peptide with between six and eleven amino acids (PEP10).

[0501] In one aspect, the present disclosure provides a cyclic GFR-binding compound, wherein said cyclic GFR-binding compound is a cyclic peptide, a variant or analog thereof, or a cyclic peptidomimetic as defined herein, with between 15-60 (in particular between 15-55, more particularly between 19-60, and even more particularly between 19-55) amino acids, or between 15-35 (in particular between 15-30, more particularly between 19-35, and even more particularly between 19-30) amino acids, comprising a peptide with four amino acids (PEP1) and a peptide with five amino acids (PEP2); wherein said cyclic GFR-binding compound further comprises a peptide with three amino acids (PEP3) and a peptide with between five and seven amino acids (PEP6).

[0502] In one aspect, the present disclosure provides a cyclic GFR-binding compound, wherein said cyclic GFR-binding compound is a cyclic peptide, a variant or analog thereof, or a cyclic peptidomimetic as defined herein, with between 15-60 (in particular between 15-55, more particularly between 19-60, and even more particularly between 19-55) amino acids, or between 15-35 (in particular between 15-30, more particularly between 19-35, and even more particularly between 19-30) amino acids, comprising a peptide with eight amino acids (PEP12) and a peptide with five amino acids (PEP2); wherein said cyclic GFR-binding compound further comprises a peptide with three amino acids (PEP3) and a peptide with between five and seven amino acids (PEP6).

[0503] In one aspect, the present disclosure provides a cyclic GFR-binding compound, wherein said cyclic GFR-binding compound is a cyclic peptide, a variant or analog thereof, or a cyclic peptidomimetic as defined herein, with between 15-60 (in particular between 15-55, more particularly between 19-60, and even more particularly between 19-55) amino acids, or between 15-35 (in particular between 15-30, more particularly between 19-35, and even more particularly between 19-30) amino acids, comprising a peptide with four amino acids (PEP1) and a peptide with five amino acids (PEP2); wherein said cyclic GFR-binding compound further comprises a peptide with three amino acids (PEP3) and a peptide with between six and eleven amino acids (PEP10).

[0504] In one aspect, the present disclosure provides a cyclic GFR-binding compound, wherein said cyclic GFR-binding compound is a cyclic peptide, a variant or analog thereof, or a cyclic peptidomimetic as defined herein, with between 15-60 (in particular between 15-55, more particularly between 19-60, and even more particularly between 19-55) amino acids, or between 15-35 (in particular between 15-30, more particularly between 19-35, and even more particularly between 19-30) amino acids, comprising a peptide with eight amino acids (PEP12) and a peptide with five amino acids (PEP2); wherein said cyclic GFR-binding compound further comprises a peptide with three amino acids (PEP3) and a peptide with between six and eleven amino acids (PEP10).

[0505] In one aspect, the present disclosure provides a cyclic GFR-binding compound, wherein said cyclic GFR-binding compound is a cyclic peptide, a variant or analog thereof, or a cyclic peptidomimetic as defined herein, with between 15-60 (in particular between 15-55, more particularly between 19-60, and even more particularly between 19-55) amino acids, or between 15-35 (in particular between 15-30, more particularly between 19-35, and even more particularly between 19-30) amino acids, comprising a peptide with four amino acids (PEP1) and a peptide with five amino acids (PEP2); wherein said cyclic GFR-binding compound further comprises a peptide with five amino acids (PEP5) and a peptide with three amino acids (PEP4).

[0506] In one aspect, the present disclosure provides a cyclic GFR-binding compound, wherein said cyclic GFR-binding compound is a cyclic peptide, a variant or analog thereof, or a cyclic peptidomimetic as defined herein, with between 15-60 (in particular between 15-55, more particularly between 19-60, and even more particularly between 19-55) amino acids, or between 15-35 (in particular between 15-30, more particularly between 19-35, and even more particularly between 19-30) amino acids, comprising a peptide with four amino acids (PEP12) and a peptide with five amino acids (PEP2); wherein said cyclic GFR-binding compound further comprises a peptide with five amino acids (PEP5) and a peptide with three amino acids (PEP4).

[0507] In one aspect, the present disclosure provides a cyclic GFR-binding compound, wherein said cyclic GFR-binding compound is a cyclic peptide, a variant or analog thereof, or a cyclic peptidomimetic as defined herein, with between 15-60 (in particular between 15-55, more particularly between 19-60, and even more particularly between 19-55) amino acids, or between 15-35 (in particular between 15-30, more particularly between 19-35, and even more particularly between 19-30) amino acids, comprising a peptide with four amino acids (PEP1) and a peptide with five amino acids (PEP2); wherein said cyclic GFR-binding compound further comprises a peptide with between six and twelve amino acids (PEP9) and a peptide with three amino acids (PEP4).

[0508] In one aspect, the present disclosure provides a cyclic GFR-binding compound, wherein said cyclic GFR-binding compound is a cyclic peptide, a variant or analog thereof, or a cyclic peptidomimetic as defined herein, with between 15-60 (in particular between 15-55, more particularly between 19-60, and even more particularly between 19-55) amino acids, or between 15-35 (in particular between 15-30, more particularly between 19-35, and even more particularly between 19-30) amino acids, comprising a peptide with four amino acids (PEP12) and a peptide with five amino acids (PEP2); wherein said cyclic GFR-binding compound further comprises a peptide with between six and twelve amino acids (PEP9) and a peptide with three amino acids (PEP4).

[0509] In one aspect, the present disclosure provides a cyclic GFR-binding compound, wherein said cyclic GFR-binding compound is a cyclic peptide, a variant or analog thereof, or a cyclic peptidomimetic as defined herein, with between 15-60 (in particular between 15-55, more particularly between 19-60, and even more particularly between 19-55) amino acids, or between 15-35 (in particular between 15-30, more particularly between 19-35, and even more particularly between 19-30) amino acids, comprising a peptide with four amino acids (PEP1) and a peptide with five amino acids (PEP2); wherein said cyclic GFR-binding compound further comprises a peptide with five amino acids (PEP5) and a peptide with between six and eleven amino acids (PEP10).

[0510] In one aspect, the present disclosure provides a cyclic GFR-binding compound, wherein said cyclic GFR-binding compound is a cyclic peptide, a variant or analog thereof, or a cyclic peptidomimetic as defined herein, with between 15-60 (in particular between 15-55, more particularly between 19-60, and even more particularly between 19-55) amino acids, or between 15-35 (in particular between 15-30, more particularly between 19-35, and even more particularly between 19-30) amino acids, comprising a peptide with four amino acids (PEP12) and a peptide with five amino acids (PEP2); wherein said cyclic GFR-binding compound further comprises a peptide with five amino acids (PEP5) and a peptide with between six and eleven amino acids (PEP10).

[0511] In one aspect, the present disclosure provides a cyclic GFR-binding compound, wherein said cyclic GFR-binding compound is a cyclic peptide, a variant or analog thereof, or a cyclic peptidomimetic as defined herein, with between 15-60 (in particular between 15-55, more particularly between 19-60, and even more particularly between 19-55) amino acids, or between 15-35 (in particular between 15-30, more particularly between 19-35, and even more particularly between 19-30) amino acids, comprising a peptide with four amino acids (PEP1) and a peptide with five amino acids (PEP2); wherein said cyclic GFR-binding compound further comprises a peptide with between six and twelve amino acids (PEP9) and a peptide with between five and seven amino acids (PEP6).

[0512] In one aspect, the present disclosure provides a cyclic GFR-binding compound, wherein said cyclic GFR-binding compound is a cyclic peptide, a variant or analog thereof, or a cyclic peptidomimetic as defined herein, with between 15-60 (in particular between 15-55, more particularly between 19-60, and even more particularly between 19-55) amino acids, or between 15-35 (in particular between 15-30, more particularly between 19-35, and even more particularly between 19-30) amino acids, comprising a peptide with four amino acids (PEP12) and a peptide with five amino acids (PEP2); wherein said cyclic GFR-binding compound further comprises a peptide with between six and twelve amino acids (PEP9) and a peptide with between five and seven amino acids (PEP6).

[0513] In one aspect, the present disclosure provides a cyclic GFR-binding compound, wherein said cyclic GFR-binding compound is a cyclic peptide, a variant or analog thereof, or a cyclic peptidomimetic as defined herein, with between 15-60 (in particular between 15-55, more particularly between 19-60, and even more particularly between 19-55) amino acids, or between 15-35 (in particular between 15-30, more particularly between 19-35, and even more particularly between 19-30) amino acids, comprising a peptide with four amino acids (PEP1) and a peptide with five amino acids (PEP2); wherein said cyclic GFR-binding compound further comprises a peptide with three amino acids (PEP3), an amino acid or a peptide with between two and seven amino acids (PEP7), and a peptide with three amino acids (PEP4).

[0514] In one aspect, the present disclosure provides a cyclic GFR-binding compound, wherein said cyclic GFR-binding compound is a cyclic peptide, a variant or analog thereof, or a cyclic peptidomimetic as defined herein, with between 15-60 (in particular between 15-55, more particularly between 19-60, and even more particularly between 19-55) amino acids, or between 15-35 (in particular between 15-30, more particularly between 19-35, and even more particularly between 19-30) amino acids, comprising a peptide with four amino acids (PEP12) and a peptide with five amino acids (PEP2); wherein said cyclic GFR-binding compound further comprises a peptide with three amino acids (PEP3), an amino acid or a peptide with between two and seven amino acids (PEP7), and a peptide with three amino acids (PEP4).

[0515] In one aspect, the present disclosure provides a cyclic GFR-binding compound, wherein said cyclic GFR-binding compound is a cyclic peptide, a variant or analog thereof, or a cyclic peptidomimetic as defined herein, with between 15-60 (in particular between 15-55, more particularly between 19-60, and even more particularly between 19-55) amino acids, or between 15-35 (in particular between 15-30, more particularly between 19-35, and even more particularly between 19-30) amino acids, comprising a peptide with four amino acids (PEP1) and a peptide with five amino acids (PEP2); wherein said cyclic GFR-binding compound further comprises a peptide with three amino acids (PEP3), an amino acid or a peptide with between two and seven amino acids (PEP7), and a peptide with between five and seven amino acids (PEP6).

[0516] In one aspect, the present disclosure provides a cyclic GFR-binding compound, wherein said cyclic GFR-binding compound is a cyclic peptide, a variant or analog thereof, or a cyclic peptidomimetic as defined herein, with between 15-60 (in particular between 15-55, more particularly between 19-60, and even more particularly between 19-55) amino acids, or between 15-35 (in particular between 15-30, more particularly between 19-35, and even more particularly between 19-30) amino acids, comprising a peptide with four amino acids (PEP12) and a peptide with five amino acids (PEP2); wherein said cyclic GFR-binding compound further comprises a peptide with three amino acids (PEP3), an amino acid or a peptide with between two and seven amino acids (PEP7), and a peptide with between five and seven amino acids (PEP6).

[0517] In one aspect, the present disclosure provides a cyclic GFR-binding compound, wherein said cyclic GFR-binding compound is a cyclic peptide, a variant or analog thereof, or a cyclic peptidomimetic as defined herein, with between 15-60 (in particular between 15-55, more particularly between 19-60, and even more particularly between 19-55) amino acids, or between 15-35 (in particular between 15-30, more particularly between 19-35, and even more particularly between 19-30) amino acids, comprising a peptide with four amino acids (PEP1) and a peptide with five amino acids (PEP2); wherein said cyclic GFR-binding compound further comprises a peptide with three amino acids (PEP3), an amino acid or a peptide with between two and seven amino acids (PEP7), and a peptide with between six and eleven amino acids (PEP10).

[0518] In one aspect, the present disclosure provides a cyclic GFR-binding compound, wherein said cyclic GFR-binding compound is a cyclic peptide, a variant or analog thereof, or a cyclic peptidomimetic as defined herein, with between 15-60 (in particular between 15-55, more particularly between 19-60, and even more particularly between 19-55) amino acids, or between 15-35 (in particular between 15-30, more particularly between 19-35, and even more particularly between 19-30) amino acids, comprising a peptide with four amino acids (PEP12) and a peptide with five amino acids (PEP2); wherein said cyclic GFR-binding compound further comprises a peptide with three amino acids (PEP3), an amino acid or a peptide with between two and seven amino acids (PEP7), and a peptide with between six and eleven amino acids (PEP10).

[0519] In one aspect, the present disclosure provides a cyclic GFR-binding compound, wherein said cyclic GFR-binding compound is a cyclic peptide, a variant or analog thereof, or a cyclic peptidomimetic as defined herein, with between 15-60 (in particular between 15-55, more particularly between 19-60, and even more particularly between 19-55) amino acids, or between 15-35 (in particular between 15-30, more particularly between 19-35, and even more particularly between 19-30) amino acids, comprising a peptide with four amino acids (PEP1) and a peptide with five amino acids (PEP2); wherein said cyclic GFR-binding compound further comprises a peptide with three amino acids (PEP3), an amino acid or a peptide with between two and seven amino acids (PEP7), a peptide with three amino acids (PEP4), and an amino acid or a peptide with between two and six amino acids (PEP8).

[0520] In one aspect, the present disclosure provides a cyclic GFR-binding compound, wherein said cyclic GFR-binding compound is a cyclic peptide, a variant or analog thereof, or a cyclic peptidomimetic as defined herein, with between 15-60 (in particular between 15-55, more particularly between 19-60, and even more particularly between 19-55) amino acids, or between 15-35 (in particular between 15-30, more particularly between 19-35, and even more particularly between 19-30) amino acids, comprising a peptide with four amino acids (PEP12) and a peptide with five amino acids (PEP2); wherein said cyclic GFR-binding compound further comprises a peptide with three amino acids (PEP3), an amino acid or a peptide with between two and seven amino acids (PEP7), a peptide with three amino acids (PEP4), and an amino acid or a peptide with between two and six amino acids (PEP8).

[0521] In one aspect, the present disclosure provides a cyclic GFR-binding compound, wherein said cyclic GFR-binding compound is a cyclic peptide, a variant or analog thereof, or a cyclic peptidomimetic as defined herein, with between 15-60 (in particular between 15-55, more particularly between 19-60, and even more particularly between 19-55) amino acids, or between 15-35 (in particular between 15-30, more particularly between 19-35, and even more particularly between 19-30) amino acids, comprising a peptide with four amino acids (PEP1) and a peptide with five amino acids (PEP2); wherein said cyclic GFR-binding compound further comprises a peptide with three amino acids (PEP3), an amino acid or a peptide with between two and seven amino acids (PEP7), a peptide with between five and seven amino acids (PEP6), and an amino acid or a peptide with between two and six amino acids (PEP8).

[0522] In one aspect, the present disclosure provides a cyclic GFR-binding compound, wherein said cyclic GFR-binding compound is a cyclic peptide, a variant or analog thereof, or a cyclic peptidomimetic as defined herein, with between 15-60 (in particular between 15-55, more particularly between 19-60, and even more particularly between 19-55) amino acids, or between 15-35 (in particular between 15-30, more particularly between 19-35, and even more particularly between 19-30) amino acids, comprising a peptide with four amino acids (PEP12) and a peptide with five amino acids (PEP2); wherein said cyclic GFR-binding compound further comprises a peptide with three amino acids (PEP3), an amino acid or a peptide with between two and seven amino acids (PEP7), a peptide with between five and seven amino acids (PEP6), and an amino acid or a peptide with between two and six amino acids (PEP8).

[0523] In one aspect, the present disclosure provides a cyclic GFR-binding compound, wherein said cyclic GFR-binding compound is a cyclic peptide, a variant or analog thereof, or a cyclic peptidomimetic as defined herein, with between 15-60 (in particular between 15-55, more particularly between 19-60, and even more particularly between 19-55) amino acids, or between 15-35 (in particular between 15-30, more particularly between 19-35, and even more particularly between 19-30) amino acids, comprising a peptide with four amino acids (PEP1) and a peptide with five amino acids (PEP2); wherein said cyclic GFR-binding compound further comprises a peptide with five amino acids (PEP5), an amino acid or a peptide with between two and seven amino acids (PEP7), and a peptide with three amino acids (PEP4).

[0524] In one aspect, the present disclosure provides a cyclic GFR-binding compound, wherein said cyclic GFR-binding compound is a cyclic peptide, a variant or analog thereof, or a cyclic peptidomimetic as defined herein, with between 15-60 (in particular between 15-55, more particularly between 19-60, and even more particularly between 19-55) amino acids, or between 15-35 (in particular between 15-30, more particularly between 19-35, and even more particularly between 19-30) amino acids, comprising a peptide with four amino acids (PEP12) and a peptide with five amino acids (PEP2); wherein said cyclic GFR-binding compound further comprises a peptide with five amino acids (PEP5), an amino acid or a peptide with between two and seven amino acids (PEP7), and a peptide with three amino acids (PEP4).

[0525] In one aspect, the present disclosure provides a cyclic GFR-binding compound, wherein said cyclic GFR-binding compound is a cyclic peptide, a variant or analog thereof, or a cyclic peptidomimetic as defined herein, with between 15-60 (in particular between 15-55, more particularly between 19-60, and even more particularly between 19-55) amino acids, or between 15-35 (in particular between 15-30, more particularly between 19-35, and even more particularly between 19-30) amino acids, comprising a peptide with four amino acids (PEP1) and a peptide with five amino acids (PEP2); wherein said cyclic GFR-binding compound further comprises a peptide with five amino acids (PEP5), an amino acid or a peptide with between two and seven amino acids (PEP7), and a peptide with between five and seven amino acids (PEP6).

[0526] In one aspect, the present disclosure provides a cyclic GFR-binding compound, wherein said cyclic GFR-binding compound is a cyclic peptide, a variant or analog thereof, or a cyclic peptidomimetic as defined herein, with between 15-60 (in particular between 15-55, more particularly between 19-60, and even more particularly between 19-55) amino acids, or between 15-35 (in particular between 15-30, more particularly between 19-35, and even more particularly between 19-30) amino acids, comprising a peptide with four amino acids (PEP12) and a peptide with five amino acids (PEP2); wherein said cyclic GFR-binding compound further comprises a peptide with five amino acids (PEP5), an amino acid or a peptide with between two and seven amino acids (PEP7), and a peptide with between five and seven amino acids (PEP6).

[0527] In one aspect, the present disclosure provides a cyclic GFR-binding compound, wherein said cyclic GFR-binding compound is a cyclic peptide, a variant or analog thereof, or a cyclic peptidomimetic as defined herein, with between 15-60 (in particular between 15-55, more particularly between 19-60, and even more particularly between 19-55) amino acids, or between 15-35 (in particular between 15-30, more particularly between 19-35, and even more particularly between 19-30) amino acids, comprising a peptide with four amino acids (PEP1) and a peptide with five amino acids (PEP2); wherein said cyclic GFR-binding compound further comprises a peptide with five amino acids (PEP5), an amino acid or a peptide with between two and seven amino acids (PEP7), and a peptide with between six and eleven amino acids (PEP10).

[0528] In one aspect, the present disclosure provides a cyclic GFR-binding compound, wherein said cyclic GFR-binding compound is a cyclic peptide, a variant or analog thereof, or a cyclic peptidomimetic as defined herein, with between 15-60 (in particular between 15-55, more particularly between 19-60, and even more particularly between 19-55) amino acids, or between 15-35 (in particular between 15-30, more particularly between 19-35, and even more particularly between 19-30) amino acids, comprising a peptide with four amino acids (PEP12) and a peptide with five amino acids (PEP2); wherein said cyclic GFR-binding compound further comprises a peptide with five amino acids (PEP5), an amino acid or a peptide with between two and seven amino acids (PEP7), and a peptide with between six and eleven amino acids (PEP10).

[0529] In one aspect, the present disclosure provides a cyclic GFR-binding compound, wherein said cyclic GFR-binding compound is a cyclic peptide, a variant or analog thereof, or a cyclic peptidomimetic as defined herein, with between 15-60 (in particular between 15-55, more particularly between 19-60, and even more particularly between 19-55) amino acids, or between 15-35 (in particular between 15-30, more particularly between 19-35, and even more particularly between 19-30) amino acids, comprising a peptide with four amino acids (PEP1) and a peptide with five amino acids (PEP2); wherein said cyclic GFR-binding compound further comprises a peptide with five amino acids (PEP5), an amino acid or a peptide with between two and seven amino acids (PEP7), a peptide with three amino acids (PEP4), and an amino acid or a peptide with between two and six amino acids (PEP8).

[0530] In one aspect, the present disclosure provides a cyclic GFR-binding compound, wherein said cyclic GFR-binding compound is a cyclic peptide, a variant or analog thereof, or a cyclic peptidomimetic as defined herein, with between 15-60 (in particular between 15-55, more particularly between 19-60, and even more particularly between 19-55) amino acids, or between 15-35 (in particular between 15-30, more particularly between 19-35, and even more particularly between 19-30) amino acids, comprising a peptide with four amino acids (PEP12) and a peptide with five amino acids (PEP2); wherein said cyclic GFR-binding compound further comprises a peptide with five amino acids (PEP5), an amino acid or a peptide with between two and seven amino acids (PEP7), a peptide with three amino acids (PEP4), and an amino acid or a peptide with between two and six amino acids (PEP8).

[0531] In one aspect, the present disclosure provides a cyclic GFR-binding compound, wherein said cyclic GFR-binding compound is a cyclic peptide, a variant or analog thereof, or a cyclic peptidomimetic as defined herein, with between 15-60 (in particular between 15-55, more particularly between 19-60, and even more particularly between 19-55) amino acids, or between 15-35 (in particular between 15-30, more particularly between 19-35, and even more particularly between 19-30) amino acids, comprising a peptide with four amino acids (PEP1) and a peptide with five amino acids (PEP2); wherein said cyclic GFR-binding compound further comprises a peptide with five amino acids (PEP5), an amino acid or a peptide with between two and seven amino acids (PEP7), a peptide with between five and seven amino acids (PEP6), and an amino acid or a peptide with between two and six amino acids (PEP8).

[0532] In one aspect, the present disclosure provides a cyclic GFR-binding compound, wherein said cyclic GFR-binding compound is a cyclic peptide, a variant or analog thereof, or a cyclic peptidomimetic as defined herein, with between 15-60 (in particular between 15-55, more particularly between 19-60, and even more particularly between 19-55) amino acids, or between 15-35 (in particular between 15-30, more particularly between 19-35, and even more particularly between 19-30) amino acids, comprising a peptide with four amino acids (PEP12) and a peptide with five amino acids (PEP2); wherein said cyclic GFR-binding compound further comprises a peptide with five amino acids (PEP5), an amino acid or a peptide with between two and seven amino acids (PEP7), a peptide with between five and seven amino acids (PEP6), and an amino acid or a peptide with between two and six amino acids (PEP8).

[0533] In one aspect, the present disclosure provides a cyclic GFR-binding compound, wherein said cyclic GFR-binding compound is a cyclic peptide, a variant or analog thereof, or a cyclic peptidomimetic as defined herein, with between 15-60 (in particular between 15-55, more particularly between 19-60, and even more particularly between 19-55) amino acids, or between 15-35 (in particular between 15-30, more particularly between 19-35, and even more particularly between 19-30) amino acids, comprising a peptide with four amino acids (PEP1) and a peptide with five amino acids (PEP2); wherein said cyclic GFR-binding compound further comprises a peptide with between six and twelve amino acids (PEP9), a peptide with three amino acids (PEP4), and an amino acid or a peptide with between two and six amino acids (PEP8).

[0534] In one aspect, the present disclosure provides a cyclic GFR-binding compound, wherein said cyclic GFR-binding compound is a cyclic peptide, a variant or analog thereof, or a cyclic peptidomimetic as defined herein, with between 15-60 (in particular between 15-55, more particularly between 19-60, and even more particularly between 19-55) amino acids, or between 15-35 (in particular between 15-30, more particularly between 19-35, and even more particularly between 19-30) amino acids, comprising a peptide with four amino acids (PEP12) and a peptide with five amino acids (PEP2); wherein said cyclic GFR-binding compound further comprises a peptide with between six and twelve amino acids (PEP9), a peptide with three amino acids (PEP4), and an amino acid or a peptide with between two and six amino acids (PEP8).

[0535] In one aspect, the present disclosure provides a cyclic GFR-binding compound, wherein said cyclic GFR-binding compound is a cyclic peptide, a variant or analog thereof, or a cyclic peptidomimetic as defined herein, with between 15-60 (in particular between 15-55, more particularly between 19-60, and even more particularly between 19-55) amino acids, or between 15-35 (in particular between 15-30, more particularly between 19-35, and even more particularly between 19-30) amino acids, comprising a peptide with four amino acids (PEP1) and a peptide with five amino acids (PEP2); wherein said cyclic GFR-binding compound further comprises a peptide with between six and twelve amino acids (PEP9), a peptide with between five and seven amino acids (PEP6), and an amino acid or a peptide with between two and six amino acids (PEP8).

[0536] In one aspect, the present disclosure provides a cyclic GFR-binding compound, wherein said cyclic GFR-binding compound is a cyclic peptide, a variant or analog thereof, or a cyclic peptidomimetic as defined herein, with between 15-60 (in particular between 15-55, more particularly between 19-60, and even more particularly between 19-55) amino acids, or between 15-35 (in particular between 15-30, more particularly between 19-35, and even more particularly between 19-30) amino acids, comprising a peptide with four amino acids (PEP12) and a peptide with five amino acids (PEP2); wherein said cyclic GFR-binding compound further comprises a peptide with between six and twelve amino acids (PEP9), a peptide with between five and seven amino acids (PEP6), and an amino acid or a peptide with between two and six amino acids (PEP8).

[0537] In one aspect, the present disclosure provides a cyclic GFR-binding compound, wherein said cyclic GFR-binding compound is a cyclic peptide, a variant or analog thereof, or a cyclic peptidomimetic as defined herein, with between 15-60 (in particular between 15-55, more particularly between 19-60, and even more particularly between 19-55) amino acids, or between 15-35 (in particular between 15-30, more particularly between 19-35, and even more particularly between 19-30) amino acids, comprising a peptide, a variant or analog thereof, or a peptidomimetic having the following general formula (Ia) (hereinafter may also be referred to as compound (Ia) or peptide (Ia)):

PEP(A)-LINKER-PEP(B) (Ia)

[0538] wherein one end of LINKER interacts covalently with one end of PEP(A); wherein another end of LINKER interacts covalently with one end of PEP(B); wherein PEP(A) comprises PEP1; wherein PEP(B) comprises PEP2; wherein LINKER is a linear or branched organic divalent radical, moiety or compound having a molecular weight (Mw) comprised between about 28 and about 2,000 Da, in particular, between about 300 and about 1000 Da, more particularly between about 300 and about 800 Da.

[0539] In one aspect, the present disclosure provides a cyclic GFR-binding compound, wherein said cyclic GFR-binding compound is a cyclic peptide, a variant or analog thereof, or a cyclic peptidomimetic as defined herein, with between 15-60 (in particular between 15-55, more particularly between 19-60, and even more particularly between 19-55) amino acids, or between 15-35 (in particular between 15-30, more particularly between 19-35, and even more particularly between 19-30) amino acids, comprising a peptide, a variant or analog thereof, or a peptidomimetic having the following general formula (Ib) (hereinafter may also be referred to as compound (Ib) or peptide (Ib)):

PEP(A)-LINKER-PEP(B)-LINKER (Ib)

[0540] wherein one end of a first LINKER interacts covalently with one end of PEP(A); wherein another end of a first LINKER interacts covalently with one end of PEP(B); wherein one end of a second LINKER interacts covalently with another end of PEP(B); wherein another end of a second LINKER interacts covalently with another end of PEP(A); wherein PEP(A) comprises PEP1; wherein PEP(B) comprises PEP2; wherein LINKER are independently a linear or branched organic divalent radical, moiety or compound having a molecular weight (Mw) comprised between about 28 and about 2,000 Da, in particular, between about 300 and about 1000 Da, more particularly between about 300 and about 800 Da.

[0541] In the present description, the molecular weight of LINKER refer to the calculated molecular weight prior to being connected to/reacted with any of the elements it is configured to connect to or react with e.g. PEP(A), PEP(B) or any other groups defined herein.

[0542] 15-60 (in particular between 15-55, more particularly between 19-60, and even more particularly between 19-55) amino acids, or between 15-35 (in particular between 15-30, In one aspect, the present disclosure provides a cyclic GFR-binding compound comprising compounds (Ia) or (Ib), wherein PEP(A) comprises PEP1; wherein PEP(B) comprises PEP2; wherein PEP(A) further comprises PEP3; wherein PEP(B) further comprises PEP4.

[0543] In one aspect, the present disclosure provides a cyclic GFR-binding compound comprising compounds (Ia) or (Ib), wherein PEP(A) comprises PEP12; wherein PEP(B) comprises PEP2; wherein PEP(A) further comprises PEP3; wherein PEP(B) further comprises PEP4.

[0544] In one aspect, the present disclosure provides a cyclic GFR-binding compound comprising compounds (Ia) or (Ib), wherein PEP(A) comprises PEP1; wherein PEP(B) comprises PEP2; wherein PEP(A) further comprises PEP5; wherein PEP(B) further comprises PEP6.

[0545] In one aspect, the present disclosure provides a cyclic GFR-binding compound comprising compounds (Ia) or (Ib), wherein PEP(A) comprises PEP12; wherein PEP(B) comprises PEP2; wherein PEP(A) further comprises PEP5; wherein PEP(B) further comprises PEP6.

[0546] In one aspect, the present disclosure provides a cyclic GFR-binding compound comprising compounds (Ia) or (Ib), wherein PEP(A) comprises PEP1; wherein PEP(B) comprises PEP2; wherein PEP(A) further comprises PEP9; wherein PEP(B) further comprises PEP10.

[0547] In one aspect, the present disclosure provides a cyclic GFR-binding compound comprising compounds (Ia) or (Ib), wherein PEP(A) comprises PEP12; wherein PEP(B) comprises PEP2; wherein PEP(A) further comprises PEP9; wherein PEP(B) further comprises PEP10.

[0548] In one aspect, the present disclosure provides a cyclic GFR-binding compound comprising compounds (Ia) or (Ib), wherein PEP(A) comprises PEP1; wherein PEP(B) comprises PEP2; wherein PEP(A) further comprises PEP3; wherein PEP(B) further comprises PEP6.

[0549] In one aspect, the present disclosure provides a cyclic GFR-binding compound comprising compounds (Ia) or (Ib), wherein PEP(A) comprises PEP12; wherein PEP(B) comprises PEP2; wherein PEP(A) further comprises PEP3; wherein PEP(B) further comprises PEP6.

[0550] In one aspect, the present disclosure provides a cyclic GFR-binding compound comprising compounds (Ia) or (Ib), wherein PEP(A) comprises PEP1; wherein PEP(B) comprises PEP2; wherein PEP(A) further comprises PEP3; wherein PEP(B) further comprises PEP10.

[0551] In one aspect, the present disclosure provides a cyclic GFR-binding compound comprising compounds (Ia) or (Ib), wherein PEP(A) comprises PEP12; wherein PEP(B) comprises PEP2; wherein PEP(A) further comprises PEP3; wherein PEP(B) further comprises PEP10.

[0552] In one aspect, the present disclosure provides a cyclic GFR-binding compound comprising compounds (Ia) or (Ib), wherein PEP(A) comprises PEP1; wherein PEP(B) comprises PEP2; wherein PEP(A) further comprises PEP5; wherein PEP(B) further comprises PEP4.

[0553] In one aspect, the present disclosure provides a cyclic GFR-binding compound comprising compounds (Ia) or (Ib), wherein PEP(A) comprises PEP12; wherein PEP(B) comprises PEP2; wherein PEP(A) further comprises PEP5; wherein PEP(B) further comprises PEP4.

[0554] In one aspect, the present disclosure provides a cyclic GFR-binding compound comprising compounds (Ia) or (Ib), wherein PEP(A) comprises PEP1; wherein PEP(B) comprises PEP2; wherein PEP(A) further comprises PEP9; wherein PEP(B) further comprises PEP4.

[0555] In one aspect, the present disclosure provides a cyclic GFR-binding compound comprising compounds (Ia) or (Ib), wherein PEP(A) comprises PEP12; wherein PEP(B) comprises PEP2; wherein PEP(A) further comprises PEP9; wherein PEP(B) further comprises PEP4.

[0556] In one aspect, the present disclosure provides a cyclic GFR-binding compound comprising compounds (Ia) or (Ib), wherein PEP(A) comprises PEP1; wherein PEP(B) comprises PEP2; wherein PEP(A) further comprises PEP5; wherein PEP(B) further comprises PEP10.

[0557] In one aspect, the present disclosure provides a cyclic GFR-binding compound comprising compounds (Ia) or (Ib), wherein PEP(A) comprises PEP12; wherein PEP(B) comprises PEP2; wherein PEP(A) further comprises PEP5; wherein PEP(B) further comprises PEP10.

[0558] In one aspect, the present disclosure provides a cyclic GFR-binding compound comprising compounds (Ia) or (Ib), wherein PEP(A) comprises PEP1; wherein PEP(B) comprises PEP2; wherein PEP(A) further comprises PEP9; wherein PEP(B) further comprises PEP6.

[0559] In one aspect, the present disclosure provides a cyclic GFR-binding compound comprising compounds (Ia) or (Ib), wherein PEP(A) comprises PEP12; wherein PEP(B) comprises PEP2; wherein PEP(A) further comprises PEP9; wherein PEP(B) further comprises PEP6.

[0560] In one aspect, the present disclosure provides a cyclic GFR-binding compound comprising compounds (Ia) or (Ib), wherein PEP(A) comprises PEP1; wherein PEP(B) comprises PEP2; wherein PEP(A) further comprises PEP3 and PEP7; wherein PEP(B) further comprises PEP4.

[0561] In one aspect, the present disclosure provides a cyclic GFR-binding compound comprising compounds (Ia) or (Ib), wherein PEP(A) comprises PEP12; wherein PEP(B) comprises PEP2; wherein PEP(A) further comprises PEP3 and PEP7; wherein PEP(B) further comprises PEP4.

[0562] In one aspect, the present disclosure provides a cyclic GFR-binding compound comprising compounds (Ia) or (Ib), wherein PEP(A) comprises PEP1; wherein PEP(B) comprises PEP2; wherein PEP(A) further comprises PEP3 and PEP7; wherein PEP(B) further comprises PEP6.

[0563] In one aspect, the present disclosure provides a cyclic GFR-binding compound comprising compounds (Ia) or (Ib), wherein PEP(A) comprises PEP12; wherein PEP(B) comprises PEP2; wherein PEP(A) further comprises PEP3 and PEP7; wherein PEP(B) further comprises PEP6.

[0564] In one aspect, the present disclosure provides a cyclic GFR-binding compound comprising compounds (Ia) or (Ib), wherein PEP(A) comprises PEP1; wherein PEP(B) comprises PEP2; wherein PEP(A) further comprises PEP3 and PEP7; wherein PEP(B) further comprises PEP10.

[0565] In one aspect, the present disclosure provides a cyclic GFR-binding compound comprising compounds (Ia) or (Ib), wherein PEP(A) comprises PEP12; wherein PEP(B) comprises PEP2; wherein PEP(A) further comprises PEP3 and PEP7; wherein PEP(B) further comprises PEP10.

[0566] In one aspect, the present disclosure provides a cyclic GFR-binding compound comprising compounds (Ia) or (Ib), wherein PEP(A) comprises PEP1; wherein PEP(B) comprises PEP2; wherein PEP(A) further comprises PEP7; wherein PEP(B) further comprises PEP4 and PEP8.

[0567] In one aspect, the present disclosure provides a cyclic GFR-binding compound comprising compounds (Ia) or (Ib), wherein PEP(A) comprises PEP12; wherein PEP(B) comprises PEP2; wherein PEP(A) further comprises PEP7; wherein PEP(B) further comprises PEP4 and PEP8.

[0568] In one aspect, the present disclosure provides a cyclic GFR-binding compound comprising compounds (Ia) or (Ib), wherein PEP(A) comprises PEP1; wherein PEP(B) comprises PEP2; wherein PEP(A) further comprises PEP7; wherein PEP(B) further comprises PEP6 and PEP8.

[0569] In one aspect, the present disclosure provides a cyclic GFR-binding compound comprising compounds (Ia) or (Ib), wherein PEP(A) comprises PEP12; wherein PEP(B) comprises PEP2; wherein PEP(A) further comprises PEP7; wherein PEP(B) further comprises PEP6 and PEP8.

[0570] In one aspect, the present disclosure provides a cyclic GFR-binding compound comprising compounds (Ia) or (Ib), wherein PEP(A) comprises PEP1; wherein PEP(B) comprises PEP2; wherein PEP(A) further comprises PEP5 and PEP7; wherein PEP(B) further comprises PEP4.

[0571] In one aspect, the present disclosure provides a cyclic GFR-binding compound comprising compounds (Ia) or (Ib), wherein PEP(A) comprises PEP12; wherein PEP(B) comprises PEP2; wherein PEP(A) further comprises PEP5 and PEP7; wherein PEP(B) further comprises PEP4.

[0572] In one aspect, the present disclosure provides a cyclic GFR-binding compound comprising compounds (Ia) or (Ib), wherein PEP(A) comprises PEP1; wherein PEP(B) comprises PEP2; wherein PEP(A) further comprises PEP5 and PEP7; wherein PEP(B) further comprises PEP6.

[0573] In one aspect, the present disclosure provides a cyclic GFR-binding compound comprising compounds (Ia) or (Ib), wherein PEP(A) comprises PEP12; wherein PEP(B) comprises PEP2; wherein PEP(A) further comprises PEP5 and PEP7; wherein PEP(B) further comprises PEP6.

[0574] In one aspect, the present disclosure provides a cyclic GFR-binding compound comprising compounds (Ia) or (Ib), wherein PEP(A) comprises PEP1; wherein PEP(B) comprises PEP2; wherein PEP(A) further comprises PEP5 and PEP7; wherein PEP(B) further comprises PEP10.

[0575] In one aspect, the present disclosure provides a cyclic GFR-binding compound comprising compounds (Ia) or (Ib), wherein PEP(A) comprises PEP12; wherein PEP(B) comprises PEP2; wherein PEP(A) further comprises PEP5 and PEP7; wherein PEP(B) further comprises PEP10.

[0576] In one aspect, the present disclosure provides a cyclic GFR-binding compound comprising compounds (Ia) or (Ib), wherein PEP(A) comprises PEP1; wherein PEP(B) comprises PEP2; wherein PEP(A) further comprises PEP5 and PEP7; wherein PEP(B) further comprises PEP4 and PEP8.

[0577] In one aspect, the present disclosure provides a cyclic GFR-binding compound comprising compounds (Ia) or (Ib), wherein PEP(A) comprises PEP12; wherein PEP(B) comprises PEP2; wherein PEP(A) further comprises PEP5 and PEP7; wherein PEP(B) further comprises PEP4 and PEP8.

[0578] In one aspect, the present disclosure provides a cyclic GFR-binding compound comprising compounds (Ia) or (Ib), wherein PEP(A) comprises PEP1; wherein PEP(B) comprises PEP2; wherein PEP(A) further comprises PEP5 and PEP7; wherein PEP(B) further comprises PEP6 and PEP8.

[0579] In one aspect, the present disclosure provides a cyclic GFR-binding compound comprising compounds (Ia) or (Ib), wherein PEP(A) comprises PEP12; wherein PEP(B) comprises PEP2; wherein PEP(A) further comprises PEP5 and PEP7; wherein PEP(B) further comprises PEP6 and PEP8.

[0580] In one aspect, the present disclosure provides a cyclic GFR-binding compound comprising compounds (Ia) or (Ib), wherein PEP(A) comprises PEP1; wherein PEP(B) comprises PEP2; wherein PEP(A) further comprises PEP9; wherein PEP(B) further comprises PEP4 and PEP8.

[0581] In one aspect, the present disclosure provides a cyclic GFR-binding compound comprising compounds (Ia) or (Ib), wherein PEP(A) comprises PEP12; wherein PEP(B) comprises PEP2; wherein PEP(A) further comprises PEP9; wherein PEP(B) further comprises PEP4 and PEP8.

[0582] In one aspect, the present disclosure provides a cyclic GFR-binding compound comprising compounds (Ia) or (Ib), wherein PEP(A) comprises PEP1; wherein PEP(B) comprises PEP2; wherein PEP(A) further comprises PEP9; wherein PEP(B) further comprises PEP6 and PEP8.

[0583] In one aspect, the present disclosure provides a cyclic GFR-binding compound comprising compounds (Ia) or (Ib), wherein PEP(A) comprises PEP12; wherein PEP(B) comprises PEP2; wherein PEP(A) further comprises PEP9; wherein PEP(B) further comprises PEP6 and PEP8.

[0584] In one aspect, the present disclosure provides a cyclic GFR-binding compound, wherein said cyclic GFR-binding compound is a cyclic peptide, a variant or analog thereof, or a cyclic peptidomimetic as defined herein, with between 15-60 (in particular between 15-55, more particularly between 19-60, and even more particularly between 19-55) amino acids, or between 15-35 (in particular between 15-30, more particularly between 19-35, and even more particularly between 19-30) amino acids, comprising a peptide, a variant or analog thereof, or a peptidomimetic having the following general formula (IIa) (hereinafter may also be referred to as compound (IIa) or peptide (IIa)):

PEP(C)-PEP12-LINKER-PEP2-PEP(D) (IIa)

[0585] wherein LINKER is a linear or branched organic divalent radical, moiety or compound having a molecular weight (Mw) comprised between about 28 and about 2,000 Da, in particular, between about 300 and about 1000 Da, more particularly between about 300 and about 800 Da; wherein PEP12 is a peptide with 8 amino acids of formula PEP1-AA¹⁷-PEP11 as defined herein; wherein PEP2 is a peptide with five amino acids as already defined herein; wherein one end of PEP(C) interacts covalently with PEP12 via one end of PEP1; wherein one end of PEP(D) interacts covalently with one end of PEP2; wherein one end of LINKER interacts covalently with one end of PEP12 via one end of PEP11; wherein another end of LINKER interacts covalently with another end of PEP2; wherein PEP(C) is a peptide with at least 5 amino acids, in particular a peptide with between 5 and 12 amino acids; wherein PEP(D) is a peptide with at least 5 amino acids, in particular a peptide with between 5 and 11 amino acids.

[0586] In one aspect, the present disclosure provides a cyclic GFR-binding compound, wherein said cyclic GFR-binding compound is a cyclic peptide, a variant or analog thereof, or a cyclic peptidomimetic as defined herein, with between 15-60 (in particular between 15-55, more particularly between 19-60, and even more particularly between 19-55) amino acids, or between 15-35 (in particular between 15-30, more particularly between 19-35, and even more particularly between 19-30) amino acids, comprising a peptide, a variant or analog thereof, or a peptidomimetic having the following general formula (IIb) (hereinafter may also be referred to as compound (IIb) or peptide (IIb)):

PEP(C)-PEP12-LINKER-PEP2-PEP(D)-LINKER (IIb)

[0587] wherein LINKER are independently a linear or branched organic divalent radical, moiety or compound having a molecular weight (Mw) comprised between about 28 and about 2,000 Da, in particular, between about 300 and about 1000 Da, more particularly between about 300 and about 800 Da; wherein PEP12 is a peptide with 8 amino acids of formula PEP1-AA¹⁷-PEP11 as defined herein; wherein PEP2 is a peptide with five amino acids as already defined herein; wherein one end of PEP(C) interacts covalently with PEP12 via one end of PEP1; wherein one end of PEP(D) interacts covalently with one end of PEP2; wherein one end of a first LINKER interacts covalently with one end of PEP12 via one end of PEP11; wherein another end of a first LINKER interacts covalently with another end of PEP2; wherein one end of a second LINKER interacts covalently with another end of PEP(D); wherein another end of a second LINKER interacts covalently with another end of PEP(C); wherein PEP(C) is a peptide with at least 5 amino acids, in particular a peptide with between 5 and 12 amino acids; wherein PEP(D) is a peptide with at least 5 amino acids, in particular a peptide with between 5 and 11 amino acids.

[0588] In one aspect, the present disclosure provides a cyclic GFR-binding compound comprising compounds (IIa) or (IIb), wherein PEP(C) comprises PEP3; wherein PEP(D) comprises PEP4.

[0589] In one aspect, the present disclosure provides a cyclic GFR-binding compound comprising compounds (IIa) or (IIb), wherein PEP(C) comprises PEP5; wherein PEP(D) comprises PEP6. In one particular example, PEP(C) is PEP5; and PEP(D) is PEP6.

[0590] In one aspect, the present disclosure provides a cyclic GFR-binding compound comprising compounds (IIa) or (IIb), wherein PEP(C) comprises PEP9; wherein PEP(D) comprises PEP10. In one particular example, PEP(C) is PEP9; and PEP(D) is PEP10.

[0591] In one aspect, the present disclosure provides a cyclic GFR-binding compound comprising compounds (IIa) or (IIb), wherein PEP(C) comprises PEP3; wherein PEP(D) comprises PEP6. In one particular example, PEP(C) comprises PEP3 and PEP(D) is PEP6.

[0592] In one aspect, the present disclosure provides a cyclic GFR-binding compound comprising compounds (IIa) or (IIb), wherein PEP(C) comprises PEP3; wherein PEP(D) comprises PEP10. In one particular example, PEP(C) comprises PEP3 and PEP(D) is PEP10.

[0593] In one aspect, the present disclosure provides a cyclic GFR-binding compound comprising compounds (IIa) or (IIb), wherein PEP(C) comprises PEP5; wherein PEP(D) comprises PEP4. In one particular example, PEP(C) is PEP5 and PEP(D) comprises PEP4.

[0594] In one aspect, the present disclosure provides a cyclic GFR-binding compound comprising compounds (IIa) or (IIb), wherein PEP(C) comprises PEP9; wherein PEP(D) comprises PEP4. In one particular example, PEP(C) is PEP9 and PEP(D) comprises PEP4.

[0595] In one aspect, the present disclosure provides a cyclic GFR-binding compound comprising compounds (IIa) or (IIb), wherein PEP(C) comprises PEP5; wherein PEP(D) comprises PEP10. In one particular example, PEP(C) is PEP5 and PEP(D) is PEP10.

[0596] In one aspect, the present disclosure provides a cyclic GFR-binding compound comprising compounds (IIa) or (IIb), wherein PEP(C) comprises PEP9; wherein PEP(D) comprises PEP6. In one particular example, PEP(C) is PEP9 and PEP(D) is PEP6.

[0597] In one aspect, the present disclosure provides a cyclic GFR-binding compound comprising compounds (IIa) or (IIb), wherein PEP(C) comprises PEP3 and PEP7; wherein PEP(D) comprises PEP4.

[0598] In one aspect, the present disclosure provides a cyclic GFR-binding compound comprising compounds (IIa) or (IIb), wherein PEP(C) comprises PEP3 and PEP7; wherein PEP(D) comprises PEP6. In one particular example, PEP(C) comprises PEP3 and PEP7, and PEP(D) is PEP6.

[0599] In one aspect, the present disclosure provides a cyclic GFR-binding compound comprising compounds (IIa) or (IIb), wherein PEP(C) comprises PEP3 and PEP7; wherein PEP(D) comprises PEP10. In one particular example, PEP(C) comprises PEP3 and PEP7, and PEP(D) is PEP10.

[0600] In one aspect, the present disclosure provides a cyclic GFR-binding compound comprising compounds (IIa) or (IIb), wherein PEP(C) comprises PEP7; wherein PEP(D) comprises PEP4 and PEP8.

[0601] In one aspect, the present disclosure provides a cyclic GFR-binding compound comprising compounds (IIa) or (IIb), wherein PEP(C) comprises PEP7; wherein PEP(D) comprises PEP6 and PEP8.

[0602] In one aspect, the present disclosure provides a cyclic GFR-binding compound comprising compounds (IIa) or (IIb), wherein PEP(C) comprises PEP5 and PEP7; wherein PEP(D) comprises PEP4.

[0603] In one aspect, the present disclosure provides a cyclic GFR-binding compound comprising compounds (IIa) or (IIb), wherein PEP(C) comprises PEP5 and PEP7; wherein PEP(D) comprises PEP6.

[0604] In one aspect, the present disclosure provides a cyclic GFR-binding compound comprising compounds (IIa) or (IIb), wherein PEP(C) comprises PEP5 and PEP7; wherein PEP(D) comprises PEP10.

[0605] In one aspect, the present disclosure provides a cyclic GFR-binding compound comprising compounds (IIa) or (IIb), wherein PEP(C) comprises PEP5 and PEP7; wherein PEP(D) comprises PEP4 and PEP8.

[0606] In one aspect, the present disclosure provides a cyclic GFR-binding compound comprising compounds (IIa) or (IIb), wherein PEP(C) comprises PEP5 and PEP7; wherein PEP(D) comprises PEP6 and PEP8.

[0607] In one aspect, the present disclosure provides a cyclic GFR-binding compound comprising compounds (IIa) or (IIb), wherein PEP(C) comprises PEP9; wherein PEP(D) comprises PEP4 and PEP8.

[0608] In one aspect, the present disclosure provides a cyclic GFR-binding compound comprising compounds (IIa) or (IIb), wherein PEP(C) comprises PEP9; wherein PEP(D) comprises PEP6 and PEP8.

[0609] In one aspect, the present disclosure provides a cyclic GFR-binding compound comprising compounds (IIa) or (IIb), wherein PEP(C) is PEP5 or PEP9 and wherein PEP(D) is PEP6 or PEP10.

[0610] In one aspect, the present disclosure provides a cyclic GFR-binding compound, wherein said cyclic GFR-binding compound is a cyclic peptide, a variant or analog thereof, or a cyclic peptidomimetic as defined herein, with between 15-60 (in particular between 15-55, more particularly between 19-60, and even more particularly between 19-55) amino acids, or between 15-35 (in particular between 15-30, more particularly between 19-35, and even more particularly between 19-30) amino acids, comprising a peptide, a variant or analog thereof, or a peptidomimetic having the following general formula (IIIa) (hereinafter may also be referred to as compound (IIIa) or peptide (IIIa)):

PEP7-PEP5-PEP12-LINKER-PEP2-PEP6-PEP8 (IIIa)

[0611] wherein LINKER is a linear or branched organic divalent radical, moiety or compound having a molecular weight (Mw) comprised between about 28 and about 2,000 Da, in particular, between about 300 and about 1000 Da, more particularly between about 300 and about 800 Da; wherein PEP12 is a peptide with 8 amino acids of formula PEP1-AA¹⁷-PEP11 as defined herein; wherein PEP2 is a peptide with five amino acids as already defined herein; wherein PEP5 is a peptide with five amino acids as already defined herein; wherein PEP6 is a peptide with between five and seven amino acids as already defined herein; wherein PEP7 an amino acid or a peptide with between two and seven amino acids as already defined herein; wherein PEP8 an amino acid or a peptide with between two and six amino acids as already defined herein; wherein one end of LINKER interacts covalently with one end of PEP12 via AA²⁰; wherein another end of LINKER interacts covalently with one end of PEP2 via AA²¹; wherein one end of PEP5 interacts covalently with another end of PEP12 via AA¹²; wherein another end of PEP5 interacts covalently with one end of PEP7 via AA⁸; wherein one end of PEP6 interacts covalently with another end of PEP2 via AA²⁶; wherein another end of PEP6 interacts covalently with one end of PEP8 via AA³².

[0612] In one aspect, the present disclosure provides a cyclic GFR-binding compound, wherein said cyclic GFR-binding compound is a cyclic peptide, a variant or analog thereof, or a cyclic peptidomimetic as defined herein, with between 15-60 (in particular between 15-55, more particularly between 19-60, and even more particularly between 19-55) amino acids, or between 15-35 (in particular between 15-30, more particularly between 19-35, and even more particularly between 19-30) amino acids, comprising a peptide, a variant or analog thereof, or a peptidomimetic having the following general formula (IIIb) (hereinafter may also be referred to as compound (IIIb) or peptide (IIIb)):

PEP7-PEP5-PEP12-LINKER-PEP2-PEP6-PEP8-LINKER (IIIb)

[0613] wherein LINKER are independently a linear or branched organic divalent radical, moiety or compound having a molecular weight (Mw) comprised between about 28 and about 2,000 Da, in particular, between about 300 and about 1000 Da, more particularly between about 300 and about 800 Da; wherein PEP12 is a peptide with 8 amino acids of formula PEP1-AA¹⁷-PEP11 as defined herein; wherein PEP2 is a peptide with five amino acids as already defined herein; wherein PEP5 is a peptide with five amino acids as already defined herein; wherein PEP6 is a peptide with between five and seven amino acids as already defined herein; wherein PEP7 an amino acid or a peptide with between two and seven amino acids as already defined herein; wherein PEP8 an amino acid or a peptide with between two and six amino acids as already defined herein; wherein one end of a first LINKER interacts covalently with one end of PEP12 via AA²⁰; wherein another end of a first LINKER interacts covalently with one end of PEP2 via AA²¹ wherein one end of a second LINKER interacts covalently with another end of PEP8; wherein another end of a second LINKER interacts covalently with another end of PEP7; wherein one end of PEP5 interacts covalently with another end of PEP12 via AA¹²; wherein another end of PEP5 interacts covalently with one end of PEP7 via AA⁸; wherein one end of PEP6 interacts covalently with another end of PEP2 via AA²⁶; wherein another end of PEP6 interacts covalently with one end of PEP8 via AA³².

[0614] In one aspect, the present disclosure provides a cyclic GFR-binding compound, wherein said cyclic GFR-binding compound is a cyclic peptide, a variant or analog thereof, or a cyclic peptidomimetic as defined herein, with between 15-60 (in particular between 15-55, more particularly between 19-60, and even more particularly between 19-55) amino acids, or between 15-35 (in particular between 15-30, more particularly between 19-35, and even more particularly between 19-30) amino acids, comprising a peptide, a variant or analog thereof, or a peptidomimetic having the following general formula (IVa) (hereinafter may also be referred to as compound (IVa) or peptide (IVa)):

AA¹-AA²-AA³-AA⁴-AA⁵-AA⁶-AA⁷-AA⁸-AA⁹-AA¹⁰-AA¹¹-AA¹²-AA¹³-AA¹⁴-AA¹⁵-AA¹⁶-AA¹⁷-AA¹⁸-AA¹⁹-AA²⁰-LINKER-AA²¹-AA²²-AA²³-AA²⁴-AA²⁵-AA²⁶-AA²⁷-AA²⁸-AA³⁰-AA³¹-AA³²-AA³³-AA³⁴-AA³⁵-AA³⁶-AA³⁷-AA³⁸ (IVa)

[0615] wherein LINKER is a linear or branched organic divalent radical, moiety or compound having a molecular weight (Mw) comprised between about 28 and about 2,000 Da, in particular, between about 300 and about 1000 Da, more particularly between about 300 and about 800 Da; wherein AA¹-AA²-AA³-AA⁴-AA⁵-AA⁶-AA⁷ is PEP7 as defined herein; wherein AA¹³-AA¹⁴-AA¹⁵-AA¹⁶-AA¹⁷-AA¹⁸-AA¹⁹-AA²⁰ is PEP12 as defined herein; wherein AA²¹-AA²²-AA²³-AA²⁴-AA²⁵ is PEP2 as already defined herein; wherein AA⁸-AA⁹-AA¹⁰ is PEP3 as defined herein; wherein AA³⁰-AA³¹-AA³² is PEP4 as defined herein; wherein AA³³-AA³⁴-AA³⁵-AA³⁶-AA³⁷-AA³⁸ is PEP8 as defined herein; wherein AA¹¹, AA¹², AA²⁶, AA²⁷, AA²⁸, and AA²⁹ are as defined herein; wherein one end of LINKER interacts covalently with AA²⁰; wherein another end of LINKER interacts covalently with AA²¹; wherein AA¹ and AA²¹ may be both N-terminal amino acids or both C-terminal amino acids; wherein AA³⁸ and AA²⁰ may be both N-terminal amino acids or both C-terminal amino acids.

[0616] In one aspect, the present disclosure provides a cyclic GFR-binding compound, wherein said cyclic GFR-binding compound is a cyclic peptide, a variant or analog thereof, or a cyclic peptidomimetic as defined herein, with between 15-60 (in particular between 15-55, more particularly between 19-60, and even more particularly between 19-55) amino acids, or between 15-35 (in particular between 15-30, more particularly between 19-35, and even more particularly between 19-30) amino acids, comprising a peptide, a variant or analog thereof, or a peptidomimetic having the following general formula (IVb) (hereinafter may also be referred to as compound (IVb) or peptide (IVb)):

AA¹-AA²-AA³-AA⁴-AA⁵-AA⁶-AA⁷-AA⁸-AA⁹-AA¹⁰-AA¹¹-AA¹²-AA¹³-AA¹⁴-AA¹⁵-AA¹⁶-AA¹⁷-AA¹⁸-AA¹⁹-AA²⁰-LINKER-AA²¹-AA²²-AA²³-AA²⁴-AA²⁵-AA²⁶-AA²⁷-AA²⁸-AA²⁹-AA³⁰-AA³¹-AA³²-AA³³-AA³⁴-AA³⁵-AA³⁶-AA³⁷-AA³⁸-LINKER (IVb)

[0617] wherein LINKER are independently a linear or branched organic divalent radical, moiety or compound having a molecular weight (Mw) comprised between about 28 and about 2,000 Da, in particular, between about 300 and about 1000 Da, more particularly between about 300 and about 800 Da; wherein AA¹-AA²-AA³-AA⁴-AA⁵-AA⁶-AA⁷ is PEP7 as defined herein; wherein AA¹³-AA¹⁴-AA¹⁵-AA¹⁶-AA¹⁷-AA¹⁸-AA¹⁹-AA²⁰ is PEP12 as defined herein; wherein AA²¹-AA²²-AA²³-AA²⁴-AA²⁵ is PEP2 as already defined herein; wherein AA⁸-AA⁹-AA¹ is PEP3 as defined herein; wherein AA³⁰-AA³¹-AA³² is PEP4 as defined herein; wherein AA³³-AA³⁴-AA³⁵-AA³⁶-AA³⁷-AA³⁸ is PEP8 as defined herein; wherein AA¹¹, AA¹², AA²⁶, AA²⁷, AA²⁸, and AA²⁹ are as defined herein; wherein one end of a first LINKER interacts covalently with AA²⁰; wherein another end of a first LINKER interacts covalently with AA²¹; wherein one end of a second LINKER interacts covalently with AA³⁸; wherein another end of a second LINKER interacts covalently with AA¹; wherein AA¹ may be an N-terminal amino acids or a C-terminal amino acid.

[0618] In one aspect, the present disclosure provides a cyclic GFR-binding compound, wherein said cyclic GFR-binding compound is a cyclic peptide, a variant or analog thereof, or a cyclic peptidomimetic as defined herein, with between 15-60 (in particular between 15-55, more particularly between 19-60, and even more particularly between 19-55) amino acids, or between 15-35 (in particular between 15-30, more particularly between 19-35, and even more particularly between 19-30) amino acids, comprising two LINKERs.

[0619] In one aspect, the present disclosure provides a cyclic GFR-binding compound, wherein said cyclic GFR-binding compound is a cyclic peptide, a variant or analog thereof, or a cyclic peptidomimetic as defined herein, with between 15-60 (in particular between 15-55, more particularly between 19-60, and even more particularly between 19-55) amino acids, or between 15-35 (in particular between 15-30, more particularly between 19-35, and even more particularly between 19-30) amino acids, having any one of the following schematic general formulae (V) to (XXVIII) (hereinafter may also be referred to as compounds (V) to (XXVIII) or peptides (V) to (XXVIII)):

[chemical structure]

[chemical structure]

[chemical structure]

[chemical structure]

[0620] wherein LINKER is a linear or branched organic divalent radical, moiety or compound having a molecular weight (Mw) comprised between about 28 and about 2,000 Da, in particular, between about 300 and about 1000 Da, more particularly between about 300 and about 800 Da; wherein PEP12 is a peptide with 8 amino acids of formula PEP1-AA¹⁷-PEP11 as defined herein; wherein PEP2 is a peptide with five amino acids as already defined herein; wherein PEP5 is a peptide with five amino acids as already defined herein; wherein PEP6 is a peptide with between five and seven amino acids as already defined herein; wherein PEP7 an amino acid or a peptide with between two and seven amino acids as already defined herein; wherein PEP8 an amino acid or a peptide with between two and six amino acids as already defined herein; wherein PEP9 is a peptide with between six and twelve amino acids; wherein PEP10 is a peptide with between six and eleven amino acids; wherein curved lines represents covalent bonds between LINKERs and PEP1 to PEP12 “boxes”. Curved lines' lengths may not be representative of the actual relative distance between the LINKERs and PEP1 to PEP12.

[0621] In one aspect, the present disclosure provides a cyclic GFR-binding compound, wherein said cyclic GFR-binding compound is a cyclic peptide, a variant or analog thereof, or a cyclic peptidomimetic as defined herein, with between 15-60 (in particular between 15-55, more particularly between 19-60, and even more particularly between 19-55) amino acids, or between 15-35 (in particular between 15-30, more particularly between 19-35, and even more particularly between 19-30) amino acids, having any one of the following schematic general formulae (XXIX) to (XXXIV) (hereinafter may also be referred to as compounds (XXIX) to (XXXIV) or peptides (XXIX) to (XXXIV)):

[chemical structure]

[chemical structure]

[0622] wherein LINKER is a linear or branched organic divalent radical, moiety or compound having a molecular weight (Mw) comprised between about 28 and about 2,000 Da, in particular, between about 300 and about 1000 Da, more particularly between about 300 and about 800 Da; wherein AA¹³-AA¹⁴-AA¹⁵-AA¹⁶-AA¹⁷-AA¹⁸-AA¹⁹-AA²⁰ is PEP12 as defined herein; wherein AA²¹-AA²²-AA²³-AA²⁴-AA²⁵ is PEP2 as already defined herein; wherein AA⁸-AA⁹-AA¹⁰ is PEP3 as defined herein; wherein AA³⁰-AA³¹-AA³² is PEP4 as defined herein; wherein AA¹¹, AA¹², AA²⁶, AA²⁷, AA²⁸, and AA²⁹ are as defined herein; wherein one end of LINKER interacts covalently with AA¹⁶ or AA²⁰; wherein another end of LINKER interacts covalently with AA²¹; and wherein curved lines represents covalent bonds between LINKERs and AAs “boxes”. Curved lines' lengths may not be representative of the actual relative distance between the LINKERs and AAs.

[0623] Each and every definitions of PEP1, PEP2, PEP3, PEP4, PEP5, PEP6, PEP7, PEP8, PEP9, PEP10, PEP11, PEP12, AA¹⁷, “PEP” pairs, quadruplets, hexaplets and heptuplet e.g. PEP1:PEP2, PEP12:PEP2, or PEP7:PEP5:PEP12:LINKER:PEP2:PEP6:PEP8, as already defined herein with respect to non-cyclic GFR-binding compounds also apply, without any specific restrictions unless specified otherwise or contradictory in context, to the cyclic GFR-binding compounds as defined herein.

[0624] In one example, said cyclic GFR-binding compound is a synthetic molecule as defined herein in the definition section.

[0625] In one particular example, said cyclic GFR-binding compound is a synthetic peptide, or a variant or analog thereof, or a cyclic peptidomimetic.

[0626] In one most particular example, said cyclic GFR-binding compound is a synthetic cyclic peptide.

[0627] In one example, a length of said cyclic GFR-binding compound, in solution, such as in a physiologically acceptable solvent such as water or PBS, is comprised between about 6 and about 20 nm, preferably between about 6 and about 16 nm, as determined using the standard «3D» procedure described above.

[0628] In one particular example, said cyclic GFR-binding compounds may be any one of peptides of SEQ ID NO: 38200 to 100371.

[0629] LINKER Suitable for Implementing Cyclic GFR-Compounds' Embodiments

[0630] In one particular example, said LINKER has a Mw comprised between about 28 and about 2,000 Da. In one particular example, said LINKER has a Mw comprised between about 75 and about 2,000 Da. In one particular example, said LINKER has a Mw comprised between about 150 and about 2,000 Da. In one particular example, said LINKER has a Mw comprised between about 150 and about 1,500 Da. In one most particular example, said LINKER has a Mw comprised between about 300 and about 1,000 Da. In one even more particular example, said LINKER has a Mw comprised between about 300 and about 800 Da.

[0631] The chemical nature of said LINKER is not meant to be particularly limited and may be any organic molecule capable of covalently connecting two ends of a peptide or a peptidomimetic such as PEP(A)-LINKER-PEP(B) or PEP(C)-PEP12-LINKER-PEP2-PEP(D) so as to form a cyclic compound, so long as LINKER provides sufficient spacing between the two elements connected therethrough and adequate cycle stability for these two connected elements to provide or conserve the required recoding activity. LINKER may thus be, for example, in certain embodiments, a peptide, or variant, analog or peptidomimetic thereof, a polysaccharide, a polynucleotide, a saturated or unsaturated hydrocarbon chain, or a mixture thereof.

[0632] For example, in certain embodiments, LINKER is a peptide with 2 to 16 amino acids. In one particular example, LINKER is a peptide with 2 to 10 amino acids. In one particular example, LINKER is a peptide with 2 to 9 amino acids. In one most particular example, LINKER is a peptide with 3 to 9 amino acids.

[0633] Thus, in one particular example, said cyclic GFR-binding compound is a peptide, a variant or analog thereof as defined herein, with between 15-60 (in particular between 15-55, more particularly between 19-60, and even more particularly between 19-55) amino acids, or between 15-35 (in particular between 15-30, more particularly between 19-35, and even more particularly between 19-30) amino acids, comprising a peptide, a variant or analog thereof of general formula (I); wherein one end of LINKER interacts covalently with one end of PEP(A); wherein another end of LINKER interacts covalently with one end of PEP(B); wherein PEP(A) comprises PEP1 or PEP12; wherein PEP(B) comprises PEP2; wherein LINKER is a peptide comprising 2 to 16 amino acids (in particular 2 to 10, 2 to 9, or 3 to 9 amino acids).

[0634] Thus, in one particular example, said cyclic GFR-binding compound is a peptide, a variant or analog thereof as defined herein, with between 15-60 (in particular between 15-55, more particularly between 19-60, and even more particularly between 19-55) amino acids, or between 15-35 (in particular between 15-30, more particularly between 19-35, and even more particularly between 19-30) amino acids, comprising a peptide, a variant or analog thereof of general formula (II); wherein LINKER is a peptide comprising 2 to 16 amino acids (in particular 2 to 10, 2 to 9, or 3 to 9 amino acids); wherein PEP12 is a peptide with 8 amino acids of formula PEP1-AA¹⁷-PEP11 as already defined herein; wherein PEP1, PEP2, PEP11, PEP(C) and PEP(D) are as already defined herein; wherein AA¹³ and AA²¹ may be both N-terminal amino acids or both C-terminal amino acids; wherein AA²⁵ and AA²⁰ may be both N-terminal amino acids or both C-terminal amino acids; wherein one end of LINKER interacts covalently with one end of PEP12 via AA²⁰ wherein another end of LINKER interacts covalently with PEP2 via AA²¹; wherein one end of PEP(C) interacts covalently with PEP12 via AA¹³; wherein one end of PEP(D) interacts covalently with PEP2 via AA²⁵.

[0635] Thus, in one particular example, said cyclic GFR-binding compound is a peptide, a variant or analog thereof as defined herein, with between 15-60 (in particular between 15-55, more particularly between 19-60, and even more particularly between 19-55) amino acids, or between 15-35 (in particular between 15-30, more particularly between 19-35, and even more particularly between 19-30) amino acids, having any one of the general formula (V) to (XXXIV); wherein LINKER is a peptide comprising 2 to 16 amino acids (in particular 2 to 10, 2 to 9, or 3 to 9 amino acids).

[0636] In certain embodiments, said cyclic GFR-binding compound is a cyclic peptidomimetic as defined herein, with between 15-60 (in particular between 15-55, more particularly between 19-60, and even more particularly between 19-55) amino acids, or between 15-35 (in particular between 15-30, more particularly between 19-35, and even more particularly between 19-30) amino acids, of general formula (II); wherein LINKER is not a peptide but may comprise amino acids or peptides in covalent or non-covalent (preferably covalent) association with other groups or residues other than amino acids or peptides.

[0637] In one particular example, LINKER comprises (or is) a peptide of general formula (XXXV):

*AA²⁰¹-AA²⁰²-AA²⁰³-AA²⁰⁴-AA²⁰⁵-AA²⁰⁶-AA²⁰⁷-AA²⁰⁸-AA²⁰⁹** (XXXV)

[0638] wherein said peptide of formula (XXXV) may be selected from the group consisting of *AA^{III}-AA^{I}-AA^{I}-AA^{II}-AA^{VII}-AA^{XII}-AA^{XII}-AA^{XII}-AA^{XII}**, *AA^{III}-AA^{I}-AA^{VI}-AA^{II}-AA^{VI}-AA^{XII}-AA^{XII}-AA^{XIII}-AA^{XII}**, *AA^{III}-AA^{I}-AA^{I}-AA^{II}-AA^{II}-AA^{XI}-AA^{XII}-AA^{XII}l-AA^{XIII}**, *AA^{III}-AA^{III}-AA^{I}-AA^{II}-AA^{II}-AA^{XII}-AA^{XII}-AA^{XIII}**, *AA^{III}-AA^{I}-AA^{II}-AA^{IV}-AA^{IV}-AA^{XII}-AA^{XII}-AA^{XII}-AA^{XII}**, *AA^{II}-AA^{I}-AA^{II}-AA^{II}-AA^{II}-AA^{XII}-AA^{XIII}-AA^{XIII}**, *AA^{III}-AA^{III}-AA^{II}-AA^{VII}-AA^{II}-AA^{XII}-AA^{XI}-AA^{XII}-AA^{XIII}**, *AA^{III}-AA^{I}-AA^{I}-AA^{II}-AA^{II}-AA^{XI}-AA^{XII}-AA^{XII}-AA^{XIII}**, *AA^{V}-AA^{V}-AA^{VII}-AA^{VII}-AA^{XII}-AA^{XII}-AA^{XIII}-AA^{XIII}**, *AA^{VIII}-AA^{V}-AA^{VIII}-AA^{II}-AA^{XII}-AA^{XII}-AA^{XII}-AA^{XIII}** and *AA^{V}-AA^{V}-AA^{VII}-AA^{II}-AA^{XII}-AA^{XII}-AA^{XII}-AA^{XIII}-AA^{XIII}**; wherein AA^{I} is any amino acid as defined herein, AA^{II} is any polar amino acid as defined herein, AA^{III} is any acidic amino acid as defined herein, AA^{IV} is any aliphatic amino acid as defined herein, AA^{V} is any apolar amino acid as defined herein, AA^{V} is any aromatic amino acid as defined herein, AA^{V} is any basic amino acid as defined herein, AA^{VIII} is L or I as defined herein, AA^{XII} is an amino acid selected from the group consisting of G, A, V, L, I, P, M, K, R, H, Y and E, wherein AA^{XII} is absent, AA^{u} or AA^{V}I, preferably absent; and wherein any one of the fragment AA²⁰¹, AA²⁰¹-AA²⁰², AA²⁰¹-AA²⁰²-AA²⁰³, AA²⁰¹-AA²⁰²-AA²⁰³-AA²⁰⁴-AA²⁰¹-AA²⁰²-AA²⁰³-AA²⁰⁴-AA²⁰⁵-AA²⁰¹-AA²⁰²-AA²⁰³-AA²⁰⁴-AA²⁰⁵-AA²⁰⁶-AA²⁰¹-AA²⁰²-AA²⁰³-AA²⁰⁴-AA²⁰⁵-AA²⁰⁶-AA²⁰⁷-AA²⁰³-AA²⁰⁴-AA²⁰⁵-AA²⁰⁶-AA²⁰⁷-AA²⁰⁸-AA²⁰⁹-AA²⁰⁴-AA²⁰⁵-AA²⁰⁶-AA²⁰⁷-AA²⁰⁸-AA²⁰⁹, AA²⁰⁵-AA²⁰⁶-AA²⁰⁷-AA²⁰⁸-AA²⁰⁹, AA²⁰⁶-AA²⁰⁷-AA²⁰⁸-AA²⁰⁹, AA²⁰⁷-AA²⁰⁸-AA²⁰⁹, AA²⁰⁸-AA²⁰⁹ or AA²⁰⁹, may be absent. In the peptides of formula (XXXV), any one of the amino acid labelled “*” or the amino acid labelled “**” is an N-terminal amino acid and the other is a C-terminal amino acid.

[0639] For instance, in the peptide of formula *AA^{III}-AA^{I}-AA^{I}-AA^{II}-AA^{VI}-AA^{XII}-AA^{XII}-AA^{XIII}-AA^{XIII}** (XXXV-1), AA^{III} occupies position AA²⁰¹, *AA^{I} occupies position AA²⁰², AA^{I} occupies position AA²⁰³, AA^{II} occupies position AA²⁰⁴, AA^{VII} occupies position AA²⁰⁵, AA^{XII} occupies position AA²⁰⁶, AA^{XII} occupies position AA²⁰⁷, AA^{XIII} occupies position AA²⁸ and AA^{XII}** occupies position AA²⁰⁹.

[0640] Likewise, in the peptide of formula *AA^{V}-AA^{V}-AA^{VII}-AA^{II}-AA^{XII}-AA^{XIII}-AA^{XIII}** (XXXV-1) AA^{V} occupies position AA²⁰¹, AA^{V} occupies position AA²⁰², AA^{VII} occupies position AA²⁰³, AA^{II} occupies position AA²⁰⁴-AA^{XII} occupies position AA²⁰⁵, AA^{XII} occupies position AA²⁰⁶, AA^{XII} occupies position AA²⁰⁷, AA^{XIII} occupies position AA²⁰⁸ and position AA²⁰⁹ is vacant, thus AA²⁰⁸ would be the amino acid which interacts, in certain embodiments, with PEP2 via AA²¹.

[0641] In one example, LINKER may thus be any one of the following peptides:

[0642] *AA²⁰¹-AA²⁰²-AA 203-AA²⁰⁴-AA²⁰⁵-AA²⁰⁶-AA²⁰⁷-AA²⁰⁸** (XXXV-1); *AA²⁰¹-AA²⁰²-AA²⁰³-AA²⁰⁴-AA²⁰⁵-AA²⁰⁶-AA²⁰⁷** (XXXV-2); *AA²⁰¹-AA²⁰²-AA²⁰³-AA²⁰⁴-AA²⁰⁵-AA²⁶** (XXXV-3); *AA²⁰¹-AA²⁰²-AA²⁰³-AA²⁰⁴-AA²⁰⁵** (XXXV-4); *AA²⁰¹-AA²⁰²-AA²⁰³-AA²⁰⁴** (XXXV-5); *AA²⁰¹-AA²⁰²-AA²⁰³** (XXXV-6); *AA²⁰¹-AA²⁰²** (XXXV-7); *AA²⁰²-AA²⁰³-AA²⁰⁴-AA²⁰⁵-AA²⁰⁶-AA²⁰⁷-AA²⁰⁸-AA²⁰⁹** (XXXV-8); *AA²⁰³-AA²⁰⁴-AA²⁰⁵-AA²⁰⁶-AA²⁰⁷-AA²⁰⁸-AA²⁰⁹** (XXXV-9); *AA²⁰⁴-AA¹⁷-AA²⁰⁵-AA²⁰⁶-AA²⁰⁷-AA²⁰⁸-AA²⁰⁹** (XXXV-10); *AA²⁰⁵-AA²⁰⁶-AA²⁰⁷-AA²⁰⁸-AA²⁰⁹** (XXXV-11); *AA²⁰⁶-AA²⁰⁷-AA²⁰⁸-AA²⁰⁹** (XXXV-12); *AA²⁰⁷-AA²⁰⁸-AA²⁰⁹** (XXXV-13); *AA²⁰⁸-AA²⁰⁹** (XXXV-14); wherein, for instance, said peptide of formulae (XXXV-1) may thus be selected from the group consisting of *AA^{III}-AA^{I}-AA^{I}-AA^{VII}-AA^{XII}-AA^{XII}-AA^{XII}-AA^{XIII}**, *AA^{III}-AA^{I}-AA^{VI}-AA^{II}-AA^{VII}-AA^{XII}-AA^{XII}-AA^{XIII}**, *AA^{III}-AA^{I}-AA^{I}-AA^{II}-AA^{II}-AA^{XII}-AA^{XIII}**, *AA^{III}-AA^{I}-AA^{II}-AA^{II}-AA^{VII}-AA^{XII}-AA^{XIII}-AA^{XIII}**, AA^{XII}-AA^{XII}-AA^{XIII}**, *AA^{III}-AA^{I}-AA^{I}-AA^{II}-AA^{VI}-AA^{II}-AA^{VII}-AA^{XII}-AA^{XII}-AA^{XI}-AA^{XII}-AA^{XII}**. *AA^{III}-AA^{I}-AA^{I}-AA^{II}-AA^{II}-AA^{XI}-AA^{XI}-AA^{XII}**, *AA^{V}-AA^{V}-AA^{VII}-AA^{VII}-AA^{XII}-AA^{XI}-AA^{XIII}**, *AA^{VIII}-AA^{V}-AA^{VII}-AA^{II}-AA^{XII}-AA^{XII}-AA^{XIII}** and *AA^{V}-AA^{V}-AA^{VII}-AA^{II}-AA^{XII}-AA^{XII}-AA^{XIII}**.

[0643] In one particular example, LINKER comprises a peptide of formula (XXXV), (XXXV-2) or (XXXV-4).

[0644] In one example, LINKER comprises (or is) a poly-(aliphatic amino acid) peptide such as poly-alanine peptide (A)ₙ, or a poly-glycine (G)ₙ, n being an integer comprised between 2 and 16, preferably between 2 to 9, such as A-A-A-A-A-A-A-A-A, A-A-A-A-A-A-A, A-A-A-A-A, G-G-G-G-G-G-G-G-G, G-G-G-G-G-G-G or G-G-G-G-G.

[0645] In one particular example, LINKER comprises (or is) a peptide of general formulae (XXXV) to (XXXV-14), more particularly (XXXV), (XXXV-2) or (XXXV-4), or a poly-(aliphatic amino acid), peptide as defined herein.

[0646] For example, in certain embodiments, LINKER is a polysaccharide comprising 2 to 16 saccharides. In one particular example, LINKER is a polysaccharide comprising 2 to 10 saccharides. In one particular example, LINKER is a polysaccharide comprising 2 to 9 saccharides. In one most particular example, LINKER is a polysaccharide comprising 3 to 9 saccharides. Suitable monosaccharides include, but are not limited to, glucose (dextrose), fructose (levulose) and galactose. Monosaccharides are the building blocks of disaccharides (such as sucrose) and polysaccharides (such as celluloses, chitosans, ulvanes and starches). Further, each carbon atom that supports a hydroxyl group (except for the first and last) is chiral, giving rise to a number of isomeric forms all with the same chemical formula. A large number of biologically important modified monosaccharides exists e.g. amino sugars such as Galactosamine, Glucosamine, Sialic acid, N-Acetylglucosamine, and sulfosugars such as Sulfoquinovose. All of these monosaccharide and polysaccharide derivatives may be used as LINKER in the present invention.

[0647] Thus, in one particular example, said cyclic GFR-binding compound is a hydride peptide/polysaccharide peptidomimetic of between 1,500 and 7,000 or between 1,500 and 5,000 Da and comprising compound (Ia) as defined herein; wherein one end of LINKER interacts covalently with one end of PEP(A); wherein another end of LINKER interacts covalently with one end of PEP(B); wherein PEP(A) comprises PEP1 or PEP12; wherein PEP(B) comprises PEP2; and wherein LINKER is a polysaccharide comprising 2 to 16 saccharides (in particular 2 to 10, 2 to 9, or 3 to 9 saccharides).

[0648] Thus, in one particular example, said cyclic GFR-binding compound is a hydride peptide/polysaccharide peptidomimetic of between 1,500 and 7,000 or between 1,500 and 5,000 Da and comprising compound (Ib) as defined herein; wherein one end of a first LINKER interacts covalently with one end of PEP(A); wherein another end of a first LINKER interacts covalently with one end of PEP(B); wherein one end of a second LINKER interacts covalently with another end of PEP(B); wherein another end of a second LINKER interacts covalently with another end of PEP(A); wherein PEP(A) comprises PEP1; wherein PEP(B) comprises PEP2; and wherein LINKER are independently a polysaccharide comprising 2 to 16 saccharides (in particular 2 to 10, 2 to 9, or 3 to 9 saccharides).

[0649] Thus, in one particular example, said cyclic GFR-binding compound is a hydride peptide/polysaccharide peptidomimetic of between 1,500 and 7,000 or between 1,500 and 5,000 Da and comprising compound (IIa) as defined herein; wherein LINKER is a polysaccharide comprising 2 to 16 saccharides (in particular 2 to 10, 2 to 9, or 3 to 9 saccharides); wherein PEP12 is a peptide with 8 amino acids of formula PEP1-AA¹⁷-PEP11 as already defined herein; wherein PEP1, PEP2, PEP11, PEP(C) and PEP(D) are as already defined herein; wherein AA¹³ and AA²¹ may be both N-terminal amino acids or both C-terminal amino acids; wherein AA²⁵ and AA²⁰ may be both N-terminal amino acids or both C-terminal amino acids; wherein one end of LINKER interacts covalently with one end of PEP12 via AA²⁰; wherein another end of LINKER interacts covalently with PEP2 via AA²¹; wherein one end of PEP(C) interacts covalently with PEP12 via AA¹³; and wherein one end of PEP(D) interacts covalently with PEP2 via AA²⁵.

[0650] Thus, in one particular example, said cyclic GFR-binding compound is a hydride peptide/polysaccharide peptidomimetic of between 1,500 and 7,000 or between 1,500 and 5,000 Da and comprising compound (IIb) as defined herein; wherein PEP12 is a peptide with 8 amino acids of formula PEP1-AA¹⁷-PEP11 as defined herein; wherein PEP2 is a peptide with five amino acids as already defined herein; wherein one end of PEP(C) interacts covalently with PEP12 via one end of PEP1; wherein one end of PEP(D) interacts covalently with one end of PEP2; wherein one end of a first LINKER interacts covalently with one end of PEP12 via one end of PEP11; wherein another end of a first LINKER interacts covalently with another end of PEP2; wherein one end of a second LINKER interacts covalently with another end of PEP(D); wherein another end of a second LINKER interacts covalently with another end of PEP(C); wherein PEP(C) is a peptide with at least 5 amino acids, in particular a peptide with between 5 and 12 amino acids; wherein PEP(D) is a peptide with at least 5 amino acids, in particular a peptide with between 5 and 11 amino acids; and wherein LINKER are independently a polysaccharide comprising 2 to 16 saccharides (in particular 2 to 10, 2 to 9, or 3 to 9 saccharides).

[0651] For example, in certain embodiments, LINKER is a polynucleotide comprising 2 to 16 nucleotides. In one particular example, LINKER is a polynucleotide comprising 2 to 10 nucleotides. In one particular example, LINKER is a polynucleotide comprising 2 to 9 nucleotides. In one most particular example, LINKER is a polynucleotide comprising 3 to 9 nucleotides. Suitable nucleotides include adenine (A), guanine (G), thymine (T), cytosine (C), uracil (U) and derivatives, analogues and/or mimetic thereof.

[0652] Thus, in one particular example, said cyclic GFR-binding compound is a hydride peptide/polynucleotide peptidomimetic of between 1,500 and 7,000 or between 1,500 and 5,000 Da and comprising compound (Ia) as defined herein; wherein one end of LINKER interacts covalently with one end of PEP(A); wherein another end of LINKER interacts covalently with one end of PEP(B); wherein PEP(A) comprises PEP1 or PEP12; and wherein PEP(B) comprises PEP2; wherein LINKER is a polynucleotide comprising 2 to 16 nucleotides (in particular 2 to 10, 2 to 9, or 3 to 9 nucleotides).

[0653] Thus, in one particular example, said cyclic GFR-binding compound is a hydride peptide/polynucleotide peptidomimetic of between 1,500 and 7,000 or between 1,500 and 5,000 Da and comprising compound (IIa) as defined herein; wherein LINKER is a polynucleotide comprising 2 to 16 nucleotides (in particular 2 to 10, 2 to 9, or 3 to 9 nucleotides); wherein PEP12 is a peptide with 8 amino acids of formula PEP1-AA¹⁷-PEP11 as already defined herein; wherein PEP1, PEP2, PEP11, PEP(C) and PEP(D) are as already defined herein; wherein AA¹³ and AA²¹ may be both N-terminal amino acids or both C-terminal amino acids; wherein AA²⁵ and AA²⁰ may be both N-terminal amino acids or both C-terminal amino acids; wherein one end of LINKER interacts covalently with one end of PEP12 via AA²⁰; wherein another end of LINKER interacts covalently with PEP2 via AA²¹; wherein one end of PEP(C) interacts covalently with PEP12 via AA¹³; and wherein one end of PEP(D) interacts covalently with PEP2 via AA²⁵.

[0654] For example, in certain embodiments, LINKER is a saturated or unsaturated hydrocarbon chain comprising between 1 and 22, between 1 and 16, between 1 and 12, between 1 and 8 or between 1 and 6 carbon atoms, wherein said hydrocarbon chain is optionally interrupted by one or more non-carbon atom, preferably between 1 and 16, between 1 and 12 or between 1 and 8 non-carbon atoms as appropriate, wherein said non-carbon atom is selected from the group consisting of —O—, —S—, —C(═O), —SO₂—, -N(Ri)(C═O)—, and -N(Ri)-, wherein Ri is selected from the group consisting of a hydrogen atom, a C1-C6 alkyl group and an aryl group, and wherein said hydrocarbon chain is non-substituted or substituted by at least one radical selected from the group consisting of a halogen, a monosaccharide, a poly(1-6)saccharide, a nucleotide, a poly(1-6)nucleotide, a C1-C10 alkyl group and an aryl group.

[0655] Thus, in one particular example, said cyclic GFR-binding compound is a hydride peptide/hydrocarbon chain peptidomimetic of between 1,500 and 7,000 or between 1,500 and 5,000 Da and comprising compound (Ia) as defined herein; wherein one end of LINKER interacts covalently with one end of PEP(A); wherein another end of LINKER interacts covalently with one end of PEP(B); wherein PEP(A) comprises PEP1 or PEP12; wherein PEP(B) comprises PEP2; and wherein LINKER is a saturated or unsaturated hydrocarbon chain comprising between 1 and 22 as defined herein.

[0656] Thus, in one particular example, said cyclic GFR-binding compound is a hydride peptide/hydrocarbon chain peptidomimetic of between 1,500 and 7,000 or between 1,500 and 5,000 Da and comprising compound (IIa) as defined herein; wherein LINKER is a saturated or unsaturated hydrocarbon chain comprising between 1 and 22 as defined herein; wherein PEP12 is a peptide with 8 amino acids of formula PEP1-AA¹⁷-PEP11 as already defined herein; wherein PEP1, PEP2, PEP11, PEP(C) and PEP(D) are as already defined herein; wherein AA¹³ and AA²¹ may be both N-terminal amino acids or both C-terminal amino acids; wherein AA²⁵ and AA²⁰ may be both N-terminal amino acids or both C-terminal amino acids; wherein one end of LINKER interacts covalently with one end of PEP12 via AA²⁰; wherein another end of LINKER interacts covalently with PEP2 via AA²¹; wherein one end of PEP(C) interacts covalently with PEP12 via AA¹³; and wherein one end of PEP(D) interacts covalently with PEP2 via AA²⁵.

[0657] In one example, LINKER is a saturated or unsaturated hydrocarbon chain of at most 10 nanometres (nm) in length, preferably at most 8 nm, 6 nm, 4 nm or 2 nm as determined using the standard «2D» procedure described above.

[0658] In one example, such saturated or unsaturated hydrocarbon chains include polyethylene glycol (PEG) or any one of its derivatives.

[0659] More particularly, LINKER is a tripeptide (three amino acids). More particularly, LINKER is a tetrapeptide (four amino acids). More particularly, LINKER is a pentapeptide (five amino acids). More particularly, LINKER is a hexapeptide (six amino acids). More particularly, LINKER is a heptapeptide (seven amino acids). More particularly, LINKER is an octapeptide (eight amino acids). More particularly, LINKER is a nonapeptide (nine amino acids).

[0660] In one particular example, LINKER is a peptide selected from the group consisting of DENEKVV, DENKNVV, DEYDKVV, DDSSNVI, DSSNNVI, DDMGVPT, DKGVVTY, NDKQQII, DAANNVV, DSANNVV, DDSSNVI, DNGRVLL, VGRKPKV, IGKTPKI, VGRTPKV, RIKPHQGQH, EYVRKKPKL, EIVRKKPIF, EYVRKKP, EIVRKKP, polyalanine (A₁₋₉) (preferably A₂₋₅) and polyglycine (G₁₋₉) (preferably G₂₋₅).

[0661] For example, in certain embodiments, to synthetise cyclic GFR-binding compounds of the present disclosure, the covalent bonds between e.g. LINKER, PEP(A) to (D) or PEP1 to PEP12, may be created through the chemical reaction between a free amine moiety e.g. of a N-terminal amino acid (—NH₂ or —NH₃X, X generally being a halide anion selected from the group consisting of F⁻, Cl⁻ and Br⁻), typically acting as a nucleophile, and an electrophile moiety of e.g. a C-terminal amino acid. Such an electrophile moiety includes, but is not limited to, alkyl halides (˜CR₂—X), alcohols (˜CR₂—OH), acid chlorides (˜C(═O)X), esters, (˜C(═O)OR), phosphate (—OP(OR)₃), phosphinate (˜OP(OR)R₂), phosphonates (˜OP(OR)₂R), phosphonite (˜P(OR)₂R) or sulfonic esters (˜SO₂OR). More particularly, this covalent bond is an amide bond (in particular a peptide bond) formed through conventional peptide synthesis using conventional coupling reagents as already defined herein.

[0662] For example, in certain embodiments, to synthetise cyclic GFR-binding compounds of the present disclosure, the covalent bonds between e.g. LINKER, PEP(A) to (D) or PEP1 to PEP12, may be created through the chemical reaction between a free carboxylic acid moiety e.g. of a C-terminal amino acid (—CO₂H or —CO₂X, X generally being an inorganic cation such as alkaline cations (e.g. Li⁺, Na⁺ or K⁺) or an organic cation such as ammonium cations), typically acting as an electrophile, and a nucleophile moiety of e.g. an N-terminal amino acid. Such a nucleophile moiety includes, but is not limited to, alcohols (˜OH), amines (—NH₂), phosphines (˜PR₃), thiols (˜SH). More particularly, this covalent interaction is a peptide bond formed through conventional peptide synthesis using conventional coupling reagents as already defined herein.

[0663] Cyclisation of a cyclic GFR-binding compound of the present disclosure may be carried out as described above using conventional peptide bond formation procedures, click chemistry, formation of disulphide bonds, etc.

[0664] The present disclosure provides pharmaceutical associations, combinations and compositions, methods and uses for converting or recoding any neoplastic cell into a non-neoplastic cell (in particular, a functional and healthy cell) of any type. In some cases, the cell type of the converted or recoded non-neoplastic cell may be selected/chosen by e.g. a person providing the treatment to a subject.

[0665] In one example, said pharmaceutical association, combination or composition induces the conversion of a neoplastic cell into a physiologically functional and/or healthy cell of any cell lineage including, but not limited to, bone cell, chondrocytic cell, neuron cell, fibroblast, vascular cell, ligament cell, tendon cell, epithelial cell, retina photoreceptor cell, muscle cell, glandular cell, myoepithelial cell, subepithelial interstitial cell, smooth muscle cell, blood cell, gastrointestinal cell, adipocyte, Sertoli cells, Leydig cell, Germ cell and renal cell lineages. Such cells include any progenitor or precursor cells or any partially or fully differentiated cells of these lineages. More generally, the present disclosure includes the treatment of any neoplastic cell of any type and cell lineage using the associations, combinations, compositions, methods and uses as defined herein.

[0666] For example, in certain embodiments, a neoplastic cell of a bone tissue (i.e. a neoplastic cell from the bone cell lineage) has been, may be or will be the cause of the development of a neoplastic bone disease (e.g. bone cancer). Inducing the conversion of this neoplastic bone cell into a physiologically functional and/or healthy cell (any physiologically functional and/or healthy cell) of the bone cell lineage may protect a subject/patient carrying this cell from bone cancer. In some cases, it may be preferable and/or satisfying and/or more practical to induce the conversion of a neoplastic bone cell into a functional and/or healthy cell of a different cell lineage i.e. not a cell from a bone lineage, such as, for example, in certain embodiments, a cell from a chondrocytic cell lineage, a fibroblast lineage or a ligament/tendon cell lineage.

[0667] In one example, a neoplastic cell of a soft tissue such as a muscle, vascular, skin or kidney tissue (i.e. a neoplastic cell from the muscle, vascular, skin or kidney cell lineage, respectively) has been, may be or will be the cause of the development of a neoplastic muscle, vascular, skin or kidney disease (e.g. Rhabdomyosarcoma, Hemangiosarcoma, basal cell carcinoma or Squamous cell carcinoma, respectively). Inducing the conversion of any of these neoplastic cells into a physiologically functional and/or healthy cell (any physiologically functional and/or healthy cell) of the muscle, vascular, skin or kidney cell lineage, respectively, may protect a subject carrying any of these cells from the diseases mentioned above. In some cases, it may be preferable and/or satisfying and/or more practical to induce the conversion of, e.g. a neoplastic muscle, vascular, skin or kidney cell into a functional and/or healthy cell of a different cell lineage ie. not a cell from a muscle, vascular, skin or kidney lineage, such as, for example, in certain embodiments, a cell from a bone cell lineage so that a medical practitioner such as a surgeon, may be able to surgically remove the newly converted bone cells more conveniently. The surgery may be carried out purely for aesthetic reasons and/or because of a discomfort and/or to avoid the possibility of e.g. infections, complications, etc.

[0668] For example, in certain embodiments, a neoplastic cell of an adipose tissue (i.e. a neoplastic cell from the adipocyte lineage) has been, may be or will be the cause of the development of a neoplastic adipose tissue disease (e.g. adipose tissue cancer or lipoma). Several treatment routes may be envisaged to induce the conversion of this neoplastic adipocyte into a physiologically functional and/or healthy cell and thus protect a subject/patient carrying this cell from a lipoma. In some cases, it may be preferable and/or satisfying and/or more practical to induce the conversion of the neoplastic adipocyte into a functional and/or healthy cell of a bone cell lineage. Once the treatment has been completed i.e. after the conversion of the neoplastic adipocyte into a non-neoplastic bone cell (e.g. an osteocyte) has taken place, surgical removal of the newly converted bone cells may be performed for e.g. aesthetic reasons and/or because of a discomfort and/or to avoid the possibility of e.g. infections, complications, etc. In other cases, it may be preferable and/or satisfying and/or more practical to induce the conversion of the neoplastic adipocyte into a functional and/or healthy cell of a muscle cell lineage. Because the conversion of the neoplastic adipocyte into a non-neoplastic muscle cell (e.g. a myocyte) does not yield hard tissues such as osteocytes, the patient would generally not feel any substantial discomfort and therefore, the surgical removal of the newly converted muscle cells may be avoided, although it may still be performed if the patient were to feel even the slight discomfort. The necessity of performing surgery following the presently defined recoding treatment would generally be left to the appreciation of the patient upon supervision of a medical practitioner.

[0669] The present disclosure thus provides methods to convert or recode a neoplastic cell of a specific tissue/cell type (e.g. bone, cartilage, neuron, prostate, ovary, muscle, skin, vascular, ligament, tendon, eye retina, kidney, head, neck, blood, gastrointestinal, lung and adipose tissues) into a non-neoplastic cell of any tissue/cell type (e.g. bone, cartilage, neuron, prostate, ovary, muscle, skin, vascular, ligament, tendon, eye retina and kidney).

[0670] II.3. Induction into a Cell of a Specific Cell Lineage

[0671] Bone Cell Lineage

[0672] Certain embodiments of the invention are particularly useful for inducing the conversion of a neoplastic cell into a cell (any cell) of a bone cell lineage.

[0673] In certain embodiments useful for inducing the conversion of a neoplastic cell into a cell (any cell) of a bone cell lineage, PEP1 is selected from the group consisting of SAIS, NAIS, SATS and SPIS.

[0674] In certain embodiments useful for inducing the conversion of a neoplastic cell into a cell (any cell) of a bone cell lineage, PEP2 is selected from the group consisting of LKNYQ, LKKYR, LRKHR and LKYHY.

[0675] In certain embodiments useful for inducing the conversion of a neoplastic cell into a cell (any cell) of a bone cell lineage, PEP3 is selected from the group consisting of VPT, APT, VPQ, VSQ and TQV.

[0676] In certain embodiments useful for inducing the conversion of a neoplastic cell into a cell (any cell) of a bone cell lineage, PEP4 is selected from the group consisting of VVE, VVR, VVK, VAE, VRS, VKS and EDH.

[0677] In certain embodiments useful for inducing the conversion of a neoplastic cell into a cell (any cell) of a bone cell lineage, PEP5 is a peptide of general formula PEP3-AA¹¹-AA¹²; wherein PEP3 is selected from the group consisting of VPT, APT, VPQ, VSQ and TQV; wherein AA¹¹ is selected from the group consisting of E, K, Q, R, A, D, G and H, in particular E, K, Q, A and D; wherein AA¹² is selected from the group consisting of L, M, T, E, Q and H, in particular L. In one particular example, PEP5 is selected from the group consisting of VPTEL, APTKL, APTQL, VPTKL, VPQAL, VSQDL, VPQDL and TQVQL.

[0678] In certain embodiments useful for inducing the conversion of a neoplastic cell into a cell (any cell) of a bone cell lineage, PEP6 is a peptide of general formula AA²⁶-AA²⁷-AA²⁸-AA²⁹-PEP4; wherein PEP4 is selected from the group consisting of VVE, VVR, VVK, VAE, VRS, VKS and EDH; wherein AA²⁶ is absent or selected from the group consisting of AA¹ amino acids, preferably is absent or E; wherein AA²⁷ and AA²⁸ are independently selected from the group consisting of AA^{III} and AA^{V} amino acids, preferably AA²⁷ is selected from the group consisting of D, E, N, G, M and T, preferably AA²⁸ is selected from the group consisting of M, I, V and L; wherein AA²⁹ is absent or selected from the group consisting of AA^{II} amino acids, preferably absent or S. In one particular example, PEP6 is selected from the group consisting of DMVVE, EMVVE, NMVVR, NMVVK, EGMSVAE, MIVRS, MIVKS, MVVKS and TLEDH.

[0679] In certain embodiments useful for inducing the conversion of a neoplastic cell into a cell (any cell) of a bone cell lineage, PEP7 is an amino acid or a peptide with between two and seven amino acids of general formula AA¹-AA²-AA³-AA⁴-AAs-AA⁶-AA⁷; wherein AA¹, AA², AA³, AA⁴, and AA⁵ are independently absent or AA^{I} as defined herein; wherein AA⁶ is absent or selected from the group consisting of S, T, C, E, Q, P and R, preferably C, S, T or R; wherein AA⁷ is absent or is selected from the group consisting of S, T, C, E, Q, P and R, preferably is selected from the group consisting of C, S and P; and wherein at least one of AA¹, AA², AA³, AA⁴, AA⁵, AA⁶ or AA⁷ is not absent. In one particular example, PEP7 is selected from the group consisting of KIPKAXX, SIPKAXX, HVTKPTX, YVPKPXX, TVPKPXX, AVPKAXX, KVGKAXX, ASAAPXX, ASASPXX and RNVQXRP.

[0680] In certain embodiments useful for inducing the conversion of a neoplastic cell into a cell (any cell) of a bone cell lineage, PEP8 is an amino acid or a peptide with between two and six amino acids of general formula AA³³-AA³⁴-AA³⁵-AA³⁶-AA³⁷-AA³⁸; wherein AA³³ is absent or is selected from the group consisting of AA^{I} amino acids at the exception of AA^{VI} amino acids; AA³⁴ is absent or is selected from the group consisting of AA^{III} and AA^{IV} amino acids; wherein AA³⁵ is absent or is selected from the group consisting of AA^{II} amino acids, preferably is S or C; wherein AA³⁶ is absent or is selected from the group consisting of AA^{III} and AA^{IV} amino acids; wherein AA³⁷ is absent or is selected from the group consisting of AA^{II} amino acids, preferably is S or C; wherein AA³⁸ is absent or is selected from the group consisting of AA^{I}; and wherein at least one of AA³³, AA³⁴, AA³⁵, AA³⁶, AA³⁷ or AA³⁸ is not absent. In one particular example, PEP8 is selected from the group consisting of GXGXR, SXGXH, AXGXH, XGXR, XKXS and LAXKXE.

[0681] In certain embodiments useful for inducing the conversion of a neoplastic cell into a cell (any cell) of a bone cell lineage, PEP9 is a peptide of general formula AA¹-AA²-AA³-AA⁴-AA⁵-AA⁶-AA⁷-PEP5; wherein PEP5 is a peptide of formula PEP3-AA¹¹-AA¹²; wherein PEP3 is selected from the group consisting of VPT, APT, VPQ, VSQ and TQV; wherein AA¹¹ is selected from the group consisting of E, K, Q, R, A, D, G and H, in particular E, K, Q, A and D; wherein AA¹² is selected from the group consisting of L, M, T, E, Q and H, in particular L; wherein AA¹, AA², AA³, AA⁴, and AA⁵ are independently absent or AA^{I} as defined herein; wherein AA⁶ is absent or selected from the group consisting of S, T, C, E, Q, P and R, preferably C, S, T or R; wherein AA⁷ is selected from the group consisting of S, T, C, E, Q, P and R, preferably is selected from the group consisting of C, S and P. In one particular example, PEP9 is selected from the group consisting of KIPKAXXVPTEL, SIPKAXXVPTEL, HVTKPTXAPTKL, YVPKPXXAPTKL, TVPKPXXAPTQL, AVPKAXXAPTKL, KVGKAXXVPTKL, ASAAPXXVPQAL, ASASPXXVSQDL, ASASPXXVPQDL and RNVQXRPTQVQL.

[0682] In certain embodiments useful for inducing the conversion of a neoplastic cell into a cell (any cell) of a bone cell lineage, PEP10 is a peptide of general formula PEP6-AA³³-AA³⁴-AA³⁵-AA³⁶-AA³⁷-AA³⁸; wherein PEP6 is a peptide of formula AA²⁶-AA²⁷-AA²⁸-AA²⁹-PEP4; wherein PEP4 is selected from the group consisting of VVE, VVR, VVK, VAE, VRS, VKS and EDH; wherein AA²⁶ is absent or selected from the group consisting of AA^{III} amino acids, preferably E; wherein AA²⁷ and AA²⁸ are independently selected from the group consisting of AA^{III} and AA^{V} amino acids, preferably AA²⁷ is selected from the group consisting of D, E, N, G, M and T, preferably AA²⁸ is selected from the group consisting of M, I, V and L; wherein AA²⁹ is absent or selected from the group consisting of AA^{II} amino acids, preferably absent or S; wherein AA³³ is absent or is selected from the group consisting of AA^{II} amino acids at the exception of AA^{VI} amino acids; AA³⁴ is absent or is selected from the group consisting of AA^{III} and AA^{IV} amino acids; wherein AA³⁵ is absent or is selected from the group consisting of AA^{III} amino acids, preferably is S or C; wherein AA³⁶ is absent or is selected from the group consisting of AA^{III} and AA^{IV} amino acids; wherein AA³⁷ is absent or is selected from the group consisting of AA^{III} amino acids, preferably is S or C; wherein AA³⁸ is absent or is selected from the group consisting of AA^{I}. In one particular example, PEP10 is selected from the group consisting of DMVVEGXGXR, EMVVEGXGXR, NMVVRSXGXH, NMVVRAXGXH, NMVVKAXGXH, EGMSVAEXGXR, MIVRSXKXS, MIVKSXKXS, MVVKSXKXS and TLEDHLAXKXE.

[0683] In certain embodiments useful for inducing the conversion of a neoplastic cell into a cell (any cell) of a bone cell lineage, PEP12 is a peptide of general formula PEP1-AA¹⁷-PEP11; wherein AA¹⁷ is selected from the group consisting of G, A, V, L, I, P, F, M, W, T and S (in particular is selected from the group consisting of M, I, L, V and T); wherein PEP1 is selected from the group consisting of SAIS, NAIS, SATS and SPIS.

[0684] In certain embodiments useful for inducing the conversion of a neoplastic cell into a cell (any cell) of a bone cell lineage, PEP11 is a peptide with 3 amino acids of general formula AA¹⁸-AA¹⁹-AA²⁰; wherein AA¹⁸ is selected from the group consisting of L, V, Q, A and R, in particular is L; wherein AA¹⁹ is selected from the group consisting of F, W, H and Y (in particular is an aromatic, polar amino acid such as Y); wherein AA²⁰ is selected from the group consisting of L, F, Y, K, I, V and M, in particular is selected from the group consisting of L, F, Y, and K. In one particular example, PEP11 is selected from the group consisting of LYL, LYF, LYY and LYK.

[0685] The definitions of “PEP” pairs, quadruplets, hexaplets and heptuplet e.g. PEP1:PEP2, PEP12:PEP2, or PEP7:PEP5:PEP12:LINKER:PEP2:PEP6:PEP8, most particularly useful for inducing the conversion of a neoplastic cell into a cell (any cell) of a bone cell lineage, are as already defined herein to the extent that PEP1 to PEP12 are particularly useful for these applications as defined in the present bone section. For instances:

[0686] In certain embodiments, useful for inducing the conversion of a neoplastic cell into a cell (any cell) of a bone cell lineage, the pair PEP1:PEP2 is selected from the group consisting of SAIS:LKNYQ, NAIS:LKKYR, SATS:LRKHR and SPIS:LKYHY.

[0687] In certain embodiments, useful for inducing the conversion of a neoplastic cell into a cell (any cell) of a bone cell lineage, the pair PEP12:PEP2 is selected from the group consisting of SAIS-AA¹⁷-LYL:LKNYQ, NAIS-AA¹⁷-LYF:LKKYR, SATS-AA¹⁷-LYY:LRKHR and SPIS-AA¹⁷-LYK:LKYHY; wherein AA¹⁷ is selected from the group consisting of G, A, V, L, I, P, F, M, W, T and S (in particular is selected from the group consisting of M, V and T).

[0688] In certain embodiments useful for inducing the conversion of a neoplastic cell into a cell (any cell) of a bone cell lineage, PEP3 is selected from the group consisting of VPT, APT, VPQ, VSQ and TQV; PEP4 is selected from the group consisting of VVE, VVR, VVK, VAE, VRS, VKS and EDH; and wherein the pair PEP3:PEP4 is selected from the group consisting of VPT:VVE, APT:VVR, APT:VVK, VPT:VAE, VPQ:VRS, VSQ:VKS, VPQ:VKS and TQV:EDH.

[0689] In certain embodiments useful for inducing the conversion of a neoplastic cell into a cell (any cell) of a bone cell lineage, PEP5 is selected from the group consisting of VPTEL, APTKL, APTQL, VPTKL, VPQAL, VSQDL, VPQDL and TQVQL; PEP6 is selected from the group consisting of DMVVE, EMVVE, NMVVR, NMVVK, EGMSVAE, MIVRS, MIVKS, MVVKS and TLEDH; and wherein the pair PEP5:PEP6 is selected from the group consisting of VPTEL:DMVVE, VPTEL:EMVVE, APTKL:NMVVR, APTQL:NMVVR, APTKL:NMVVK, VPTKL:EGMSVAE, VPQAL:MIVRS, VSQDL:MIVKS, VPQDL:MVVKS and TQVQL:TLEDH.

[0690] In certain embodiments useful for inducing the conversion of a neoplastic cell into a cell (any cell) of a bone cell lineage, PEP7 is selected from the group consisting of KIPKAXX, SIPKAXX, HVTKPTX, YVPKPXX, TVPKPXX, AVPKAXX, KVGKAXX, ASAAPXX, ASASPXX and RNVQXRP; wherein PEP8 is selected from the group consisting of GXGXR, SXGXH, AXGXH, XGXR, XKXS and LAXKXE; and wherein the pair PEP7:PEP8 is selected from the group consisting of KIPKAXX:GXGXR, SIPKAXX:GXGXR, HVTKPTX:SXGXH, YVPKPXX:SXGXH, KVGKAXX:XGXR, ASAAPXX:XKXS, ASASPXX:XKXS and RNVQXRP:LAXKXE.

[0691] In certain embodiments useful for inducing the conversion of a neoplastic cell into a cell (any cell) of a bone cell lineage, PEP9 is selected from the group consisting of KIPKAXXVPTEL, SIPKAXXVPTEL, HVTKPTXAPTKL, YVPKPXXAPTKL, TVPKPXXAPTQL, AVPKAXXAPTKL, KVGKAXXVPTKL, ASAAPXXVPQAL, ASASPXXVSQDL, ASASPXXVPQDL and RNVQXRPTQVQL; PEP10 is selected from the group consisting of DMVVEGXGXR, EMVVEGXGXR, NMVVRSXGXH, NMVVRAXGXH, NMVVKAXGXH, EGMSVAEXGXR, MIVRSXKXS, MIVKSXKXS, MVVKSXKXS and TLEDHLAXKXE; and wherein the pair PEP9:PEP10 is selected from the group consisting of KIPKAXXVPTEL:DMVVEGXGXR, SIPKAXXVPTEL:EMVVEGXGXR, HVTKPTXAPTKL:NMVVRSXGXH, YVPKPXXAPTKL:NMVVRSXGXH, KVGKAXXVPTKL:EGMSVAEXGXR, ASAAPXXVPQAL:MIVRSXKXS, ASASPXXVSQDL:MIVKSXKXS, ASASPXXVPQDL:MVVKSXKXS and RNVQXRPTQVQL:TLEDHLAXKXE.

[0692] In certain embodiments useful for inducing the conversion of a neoplastic cell into a cell (any cell) of a bone cell lineage, PEP5 is selected from the group consisting of VPTEL, APTKL, APTQL, VPTKL, VPQAL, VSQDL, VPQDL and TQVQL; PEP6 is selected from the group consisting of DMVVE, EMVVE, NMVVR, NMVVK, EGMSVAE, MIVRS, MIVKS, MVVKS and TLEDH; and wherein the pair PEP5:PEP6 is selected from the group consisting of VPTEL:DMVVE, VPTEL:EMVVE, APTKL:NMVVR, APTQL:NMVVR, APTKL:NMVVK, VPTKL:EGMSVAE, VPQAL:MIVRS, VSQDL:MIVKS, VPQDL:MVVKS and TQVQL:TLEDH; and wherein the pair PEP5:PEP6 is not VPTEL:DMWE when PEP1 is SAIS and PEP2 is LKNYQ; wherein the pair PEP5:PEP6 is not VPTEL:EMVVE when PEP1 is SAIS and PEP2 is LKNYQ; wherein the pair PEP5:PEP6 is not APTKL:NMVVR when PEP1 is NAIS and PEP2 is LKKYR; wherein the pair PEP5:PEP6 is not APTQL:NMVVR when PEP1 is NAIS and PEP2 is LKKYR; wherein the pair PEP5:PEP6 is not APTKL:NMVVK when PEP1 is SATS and PEP2 is LRKHR; wherein the pair PEP5:PEP6 is not VPTKL:EGMSVAE when PEP1 is SPIS and PEP2 is LKYHY.

[0693] In certain embodiments useful for inducing the conversion of a neoplastic cell into a cell (any cell) of a bone cell lineage, PEP9 is selected from the group consisting of KIPKAXXVPTEL, SIPKAXXVPTEL, HVTKPTXAPTKL, YVPKPXXAPTKL, TVPKPXXAPTQL, AVPKAXXAPTKL, KVGKAXXVPTKL, ASAAPXXVPQAL, ASASPXXVSQDL, ASASPXXVPQDL and RNVQXRPTQVQL; PEP10 is selected from the group consisting of DMVVEGXGXR, EMVVEGXGXR, NMVVRSXGXH, NMVVRAXGXH, NMVVKAXGXH, EGMSVAEXGXR, MIVRSXKXS, MIVKSXKXS, MVVKSXKXS and TLEDHLAXKXE; and wherein the pair PEP9:PEP10 is selected from the group consisting of KIPKAXXVPTEL:DMVVEGXGXR, SIPKAXXVPTEL:EMVVEGXGXR, HVTKPTXAPTKL:NMVVRSXGXH, YVPKPXXAPTKL:NMVVRSXGXH, KVGKAXXVPTKL:EGMSVAEXGXR, ASAAPXXVPQAL:MIVRSXKXS, ASASPXXVSQDL:MIVKSXKXS, ASASPXXVPQDL:MVVKSXKXS and RNVQXRPTQVQL:TLEDHLAXKXE; and wherein PEP9:PEP10 is not KIPKAXXVPTEL:DMVVEGXGXR when PEP1 is SAIS and PEP2 is LKNYQ; wherein PEP9:PEP10 is not SIPKAXXVPTEL:EMVVEGXGXR when PEP1 is SAIS and PEP2 is LKNYQ; wherein PEP9:PEP10 is not HVTKPTXAPTKL:NMVVRSXGXH when PEP1 is NAIS and PEP2 is LKKYR; wherein PEP9:PEP10 is not YVPKPXXAPTKL:NMVVRSXGXH when PEP1 is NAIS and PEP2 is LKKYR; wherein PEP9:PEP10 is not TVPKPXXAPTQL:NMVVRAXGXH when PEP1 is NAIS and PEP2 is LKKYR; wherein PEP9:PEP10 is not AVPKAXXAPTKL:NMVVKAXGXH when PEP1 is SATS and PEP2 is LRKHR; wherein PEP9:PEP10 is not KVGKAXXVPTKL:EGMSVAEXGXR when PEP1 is SPIS and PEP2 is LKYHY.

[0694] In certain embodiments useful for inducing the conversion of a neoplastic cell into a cell (any cell) of a bone cell lineage, PEP1 is selected from the group consisting of SAIS, NAIS, SATS and SPIS; PEP11 is selected from the group consisting of LYL, LFF, LYF, LYY, LYK, LYI, LFI, LYV, VYY, QIM, AKV and RKI; and the pair PEP1:PEP11 is selected from the group consisting of SAIS:LYL, NAIS:LYF, SATS:LYY and SPIS:LYK.

[0695] In one aspect, the present disclosure provides a GFR-binding compound, wherein said GFR-binding compound is a peptide, a variant or analog thereof, or a peptidomimetic as defined herein, with between 20 and 60 (in particular between 20 and 50, and more particularly, between 20 and 45) amino acids, comprising a peptide with four amino acids (PEP1) or a peptide with eight amino acids (PEP12), a peptide with five amino acids (PEP2), and optionally a pair of peptides selected form the group consisting of PEP3:PEP4, PEP3:PEP6, PEP3:PEP10, PEP5:PEP4, PEP9:PEP4, PEP5:PEP6, PEP5:PEP10, PEP9:PEP6 and PEP9:PEP10; wherein said GFR-binding compound does not comprise the pair of peptides VPTEL:DMVVE when PEP1 is SAIS and PEP2 is LKNYQ; wherein said GFR-binding compound does not comprise the pair of peptides VPTEL:EMVVE when PEP1 is SAIS and PEP2 is LKNYQ; wherein said GFR-binding compound does not comprise the pair of peptides APTKL:NMVVR when PEP1 is NAIS and PEP2 is LKKYR; wherein said GFR-binding compound does not comprise the pair of peptides APTQL:NMVVR when PEP1 is NAIS and PEP2 is LKKYR; wherein said GFR-binding compound does not comprise the pair of peptides APTKL:NMVVK when PEP1 is SATS and PEP2 is LRKHR; wherein said GFR-binding compound does not comprise the pair of peptides VPTKL:EGMSVAE when PEP1 is SPIS and PEP2 is LKYHY; and, optionally, wherein the RMSD is 2.45 Å or less.

[0696] In one aspect, the present disclosure provides a GFR-binding compound, wherein said GFR-binding compound is a peptide, a variant or analog thereof, or a peptidomimetic as defined herein, with between 20 and 60 (in particular between 20 and 50, and more particularly, between 20 and 45) amino acids, comprising a peptide with four amino acids (PEP1) or a peptide with eight amino acids (PEP12), a peptide with five amino acids (PEP2), and optionally a pair of peptides selected form the group consisting of PEP3:PEP4, PEP3:PEP6, PEP3:PEP10, PEP5:PEP4, PEP9:PEP4, PEP5:PEP6, PEP5:PEP10, PEP9:PEP6 and PEP9:PEP10; wherein said GFR-binding compound does not comprise the pair of peptides KIPKAXXVPTEL:DMVVEGXGXR when PEP1 is SAIS and PEP2 is LKNYQ; wherein said GFR-binding compound does not comprise the pair of peptides SIPKAXXVPTEL:EMVVEGXGXR when PEP1 is SAIS and PEP2 is LKNYQ; wherein said GFR-binding compound does not comprise the pair of peptides HVTKPTXAPTKL:NMVVRSXGXH when PEP1 is NAIS and PEP2 is LKKYR; wherein said GFR-binding compound does not comprise the pair of peptides YVPKPXXAPTKL:NMVVRSXGXH when PEP1 is NAIS and PEP2 is LKKYR; wherein said GFR-binding compound does not comprise the pair of peptides TVPKPXXAPTQL:NMVVRAXGXH when PEP1 is NAIS and PEP2 is LKKYR; wherein said GFR-binding compound does not comprise the pair of peptides AVPKAXXAPTKL:NMVVKAXGXH when PEP1 is SATS and PEP2 is LRKHR; wherein said GFR-binding compound does not comprise the pair of peptides KVGKAXXVPTKL:EGMSVAEXGXR when PEP1 is SPIS and PEP2 is LKYHY; and, optionally, wherein the RMSD is 2.45 Å or less.

[0697] In certain embodiments useful for inducing the conversion of a neoplastic cell into a cell (any cell) of a bone cell lineage, said GFR-binding compound is a synthetic molecule as defined herein in the definition section.

[0698] In certain embodiments useful for inducing the conversion of a neoplastic cell into a cell (any cell) of a bone cell lineage, said GFR-binding compound is a synthetic peptide, or a variant or analog thereof, or a peptidomimetic.

[0699] Chondrocytic Cell Lineage

[0700] Certain embodiments of the invention are particularly useful for inducing the conversion of a neoplastic cell into a cell (any cell) of a chondrocytic cell lineage.

[0701] In certain embodiments useful for inducing the conversion of a neoplastic cell into a cell (any cell) of a chondrocytic cell lineage, PEP1 is selected from the group consisting of SAIS, NAIS, SPIS, EPLP and EPLT.

[0702] In certain embodiments useful for inducing the conversion of a neoplastic cell into a cell (any cell) of a chondrocytic cell lineage, PEP2 is selected from the group consisting of LKNYQ, LKKYR, YKQYE and EQLSN.

[0703] In certain embodiments useful for inducing the conversion of a neoplastic cell into a cell (any cell) of a chondrocytic cell lineage, PEP3 is selected from the group consisting of VPT, APT, VPQ and VSQ.

[0704] In certain embodiments useful for inducing the conversion of a neoplastic cell into a cell (any cell) of a chondrocytic cell lineage, PEP4 is selected from the group consisting of VVE, VVR, VRS and VKS.

[0705] In certain embodiments useful for inducing the conversion of a neoplastic cell into a cell (any cell) of a chondrocytic cell lineage, PEP5 is a peptide of general formula PEP3-AA¹¹-AA¹²; wherein PEP3 is selected from the group consisting of VPT, APT, VPQ and VSQ; wherein AA¹¹ is selected from the group consisting of E, K, Q, R, A, D, G and H, in particular E, K, Q, R, A and D; wherein AA¹² is selected from the group consisting of L, M, T, E, Q and H, in particular is L. In one particular example, PEP5 is selected from the group consisting of VPTEL, APTKL, APTQL, VPTRL, VPQAL, VSQDL and VPQDL.

[0706] In certain embodiments useful for inducing the conversion of a neoplastic cell into a cell (any cell) of a chondrocytic cell lineage, PEP6 is a peptide of general formula AA²⁶-AA²⁷-AA²⁸-AA²⁹-PEP4; wherein PEP4 is selected from the group consisting of VVE, VVR, VRS and VKS; wherein AA²⁶ is absent or selected from the group consisting of AA^{III} amino acids, preferably is absent; wherein AA²⁷ and AA²⁸ are independently selected from the group consisting of AA^{III} and AA^{V} amino acids, preferably AA²⁷ is selected from the group consisting of D, E, N and M, preferably AA²⁸ is selected from the group consisting of M, I and V; wherein AA²⁹ is absent or selected from the group consisting of AA^{II} amino acids, preferably absent. In one particular example, PEP6 is selected from the group consisting of DMVVE, EMVVE, NMVVR, DMVVE, MIVRS, MIVKS and MVVKS.

[0707] In certain embodiments useful for inducing the conversion of a neoplastic cell into a cell (any cell) of a chondrocytic cell lineage, PEP7 is an amino acid or a peptide with between two and seven amino acids of general formula AA¹-AA²-AA³-AA⁴-AA⁵-AA⁶-AA⁷; wherein AA¹, AA², AA³, AA⁴, and AA⁵ are independently absent or AA^{I} as defined herein; wherein AA⁶ is absent or selected from the group consisting of S, T, C, E, Q, P and R, preferably is S, C or T; wherein AA⁷ is absent or is selected from the group consisting of S, T, C, E, Q, P and R, preferably is S or C; and wherein at least one of AA¹, AA², AA³, AA⁴, AA⁵, AA⁶ or AA⁷ is not absent. In one particular example, PEP7 is selected from the group consisting of KIPKAXX, SIPKAXX, HVTKPTX, YVPKPXX, TVPKPXX, STPPTXX, ASAAPXX and ASASPXX.

[0708] In certain embodiments useful for inducing the conversion of a neoplastic cell into a cell (any cell) of a chondrocytic cell lineage, PEP8 is an amino acid or a peptide with between two and six amino acids of general formula AA³³-AA³⁴-AA³⁵-AA³⁶-AA³⁷-AA³⁸; wherein AA³³ is absent or is selected from the group consisting of AA^{I} amino acids at the exception of AA^{V1} amino acids, preferably absent, G, S or A; AA³⁴ is absent or is selected from the group consisting of AA^{III} and AA^{V} amino acids, preferably absent; wherein AA³⁵ is absent or is selected from the group consisting of AA^{II} amino acids, preferably is S or C; wherein AA³⁶ is absent or is selected from the group consisting of AA^{III} and AA^{IV} amino acids, preferably is G or K; wherein AA³⁷ is absent or is selected from the group consisting of AA^{II} amino acids, preferably is S or C; wherein AA³⁸ is absent or is selected from the group consisting of AA^{I}; and wherein at least one of AA³³, AA³⁴, AA³⁵, AA³⁶, AA³⁷ or AA³⁸ is not absent. In one particular example, PEP8 is selected from the group consisting of GXGXR, SXGXH, AXGXH, SXGXR and XKXS.

[0709] In certain embodiments useful for inducing the conversion of a neoplastic cell into a cell (any cell) of a chondrocytic cell lineage, PEP9 is a peptide of general formula AA¹-AA²-AA³-AA⁴-AA⁵-AA⁶-AA⁷-PEP5; wherein PEP5 is a peptide of formula PEP3-AA¹¹-AA¹²; wherein PEP3 is selected from the group consisting of VPT, APT, VPQ and VSQ; wherein AA¹¹ is selected from the group consisting of E, K, Q, R, A, D, G and H, in particular E, K, Q, R, A and D; wherein AA¹² is selected from the group consisting of L, M, T, E, Q and H, in particular is L; wherein AA¹, AA², AA³, AA⁴, and AA⁵ are independently absent or AA^{I} as defined herein; wherein AA⁶ is absent or selected from the group consisting of S, T, C, E, Q, P and R, preferably is S, C or T; wherein AA⁷ is selected from the group consisting of S, T, C, E, Q, P and R, preferably is S or C. In one particular example, PEP9 is selected from the group consisting of KIPKAXXVPTEL, SIPKAXXVPTEL, HVTKPTXAPTKL, YVPKPXXAPTKL, TVPKPXXAPTQL, STPPTXXVPTRL, ASAAPXXVPQAL, ASASPXXVSQDL and ASASPXXVPQDL.

[0710] In certain embodiments useful for inducing the conversion of a neoplastic cell into a cell (any cell) of a chondrocytic cell lineage, PEP10 is a peptide of general formula PEP6-AA³³-AA³⁴-AA³⁵-AA³⁶-AA³⁷-AA³⁸; wherein PEP6 is a peptide of formula AA²⁶-AA²⁷-AA²⁸-AA²⁹-PEP4; wherein PEP4 is selected from the group consisting of VVE, VVR, VRS and VKS; wherein AA²⁶ is absent or selected from the group consisting of AA^{III} amino acids, preferably absent; wherein AA²⁷ and AA²⁸ are independently selected from the group consisting of AA^{III} and AA^{V} amino acids, preferably AA²⁷ is selected from the group consisting of D, E, N and M, preferably AA²⁸ is selected from the group consisting of M, I and V; wherein AA²⁹ is absent or selected from the group consisting of AA^{II} amino acids, preferably absent; wherein AA³³ is absent or is selected from the group consisting of AA^{I} amino acids at the exception of AA^{VI} amino acids, preferably absent, G, S or A; AA³⁴ is absent or is selected from the group consisting of AA^{III} and AA^{IV} amino acids, preferably absent; wherein AA³⁵ is absent or is selected from the group consisting of AA^{II} amino acids, preferably is S or C; wherein AA³⁶ is absent or is selected from the group consisting of AA^{III} and AA^{IV} amino acids, preferably is G or K; wherein AA³⁷ is absent or is selected from the group consisting of AA^{II} amino acids, preferably is S or C; wherein AA³⁸ is absent or is selected from the group consisting of AA^{I}. In one particular example, PEP10 is selected from the group consisting of DMVVEGXGXR, EMVVEGXGXR, NMVVRSXGXH, NMVVRAXGXH, DMVVESXGXR, MIVRSXKXS, MIVKSXKXS and MVVKSXKXS.

[0711] In certain embodiments useful for inducing the conversion of a neoplastic cell into a cell (any cell) of a chondrocytic cell lineage, PEP12 is a peptide of general formula PEP1-AA¹⁷-PEP11; wherein AA¹⁷ is selected from the group consisting of G, A, V, L, I, P, F, M, W, T and S (in particular is selected from the group consisting of M, I, L, V and T); wherein PEP1 is selected from the group consisting of SAIS, NAIS, SPIS, EPLP and EPLT.

[0712] In certain embodiments useful for inducing the conversion of a neoplastic cell into a cell (any cell) of a chondrocytic cell lineage, PEP11 is a peptide with 3 amino acids of general formula AA¹⁸-AA¹⁹-AA²⁰; wherein AA¹⁶ is selected from the group consisting of L, V, Q, A and R, in particular is L or V; wherein AA¹⁹ is selected from the group consisting of F, W, H and Y, in particular is Y or F; wherein AA²⁰ is selected from the group consisting of L, F, Y and I. In one particular example, PEP11 is selected from the group consisting of LYL, LYF, LFI, VYY and LYY.

[0713] The definitions of “PEP” pairs, quadruplets, hexaplets and heptuplet e.g. PEP1:PEP2, PEP12:PEP2, or PEP7:PEP5:PEP12:LINKER:PEP2:PEP6:PEP8, most particularly useful for inducing the conversion of a neoplastic cell into a cell (any cell) of a chondrocytic cell lineage, are as already defined herein to the extent that PEP1 to PEP12 are particularly useful for these applications. For instances: In certain embodiments useful for inducing the conversion of a neoplastic cell into a cell (any cell) of a chondrocytic cell lineage, the pair PEP1:PEP2 is selected from the group consisting of SAIS:LKNYQ, NAIS:LKKYR, SPIS:YKQYE, EPLP:EQLSN and EPLT:EQLSN.

[0714] In certain embodiments useful for inducing the conversion of a neoplastic cell into a cell (any cell) of a chondrocytic cell lineage, the pair PEP12:PEP2 is selected from the group consisting of SAIS-AA¹⁷-LYL:LKNYQ, NAIS-AA¹⁷-LYF:LKKYR, SPIS-AA¹⁷-LFI:YKQYE, EPLP-AA¹⁷-VYY:EQLSN and EPLT-AA¹⁷-LYY:EQLSN; wherein AA¹⁷ is selected from the group consisting of G, A, V, L, I, P, F, M, W, T and S (in particular is selected from the group consisting of M, I, V and T).

[0715] In certain embodiments useful for inducing the conversion of a neoplastic cell into a cell (any cell) of a chondrocytic cell lineage, PEP3 is selected from the group consisting of VPT, APT, VPQ and VSQ; PEP4 is selected from the group consisting of VVE, VVR, VRS and VKS; and wherein the pair PEP3:PEP4 is selected from the group consisting of VPT:VVE, APT:VVR, VPQ:VRS, VSQ:VKS and VPQ:VKS.

[0716] In certain embodiments useful for inducing the conversion of a neoplastic cell into a cell (any cell) of a chondrocytic cell lineage, PEP5 is selected from the group consisting of VPTEL, APTKL, APTQL, VPTRL, VPQAL, VSQDL and VPQDL; PEP6 is selected from the group consisting of DMVVE, EMVVE, NMVVR, DMVVE, MIVRS, MIVKS and MVVKS; and wherein the pair PEP5:PEP6 is selected from the group consisting of VPTEL:DMVVE, VPTEL:EMVVE, APTKL:NMVVR, APTQL:NMVVR, VPTRL:DMVVE, VPQAL:MIVRS, VSQDL:MIVKS and VPQDL:MVVKS.

[0717] In certain embodiments useful for inducing the conversion of a neoplastic cell into a cell (any cell) of a chondrocytic cell lineage, PEP7 is selected from the group consisting of KIPKAXX, SIPKAXX, HVTKPTX, YVPKPXX, TVPKPXX, STPPTXX, ASAAPXX and ASASPXX; wherein PEP8 is selected from the group consisting of GXGXR, SXGXH, AXGXH, SXGXR and XKXS; and wherein the pair PEP7:PEP8 is selected from the group consisting of KIPKAXX: GXGXR, SIPKAXX:GXGXR, HVTKPTX:SXGXH, YVPKPXX:SXGXH, TVPKPXX:AXGXH, STPPTXX:SXGSR, ASAAPXX:XKXS and ASASPXX:XKXS.

[0718] In certain embodiments useful for inducing the conversion of a neoplastic cell into a cell (any cell) of a chondrocytic cell lineage, PEP9 is selected from the group consisting of KIPKAXXVPTEL, SIPKAXXVPTEL, HVTKPTXAPTKL, YVPKPXXAPTKL, TVPKPXXAPTQL, STPPTXXVPTRL, ASAAPXXVPQAL, ASASPXXVSQDL and ASASPXXVPQDL; PEP10 is selected from the group consisting of DMVVEGXGXR, EMVVEGXGXR, NMVVRSXGXH, NMVVRAXGXH, DMVVESXGXR, MIVRSXKXS, MIVKSXKXS and MVVKSXKXS; and wherein the pair PEP9:PEP10 is selected from the group consisting of KIPKAXXVPTEL:DMVVEGXGXR, SIPKAXXVPTEL:EMVVEGXGXR, HVTKPTXAPTKL:NMVVRSXGXH, YVPKPXXAPTKL:NMVVRSXGXH, TVPKPXXAPTQL:NMVVRAXGXH, STPPTXXVPTRL:DMVVESXGSR, ASAAPXXVPQAL:MIVRSXKXS, ASASPXXVSQDL:MIVKSXKXS and ASASPXXVPQDL:MVVKSXKXS.

[0719] In certain embodiments useful for inducing the conversion of a neoplastic cell into a cell (any cell) of a chondrocytic cell lineage, PEP5 is selected from the group consisting of VPTEL, APTKL, APTQL, VPTRL, VPQAL, VSQDL and VPQDL; PEP6 is selected from the group consisting of DMVVE, EMVVE, NMVVR, DMVVE, MIVRS, MIVKS and MVVKS; and wherein the pair PEP5:PEP6 is selected from the group consisting of VPTEL:DMVVE, VPTEL:EMVVE, APTKL:NMVVR, APTQL:NMVVR, VPTRL:DMVVE, VPQAL:MIVRS, VSQDL:MIVKS and VPQDL:MVVKS; wherein the pair PEP5:PEP6 is not VPTEL:DMVVE when PEP1 is SAIS and PEP2 is LKNYQ; wherein the pair PEP5:PEP6 is not VPTEL:EMVVE when PEP1 is SAIS and PEP2 is LKNYQ; wherein the pair PEP5:PEP6 is not APTKL:NMVVR when PEP1 is NAIS and PEP2 is LKKYR; wherein the pair PEP5:PEP6 is not APTQL:NMVVR when PEP1 is NAIS and PEP2 is LKKYR; wherein the pair PEP5:PEP6 is not VPTRL:DMVVE when PEP1 is SPIS and PEP2 is YKQYE; wherein the pair PEP5:PEP6 is not VPQAL:MIVRS when PEP1 is EPLP and PEP2 is EQLSN; wherein the pair PEP5:PEP6 is not VSQDL:MIVKS when PEP1 is EPLT and PEP2 is EQLSN; wherein the pair PEP5:PEP6 is not VPQDL:MVVKS when PEP1 is EPLT and PEP2 is EQLSN.

[0720] In certain embodiments useful for inducing the conversion of a neoplastic cell into a cell (any cell) of a chondrocytic cell lineage, PEP9 is selected from the group consisting of KIPKAXXVPTEL, SIPKAXXVPTEL, HVTKPTXAPTKL, YVPKPXXAPTKL, TVPKPXXAPTQL, STPPTXXVPTRL, ASAAPXXVPQAL, ASASPXXVSQDL and ASASPXXVPQDL; PEP10 is selected from the group consisting of DMVVEGXGXR, EMVVEGXGXR, NMVVRSXGXH, NMVVRAXGXH, DMVVESXGXR, MIVRSXKXS, MIVKSXKXS and MVVKSXKXS; and wherein the pair PEP9:PEP10 is selected from the group consisting of KIPKAXXVPTEL:DMVVEGXGXR, SIPKAXXVPTEL:EMVVEGXGXR, HVTKPTXAPTKL:NMVVRSXGXH, YVPKPXXAPTKL:NMVVRSXGXH, TVPKPXXAPTQL:NMVVRAXGXH, STPPTXXVPTRL:DMVVESXGSR, ASAAPXXVPQAL:MIVRSXKXS, ASASPXXVSQDL:MIVKSXKXS and ASASPXXVPQDL:MVVKSXKXS; wherein PEP9:PEP10 is not KIPKAXXVPTEL:DMVVEGXGXR when PEP1 is SAIS and PEP2 is LKNYQ; wherein PEP9:PEP10 is not SIPKAXXVPTEL:EMVVEGXGXR when PEP1 is SAIS and PEP2 is LKNYQ; wherein PEP9:PEP10 is not HVTKPTXAPTKL:NMVVRSXGXH when PEP1 is NAIS and PEP2 is LKKYR; wherein PEP9:PEP10 is not YVPKPXXAPTKL:NMVVRSXGXH when PEP1 is NAIS and PEP2 is LKKYR; wherein PEP9:PEP10 is not TVPKPXXAPTQL:NMVVRAXGXH when PEP1 is NAIS and PEP2 is LKKYR; wherein PEP9:PEP10 is not STPPTXXVPTRL:DMVVESXGSR when PEP1 is SPIS; wherein PEP9:PEP10 is not ASAAPXXVPQAL:MIVRSXKXS when PEP1 is EPLP and PEP2 is EQLSN; wherein PEP9:PEP10 is not ASASPXXVSQDL:MIVKSXKXS when PEP1 is EPLT and PEP2 is EQLSN; wherein PEP9:PEP10 is not ASASPXXVPQDL:MVVKSXKXS when PEP1 is EPLT and PEP2 is EQLSN.

[0721] In certain embodiments useful for inducing the conversion of a neoplastic cell into a cell (any cell) of a chondrocytic cell lineage, PEP1 is selected from the group consisting of SAIS, NAIS, SPIS, EPLP and EPLT; PEP11 is selected from the group consisting of LYL, LYF, LFI, VYY and LYY; and the pair PEP1:PEP11 is selected from the group consisting of SAIS:LYL, NAIS:LYF, SPIS:LFI, EPLP:VYY and EPLT:LYY.

[0722] In one aspect, the present disclosure provides a GFR-binding compound, wherein said GFR-binding compound is a peptide, a variant or analog thereof, or a peptidomimetic as defined herein, with between 20 and 60 (in particular between 20 and 50, and more particularly, between 20 and 45) amino acids, comprising a peptide with four amino acids (PEP1) or a peptide with eight amino acids (PEP12), a peptide with five amino acids (PEP2), and optionally a pair of peptides selected form the group consisting of PEP3:PEP4, PEP3:PEP6, PEP3:PEP10, PEP5:PEP4, PEP9:PEP4, PEP5:PEP6, PEP5:PEP10, PEP9:PEP6 and PEP9:PEP10; wherein said GFR-binding compound does not comprise the pair of peptides VPTEL:DMVVE when PEP1 is SAIS and PEP2 is LKNYQ; wherein said GFR-binding compound does not comprise the pair of peptides VPTEL:EMVVE when PEP1 is SAIS and PEP2 is LKNYQ; wherein said GFR-binding compound does not comprise the pair of peptides APTKL:NMVVR when PEP1 is NAIS and PEP2 is LKKYR; wherein said GFR-binding compound does not comprise the pair of peptides APTQL:NMVVR when PEP1 is NAIS and PEP2 is LKKYR; wherein said GFR-binding compound does not comprise the pair of peptides VPTRL:DMVVE when PEP1 is SPIS and PEP2 is YKQYE; wherein said GFR-binding compound does not comprise the pair of peptides VPQAL:MIVRS when PEP1 is EPLP and PEP2 is EQLSN; wherein said GFR-binding compound does not comprise the pair of peptides VSQDL:MIVKS when PEP1 is EPLT and PEP2 is EQLSN; wherein said GFR-binding compound does not comprise the pair of peptides VPQDL:MVVKS when PEP1 is EPLT and PEP2 is EQLSN; and, optionally, wherein the RMSD is 2.45 Å or less.

[0723] In one aspect, the present disclosure provides a GFR-binding compound, wherein said GFR-binding compound is a peptide, a variant or analog thereof, or a peptidomimetic as defined herein, with between 20 and 60 (in particular between 20 and 50, and more particularly, between 20 and 45) amino acids, comprising a peptide with four amino acids (PEP1) or a peptide with eight amino acids (PEP12), a peptide with five amino acids (PEP2), and optionally a pair of peptides selected form the group consisting of PEP3:PEP4, PEP3:PEP6, PEP3:PEP10, PEP5:PEP4, PEP9:PEP4, PEP5:PEP6, PEP5:PEP10, PEP9:PEP6 and PEP9:PEP10; wherein said GFR-binding compound does not comprise the pair of peptides KIPKAXXVPTEL:DMVVEGXGXR when PEP1 is SAIS and PEP2 is LKNYQ; wherein said GFR-binding compound does not comprise the pair of peptides SIPKAXXVPTEL:EMVVEGXGXR when PEP1 is SAIS and PEP2 is LKNYQ; wherein said GFR-binding compound does not comprise the pair of peptides HVTKPTXAPTKL:NMVVRSXGXH when PEP1 is NAIS and PEP2 is LKKYR; wherein said GFR-binding compound does not comprise the pair of peptides YVPKPXXAPTKL:NMVVRSXGXH when PEP1 is NAIS and PEP2 is LKKYR; wherein said GFR-binding compound does not comprise the pair of peptides TVPKPXXAPTQL:NMVVRAXGXH when PEP1 is NAIS and PEP2 is LKKYR; wherein said GFR-binding compound does not comprise the pair of peptides STPPTXXVPTRL:DMVVESXGSR when PEP1 is SPIS; wherein said GFR-binding compound does not comprise the pair of peptides ASAAPXXVPQAL:MIVRSXKXS when PEP1 is EPLP and PEP2 is EQLSN; wherein said GFR-binding compound does not comprise the pair of peptides ASASPXXVSQDL:MIVKSXKXS when PEP1 is EPLT and PEP2 is EQLSN; wherein said GFR-binding compound does not comprise the pair of peptides ASASPXXVPQDL:MVVKSXKXS when PEP1 is EPLT and PEP2 is EQLSN; and, optionally, wherein the RMSD is 2.45 Å or less.

[0724] In certain embodiments useful for inducing the conversion of a neoplastic cell into a cell (any cell) of a chondrocytic cell lineage, said GFR-binding compound is a synthetic molecule as defined herein in the definition section.

[0725] In certain embodiments useful for inducing the conversion of a neoplastic cell into a cell (any cell) of a chondrocytic cell lineage, said GFR-binding compound is a synthetic peptide, or a variant or analog thereof, or a peptidomimetic.

[0726] Vascular Cell Lineage

[0727] Certain embodiments of the invention are particularly useful for inducing the conversion of a neoplastic cell into a cell (any cell) of a vascular cell lineage.

[0728] In other embodiments useful for inducing the conversion of a neoplastic cell into a cell (any cell) of a vascular cell lineage, PEP1 is selected from the group consisting of SNIT, RPVQ and RSVK.

[0729] In other embodiments useful for inducing the conversion of a neoplastic cell into a cell (any cell) of a vascular cell lineage, PEP2 is selected from the group consisting of IGEMS, LGEMS, KEVQV and KKATV.

[0730] In other embodiments useful for inducing the conversion of a neoplastic cell into a cell (any cell) of a vascular cell lineage, PEP3 is selected from the group consisting of VPT, SRV and TQV.

[0731] In other embodiments useful for inducing the conversion of a neoplastic cell into a cell (any cell) of a vascular cell lineage, PEP4 is selected from the group consisting of QHN, EHS, EEH and EDH.

[0732] In other embodiments useful for inducing the conversion of a neoplastic cell into a cell (any cell) of a vascular cell lineage, PEP5 is a peptide of general formula PEP3-AA¹¹-AA¹²; wherein PEP3 is selected from the group consisting of VPT, SRV and TQV; wherein AA¹¹ is selected from the group consisting of E, K, Q, R, A, D, G and H, in particular is E, G, H and Q; wherein AA¹² is selected from the group consisting of L, M, T, E, Q and H, in particular is selected from the group consisting of E, Q, H and L. In one particular example, PEP5 is selected from the group consisting of VPTGQ, VPTEE, SRVHH and TQVQL.

[0733] In other embodiments useful for inducing the conversion of a neoplastic cell into a cell (any cell) of a vascular cell lineage, PEP6 is a peptide of general formula AA²⁶-AA²⁷-AA²⁸-AA²⁹-PEP4; wherein PEP4 is selected from the group consisting of QHN, EHS, EEH and EDH; wherein AA²⁶ is absent or selected from the group consisting of AA^{III} amino acids, preferably is absent; wherein AA²⁷ and AA²⁸ are independently selected from the group consisting of AA^{III} and AA^{V} amino acids, preferably AA²⁷ is selected from the group consisting of F, L, R and T, preferably AA²⁸ is L or E; wherein AA²⁹ is absent or selected from the group consisting of AA^{II} amino acids, preferably is absent. In one particular example, PEP6 is selected from the group consisting of LEEHS, FLQHN, RLEEH and TLEDH.

[0734] In other embodiments useful for inducing the conversion of a neoplastic cell into a cell (any cell) of a vascular cell lineage, PEP7 is an amino acid or a peptide with between two and seven amino acids of general formula AA¹-AA²-AA³-AA⁴-AA⁵-AA⁶-AA⁷; wherein AA¹, AA², AA³, AA⁴, and AA⁵ are independently absent or AA^{I} as defined herein; wherein AA⁶ is absent or selected from the group consisting of S, T, C, E, Q, P and R, preferably is selected from the group consisting of E, Q and R; wherein AA⁷ is absent or is selected from the group consisting of S, T, C, E, Q, P and R, preferably is selected from the group consisting of S, C and P; and wherein at least one of AA¹, AA², AA³, AA⁴, AA⁵, AA⁶ or AA⁷ is not absent. In one particular example, PEP7 is selected from the group consisting of NDEGLEX, SSVKXQP and RNVQXRP.

[0735] In other embodiments useful for inducing the conversion of a neoplastic cell into a cell (any cell) of a vascular cell lineage, PEP8 is an amino acid or a peptide with between two and six amino acids of general formula AA³³-AA³⁴-AA³⁵-AA³⁶-AA³⁷-AA³⁸; wherein AA³³ is absent or is selected from the group consisting of AA^{I} amino acids at the exception of AA^{VI} amino acids, in particular is selected from the group consisting of K, Q and L; AA³⁴ is absent or is selected from the group consisting of AA^{III} and AA^{IV} amino acids, in particular is absent, E or A; wherein AA³⁵ is absent or is selected from the group consisting of AA^{II} amino acids, preferably is S or C; wherein AA³⁶ is absent or is selected from the group consisting of AA^{III} and AA^{IV} amino acids, in particular is selected from the group consisting of E, A and K; wherein AA³⁷ is absent or is selected from the group consisting of AA^{II} amino acids, preferably is S or C; wherein AA³⁸ is absent or is selected from the group consisting of AA^{I}, in particular is selected from the group consisting of R, A and E; and wherein at least one of AA³³, AA³⁴, AA³⁵, AA³⁶, AA³⁷ or AA³⁸ is not absent. In one particular example, PEP8 is selected from the group consisting of KXEXR, QXEXR, LEXAXA and LAXKXE.

[0736] In other embodiments useful for inducing the conversion of a neoplastic cell into a cell (any cell) of a vascular cell lineage, PEP9 is a peptide of general formula AA¹-AA²-AA³-AA⁴-AA⁵-AA⁶-AA⁷-PEP5; wherein PEP5 is a peptide of formula PEP3-AA¹¹-AA¹²; wherein PEP3 is selected from the group consisting of VPT, SRV and TQV; wherein AA¹¹ is selected from the group consisting of E, K, Q, R, A, D, G and H, in particular is E, G, H and Q; wherein AA¹² is selected from the group consisting of L, M, T, E, Q and H, in particular is selected from the group consisting of E, Q, H and L; wherein AA¹, AA², AA³, AA⁴, and AA⁵ are independently absent or AA^{I} as defined herein; wherein AA⁶ is absent or selected from the group consisting of S, T, C, E, Q, P and R, preferably is selected from the group consisting of E, Q and R; wherein AA⁷ is selected from the group consisting of S, T, C, E, Q, P and R, preferably is selected from the group consisting of S, C and P. In one particular example, PEP9 is selected from the group consisting of NDEGLEXVPTEE, NDEGLEXVPTGQ, SSVKXQPSRVHH and RNVQXRPTQVQL.

[0737] In other embodiments useful for inducing the conversion of a neoplastic cell into a cell (any cell) of a vascular cell lineage, PEP10 is a peptide of general formula PEP6-AA³³-AA³⁴-AA³⁵-AA³⁶-AA³⁷-AA³⁸; wherein PEP6 is a peptide of formula AA²⁶-AA²⁷-AA²⁸-AA²⁹-PEP4; wherein PEP4 is selected from the group consisting of QHN, EHS, EEH and EDH; wherein AA²⁶ is absent or selected from the group consisting of AA^{III} amino acids, preferably is absent; wherein AA²⁷ and AA²⁸ are independently selected from the group consisting of AA^{III} and AA^{V} amino acids, preferably AA²⁷ is selected from the group consisting of F, L, R and T, preferably AA²⁸ is L or E; wherein AA²⁹ is absent or selected from the group consisting of AA^{II} amino acids, preferably is absent; wherein AA³³ is absent or is selected from the group consisting of AA^{I} amino acids at the exception of AA^{VI} amino acids, in particular is selected from the group consisting of K, Q and L; AA³⁴ is absent or is selected from the group consisting of AA^{III} and AA^{IV} amino acids, in particular is absent, E or A; wherein AA³⁵ is absent or is selected from the group consisting of AA^{II} amino acids, preferably is S or C; wherein AA³⁶ is absent or is selected from the group consisting of AA^{III} and AA^{IV} amino acids, in particular is selected from the group consisting of E, A and K; wherein AA³⁷ is absent or is selected from the group consisting of AA^{II} amino acids, preferably is S or C; wherein AA³⁸ is absent or is selected from the group consisting of AA^{I}, in particular is selected from the group consisting of R, A and E. In one particular example, PEP10 is selected from the group consisting of FLQHNKXEXR, LEEHSQXEXR, RLEEHLEXAXA and TLEDHLAXKXE.

[0738] In other embodiments useful for inducing the conversion of a neoplastic cell into a cell (any cell) of a vascular cell lineage, PEP12 is a peptide of general formula PEP1-AA¹⁷-PEP11; wherein AA¹⁷ is selected from the group consisting of G, A, V, L, I, P, F, M, W, T and S (in particular is selected from the group consisting of M, I, L, V and T); wherein PEP1 is selected from the group consisting of SNIT, RPVQ and RSVK.

[0739] In other embodiments useful for inducing the conversion of a neoplastic cell into a cell (any cell) of a vascular cell lineage, PEP11 is a peptide with 3 amino acids of general formula AA¹⁸-AA¹⁹-AA²⁰; wherein AA¹⁸ is selected from the group consisting of L, V, Q, A and R, in particular is selected from the group consisting of Q, A and R; wherein AA¹⁹ is selected from the group consisting of F, W, H, Y, I and K, in particular is I or K; wherein AA²⁰ is selected from the group consisting of L, F, Y, K, I, V and M, in particular is selected from the group consisting of M, V and I. In one particular example, PEP11 is selected from the group consisting of QIM, AKV and RKI.

[0740] The definitions of “PEP” pairs, quadruplets, hexaplets and heptuplet e.g. PEP1:PEP2, PEP12:PEP2, or PEP7:PEP5:PEP12:LINKER:PEP2:PEP6:PEP8, most particularly useful for inducing the conversion of a neoplastic cell into a cell (any cell) of a vascular cell lineage, are as already defined herein to the extent that PEP1 to PEP12 are particularly useful for these applications. For instances: In other embodiments useful for inducing the conversion of a neoplastic cell into a cell (any cell) of a vascular cell lineage, the pair PEP1:PEP2 is selected from the group consisting of SNIT:IGEMS, SNIT:LGEMS, RSVK:KEVQV and RPVQ:KKATV.

[0741] In other embodiments useful for inducing the conversion of a neoplastic cell into a cell (any cell) of a vascular cell lineage, the pair PEP12:PEP2 is selected from the group consisting of SNIT-AA¹⁷-QIM:IGEMS, SNIT-AA¹⁷-QIM:LGEMS, RSVK-AA¹⁷-AKV:KEVQV and RPVQ-AA¹⁷-RKI:KKATV; wherein AA¹⁷ is selected from the group consisting of G, A, V, L, I, P, F, M, W, T and S (in particular is selected from the group consisting of M, V and T).

[0742] In other embodiments useful for inducing the conversion of a neoplastic cell into a cell (any cell) of a vascular cell lineage, PEP3 is selected from the group consisting of VPT, SRV and TQV; PEP4 is selected from the group consisting of QHN, EHS, EEH and EDH; and wherein the pair PEP3:PEP4 is selected from the group consisting of VPT:QHN, VPT:EHS, SRV:EEH and TQV:EDH.

[0743] In other embodiments useful for inducing the conversion of a neoplastic cell into a cell (any cell) of a vascular cell lineage, PEP5 is selected from the group consisting of VPTGQ, VPTEE, SRVHH and TQVQL; PEP6 is selected from the group consisting of LEEHS, FLQHN, RLEEH and TLEDH; and wherein the pair PEP5:PEP6 is selected from the group consisting of VPTGQ:LEEHS, VPTEE:FLQHN, SRVHH:RLEEH and TQVQL:TLEDH.

[0744] In other embodiments useful for inducing the conversion of a neoplastic cell into a cell (any cell) of a vascular cell lineage, PEP7 is selected from the group consisting of NDEGLEX, SSVKXQP and RNVQXRP; wherein PEP8 is selected from the group consisting of KXEXR, QXEXR, LEXAXA and LAXKXE; and wherein the pair PEP7:PEP8 is selected from the group consisting of NDEGLEX:KXEXR, NDEGLEX:QXEXR, SSVKXQP:LEXAXA and RNVQXRP:LAXKXE.

[0745] In other embodiments useful for inducing the conversion of a neoplastic cell into a cell (any cell) of a vascular cell lineage, PEP9 is selected from the group consisting of NDEGLEXVPTEE, NDEGLEXVPTGQ, SSVKXQPSRVHH and RNVQXRPTQVQL; PEP10 is selected from the group consisting of FLQHNKXEXR, LEEHSQXEXR, RLEEHLEXAXA and TLEDHLAXKXE; and wherein the pair PEP9:PEP10 is selected from the group consisting of NDEGLEXVPTEE:FLQHNKXEXR, NDEGLEXVPTGQ:LEEHSQXEXR, SSVKXQPSRVHH:RLEEHLEXAXA and RNVQXRPTQVQL:TLEDHLAXKXE.

[0746] In other embodiments useful for inducing the conversion of a neoplastic cell into a cell (any cell) of a vascular cell lineage, PEP5 is selected from the group consisting of VPTGQ, VPTEE, SRVHH and TQVQL; PEP6 is selected from the group consisting of LEEHS, FLQHN, RLEEH and TLEDH; and wherein the pair PEP5:PEP6 is selected from the group consisting of VPTGQ:LEEHS, VPTEE:FLQHN, SRVHH:RLEEH and TQVQL:TLEDH; wherein the pair PEP5:PEP6 is not VPTEE:FLQHN when PEP1 is SNIT and PEP2 is IGEMS; wherein the pair PEP5:PEP6 is not VPTGQ:LEEHS when PEP1 is SNIT and PEP2 is LGEMS; wherein the pair PEP5:PEP6 is not SRVHH:RLEEH when PEP1 is RSVK and PEP2 is KEVQV; and wherein the pair PEP5:PEP6 is not TQVQL:TLEDH when PEP1 is RPVQ and PEP2 is KKATV.

[0747] In other embodiments useful for inducing the conversion of a neoplastic cell into a cell (any cell) of a vascular cell lineage, PEP9 is selected from the group consisting of NDEGLEXVPTEE, NDEGLEXVPTGQ, SSVKXQPSRVHH and RNVQXRPTQVQL; PEP10 is selected from the group consisting of FLQHNKXEXR, LEEHSQXEXR, RLEEHLEXAXA and TLEDHLAXKXE; and wherein the pair PEP9:PEP10 is selected from the group consisting of NDEGLEXVPTEE:FLQHNKXEXR, NDEGLEXVPTGQ:LEEHSQXEXR, SSVKXQPSRVHH:RLEEHLEXAXA and RNVQXRPTQVQL:TLEDHLAXKXE; wherein the pair PEP9:PEP10 is not NDEGLEXVPTEE:FLQHNKXEXR when PEP1 is SNIT and PEP2 is IGEMS; wherein the pair PEP9:PEP10 is not NDEGLEXVPTGQ:LEEHSQXEXR when PEP1 is SNIT and PEP2 is LGEMS; wherein the pair PEP9:PEP10 is not SSVKXQPSRVHH:RLEEHLEXAXA when PEP1 is RSVK and PEP2 is KEVQV; and wherein the pair PEP9:PEP10 is not RNVQXRPTQVQL:TLEDHLAXKXE when PEP1 is RPVQ and PEP2 is KKATV.

[0748] In other embodiments useful for inducing the conversion of a neoplastic cell into a cell (any cell) of a vascular cell lineage, PEP1 is selected from the group consisting of SNIT, RPVQ and RSVK; PEP11 is selected from the group consisting of QIM, AKV and RKI; and the pair PEP1:PEP11 is selected from the group consisting of SNIT:QIM, RSVK:KEVQV and RPVQ:KKATV.

[0749] In one aspect, the present disclosure provides a GFR-binding compound, wherein said GFR-binding compound is a peptide, a variant or analog thereof, or a peptidomimetic as defined herein, with between 20 and 60 (in particular between 20 and 50, and more particularly, between 20 and 45) amino acids, comprising a peptide with four amino acids (PEP1) or a peptide with eight amino acids (PEP12), a peptide with five amino acids (PEP2), and optionally a pair of peptides selected form the group consisting of PEP3:PEP4, PEP3:PEP6, PEP3:PEP10, PEP5:PEP4, PEP9:PEP4, PEP5:PEP6, PEP5:PEP10, PEP9:PEP6 and PEP9:PEP10; wherein said GFR-binding compound does not comprise the pair of peptides VPTEE:FLQHN when PEP1 is SNIT and PEP2 is IGEMS; wherein said GFR-binding compound does not comprise the pair of peptides VPTGQ:LEEHS when PEP1 is SNIT and PEP2 is LGEMS; wherein said GFR-binding compound does not comprise the pair of peptides SRVHH:RLEEH when PEP1 is RSVK and PEP2 is KEVQV; and wherein said GFR-binding compound does not comprise the pair of peptides TQVQL:TLEDH when PEP1 is RPVQ and PEP2 is KKATV; and, optionally, wherein the RMSD is 2.45 Å or less.

[0750] In one aspect, the present disclosure provides a GFR-binding compound, wherein said GFR-binding compound is a peptide, a variant or analog thereof, or a peptidomimetic as defined herein, with between 20 and 60 (in particular between 20 and 50, and more particularly, between 20 and 45) amino acids, comprising a peptide with four amino acids (PEP1) or a peptide with eight amino acids (PEP12), a peptide with five amino acids (PEP2), and optionally a pair of peptides selected form the group consisting of PEP3:PEP4, PEP3:PEP6, PEP3:PEP10, PEP5:PEP4, PEP9:PEP4, PEP5:PEP6, PEP5:PEP10, PEP9:PEP6 and PEP9:PEP10; wherein said GFR-binding compound does not comprise the pair of peptides NDEGLEXVPTEE:FLQHNKXEXR when PEP1 is SNIT and PEP2 is IGEMS; wherein said GFR-binding compound does not comprise the pair of peptides NDEGLEXVPTGQ:LEEHSQXEXR when PEP1 is SNIT and PEP2 is LGEMS; wherein said GFR-binding compound does not comprise the pair of peptides SSVKXQPSRVHH:RLEEHLEXAXA when PEP1 is RSVK and PEP2 is KEVQV; and wherein said GFR-binding compound does not comprise the pair of peptides RNVQXRPTQVQL:TLEDHLAXKXE when PEP1 is RPVQ and PEP2 is KKATV; and, optionally, wherein the RMSD is 2.45 Å or less.

[0751] In other embodiments useful for inducing the conversion of a neoplastic cell into a cell (any cell) of a vascular cell lineage, said GFR-binding compound is a synthetic molecule as defined herein in the definition section.

[0752] In other embodiments useful for inducing the conversion of a neoplastic cell into a cell (any cell) of a vascular cell lineage, said GFR-binding compound is a synthetic peptide, or a variant or analog thereof, or a peptidomimetic.

[0753] Neuron Lineage

[0754] Certain embodiments of the invention are particularly useful for inducing the conversion of a neoplastic cell into a cell (any cell) of a neuron lineage.

[0755] In certain embodiments useful for inducing the conversion of a neoplastic cell into a cell (any cell) of a neuron lineage, PEP1 is selected from the group consisting of NAIS, SPIS and EPIS.

[0756] In certain embodiments useful for inducing the conversion of a neoplastic cell into a cell (any cell) of a neuron lineage, PEP2 is selected from the group consisting of LKKYR, LKYHY, YKQYE and KFKYE.

[0757] In certain embodiments useful for inducing the conversion of a neoplastic cell into a cell (any cell) of a neuron lineage, PEP3 is selected from the group consisting of VPT, APT, VPA, VPQ and VSQ.

[0758] In certain embodiments useful for inducing the conversion of a neoplastic cell into a cell (any cell) of a neuron lineage, PEP4 is selected from the group consisting of VVE, VVR, VVK, VAE, AVS, VRS and VKS.

[0759] In certain embodiments useful for inducing the conversion of a neoplastic cell into a cell (any cell) of a neuron lineage, PEP5 is a peptide of general formula PEP3-AA¹¹-AA¹²; wherein PEP3 is selected from the group consisting of VPT, APT, VPA, VPQ and VSQ; wherein AA¹¹ is selected from the group consisting of E, K, Q, R, A, D, G and H, in particular E, K, Q, R, A and D; wherein AA¹² is selected from the group consisting of L, M, T, E, Q and H, in particular L. In one particular example, PEP5 is selected from the group consisting of VPTEL, APTKL, APTQL, VPTKL, VPARL, VPQAL, VSQDL and VPQDL.

[0760] In certain embodiments useful for inducing the conversion of a neoplastic cell into a cell (any cell) of a neuron lineage, PEP6 is a peptide of general formula AA²⁶-AA²⁷-AA²⁸-AA²⁹-PEP4; wherein PEP4 is selected from the group consisting of VVE, VVR, VVK, VAE, AVS, VRS and VKS; wherein AA²⁶ is absent or selected from the group consisting of AA^{III} amino acids, preferably absent or E; wherein AA²⁷ and AA²⁸ are independently selected from the group consisting of AA^{III} and AA^{V} amino acids, preferably AA²⁷ is selected from the group consisting of D, E, N, G and M, preferably AA²⁸ is selected from the group consisting of M, I and V; wherein AA²⁹ is absent or selected from the group consisting of AA^{II} amino acids, preferably absent or S. In one particular example, PEP6 is selected from the group consisting of DMVVE, EMVVE, NMVVR, NMVVK, EGMSVAE, GMAVS, DMVVE, MIVRS, MIVKS and MVVKS.

[0761] In certain embodiments useful for inducing the conversion of a neoplastic cell into a cell (any cell) of a neuron lineage, PEP7 is an amino acid or a peptide with between two and seven amino acids of general formula AA¹-AA²-AA³-AA⁴-AA⁵-AA⁶-AA⁷; wherein AA¹, AA², AA³, AA⁴, and AA⁵ are independently absent or AA^{I} as defined herein; wherein AA⁶ is absent or selected from the group consisting of S, T, C, E, Q, P and R, preferably S or C; wherein AA⁷ is absent or is selected from the group consisting of S, T, C, E, Q, P and R, preferably is S or C; and wherein at least one of AA¹, AA², AA³, AA⁴, AA⁵, AA⁶ or AA⁷ is not absent. In one particular example, PEP7 is selected from the group consisting of KIPKAXX, SIPKAXX, HVTKPTX, YVPKPXX, TVPKPXX, AVPKAXX, KVGKAXX, ASAAPXX, ASASPXX and RNVQXRP.

[0762] In certain embodiments useful for inducing the conversion of a neoplastic cell into a cell (any cell) of a neuron lineage, PEP8 is an amino acid or a peptide with between two and six amino acids of general formula AA³³-AA³⁴-AA³⁵-AA³⁶-AA³⁷-AA³⁸; wherein AA³³ is absent or is selected from the group consisting of AA^{I} amino acids at the exception of AA¹ amino acids, in particular is absent or is selected from the group consisting of G, S, A and E; AA³⁴ is absent or is selected from the group consisting of AA^{III} and AA^{IV} amino acids, in particular is absent; wherein AA³⁵ is absent or is selected from the group consisting of AA^{II} amino acids, preferably is S or C; wherein AA³⁶ is absent or is selected from the group consisting of AA^{III} and AA^{IV} amino acids, in particular is G or K; wherein AA³⁷ is absent or is selected from the group consisting of AA^{II} amino acids, preferably is S or C; wherein AA³⁸ is absent or is selected from the group consisting of AA^{I}, in particular is selected from the group consisting of R, H and S; and wherein at least one of AA³³, AA³⁴, AA³⁵, AA³⁶, AA³⁷ or AA³⁸ is not absent. In one particular example, PEP8 is selected from the group consisting of GXGXR, SXGXH, AXGXH, XGXR, XKXS and LAXKXE.

[0763] In certain embodiments useful for inducing the conversion of a neoplastic cell into a cell (any cell) of a neuron lineage, PEP9 is a peptide of general formula AA¹-AA²-AA³-AA⁴-AA⁵-AA⁶-AA⁷-PEP5; wherein PEP5 is a peptide of formula PEP3-AA¹¹-AA¹²; wherein PEP3 is selected from the group consisting of VPT, APT, VPA, VPQ and VSQ; wherein AA¹¹ is selected from the group consisting of E, K, Q, R, A, D, G and H, in particular E, K, Q, R, A and D; wherein AA¹² is selected from the group consisting of L, M, T, E, Q and H, in particular L; wherein AA¹, AA², AA³, AA⁴, and AA⁵ are independently absent or AA^{I} as defined herein; wherein AA⁶ is absent or selected from the group consisting of S, T, C, E, Q, P and R, preferably S or C; wherein AA⁷ is selected from the group consisting of S, T, C, E, Q, P and R, preferably is S or C. In one particular example, PEP9 is selected from the group consisting of KIPKAXXVPTEL, SIPKAXXVPTEL, HVTKPTXAPTKL, YVPKPXXAPTKL, TVPKPXXAPTQL, AVPKAXXAPTKL, KVGKAXXVPTKL, ASAAPXXVPQAL, ASASPXXVSQDL, ASASPXXVPQDL and RNVQXRPTQVQL.

[0764] In certain embodiments useful for inducing the conversion of a neoplastic cell into a cell (any cell) of a neuron lineage, PEP10 is a peptide of general formula PEP6-AA³³-AA³⁴-AA³⁵-AA³⁶-AA³⁷-AA³⁸; wherein PEP6 is a peptide of formula AA²⁶-AA²⁷-AA²⁸-AA²⁹-PEP4; wherein PEP4 is selected from the group consisting of VVE, VVR, VVK, VAE, AVS, VRS and VKS; wherein AA²⁶ is absent or selected from the group consisting of AA^{III} amino acids, preferably absent or E; wherein AA²⁷ and AA²⁸ are independently selected from the group consisting of AA^{III} and AA^{V} amino acids, preferably AA²⁷ is selected from the group consisting of D, E, N, G and M, preferably AA²⁸ is selected from the group consisting of M, I and V; wherein AA²⁹ is absent or selected from the group consisting of AA^{II} amino acids, preferably absent or S; wherein AA³³ is absent or is selected from the group consisting of AA^{I} amino acids at the exception of AA^{VI} amino acids, in particular is absent or is selected from the group consisting of G, S, A and E; AA³⁴ is absent or is selected from the group consisting of AA^{III} and AA^{V} amino acids, in particular is absent; wherein AA³⁵ is absent or is selected from the group consisting of AA^{II} amino acids, preferably is S or C; wherein AA³⁶ is absent or is selected from the group consisting of AA^{III} and AA^{V} amino acids, in particular is G or K; wherein AA³⁷ is absent or is selected from the group consisting of AA^{II} amino acids, preferably is S or C; wherein AA³⁸ is absent or is selected from the group consisting of AA^{I}, in particular is selected from the group consisting of R, H and S. In one particular example, PEP10 is selected from the group consisting of DMVVEGXGXR, EMVVEGXGXR, NMVVRSXGXH, NMVVRAXGXH, NMVVKAXGXH, EGMSVAEXGXR, MIVRSXKXS, MIVKSXKXS, MVVKSXKXS and TLEDHLAXKXE.

[0765] In certain embodiments useful for inducing the conversion of a neoplastic cell into a cell (any cell) of a neuron lineage, PEP12 is a peptide of general formula PEP1-AA¹⁷-PEP11; wherein AA¹⁷ is selected from the group consisting of G, A, V, L, I, P, F, M, W, T and S (in particular is selected from the group consisting of M, I, L, V and T); wherein PEP1 is selected from the group consisting of NAIS, SPIS and EPIS.

[0766] In certain embodiments useful for inducing the conversion of a neoplastic cell into a cell (any cell) of a neuron lineage, PEP11 is a peptide with 3 amino acids of general formula AA¹⁸-AA¹⁹-AA²⁰; wherein AA¹⁸ is selected from the group consisting of L, V, Q, A and R, in particular is L; wherein AA¹⁹ is selected from the group consisting of F, W, H and Y (in particular is an aromatic, polar amino acid such as Y); wherein AA²⁰ is selected from the group consisting of L, F, Y, K, I, V and M, in particular is selected from the group consisting of L, F, I, and K. In one particular example, PEP11 is selected from the group consisting of LYL, LYF, LYI and LYK.

[0767] The definitions of “PEP” pairs, quadruplets, hexaplets and heptuplet e.g. PEP1:PEP2, PEP12:PEP2, or PEP7:PEP5:PEP12:LINKER:PEP2:PEP6:PEP8, most particularly useful for inducing the conversion of a neoplastic cell into a cell (any cell) of a neuron lineage, are as already defined herein to the extent that PEP1 to PEP12 are particularly useful for these applications. For instances: In certain embodiments useful for inducing the conversion of a neoplastic cell into a cell (any cell) of a neuron lineage, the pair PEP1:PEP2 is selected from the group consisting of NAIS:LKKYR, SPIS:LKYHY, EPIS:KFKYE and SPIS:YKQYE.

[0768] In certain embodiments useful for inducing the conversion of a neoplastic cell into a cell (any cell) of a neuron lineage, the pair PEP12:PEP2 is selected from the group consisting of NAIS-AA¹⁷-LYF:LKKYR, SPIS-AA¹⁷-LYK:LKYHY, EPIS-AA¹⁷-LYL:KFKYE and SPIS-AA¹⁷-LYI:YKQYE; wherein AA¹⁷ is selected from the group consisting of G, A, V, L, I, P, F, M, W, T and S (in particular is selected from the group consisting of V, I and T).

[0769] In certain embodiments useful for inducing the conversion of a neoplastic cell into a cell (any cell) of a neuron lineage, PEP3 is selected from the group consisting of VPT, APT, VPA, VPQ and VSQ; PEP4 is selected from the group consisting of VVE, VVR, VVK, VAE, AVS, VRS and VKS; and wherein the pair PEP3:PEP4 is selected from the group consisting of VPT:VVE, APT:VVR, APT:VVK, VPT:VAE, VPT:AVS, VPA:VVE, VPQ:VRS, VSQ:VKS and VPQ:VKS.

[0770] In certain embodiments useful for inducing the conversion of a neoplastic cell into a cell (any cell) of a neuron lineage, PEP5 is selected from the group consisting of VPTEL, APTKL, APTQL, VPTKL, VPARL, VPQAL, VSQDL and VPQDL; PEP6 is selected from the group consisting of DMVVE, EMVVE, NMVVR, NMVVK, EGMSVAE, GMAVS, DMVVE, MIVRS, MIVKS and MVVKS; and wherein the pair PEP5:PEP6 is selected from the group consisting of VPTEL:DMVVE, VPTEL:EMVVE, APTKL:NMVVR, APTQL:NMVV, APTKL:NMVVK, VPTKL:EGMSVAE, VPTKL:EGMAVS, VPARL:DMVVE, VPQAL:MIVRS, VSQDL:MIVKS and VPQDL:MVVKS.

[0771] In certain embodiments useful for inducing the conversion of a neoplastic cell into a cell (any cell) of a neuron lineage, PEP7 is selected from the group consisting of KIPKAXX, SIPKAXX, HVTKPTX, YVPKPXX, TVPKPXX, AVPKAXX, KVGKAXX, ASAAPXX, ASASPXX and RNVQXRP; wherein PEP8 is selected from the group consisting of GXGXR, SXGXH, AXGXH, XGXR, XKXS and LAXKXE; and wherein the pair PEP7:PEP8 is selected from the group consisting of KIPKAXX:GXGXR, SIPKAXX:GXGXR, HVTKPTX:SXGXH, YVPKPXX:SXGXH, TVPKPXX:AXGXH, AVPKAXX:AXGXH, KVGKAXX:XGXR, KASKAXX:EXGXR, AAPASXX:AXGXR, ASAAPXX:XKXS, ASASPXX:XKXS and ASASPXX:XKXS.

[0772] In certain embodiments useful for inducing the conversion of a neoplastic cell into a cell (any cell) of a neuron lineage, PEP9 is selected from the group consisting of KIPKAXXVPTEL, SIPKAXXVPTEL, HVTKPTXAPTKL, YVPKPXXAPTKL, TVPKPXXAPTQL, AVPKAXXAPTKL, KVGKAXXVPTKL, ASAAPXXVPQAL, ASASPXXVSQDL, ASASPXXVPQDL and RNVQXRPTQVQL; PEP10 is selected from the group consisting of DMVVEGXGXR, EMVVEGXGXR, NMVVRSXGXH, NMVVRAXGXH, NMVVKAXGXH, EGMSVAEXGXR, MIVRSXKXS, MIVKSXKXS, MVVKSXKXS and TLEDHLAXKXE; and wherein the pair PEP9:PEP10 is selected from the group consisting of KIPKAXXVPTEL:DMVVEGXGXR, SIPKAXXVPTEL:EMVVEGXGXR, HVTKPTXAPTKL:NMVVRSXGXH, YVPKPXXAPTKL:NMVVRSXGXH, TVPKPXXAPTQL:NMVVRAXGXH, AVPKAXXAPTKL:NMVVKAXGXH, KVGKAXXVPTKL:EGMSVAEXGXR, KASKAXXVPTKL:GMAVSEXGXR, AAPASXXVPARL:DMVVEAXGXR, ASAAPXXVPQAL:MIVRSXKXS, ASASPXXVSQDL:MIVKSXKXS and ASASPXXVPQDL:MVVKSXKXS.

[0773] In certain embodiments useful for inducing the conversion of a neoplastic cell into a cell (any cell) of a neuron lineage, PEP5 is selected from the group consisting of VPTEL, APTKL, APTQL, VPTKL, VPARL, VPQAL, VSQDL and VPQDL; PEP6 is selected from the group consisting of DMVVE, EMVVE, NMVVR, NMVVK, EGMSVAE, GMAVS, DMVVE, MIVRS, MIVKS and MVVKS; and wherein the pair PEP5:PEP6 is selected from the group consisting of VPTEL:DMVVE, VPTEL:EMVVE, APTKL:NMVVR, APTQL:NMVV, APTKL:NMVVK, VPTKL:EGMSVAE, VPTKL:EGMAVS, VPARL:DMVVE, VPQAL:MIVRS, VSQDL:MIVKS and VPQDL:MVVKS; wherein the pair PEP5:PEP6 is not APTQL:NMVVR when PEP1 is NAIS and PEP2 is LKKYR; wherein the pair PEP5:PEP6 is not VPTKL:EGMSVAE when PEP1 is SPIS and PEP2 is LKYHY; wherein the pair PEP5:PEP6 is not VPTKL:GMAVS when PEP1 is EPIS and PEP2 is KFKYE; and wherein the pair PEP5:PEP6 is not VPARL:DMVVE when PEP1 is SPIS and PEP2 is YKQYE.

[0774] In certain embodiments useful for inducing the conversion of a neoplastic cell into a cell (any cell) of a neuron lineage, PEP9 is selected from the group consisting of KIPKAXXVPTEL, SIPKAXXVPTEL, HVTKPTXAPTKL, YVPKPXXAPTKL, TVPKPXXAPTQL, AVPKAXXAPTKL, KVGKAXXVPTKL, ASAAPXXVPQAL, ASASPXXVSQDL, ASASPXXVPQDL and RNVQXRPTQVQL; PEP10 is selected from the group consisting of DMVVEGXGXR, EMVVEGXGXR, NMVVRSXGXH, NMVVRAXGXH, NMVVKAXGXH, EGMSVAEXGXR, MIVRSXKXS, MIVKSXKXS, MVVKSXKXS and TLEDHLAXKXE; and wherein the pair PEP9:PEP10 is selected from the group consisting of KIPKAXXVPTEL:DMVVEGXGXR, SIPKAXXVPTEL:EMVVEGXGXR, HVTKPTXAPTKL:NMVVRSXGXH, YVPKPXXAPTKL:NMVVRSXGXH, TVPKPXXAPTQL:NMVVRAXGXH, AVPKAXXAPTKL:NMVVKAXGXH, KVGKAXXVPTKL:EGMSVAEXGXR, KASKAXXVPTKL:GMAVSEXGXR, AAPASXXVPARL:DMVVEAXGXR, ASAAPXXVPQAL:MIVRSXKXS, ASASPXXVSQDL:MIVKSXKXS and ASASPXXVPQDL:MVVKSXKXS; wherein PEP9:PEP10 is not TVPKPXXAPTQL:NMVVRAXGXH when PEP1 is NAIS and PEP2 is LKKYR; wherein PEP9:PEP10 is not KVGKAXXVPTKL:EGMSVAEXGXR when PEP1 is SPIS and PEP2 is LKYHY; wherein PEP9:PEP10 is not KASKAXXVPTKL:GMAVSEXGXR when PEP1 is EPIS and PEP2 is KFKYE; wherein PEP9:PEP10 is not AAPASXXVPARL:DMVVEAXGXR when PEP1 is SPIS.

[0775] In certain embodiments useful for inducing the conversion of a neoplastic cell into a cell (any cell) of a neuron lineage, PEP1 is selected from the group consisting of NAIS, SPIS and EPIS; PEP11 is selected from the group consisting of LYF, LYK, LYL and LYI; and the pair PEP1:PEP11 is selected from the group consisting of NAIS:LYF, SPIS:LYK, EPIS:LYL and SPIS:LYI.

[0776] In one aspect, the present disclosure provides a GFR-binding compound, wherein said GFR-binding compound is a peptide, a variant or analog thereof, or a peptidomimetic as defined herein, with between 20 and 60 (in particular between 20 and 50, and more particularly, between 20 and 45) amino acids, comprising a peptide with four amino acids (PEP1) or a peptide with eight amino acids (PEP12), a peptide with five amino acids (PEP2), and optionally a pair of peptides selected form the group consisting of PEP3:PEP4, PEP3:PEP6, PEP3:PEP10, PEP5:PEP4, PEP9:PEP4, PEP5:PEP6, PEP5:PEP10, PEP9:PEP6 and PEP9:PEP10; wherein said GFR-binding compound does not comprise the pair of peptides APTQL:NMVVR when PEP1 is NAIS and PEP2 is LKKYR; wherein said GFR-binding compound does not comprise the pair of peptides VPTKL:EGMSVAE when PEP1 is SPIS and PEP2 is LKYHY; wherein said GFR-binding compound does not comprise the pair of peptides VPTKL:GMAVS when PEP1 is EPIS and PEP2 is KFKYE; and wherein said GFR-binding compound does not comprise the pair of peptides VPARL:DMVVE when PEP1 is SPIS and PEP2 is YKQYE; and, optionally, wherein the RMSD is 2.45 Å or less.

[0777] In one aspect, the present disclosure provides a GFR-binding compound, wherein said GFR-binding compound is a peptide, a variant or analog thereof, or a peptidomimetic as defined herein, with between 20 and 60 (in particular between 20 and 50, and more particularly, between 20 and 45) amino acids, comprising a peptide with four amino acids (PEP1) or a peptide with eight amino acids (PEP12), a peptide with five amino acids (PEP2), and optionally a pair of peptides selected form the group consisting of PEP3:PEP4, PEP3:PEP6, PEP3:PEP10, PEP5:PEP4, PEP9:PEP4, PEP5:PEP6, PEP5:PEP10, PEP9:PEP6 and PEP9:PEP10; wherein said GFR-binding compound does not comprise the pair of peptides TVPKPXXAPTQL:NMVVRAXGXH when PEP1 is NAIS and PEP2 is LKKYR; wherein said GFR-binding compound does not comprise the pair of peptides KVGKAXXVPTKL:EGMSVAEXGXR when PEP1 is SPIS and PEP2 is LKYHY; wherein said GFR-binding compound does not comprise the pair of peptides KASKAXXVPTKL:GMAVSEXGXR when PEP1 is EPIS and PEP2 is KFKYE; wherein said GFR-binding compound does not comprise the pair of peptides AAPASXXVPARL:DMVVEAXGXR when PEP1 is SPIS; and, optionally, wherein the RMSD is 2.45 Å or less.

[0778] In certain embodiments useful for inducing the conversion of a neoplastic cell into a cell (any cell) of a neuron lineage, said GFR-binding compound is a synthetic molecule as defined herein in the definition section.

[0779] In certain embodiments useful for inducing the conversion of a neoplastic cell into a cell (any cell) of a neuron lineage, said GFR-binding compound is a synthetic peptide, or a variant or analog thereof, or a peptidomimetic.

[0780] Eye Retina Cell Lineage

[0781] Certain embodiments of the invention are particularly useful for inducing the conversion of a neoplastic cell into a cell (any cell) of an eye retina cell lineage.

[0782] In certain embodiments useful for inducing the conversion of a neoplastic cell into a cell (any cell) of an eye retina cell lineage, PEP1 is SPIN.

[0783] In certain embodiments useful for inducing the conversion of a neoplastic cell into a cell (any cell) of an eye retina cell lineage, PEP2 is YGKIP.

[0784] In certain embodiments useful for inducing the conversion of a neoplastic cell into a cell (any cell) of an eye retina cell lineage, PEP3 is selected from the group consisting of VPT, APT, TPT, VPA and APV.

[0785] In certain embodiments useful for inducing the conversion of a neoplastic cell into a cell (any cell) of an eye retina cell lineage, PEP4 is selected from the group consisting of VVE, VVR, VVK, VAE, AVS, VVD and VEE.

[0786] In certain embodiments useful for inducing the conversion of a neoplastic cell into a cell (any cell) of an eye retina cell lineage, PEP5 is a peptide of general formula PEP3-AA¹¹-AA¹²; wherein PEP3 is selected from the group consisting of VPT, APT, TPT, VPA and APV; wherein AA¹¹ is selected from the group consisting of E, K, Q, R, A, D, G and H, in particular is E, K, Q and R; wherein AA¹² is selected from the group consisting of L, M, T, E, Q and H, in particular is L, M or T. In one particular example, PEP5 is selected from the group consisting of VPTEL, APTKL, APTQL, VPTKL, TPTKM, VPARL, VPTRL and APVKT.

[0787] In certain embodiments useful for inducing the conversion of a neoplastic cell into a cell (any cell) of an eye retina cell lineage, PEP6 is a peptide of general formula AA²⁶-AA²⁷-AA²⁸-AA²⁹-PEP4; wherein PEP4 is selected from the group consisting of VVE, VVR, VVK, VAE, AVS, VVD and VEE; wherein AA²⁶ is absent or selected from the group consisting of AA^{III} amino acids, preferably absent or E; wherein AA²⁷ and AA²⁸ are independently selected from the group consisting of AA^{III} and AA^{V} amino acids, preferably AA²⁷ is selected from the group consisting of D, E, N, G and M, preferably AA²⁸ is M or I; wherein AA²⁹ is absent or selected from the group consisting of AA^{II} amino acids, preferably absent or S. In one particular example, PEP6 is selected from the group consisting of DMVVE, EMVVE, NMVVR, NMVVK, EGMSVAE, EGMAVS, GMVVD and DMIVEE.

[0788] In certain embodiments useful for inducing the conversion of a neoplastic cell into a cell (any cell) of an eye retina cell lineage, PEP7 is an amino acid or a peptide with between two and seven amino acids of general formula AA¹-AA²-AA³-AA⁴-AA⁵-AA⁶-AA⁷; wherein AA¹, AA², AA³, AA⁴, and AA⁵ are independently absent or AA^{I} as defined herein; wherein AA⁶ is absent or selected from the group consisting of S, T, C, E, Q, P and R, preferably is S or C; wherein AA⁷ is absent or is selected from the group consisting of S, T, C, E, Q, P and R, preferably is S or C; and wherein at least one of AA¹, AA², AA³, AA⁴, AA⁵, AA⁶ or AA⁷ is not absent. In one particular example, PEP7 is selected from the group consisting of KIPKAXX, SIPKAXX, HVTKPTX, YVPKPXX, TVPKPXX, AVPKAXX, KVGKAXX, KASKAXX, GSAGPXX, AAPAXXS, STPPTXX, HVPKPXX and RVPSTXX.

[0789] In certain embodiments useful for inducing the conversion of a neoplastic cell into a cell (any cell) of an eye retina cell lineage, PEP8 is an amino acid or a peptide with between two and six amino acids of general formula AA³³-AA³⁴-AA³⁵-AA³⁶-AA³⁷-AA³⁸; wherein AA³³ is absent or is selected from the group consisting of AA^{I} amino acids at the exception of AA^{VI} amino acids, in particular is absent or is selected from the group consisting of G, S, A, E and R; AA³⁴ is absent or is selected from the group consisting of AA^{III} and AA^{IV} amino acids, in particular is absent; wherein AA³⁵ is absent or is selected from the group consisting of AA^{II} amino acids, preferably is S or C; wherein AA³⁶ is absent or is selected from the group consisting of AA^{III} and AA^{IV} amino acids; wherein AA³⁷ is absent or is selected from the group consisting of AA^{II} amino acids, preferably is S or C; wherein AA³⁸ is absent or is selected from the group consisting of AA^{I}, in particular is selected from the group consisting of R, H, S and L; and wherein at least one of AA³³, AA³⁴, AA³⁵, AA³⁶, AA³⁷ or AA³⁸ is not absent. In one particular example, PEP8 is selected from the group consisting of GXGXR, SXGXH, AXGXH, XGXR, EXGXR, RXGXS, AXGXR, SXGXR and XGXL.

[0790] In certain embodiments useful for inducing the conversion of a neoplastic cell into a cell (any cell) of an eye retina cell lineage, PEP9 is a peptide of general formula AA⁷-AA²-AA³-AA⁴-AA⁵-AA⁶-AA⁷-PEP5; wherein PEP5 is a peptide of formula PEP3-AA¹¹-AA¹²; wherein PEP3 is selected from the group consisting of VPT, APT, TPT, VPA and APV; wherein AA¹¹ is selected from the group consisting of E, K, Q, R, A, D, G and H, in particular is E, K, Q and R; wherein AA¹² is selected from the group consisting of L, M, T, E, Q and H, in particular is L, M or T; wherein AA¹, AA², AA³, AA⁴, and AA⁵ are independently absent or AA^{I} as defined herein; wherein AA⁶ is absent or selected from the group consisting of S, T, C, E, Q, P and R, preferably is S or C; wherein AA⁷ is selected from the group consisting of S, T, C, E, Q, P and R, preferably is S or C. In one particular example, PEP9 is selected from the group consisting of KIPKAXXVPTEL, SIPKAXXVPTEL, HVTKPTXAPTKL, YVPKPXXAPTKL, TVPKPXXAPTQL, AVPKAXXAPTKL, KVGKAXXVPTKL, KASKAXXVPTKL, GSAGPXXTPTKL, AAPASXXVPARL, STPPTXXVPTRL, HVPKPXXAPTKL and RVPSTXXAPVKT.

[0791] In certain embodiments useful for inducing the conversion of a neoplastic cell into a cell (any cell) of an eye retina cell lineage, PEP10 is a peptide of general formula PEP6-AA³³-AA³⁴-AA³⁵-AA³⁶-AA³⁷-AA³⁸; wherein PEP6 is a peptide of formula AA²⁶-AA²⁷-AA²⁸-AA²⁹-PEP4; wherein PEP4 is selected from the group consisting of VVE, VVR, VVK, VAE, AVS, VVD and VEE; wherein AA²⁶ is absent or selected from the group consisting of AA^{III} amino acids, preferably absent or E; wherein AA²⁷ and AA²⁸ are independently selected from the group consisting of AA^{III} and AA^{V} amino acids, preferably AA²⁷ is selected from the group consisting of D, E, N, G and M, preferably AA²⁸ is M or I; wherein AA²⁹ is absent or selected from the group consisting of AA^{II} amino acids, preferably absent or S; wherein AA³³ is absent or is selected from the group consisting of AA^{I} amino acids at the exception of AA^{VI} amino acids, in particular is absent or is selected from the group consisting of G, S, A, E and R; AA³⁴ is absent or is selected from the group consisting of AA^{III} and AA^{IV} amino acids, in particular is absent; wherein AA³⁵ is absent or is selected from the group consisting of AA^{II} amino acids, preferably is S or C; wherein AA³⁶ is absent or is selected from the group consisting of AA^{III} and AA^{IV} amino acids; wherein AA³⁷ is absent or is selected from the group consisting of AA^{II} amino acids, preferably is S or C; wherein AA³⁸ is absent or is selected from the group consisting of AA^{I}, in particular is selected from the group consisting of R, H, S and L. In one particular example, PEP10 is selected from the group consisting of DMVVEGXGXR, EMVVEGXGXR, NMVVRSXGXH, NMVVRAXGXH, NMVVKAXGXH, EGMSVAEXGXR, GMAVSEXGXR, GMVVDRXGXS, DMVVEAXGXR, DMVVESXGXR, NMVVRSXGXH and MIVEEXGXL.

[0792] In certain embodiments useful for inducing the conversion of a neoplastic cell into a cell (any cell) of an eye retina cell lineage, PEP12 is a peptide of general formula PEP1-AA¹⁷-PEP11; wherein AA¹⁷ is selected from the group consisting of G, A, V, L, I, P, F, M, W, T and S (in particular is selected from the group consisting of M, I, L, V and T); wherein PEP1 is SPIN.

[0793] In certain embodiments useful for inducing the conversion of a neoplastic cell into a cell (any cell) of an eye retina cell lineage, PEP11 is a peptide with 3 amino acids of general formula AA¹⁸-AA¹⁹-AA²⁰; wherein AA¹⁸ is selected from the group consisting of L, V, Q, A and R, in particular is L; wherein AA¹⁹ is selected from the group consisting of F, W, H and Y, in particular is Y or F; wherein AA²⁰ is selected from the group consisting of L, F, Y, K, I, V and M, in particular is selected from the group consisting of L, F, Y, K, I and V. In one particular example, PEP11 is LYF.

[0794] The definitions of “PEP” pairs, quadruplets, hexaplets and heptuplet e.g. PEP1:PEP2, PEP12:PEP2, or PEP7:PEP5:PEP12:LINKER:PEP2:PEP6:PEP8, most particularly useful for inducing the conversion of a neoplastic cell into a cell (any cell) of an eye retina cell lineage, are as already defined herein to the extent that PEP1 to PEP12 are particularly useful for these applications. For instances: In certain embodiments useful for inducing the conversion of a neoplastic cell into a cell (any cell) of an eye retina cell lineage, PEP3 is selected from the group consisting of VPT, APT, TPT, VPA and APV; PEP4 is selected from the group consisting of VVE, VVR, VVK, VAE, AVS, VVD and VEE; and wherein the pair PEP3:PEP4 is selected from the group consisting of VPT:VVE, APT:VVR, APT:VVK, VPT:VAE, VPT:AVS, TPT:VVD, VPA:VVE and APV:VEE.

[0795] In certain embodiments useful for inducing the conversion of a neoplastic cell into a cell (any cell) of an eye retina cell lineage, PEP5 is selected from the group consisting of VPTEL, APTKL, APTQL, VPTKL, TPTKM, VPARL, VPTRL and APVKT; PEP6 is selected from the group consisting of DMVVE, EMVVE, NMVVR, NMVVK, EGMSVAE, EGMAVS, GMVVD and DMIVEE; and wherein the pair PEP5:PEP6 is selected from the group consisting of VPTEL:DMVVE, VPTEL:EMVVE, APTKL:NMVVR, APTQL:NMVVR, APTKL:NMVVK, VPTKL:EGMSVAE, VPTKL:EGMAVS, TPTKM:GMVVD, VPARL:DMVVE, VPTRL:DMVVE, APTKL:NMVVR and APVKT:DMIVEE.

[0796] In certain embodiments useful for inducing the conversion of a neoplastic cell into a cell (any cell) of an eye retina cell lineage, PEP7 is selected from the group consisting of KIPKAXX, SIPKAXX, HVTKPTX, YVPKPXX, TVPKPXX, AVPKAXX, KVGKAXX, KASKAXX, GSAGPXX, AAPAXXS, STPPTXX, HVPKPXX and RVPSTXX; wherein PEP8 is selected from the group consisting of GXGXR, SXGXH, AXGXH, XGXR, EXGXR, RXGXS, AXGXR, SXGXR and XGXL; and wherein the pair PEP7:PEP8 is selected from the group consisting of KIPKAXX:GXGXR, SIPKAXX:GXGXR, HVTKPTX:SXGXH, YVPKPXX:SXGSH, TVPKPXX:AXGXH, AVPKAXX:AXGXH, KVGKAXX:XGXR, KASKAXX:EXGXR, GSAGPXX:RXGXS, AAPASXX:AXGXR, STPPTXX:SXGXR, HVPKPXX:SXGXH and RVPSTXX:XGXL.

[0797] In certain embodiments useful for inducing the conversion of a neoplastic cell into a cell (any cell) of an eye retina cell lineage, PEP9 is selected from the group consisting of KIPKAXXVPTEL, SIPKAXXVPTEL, HVTKPTXAPTKL, YVPKPXXAPTKL, TVPKPXXAPTQL, AVPKAXXAPTKL, KVGKAXXVPTKL, KASKAXXVPTKL, GSAGPXXTPTKL, AAPASXXVPARL, STPPTXXVPTRL, HVPKPXXAPTKL and RVPSTXXAPVKT; PEP10 is selected from the group consisting of DMVVEGXGXR, EMVVEGXGXR, NMVVRSXGXH, NMVVRAXGXH, NMVVKAXGXH, EGMSVAEXGXR, GMAVSEXGXR, GMVVDRXGXS, DMVVEAXGXR, DMVVESXGXR, NMVVRSXGXH and MIVEEXGXL; and wherein the pair PEP9:PEP10 is selected from the group consisting of KIPKAXXVPTEL:DMVVEGXGXR, SIPKAXXVPTEL:EMVVEGXGXR, HVTKPTXAPTKL:NMVVRSXGXH, YVPKPXXAPTKL:NMVVRSXGXH, TVPKPXXAPTQL:NMVVRAXGXH, AVPKAXXAPTKL:NMVVKAXGXH, KVGKAXXVPTKL:EGMSVAEXGXR, KASKAXXVPTKL:GMAVSEXGXR, GSAGPXXTPTKM:GMVVDRXGXS, AAPASXXVPARL:DMVVEAXGXR, STPPTXXVPTRL:DMVVESXGXR, HVPKPXXAPTKL:NMVVRSXGXH and RVPSTXXAPVKT:MIVEEXGXL.

[0798] In certain embodiments useful for inducing the conversion of a neoplastic cell into a cell (any cell) of an eye retina cell lineage, PEP5 is selected from the group consisting of VPTEL, APTKL, APTQL, VPTKL, VPARL, VPQAL, VSQDL and VPQDL; PEP6 is selected from the group consisting of DMVVE, EMVVE, NMVVR, NMVVK, EGMSVAE, GMAVS, DMVVE, MIVRS, MIVKS and MVVKS; and wherein the pair PEP5:PEP6 is selected from the group consisting of VPTEL:DMVVE, VPTEL:EMVVE, APTKL:NMVVR, APTQL:NMVVR, APTKL:NMVVK, VPTKL:EGMSVAE, VPTKL:EGMAVS, TPTKM:GMVVD, VPARL:DMVVE, VPTRL:DMVVE, APTKL:NMVVR and APVKT:DMIVEE; and wherein the pair PEP5:PEP6 is not TPTKM:GMVVD when PEP1 is SPIN and PEP2 is YGKIP.

[0799] In certain embodiments useful for inducing the conversion of a neoplastic cell into a cell (any cell) of an eye retina cell lineage, PEP9 is selected from the group consisting of KIPKAXXVPTEL, SIPKAXXVPTEL, HVTKPTXAPTKL, YVPKPXXAPTKL, TVPKPXXAPTQL, AVPKAXXAPTKL, KVGKAXXVPTKL, KASKAXXVPTKL, GSAGPXXTPTKL, AAPASXXVPARL, STPPTXXVPTRL, HVPKPXXAPTKL and RVPSTXXAPVKT; PEP10 is selected from the group consisting of DMVVEGXGXR, EMVVEGXGXR, NMVVRSXGXH, NMVVRAXGXH, NMVVKAXGXH, EGMSVAEXGXR, GMAVSEXGXR, GMVVDRXGXS, DMVVEAXGXR, DMVVESXGXR, NMVVRSXGXH and MIVEEXGXL; and wherein the pair PEP9:PEP10 is selected from the group consisting of KIPKAXXVPTEL:DMVVEGXGXR, SIPKAXXVPTEL:EMVVEGXGXR, HVTKPTXAPTKL:NMVVRSXGXH, YVPKPXXAPTKL:NMVVRSXGXH, TVPKPXXAPTQL:NMVVRAXGXH, AVPKAXXAPTKL:NMVVKAXGXH, KVGKAXXVPTKL:EGMSVAEXGXR, KASKAXXVPTKL:GMAVSEXGXR, GSAGPXXTPTKM:GMVVDRXGXS, AAPASXXVPARL:DMVVEAXGXR, STPPTXXVPTRL:DMVVESXGXR, HVPKPXXAPTKL:NMVVRSXGXH and RVPSTXXAPVKT:MIVEEXGXL; and wherein PEP9:PEP10 is not GSAGPXXTPTKM:GMVVDRXGXS when PEP1 is SPIN and PEP2 is YGKIP.

[0800] In certain embodiments useful for inducing the conversion of a neoplastic cell into a cell (any cell) of an eye retina cell lineage, PEP1 is SPIN and PEP11 is LYF.

[0801] In one aspect, the present disclosure provides a GFR-binding compound, wherein said GFR-binding compound is a peptide, a variant or analog thereof, or a peptidomimetic as defined herein, with between 20 and 60 (in particular between 20 and 50, and more particularly, between 20 and 45) amino acids, comprising a peptide with four amino acids (PEP1) or a peptide with eight amino acids (PEP12), a peptide with five amino acids (PEP2), and optionally a pair of peptides selected form the group consisting of PEP3:PEP4, PEP3:PEP6, PEP3:PEP10, PEP5:PEP4, PEP9:PEP4, PEP5:PEP6, PEP5:PEP10, PEP9:PEP6 and PEP9:PEP10; wherein said GFR-binding compound does not comprise the pair of peptides TPTKM:GMVVD when PEP1 is SPIN and PEP2 is YGKIP; and, optionally, wherein the RMSD is 2.45 Å or less.

[0802] In one aspect, the present disclosure provides a GFR-binding compound, wherein said GFR-binding compound is a peptide, a variant or analog thereof, or a peptidomimetic as defined herein, with between 20 and 60 (in particular between 20 and 50, and more particularly, between 20 and 45) amino acids, comprising a peptide with four amino acids (PEP1) or a peptide with eight amino acids (PEP12), a peptide with five amino acids (PEP2), and optionally a pair of peptides selected form the group consisting of PEP3:PEP4, PEP3:PEP6, PEP3:PEP10, PEP5:PEP4, PEP9:PEP4, PEP5:PEP6, PEP5:PEP10, PEP9:PEP6 and PEP9:PEP10; wherein said GFR-binding compound does not comprise the pair of peptides GSAGPXXTPTKM:GMVVDRXGXS when PEP1 is SPIN and PEP2 is YGKIP; and, optionally, wherein the RMSD is 2.45 Å or less.

[0803] In certain embodiments useful for inducing the conversion of a neoplastic cell into a cell (any cell) of an eye retina cell lineage, said GFR-binding compound is a synthetic molecule as defined herein in the definition section.

[0804] In certain embodiments useful for inducing the conversion of a neoplastic cell into a cell (any cell) of an eye retina cell lineage, said GFR-binding compound is a synthetic peptide, or a variant or analog thereof, or a peptidomimetic.

[0805] Renal cell lineage Certain embodiments of the invention are particularly useful for inducing the conversion of a neoplastic cell into a cell (any cell) of a renal cell lineage.

[0806] In certain embodiments useful for inducing the conversion of a neoplastic cell into a cell (any cell) of a renal cell lineage, PEP1 is SPIN.

[0807] In certain embodiments useful for inducing the conversion of a neoplastic cell into a cell (any cell) of a renal cell lineage, PEP2 is YGKIP.

[0808] In certain embodiments useful for inducing the conversion of a neoplastic cell into a cell (any cell) of a renal cell lineage, PEP3 is selected from the group consisting of VPT, APT, TPT, VPA and APV.

[0809] In certain embodiments useful for inducing the conversion of a neoplastic cell into a cell (any cell) of a renal cell lineage, PEP4 is selected from the group consisting of VVE, VVR, VVK, VAE, AVS, VVD and VEE.

[0810] In certain embodiments useful for inducing the conversion of a neoplastic cell into a cell (any cell) of a renal cell lineage, PEP5 is a peptide of general formula PEP3-AA¹¹-AA¹²; wherein PEP3 is selected from the group consisting of VPT, APT, TPT, VPA and APV; wherein AA¹¹ is selected from the group consisting of E, K, Q, R, A, D, G and H, in particular is E, K, Q and R; wherein AA¹² is selected from the group consisting of L, M, T, E, Q and H, in particular is L, M or T. In one particular example, PEP5 is selected from the group consisting of VPTEL, APTKL, APTQL, VPTKL, TPTKM, VPARL, VPTRL and APVKT.

[0811] In certain embodiments useful for inducing the conversion of a neoplastic cell into a cell (any cell) of a renal cell lineage, PEP6 is a peptide of general formula AA²⁶-AA²⁷-AA²⁸-AA²⁹-PEP4; wherein PEP4 is selected from the group consisting of VVE, VVR, VVK, VAE, AVS, VVD and VEE; wherein AA²⁶ is absent or selected from the group consisting of AA^{III} amino acids, preferably absent or E; wherein AA²⁷ and AA²⁸ are independently selected from the group consisting of AA^{III} and AA^{V} amino acids, preferably AA²⁷ is selected from the group consisting of D, E, N, G and M, preferably AA²⁸ is M or I; wherein AA²⁹ is absent or selected from the group consisting of AA^{II} amino acids, preferably absent or S. In one particular example, PEP6 is selected from the group consisting of DMVVE, EMVVE, NMVVR, NMVVK, EGMSVAE, EGMAVS, GMVVD and DMIVEE.

[0812] In certain embodiments useful for inducing the conversion of a neoplastic cell into a cell (any cell) of a renal cell lineage, PEP7 is an amino acid or a peptide with between two and seven amino acids of general formula AA¹-AA²-AA³-AA⁴-AA⁵-AA⁶-AA⁷; wherein AA¹, AA², AA³, AA⁴, and AA⁵ are independently absent or AA^{I} as defined herein; wherein AA⁶ is absent or selected from the group consisting of S, T, C, E, Q, P and R, preferably is S or C; wherein AA⁷ is absent or is selected from the group consisting of S, T, C, E, Q, P and R, preferably is S or C; and wherein at least one of AA¹, AA², AA³, AA⁴, AA⁵, AA⁶ or AA⁷ is not absent. In one particular example, PEP7 is selected from the group consisting of KIPKAXX, SIPKAXX, HVTKPTX, YVPKPXX, TVPKPXX, AVPKAXX, KVGKAXX, KASKAXX, GSAGPXX, AAPAXXS, STPPTXX, HVPKPXX and RVPSTXX.

[0813] In certain embodiments useful for inducing the conversion of a neoplastic cell into a cell (any cell) of a renal cell lineage, PEP8 is an amino acid or a peptide with between two and six amino acids of general formula AA³³-AA³⁴-AA³⁵-AA³⁶-AA³⁷-AA³⁸; wherein AA³³ is absent or is selected from the group consisting of AA^{I} amino acids at the exception of AA^{VI} amino acids, in particular is absent or is selected from the group consisting of G, S, A, E and R; AA³⁴ is absent or is selected from the group consisting of AA^{III} and AA^{IV} amino acids, in particular is absent; wherein AA³⁵ is absent or is selected from the group consisting of AA^{II} amino acids, preferably is S or C; wherein AA³⁶ is absent or is selected from the group consisting of AA^{III} and AA^{IV} amino acids; wherein AA³⁷ is absent or is selected from the group consisting of AA^{II} amino acids, preferably is S or C; wherein AA³⁸ is absent or is selected from the group consisting of AA^{I}, in particular is selected from the group consisting of R, H, S and L; and wherein at least one of AA³³, AA³⁴, AA³⁵, AA³⁶, AA³⁷ or AA³⁸ is not absent. In one particular example, PEP8 is selected from the group consisting of GXGXR, SXGXH, AXGXH, XGXR, EXGXR, RXGXS, AXGXR, SXGXR and XGXL.

[0814] In certain embodiments useful for inducing the conversion of a neoplastic cell into a cell (any cell) of a renal cell lineage, PEP9 is a peptide of general formula AA¹-AA²-AA³-AA⁴-AA⁵-AA⁶-AA⁷-PEP5; wherein PEP5 is a peptide of formula PEP3-AA¹¹-AA¹²; wherein PEP3 is selected from the group consisting of VPT, APT, TPT, VPA and APV; wherein AA¹¹ is selected from the group consisting of E, K, Q, R, A, D, G and H, in particular is E, K, Q and R; wherein AA¹² is selected from the group consisting of L, M, T, E, Q and H, in particular is L, M or T; wherein AA¹, AA², AA³, AA⁴, and AA⁵ are independently absent or AA^{I} as defined herein; wherein AA⁶ is absent or selected from the group consisting of S, T, C, E, Q, P and R, preferably is S or C; wherein AA⁷ is selected from the group consisting of S, T, C, E, Q, P and R, preferably is S or C. In one particular example, PEP9 is selected from the group consisting of KIPKAXXVPTEL, SIPKAXXVPTEL, HVTKPTXAPTKL, YVPKPXXAPTKL, TVPKPXXAPTQL, AVPKAXXAPTKL, KVGKAXXVPTKL, KASKAXXVPTKL, GSAGPXXTPTKL, AAPASXXVPARL, STPPTXXVPTRL, HVPKPXXAPTKL and RVPSTXXAPVKT.

[0815] In certain embodiments useful for inducing the conversion of a neoplastic cell into a cell (any cell) of a renal cell lineage, PEP10 is a peptide of general formula PEP6-AA³³-AA³⁴-AA³⁵-AA³⁶-AA³⁷-AA³⁸; wherein PEP6 is a peptide of formula AA²⁶-AA²⁷-AA²⁸-AA²⁹-PEP4; wherein PEP4 is selected from the group consisting of VVE, VVR, VVK, VAE, AVS, VVD and VEE; wherein AA²⁶ is absent or selected from the group consisting of AA^{III} amino acids, preferably absent or E; wherein AA²⁷ and AA²⁸ are independently selected from the group consisting of AA^{III} and AA^{V} amino acids, preferably AA²⁷ is selected from the group consisting of D, E, N, G and M, preferably AA²⁸ is M or I; wherein AA²⁹ is absent or selected from the group consisting of AA^{II} amino acids, preferably absent or S; wherein AA³³ is absent or is selected from the group consisting of AA^{I} amino acids at the exception of AA^{VI} amino acids, in particular is absent or is selected from the group consisting of G, S, A, E and R; AA³⁴ is absent or is selected from the group consisting of AA^{III} and AA^{IV} amino acids, in particular is absent; wherein AA³⁵ is absent or is selected from the group consisting of AA^{II} amino acids, preferably is S or C; wherein AA³⁶ is absent or is selected from the group consisting of AA^{III} and AA^{IV} amino acids; wherein AA³⁷ is absent or is selected from the group consisting of AA^{II} amino acids, preferably is S or C; wherein AA³⁸ is absent or is selected from the group consisting of AA^{I}, in particular is selected from the group consisting of R, H, S and L. In one particular example, PEP10 is selected from the group consisting of DMVVEGXGXR, EMVVEGXGXR, NMVVRSXGXH, NMVVRAXGXH, NMVVKAXGXH, EGMSVAEXGXR, GMAVSEXGXR, GMVVDRXGXS, DMVVEAXGXR, DMVVESXGXR, NMVVRSXGXH and MIVEEXGXL.

[0816] In certain embodiments useful for inducing the conversion of a neoplastic cell into a cell (any cell) of a renal cell lineage, PEP12 is a peptide of general formula PEP1-AA¹⁷-PEP11; wherein AA¹⁷ is selected from the group consisting of G, A, V, L, I, P, F, M, W, T and S (in particular is selected from the group consisting of M, I, L, V and T); wherein PEP1 is SPIN.

[0817] In certain embodiments useful for inducing the conversion of a neoplastic cell into a cell (any cell) of a renal cell lineage, PEP11 is a peptide with 3 amino acids of general formula AA 8-AA¹⁹-AA²⁰; wherein AA¹⁸ is selected from the group consisting of L, V, Q, A and R, in particular is L; wherein AA¹⁹ is selected from the group consisting of F, W, H and Y, in particular is Y or F; wherein AA²⁰ is selected from the group consisting of L, F, Y, K, I, V and M, in particular is selected from the group consisting of L, F, Y, K, I and V. In one particular example, PEP11 is LYF.

[0818] The definitions of “PEP” pairs, quadruplets, hexaplets and heptuplet e.g. PEP1:PEP2, PEP12:PEP2, or PEP7:PEP5:PEP12:LINKER:PEP2:PEP6:PEP8, most particularly useful for inducing the conversion of a neoplastic cell into a cell (any cell) of a renal cell lineage, are as already defined herein to the extent that PEP1 to PEP12 are particularly useful for these applications. For instances: In certain embodiments useful for inducing the conversion of a neoplastic cell into a cell (any cell) of a renal cell lineage, PEP3 is selected from the group consisting of VPT, APT, TPT, VPA and APV; PEP4 is selected from the group consisting of VVE, VVR, VVK, VAE, AVS, VVD and VEE; and wherein the pair PEP3:PEP4 is selected from the group consisting of VPT:VVE, APT:VVR, APT:VVK, VPT:VAE, VPT:AVS, TPT:VVD, VPA:VVE and APV:VEE.

[0819] In certain embodiments useful for inducing the conversion of a neoplastic cell into a cell (any cell) of a renal cell lineage, PEP5 is selected from the group consisting of VPTEL, APTKL, APTQL, VPTKL, TPTKM, VPARL, VPTRL and APVKT; PEP6 is selected from the group consisting of DMVVE, EMVVE, NMVVR, NMVVK, EGMSVAE, EGMAVS, GMVVD and DMIVEE; and wherein the pair PEP5:PEP6 is selected from the group consisting of VPTEL:DMVVE, VPTEL:EMVVE, APTKL:NMVVR, APTQL:NMVVR, APTKL:NMVVK, VPTKL:EGMSVAE, VPTKL:EGMAVS, TPTKM:GMVVD, VPARL:DMVVE, VPTRL:DMVVE, APTKL:NMVVR and APVKT:DMIVEE.

[0820] In certain embodiments useful for inducing the conversion of a neoplastic cell into a cell (any cell) of a renal cell lineage, PEP7 is selected from the group consisting of KIPKAXX, SIPKAXX, HVTKPTX, YVPKPXX, TVPKPXX, AVPKAXX, KVGKAXX, KASKAXX, GSAGPXX, AAPAXXS, STPPTXX, HVPKPXX and RVPSTXX; wherein PEP8 is selected from the group consisting of GXGXR, SXGXH, AXGXH, XGXR, EXGXR, RXGXS, AXGXR, SXGXR and XGXL; and wherein the pair PEP7:PEP8 is selected from the group consisting of KIPKAXX:GXGXR, SIPKAXX:GXGXR, HVTKPTX:SXGXH, YVPKPXX:SXGXH, TVPKPXX:AXGXH, AVPKAXX:AXGXH, KVGKAXX:XGXR, KASKAXX:EXGXR, GSAGPXX:RXGXS, AAPASXX:AXGXR, STPPTXX:SXGXR, HVPKPXX:SXGXH and RVPSTXX:XGXL.

[0821] In certain embodiments useful for inducing the conversion of a neoplastic cell into a cell (any cell) of a renal cell lineage, PEP9 is selected from the group consisting of KIPKAXXVPTEL, SIPKAXXVPTEL, HVTKPTXAPTKL, YVPKPXXAPTKL, TVPKPXXAPTQL, AVPKAXXAPTKL, KVGKAXXVPTKL, KASKAXXVPTKL, GSAGPXXTPTKL, AAPASXXVPARL, STPPTXXVPTRL, HVPKPXXAPTKL and RVPSTXXAPVKT; PEP10 is selected from the group consisting of DMVVEGXGXR, EMVVEGXGXR, NMVVRSXGXH, NMVVRAXGXH, NMVVKAXGXH, EGMSVAEXGXR, GMAVSEXGXR, GMVVDRXGXS, DMVVEAXGXR, DMVVESXGXR, NMVVRSXGXH and MIVEEXGXL; and wherein the pair PEP9:PEP10 is selected from the group consisting of KIPKAXXVPTEL:DMVVEGXGXR, SIPKAXXVPTEL:EMVVEGXGXR, HVTKPTXAPTKL:NMVVRSXGXH, YVPKPXXAPTKL:NMVVRSXGXH, TVPKPXXAPTQL:NMVVRAXGXH, AVPKAXXAPTKL:NMVVKAXGXH, KVGKAXXVPTKL:EGMSVAEXGXR, KASKAXXVPTKL:GMAVSEXGXR, GSAGPXXTPTKM:GMVVDRXGXS, AAPASXXVPARL:DMVVEAXGXR, STPPTXXVPTRL:DMVVESXGXR, HVPKPXXAPTKL:NMVVRSXGXH and RVPSTXXAPVKT:MIVEEXGXL.

[0822] In certain embodiments useful for inducing the conversion of a neoplastic cell into a cell (any cell) of a renal cell lineage, PEP5 is selected from the group consisting of VPTEL, APTKL, APTQL, VPTKL, VPARL, VPQAL, VSQDL and VPQDL; PEP6 is selected from the group consisting of DMVVE, EMVVE, NMVVR, NMVVK, EGMSVAE, GMAVS, DMVVE, MIVRS, MIVKS and MVVKS; and wherein the pair PEP5:PEP6 is selected from the group consisting of VPTEL:DMVVE, VPTEL:EMVVE, APTKL:NMVVR, APTQL:NMVVR, APTKL:NMVVK, VPTKL:EGMSVAE, VPTKL:EGMAVS, TPTKM:GMVVD, VPARL:DMVVE, VPTRL:DMVVE, APTKL:NMVVR and APVKT:DMIVEE; and wherein the pair PEP5:PEP6 is not TPTKM:GMVVD when PEP1 is SPIN and PEP2 is YGKIP.

[0823] In certain embodiments useful for inducing the conversion of a neoplastic cell into a cell (any cell) of a renal cell lineage, PEP9 is selected from the group consisting of KIPKAXXVPTEL, SIPKAXXVPTEL, HVTKPTXAPTKL, YVPKPXXAPTKL, TVPKPXXAPTQL, AVPKAXXAPTKL, KVGKAXXVPTKL, KASKAXXVPTKL, GSAGPXXTPTKL, AAPASXXVPARL, STPPTXXVPTRL, HVPKPXXAPTKL and RVPSTXXAPVKT; PEP10 is selected from the group consisting of DMVVEGXGXR, EMVVEGXGXR, NMVVRSXGXH, NMVVRAXGXH, NMVVKAXGXH, EGMSVAEXGXR, GMAVSEXGXR, GMVVDRXGXS, DMVVEAXGXR, DMVVESXGXR, NMVVRSXGXH and MIVEEXGXL; and wherein the pair PEP9:PEP10 is selected from the group consisting of KIPKAXXVPTEL:DMVVEGXGXR, SIPKAXXVPTEL:EMVVEGXGXR, HVTKPTXAPTKL:NMVVRSXGXH, YVPKPXXAPTKL:NMVVRSXGXH, TVPKPXXAPTQL:NMVVRAXGXH, AVPKAXXAPTKL:NMVVKAXGXH, KVGKAXXVPTKL:EGMSVAEXGXR, KASKAXXVPTKL:GMAVSEXGXR, GSAGPXXTPTKM:GMVVDRXGXS, AAPASXXVPARL:DMVVEAXGXR, STPPTXXVPTRL:DMVVESXGXR, HVPKPXXAPTKL:NMVVRSXGXH and RVPSTXXAPVKT:MIVEEXGXL; and wherein PEP9:PEP10 is not GSAGPXXTPTKM:GMVVDRXGXS when PEP1 is SPIN and PEP2 is YGKIP.

[0824] In certain embodiments useful for inducing the conversion of a neoplastic cell into a cell (any cell) of a renal cell lineage, PEP1 is SPIN and PEP11 is LYF.

[0825] In one aspect, the present disclosure provides a GFR-binding compound, wherein said GFR-binding compound is a peptide, a variant or analog thereof, or a peptidomimetic as defined herein, with between 20 and 60 (in particular between 20 and 50, and more particularly, between 20 and 45) amino acids, comprising a peptide with four amino acids (PEP1) or a peptide with eight amino acids (PEP12), a peptide with five amino acids (PEP2), and optionally a pair of peptides selected form the group consisting of PEP3:PEP4, PEP3:PEP6, PEP3:PEP10, PEP5:PEP4, PEP9:PEP4, PEP5:PEP6, PEP5:PEP10, PEP9:PEP6 and PEP9:PEP10; wherein said GFR-binding compound does not comprise the pair of peptides TPTKM:GMVVD when PEP1 is SPIN and PEP2 is YGKIP; and, optionally, wherein the RMSD is 2.45 Å or less.

[0826] In one aspect, the present disclosure provides a GFR-binding compound, wherein said GFR-binding compound is a peptide, a variant or analog thereof, or a peptidomimetic as defined herein, with between 20 and 60 (in particular between 20 and 50, and more particularly, between 20 and 45) amino acids, comprising a peptide with four amino acids (PEP1) or a peptide with eight amino acids (PEP12), a peptide with five amino acids (PEP2), and optionally a pair of peptides selected form the group consisting of PEP3:PEP4, PEP3:PEP6, PEP3:PEP10, PEP5:PEP4, PEP9:PEP4, PEP5:PEP6, PEP5:PEP10, PEP9:PEP6 and PEP9:PEP10; wherein said GFR-binding compound does not comprise the pair of peptides GSAGPXXTPTKM:GMVVDRXGXS when PEP1 is SPIN and PEP2 is YGKIP; and, optionally, wherein the RMSD is 2.45 Å or less.

[0827] In certain embodiments useful for inducing the conversion of a neoplastic cell into a cell (any cell) of a renal cell lineage, said GFR-binding compound is a synthetic molecule as defined herein in the definition section.

[0828] In certain embodiments useful for inducing the conversion of a neoplastic cell into a cell (any cell) of a renal cell lineage, said GFR-binding compound is a synthetic peptide, or a variant or analog thereof, or a peptidomimetic.

[0829] Ligament and Tendon Cell Lineage

[0830] Certain embodiments of the invention are particularly useful for inducing the conversion of a neoplastic cell into a cell (any cell) of the ligament and tendon cell lineage.

[0831] In certain embodiments useful for inducing the conversion of a neoplastic cell into a cell (any cell) of the ligament and tendon cell lineage, PEP1 is selected from the group consisting of NAIS, SPIS, EPLP and EPLT.

[0832] In certain embodiments useful for inducing the conversion of a neoplastic cell into a cell (any cell) of the ligament and tendon cell lineage, PEP2 is selected from the group consisting of LKKYR, YKQYE and EQLSN.

[0833] In certain embodiments useful for inducing the conversion of a neoplastic cell into a cell (any cell) of the ligament and tendon cell lineage, PEP3 is selected from the group consisting of VPT, APT, VPQ and VSQ.

[0834] In certain embodiments useful for inducing the conversion of a neoplastic cell into a cell (any cell) of the ligament and tendon cell lineage, PEP4 is selected from the group consisting of VVE, VVR, VRS, VKS and VVK.

[0835] In certain embodiments useful for inducing the conversion of a neoplastic cell into a cell (any cell) of the ligament and tendon cell lineage, PEP5 is a peptide of general formula PEP3-AA¹¹-AA¹²; wherein PEP3 is selected from the group consisting of VPT, APT, VPQ and VSQ; wherein AA¹¹ is selected from the group consisting of E, K, Q, R, A, D, G and H, in particular is E, K, Q, R, A and D; wherein AA¹² is selected from the group consisting of L, M, T, E, Q and H, in particular is L. In one particular example, PEP5 is selected from the group consisting of VPTEL, APTKL, APTQL, VPTRL, VPQAL, VSQDL and VPQDL.

[0836] In certain embodiments useful for inducing the conversion of a neoplastic cell into a cell (any cell) of the ligament and tendon cell lineage, PEP6 is a peptide of general formula AA²⁶-AA²⁷-AA²⁸-AA²⁹-PEP4; wherein PEP4 is selected from the group consisting of VVE, VVR, VRS, VKS and VVK; wherein AA²⁶ is absent or selected from the group consisting of AA¹ amino acids, preferably is absent; wherein AA²⁷ and AA²⁸ are independently selected from the group consisting of AA^{III} and AA^{V} amino acids, preferably AA²⁷ is selected from the group consisting of D, E, N and M, preferably AA²⁸ is selected from the group consisting of M, I and V; wherein AA²⁹ is absent or selected from the group consisting of AA^{II} amino acids, preferably is absent. In one particular example, PEP6 is selected from the group consisting of DMVVE, EMVVE, NMVVR, DMVVE, MIVRS, MIVKS and NMVVK.

[0837] In certain embodiments useful for inducing the conversion of a neoplastic cell into a cell (any cell) of the ligament and tendon cell lineage, PEP7 is an amino acid or a peptide with between two and seven amino acids of general formula AA¹-AA²-AA³-AA⁴-AA⁵-AA⁶-AA⁷; wherein AA¹, AA², AA³, AA⁴, and AA⁵ are independently absent or AA^{I} as defined herein; wherein AA⁶ is absent or selected from the group consisting of S, T, C, E, Q, P and R, preferably is selected from the group consisting of T, S and C; wherein AA⁷ is absent or is selected from the group consisting of S, T, C, E, Q, P and R, preferably S or C; and wherein at least one of AA¹, AA², AA³, AA⁴, AA⁵, AA⁶ or AA⁷ is not absent. In one particular example, PEP7 is selected from the group consisting of KIPKAXX, SIPKAXX, HVTKPTX, YVPKPXX, TVPKPXX, STPPTXX, ASAAPXX and ASASPXX.

[0838] In certain embodiments useful for inducing the conversion of a neoplastic cell into a cell (any cell) of the ligament and tendon cell lineage, PEP8 is an amino acid or a peptide with between two and six amino acids of general formula AA³³-AA³⁴-AA³⁵-AA³⁶-AA³⁷-AA³⁸; wherein AA³³ is absent or is selected from the group consisting of AA^{I} amino acids at the exception of AA^{VI} amino acids, in particular is absent or is selected from the group consisting of G, S and A; AA³⁴ is absent or is selected from the group consisting of AA^{III} and AA^{IV} amino acids, in particular is absent; wherein AA³⁵ is absent or is selected from the group consisting of AA^{II} amino acids, preferably is S or C; wherein AA³⁶ is absent or is selected from the group consisting of AA^{III} and AA^{IV} amino acids, in particular is G or K; wherein AA³⁷ is absent or is selected from the group consisting of AA^{II} amino acids, preferably is S or C; wherein AA³⁸ is absent or is selected from the group consisting of AA^{I}, in particular is selected from the group consisting of R, H and S; and wherein at least one of AA³³, AA³⁴, AA³⁵, AA³⁶, AA³⁷ or AA³⁸ is not absent. In one particular example, PEP8 is selected from the group consisting of GXGXR, SXGXH, AXGXH, SXGXR, XKXS and SXKXS.

[0839] In certain embodiments useful for inducing the conversion of a neoplastic cell into a cell (any cell) of the ligament and tendon cell lineage, PEP9 is a peptide of general formula AA¹-AA²-AA³-AA⁴-AA⁵-AA⁶-AA⁷-PEP5; wherein PEP5 is a peptide of formula PEP3-AA¹¹-AA¹²; wherein PEP3 is selected from the group consisting of VPT, APT, VPQ and VSQ; wherein AA¹¹ is selected from the group consisting of E, K, Q, R, A, D, G and H, in particular is E, K, Q, R, A and D; wherein AA¹² is selected from the group consisting of L, M, T, E, Q and H, in particular is L; wherein AA¹, AA², AA³, AA⁴, and AA⁵ are independently absent or AA^{I} as defined herein; wherein AA⁶ is absent or selected from the group consisting of S, T, C, E, Q, P and R, preferably is selected from the group consisting of T, S and C; wherein AA⁷ is selected from the group consisting of S, T, C, E, Q, P and R, preferably S or C. In one particular example, PEP9 is selected from the group consisting of KIPKAXXVPTEL, SIPKAXXVPTEL, HVTKPTXAPTKL, YVPKPXXAPTKL, TVPKPXXAPTQL, STPPTXXVPTRL, ASAAPXXVPQAL, ASASPXXVSQDL and ASASPXXVPQDL.

[0840] In certain embodiments useful for inducing the conversion of a neoplastic cell into a cell (any cell) of the ligament and tendon cell lineage, PEP10 is a peptide of general formula PEP6-AA³³-AA³⁴-AA³⁵-AA³⁶-AA³⁷-AA³⁸; wherein PEP6 is a peptide of formula AA²⁶-AA²⁷-AA²⁸-AA²⁹-PEP4; wherein PEP4 is selected from the group consisting of VVE, VVR, VRS, VKS and VVK; wherein AA²⁶ is absent or selected from the group consisting of AA^{III} amino acids, preferably is absent; wherein AA²⁷ and AA²⁸ are independently selected from the group consisting of AA^{III} and AA^{V} amino acids, preferably AA²⁷ is selected from the group consisting of D, E, N and M, preferably AA²⁸ is selected from the group consisting of M, I and V; wherein AA²⁹ is absent or selected from the group consisting of AA^{II} amino acids, preferably is absent; wherein AA³³ is absent or is selected from the group consisting of AA^{I} amino acids at the exception of AA^{VI} amino acids, in particular is absent or is selected from the group consisting of G, S and A; AA³⁴ is absent or is selected from the group consisting of AA^{III} and AA^{V} amino acids, in particular is absent; wherein AA³⁵ is absent or is selected from the group consisting of AA^{II} amino acids, preferably is S or C; wherein AA³⁶ is absent or is selected from the group consisting of AA^{III} and AA^{IV} amino acids, in particular is G or K; wherein AA³⁷ is absent or is selected from the group consisting of AA^{II} amino acids, preferably is S or C; wherein AA³⁸ is absent or is selected from the group consisting of AA^{I}, in particular is selected from the group consisting of R, H and S. In one particular example, PEP10 is selected from the group consisting of DMVVEGXGXR, EMVVEGXGXR, NMVVRSXGXH, NMVVRAXGXH, DMVVESXGXR, MIVRSXKXS, MIVKSXKXS and MVVKSXKXS.

[0841] In certain embodiments useful for inducing the conversion of a neoplastic cell into a cell (any cell) of the ligament and tendon cell lineage, PEP12 is a peptide of general formula PEP1-AA¹⁷-PEP11; wherein AA¹⁷ is selected from the group consisting of G, A, V, L, I, P, F, M, W, T and S (in particular is selected from the group consisting of M, I, L, V and T); wherein PEP1 is selected from the group consisting of NAIS, SPIS, EPLP and EPLT.

[0842] In certain embodiments useful for inducing the conversion of a neoplastic cell into a cell (any cell) of the ligament and tendon cell lineage, PEP11 is a peptide with 3 amino acids of general formula AA¹⁸-AA¹⁹-AA²⁰; wherein AA¹⁸ is selected from the group consisting of L, V, Q, A and R, in particular is L or V; wherein AA¹⁹ is selected from the group consisting of F, W, H and Y, in particular is Y or F; wherein AA²⁰ is selected from the group consisting of L, F, Y, K, I, V and M, in particular is selected from the group consisting of F, I and Y. In one particular example, PEP11 is selected from the group consisting of LYF, LFI, VYY and LYY.

[0843] The definitions of “PEP” pairs, quadruplets, hexaplets and heptuplet e.g. PEP1:PEP2, PEP12:PEP2, or PEP7:PEP5:PEP12:LINKER:PEP2:PEP6:PEP8, most particularly useful for inducing the conversion of a neoplastic cell into a cell (any cell) of the ligament and tendon cell lineage, are as already defined herein to the extent that PEP1 to PEP12 are particularly useful for these applications. For instances: In certain embodiments useful for inducing the conversion of a neoplastic cell into a cell (any cell) of the ligament and tendon cell lineage, the pair PEP1:PEP2 is selected from the group consisting of NAIS:LKKYR, SPIS:YKQYE, EPLP:EQLSN and EPLT:EQLSN.

[0844] In certain embodiments useful for inducing the conversion of a neoplastic cell into a cell (any cell) of the ligament and tendon cell lineage, the pair PEP12:PEP2 is selected from the group consisting of NAIS-AA¹⁷-LYF:LKKYR, SPIS-AA¹⁷-LFI:YKQYE, EPLP-AA¹⁷-VYY:EQLSN and EPLT-AA¹⁷-LYY:EQLSN; wherein AA¹⁷ is selected from the group consisting of G, A, V, L, I, P, F, M, W, T and S (in particular is selected from the group consisting of V, I and T).

[0845] In certain embodiments useful for inducing the conversion of a neoplastic cell into a cell (any cell) of the ligament and tendon cell lineage, PEP3 is selected from the group consisting of VPT, APT, VPQ and VSQ; PEP4 is selected from the group consisting of VVE, VVR, VRS, VKS and VVK; and wherein the pair PEP3:PEP4 is selected from the group consisting of VPT:VVE, APT:VVR, VPT:VVE, VPQ:VRS, VSQ:VKS and VPQ:VVK.

[0846] In certain embodiments useful for inducing the conversion of a neoplastic cell into a cell (any cell) of the ligament and tendon cell lineage, PEP5 is selected from the group consisting of VPTEL, APTKL, APTQL, VPTRL, VPQAL, VSQDL and VPQDL; PEP6 is selected from the group consisting of DMVVE, EMVVE, NMVVR, DMVVE, MIVRS, MIVKS and NMVVK; and wherein the pair PEP5:PEP6 is selected from the group consisting of VPTEL:DMVVE, VPTEL:EMVVE, APTKL:NMVVR, APTQL:NMVVR, VPTRL:DMVVE, VPQAL:MIVRS, VSQDL:MIVKS and VPQDL:NMVVK.

[0847] In certain embodiments useful for inducing the conversion of a neoplastic cell into a cell (any cell) of the ligament and tendon cell lineage, PEP7 is selected from the group consisting of KIPKAXX, SIPKAXX, HVTKPTX, YVPKPXX, TVPKPXX, STPPTXX, ASAAPXX and ASASPXX; wherein PEP8 is selected from the group consisting of GXGXR, SXGXH, AXGXH, SXGXR, XKXS and SXKXS; and wherein the pair PEP7:PEP8 is selected from the group consisting of KIPKAXX:GXGXR, SIPKAXX:GXGXR, HVTKPTX:SXGXH, YVPKPXX:SXGXH, TVPKPXX:AXGXH, STPPTXX:SXGXR, ASAAPXX:XKXS and ASASPXX:XKXS.

[0848] In certain embodiments useful for inducing the conversion of a neoplastic cell into a cell (any cell) of the ligament and tendon cell lineage, PEP9 is selected from the group consisting of KIPKAXXVPTEL, SIPKAXXVPTEL, HVTKPTXAPTKL, YVPKPXXAPTKL, TVPKPXXAPTQL, STPPTXXVPTRL, ASAAPXXVPQAL, ASASPXXVSQDL and ASASPXXVPQDL; PEP10 is selected from the group consisting of DMVVEGXGXR, EMVVEGXGXR, NMVVRSXGXH, NMVVRAXGXH, DMVVESXGXR, MIVRSXKXS, MIVKSXKXS and MVVKSXKXS; and wherein the pair PEP9:PEP10 is selected from the group consisting of KIPKAXXVPTEL:DMVVEGXGXR, SIPKAXXVPTEL:EMVVEGXGXR, HVTKPTXAPTKL:NMVVRSXGXH, YVPKPXXAPTKL:NMVVRSXGXH, TVPKPXXAPTQL:NMVVRAXGXH, STPPTXXVPTRL:DMVVESXGXR, ASAAPXXVPQAL:MIVRSXKXS, ASASPXXVSQDL:MIVKSXKXS and ASASPXXVPQDL:MVVKSXKXS.

[0849] In certain embodiments useful for inducing the conversion of a neoplastic cell into a cell (any cell) of the ligament and tendon cell lineage, PEP5 is selected from the group consisting of VPTEL, APTKL, APTQL, VPTRL, VPQAL, VSQDL and VPQDL; PEP6 is selected from the group consisting of DMVVE, EMVVE, NMVVR, DMVVE, MIVRS, MIVKS and NMVVK; and wherein the pair PEP5:PEP6 is selected from the group consisting of VPTEL:DMVVE, VPTEL:EMVVE, APTKL:NMVVR, APTQL:NMVVR, VPTRL:DMVVE, VPQAL:MIVRS, VSQDL:MIVKS and VPQDL:NMVVK; wherein the pair PEP5:PEP6 is not APTQL:NMVVR when PEP1 is NAIS and PEP2 is LKKYR; wherein the pair PEP5:PEP6 is not VPTRL:DMVVE when PEP1 is SPIS and PEP2 is YKQYE; wherein the pair PEP5:PEP6 is not VPQAL:MIVRS when PEP1 is EPLP and PEP2 is EQLSN; wherein the pair PEP5:PEP6 is not VSQDL:MIVKS when PEP1 is EPLT and PEP2 is EQLSN; and wherein the pair PEP5:PEP6 is not VPQDL:NMVVK when PEP1 is EPLT and PEP2 is EQLSN.

[0850] In certain embodiments useful for inducing the conversion of a neoplastic cell into a cell (any cell) of the ligament and tendon cell lineage, PEP9 is selected from the group consisting of KIPKAXXVPTEL, SIPKAXXVPTEL, HVTKPTXAPTKL, YVPKPXXAPTKL, TVPKPXXAPTQL, STPPTXXVPTRL, ASAAPXXVPQAL, ASASPXXVSQDL and ASASPXXVPQDL; PEP10 is selected from the group consisting of DMVVEGXGXR, EMVVEGXGXR, NMVVRSXGXH, NMVVRAXGXH, DMVVESXGXR, MIVRSXKXS, MIVKSXKXS and MVVKSXKXS; and wherein the pair PEP9:PEP10 is selected from the group consisting of KIPKAXXVPTEL:DMVVEGXGXR, SIPKAXXVPTEL:EMVVEGXGXR, HVTKPTXAPTKL:NMVVRSXGXH, YVPKPXXAPTKL:NMVVRSXGXH, TVPKPXXAPTQL:NMVVRAXGXH, STPPTXXVPTRL:DMVVESXGXR, ASAAPXXVPQAL:MIVRSXKXS, ASASPXXVSQDL:MIVKSXKXS and ASASPXXVPQDL:MVVKSXKXS;
[0851] wherein the pair PEP9:PEP10 is not TVPKPXXAPTQL:NMVVRAXGXH when PEP1 is NAIS and PEP2 is LKKYR; wherein the pair PEP9:PEP10 is not STPPTXXVPTRL:DMVVESXGXR when PEP1 is SPIS and PEP2 is YKQYE; wherein the pair PEP9:PEP10 is not ASAAPXXVPQAL:MIVRSXKXS when PEP1 is EPLP and PEP2 is EQLSN; wherein the pair PEP9:PEP10 is not ASASPXXVSQDL:MIVKSXKXS when PEP1 is EPLT and PEP2 is EQLSN; and wherein the pair PEP9:PEP10 is not ASASPXXVPQDL:MVVKSXKXS when PEP1 is EPLT and PEP2 is EQLSN.

[0852] In certain embodiments useful for inducing the conversion of a neoplastic cell into a cell (any cell) of the ligament and tendon cell lineage, PEP1 is selected from the group consisting of NAIS, SPIS, EPLP and EPLT; PEP11 is selected from the group consisting of LYF, LFI, VYY and LYY; and the pair PEP1:PEP11 is selected from the group consisting of NAIS:LYF, SPIS:LFI, EPLP:VYY and EPLT:LYY.

[0853] In one aspect, the present disclosure provides a GFR-binding compound, wherein said GFR-binding compound is a peptide, a variant or analog thereof, or a peptidomimetic as defined herein, with between 20 and 60 (in particular between 20 and 50, and more particularly, between 20 and 45) amino acids, comprising a peptide with four amino acids (PEP1) or a peptide with eight amino acids (PEP12), a peptide with five amino acids (PEP2), and optionally a pair of peptides selected form the group consisting of PEP3:PEP4, PEP3:PEP6, PEP3:PEP10, PEP5:PEP4, PEP9:PEP4, PEP5:PEP6, PEP5:PEP10, PEP9:PEP6 and PEP9:PEP10; wherein said GFR-binding compound does not comprise the pair of peptides APTQL:NMVVR when PEP1 is NAIS and PEP2 is LKKYR; wherein said GFR-binding compound does not comprise the pair of peptides VPTRL:DMVVE when PEP1 is SPIS and PEP2 is YKQYE; wherein said GFR-binding compound does not comprise the pair of peptides VPQAL:MIVRS when PEP1 is EPLP and PEP2 is EQLSN; wherein said GFR-binding compound does not comprise the pair of peptides VSQDL:MIVKS when PEP1 is EPLT and PEP2 is EQLSN; and wherein said GFR-binding compound does not comprise the pair of peptides VPQDL:NMVVK when PEP1 is EPLT and PEP2 is EQLSN; and, optionally, wherein the RMSD is 2.45 Å or less.

[0854] In one aspect, the present disclosure provides a GFR-binding compound, wherein said GFR-binding compound is a peptide, a variant or analog thereof, or a peptidomimetic as defined herein, with between 20 and 60 (in particular between 20 and 50, and more particularly, between 20 and 45) amino acids, comprising a peptide with four amino acids (PEP1) or a peptide with eight amino acids (PEP12), a peptide with five amino acids (PEP2), and optionally a pair of peptides selected form the group consisting of PEP3:PEP4, PEP3:PEP6, PEP3:PEP10, PEP5:PEP4, PEP9:PEP4, PEP5:PEP6, PEP5:PEP10, PEP9:PEP6 and PEP9:PEP10; wherein said GFR-binding compound does not comprise the pair of peptides TVPKPXXAPTQL:NMVVRAXGXH when PEP1 is NAIS and PEP2 is LKKYR; wherein said GFR-binding compound does not comprise the pair of peptides STPPTXXVPTRL:DMVVESXGXR when PEP1 is SPIS and PEP2 is YKQYE; wherein said GFR-binding compound does not comprise the pair of peptides ASAAPXXVPQAL:MIVRSXKXS when PEP1 is EPLP and PEP2 is EQLSN; wherein said GFR-binding compound does not comprise the pair of peptides ASASPXXVSQDL:MIVKSXKXS when PEP1 is EPLT and PEP2 is EQLSN; and wherein said GFR-binding compound does not comprise the pair of peptides ASASPXXVPQDL:MVVKSXKXS when PEP1 is EPLT and PEP2 is EQLSN; and, optionally, wherein the RMSD is 2.45 Å or less.

[0855] In certain embodiments useful for inducing the conversion of a neoplastic cell into a cell (any cell) of the ligament and tendon cell lineage, said GFR-binding compound is a synthetic molecule as defined herein in the definition section.

[0856] In certain embodiments useful for inducing the conversion of a neoplastic cell into a cell (any cell) of the ligament and tendon cell lineage, said GFR-binding compound is a synthetic peptide, or a variant or analog thereof, or a peptidomimetic.

[0857] In other embodiments also useful for inducing the conversion of a neoplastic cell into a cell (any cell) of the ligament and tendon cell lineage, PEP1 is SPIS.

[0858] In other embodiments also useful for inducing the conversion of a neoplastic cell into a cell (any cell) of the ligament and tendon cell lineage, PEP2 is YKQYE.

[0859] In other embodiments also useful for inducing the conversion of a neoplastic cell into a cell (any cell) of the ligament and tendon cell lineage, PEP3 is selected from the group consisting of VPT, APT, TPT, VPA and APV.

[0860] In other embodiments also useful for inducing the conversion of a neoplastic cell into a cell (any cell) of the ligament and tendon cell lineage, PEP4 is selected from the group consisting of VVE, VVR, VVK, VAE, AVS, VVD and VEE.

[0861] In other embodiments also useful for inducing the conversion of a neoplastic cell into a cell (any cell) of the ligament and tendon cell lineage, PEP5 is a peptide of general formula PEP3-AA¹¹-AA¹²; wherein PEP3 is selected from the group consisting of VPT, APT, TPT, VPA and APV; wherein AA¹¹ is selected from the group consisting of E, K, Q, R, A, D, G and H, in particular is selected from the group consisting of E, K, Q and R; wherein AA¹² is selected from the group consisting of L, M, T, E, Q and H, in particular is selected from the group consisting of L, M and T. In one particular example, PEP5 is selected from the group consisting of VPTEL, APTKL, APTQL, VPTKL, TPTKM, VPARL, VPTRL and APVKT.

[0862] In other embodiments also useful for inducing the conversion of a neoplastic cell into a cell (any cell) of the ligament and tendon cell lineage, PEP6 is a peptide of general formula AA²⁶-AA²⁷-AA²⁸-AA²⁹-PEP4; wherein PEP4 is selected from the group consisting of VVE, VVR, VVK, VAE, AVS, VVD and VEE; wherein AA²⁶ is absent or selected from the group consisting of AA^{III} amino acids, preferably absent or E; wherein AA²⁷ and AA²⁸ are independently selected from the group consisting of AA^{III} and AA^{V} amino acids, preferably AA²⁷ is selected from the group consisting of D, E, N, G and M, preferably AA²⁸ is M or I; wherein AA²⁹ is absent or selected from the group consisting of AA^{II} amino acids, preferably absent or S. In one particular example, PEP6 is selected from the group consisting of DMVVE, EMVVE, NMVVR, NMVVK, EGMSVAE, EGMAVS, GMVVD and DMIVEE.

[0863] In other embodiments also useful for inducing the conversion of a neoplastic cell into a cell (any cell) of the ligament and tendon cell lineage, PEP7 is an amino acid or a peptide with between two and seven amino acids of general formula AA¹-AA²-AA³-AA⁴-AA⁵-AA⁶-AA⁷; wherein AA¹, AA², AA³, AA⁴, and AA⁵ are independently absent or AA^{I} as defined herein; wherein AA⁶ is absent or selected from the group consisting of S, T, C, E, Q, P and R, preferably is S or C; wherein AA⁷ is absent or is selected from the group consisting of S, T, C, E, Q, P and R, preferably is S or C; and wherein at least one of AA¹, AA², AA³, AA⁴, AA⁵, AA⁶ or AA⁷ is not absent. In one particular example, PEP7 is selected from the group consisting of KIPKAXX, SIPKAXX, HVTKPTX, YVPKPXX, TVPKPXX, AVPKAXX, KVGKAXX, KASKAXX, GSAGPXX, AAPAXXS, STPPTXX, HVPKPXX and RVPSTXX.

[0864] In other embodiments also useful for inducing the conversion of a neoplastic cell into a cell (any cell) of the ligament and tendon cell lineage, PEP8 is an amino acid or a peptide with between two and six amino acids of general formula AA³³-AA³⁴-AA³⁵-AA³-AA³⁷-AA³⁸; wherein AA³³ is absent or is selected from the group consisting of AA^{I} amino acids at the exception of AA^{VI} amino acids, in particular is absent or is selected from the group consisting of G, S, A, E and R; AA³⁴ is absent or is selected from the group consisting of AA^{III} and AA^{IV} amino acids, in particular is absent; wherein AA³⁵ is absent or is selected from the group consisting of AA^{II} amino acids, preferably is S or C; wherein AA³⁶ is absent or is selected from the group consisting of AA^{III} and AA^{IV} amino acids; wherein AA³⁷ is absent or is selected from the group consisting of AA^{II} amino acids, preferably is S or C; wherein AA³⁸ is absent or is selected from the group consisting of AA^{I}, in particular is selected from the group consisting of R, H, S and L; and wherein at least one of AA³³, AA³⁴, AA³⁵, AA³⁶, AA³⁷ or AA³⁸ is not absent. In one particular example, PEP8 is selected from the group consisting of GXGXR, SXGXH, AXGXH, XGXR, EXGXR, RXGXS, AXGXR, SXGXR and XGXL.

[0865] In other embodiments also useful for inducing the conversion of a neoplastic cell into a cell (any cell) of the ligament and tendon cell lineage, PEP9 is a peptide of general formula AA¹-AA²-AA³-AA⁴-AA⁵-AA⁶-AA⁷-PEP5; wherein PEP5 is a peptide of formula PEP3-AA¹¹-AA¹²; wherein PEP3 is selected from the group consisting of VPT, APT, TPT, VPA and APV; wherein AA¹¹ is selected from the group consisting of E, K, Q, R, A, D, G and H, in particular is E, K, Q and R; wherein AA¹² is selected from the group consisting of L, M, T, E, Q and H, in particular is L, M or T; wherein AA¹, AA², AA³, AA⁴, and AA⁵ are independently absent or AA^{I} as defined herein; wherein AA⁶ is absent or selected from the group consisting of S, T, C, E, Q, P and R, preferably is S or C; wherein AA⁷ is selected from the group consisting of S, T, C, E, Q, P and R, preferably is S or C. In one particular example, PEP9 is selected from the group consisting of KIPKAXXVPTEL, SIPKAXXVPTEL, HVTKPTXAPTKL, YVPKPXXAPTKL, TVPKPXXAPTQL, AVPKAXXAPTKL, KVGKAXXVPTKL, KASKAXXVPTKL, GSAGPXXTPTKL, AAPASXXVPARL, STPPTXXVPTRL, HVPKPXXAPTKL and RVPSTXXAPVKT.

[0866] In other embodiments also useful for inducing the conversion of a neoplastic cell into a cell (any cell) of the ligament and tendon cell lineage, PEP10 is a peptide of general formula PEP6-AA³³-AA³⁴-AA³⁵-AA³⁶-AA³⁷-AA³⁸; wherein PEP6 is a peptide of formula AA²⁶-AA²⁷-AA²⁸-AA²⁹-PEP4; wherein PEP4 is selected from the group consisting of VVE, VVR, VVK, VAE, AVS, VVD and VEE; wherein AA²⁶ is absent or selected from the group consisting of AA^{III} amino acids, preferably absent or E; wherein AA²⁷ and AA²⁸ are independently selected from the group consisting of AA^{III} and AA^{V} amino acids, preferably AA²⁷ is selected from the group consisting of D, E, N, G and M, preferably AA²⁸ is M or I; wherein AA²⁹ is absent or selected from the group consisting of AA^{II} amino acids, preferably absent or S; wherein AA³³ is absent or is selected from the group consisting of AA^{I} amino acids at the exception of AA^{V} amino acids, in particular is absent or is selected from the group consisting of G, S, A, E and R; AA³⁴ is absent or is selected from the group consisting of AA^{III} and AA^{V} amino acids, in particular is absent; wherein AA³⁵ is absent or is selected from the group consisting of AA^{II} amino acids, preferably is S or C; wherein AA³⁶ is absent or is selected from the group consisting of AA^{III} and AA^{IV} amino acids; wherein AA³⁷ is absent or is selected from the group consisting of AA^{II} amino acids, preferably is S or C; wherein AA³⁸ is absent or is selected from the group consisting of AA^{I}, in particular is selected from the group consisting of R, H, S and L. In one particular example, PEP10 is selected from the group consisting of DMVVEGXGXR, EMVVEGXGXR, NMVVRSXGXH, NMVVRAXGXH, NMVVKAXGXH, EGMSVAEXGXR, GMAVSEXGXR, GMVVDRXGXS, DMVVEAXGXR, DMVVESXGXR, NMVVRSXGXH and MIVEEXGXL.

[0867] In other embodiments also useful for inducing the conversion of a neoplastic cell into a cell (any cell) of the ligament and tendon cell lineage, PEP12 is a peptide of general formula PEP1-AA¹⁷-PEP11; wherein AA¹⁷ is selected from the group consisting of G, A, V, L, I, P, F, M, W, T and S (in particular is selected from the group consisting of M, I, L, V and T); wherein PEP1 is SPIS.

[0868] In other embodiments also useful for inducing the conversion of a neoplastic cell into a cell (any cell) of the ligament and tendon cell lineage, PEP11 is a peptide with 3 amino acids of general formula AA¹⁸-AA¹⁹-AA²⁰; wherein AA¹⁸ is selected from the group consisting of L, V, Q, A and R, in particular is L; wherein AA¹⁹ is selected from the group consisting of F, W, H and Y, in particular is a polar aromatic amino acid such as Y; wherein AA²⁰ is selected from the group consisting of L, F, Y, K, I, V and M, in particular is I. In one particular example, PEP11 is LYI.

[0869] The definitions of “PEP” pairs, quadruplets, hexaplets and heptuplet e.g. PEP1:PEP2, PEP12:PEP2, or PEP7:PEP5:PEP12:LINKER:PEP2:PEP6:PEP8, also useful for inducing the conversion of a neoplastic cell into a cell (any cell) of the ligament and tendon cell lineage, are as already defined herein to the extent that PEP1 to PEP12 are particularly useful for these applications. For instances: In other embodiments also useful for inducing the conversion of a neoplastic cell into a cell (any cell) of the ligament and tendon cell lineage, PEP3 is selected from the group consisting of VPT, APT, TPT, VPA and APV; PEP4 is selected from the group consisting of VVE, VVR, VVK, VAE, AVS, VVD and VEE; and wherein the pair PEP3:PEP4 is selected from the group consisting of VPT:VVE, APT:VVR, APT:VVK, VPT:VAE, VPT:AVS, TPT:VVD, VPA:VVE and APV:VEE.

[0870] In other embodiments also useful for inducing the conversion of a neoplastic cell into a cell (any cell) of the ligament and tendon cell lineage, PEP5 is selected from the group consisting of VPTEL, APTKL, APTQL, VPTKL, TPTKM, VPARL, VPTRL and APVKT; PEP6 is selected from the group consisting of DMVVE, EMVVE, NMVVR, NMVVK, EGMSVAE, EGMAVS, GMVVD and DMIVEE; and wherein the pair PEP5:PEP6 is selected from the group consisting of VPTEL:DMVVE, VPTEL:EMVVE, APTKL:NMVVR, APTQL:NMVVR, APTKL:NMVVK, VPTKL:EGMSVAE, VPTKL:EGMAVS, TPTKM:GMVVD, VPARL:DMVVE, VPTRL:DMVVE, APTKL:NMVVR and APVKT:DMIVEE.

[0871] In other embodiments also useful for inducing the conversion of a neoplastic cell into a cell (any cell) of the ligament and tendon cell lineage, PEP7 is selected from the group consisting of KIPKAXX, SIPKAXX, HVTKPTX, YVPKPXX, TVPKPXX, AVPKAXX, KVGKAXX, KASKAXX, GSAGPXX, AAPAXXS, STPPTXX, HVPKPXX and RVPSTXX; wherein PEP8 is selected from the group consisting of GXGXR, SXGXH, AXGXH, XGXR, EXGXR, RXGXS, AXGXR, SXGXR and XGXL; and wherein the pair PEP7:PEP8 is selected from the group consisting of KIPKAXX:GXGXR, SIPKAXX:GXGXR, HVTKPTX:SXGXH, YVPKPXX:SXGXH, TVPKPXX:AXGXH, AVPKAXX:AXGXH, KVGKAXX:XGXR, KASKAXX:EXGXR, GSAGPXX:RXGXS, AAPASXX:AXGXR, STPPTXX:SXGXR, HVPKPXX:SXGXH and RVPSTXX:XGXL.

[0872] In other embodiments also useful for inducing the conversion of a neoplastic cell into a cell (any cell) of the ligament and tendon cell lineage, PEP9 is selected from the group consisting of KIPKAXXVPTEL, SIPKAXXVPTEL, HVTKPTXAPTKL, YVPKPXXAPTKL, TVPKPXXAPTQL, AVPKAXXAPTKL, KVGKAXXVPTKL, KASKAXXVPTKL, GSAGPXXTPTKL, AAPASXXVPARL, STPPTXXVPTRL, HVPKPXXAPTKL and RVPSTXXAPVKT; PEP10 is selected from the group consisting of DMVVEGXGXR, EMVVEGXGXR, NMVVRSXGXH, NMVVRAXGXH, NMVVKAXGXH, EGMSVAEXGXR, GMAVSEXGXR, GMVVDRXGXS, DMWEAXGXR, DMVVESXGXR, NMVVRSXGXH and MIVEEXGXL; and wherein the pair PEP9:PEP10 is selected from the group consisting of KIPKAXXVPTEL:DMVVEGXGXR, SIPKAXXVPTEL:EMVVEGXGXR, HVTKPTXAPTKL:NMVVRSXGXH, YVPKPXXAPTKL:NMVVRSXGXH, TVPKPXXAPTQL:NMVVRAXGXH, AVPKAXXAPTKL:NMVVKAXGXH, KVGKAXXVPTKL:EGMSVAEXGXR, KASKAXXVPTKL:GMAVSEXGXR, GSAGPXXTPTKM:GMVVDRXGXS, AAPASXXVPARL:DMVVEAXGXR, STPPTXXVPTRL:DMVVESXGXR, HVPKPXXAPTKL:NMVVRSXGXH and RVPSTXXAPVKT:MIVEEXGXL.

[0873] In other embodiments also useful for inducing the conversion of a neoplastic cell into a cell (any cell) of the ligament and tendon cell lineage, PEP5 is selected from the group consisting of VPTEL, APTKL, APTQL, VPTKL, VPARL, VPQAL, VSQDL and VPQDL; PEP6 is selected from the group consisting of DMVVE, EMVVE, NMVVR, NMVVK, EGMSVAE, GMAVS, DMVVE, MIVRS, MIVKS and MVVKS; and wherein the pair PEP5:PEP6 is selected from the group consisting of VPTEL:DMVVE, VPTEL:EMVVE, APTKL:NMVVR, APTQL:NMVVR, APTKL:NMVVK, VPTKL:EGMSVAE, VPTKL:EGMAVS, TPTKM:GMVVD, VPARL:DMVVE, VPTRL:DMVVE, APTKL:NMVVR and APVKT:DMIVEE; and wherein the pair PEP5:PEP6 is not VPARL:DMVVE when PEP1 is SPIS and PEP2 is YKQYE.

[0874] In other embodiments also useful for inducing the conversion of a neoplastic cell into a cell (any cell) of the ligament and tendon cell lineage, PEP9 is selected from the group consisting of KIPKAXXVPTEL, SIPKAXXVPTEL, HVTKPTXAPTKL, YVPKPXXAPTKL, TVPKPXXAPTQL, AVPKAXXAPTKL, KVGKAXXVPTKL, KASKAXXVPTKL, GSAGPXXTPTKL, AAPASXXVPARL, STPPTXXVPTRL, HVPKPXXAPTKL and RVPSTXXAPVKT; PEP10 is selected from the group consisting of DMVVEGXGXR, EMVVEGXGXR, NMVVRSXGXH, NMVVRAXGXH, NMVVKAXGXH, EGMSVAEXGXR, GMAVSEXGXR, GMVVDRXGXS, DMWEAXGXR, DMVVESXGXR, NMVVRSXGXH and MIVEEXGXL; and wherein the pair PEP9:PEP10 is selected from the group consisting of KIPKAXXVPTEL:DMVVEGXGXR, SIPKAXXVPTEL:EMVVEGXGXR, HVTKPTXAPTKL:NMVVRSXGXH, YVPKPXXAPTKL:NMVVRSXGXH, TVPKPXXAPTQL:NMVVRAXGXH, AVPKAXXAPTKL:NMVVKAXGXH, KVGKAXXVPTKL:EGMSVAEXGXR, KASKAXXVPTKL:GMAVSEXGXR, GSAGPXXTPTKM:GMVVDRXGXS, AAPASXXVPARL:DMVVEAXGXR, STPPTXXVPTRL:DMVVESXGXR, HVPKPXXAPTKL:NMVVRSXGXH and RVPSTXXAPVKT:MIVEEXGXL; and wherein PEP9:PEP10 is not AAPASXXVPARL:DMVVEAXGXR when PEP1 is SPIS and PEP2 is YKQYE.

[0875] In other embodiments also useful for inducing the conversion of a neoplastic cell into a cell (any cell) of the ligament and tendon cell lineage, PEP1 is SPIS and PEP11 is LYI.

[0876] In one aspect, the present disclosure provides a GFR-binding compound, wherein said GFR-binding compound is a peptide, a variant or analog thereof, or a peptidomimetic as defined herein, with between 20 and 60 (in particular between 20 and 50, and more particularly, between 20 and 45) amino acids, comprising a peptide with four amino acids (PEP1) or a peptide with eight amino acids (PEP12), a peptide with five amino acids (PEP2), and optionally a pair of peptides selected form the group consisting of PEP3:PEP4, PEP3:PEP6, PEP3:PEP10, PEP5:PEP4, PEP9:PEP4, PEP5:PEP6, PEP5:PEP10, PEP9:PEP6 and PEP9:PEP10; wherein said GFR-binding compound does not comprise the pair of peptides VPARL:DMVVE when PEP1 is SPIS and PEP2 is YKQYE; and, optionally, wherein the RMSD is 2.45 Å or less.

[0877] In one aspect, the present disclosure provides a GFR-binding compound, wherein said GFR-binding compound is a peptide, a variant or analog thereof, or a peptidomimetic as defined herein, with between 20 and 60 (in particular between 20 and 50, and more particularly, between 20 and 45) amino acids, comprising a peptide with four amino acids (PEP1) or a peptide with eight amino acids (PEP12), a peptide with five amino acids (PEP2), and optionally a pair of peptides selected form the group consisting of PEP3:PEP4, PEP3:PEP6, PEP3:PEP10, PEP5:PEP4, PEP9:PEP4, PEP5:PEP6, PEP5:PEP10, PEP9:PEP6 and PEP9:PEP10; wherein said GFR-binding compound does not comprise the pair of peptides AAPASXXVPARL:DMVVEAXGXR when PEP1 is SPIS and PEP2 is YKQYE; and, optionally, wherein the RMSD is 2.45 Å or less.

[0878] In other embodiments also useful for inducing the conversion of a neoplastic cell into a cell (any cell) of the ligament and tendon cell lineage, said GFR-binding compound is a synthetic molecule as defined herein in the definition section.

[0879] In other embodiments also useful for inducing the conversion of a neoplastic cell into a cell (any cell) of the ligament and tendon cell lineage, said GFR-binding compound is a synthetic peptide, or a variant or analog thereof, or a peptidomimetic.

[0880] Fibroblast Lineage

[0881] Certain embodiments of the invention are particularly useful for inducing the conversion of a neoplastic cell into a cell (any cell) of a fibroblast lineage.

[0882] In certain embodiments useful for inducing the conversion of a neoplastic cell into a cell (any cell) of a fibroblast lineage, PEP1 is selected from the group consisting of EPLP, EPLT, SNIT, RSVK and RPVQ.

[0883] In certain embodiments useful for inducing the conversion of a neoplastic cell into a cell (any cell) of a fibroblast lineage, PEP2 is selected from the group consisting of EQLSN, IGEMS, KEVQV and KKATV.

[0884] In certain embodiments useful for inducing the conversion of a neoplastic cell into a cell (any cell) of a fibroblast lineage, PEP3 is selected from the group consisting of VPT, APT, VPQ, VSQ, SRV and TQV.

[0885] In certain embodiments useful for inducing the conversion of a neoplastic cell into a cell (any cell) of a fibroblast lineage, PEP4 is selected from the group consisting of VVE, VVR, VRS, VKS, VVK, QHN, EEH and EDH.

[0886] In certain embodiments useful for inducing the conversion of a neoplastic cell into a cell (any cell) of a fibroblast lineage, PEP5 is a peptide of general formula PEP3-AA¹¹-AA¹²; wherein PEP3 is selected from the group consisting of VPT, APT, VPQ, VSQ, SRV and TQV; wherein AA¹¹ is selected from the group consisting of E, K, Q, R, A, D, G and H, in particular is selected from the group consisting of E, K, Q, A, D and H; wherein AA¹² is selected from the group consisting of L, M, T, E, Q and H, in particular is selected from the group consisting of L, E and H. In one particular example, PEP5 is selected from the group consisting of VPTEL, APTKL, APTQL, VPQAL, VSQDL, VPQDL, VPTEE, SRVHH and TQVQL.

[0887] In certain embodiments useful for inducing the conversion of a neoplastic cell into a cell (any cell) of a fibroblast lineage, PEP6 is a peptide of general formula AA²⁶-AA²⁷-AA²⁸-AA²⁹-PEP4; wherein PEP4 is selected from the group consisting of VVE, VVR, VRS, VKS, VVK, QHN, EEH and EDH; wherein AA²⁶ is absent or selected from the group consisting of AA^{III} amino acids, preferably is absent; wherein AA²⁷ and AA²⁸ are independently selected from the group consisting of AA^{III} and AA^{V} amino acids, preferably AA²⁷ is selected from the group consisting of D, N, E, M, F, T and R, preferably AA²⁸ is selected from the group consisting of M, I, V and L; wherein AA²⁹ is absent or selected from the group consisting of AA^{II} amino acids, preferably is absent. In one particular example, PEP6 is selected from the group consisting of DMVVE, EMVVE, NMVVR, MIVRS, MIVKS, NMVVK, FLQHN, RLEEH and TLEDH.

[0888] In certain embodiments useful for inducing the conversion of a neoplastic cell into a cell (any cell) of a fibroblast lineage, PEP7 is an amino acid or a peptide with between two and seven amino acids of general formula AA¹-AA²-AA³-AA⁴-AA⁵-AA⁶-AA⁷; wherein AA¹, AA², AA³, AA⁴, and AA⁵ are independently absent or AA^{I} as defined herein; wherein AA⁶ is absent or selected from the group consisting of S, T, C, E, Q, P and R, preferably is selected from the group consisting of C, S, T, E, R and Q; wherein AA⁷ is absent or is selected from the group consisting of S, T, C, E, Q, P and R, preferably is selected from the group consisting of S, C and P; and wherein at least one of AA¹, AA², AA³, AA⁴, AA⁵, AA⁶ or AA⁷ is not absent. In one particular example, PEP7 is selected from the group consisting of KIPKAXX, SIPKAXX, HVTKPTX, YVPKPXX, TVPKPXX, ASAAPXX, ASASPXX, NDEGLEX, SSVKXQP and RNVQXRP.

[0889] In certain embodiments useful for inducing the conversion of a neoplastic cell into a cell (any cell) of a fibroblast lineage, PEP8 is an amino acid or a peptide with between two and six amino acids of general formula AA³³-AA³⁴-AA³⁵-AA³⁶-AA³⁷-AA³⁸; wherein AA³³ is absent or is selected from the group consisting of AA^{I} amino acids at the exception of AA^{VI} amino acids, in particular is absent or is selected from the group consisting of G, S, A, K and L; AA³⁴ is absent or is selected from the group consisting of AA^{III} and AA^{IV} amino acids, in particular is absent, A or E; wherein AA³⁵ is absent or is selected from the group consisting of AA^{II} amino acids, preferably is S or C; wherein AA³⁶ is absent or is selected from the group consisting of AA^{III} and AA^{IV} amino acids, in particular is selected from the group consisting of G, A, K and E; wherein AA³⁷ is absent or is selected from the group consisting of AA^{II} amino acids, preferably is S or C; wherein AA³⁸ is absent or is selected from the group consisting of AA^{I}, in particular is selected from the group consisting of R, H, S, E and A; and wherein at least one of AA³³, AA³⁴, AA³⁵, AA³⁶, AA³⁷ or AA³⁸ is not absent. In one particular example, PEP8 is selected from the group consisting of GXGXR, SXGXH, AXGXH, XKXS, KXEXR, LEXAXA and LAXKXE.

[0890] In certain embodiments useful for inducing the conversion of a neoplastic cell into a cell (any cell) of a fibroblast lineage, PEP9 is a peptide of general formula AA¹-AA²-AA³-AA⁴-AA⁵-AA⁶-AA⁷-PEP5; wherein PEP5 is a peptide of formula PEP3-AA¹¹-AA¹²; wherein PEP3 is selected from the group consisting of VPT, APT, VPQ, VSQ, SRV and TQV; wherein AA¹¹ is selected from the group consisting of E, K, Q, R, A, D, G and H, in particular is selected from the group consisting of E, K, Q, A, D and H; wherein AA¹² is selected from the group consisting of L, M, T, E, Q and H, in particular is selected from the group consisting of L, E and H; wherein AA¹, AA², AA³, AA⁴, and AA⁵ are independently absent or AA^{I} as defined herein; wherein AA⁶ is absent or selected from the group consisting of S, T, C, E, Q, P and R, preferably is selected from the group consisting of C, S, T, E, R and Q; wherein AA⁷ is selected from the group consisting of S, T, C, E, Q, P and R, preferably is selected from the group consisting of S, C and P. In one particular example, PEP9 is selected from the group consisting of KIPKAXXVPTEL, SIPKAXXVPTEL, HVTKPTXAPTKL, YVPKPXXAPTKL, TVPKPXXAPTQL, ASAAPXXVPQAL, ASASPXXVSQDL, ASASPXXVPQDL, NDEGLEXVPTEE, SSVKXQPSRVHH and RNVQXRPTQVQL.

[0891] In certain embodiments useful for inducing the conversion of a neoplastic cell into a cell (any cell) of a fibroblast lineage, PEP10 is a peptide of general formula PEP6-AA³³-AA³⁴-AA³⁵-AA³⁶-AA³⁷-AA³⁸; wherein PEP6 is a peptide of formula AA²⁶-AA²⁷-AA²⁸-AA²⁹-PEP4; wherein PEP4 is selected from the group consisting of VVE, VVR, VRS, VKS, VVK, QHN, EEH and EDH; wherein AA²⁶ is absent or selected from the group consisting of AA^{III} amino acids, preferably is absent; wherein AA²⁷ and AA²⁸ are independently selected from the group consisting of AA^{III} and AA^{V} amino acids, preferably AA²⁷ is selected from the group consisting of D, N, E, M, F, T and R, preferably AA²⁸ is selected from the group consisting of M, I, V and L; wherein AA²⁹ is absent or selected from the group consisting of AA^{II} amino acids, preferably is absent; wherein AA³³ is absent or is selected from the group consisting of AA^{I} amino acids at the exception of AA^{VI} amino acids, in particular is absent or is selected from the group consisting of G, S, A, K and L; AA³⁴ is absent or is selected from the group consisting of AA^{III} and AA^{IV} amino acids, in particular is absent, A or E; wherein AA³⁵ is absent or is selected from the group consisting of AA^{II} amino acids, preferably is S or C; wherein AA³⁶ is absent or is selected from the group consisting of AA^{III} and AA^{IV} amino acids, in particular is selected from the group consisting of G, A, K and E; wherein AA³⁷ is absent or is selected from the group consisting of AA^{II} amino acids, preferably is S or C; wherein AA³⁸ is absent or is selected from the group consisting of AA^{I}, in particular is selected from the group consisting of R, H, S, E and A. In one particular example, PEP10 is selected from the group consisting of DMVVEGXGXR, EMVVEGXGXR, NMVVRSXGXH, NMVVRAXGXH, MIVRSXKXS, MIVKSXKXS, MVVKSXKXS, FLQHNKXEXR, RLEEHLEXAXA and TLEDHLAXKXE.

[0892] In certain embodiments useful for inducing the conversion of a neoplastic cell into a cell (any cell) of a fibroblast lineage, PEP12 is a peptide of general formula PEP1-AA¹⁷-PEP11; wherein AA¹⁷ is selected from the group consisting of G, A, V, L, I, P, F, M, W, T and S (in particular is selected from the group consisting of M, I, L, V and T); wherein PEP1 is selected from the group consisting of EPLP, EPLT, SNIT, RSVK and RPVQ.

[0893] In certain embodiments useful for inducing the conversion of a neoplastic cell into a cell (any cell) of a fibroblast lineage, PEP11 is a peptide with 3 amino acids of general formula AA¹⁸-AA¹⁹-AA²⁰; wherein AA¹⁸ is selected from the group consisting of L, V, Q, A and R; wherein AA¹⁹ is selected from the group consisting of F, W, H, Y, I and K, in particular is selected from the group consisting of Y, I and K; wherein AA²⁰ is selected from the group consisting of L, F, Y, K, I, V and M, in particular is selected from the group consisting of Y, M, V and I. In one particular example, PEP11 is selected from the group consisting of VYY, LYY, QIM, AKV and RKI.

[0894] The definitions of “PEP” pairs, quadruplets, hexaplets and heptuplet e.g. PEP1:PEP2, PEP12:PEP2, or PEP7:PEP5:PEP12:LINKER:PEP2:PEP6:PEP8, useful for inducing the conversion of a neoplastic cell into a cell (any cell) of a fibroblast lineage, are as already defined herein to the extent that PEP1 to PEP12 are particularly useful for these applications. For instances:

[0895] In certain embodiments useful for inducing the conversion of a neoplastic cell into a cell (any cell) of a fibroblast lineage, the pair PEP1:PEP2 is selected from the group consisting of EPLP:EQLSN, EPLT:EQLSN and SNIT:IGEMS.

[0896] In certain embodiments useful for inducing the conversion of a neoplastic cell into a cell (any cell) of a fibroblast lineage, the pair PEP12:PEP2 is selected from the group consisting of EPLP-AA¹⁷-VYY:EQLSN, EPLT-AA¹⁷-LYY:EQLSN and SNIT-AA¹⁷-QIM:IGEMS; wherein AA¹⁷ is selected from the group consisting of G, A, V, L, I, P, F, M, W, T and S (in particular is selected from the group consisting of M, I, V and T).

[0897] In certain embodiments useful for inducing the conversion of a neoplastic cell into a cell (any cell) of a fibroblast lineage, PEP3 is selected from the group consisting of VPT, APT, VPQ, VSQ, SRV and TQV; PEP4 is selected from the group consisting of VVE, VVR, VRS, VKS, VVK, QHN, EEH and EDH; and wherein the pair PEP3:PEP4 is selected from the group consisting of VPT:VVE, APT:VVR, VPQ:VRS, VSQ:VKS, VPQ:VVK, VPT:QHN, SRV:EEH and TQV:EDH.

[0898] In certain embodiments useful for inducing the conversion of a neoplastic cell into a cell (any cell) of a fibroblast lineage, PEP5 is selected from the group consisting of VPTEL, APTKL, APTQL, VPQAL, VSQDL, VPQDL, VPTEE, SRVHH and TQVQL; PEP6 is selected from the group consisting of DMVVE, EMVVE, NMVVR, MIVRS, MIVKS, NMVVK, FLQHN, RLEEH and TLEDH; and wherein the pair PEP5:PEP6 is selected from the group consisting of VPTEL:DMVVE, VPTEL:EMVVE, APTKL:NMVVR, APTQL:NMVVR, VPQAL:MIVRS, VSQDL:MIVKS, VPQDL:NMVVK, VPTEE:FLQHN, SRVHH:RLEEH and TQVQL:TLEDH.

[0899] In certain embodiments useful for inducing the conversion of a neoplastic cell into a cell (any cell) of a fibroblast lineage, PEP7 is selected from the group consisting of KIPKAXX, SIPKAXX, HVTKPTX, YVPKPXX, TVPKPXX, ASAAPXX, ASASPXX, NDEGLEX, SSVKXQP and RNVQXRP; wherein PEP8 is selected from the group consisting of GXGXR, SXGXH, AXGXH, XKXS, KXEXR, LEXAXA and LAXKXE; and wherein the pair PEP7:PEP8 is selected from the group consisting of KIPKAXX:GXGXR, SIPKAXX:GXGXR, HVTKPTX:SXGXH, YVPKPXX:SXGXH, TVPKPXX:AXGXH, ASAAPXX:XKXS, ASASPXX:XKXS, NDEGLEX:KXEXR, SSVKXQP:LEXAXA and RNVQXRP:LAXKXE.

[0900] In certain embodiments useful for inducing the conversion of a neoplastic cell into a cell (any cell) of a fibroblast lineage, PEP9 is selected from the group consisting of KIPKAXXVPTEL, SIPKAXXVPTEL, HVTKPTXAPTKL, YVPKPXXAPTKL, TVPKPXXAPTQL, ASAAPXXVPQAL, ASASPXXVSQDL, ASASPXXVPQDL, NDEGLEXVPTEE, SSVKXQPSRVHH and RNVQXRPTQVQL; PEP10 is selected from the group consisting of DMVVEGXGXR, EMVVEGXGXR, NMVVRSXGXH, NMVVRAXGXH, MIVRSXKXS, MIVKSXKXS, MVVKSXKXS, FLQHNKXEXR, RLEEHLEXAXA and TLEDHLAXKXE; and wherein the pair PEP9:PEP10 is selected from the group consisting of KIPKAXXVPTEL:DMVVEGXGXR, SIPKAXXVPTEL:EMVVEGXGXR, HVTKPTXAPTKL:NMVVRSXGXH, YVPKPXXAPTKL:NMVVRSXGXH, TVPKPXXAPTQL:NMVVRAXGXH, ASAAPXXVPQAL:MIVRSXKXS, ASASPXXVSQDL:MIVKSXKXS, ASASPXXVPQDL:MVVKSXKXS, NDEGLEXVPTEE:FLQHNKXEXR, SSVKXQPSRVHH:RLEEHLEXAXA and RNVQXRPTQVQL:TLEDHLAXKXE.

[0901] In certain embodiments useful for inducing the conversion of a neoplastic cell into a cell (any cell) of a fibroblast lineage, PEP5 is selected from the group consisting of VPTEL, APTKL, APTQL, VPQAL, VSQDL, VPQDL, VPTEE, SRVHH and TQVQL; PEP6 is selected from the group consisting of DMVVE, EMVVE, NMVVR, MIVRS, MIVKS, NMVVK, FLQHN, RLEEH and TLEDH; and wherein the pair PEP5:PEP6 is selected from the group consisting of VPTEL:DMVVE, VPTEL:EMVVE, APTKL:NMVVR, APTQL:NMVVR, VPQAL:MIVRS, VSQDL:MIVKS, VPQDL:NMVVK, VPTEE:FLQHN, SRVHH:RLEEH and TQVQL:TLEDH; wherein the pair PEP5:PEP6 is not VPQAL:MIVRS when PEP1 is EPLP and PEP2 is EQLSN; wherein the pair PEP5:PEP6 is not VSQDL:MIVKS when PEP1 is EPLT and PEP2 is EQLSN; wherein the pair PEP5:PEP6 is not VPQDL:MVVVK when PEP1 is EPLT and PEP2 is EQLSN; wherein the pair PEP5:PEP6 is not VPTEE:FLQHN when PEP1 is SNIT and PEP2 is IGEMS; wherein the pair PEP5:PEP6 is not SRVHH:RLEEH when PEP1 is RSVK and PEP2 is KEVQV; and wherein the pair PEP5:PEP6 is not TQVQL:TLEDH when PEP1 is RPVQ and PEP2 is KKATV.

[0902] In certain embodiments useful for inducing the conversion of a neoplastic cell into a cell (any cell) of a fibroblast lineage, PEP9 is selected from the group consisting of KIPKAXXVPTEL, SIPKAXXVPTEL, HVTKPTXAPTKL, YVPKPXXAPTKL, TVPKPXXAPTQL, ASAAPXXVPQAL, ASASPXXVSQDL, ASASPXXVPQDL, NDEGLEXVPTEE, SSVKXQPSRVHH and RNVQXRPTQVQL; PEP10 is selected from the group consisting of DMVVEGXGXR, EMVVEGXGXR, NMVVRSXGXH, NMVVRAXGXH, MIVRSXKXS, MIVKSXKXS, MVVKSXKXS, FLQHNKXEXR, RLEEHLEXAXA and TLEDHLAXKXE; and wherein the pair PEP9:PEP10 is selected from the group consisting of KIPKAXXVPTEL:DMVVEGXGXR, SIPKAXXVPTEL:EMVVEGXGXR, HVTKPTXAPTKL:NMVVRSXGXH, YVPKPXXAPTKL:NMVVRSXGXH, TVPKPXXAPTQL:NMVVRAXGXH, ASAAPXXVPQAL:MIVRSXKXS, ASASPXXVSQDL:MIVKSXKXS, ASASPXXVPQDL:MVVKSXKXS, NDEGLEXVPTEE:FLQHNKXEXR, SSVKXQPSRVHH:RLEEHLEXAXA and RNVQXRPTQVQL:TLEDHLAXKXE; wherein the pair PEP9:PEP10 is not ASAAPXXVPQAL:MIVRSXKXS when PEP1 is EPLP and PEP2 is EQLSN; wherein the pair PEP9:PEP10 is not ASASPXXVSQDL:MIVKSXKXS when PEP1 is EPLT and PEP2 is EQLSN; wherein the pair PEP9:PEP10 is not ASASPXXVPQDL:MVVKSXKXS when PEP1 is EPLT and PEP2 is EQLSN; wherein the pair PEP9:PEP10 is not NDEGLEXVPTEE:FLQHNKXEXR when PEP1 is SNIT and PEP2 is IGEMS; wherein the pair PEP9:PEP10 is not SSVKXQPSRVHH:RLEEHLEXAXA when PEP1 is RSVK and PEP2 is KEVQV; and wherein the pair PEP9:PEP10 is not RNVQXRPTQVQL:TLEDHLAXKXE when PEP1 is RPVQ and PEP2 is KKATV.

[0903] In certain embodiments useful for inducing the conversion of a neoplastic cell into a cell (any cell) of a fibroblast lineage, PEP1 is selected from the group consisting of EPLP, EPLT, SNIT, RSVK and RPVQ; PEP11 is selected from the group consisting of VYY, LYY, QIM, AKV and RKI; and the pair PEP1:PEP11 is selected from the group consisting of EPLP:VYY, EPLT:LYY, SNIT:QIM, RSVK:KEVQV and RPVQ:KKATV.

[0904] In one aspect, the present disclosure provides a GFR-binding compound, wherein said GFR-binding compound is a peptide, a variant or analog thereof, or a peptidomimetic as defined herein, with between 20 and 60 (in particular between 20 and 50, and more particularly, between 20 and 45) amino acids, comprising a peptide with four amino acids (PEP1) or a peptide with eight amino acids (PEP12), a peptide with five amino acids (PEP2), and optionally a pair of peptides selected form the group consisting of PEP3:PEP4, PEP3:PEP6, PEP3:PEP10, PEP5:PEP4, PEP9:PEP4, PEP5:PEP6, PEP5:PEP10, PEP9:PEP6 and PEP9:PEP10; wherein said GFR-binding compound does not comprise the pair of peptides VPQAL:MIVRS when PEP1 is EPLP and PEP2 is EQLSN; wherein said GFR-binding compound does not comprise the pair of peptides VSQDL:MIVKS when PEP1 is EPLT and PEP2 is EQLSN; wherein said GFR-binding compound does not comprise the pair of peptides VPQDL:MVVVK when PEP1 is EPLT and PEP2 is EQLSN; wherein said GFR-binding compound does not comprise the pair of peptides VPTEE:FLQHN when PEP1 is SNIT and PEP2 is IGEMS; wherein said GFR-binding compound does not comprise the pair of peptides SRVHH:RLEEH when PEP1 is RSVK and PEP2 is KEVQV; and wherein said GFR-binding compound does not comprise the pair of peptides TQVQL:TLEDH when PEP1 is RPVQ and PEP2 is KKATV; and, optionally, wherein the RMSD is 2.45 Å or less.

[0905] In one aspect, the present disclosure provides a GFR-binding compound, wherein said GFR-binding compound is a peptide, a variant or analog thereof, or a peptidomimetic as defined herein, with between 20 and 60 (in particular between 20 and 50, and more particularly, between 20 and 45) amino acids, comprising a peptide with four amino acids (PEP1) or a peptide with eight amino acids (PEP12), a peptide with five amino acids (PEP2), and optionally a pair of peptides selected form the group consisting of PEP3:PEP4, PEP3:PEP6, PEP3:PEP10, PEP5:PEP4, PEP9:PEP4, PEP5:PEP6, PEP5:PEP10, PEP9:PEP6 and PEP9:PEP10; wherein said GFR-binding compound does not comprise the pair of peptides ASAAPXXVPQAL:MIVRSXKXS when PEP1 is EPLP and PEP2 is EQLSN; wherein said GFR-binding compound does not comprise the pair of peptides ASASPXXVSQDL:MIVKSXKXS when PEP1 is EPLT and PEP2 is EQLSN; wherein said GFR-binding compound does not comprise the pair of peptides ASASPXXVPQDL:MVVKSXKXS when PEP1 is EPLT and PEP2 is EQLSN; wherein said GFR-binding compound does not comprise the pair of peptides NDEGLEXVPTEE:FLQHNKXEXR when PEP1 is SNIT and PEP2 is IGEMS; wherein said GFR-binding compound does not comprise the pair of peptides SSVKXQPSRVHH:RLEEHLEXAXA when PEP1 is RSVK and PEP2 is KEVQV; and wherein said GFR-binding compound does not comprise the pair of peptides RNVQXRPTQVQL:TLEDHLAXKXE when PEP1 is RPVQ and PEP2 is KKATV; and, optionally, wherein the RMSD is 2.45 Å or less.

[0906] In certain embodiments useful for inducing the conversion of a neoplastic cell into a cell (any cell) of a fibroblast lineage, said GFR-binding compound is a synthetic molecule as defined herein in the definition section.

[0907] In certain embodiments useful for inducing the conversion of a neoplastic cell into a cell (any cell) of a fibroblast lineage, said GFR-binding compound is a synthetic peptide, or a variant or analog thereof, or a peptidomimetic.

[0908] Reproduction System Lineage

[0909] Certain embodiments of the invention are particularly useful for inducing the conversion of a neoplastic cell into a cell (any cell) of the reproduction system lineage.

[0910] In certain embodiments useful for inducing the conversion of a neoplastic cell into a cell (any cell) of the reproduction system lineage, PEP1 is NAIS.

[0911] In certain embodiments useful for inducing the conversion of a neoplastic cell into a cell (any cell) of the reproduction system lineage, PEP2 is LKKYR.

[0912] In certain embodiments useful for inducing the conversion of a neoplastic cell into a cell (any cell) of the reproduction system lineage, PEP3 is selected from the group consisting of VPT, APT, TPT, VPA and APV.

[0913] In certain embodiments useful for inducing the conversion of a neoplastic cell into a cell (any cell) of the reproduction system lineage, PEP4 is selected from the group consisting of VVE, VVR, VVK, VAE, AVS, VVD and VEE.

[0914] In certain embodiments useful for inducing the conversion of a neoplastic cell into a cell (any cell) of the reproduction system lineage, PEP5 is a peptide of general formula PEP3-AA¹¹-AA¹²; wherein PEP3 is selected from the group consisting of VPT, APT, TPT, VPA and APV; wherein AA¹¹ is selected from the group consisting of E, K, Q, R, A, D, G and H, in particular is selected from the group consisting of E, K, Q and R; wherein AA¹² is selected from the group consisting of L, M, T, E, Q and H, in particular is selected from the group consisting of L, M and T. In one particular example, PEP5 is selected from the group consisting of VPTEL, APTKL, APTQL, VPTKL, TPTKM, VPARL, VPTRL and APVKT.

[0915] In certain embodiments useful for inducing the conversion of a neoplastic cell into a cell (any cell) of the reproduction system lineage, PEP6 is a peptide of general formula AA²⁶-AA²⁷-AA²⁸-AA²⁹-PEP4; wherein PEP4 is selected from the group consisting of VVE, VVR, VRS, VKS, VVK, QHN, EEH and EDH; wherein AA²⁶ is absent or selected from the group consisting of AA^{III} amino acids, preferably is absent or E; wherein AA²⁷ and AA²⁸ are independently selected from the group consisting of AA^{III} and AA^{V} amino acids, preferably AA²⁷ is selected from the group consisting of D, N, E, M and G, preferably AA²⁸ is M or I; wherein AA²⁹ is absent or selected from the group consisting of AA^{II} amino acids, preferably is absent or S. In one particular example, PEP6 is selected from the group consisting of DMVVE, EMVVE, NMVVR, NMVVK, EGMSVAE, GMAVS, GMVVD and MIVEE.

[0916] In certain embodiments useful for inducing the conversion of a neoplastic cell into a cell (any cell) of the reproduction system lineage, PEP7 is an amino acid or a peptide with between two and seven amino acids of general formula AA¹-AA²-AA³-AA⁴-AA⁵-AA⁶-AA⁷; wherein AA¹, AA², AA³, AA⁴, and AA⁵ are independently absent or AA^{I} as defined herein; wherein AA⁶ is absent or selected from the group consisting of S, T, C, E, Q, P and R, preferably is selected from the group consisting of C, S and T; wherein AA⁷ is absent or is selected from the group consisting of S, T, C, E, Q, P and R, preferably is selected from the group consisting of S and C; and wherein at least one of AA¹, AA², AA³, AA⁴, AA⁵, AA⁶ or AA⁷ is not absent. In one particular example, PEP7 is selected from the group consisting of KIPKAXX, SIPKAXX, HVTKPTX, YVPKPXX, TVPKPXX, AVPKAXX, KVGKAXX, KASKAXX, GSAGPXX, AAPASXX, STPPTXX, HVPKPXX and RVPSTXX.

[0917] In certain embodiments useful for inducing the conversion of a neoplastic cell into a cell (any cell) of the reproduction system lineage, PEP8 is an amino acid or a peptide with between two and six amino acids of general formula AA³³-AA³⁴-AA³⁵-AA³⁶-AA³⁷-AA³⁸; wherein AA³³ is absent or is selected from the group consisting of AA^{I} amino acids at the exception of AA^{VI} amino acids, in particular is absent or is selected from the group consisting of G, S, A, E and R; AA³⁴ is absent or is selected from the group consisting of AA^{III} and AA^{IV} amino acids, in particular is absent; wherein AA³⁵ is absent or is selected from the group consisting of AA^{II} amino acids, preferably is S or C; wherein AA³⁶ is absent or is selected from the group consisting of AA^{III} and AA^{IV} amino acids, in particular is G; wherein AA³⁷ is absent or is selected from the group consisting of AA^{II} amino acids, preferably is S or C; wherein AA³⁸ is absent or is selected from the group consisting of AA^{I}, in particular is selected from the group consisting of R, H, S and L; and wherein at least one of AA³³, AA³⁴, AA³⁵, AA³⁶, AA³⁷ or AA³⁸ is not absent. In one particular example, PEP8 is selected from the group consisting of GXGXR, SXGXH, AXGXH, XGXR, EXGXR, RXGXS, AXGXR, SXGXR and XGXL.

[0918] In certain embodiments useful for inducing the conversion of a neoplastic cell into a cell (any cell) of the reproduction system lineage, PEP9 is a peptide of general formula AA¹-AA²-AA³-AA⁴-AA⁵-AA⁶-AA⁷-PEP5; wherein PEP5 is a peptide of formula PEP3-AA¹¹-AA¹²; wherein PEP3 is selected from the group consisting of VPT, APT, TPT, VPA and APV; wherein AA¹¹ is selected from the group consisting of E, K, Q, R, A, D, G and H, in particular is selected from the group consisting of E, K, Q and R; wherein AA¹² is selected from the group consisting of L, M, T, E, Q and H, in particular is selected from the group consisting of L, M and T; wherein AA¹, AA², AA³, AA⁴, and AA⁵ are independently absent or AA^{I} as defined herein; wherein AA⁶ is absent or selected from the group consisting of S, T, C, E, Q, P and R, preferably is selected from the group consisting of C, S and T; wherein AA⁷ is selected from the group consisting of S, T, C, E, Q, P and R, preferably is selected from the group consisting of S and C. In one particular example, PEP9 is selected from the group consisting of KIPKAXXVPTEL, SIPKAXXVPTEL, HVTKPTXAPTKL, YVPKPXXAPTKL, TVPKPXXAPTQL, AVPKAXXAPTKL, KVGKAXXVPTKL, KASKAXXVPTKL, GSAGPXXTPTKM, AAPASXXVPARL, STPPTXXVPTRL, HVPKPXXAPTKL and RVPSTXXAPVKT.

[0919] In certain embodiments useful for inducing the conversion of a neoplastic cell into a cell (any cell) of the reproduction system lineage, PEP10 is a peptide of general formula PEP6-AA³³-AA³⁴-AA³⁵-AA³⁶-AA³⁷-AA³⁸ wherein PEP6 is a peptide of formula AA²⁶-AA²⁷-AA¹-AA²⁹-PEP4; wherein PEP4 is selected from the group consisting of VVE, VVR, VVK, VAE, AVS, VVD and VEE; wherein AA²⁶ is absent or selected from the group consisting of AA^{III} amino acids, preferably is absent or E; wherein AA²⁷ and AA²⁸ are independently selected from the group consisting of AA^{III} and AA^{IV} amino acids, preferably AA²⁷ is selected from the group consisting of D, N, E, M and G, preferably AA²⁸ is M or I; wherein AA²⁹ is absent or selected from the group consisting of AA^{II} amino acids, preferably is absent or is S; wherein AA³³ is absent or is selected from the group consisting of AA¹ amino acids at the exception of AA^{VI} amino acids, in particular is absent or is selected from the group consisting of G, S, A, E and R; AA³⁴ is absent or is selected from the group consisting of AA^{III} and AA^{IV} amino acids, in particular is absent; wherein AA³⁵ is absent or is selected from the group consisting of AA^{I} amino acids, preferably is S or C; wherein AA³⁶ is absent or is selected from the group consisting of AA^{III} and AA^{IV} amino acids, in particular is G; wherein AA³⁷ is absent or is selected from the group consisting of AA^{II} amino acids, preferably is S or C; wherein AA³⁸ is absent or is selected from the group consisting of AA^{I}, in particular is selected from the group consisting of R, H, S and L. In one particular example, PEP10 is selected from the group consisting of DMVVEGXGXR, EMVVEGXGXR, NMVVRSXGXH, NMVVRSXGXH, NMVVRAXGXH, NMVVKAXGXH, EGMSVAEXGXR, GMAVSEXGXR, GMVVDRXGXS, DMVVEAXGXR, DMVVESXGXR, NMVVRSXGXH and MIVEEXGXL.

[0920] In certain embodiments useful for inducing the conversion of a neoplastic cell into a cell (any cell) of the reproduction system lineage, PEP12 is a peptide of general formula PEP1-AA¹⁷-PEP11; wherein AA¹⁷ is selected from the group consisting of G, A, V, L, I, P, F, M, W, T and S (in particular is selected from the group consisting of M, I, L, V and T); wherein PEP1 is NAIS.

[0921] In certain embodiments useful for inducing the conversion of a neoplastic cell into a cell (any cell) of the reproduction system lineage, PEP11 is a peptide with 3 amino acids of general formula AA¹⁸-AA¹⁹-AA²⁰; wherein AA¹⁸ is selected from the group consisting of L, V, Q, A and R, in particular is L; wherein AA¹⁹ is selected from the group consisting of F, W, H, Y, I and K, in particular is Y; wherein AA²⁰ is selected from the group consisting of L, F, Y, K, I, V and M, in particular is F. In one particular example, PEP11 is LYF.

[0922] The definitions of “PEP” pairs, quadruplets, hexaplets and heptuplet e.g. PEP1:PEP2, PEP12:PEP2, or PEP7:PEP5:PEP12:LINKER:PEP2:PEP6:PEP8, useful for inducing the conversion of a neoplastic cell into a cell (any cell) of the reproduction system lineage, are as already defined herein to the extent that PEP1 to PEP12 are particularly useful for these applications. For instances:

[0923] In certain embodiments useful for inducing the conversion of a neoplastic cell into a cell (any cell) of the reproduction system lineage, PEP3 is selected from the group consisting of VPT, APT, TPT, VPA and APV; PEP4 is selected from the group consisting of VVE, VVR, VVK, VAE, AVS, VVD and VEE; and wherein the pair PEP3:PEP4 is selected from the group consisting of VPT:VVE, APT:VVR, APT:VVK, VPT:VAE, VPT:AVS, TPT:VVD, VPA:VVE and APV:VEE.

[0924] In certain embodiments useful for inducing the conversion of a neoplastic cell into a cell (any cell) of the reproduction system lineage, PEP5 is selected from the group consisting of VPTEL, APTKL, APTQL, VPTKL, TPTKM, VPARL, VPTRL and APVKT; PEP6 is selected from the group consisting of DMVVE, EMVVE, NMVVR, NMVVK, EGMSVAE, GMAVS, GMVVD and MIVEE; and wherein the pair PEP5:PEP6 is selected from the group consisting of VPTEL:DMVVE, VPTEL:EMVVE, APTKL:NMVVR, APTQL:NMVVR, APTKL:NMVVK, VPTKL:EGMSVAE, VPTKL:GMAVS, TPTKM:GMVVD, VPARL:DMVVE, VPTRL:DMVVE and APVKT:MIVEE.

[0925] In certain embodiments useful for inducing the conversion of a neoplastic cell into a cell (any cell) of the reproduction system lineage, PEP7 is selected from the group consisting of KIPKAXX, SIPKAXX, HVTKPTX, YVPKPXX, TVPKPXX, AVPKAXX, KVGKAXX, KASKAXX, GSAGPXX, AAPASXX, STPPTXX, HVPKPXX and RVPSTXX; wherein PEP8 is selected from the group consisting of GXGXR, SXGXH, AXGXH, XGXR, EXGXR, RXGXS, AXGXR, SXGXR and XGXL; and wherein the pair PEP7:PEP8 is selected from the group consisting of KIPKAXX:GXGXR, SIPKAXX:GXGXR, HVTKPTX:SXGXH, YVPKPXX:SXGXH, TVPKPXX:AXGXH, AVPKAXX:AXGXH, KVGKAXX:XGXR, KASKAXX:EXGXR, GSAGPXX:RXGXS, AAPASXX:AXGXR, STPPTXX:SXGXR, HVPKPXX:SXGXH and RVPSTXX:XGXL.

[0926] In certain embodiments useful for inducing the conversion of a neoplastic cell into a cell (any cell) of the reproduction system lineage, PEP9 is selected from the group consisting of KIPKAXXVPTEL, SIPKAXXVPTEL, HVTKPTXAPTKL, YVPKPXXAPTKL, TVPKPXXAPTQL, AVPKAXXAPTKL, KVGKAXXVPTKL, KASKAXXVPTKL, GSAGPXXTPTKM, AAPASXXVPARL, STPPTXXVPTRL, HVPKPXXAPTKL and RVPSTXXAPVKT; PEP10 is selected from the group consisting of DMVVEGXGXR, EMVVEGXGXR, NMVVRSXGXH, NMVVRSXGXH, NMVVRAXGXH, NMVVKAXGXH, EGMSVAEXGXR, GMAVSEXGXR, GMVVDRXGXS, DMVVEAXGXR, DMVVESXGXR, NMVVRSXGXH and MIVEEXGXL; and wherein the pair PEP9:PEP10 is selected from the group consisting of KIPKAXXVPTEL:DMVVEGXGXR, SIPKAXXVPTEL:EMVVEGXGXR, HVTKPTXAPTKL:NMVVRSXGXH, YVPKPXXAPTKL:NMVVRSXGXH, TVPKPXXAPTQL:NMVVRAXGXH, AVPKAXXAPTKL:NMVVKAXGXH, KVGKAXXVPTKL:EGMSVAEXGXR, KASKAXXVPTKL:GMAVSEXGXR, GSAGPXXTPTKM:GMVVDRXGXS, AAPASXXVPARL:DMVVEAXGXR, STPPTXXVPTRL:DMVVESXGXR, HVPKPXXAPTKL:NMVVRSXGXH and RVPSTXXAPVKT:MIVEEXGXL.

[0927] In certain embodiments useful for inducing the conversion of a neoplastic cell into a cell (any cell) of the reproduction system lineage, PEP5 is selected from the group consisting of VPTEL, APTKL, APTQL, VPTKL, TPTKM, VPARL, VPTRL and APVKT; PEP6 is selected from the group consisting of DMVVE, EMVVE, NMVVR, NMVVK, EGMSVAE, GMAVS, GMVVD and MIVEE; and wherein the pair PEP5:PEP6 is selected from the group consisting of VPTEL:DMVVE, VPTEL:EMVVE, APTKL:NMVVR, APTQL:NMVVR, APTKL:NMVVK, VPTKL:EGMSVAE, VPTKL:GMAVS, TPTKM:GMVVD, VPARL:DMVVE, VPTRL:DMVVE and APVKT:MIVEE; and wherein the pair PEP5:PEP6 is not APTKL:NMVVR when PEP1 is NAIS and PEP2 is LKKYR.

[0928] In certain embodiments useful for inducing the conversion of a neoplastic cell into a cell (any cell) of the reproduction system lineage, PEP9 is selected from the group consisting of KIPKAXXVPTEL, SIPKAXXVPTEL, HVTKPTXAPTKL, YVPKPXXAPTKL, TVPKPXXAPTQL, AVPKAXXAPTKL, KVGKAXXVPTKL, KASKAXXVPTKL, GSAGPXXTPTKM, AAPASXXVPARL, STPPTXXVPTRL, HVPKPXXAPTKL and RVPSTXXAPVKT; PEP10 is selected from the group consisting of DMVVEGXGXR, EMVVEGXGXR, NMVVRSXGXH, NMVVRSXGXH, NMVVRAXGXH, NMVVKAXGXH, EGMSVAEXGXR, GMAVSEXGXR, GMVVDRXGXS, DMVVEAXGXR, DMVVESXGXR, NMVVRSXGXH and MIVEEXGXL; and wherein the pair PEP9:PEP10 is selected from the group consisting of KIPKAXXVPTEL:DMVVEGXGXR, SIPKAXXVPTEL:EMVVEGXGXR, HVTKPTXAPTKL:NMVVRSXGXH, YVPKPXXAPTKL:NMVVRSXGXH, TVPKPXXAPTQL:NMVVRAXGXH, AVPKAXXAPTKL:NMVVKAXGXH, KVGKAXXVPTKL:EGMSVAEXGXR, KASKAXXVPTKL:GMAVSEXGXR, GSAGPXXTPTKM:GMVVDRXGXS, AAPASXXVPARL:DMVVEAXGXR, STPPTXXVPTRL:DMVVESXGXR, HVPKPXXAPTKL:NMVVRSXGXH and RVPSTXXAPVKT:MIVEEXGXL; and wherein the pair PEP9:PEP10 is not HVPKPXXAPTKL:NMVVRSXGXH when PEP1 is NAIS and PEP2 is LKKYR.

[0929] In certain embodiments useful for inducing the conversion of a neoplastic cell into a cell (any cell) of the reproduction system lineage, PEP1 is NAIS and PEP11 is LYF.

[0930] In one aspect, the present disclosure provides a GFR-binding compound, wherein said GFR-binding compound is a peptide, a variant or analog thereof, or a peptidomimetic as defined herein, with between 20 and 60 (in particular between 20 and 50, and more particularly, between 20 and 45) amino acids, comprising a peptide with four amino acids (PEP1) or a peptide with eight amino acids (PEP12), a peptide with five amino acids (PEP2), and optionally a pair of peptides selected form the group consisting of PEP3:PEP4, PEP3:PEP6, PEP3:PEP10, PEP5:PEP4, PEP9:PEP4, PEP5:PEP6, PEP5:PEP10, PEP9:PEP6 and PEP9:PEP10; wherein said GFR-binding compound does not comprise the pair of peptides APTKL:NMVVR when PEP1 is NAIS and PEP2 is LKKYR; and, optionally, wherein the RMSD is 2.45 Å or less.

[0931] In one aspect, the present disclosure provides a GFR-binding compound, wherein said GFR-binding compound is a peptide, a variant or analog thereof, or a peptidomimetic as defined herein, with between 20 and 60 (in particular between 20 and 50, and more particularly, between 20 and 45) amino acids, comprising a peptide with four amino acids (PEP1) or a peptide with eight amino acids (PEP12), a peptide with five amino acids (PEP2), and optionally a pair of peptides selected form the group consisting of PEP3:PEP4, PEP3:PEP6, PEP3:PEP10, PEP5:PEP4, PEP9:PEP4, PEP5:PEP6, PEP5:PEP10, PEP9:PEP6 and PEP9:PEP10; wherein said GFR-binding compound does not comprise the pair of peptides HVPKPXXAPTKL:NMVVRSXGXH when PEP1 is NAIS and PEP2 is LKKYR; and, optionally, wherein the RMSD is 2.45 Å or less.

[0932] In certain embodiments useful for inducing the conversion of a neoplastic cell into a cell (any cell) of the reproduction system lineage, said GFR-binding compound is a synthetic molecule as defined herein in the definition section.

[0933] In certain embodiments useful for inducing the conversion of a neoplastic cell into a cell (any cell) of the reproduction system lineage, said GFR-binding compound is a synthetic peptide, or a variant or analog thereof, or a peptidomimetic.

[0934] Lung Cell Lineage

[0935] Certain embodiments of the invention are particularly useful for inducing the conversion of a neoplastic cell into a cell (any cell) of the lung cell lineage.

[0936] In certain embodiments useful for inducing the conversion of a neoplastic cell into a cell (any cell) of the lung cell lineage, PEP1 is selected from the group consisting of NAIS, SATS, SPIS, EPIS and SPIN.

[0937] In certain embodiments useful for inducing the conversion of a neoplastic cell into a cell (any cell) of the lung cell lineage, PEP2 is selected from the group consisting of LKKYR, LRKHR, LKYHY, KFKYE and YGKIP.

[0938] In certain embodiments useful for inducing the conversion of a neoplastic cell into a cell (any cell) of the lung cell lineage, PEP3 is selected from the group consisting of VPT, VPE, APT, TPT, VPA, APV, VPQ and VSQ.

[0939] In certain embodiments useful for inducing the conversion of a neoplastic cell into a cell (any cell) of the lung cell lineage, PEP4 is selected from the group consisting of VVE, TVE, VVR, VVK, VAE, AVS, VVD, VEE, VRS and VKS.

[0940] In certain embodiments useful for inducing the conversion of a neoplastic cell into a cell (any cell) of the lung cell lineage, PEP5 is a peptide of general formula PEP3-AA¹¹-AA¹²; wherein PEP3 is selected from the group consisting of VPT, VPE, APT, TPT, VPA, APV, VPQ and VSQ; wherein AA¹¹ is selected from the group consisting of E, K, Q, R, A, D, G and H, in particular is selected from the group consisting of E, K, Q, R, A and D; wherein AA¹² is selected from the group consisting of L, M, T, E, Q and H, in particular selected from the group consisting of L, M and T. In one particular example, PEP5 is selected from the group consisting of VPTEL, VPEKM, APTKL, APTQL, VPTKL, TPTKM, VPARL, VPTRL, APVKT, VPQAL, VSQDL and VPQDL.

[0941] In certain embodiments useful for inducing the conversion of a neoplastic cell into a cell (any cell) of the lung cell lineage, PEP6 is a peptide of general formula AA²⁶-AA²⁷-AA²⁸-AA²⁹-PEP4; wherein PEP4 is selected from the group consisting of VVE, TVE, VVR, VVK, VAE, AVS, VVD, VEE, VRS and VKS; wherein AA²⁶ is absent or selected from the group consisting of AA^{III} amino acids, preferably is absent or E; wherein AA²⁷ and AA²⁸ are independently selected from the group consisting of AA^{III} and AA^{V} amino acids, preferably AA²⁷ is selected from the group consisting of D, E, N, G and M, preferably AA²⁸ is selected from the group consisting of M, I and V; wherein AA²⁹ is absent or selected from the group consisting of AA^{II} amino acids, preferably absent or S. In one particular example, PEP6 is selected from the group consisting of DMVVE, NMTVE, EMVVE, NMVVR, NMVVK, EGMSVAE, GMAVS, GMVVD, DMVVE, MIVEE, MIVRS, MIVKS and MVVKS.

[0942] In certain embodiments useful for inducing the conversion of a neoplastic cell into a cell (any cell) of the lung cell lineage, PEP7 is an amino acid or a peptide with between two and seven amino acids of general formula AA¹-AA²-AA³-AA⁴-AA⁵-AA⁶-AA⁷; wherein AA¹, AA², AA³, AA⁴, and AA⁵ are independently absent or AA^{I} as defined herein; wherein AA⁶ is absent or selected from the group consisting of S, T, C, E, Q, P and R, preferably is selected from the group consisting of C, S and T; wherein AA⁷ is absent or is selected from the group consisting of S, T, C, E, Q, P and R, preferably is C or S; and wherein at least one of AA¹, AA², AA³, AA⁴, AA⁵, AA⁶ or AA⁷ is not absent. In one particular example, PEP7 is selected from the group consisting of KIPKAXX, GIPEPXX, SIPKAXX, HVTKPTX, YVPKPXX, TVPKPXX, AVPKAXX, KVGKAXX, KASKAXX, GSAGPXX, AAPASXX, STPPTXX, HVPKPXX, RVPSTXX, ASAAPXX and ASASPXX.

[0943] In certain embodiments useful for inducing the conversion of a neoplastic cell into a cell (any cell) of the lung cell lineage, PEP8 is an amino acid or a peptide with between two and six amino acids of general formula AA³³-AA³⁴-AA³⁵-AA³⁶-AA³⁷-AA³⁸; wherein AA³³ is absent or is selected from the group consisting of AA^{I} amino acids at the exception of AA^{VI} amino acids; AA³⁴ is absent or is selected from the group consisting of AA^{III} and AA^{IV} amino acids; wherein AA³⁵ is absent or is selected from the group consisting of AA^{II} amino acids, preferably is S or C; wherein AA³⁶ is absent or is selected from the group consisting of AA^{III} and AA^{IV} amino acids; wherein AA³⁷ is absent or is selected from the group consisting of AA^{II} amino acids, preferably is S or C; wherein AA³⁸ is absent or is selected from the group consisting of AA^{I}; and wherein at least one of AA³³, AA³⁴, AA³⁵, AA³⁶, AA³⁷ or AA³⁸ is not absent. In one particular example, PEP8 is selected from the group consisting of GXGXR, SXAXR, SXGXH, AXGXH, XGXR, EXGXR, RXGXS, AXGXR, SXGXR, XGXL and XKXS.

[0944] In certain embodiments useful for inducing the conversion of a neoplastic cell into a cell (any cell) of the lung cell lineage, PEP9 is a peptide of general formula AA¹-AA²-AA³-AA⁴-AA⁵-AA⁶-AA⁷-PEP5; wherein PEP5 is a peptide of formula PEP3-AA¹¹-AA¹²; wherein PEP3 is selected from the group consisting of VPT, VPE, APT, TPT, VPA, APV, VPQ and VSQ; wherein AA¹¹ is selected from the group consisting of E, K, Q, R, A, D, G and H, in particular E, K, Q, R, A and D; wherein AA¹² is selected from the group consisting of L, M, T, E, Q and H, in particular selected from the group consisting of L, M and T; wherein AA¹, AA², AA³, AA⁴, and AA⁵ are independently absent or AA^{I} as defined herein; wherein AA⁶ is absent or selected from the group consisting of S, T, C, E, Q, P and R, preferably is selected from the group consisting of C, S and T; wherein AA⁷ is selected from the group consisting of S, T, C, E, Q, P and R, preferably is C or S. In one particular example, PEP9 is selected from the group consisting of KIPKAXXVPTEL, GIPEPXXVPEKM, SIPKAXXVPTEL, HVTKPTXAPTKL, YVPKPXXAPTKL, TVPKPXXAPTQL, AVPKAXXAPTKL, KVGKAXXVPTKL, KASKAXXVPTKL, GSAGPXXTPTKM, AAPASXXVPARL, STPPTXXVPTRL, HVPKPXXAPTKL, RVPSTXXAPVKT, ASAAPXXVPQAL, ASASPXXVSQDL and ASASPXXVPQDL.

[0945] In certain embodiments useful for inducing the conversion of a neoplastic cell into a cell (any cell) of the lung cell lineage, PEP10 is a peptide of general formula PEP6-AA³³-AA³⁴-AA³⁵-AA³⁶-AA³⁷-AA³⁸; wherein PEP6 is a peptide of formula AA²⁶-AA²⁷-AA²⁸-AA²⁹-PEP4; wherein PEP4 is selected from the group consisting of VVE, TVE, VVR, VVK, VAE, AVS, VVD, VEE, VRS and VKS; wherein AA²⁶ is absent or selected from the group consisting of AA^{III} amino acids, preferably is absent or E; wherein AA²⁷ and AA²⁸ are independently selected from the group consisting of AA^{III} and AA^{IV} amino acids, preferably AA²⁷ is selected from the group consisting of D, E, N, G and M, preferably AA²⁸ is selected from the group consisting of M, I and V; wherein AA²⁹ is absent or selected from the group consisting of AA^{II} amino acids, preferably absent or S; wherein AA³³ is absent or is selected from the group consisting of AA^{I} amino acids at the exception of AA^{VI} amino acids; AA³⁴ is absent or is selected from the group consisting of AA^{III} and AA^{IV} amino acids; wherein AA³⁵ is absent or is selected from the group consisting of AA^{II} amino acids, preferably is S or C; wherein AA³⁶ is absent or is selected from the group consisting of AA^{III} and AA^{IV} amino acids; wherein AA³⁷ is absent or is selected from the group consisting of AA^{II} amino acids, preferably is S or C; wherein AA³⁸ is absent or is selected from the group consisting of AA^{I}. In one particular example, PEP10 is selected from the group consisting of DMVVEGXGXR, NMTVESXAXR, EMVVEGXGXR, NMVVRSXGXH, NMVVRSXGXH, NMVVRAXGXH, NMVVKAXGXH, EGMSVAEXGXR, GMAVSEXGXR, GMVVDRXGXS, DMVVEAXGXR, DMVVESXGXR, NMVVRSXGXH, MIVEEXGXL, MIVRSXKXS, MIVKSXKXS and MVVKSXKXS.

[0946] In certain embodiments useful for inducing the conversion of a neoplastic cell into a cell (any cell) of the lung cell lineage, PEP12 is a peptide of general formula PEP1-AA¹⁷-PEP11; wherein AA¹⁷ is selected from the group consisting of G, A, V, L, I, P, F, M, W, T and S (in particular is selected from the group consisting of M, I, L, V and T); wherein PEP1 is selected from the group consisting of NAIS, SATS, SPIS, EPIS and SPIN.

[0947] In certain embodiments useful for inducing the conversion of a neoplastic cell into a cell (any cell) of the lung cell lineage, PEP11 is a peptide with 3 amino acids of general formula AA¹⁸-AA¹⁹-AA²⁰; wherein AA¹⁸ is selected from the group consisting of L, V, Q, A and R, in particular is L; wherein AA¹⁹ is selected from the group consisting of F, W, H and Y (in particular is a polar aromatic amino acid such as Y); wherein AA²⁰ is selected from the group consisting of L, F, Y, K, I, V and M, in particular is selected from the group consisting of L, F, Y, and K. In one particular example, PEP11 is selected from the group consisting of LYF, LYY, LYK and LYL.

[0948] The definitions of “PEP” pairs, quadruplets, hexaplets and heptuplet e.g. PEP1:PEP2, PEP12:PEP2, or PEP7:PEP5:PEP12:LINKER:PEP2:PEP6:PEP8, useful for inducing the conversion of a neoplastic cell into a cell (any cell) of the lung cell lineage, are as already defined herein to the extent that PEP1 to PEP12 are particularly useful for these applications. For instances: In certain embodiments useful for inducing the conversion of a neoplastic cell into a cell (any cell) of the lung cell lineage, the pair PEP1:PEP2 is selected from the group consisting of NAIS:LKKYR, SATS:LRKHR, SPIS:LKYHY, EPIS:KFKYE and SPIN:YGKIP.

[0949] In certain embodiments useful for inducing the conversion of a neoplastic cell into a cell (any cell) of the lung cell lineage, the pair PEP12:PEP2 is selected from the group consisting of NAIS-AA¹⁷-LYF:LKKYR, SATS-AA¹⁷-LYY:LRKHR, SPIS-AA¹⁷-LYK:LKYHY, EPIS-AA¹⁷-LYL:KFKYE and SPIN-AA¹⁷-LYF:YGKIP; wherein AA¹⁷ is selected from the group consisting of G, A, V, L, I, P, F, M, W, T and S (in particular is selected from the group consisting of M, I, V and T).

[0950] In certain embodiments useful for inducing the conversion of a neoplastic cell into a cell (any cell) of the lung cell lineage, PEP3 is selected from the group consisting of VPT, VPE, APT, TPT, VPA, APV, VPQ and VSQ; PEP4 is selected from the group consisting of VVE, TVE, VVR, VVK, VAE, AVS, VVD, VEE, VRS and VKS; and wherein the pair PEP3:PEP4 is selected from the group consisting of VPT:VVE, VPE:TVE, APT:VVR, APT:VVK, VPT:VAE, VPT:AVS, TPT:VVD, VPA:VVE, APV:VEE, VPQ:VRS, VSQ:VKS and VPQ:VKS.

[0951] In certain embodiments useful for inducing the conversion of a neoplastic cell into a cell (any cell) of the lung cell lineage, PEP5 is selected from the group consisting of VPTEL, VPEKM, APTKL, APTQL, VPTKL, TPTKM, VPARL, VPTRL, APVKT, VPQAL, VSQDL and VPQDL; PEP6 is selected from the group consisting of DMVVE, NMTVE, EMVVE, NMVVR, NMVVK, EGMSVAE, GMAVS, GMVVD, DMVVE, MIVEE, MIVRS, MIVKS and MVVKS; and wherein the pair PEP5:PEP6 is selected from the group consisting of VPTEL:DMVVE, VPEKM:NMTVE, VPTEL:EMVVE, APTKL:NMVVR, APTQL:NMVVR, APTKL:NMVVK, VPTKL:EGMSVAE, VPTKL:GMAVS, TPTKM:GMVVD, VPARL:DMVVE, VPTRL:DMVVE, APVKT:MIVEE, VPQAL:MIVRS, VSQDL:MIVKS and VPQDL:MVVKS.

[0952] In certain embodiments useful for inducing the conversion of a neoplastic cell into a cell (any cell) of the lung cell lineage, PEP7 is selected from the group consisting of KIPKAXX, GIPEPXX, SIPKAXX, HVTKPTX, YVPKPXX, TVPKPXX, AVPKAXX, KVGKAXX, KASKAXX, GSAGPXX, AAPASXX, STPPTXX, HVPKPXX, RVPSTXX, ASAAPXX and ASASPXX; wherein PEP8 is selected from the group consisting of GXGXR, SXAXR, SXGXH, AXGXH, XGXR, EXGXR, RXGXS, AXGXR, SXGXR, XGXL and XKXS; and wherein the pair PEP7:PEP8 is selected from the group consisting of KIPKAXX:GXGXR, GIPEPXX:SXAXR, SIPKAXX:GXGXR, HVTKPTX:SXGXH, YVPKPXX:SXGXH, TVPKPXX:AXGXH, AVPKAXX:AXGXH, KVGKAXX:XGXR, KASKAXX:EXGXR, GSAGPXX:RXGXS, AAPASXX:AXGXR, STPPTXX:SXGXR, HVPKPXX:SXGXH, RVPSTXX:XGXL, ASAAPXX:XKXS and ASASPXX:XKXS.

[0953] In certain embodiments useful for inducing the conversion of a neoplastic cell into a cell (any cell) of the lung cell lineage, PEP9 is selected from the group consisting of KIPKAXXVPTEL, GIPEPXXVPEKM, SIPKAXXVPTEL, HVTKPTXAPTKL, YVPKPXXAPTKL, TVPKPXXAPTQL, AVPKAXXAPTKL, KVGKAXXVPTKL, KASKAXXVPTKL, GSAGPXXTPTKM, AAPASXXVPARL, STPPTXXVPTRL, HVPKPXXAPTKL, RVPSTXXAPVKT, ASAAPXXVPQAL, ASASPXXVSQDL and ASASPXXVPQDL; PEP10 is selected from the group consisting of DMVVEGXGXR, NMTVESXAXR, EMVVEGXGXR, NMVVRSXGXH, NMVVRSXGXH, NMVVRAXGXH, NMVVKAXGXH, EGMSVAEXGXR, GMAVSEXGXR, GMVVDRXGXS, DMVVEAXGXR, DMVVESXGXR, NMVVRSXGXH, MIVEEXGXL, MIVRSXKXS, MIVKSXKXS and MVVKSXKXS; and wherein the pair PEP9:PEP10 is selected from the group consisting of KIPKAXXVPTEL:DMVVEGXGXR, GIPEPXXVPEKM:NMTVESXAXR, SIPKAXXVPTEL:EMVVEGXGXR, HVTKPTXAPTKL:NMVVRSXGXH, YVPKPXXAPTKL:NMVVRSXGXH, TVPKPXXAPTQL:NMVVRAXGXH, AVPKAXXAPTKL:NMVVKAXGXH, KVGKAXXVPTKL:EGMSVAEXGXR, KASKAXXVPTKL:GMAVSEXGXR, GSAGPXXTPTKM:GMVVDRXGXS, AAPASXXVPARL:DMVVEAXGXR, STPPTXXVPTRL:DMVVESXGXR, HVPKPXXAPTKL:NMVVRSXGXH, RVPSTXXAPVKT:MIVEEXGXL, ASAAPXXVPQAL:MIVRSXKXS, ASASPXXVSQDL:MIVKSXKXS and ASASPXXVPQDL:MVVKSXKXS.

[0954] In certain embodiments useful for inducing the conversion of a neoplastic cell into a cell (any cell) of the lung cell lineage, PEP5 is selected from the group consisting of VPTEL, VPEKM, APTKL, APTQL, VPTKL, TPTKM, VPARL, VPTRL, APVKT, VPQAL, VSQDL and VPQDL; PEP6 is selected from the group consisting of DMVVE, NMTVE, EMVVE, NMVVR, NMVVK, EGMSVAE, GMAVS, GMVVD, DMVVE, MIVEE, MIVRS, MIVKS and MVVKS; and wherein the pair PEP5:PEP6 is selected from the group consisting of VPTEL:DMVVE, VPEKM:NMTVE, VPTEL:EMVVE, APTKL:NMVVR, APTQL:NMVVR, APTKL:NMVVK, VPTKL:EGMSVAE, VPTKL:GMAVS, TPTKM:GMWD, VPARL:DMVVE, VPTRL:DMVVE, APVKT:MIVEE, VPQAL:MIVRS, VSQDL:MIVKS and VPQDL:MVVKS; wherein the pair PEP5:PEP6 is not APTKL:NMVVR when PEP1 is NAIS and PEP2 is LKKYR; wherein the pair PEP5:PEP6 is not APTQL:NMVVR when PEP1 is NAIS and PEP2 is LKKYR; wherein the pair PEP5:PEP6 is not APTKL:NMVVK when PEP1 is SATS and PEP2 is LRKHR; wherein the pair PEP5:PEP6 is not VPTKL:EGMSVAE when PEP1 is SPIS and PEP2 is LKYHY; wherein the pair PEP5:PEP6 is not VPTKL:GMAVS when PEP1 is EPIS and PEP2 is KFKYE; and wherein the pair PEP5:PEP6 is not TPTKM:GMVVD when PEP1 is SPIN and PEP2 is YGKIP.

[0955] In certain embodiments useful for inducing the conversion of a neoplastic cell into a cell (any cell) of the lung cell lineage, PEP9 is selected from the group consisting of KIPKAXXVPTEL, GIPEPXXVPEKM, SIPKAXXVPTEL, HVTKPTXAPTKL, YVPKPXXAPTKL, TVPKPXXAPTQL, AVPKAXXAPTKL, KVGKAXXVPTKL, KASKAXXVPTKL, GSAGPXXTPTKM, AAPASXXVPARL, STPPTXXVPTRL, HVPKPXXAPTKL, RVPSTXXAPVKT, ASAAPXXVPQAL, ASASPXXVSQDL and ASASPXXVPQDL; PEP10 is selected from the group consisting of DMVVEGXGXR, NMTVESXAXR, EMVVEGXGXR, NMVVRSXGXH, NMVVRSXGXH, NMVVRAXGXH, NMVVKAXGXH, EGMSVAEXGXR, GMAVSEXGXR, GMVVDRXGXS, DMVVEAXGXR, DMVVESXGXR, NMVVRSXGXH, MIVEEXGXL, MIVRSXKXS, MIVKSXKXS and MVVKSXKXS; and wherein the pair PEP9:PEP10 is selected from the group consisting of KIPKAXXVPTEL:DMVVEGXGXR, GIPEPXXVPEKM:NMTVESXAXR, SIPKAXXVPTEL:EMVVEGXGXR, HVTKPTXAPTKL:NMVVRSXGXH, YVPKPXXAPTKL:NMVVRSXGXH, TVPKPXXAPTQL:NMVVRAXGXH, AVPKAXXAPTKL:NMVVKAXGXH, KVGKAXXVPTKL:EGMSVAEXGXR, KASKAXXVPTKL:GMAVSEXGXR, GSAGPXXTPTKM:GMVVDRXGXS, AAPASXXVPARL:DMVVEAXGXR, STPPTXXVPTRL:DMVVESXGXR, HVPKPXXAPTKL:NMVVRSXGXH, RVPSTXXAPVKT:MIVEEXGXL, ASAAPXXVPQAL:MIVRSXKXS, ASASPXXVSQDL:MIVKSXKXS and ASASPXXVPQDL:MVVKSXKXS; wherein the pair PEP9:PEP10 is not YVPKPXXAPTKL:NMVVRSXGXH when PEP1 is NAIS and PEP2 is LKKYR; wherein the pair PEP9:PEP10 is not TVPKPXXAPTQL:NMVVRAXGXH when PEP1 is NAIS and PEP2 is LKKYR; wherein the pair PEP9:PEP10 is not AVPKAXXAPTKL:NMVVKAXGXH when PEP1 is SATS and PEP2 is LRKHR; wherein the pair PEP9:PEP10 is not KVGKAXXVPTKL:EGMSVAEXGXR when PEP1 is SPIS and PEP2 is LKYHY; wherein the pair PEP9:PEP10 is not KASKAXXVPTKL:GMAVSEXGXR when PEP1 is EPIS and PEP2 is KFKYE; and wherein the pair PEP9:PEP10 is not GSAGPXXTPTKM:GMVVDRXGXS when PEP1 is SPIN and PEP2 is YGKIP.

[0956] In certain embodiments useful for inducing the conversion of a neoplastic cell into a cell (any cell) of the lung cell lineage, PEP1 is selected from the group consisting of NAIS, SATS, SPIS, EPIS and SPIN; PEP11 is selected from the group consisting of LYF, LYY, LYK and LYL; and the pair PEP1:PEP11 is selected from the group consisting of NAIS:LYF, SATS:LYY, SPIS:LYK, EPIS:LYL and SPIN:LYF.

[0957] In one aspect, the present disclosure provides a GFR-binding compound, wherein said GFR-binding compound is a peptide, a variant or analog thereof, or a peptidomimetic as defined herein, with between 20 and 60 (in particular between 20 and 50, and more particularly, between 20 and 45) amino acids, comprising a peptide with four amino acids (PEP1) or a peptide with eight amino acids (PEP12), a peptide with five amino acids (PEP2), and optionally a pair of peptides selected form the group consisting of PEP3:PEP4, PEP3:PEP6, PEP3:PEP10, PEP5:PEP4, PEP9:PEP4, PEP5:PEP6, PEP5:PEP10, PEP9:PEP6 and PEP9:PEP10; wherein said GFR-binding compound does not comprise the pair of peptides APTKL:NMVVR when PEP1 is NAIS and PEP2 is LKKYR; wherein said GFR-binding compound does not comprise the pair of peptides APTQL:NMVVR when PEP1 is NAIS and PEP2 is LKKYR; wherein said GFR-binding compound does not comprise the pair of peptides APTKL:NMVVK when PEP1 is SATS and PEP2 is LRKHR; wherein said GFR-binding compound does not comprise the pair of peptides VPTKL:EGMSVAE when PEP1 is SPIS and PEP2 is LKYHY; wherein said GFR-binding compound does not comprise the pair of peptides VPTKL:GMAVS when PEP1 is EPIS and PEP2 is KFKYE; and wherein said GFR-binding compound does not comprise the pair of peptides TPTKM:GMVVD when PEP1 is SPIN and PEP2 is YGKIP; and, optionally, wherein the RMSD is 2.45 Å or less.

[0958] In one aspect, the present disclosure provides a GFR-binding compound, wherein said GFR-binding compound is a peptide, a variant or analog thereof, or a peptidomimetic as defined herein, with between 20 and 60 (in particular between 20 and 50, and more particularly, between 20 and 45) amino acids, comprising a peptide with four amino acids (PEP1) or a peptide with eight amino acids (PEP12), a peptide with five amino acids (PEP2), and optionally a pair of peptides selected form the group consisting of PEP3:PEP4, PEP3:PEP6, PEP3:PEP10, PEP5:PEP4, PEP9:PEP4, PEP5:PEP6, PEP5:PEP10, PEP9:PEP6 and PEP9:PEP10; wherein said GFR-binding compound does not comprise the pair of peptides YVPKPXXAPTKL:NMVVRSXGXH when PEP1 is NAIS and PEP2 is LKKYR; wherein said GFR-binding compound does not comprise the pair of peptides TVPKPXXAPTQL:NMVVRAXGXH when PEP1 is NAIS and PEP2 is LKKYR; wherein said GFR-binding compound does not comprise the pair of peptides AVPKAXXAPTKL:NMVVKAXGXH when PEP1 is SATS and PEP2 is LRKHR; wherein said GFR-binding compound does not comprise the pair of peptides KVGKAXXVPTKL:EGMSVAEXGXR when PEP1 is SPIS and PEP2 is LKYHY; wherein said GFR-binding compound does not comprise the pair of peptides KASKAXXVPTKL:GMAVSEXGXR when PEP1 is EPIS and PEP2 is KFKYE; and wherein said GFR-binding compound does not comprise the pair of peptides GSAGPXXTPTKM:GMVVDRXGXS when PEP1 is SPIN and PEP2 is YGKIP; and, optionally, wherein the RMSD is 2.45 Å or less.

[0959] In certain embodiments useful for inducing the conversion of a neoplastic cell into a cell (any cell) of the lung cell lineage, said GFR-binding compound is a synthetic molecule as defined herein in the definition section.

[0960] In certain embodiments useful for inducing the conversion of a neoplastic cell into a cell (any cell) of the lung cell lineage, said GFR-binding compound is a synthetic peptide, or a variant or analog thereof, or a peptidomimetic.

[0961] Muscle Cell Lineage

[0962] Certain embodiments of the invention are particularly useful for inducing the conversion of a neoplastic cell into a cell (any cell) of the muscle cell lineage.

[0963] In certain embodiments useful for inducing the conversion of a neoplastic cell into a cell (any cell) of the muscle cell lineage, PEP1 is RSVK or RPVQ.

[0964] In certain embodiments useful for inducing the conversion of a neoplastic cell into a cell (any cell) of the muscle cell lineage, PEP2 is KEVQV or KKATV.

[0965] In certain embodiments useful for inducing the conversion of a neoplastic cell into a cell (any cell) of the muscle cell lineage, PEP3 is selected from the group consisting of VPQ, VSQ, VPT, SRV and TQV.

[0966] In certain embodiments useful for inducing the conversion of a neoplastic cell into a cell (any cell) of the muscle cell lineage, PEP4 is selected from the group consisting of VRS, VKS, QHN, EHS, EEH and EDH.

[0967] In certain embodiments useful for inducing the conversion of a neoplastic cell into a cell (any cell) of the muscle cell lineage, PEP5 is a peptide of general formula PEP3-AA¹¹-AA¹²; wherein PEP3 is selected from the group consisting of VPQ, VSQ, VPT, SRV and TQV; wherein AA¹¹ is selected from the group consisting of E, K, Q, R, A, D, G and H, in particular A, D, E, H, Q and G; wherein AA¹² is selected from the group consisting of L, M, T, E, Q and H, in particular L, E, H and Q. In one particular example, PEP5 is selected from the group consisting of VPQAL, VSQDL, VPQDL, VPTEE, VPTGQ, SRVHH and TQVQL.

[0968] In certain embodiments useful for inducing the conversion of a neoplastic cell into a cell (any cell) of the muscle cell lineage, PEP6 is a peptide of general formula AA²⁶-AA²⁷-AA²⁸-AA²⁹-PEP4; wherein PEP4 is selected from the group consisting of VRS, VKS, QHN, EHS, EEH and EDH; wherein AA²⁶ is absent or selected from the group consisting of AA^{III} amino acids, preferably is absent; wherein AA²⁷ and AA²⁸ are independently selected from the group consisting of AA^{III} and AA^{V} amino acids, preferably AA²⁷ is selected from the group consisting of M, F, R, T and L, preferably AA²⁸ is selected from the group consisting of I, V, L and E; wherein AA²⁹ is absent or selected from the group consisting of AA^{II} amino acids, preferably absent. In one particular example, PEP6 is selected from the group consisting of MIVRS, MIVKS, MVVKS, FLQHN, LEEHS, RLEEH and TLEDH.

[0969] In certain embodiments useful for inducing the conversion of a neoplastic cell into a cell (any cell) of the muscle cell lineage, PEP7 is an amino acid or a peptide with between two and seven amino acids of general formula AA¹-AA²-AA³-AA⁴-AA⁵-AA⁶-AA⁷; wherein AA¹, AA², AA³, AA⁴, and AA⁵ are independently absent or AA^{I} as defined herein; wherein AA⁶ is absent or selected from the group consisting of S, T, C, E, Q, P and R, preferably C, S, Q, R or E; wherein AA⁷ is absent or is selected from the group consisting of S, T, C, E, Q, P and R, preferably is S, P or C; and wherein at least one of AA¹, AA², AA³, AA⁴, AA⁵, AA⁶ or AA⁷ is not absent. In one particular example, PEP7 is selected from the group consisting of ASAAPXX, ASASPXX, NDEGLEX, SSVKXQP and RNVQXRP.

[0970] In certain embodiments useful for inducing the conversion of a neoplastic cell into a cell (any cell) of the muscle cell lineage, PEP8 is an amino acid or a peptide with between two and six amino acids of general formula AA³³-AA³⁴-AA³⁵-AA³⁶-AA³⁷-AA³⁸; wherein AA³³ is absent or is selected from the group consisting of AA^{I} amino acids at the exception of AA^{VI} amino acids; AA³⁴ is absent or is selected from the group consisting of AA^{III} and AA^{IV} amino acids; wherein AA³⁵ is absent or is selected from the group consisting of AA^{II} amino acids, preferably is S or C; wherein AA³⁶ is absent or is selected from the group consisting of AA^{III} and AA^{IV} amino acids; wherein AA³⁷ is absent or is selected from the group consisting of AA^{II} amino acids, preferably is S or C; wherein AA³⁸ is absent or is selected from the group consisting of AA^{I}; and wherein at least one of AA³³, AA³⁴, AA³⁵, AA³⁶, AA³⁷ or AA³⁸ is not absent. In one particular example, PEP8 is selected from the group consisting of XKXS, KXEXR, QXEXR, LEXAXA and LAXKXE.

[0971] In certain embodiments useful for inducing the conversion of a neoplastic cell into a cell (any cell) of the muscle cell lineage, PEP9 is a peptide of general formula AA¹-AA²-AA³-AA⁴-AA⁵-AA⁶-AA⁷-PEP5; wherein PEP5 is a peptide of formula PEP3-AA¹¹-AA¹²; wherein PEP3 is selected from the group consisting of VPQ, VSQ, VPT, SRV and TQV; wherein AA¹¹ is selected from the group consisting of E, K, Q, R, A, D, G and H, in particular A, D, E, H, Q and G; wherein AA¹² is selected from the group consisting of L, M, T, E, Q and H, in particular L, E, H and Q; wherein AA¹, AA², AA³, AA⁴, and AA⁵ are independently absent or AA^{I} as defined herein; wherein AA⁶ is absent or selected from the group consisting of S, T, C, E, Q, P and R, preferably C, S, Q, R or E; wherein AA⁷ is absent or is selected from the group consisting of S, T, C, E, Q, P and R, preferably is S, P or C. In one particular example, PEP9 is selected from the group consisting of ASAAPXXVPQAL, ASASPXXVSQDL, ASASPXXVPQDL, NDEGLEXVPTEE, NDEGLEXVPTGQ, SSVKXQPSRVHH and RNVQXRPTQVQL.

[0972] In certain embodiments useful for inducing the conversion of a neoplastic cell into a cell (any cell) of the muscle cell lineage, PEP10 is a peptide of general formula PEP6-AA³³-AA³⁴-AA³⁵-AA³⁶-AA³⁷-AA³⁸; wherein PEP6 is a peptide of formula AA²⁶-AA²⁷-AA²⁸-AA²⁹-PEP4; wherein PEP4 is selected from the group consisting of VRS, VKS, QHN, EHS, EEH and EDH; wherein AA²⁶ is absent or selected from the group consisting of AA^{III} amino acids, preferably is absent; wherein AA²⁷ and AA²⁸ are independently selected from the group consisting of AA^{III} and AA^{IV} amino acids, preferably AA²⁷ is selected from the group consisting of M, F, R, T and L, preferably AA²⁸ is selected from the group consisting of I, V, L and E; wherein AA²⁹ is absent or selected from the group consisting of AA^{II} amino acids, preferably absent; wherein AA³³ is absent or is selected from the group consisting of AA^{I} amino acids at the exception of AA^{VI} amino acids; AA³⁴ is absent or is selected from the group consisting of AA^{III} and AA^{IV} amino acids; wherein AA³⁵ is absent or is selected from the group consisting of AA^{II} amino acids, preferably is S or C; wherein AA³⁶ is absent or is selected from the group consisting of AA^{III} and AA^{IV} amino acids; wherein AA³⁷ is absent or is selected from the group consisting of AA^{II} amino acids, preferably is S or C; wherein AA³⁸ is absent or is selected from the group consisting of AA^{I}. In one particular example, PEP10 is selected from the group consisting of MIVRSXKXS, MIVKSXKXS, MVVKSXKXS, FLQHNKXEXR, LEEHSQXEXR, RLEEHLEXAXA and TLEDHLAXKXE.

[0973] In certain embodiments useful for inducing the conversion of a neoplastic cell into a cell (any cell) of the muscle cell lineage, PEP12 is a peptide of general formula PEP1-AA¹⁷-PEP11; wherein AA¹⁷ is selected from the group consisting of G, A, V, L, I, P, F, M, W, T and S (in particular is I or M); wherein PEP1 is RSVK or RPVQ.

[0974] In certain embodiments useful for inducing the conversion of a neoplastic cell into a cell (any cell) of the muscle cell lineage, PEP11 is a peptide with 3 amino acids of general formula AA¹⁸-AA¹⁹-AA²⁰; wherein AA¹⁸ is selected from the group consisting of L, V, Q, A and R, in particular is A or R; wherein AA¹⁹ is selected from the group consisting of AA^{VII} amino acids (in particular is K); wherein AA²⁰ is selected from the group consisting of L, F, Y, K, I, V and M, in particular is V or I. In one particular example, PEP11 is AKV or RKI.

[0975] The definitions of “PEP” pairs, quadruplets, hexaplets and heptuplet e.g. PEP1:PEP2, PEP12:PEP2, or PEP7:PEP5:PEP12:LINKER:PEP2:PEP6:PEP8, useful for inducing the conversion of a neoplastic cell into a cell (any cell) of the muscle cell lineage, are as already defined herein to the extent that PEP1 to PEP12 are particularly useful for these applications. For instances: In certain embodiments useful for inducing the conversion of a neoplastic cell into a cell (any cell) of the muscle cell lineage, the pair PEP1:PEP2 is RSVK:KEVQV or RPVQ:KKATV.

[0976] In certain embodiments, useful for inducing the conversion of a neoplastic cell into a cell (any cell) of the muscle cell lineage, the pair PEP12:PEP2 is RSVK-AA¹⁷-AKV:KEVQV or RPVQ-AA¹⁷-RKI:KKATV; wherein AA¹⁷ is selected from the group consisting of G, A, V, L, I, P, F, M, W, T and S (in particular is I or M).

[0977] In certain embodiments useful for inducing the conversion of a neoplastic cell into a cell (any cell) of the muscle cell lineage, PEP3 is selected from the group consisting of VPQ, VSQ, VPT, SRV and TQV; PEP4 is selected from the group consisting of VRS, VKS, QHN, EHS, EEH and EDH; and wherein the pair PEP3:PEP4 is selected from the group consisting of VPQ:VRS, VSQ:VKS, VPQ:VKS, VPT:QHN, VPT:EHS, SRV:EEH and TQV:EDH.

[0978] In certain embodiments useful for inducing the conversion of a neoplastic cell into a cell (any cell) of the muscle cell lineage, PEP5 is selected from the group consisting of VPQAL, VSQDL, VPQDL, VPTEE, VPTGQ, SRVHH and TQVQL; PEP6 is selected from the group consisting of MIVRS, MIVKS, MVVKS, FLQHN, LEEHS, RLEEH and TLEDH; and wherein the pair PEP5:PEP6 is selected from the group consisting of VPQAL:MIVRS, VSQDL:MIVKS, VPQDL:MVVKS, VPTEE:FLQHN, VPTGQ:LEEHS and SRVHH:RLEEH and TQVQL:TLEDH.

[0979] In certain embodiments useful for inducing the conversion of a neoplastic cell into a cell (any cell) of the muscle cell lineage, PEP7 is selected from the group consisting of ASAAPXX, ASASPXX, NDEGLEX, SSVKXQP and RNVQXRP; wherein PEP8 is selected from the group consisting of XKXS, KXEXR, QXEXR, LEXAXA and LAXKXE; and wherein the pair PEP7:PEP8 is selected from the group consisting of ASAAPXX:XKXS, ASASPXX:XKXS, NDEGLEX:KXEXR, NDEGLEX:QXEXR, SSVKXQP:LEXAXA and RNVQXRP:LAXKXE.

[0980] In certain embodiments useful for inducing the conversion of a neoplastic cell into a cell (any cell) of the muscle cell lineage, PEP9 is selected from the group consisting of ASAAPXXVPQAL, ASASPXXVSQDL, ASASPXXVPQDL, NDEGLEXVPTEE, NDEGLEXVPTGQ, SSVKXQPSRVHH and RNVQXRPTQVQL; PEP10 is selected from the group consisting of MIVRSXKXS, MIVKSXKXS, MVVKSXKXS, FLQHNKXEXR, LEEHSQXEXR, RLEEHLEXAXA and TLEDHLAXKXE; and wherein the pair PEP9:PEP10 is selected from the group consisting of ASAAPXXVPQAL:MIVRSXKXS, ASASPXXVSQDL:MIVKSXKXS, ASASPXXVPQDL:MVVKSXKXS, NDEGLEXVPTEE:FLQHNKXEXR, NDEGLEXVPTGQ:LEEHSQXEXR, SSVKXQPSRVHH:RLEEHLEXAXA and RNVQXRPTQVQL:TLEDHLAXKXE.

[0981] In certain embodiments useful for inducing the conversion of a neoplastic cell into a cell (any cell) of the muscle cell lineage, PEP1 is RSVK or RPVQ; PEP11 is is AKV or RKI; and the pair PEP1:PEP11 is RSVK:AKV or RPVQ:RKI.

[0982] In certain embodiments useful for inducing the conversion of a neoplastic cell into a cell (any cell) of the muscle cell lineage, said GFR-binding compound is a synthetic molecule as defined herein in the definition section.

[0983] In certain embodiments useful for inducing the conversion of a neoplastic cell into a cell (any cell) of the muscle cell lineage, said GFR-binding compound is a synthetic peptide, or a variant or analog thereof, or a peptidomimetic.

[0984] Blood Cell Lineage

[0985] Certain embodiments of the invention are particularly useful for inducing the conversion of a neoplastic cell into a cell (any cell) of the blood cell lineage.

[0986] In certain embodiments useful for inducing the conversion of a neoplastic cell into a cell (any cell) of the blood cell lineage, PEP1 is SNIT.

[0987] In certain embodiments useful for inducing the conversion of a neoplastic cell into a cell (any cell) of the blood cell lineage, PEP2 is IGEMS or LGEMS.

[0988] In certain embodiments useful for inducing the conversion of a neoplastic cell into a cell (any cell) of the blood cell lineage, PEP3 is selected from the group consisting of TPT, VPA, VPT, APT, APV, VPQ, VSQ, SRV and TQV.

[0989] In certain embodiments useful for inducing the conversion of a neoplastic cell into a cell (any cell) of the blood cell lineage, PEP4 is selected from the group consisting of VVD, VVE, VVR, VEE, VRS, VKS, QHN, EHS, EEH and EDH.

[0990] In certain embodiments useful for inducing the conversion of a neoplastic cell into a cell (any cell) of the blood cell lineage, PEP5 is a peptide of general formula PEP3-AA¹¹-AA¹²; wherein PEP3 is selected from the group consisting of TPT, VPA, VPT, APT, APV, VPQ, VSQ, SRV and TQV; wherein AA¹¹ is selected from the group consisting of E, K, Q, R, A, D, G and H; wherein AA¹² is selected from the group consisting of L, M, T, E, Q and H. In one particular example, PEP5 is selected from the group consisting of TPTKM, VPARL, VPTRL, APTKL, APVKT, VPQAL, VSQDL, VPQDL, VPTEE, VPTGQ, SRVHH and TQVQL.

[0991] In certain embodiments useful for inducing the conversion of a neoplastic cell into a cell (any cell) of the blood cell lineage, PEP6 is a peptide of general formula AA²⁶-AA²⁷-AA²⁸-AA²⁹-PEP4; wherein PEP4 is selected from the group consisting of VVD, VVE, VVR, VEE, VRS, VKS, QHN, EHS, EEH and EDH; wherein AA²⁶ is absent or selected from the group consisting of AA^{III} amino acids, preferably is absent; wherein AA²⁷ and AA²⁸ are independently selected from the group consisting of AA^{III} and AA^{IV} amino acids, preferably AA²⁷ is selected from the group consisting of G, D, N, M, R, F, L and T, preferably AA²⁸ is selected from the group consisting of M, I, V, E and L; wherein AA²⁹ is absent or selected from the group consisting of AA^{II} amino acids, preferably is absent. In one particular example, PEP6 is selected from the group consisting of GMVVD, DMVVE, NMVVR, MIVEE, MIVRS, MIVKS, MVVKS, FLQHN, LEEHS, RLEEH and TLEDH.

[0992] In certain embodiments useful for inducing the conversion of a neoplastic cell into a cell (any cell) of the blood cell lineage, PEP7 is an amino acid or a peptide with between two and seven amino acids of general formula AA¹-AA²-AA³-AA⁴-AA⁵-AA⁶-AA⁷; wherein AA¹, AA², AA³, AA⁴, and AA⁵ are independently absent or AA^{I} as defined herein; wherein AA⁶ is absent or selected from the group consisting of S, T, C, E, Q, P and R, preferably is selected from the group consisting of S, C, E, Q and R; wherein AA⁷ is absent or is selected from the group consisting of S, T, C, E, Q, P and R, preferably is selected from the group consisting of C, S and P; and wherein at least one of AA¹, AA², AA³, AA⁴, AA⁵, AA⁶ or AA⁷ is not absent. In one particular example, PEP7 is selected from the group consisting of GSAGPXX, AAPASXX, STPPTXX, HVPKPXX, RVPSTXX, ASAAPXX, ASASPXX, NDEGLEX, SSVKXQP and RNVQXRP.

[0993] In certain embodiments useful for inducing the conversion of a neoplastic cell into a cell (any cell) of the blood cell lineage, PEP8 is an amino acid or a peptide with between two and six amino acids of general formula AA³³-AA³⁴-AA³⁵-AA³⁶-AA³⁷-AA³⁸; wherein AA³³ is absent or is selected from the group consisting of AA^{I} amino acids at the exception of AA^{VI} amino acids; AA³⁴ is absent or is selected from the group consisting of AA^{II} and AA^{IV} amino acids; wherein AA³⁵ is absent or is selected from the group consisting of AA^{II} amino acids, preferably is S or C; wherein AA³⁶ is absent or is selected from the group consisting of AA^{III} and AA^{IV} amino acids; wherein AA³⁷ is absent or is selected from the group consisting of AA^{II} amino acids, preferably is S or C; wherein AA³⁸ is absent or is selected from the group consisting of AA^{I}; and wherein at least one of AA³³, AA³⁴, AA³⁵, AA³⁶, AA³⁷ or AA³⁸ is not absent. In one particular example, PEP8 is selected from the group consisting of RXGXS, AXGXR, SXGXR, SXGXH, XGXL, XKXS, KXEXR, QXEXR, LEXAXA and LAXKXE.

[0994] In certain embodiments useful for inducing the conversion of a neoplastic cell into a cell (any cell) of the blood cell lineage, PEP9 is a peptide of general formula AA¹-AA²-AA³-AA⁴-AA⁵-AA⁶-AA⁷-PEP5; wherein PEP5 is a peptide of formula PEP3-AA¹¹-AA¹²; wherein PEP3 is selected from the group consisting of TPT, VPA, VPT, APT, APV, VPQ, VSQ, SRV and TQV; wherein AA¹¹ is selected from the group consisting of E, K, Q, R, A, D, G and H; wherein AA¹² is selected from the group consisting of L, M, T, E, Q and H; wherein AA¹, AA², AA³, AA⁴, and AA⁵ are independently absent or AA^{I} as defined herein; wherein AA⁶ is absent or selected from the group consisting of S, T, C, E, Q, P and R, preferably is selected from the group consisting of S, C, E, Q and R; wherein AA⁷ is absent or is selected from the group consisting of S, T, C, E, Q, P and R, preferably is selected from the group consisting of C, S and P. In one particular example, PEP9 is selected from the group consisting of GSAGPXXTPTKM, AAPASXXVPARL, STPPTXXVPTRL, HVPKPXXAPTKL, RVPSTXXAPVKT, ASAAPXXVPQAL, ASASPXXVSQDL, ASASPXXVPQDL, NDEGLEXVPTEE, NDEGLEXVPTGQ, SSVKXQPSRVHH and RNVQXRPTQVQL.

[0995] In certain embodiments useful for inducing the conversion of a neoplastic cell into a cell (any cell) of the blood cell lineage, PEP10 is a peptide of general formula PEP6-AA³³-AA³⁴-AA³⁵-AA³⁶-AA³⁷-AA³⁸; wherein PEP6 is a peptide of formula AA²⁶-AA²⁷-AA²⁸-AA²⁹-PEP4; wherein PEP4 is selected from the group consisting of VVD, VVE, VVR, VEE, VRS, VKS, QHN, EHS, EEH and EDH; wherein AA²⁶ is absent or selected from the group consisting of AA^{III} amino acids, preferably is absent; wherein AA²⁷ and AA²⁸ are independently selected from the group consisting of AA^{III} and AA^{V} amino acids, preferably AA²⁷ is selected from the group consisting of G, D, N, M, R, F, L and T, preferably AA²⁸ is selected from the group consisting of M, I, V, E and L; wherein AA²⁹ is absent or selected from the group consisting of AA^{II} amino acids, preferably is absent; wherein AA³³ is absent or is selected from the group consisting of AA^{I} amino acids at the exception of AA^{VI} amino acids; AA³⁴ is absent or is selected from the group consisting of AA^{III} and AA^{IV} amino acids; wherein AA³⁵ is absent or is selected from the group consisting of AA^{II} amino acids, preferably is S or C; wherein AA³⁶ is absent or is selected from the group consisting of AA^{III} and AA^{IV} amino acids; wherein AA³⁷ is absent or is selected from the group consisting of AA^{II} amino acids, preferably is S or C; wherein AA³⁸ is absent or is selected from the group consisting of AA^{I}. In one particular example, PEP10 is selected from the group consisting of GMVVDRXGXS, DMVVEAXGXR, DMVVESXGXR, NMVVRSXGXH, MIVEEXGXL, MIVRSXKXS, MIVKSXKXS, MVVKSXKXS, FLQHNKXEXR, LEEHSQXEXR, RLEEHLEXAXA and TLEDHLAXKXE.

[0996] In certain embodiments useful for inducing the conversion of a neoplastic cell into a cell (any cell) of the blood cell lineage, PEP12 is a peptide of general formula PEP1-AA¹⁷-PEP11; wherein AA¹⁷ is selected from the group consisting of G, A, V, L, I, P, F, M, W, T and S (in particular is selected from the group consisting of M, I, V and T); wherein PEP1 is SNIT.

[0997] In certain embodiments useful for inducing the conversion of a neoplastic cell into a cell (any cell) of the blood cell lineage, PEP11 is a peptide with 3 amino acids of general formula AA¹⁸-AA¹⁹-AA²⁰; wherein AA¹⁸ is selected from the group consisting of L, V, Q, A and R, in particular is Q; wherein AA¹⁹ is selected from the group consisting of F, W, H, I and Y (in particular is I); wherein AA²⁰ is selected from the group consisting of L, F, Y, K, I, V and M, in particular is M. In one particular example, PEP11 is QIM.

[0998] In certain embodiments useful for inducing the conversion of a neoplastic cell into a cell (any cell) of the blood cell lineage, the pair PEP1:PEP2 is SNIT:IGEMS or SNIT:LGEMS.

[0999] In certain embodiments useful for inducing the conversion of a neoplastic cell into a cell (any cell) of the blood cell lineage, the pair PEP12:PEP2 is SNIT-AA¹⁷-QIM:IGEMS or SNIT-AA¹⁷-QIM:LGEMS; wherein AA¹⁷ is selected from the group consisting of G, A, V, L, I, P, F, M, W, T and S (in particular is selected from the group consisting of M, I, V and T).

[1000] The definitions of “PEP” pairs, quadruplets, hexaplets and heptuplet e.g. PEP1:PEP2, PEP12:PEP2, or PEP7:PEP5:PEP12:LINKER:PEP2:PEP6:PEP8, useful for inducing the conversion of a neoplastic cell into a cell (any cell) of the blood cell lineage, are as already defined herein to the extent that PEP1 to PEP12 are particularly useful for these applications. For instances: In certain embodiments useful for inducing the conversion of a neoplastic cell into a cell (any cell) of the blood cell lineage, PEP3 is selected from the group consisting of TPT, VPA, VPT, APT, APV, VPQ, VSQ, SRV and TQV; PEP4 is selected from the group consisting of VVD, VVE, VVR, VEE, VRS, VKS, QHN, EHS, EEH and EDH; and wherein the pair PEP3:PEP4 is selected from the consisting of TPT:VVD, VPA:VVE, VPT:VVE, APT:VVR, APV:VEE, VPQ:VRS, VSQ:VKS, VPQ:VKS, VPT:QHN, VPT:EHS, SRV:EEH and TQV:EDH.

[1001] In certain embodiments useful for inducing the conversion of a neoplastic cell into a cell (any cell) of the blood cell lineage, PEP5 is selected from the group consisting of TPTKM, VPARL, VPTRL, APTKL, APVKT, VPQAL, VSQDL, VPQDL, VPTEE, VPTGQ, SRVHH and TQVQL; PEP6 is selected from the group consisting of GMVVD, DMVVE, NMVVR, MIVEE, MIVRS, MIVKS, MVVKS, FLQHN, LEEHS, RLEEH and TLEDH; and wherein the pair PEP5:PEP6 is selected from the group consisting of TPTKM:GMVVD, VPARL:DMVVE, VPTRL:DMVVE, APTKL:NMVVR, APVKT:MIVEE, VPQAL:MIVRS, VSQDL:MIVKS, VPQDL:MVVKS, VPTEE:FLQHN, VPTGQ:LEEHS, SRVHH:RLEEH and TQVQL:TLEDH.

[1002] In certain embodiments useful for inducing the conversion of a neoplastic cell into a cell (any cell) of the blood cell lineage, PEP7 is selected from the group consisting of GSAGPXX, AAPASXX, STPPTXX, HVPKPXX, RVPSTXX, ASAAPXX, ASASPXX, NDEGLEX, SSVKXQP and RNVQXRP; wherein PEP8 is selected from the group consisting of RXGXS, AXGXR, SXGXR, SXGXH, XGXL, XKXS, KXEXR, QXEXR, LEXAXA and LAXKXE; and wherein the pair PEP7:PEP8 is selected from the group consisting of GSAGPXX:RXGXS, AAPASXX:AXGXR, STPPTXX:SXGXR, HVPKPXX:SXGXH, RVPSTXX:XGXL, ASAAPXX:XKXS, ASASPXX:XKXS, NDEGLEX:KXEXR, NDEGLEX:QXEXR, SSVKXQP:LEXAXA and RNVQXRP:LAXKXE.

[1003] In certain embodiments useful for inducing the conversion of a neoplastic cell into a cell (any cell) of the blood cell lineage, PEP9 is selected from the group consisting of GSAGPXXTPTKM, AAPASXXVPARL, STPPTXXVPTRL, HVPKPXXAPTKL, RVPSTXXAPVKT, ASAAPXXVPQAL, ASASPXXVSQDL, ASASPXXVPQDL, NDEGLEXVPTEE, NDEGLEXVPTGQ, SSVKXQPSRVHH and RNVQXRPTQVQL; PEP10 is selected from the group consisting of GMVVDRXGXS, DMVVEAXGXR, DMVVESXGXR, NMVVRSXGXH, MIVEEXGXL, MIVRSXKXS, MIVKSXKXS, MVVKSXKXS, FLQHNKXEXR, LEEHSQXEXR, RLEEHLEXAXA and TLEDHLAXKXE; and wherein the pair PEP9:PEP10 is selected from the group consisting of GSAGPXXTPTKM:GMVVDRXGXS, AAPASXXVPARL:DMVVEAXGXR, STPPTXXVPTRL:DMVVESXGXR, HVPKPXXAPTKL:NMVVRSXGXH, RVPSTXXAPVKT:MIVEEXGXL, ASAAPXXVPQAL:MIVRSXKXS, ASASPXXVSQDL:MIVKSXKXS, ASASPXXVPQDL:MVVKSXKXS, NDEGLEXVPTEE:FLQHNKXEXR, NDEGLEXVPTGQ:LEEHSQXEXR, SSVKXQPSRVHH:RLEEHLEXAXA and RNVQXRPTQVQL:TLEDHLAXKXE.

[1004] In certain embodiments useful for inducing the conversion of a neoplastic cell into a cell (any cell) of the blood cell lineage, PEP1 is SNIT and PEP11 is QIM.

[1005] In one aspect, the present disclosure provides a GFR-binding compound, wherein said GFR-binding compound is a peptide, a variant or analog thereof, or a peptidomimetic as defined herein, with between 20 and 60 (in particular between 20 and 50, and more particularly, between 20 and 45) amino acids, comprising a peptide with four amino acids (PEP1) or a peptide with eight amino acids (PEP12), a peptide with five amino acids (PEP2); optionally a pair of peptides selected form the group consisting of PEP3:PEP4, PEP3:PEP6, PEP3:PEP10, PEP5:PEP4, PEP9:PEP4, PEP5:PEP6, PEP5:PEP10, PEP9:PEP6 and PEP9:PEP10; and, optionally, wherein the RMSD is 2.45 Å or less.

[1006] In certain embodiments useful for inducing the conversion of a neoplastic cell into a cell (any cell) of the blood cell lineage, said GFR-binding compound is a synthetic molecule as defined herein in the definition section.

[1007] In certain embodiments useful for inducing the conversion of a neoplastic cell into a cell (any cell) of the blood cell lineage, said GFR-binding compound is a synthetic peptide, or a variant or analog thereof, or a peptidomimetic.

[1008] Adipocyte Cell Lineage

[1009] Certain embodiments of the invention are particularly useful for inducing the conversion of a neoplastic cell into a cell (any cell) of the adipocyte lineage.

[1010] In certain embodiments useful for inducing the conversion of a neoplastic cell into a cell (any cell) of the adipocyte lineage, PEP1 is SAIS or NAIS.

[1011] In certain embodiments useful for inducing the conversion of a neoplastic cell into a cell (any cell) of the adipocyte lineage, PEP2 is LKNYQ or LKKYR.

[1012] In certain embodiments useful for inducing the conversion of a neoplastic cell into a cell (any cell) of the adipocyte lineage, PEP3 is selected from the group consisting of VPT, VPE, APT, TPT, VPA, APV, VPQ and VSQ.

[1013] In certain embodiments useful for inducing the conversion of a neoplastic cell into a cell (any cell) of the adipocyte lineage, PEP4 is selected from the group consisting of VVE, TVE, VVR, VVK, VAE, AVS, VVD, VEE, VRS and VKS.

[1014] In certain embodiments useful for inducing the conversion of a neoplastic cell into a cell (any cell) of the adipocyte lineage, PEP5 is a peptide of general formula PEP3-AA¹¹-AA¹²; wherein PEP3 is selected from the group consisting of VPT, VPE, APT, TPT, VPA, APV, VPQ and VSQ; wherein AA¹¹ is selected from the group consisting of E, K, Q, R, A, D, G and H, in particular is selected from the group consisting of E, K, Q, R, A and D; wherein AA¹² is selected from the group consisting of L, M, T, E, Q and H, in particular selected from the group consisting of L, M and T. In one particular example, PEP5 is selected from the group consisting of VPTEL, VPEKM, APTKL, APTQL, VPTKL, TPTKM, VPARL, VPTRL, APVKT, VPQAL, VSQDL and VPQDL.

[1015] In certain embodiments useful for inducing the conversion of a neoplastic cell into a cell (any cell) of the adipocyte lineage, PEP6 is a peptide of general formula AA²⁶-AA²⁷-AA²⁸-AA²⁹-PEP4; wherein PEP4 is selected from the group consisting of VVE, TVE, VVR, VVK, VAE, AVS, VVD, VEE, VRS and VKS; wherein AA²⁶ is absent or selected from the group consisting of AA^{III} amino acids, preferably is absent or E; wherein AA²⁷ and AA²⁸ are independently selected from the group consisting of AA^{III} and AA^{V} amino acids, preferably AA²⁷ is selected from the group consisting of D, E, N, G and M, preferably AA²⁸ is selected from the group consisting of M, I and V; wherein AA²⁹ is absent or selected from the group consisting of AA^{II} amino acids, preferably absent or S. In one particular example, PEP6 is selected from the group consisting of DMVVE, NMTVE, EMVVE, NMVVR, NMVVK, EGMSVAE, GMAVS, GMVVD, DMVVE, MIVEE, MIVRS, MIVKS and MVVKS.

[1016] In certain embodiments useful for inducing the conversion of a neoplastic cell into a cell (any cell) of the adipocyte lineage, PEP7 is an amino acid or a peptide with between two and seven amino acids of general formula AA¹-AA²-AA³-AA⁴-AA⁵-AA⁶-AA⁷; wherein AA¹, AA², AA³, AA⁴, and AA⁵ are independently absent or AA^{I} as defined herein; wherein AA⁶ is absent or selected from the group consisting of S, T, C, E, Q, P and R, preferably is selected from the group consisting of C, S and T; wherein AA⁷ is absent or is selected from the group consisting of S, T, C, E, Q, P and R, preferably is C or S; and wherein at least one of AA¹, AA², AA³, AA⁴, AA⁵, AA⁶ or AA⁷ is not absent. In one particular example, PEP7 is selected from the group consisting of KIPKAXX, GIPEPXX, SIPKAXX, HVTKPTX, YVPKPXX, TVPKPXX, AVPKAXX, KVGKAXX, KASKAXX, GSAGPXX, AAPASXX, STPPTXX, HVPKPXX, RVPSTXX, ASAAPXX and ASASPXX.

[1017] In certain embodiments useful for inducing the conversion of a neoplastic cell into a cell (any cell) of the adipocyte lineage, PEP8 is an amino acid or a peptide with between two and six amino acids of general formula AA³³-AA³⁴-AA³⁵-AA³⁶-AA³⁷-AA³⁸; wherein AA³³ is absent or is selected from the group consisting of AA^{I} amino acids at the exception of AA^{VI} amino acids; AA³⁴ is absent or is selected from the group consisting of AA^{III} and AA^{IV} amino acids; wherein AA³⁵ is absent or is selected from the group consisting of AA^{II} amino acids, preferably is S or C; wherein AA³⁶ is absent or is selected from the group consisting of AA^{III} and AA^{IV} amino acids; wherein AA³⁷ is absent or is selected from the group consisting of AA^{II} amino acids, preferably is S or C; wherein AA³⁸ is absent or is selected from the group consisting of AA^{I}; and wherein at least one of AA³³, AA³⁴, AA³⁵, AA³⁶, AA³⁷ or AA³⁸ is not absent. In one particular example, PEP8 is selected from the group consisting of GXGXR, SXAXR, SXGXH, AXGXH, XGXR, EXGXR, RXGXS, AXGXR, SXGXR, XGXL and XKXS.

[1018] In certain embodiments useful for inducing the conversion of a neoplastic cell into a cell (any cell) of the adipocyte lineage, PEP9 is a peptide of general formula AA¹-AA²-AA³-AA⁴-AA⁵-AA⁶-AA⁷-PEP5; wherein PEP5 is a peptide of formula PEP3-AA¹¹-AA¹²; wherein PEP3 is selected from the group consisting of VPT, VPE, APT, TPT, VPA, APV, VPQ and VSQ; wherein AA¹¹ is selected from the group consisting of E, K, Q, R, A, D, G and H, in particular E, K, Q, R, A and D; wherein AA¹² is selected from the group consisting of L, M, T, E, Q and H, in particular selected from the group consisting of L, M and T; wherein AA¹, AA², AA³, AA⁴, and AA⁵ are independently absent or AA¹ as defined herein; wherein AA⁶ is absent or selected from the group consisting of S, T, C, E, Q, P and R, preferably is selected from the group consisting of C, S and T; wherein AA⁷ is selected from the group consisting of S, T, C, E, Q, P and R, preferably is C or S. In one particular example, PEP9 is selected from the group consisting of KIPKAXXVPTEL, GIPEPXXVPEKM, SIPKAXXVPTEL, HVTKPTXAPTKL, YVPKPXXAPTKL, TVPKPXXAPTQL, AVPKAXXAPTKL, KVGKAXXVPTKL, KASKAXXVPTKL, GSAGPXXTPTKM, AAPASXXVPARL, STPPTXXVPTRL, HVPKPXXAPTKL, RVPSTXXAPVKT, ASAAPXXVPQAL, ASASPXXVSQDL and ASASPXXVPQDL.

[1019] In certain embodiments useful for inducing the conversion of a neoplastic cell into a cell (any cell) of the adipocyte lineage, PEP10 is a peptide of general formula PEP6-AA³³-AA³⁴-AA³⁵-AA³⁶-AA³⁷-AA³⁸; wherein PEP6 is a peptide of formula AA²⁶-AA²⁷-AA²⁸-AA²⁹-PEP4; wherein PEP4 is selected from the group consisting of VVE, TVE, VVR, VVK, VAE, AVS, VVD, VEE, VRS and VKS; wherein AA²⁶ is absent or selected from the group consisting of AA^{III} amino acids, preferably is absent or E; wherein AA²⁷ and AA²⁸ are independently selected from the group consisting of AA^{III} and AA^{IV} amino acids, preferably AA²⁷ is selected from the group consisting of D, E, N, G and M, preferably AA²⁸ is selected from the group consisting of M, I and V; wherein AA²⁹ is absent or selected from the group consisting of AA^{II} amino acids, preferably absent or S; wherein AA³³ is absent or is selected from the group consisting of AA^{I} amino acids at the exception of AA^{VI} amino acids; AA³⁴ is absent or is selected from the group consisting of AA^{III} and AA^{IV} amino acids; wherein AA³⁵ is absent or is selected from the group consisting of AA^{II} amino acids, preferably is S or C; wherein AA³⁶ is absent or is selected from the group consisting of AA^{III} and AA^{IV} amino acids; wherein AA³⁷ is absent or is selected from the group consisting of AA^{II} amino acids, preferably is S or C; wherein AA³⁸ is absent or is selected from the group consisting of AA^{I}. In one particular example, PEP10 is selected from the group consisting of DMVVEGXGXR, NMTVESXAXR, EMVVEGXGXR, NMVVRSXGXH, NMVVRSXGXH, NMVVRAXGXH, NMVVKAXGXH, EGMSVAEXGXR, GMAVSEXGXR, GMVVDRXGXS, DMVVEAXGXR, DMVVESXGXR, NMVVRSXGXH, MIVEEXGXL, MIVRSXKXS, MIVKSXKXS and MVVKSXKXS.

[1020] In certain embodiments useful for inducing the conversion of a neoplastic cell into a cell (any cell) of the adipocyte lineage, PEP12 is a peptide of general formula PEP1-AA¹⁷-PEP11; wherein AA¹⁷ is selected from the group consisting of G, A, V, L, I, P, F, M, W, T and S (in particular is selected from the group consisting of M, V and T); wherein PEP1 is SAIS or NAIS.

[1021] In certain embodiments useful for inducing the conversion of a neoplastic cell into a cell (any cell) of the adipocyte lineage, PEP11 is a peptide with 3 amino acids of general formula AA¹⁸-AA¹⁹-AA²⁰; wherein AA¹⁸ is selected from the group consisting of L, V, Q, A and R, in particular is L; wherein AA¹⁹ is selected from the group consisting of F, W, H and Y (in particular is a polar aromatic amino acid such as Y); wherein AA²⁰ is selected from the group consisting of L, F, Y, K, I, V and M, in particular is L or F. In one particular example, PEP11 is LYL or LYF.

[1022] The definitions of “PEP” pairs, quadruplets, hexaplets and heptuplet e.g. PEP1:PEP2, PEP12:PEP2, or PEP7:PEP5:PEP12:LINKER:PEP2:PEP6:PEP8, useful for inducing the conversion of a neoplastic cell into a cell (any cell) of the adipocyte lineage, are as already defined herein to the extent that PEP1 to PEP12 are particularly useful for these applications. For instances: In certain embodiments useful for inducing the conversion of a neoplastic cell into a cell (any cell) of the adipocyte lineage, the pair PEP1:PEP2 is SAIS:LKNYQ or NAIS:LKKYR.

[1023] In certain embodiments useful for inducing the conversion of a neoplastic cell into a cell (any cell) of the adipocyte lineage, the pair PEP12:PEP2 is SAIS-AA¹⁷-LYL:LKNYQ or NAIS-AA¹⁷-LYF:LKKYR; wherein AA¹⁷ is selected from the group consisting of G, A, V, L, I, P, F, M, W, T and S (in particular is selected from the group consisting of M, V and T).

[1024] In certain embodiments useful for inducing the conversion of a neoplastic cell into a cell (any cell) of the adipocyte lineage, PEP3 is selected from the group consisting of VPT, VPE, APT, TPT, VPA, APV, VPQ and VSQ; PEP4 is selected from the group consisting of VVE, TVE, VVR, VVK, VAE, AVS, VVD, VEE, VRS and VKS; and wherein the pair PEP3:PEP4 is selected from the group consisting of VPT:VVE, VPE:TVE, APT:VVR, APT:VVK, VPT:VAE, VPT:AVS, TPT:VVD, VPA:VVE, APV:VEE, VPQ:VRS, VSQ:VKS and VPQ:VKS.

[1025] In certain embodiments useful for inducing the conversion of a neoplastic cell into a cell (any cell) of the adipocyte lineage, PEP5 is selected from the group consisting of VPTEL, VPEKM, APTKL, APTQL, VPTKL, TPTKM, VPARL, VPTRL, APVKT, VPQAL, VSQDL and VPQDL; PEP6 is selected from the group consisting of DMVVE, NMTVE, EMVVE, NMVVR, NMVVK, EGMSVAE, GMAVS, GMVVD, DMVVE, MIVEE, MIVRS, MIVKS and MVVKS; and wherein the pair PEP5:PEP6 is selected from the group consisting of VPTEL:DMVVE, VPEKM:NMTVE, VPTEL:EMVVE, APTKL:NMVVR, APTQL:NMVVR, APTKL:NMVVK, VPTKL:EGMSVAE, VPTKL:GMAVS, TPTKM:GMVVD, VPARL:DMVVE, VPTRL:DMVVE, APVKT:MIVEE, VPQAL:MIVRS, VSQDL:MIVKS and VPQDL:MVVKS.

[1026] In certain embodiments useful for inducing the conversion of a neoplastic cell into a cell (any cell) of the adipocyte lineage, PEP7 is selected from the group consisting of KIPKAXX, GIPEPXX, SIPKAXX, HVTKPTX, YVPKPXX, TVPKPXX, AVPKAXX, KVGKAXX, KASKAXX, GSAGPXX, AAPASXX, STPPTXX, HVPKPXX, RVPSTXX, ASAAPXX and ASASPXX; wherein PEP8 is selected from the group consisting of GXGXR, SXAXR, SXGXH, AXGXH, XGXR, EXGXR, RXGXS, AXGXR, SXGXR, XGXL and XKXS; and wherein the pair PEP7:PEP8 is selected from the group consisting of KIPKAXX:GXGXR, GIPEPXX:SXAXR, SIPKAXX:GXGXR, HVTKPTX:SXGXH, YVPKPXX:SXGXH, TVPKPXX:AXGXH, AVPKAXX:AXGXH, KVGKAXX:XGXR, KASKAXX:EXGXR, GSAGPXX:RXGXS, AAPASXX:AXGXR, STPPTXX:SXGXR, HVPKPXX:SXGXH, RVPSTXX:XGXL, ASAAPXX:XKXS and ASASPXX:XKXS.

[1027] In certain embodiments useful for inducing the conversion of a neoplastic cell into a cell (any cell) of the adipocyte lineage, PEP9 is selected from the group consisting of KIPKAXXVPTEL, GIPEPXXVPEKM, SIPKAXXVPTEL, HVTKPTXAPTKL, YVPKPXXAPTKL, TVPKPXXAPTQL, AVPKAXXAPTKL, KVGKAXXVPTKL, KASKAXXVPTKL, GSAGPXXTPTKM, AAPASXXVPARL, STPPTXXVPTRL, HVPKPXXAPTKL, RVPSTXXAPVKT, ASAAPXXVPQAL, ASASPXXVSQDL and ASASPXXVPQDL; PEP10 is selected from the group consisting of DMVVEGXGXR, NMTVESXAXR, EMVVEGXGXR, NMVVRSXGXH, NMVVRSXGXH, NMVVRAXGXH, NMVVKAXGXH, EGMSVAEXGXR, GMAVSEXGXR, GMVVDRXGXS, DMVVEAXGXR, DMVVESXGXR, NMVVRSXGXH, MIVEEXGXL, MIVRSXKXS, MIVKSXKXS and MVVKSXKXS; and wherein the pair PEP9:PEP10 is selected from the group consisting of KIPKAXXVPTEL:DMVVEGXGXR, GIPEPXXVPEKM:NMTVESXAXR, SIPKAXXVPTEL:EMVVEGXGXR, HVTKPTXAPTKL:NMVVRSXGXH, YVPKPXXAPTKL:NMVVRSXGXH, TVPKPXXAPTQL:NMVVRAXGXH, AVPKAXXAPTKL:NMVVKAXGXH, KVGKAXXVPTKL:EGMSVAEXGXR, KASKAXXVPTKL:GMAVSEXGXR, GSAGPXXTPTKM:GMVVDRXGXS, AAPASXXVPARL:DMVVEAXGXR, STPPTXXVPTRL:DMVVESXGXR, HVPKPXXAPTKL:NMVVRSXGXH, RVPSTXXAPVKT:MIVEEXGXL, ASAAPXXVPQAL:MIVRSXKXS, ASASPXXVSQDL:MIVKSXKXS and ASASPXXVPQDL:MVVKSXKXS.

[1028] In certain embodiments useful for inducing the conversion of a neoplastic cell into a cell (any cell) of the adipocyte lineage, PEP5 is selected from the group consisting of VPTEL, VPEKM, APTKL, APTQL, VPTKL, TPTKM, VPARL, VPTRL, APVKT, VPQAL, VSQDL and VPQDL; PEP6 is selected from the group consisting of DMVVE, NMTVE, EMVVE, NMVVR, NMVVK, EGMSVAE, GMAVS, GMVVD, DMVVE, MIVEE, MIVRS, MIVKS and MVVKS; and wherein the pair PEP5:PEP6 is selected from the group consisting of VPTEL:DMVVE, VPEKM:NMTVE, VPTEL:EMVVE, APTKL:NMVVR, APTQL:NMVVR, APTKL:NMVVK, VPTKL:EGMSVAE, VPTKL:GMAVS, TPTKM:GMVVD, VPARL:DMVVE, VPTRL:DMVVE, APVKT:MIVEE, VPQAL:MIVRS, VSQDL:MIVKS and VPQDL:MVVKS; wherein the pair PEP5:PEP6 is not VPTEL:DMVVE when PEP1 is SAIS and PEP2 is LKNYQ; wherein the pair PEP5:PEP6 is not VPTEL:EMVVE when PEP1 is SAIS and PEP2 is LKNYQ; wherein the pair PEP5:PEP6 is not APTQL:NMVVR when PEP1 is NAIS and PEP2 is LKKYR; and wherein the pair PEP5:PEP6 is not APTKL:NMVVR when PEP1 is NAIS and PEP2 is LKKYR.

[1029] In certain embodiments useful for inducing the conversion of a neoplastic cell into a cell (any cell) of the adipocyte lineage, PEP9 is selected from the group consisting of KIPKAXXVPTEL, GIPEPXXVPEKM, SIPKAXXVPTEL, HVTKPTXAPTKL, YVPKPXXAPTKL, TVPKPXXAPTQL, AVPKAXXAPTKL, KVGKAXXVPTKL, KASKAXXVPTKL, GSAGPXXTPTKM, AAPASXXVPARL, STPPTXXVPTRL, HVPKPXXAPTKL, RVPSTXXAPVKT, ASAAPXXVPQAL, ASASPXXVSQDL and ASASPXXVPQDL; PEP10 is selected from the group consisting of DMVVEGXGXR, NMTVESXAXR, EMVVEGXGXR, NMVVRSXGXH, NMVVRSXGXH, NMVVRAXGXH, NMVVKAXGXH, EGMSVAEXGXR, GMAVSEXGXR, GMVVDRXGXS, DMVVEAXGXR, DMVVESXGXR, NMVVRSXGXH, MIVEEXGXL, MIVRSXKXS, MIVKSXKXS and MVVKSXKXS; and wherein the pair PEP9:PEP10 is selected from the group consisting of KIPKAXXVPTEL:DMVVEGXGXR, GIPEPXXVPEKM:NMTVESXAXR, SIPKAXXVPTEL:EMVVEGXGXR, HVTKPTXAPTKL:NMVVRSXGXH, YVPKPXXAPTKL:NMVVRSXGXH, TVPKPXXAPTQL:NMVVRAXGXH, AVPKAXXAPTKL:NMVVKAXGXH, KVGKAXXVPTKL:EGMSVAEXGXR, KASKAXXVPTKL:GMAVSEXGXR, GSAGPXXTPTKM:GMVVDRXGXS, AAPASXXVPARL:DMVVEAXGXR, STPPTXXVPTRL:DMVVESXGXR, HVPKPXXAPTKL:NMVVRSXGXH, RVPSTXXAPVKT:MIVEEXGXL, ASAAPXXVPQAL:MIVRSXKXS, ASASPXXVSQDL:MIVKSXKXS and ASASPXXVPQDL:MVVKSXKXS; wherein the pair PEP9:PEP10 is not KIPKAXXVPTEL:DMVVEGXGXR when PEP1 is SAIS and PEP2 is LKNYQ; wherein the pair PEP9:PEP10 is not SIPKAXXVPTEL:EMVVEGXGXR when PEP1 is SAIS and PEP2 is LKNYQ; wherein the pair PEP9:PEP10 is not HVTKPTXAPTKL:NMVVRSXGXH when PEP1 is NAIS and PEP2 is LKKYR; wherein the pair PEP9:PEP10 is not YVPKPXXAPTKL:NMVVRSXGXH when PEP1 is NAIS and PEP2 is LKKYR; wherein the pair PEP9:PEP10 is not TVPKPXXAPTQL:NMVVRAXGXH when PEP1 is NAIS and PEP2 is LKKYR; and wherein the pair PEP9:PEP10 is not HVPKPXXAPTKL:NMVVRSXGXH when PEP1 is NAIS and PEP2 is LKKYR.

[1030] In certain embodiments useful for inducing the conversion of a neoplastic cell into a cell (any cell) of the adipocyte lineage, PEP1 is SAIS or NAIS; PEP11 is LYL or LYF; and the pair PEP1:PEP11 is SAIS:LYL or NAIS:LYF.

[1031] In one aspect, the present disclosure provides a GFR-binding compound, wherein said GFR-binding compound is a peptide, a variant or analog thereof, or a peptidomimetic as defined herein, with between 20 and 60 (in particular between 20 and 50, and more particularly, between 20 and 45) amino acids, comprising a peptide with four amino acids (PEP1) or a peptide with eight amino acids (PEP12), a peptide with five amino acids (PEP2), and optionally a pair of peptides selected form the group consisting of PEP3:PEP4, PEP3:PEP6, PEP3:PEP10, PEP5:PEP4, PEP9:PEP4, PEP5:PEP6, PEP5:PEP10, PEP9:PEP6 and PEP9:PEP10; wherein said GFR-binding compound does not comprise the pair of peptides VPTEL:DMVVE when PEP1 is SAIS and PEP2 is LKNYQ; wherein said GFR-binding compound does not comprise the pair of peptides VPTEL:EMVVE when PEP1 is SAIS and PEP2 is LKNYQ; wherein said GFR-binding compound does not comprise the pair of peptides APTQL:NMVVR when PEP1 is NAIS and PEP2 is LKKYR; and wherein said GFR-binding compound does not comprise the pair of peptides APTKL:NMVVR when PEP1 is NAIS and PEP2 is LKKYR; and, optionally, wherein the RMSD is 2.45 Å or less.

[1032] In one aspect, the present disclosure provides a GFR-binding compound, wherein said GFR-binding compound is a peptide, a variant or analog thereof, or a peptidomimetic as defined herein, with between 20 and 60 (in particular between 20 and 50, and more particularly, between 20 and 45) amino acids, comprising a peptide with four amino acids (PEP1) or a peptide with eight amino acids (PEP12), a peptide with five amino acids (PEP2), and optionally a pair of peptides selected form the group consisting of PEP3:PEP4, PEP3:PEP6, PEP3:PEP10, PEP5:PEP4, PEP9:PEP4, PEP5:PEP6, PEP5:PEP10, PEP9:PEP6 and PEP9:PEP10; wherein said GFR-binding compound does not comprise the pair of peptides KIPKAXXVPTEL:DMVVEGXGXR when PEP1 is SAIS and PEP2 is LKNYQ; wherein said GFR-binding compound does not comprise the pair of peptides SIPKAXXVPTEL:EMVVEGXGXR when PEP1 is SAIS and PEP2 is LKNYQ; wherein said GFR-binding compound does not comprise the pair of peptides HVTKPTXAPTKL:NMVVRSXGXH when PEP1 is NAIS and PEP2 is LKKYR; wherein said GFR-binding compound does not comprise the pair of peptides YVPKPXXAPTKL:NMVVRSXGXH when PEP1 is NAIS and PEP2 is LKKYR; wherein said GFR-binding compound does not comprise the pair of peptides TVPKPXXAPTQL:NMVVRAXGXH when PEP1 is NAIS and PEP2 is LKKYR; and wherein said GFR-binding compound does not comprise the pair of peptides HVPKPXXAPTKL:NMVVRSXGXH when PEP1 is NAIS and PEP2 is LKKYR; and, optionally, wherein the RMSD is 2.45 Å or less.

[1033] In certain embodiments useful for inducing the conversion of a neoplastic cell into a cell (any cell) of the adipocyte lineage, said GFR-binding compound is a synthetic molecule as defined herein in the definition section.

[1034] In certain embodiments useful for inducing the conversion of a neoplastic cell into a cell (any cell) of the adipocyte lineage, said GFR-binding compound is a synthetic peptide, or a variant or analog thereof, or a peptidomimetic.

[1035] II.4. Interactions

[1036] GFR-binding compounds may form at least one intramolecular non-covalent interaction. Such interactions may be one of electrostatic interactions, r-interactions, van der Waals forces, hydrophobic interactions or any combinations thereof. Such interactions may be formed between 2 or more amino acids' side chains, between 2 or more amino acids' backbones or between amino acids' side chains and backbones. Such interactions may increase the stability of the GFR-binding compounds in vitro and/or in vivo thus reducing or preventing physiological degradation. In one example, GFR-binding compounds may form at least one, preferably more than one, of the following intramolecular non-covalent interactions: AA²⁰///AA²⁰⁶, AA¹⁹/AA²⁰⁷, AA¹⁸ ///AA²¹, AA¹⁷///AA²², AA¹⁶///AA²³, AA¹⁵///AA²⁴, AA¹⁵///AA²⁵, wherein /// represents a non-covalent interaction.

### III. Adhesion Protein Inhibitor

[1037] The present invention achieves its intended therapeutic action(s) i.e. the treatment of a neoplastic disease via extracellular, non-mutagenic, recoding or conversion of neoplastic cells, by providing an association (or combination) of at least two bioactive substances, namely, at least one GFR-binding compound as described herein and at least one adhesion protein inhibitor or adhesion molecule inhibitor.

[1038] In one aspect, the present disclosure thus provides at least one adhesion protein inhibitor, as part of a pharmaceutical association or combination as defined herein, as an active principle for use in methods and uses described herein.

[1039] In one example, said GFR-binding compound and said adhesion protein inhibitor may be operably covalently or non-covalently associated, combined, linked or connected as defined herein.

[1040] Various methods known in the art may be used to assess the deactivation or inhibitory activity or potency of a given adhesion protein inhibitor on a given adhesion protein such an integrin or a syndecan. However, for the avoidance of doubts and for the purpose of the present disclosure, the assessment of the inhibition or deactivation of adhesion protein(s) by a given adhesion protein inhibitor as defined herein (alone or within a pharmaceutical association, combination or composition as defined herein) is performed using fluorescence resonance energy transfer (FRET). This method is able to measure with high precision the degree of protein conformational changes that are associated with the action of a specific adhesion protein inhibitor on a given adhesion protein and thus quantify the inhibitory effect of the adhesion protein inhibitor. FRET is a well-known and recognised analytical method, but for the avoidance of doubts and for the purpose of the present disclosure, the experimental procedures, parameters and setup are those described in Chigaev, A., Buranda, T., Dwyer, D. C., Prossnitz, E. R. and Sklar, L. A. (2003), “FRET detection of cellular α4-integrin conformational activation”, Biophys., J. 85, 3951-3962, which is hereby incorporated by reference in its entirety.

[1041] As used herein, unless stated otherwise or contradictory in context, the terms “inhibition”, “down-regulation”, “deactivation” or “inactivation”, when used in the context of cell adhesion, refers to a diminution or reduction in activity, function, gene expression and/or protein expression of a molecule, protein or gene, observed when a pharmaceutical association, combination or composition of the present disclosure is provided or administered to a cell or to a subject carrying this cell, using one of the methods defined herein, in comparison with the activity, function, gene expression and/or protein expression of a molecule, protein or gene in a neoplastic cell in the absence of such provision or administration, of more than 10%, 11%, 12%, 13%, 14%, 15%, 16%, 17%, 18%, 19%, 20%, 21%, 22%, 23%, 24%, 25%, 26%, 27%, 28%, 29%, 30%, 31%, 32%, 33%, 34%, 35%, 36%, 37%, 38%, 39%, 40%, 41%, 42%, 43%, 44%, 45%, 46%, 47%, 48%, 49%, 50%, 51%, 52%, 53%, 54%, 55%, 56%, 57%, 58%, 59%, 60%, 61%, 62%, 63%, 64%, 65%, 66%, 67%, 68%, 69%, 70%, 71%, 72%, 73%, 74%, 75%, 76%, 77%, 78%, 79%, 80%, 81%, 82%, 83%, 84%, 85%, 86%, 87%, 88%, 89%, 90%, 91%, 92%, 93%, 94%, 95%, 96%, 97%, 98%, or 99%, in particular of more than 20%. In one particular example, said inhibition is more than 30%. In one particular example, said inhibition is more than 40%. In one particular example, said inhibition is more than 50%. In one particular example, said inhibition is more than 60%. In one particular example, said inhibition is more than 70%. In one particular example, said inhibition is more than 80%.

[1042] In certain embodiments, the inhibition of cell adhesion comprises (or is exclusively constituted of, or exclusively consists of) the inhibition, deactivation or down-regulation of the gene or protein expression of one or more integrins, syndecans, selectins, dystroglycans or any combinations thereof.

[1043] In one aspect, the present disclosure also provides a use of an adhesion protein inhibitor as defined herein in the manufacture of a medicament comprising a GFR-binding compound as defined herein, for use in the diagnostic, prevention and/or treatment of a neoplastic disease.

[1044] One particular biological checkpoint that the present invention is able to re-establish, repair or restore is the cell adhesion checkpoint. The cell adhesion checkpoint is known to be in charge of monitoring the cells attachments to the extracellular matrix (ECM). In normal conditions, when a cell does not detect a “correct” attachment it should halt further advance through the cell cycle and enter the G0 phase.

[1045] Cell adhesion is the binding of a cell to a surface or substrate, such as the extracellular matrix (ECM). Adhesion occurs from the action (or engagement) of proteins, called cell adhesion proteins or molecules. Examples of such cell adhesion proteins are cell transmembrane adhesion proteins, such as the integrins, syndecans, selectins and dystroglycans. The most important among these proteins are the integrins, which assemble as alpha-beta heterodimers.

[1046] III.1. Integrins

[1047] The integrins belong to a superfamily of cell adhesion receptors that bind to extracellular matrix ligands, cell-surface ligands, and soluble ligands. They are transmembrane αβ heterodimers and at least 18 a and 8 β subunits are known in humans, generating 24 heterodimers such as α1β1, α2β1, α3β1, α4β1, α5β1, α6β1, α7β1, αLβ2, αMβ2, αIIbβ3, αVβ1, αVβ3, αVβ5, αVβ6, αVβ8, and α6β4. Members of this family have been found in mammals, chicken and zebrafish, as well as lower eukaryotes. The a and P subunits have distinct domain structures, with extracellular domains from each subunit contributing to the ligand-binding site of the heterodimer. The sequence arginine-glycine-aspartic acid (RGD) was identified as a general integrin-binding motif, but individual integrins are also specific for particular protein ligands. In addition to physically linking the cell to the extracellular matrix, the binding of the extracellular integrin domains to specific components of the ECM activates the integrins and allows binding of different signalling molecules to their intracellular domain. This activates various signalling pathways that mediate signals to the adhesion checkpoint.

[1048] The activation of an integrin is associated with structural conformational changes of the protein. Integrins are known to adopt three major conformational states: «inactive» (low affinity), «primed» or «active» (high affinity), and ligand occupied (which may be activated or not depending on the nature of the ligand). The active form of the protein is considered as having an «extended» conformation while the inactive form is considered as «bent» with bending of the ligand-binding headpiece of its extracellular domain. Upon activation the integrin proceeds with an unbending of this domain to acquire the extended conformation, which is able to bind the ECM components. This process initiates further conformational changes, which activate, through the intracellular domain several signaling pathway cascades.

[1049] In the present disclosure, the pharmaceutical association, combination or (therapeutic, dermatologic, ophthalmologic, diagnostic, etc.) composition defined herein is thus suitable for treating a neoplastic cell or a neoplastic disease (i) by activating one or more growth factor receptors and (ii) by, simultaneously or non-simultaneously, modulating or regulating the adhesion of that cell to its ECM microenvironment by (partially or completely) deactivating or inhibiting at least one integrin expressed on the cell membrane of said neoplastic cell. In certain embodiments, and without wishing to be bound to any specific theory, the deactivation or inhibition of an integrin may be the result of, for example, integrin's inactivation, integrin's dimerisation inhibition, and/or integrin's gene expression inhibition.

[1050] In certain embodiments, the adhesion protein inhibitor as defined herein comprises (or is) an integrin deactivator or inhibitor which binds to/interacts with at least one integrin and/or to at least one integrin dimer. In one example, said integrin deactivator or inhibitor is a receptor competitive antagonist. In one example, said integrin deactivator or inhibitor is a receptor non-competitive antagonist. In one example, said integrin deactivator or inhibitor is a receptor uncompetitive antagonist. In one example, said integrin deactivator or inhibitor is a receptor silent antagonist. In one example, said integrin deactivator or inhibitor is a receptor partial agonist. In one example, said integrin deactivator or inhibitor is a receptor inverse agonist.

[1051] In one aspect, the present disclosure thus provides a pharmaceutical association or combination or (therapeutic, dermatologic, ophthalmologic, diagnostic, etc.) composition as defined herein comprising at least one GFR-binding compound as defined herein and at least one inhibitor of integrin engagement with the ECM.

[1052] In certain embodiments, said at least one inhibitor of integrin engagement with the ECM is an anti-integrin antibody. One aspect of the present disclosure thus also provides a pharmaceutical association or combination or (therapeutic, dermatologic, ophthalmologic, diagnostic, etc.) composition as defined herein comprising at least one GFR-binding compound as defined herein and at least one integrin antibody.

[1053] In one example, said integrin antibody is selected from the group consisting of, Integrin α1 (A-9), Integrin α1 (F-19), Integrin α1 (HM alpha 1), Integrin α1 (R-164), Integrin α1 (R-19), Integrin α1 (TS2/7.1.1), Integrin α2 (H-293), Integrin α2 (N-19), Integrin α2 (C-9), Integrin α2 (P1H5), Integrin α2 (P1E6), Integrin α2 (HAS-4), Integrin α2 (P4B4), Integrin α2 (HAS-3), Integrin α2 (2), Integrin α3 (A-3), Integrin α3 (A-6), Integrin α3 (1-19), Integrin α3 (C-18), Integrin α3 (E-8), Integrin α3 (P1B5), Integrin α3 (H-43), Integrin α3 (Ralph 3.2), Integrin α3 (N-19), Integrin α3 (VM-2), Integrin α3 (IA3), Integrin α3 (F35 177-1), Integrin α4 (A-7), Integrin α4 (C-2), Integrin α4 (H-210), Integrin α4 (B-2), Integrin α4 (C-20), Integrin α4 (N-19), Integrin α4 (9F10), Integrin α4 (Y-18), Integrin α4 (PS/2), Integrin α5 (H-104), Integrin α5 (P-19), Integrin α5 (C-9), Integrin α5 (A-11), Integrin α5 (B-4), Integrin α5 (D-9), Integrin α5 (HMa5-1), Integrin α5 (P1D6), Integrin α5 (MFR5/5H10), Integrin α5 (JBS5), Integrin α5 (SAM-1), Integrin α5 (1), Integrin α6 (F-6), Integrin α6 (H-87), Integrin α6 (N-19), Integrin α6 (BQ16), Integrin α6 (GOH3), Integrin α6 (C-18), Integrin α6 (4F10), Integrin α6 (541A11), Integrin α6 (mAB-5A), Integrin α6 (450-30A), Integrin α6 (NKI-GOH3), Integrin α6 (3H1512), Integrin α6 (2Q959), Integrin α6 (1.BB.460), Integrin α7 (L-17), Integrin α7 (H-40), Integrin α7 (C-15), Integrin α7 (012-Z), Integrin α8 (F-11), Integrin α8 (F-19), Integrin α8 (T-20), Integrin α8 (H-180), Integrin α8 (S-16), Integrin α9 (N-19), Integrin α9 (H-198), Integrin α10 (E-15), Integrin α10 (S-14), Integrin all (H-242), Integrin all (Y-16), Integrin all (F-5), Integrin all (E-20), Integrin αIIb (B-10), Integrin αIIb (B-9), Integrin αIIb (H-160), Integrin αIIb (C-20), Integrin αIIb (A-7), Integrin αIIb (K-18), Integrin αIIb (96-2C1), Integrin αIIb (MWReg30), Integrin αIIb (SZ.22), Integrin αIIb (M-148), Integrin αIIIa (158A3), Integrin αIIIa (29A3), Integrin αIIIb (54B3), Integrin αVIa (1A10), Integrin αVIb (6B4), Integrin αIIIb/VIb (PB36), Integrin αD (T-17), Integrin αE (H-260), Integrin αE (N-19), Integrin αE (Ber-ACT8), Integrin αE (R-15), Integrin αE (OX62), Integrin αE (BP6), Integrin αL (E-1), Integrin αL (C-11), Integrin αL (N-18), Integrin αL (Y-17), Integrin αL (H-300), Integrin αL (C-17), Integrin αL (F-11), Integrin αL (38), Integrin αL (16B8), Integrin αL (HI111), Integrin αL (121/7), Integrin αL (CRIS-3), Integrin αL (27), Integrin αM (M-19), Integrin αM (H-61), Integrin αM (2LPM19c), Integrin αM (44), Integrin αM (1B6e), Integrin αM (C-19), Integrin αM (OX42), Integrin αM (VIM12), Integrin αM (LM2/1), Integrin αM (ICRF44), Integrin αM (M1/70), Integrin αM (CBRM1/5), Integrin αM (M1/70.15.11.5.HL), Integrin αM (LM2/1.6.11), Integrin αM (2B2.38), Integrin αM (CC125), Integrin αM (CC104), Integrin αM (Bear-1), Integrin αM (6A248), Integrin αM (2Q913), Integrin αM (3A33), Integrin αM (MEM-174), Integrin αV (H-2), Integrin αV (Q-20)-R, Integrin αV (P2W7), Integrin αV (H-75), Integrin αV (T-20), Integrin αV (N-19), Integrin αV (2Q888), Integrin αV (13C2), Integrin αV (NKI-M9), Integrin αX (B-6), Integrin αX (BU15), Integrin αX (D-8), Integrin αX (G-3), Integrin αX (KB90), Integrin αX (3.9), Integrin αX (B-ly6), Integrin αX (HC1/1), Integrin αX (2Q862), Integrin αX (2B2.36), Integrin αX (2Q865), Integrin αX (F-20), Integrin αX (H-68), Integrin αX (N-19), Integrin αX (M-50), Integrin αX (C-20), Integrin αX (M-20), Integrin αX (N418), Integrin αX (R-113), Integrin αX (3H986), Integrin β1 (A-4), Integrin β1 (E-11), Integrin β1 (N-20), Integrin β1 (K-20), Integrin β1 (M-106), Integrin β1 (P5D2), Integrin β1 (L-16), Integrin β1 (HM13i-1), Integrin β1 (4B7R), Integrin β1 (P4G11), Integrin β1 (JB1B), Integrin β1 (12G10), Integrin β1 (102DF5), Integrin β1 (TS2/16), Integrin α9/p31 (Y9A2), Integrin β1 (MEM-101A), Integrin β1 (2Q837), Integrin β1 (3H1192), Integrin α2/β1 (16B4), Integrin α9/31 (2Q954), Integrin α2/31 (2B2.29), Integrin α2/31 (3H1472), Integrin β2 (CTB104), Integrin β2 (F-3), Integrin β2 (N-19), Integrin 12 (M18/2), Integrin β2 (H-120), Integrin β2 (H-7), Integrin β2 (C-20), Integrin β2 (K-19), Integrin β2 (C-4), Integrin β2 (GAME-46), Integrin β2 (P4H9), Integrin β2 (C71/16), Integrin β2 (M18/2.a.12.7), Integrin β2 (1.BB.246), Integrin β2 (IB4), Integrin αL/M/X/32 (24), Integrin β2 (3H1041), Integrin β2 (2B2.45), Integrin β2 (YTS 213.1), Integrin β2 (6G2), Integrin β2 (2Q822), Integrin β2 (L-13), Integrin β2 (6A21), Integrin β2 (MEM-48), Integrin β2 (MEM-148), Integrin β2 (IVA35), Integrin β3 (D-11), Integrin β3 (H-96), Integrin β3 (C-20), Integrin β3 (N-20), Integrin β3 (B-7), Integrin αIIb/β3 (A2A9/6), Integrin αV/33 (23C6), Integrin β3 (Y2/51), Integrin β3 (F-11), Integrin β3 (SAP), Integrin β3 (2C9.G2), Integrin αIIb/33 (P256), Integrin β3 (BV4), Integrin β3 (NaM28-7D6), Integrin β3 (MHF4), Integrin β3 (5K291), Integrin β3 (PM6/13), Integrin αIIb/β3 (474), Integrin αV/β3 (BV3), Integrin αIIb/β3 (IVA30), Integrin β4 (H-101), Integrin β4 (C-20), Integrin 14 (B-4), Integrin β4 (G-7), Integrin β4 (F-7), Integrin β4 (N-20), Integrin β4 (H-1), Integrin β4 (A9), Integrin β4 (7), Integrin β5 (B-10), Integrin β5 (H-96), Integrin β5 (B-1), Integrin β5 (E-18), Integrin β5 (E-19), Integrin β5 (F-5), Integrin αV/35 (P1F76), Integrin αV/35 (P1F6), Integrin β5 (4AK), Integrin β6 (H-110), Integrin β6 (C-19), Integrin β6 (N-20), Integrin β7 (C-2), Integrin β7 (C-20), Integrin β7 (N-18), Integrin β7 (FIB504), Integrin β7 (H-120), Integrin β7 (E-19), Integrin α4/37 (DATK32), Integrin β8 (E-6), Integrin β7 (LS722), Integrin β8 (G-17), Integrin β8 (H-160), Integrin β8 (C-19), Integrin β1d (2B1), Integrin β1d (1G2), Integrin βL1 (F-21), and Integrin βL1 (N-15). Conveniently, the integrin antibody or antibodies is/are the antibody or antibodies which is/are predominantly expressed on the surface of a given neoplastic cell and will thus vary according to the type and nature of the neoplastic cell to be treated using the recoding therapy as defined herein.

[1054] In certain embodiments, said at least one inhibitor of integrin engagement with the ECM is a Arginylglycylaspartic acid (RGD) peptide. One aspect of the present disclosure thus also provides a pharmaceutical association or combination or (therapeutic, dermatologic, ophthalmologic, diagnostic, etc.) composition as defined herein comprising at least one GFR-binding compound as defined herein and at least one RGD peptide.

[1055] In certain embodiments, the adhesion protein inhibitor as defined herein comprises (or is) an integrin deactivator or inhibitor which inhibits or down-regulates the gene or protein expression of at least one integrin by e.g. alteration of the chromatin structure (e.g. through histone modifications), regulation of gene transcription (e.g. by acting on specificity factors, repressors, general transcription factors, activators, enhancers and/or silencers), post-transcriptional regulation, and/or regulation of translation.

[1056] In one aspect, the present disclosure thus provides a pharmaceutical association or combination or (therapeutic, dermatologic, ophthalmologic, diagnostic, etc.) composition defined herein comprising at least one GFR-binding compound as defined herein and at least one small-interfering RNA (si-RNA) which interferes with or inhibit the gene or protein expression of at least one integrin.

[1057] Integrins expressed on the cell membrane of neoplastic cells may be identified using various methods. However, for the avoidance of doubts and for the purpose of the present disclosure, identification of such integrin(s) is performed using e.g. RT-PCR or western blot. Because, the type of integrins expressed on the cell membrane of a given cell (e.g. a neoplastic cell) may differ from the integrins expressed in the cell membrane of another (neoplastic) cell, prior identification of the integrins expressed on the cell membrane of a cell to be treated using a method such as RT-PCR, allows for a more tailored, personalised and/or efficient treatment to be provided.

[1058] In certain embodiments, the modulation or regulation of a neoplastic cell adhesion thus comprises (or is exclusively constituted of, or exclusively consists of) the inhibition, deactivation or down-regulation of the gene or protein expression of one or more identified integrins or dimers of integrins expressed by the neoplastic cell to be treated using, for example, conventional techniques known in the art such as gene silencing using small-interfering RNAs, microRNAs or shRNAs, integrin extracellular antibodies and/or integrin antagonists. The identification of said specific one or more integrins or dimers of integrins may be carried for each specific neoplastic cell using conventional methods in the art such as the one described herein.

[1059] Various methods known in the art may be used to qualify and/or quantify the degree of deactivation or inhibitory activity of a given adhesion protein inhibitor on the gene expression of integrins. However, for the avoidance of doubts and for the purpose of the present disclosure, assessment of integrins gene expression of a given cell by an adhesion protein inhibitor as defined herein is performed using RT-PCR as already defined herein.

[1060] Various methods known in the art may be used to qualify and/or quantify the degree of deactivation or inhibitory activity of a given adhesion protein inhibitor on the protein expression of integrins. However, for the avoidance of doubts and for the purpose of the present disclosure, assessment of integrins protein expression of a given cell by an adhesion protein inhibitor as defined herein is performed using the western blot method as already defined herein.

[1061] Various methods known in the art may be used to qualify and/or quantify the degree of activation or inactivation/inhibition state of integrins. However, for the avoidance of doubts and for the purpose of the present disclosure, assessment of the integrins activation or inactivation state of a given cell by an adhesion protein inhibitor as defined herein is performed using FRET as already defined herein.

[1062] Also provided is a method of treating a neoplastic cell or a neoplastic disease by (partially or completely) deactivating or inhibiting at least one integrin or dimer of integrins expressed on the cell membrane of said neoplastic cell, comprising administering to a subject in need thereof an effective amount of a pharmaceutical association, combination or (therapeutic, dermatologic, ophthalmologic, diagnostic, etc.) composition as defined herein.

[1063] Also provided is a method of treating a neoplastic cell or a neoplastic disease comprising identifying at least one integrin or dimer of integrin expressed on the membrane of said neoplastic cell, and (partially or completely) deactivating or inhibiting said at least one integrin or dimer of integrin by administering to a subject in need thereof an effective amount of a pharmaceutical association, combination or (therapeutic, dermatologic, ophthalmologic, diagnostic, etc.) composition as defined herein.

[1064] III.2. Syndecans

[1065] As used herein, unless indicated otherwise or contradictory in context, the term “syndecans” refers to single transmembrane domain proteins that are thought to act as co-receptors, especially for G protein-coupled receptors. These core proteins carry three to five heparan sulfate and chondroitin sulfate chains, which allow for interaction with a large variety of ligands including fibroblast growth factors, vascular endothelial growth factor, transforming growth factor-beta, fibronectin and antithrombin-1. Interactions between fibronectin and some syndecans can be modulated by the extracellular matrix protein tenascin C. The syndecan protein family has four members. Syndecans 1 and 3 and syndecans 2 and 4, making up separate subfamilies, arose by gene duplication and divergent evolution from a single ancestral gene. The syndecan numbers reflect the order in which the cDNAs for each family member were cloned. All syndecans have an N-terminal signal peptide, an ectodomain, a single hydrophobic transmembrane domain, and a short C-terminal cytoplasmic domain. All syndecans are anchored to plasma membrane via a 24-25 amino acid long hydrophobic transmembrane domain. In mammalian cells, syndecans are expressed by unique genes located on different chromosomes. All members of the syndecan family have 5 exons. The difference in size of the syndecans is credited to the variable length of exon 3, which encodes a spacer domain. In humans, the amino acid length of syndecan 1, 2, 3 and 4 is 310, 201, 346 and 198 respectively. Glycosaminoglycan chains, a member of the heparan sulfate group, are an important component of syndecans and are responsible for a diverse set of syndecan functions. The addition of glycosaminoglycans to syndecan is controlled by a series of post-translational events.

[1066] In the present disclosure, the pharmaceutical association, combination or (therapeutic, dermatologic, ophthalmologic, diagnostic, etc.) composition defined herein is thus suitable for treating a neoplastic cell or a neoplastic disease (i) by activating one or more growth factor receptors and (ii) by, simultaneously or non-simultaneously, modulating or regulating the adhesion of that cell with its ECM microenvironment by (partially or completely) deactivating or inhibiting at least one syndecan expressed on the cell membrane of said neoplastic cell. In certain embodiments, and without wishing to be bound to any specific theory, the deactivation or inhibition of a syndecan may be the result of, for example, syndecan's inactivation, syndecan's dimerisation inhibition, and/or syndecan's gene expression inhibition.

[1067] In certain embodiments, the adhesion protein inhibitor as defined herein comprises (or is) an syndecan deactivator or inhibitor which binds to/interacts with at least one syndecan and/or to at least one syndecan dimer. In one example, said syndecan deactivator or inhibitor is a receptor competitive antagonist. In one example, said syndecan deactivator or inhibitor is a receptor non-competitive antagonist. In one example, said syndecan deactivator or inhibitor is a receptor uncompetitive antagonist. In one example, said syndecan deactivator or inhibitor is a receptor silent antagonist. In one example, said syndecan deactivator or inhibitor is a receptor partial agonist. In one example, said syndecan deactivator or inhibitor is a receptor inverse agonist.

[1068] In one aspect, the present disclosure thus provides a pharmaceutical association or combination or (therapeutic, dermatologic, ophthalmologic, diagnostic, etc.) composition as defined herein comprising at least one GFR-binding compound as defined herein and at least one inhibitor of syndecan engagement.

[1069] In one aspect, the present disclosure thus provides a pharmaceutical association or combination or (therapeutic, dermatologic, ophthalmologic, diagnostic, etc.) composition defined herein comprising at least one GFR-binding compound as defined herein and at least one syndecan antibody.

[1070] In certain embodiments, the adhesion protein inhibitor as defined herein comprises (or is) a syndecan deactivator or inhibitor which inhibits or down-regulates the gene or protein expression of at least one syndecan by e.g. alteration of the chromatin structure (e.g. through histone modifications), regulation of gene transcription (e.g. by acting on specificity factors, repressors, general transcription factors, activators, enhancers and/or silencers), post-transcriptional regulation, and/or regulation of translation.

[1071] In one aspect, the present disclosure thus provides a pharmaceutical association or combination or (therapeutic, dermatologic, ophthalmologic, diagnostic, etc.) composition defined herein comprising at least one GFR-binding compound as defined herein and at least one small-interfering RNA (si-RNA) which interferes with or inhibit the gene or protein expression of at least one syndecan.

[1072] Syndecans expressed on the cell membrane of neoplastic cells may be identified using various methods. However, for the avoidance of doubts and for the purpose of the present disclosure, identification of such syndecan is performed using e.g. RT-PCR or western blot. Because, the type of syndecans expressed on the cell membrane of a given cell (e.g. a neoplastic cell) may differ from the syndecans expressed in the cell membrane of another (neoplastic) cell, prior identification of the syndecans expressed on the cell membrane of a cell to be treated using a method such as RT-PCR, allows for a more tailored, personalised and/or efficient treatment to be provided.

[1073] In certain embodiments, the modulation or regulation of a neoplastic cell adhesion thus comprises (or is exclusively constituted of, or exclusively consists of) the inhibition, deactivation or down-regulation of the gene or protein expression of one or more identified syndecans or dimers of syndecans expressed by the neoplastic cell to be treated using, for example, conventional techniques known in the art such as gene silencing using small-interfering RNAs, microRNAs, or shRNAs, syndecan extracellular antibodies and/or syndecan antagonists. The identification of said specific one or more syndecans or dimers of syndecans may be carried for each specific neoplastic cell using conventional methods in the art such as the one described herein.

[1074] Various methods known in the art may be used to qualify and/or quantify the degree of deactivation or inhibitory activity of a given adhesion protein inhibitor on the gene expression of syndecans. However, for the avoidance of doubts and for the purpose of the present disclosure, assessment of syndecans gene expression of a given cell by an adhesion protein inhibitor as defined herein is performed using RT-PCR as already defined herein.

[1075] Various methods known in the art may be used to qualify and/or quantify the degree of deactivation or inhibitory activity of a given adhesion protein inhibitor on the protein expression of syndecans. However, for the avoidance of doubts and for the purpose of the present disclosure, assessment of syndecans protein expression of a given cell by an adhesion protein inhibitor as defined herein is performed using the western blot method as already defined herein.

[1076] Various methods known in the art may be used to qualify and/or quantify the degree of activation or inactivation/inhibition state of syndecans. However, for the avoidance of doubts and for the purpose of the present disclosure, assessment of the syndecans activation or inactivation state of a given cell by an adhesion protein inhibitor as defined herein is performed using FRET as already defined herein.

[1077] Also provided is a method of treating a neoplastic cell or a neoplastic disease by (partially or completely) deactivating or inhibiting at least one syndecan or dimer of syndecans expressed on the cell membrane of said neoplastic cell, comprising administering to a subject in need thereof an effective amount of a pharmaceutical association, combination or (therapeutic, dermatologic, ophthalmologic, diagnostic, etc.) composition as defined herein.

[1078] Also provided is a method of treating a neoplastic cell or a neoplastic disease comprising identifying at least one syndecan or dimer of syndecan expressed on the membrane of said neoplastic cell, and (partially or completely) deactivating or inhibiting said at least one syndecan or dimer of syndecan by administering to a subject in need thereof an effective amount of a pharmaceutical association, combination or (therapeutic, dermatologic, ophthalmologic, diagnostic, etc.) composition as defined herein.

[1079] III.3. Selectins

[1080] The selectins are a family of cell adhesion molecules. All selectins are single-chain transmembrane glycoproteins. Selectins bind to sugar moieties and so are considered to be a type of lectin, cell adhesion proteins that bind sugar polymers. All three known members of the selectin family (L-, E-, and P-selectin) share a similar cassette structure: an N-terminal, calcium-dependent lectin domain, an epidermal growth factor (EGF)-like domain, a variable number of consensus repeat units (2, 6, and 9 for L-, E-, and P-selectin, respectively), a transmembrane domain (TM) and an intracellular cytoplasmic tail (cyto). Selectins have hinge domains, allowing them to undergo rapid conformational changes in the nanosecond range between ‘open’ and ‘closed’ conformations. Shear stress on the selectin molecule causes it to favor the ‘open’ conformation.

[1081] In the present disclosure, the pharmaceutical association, combination or (therapeutic, dermatologic, ophthalmologic, diagnostic, etc.) composition defined herein is thus suitable for treating a neoplastic cell or a neoplastic disease (i) by activating one or more growth factor receptors and (ii) by, simultaneously or non-simultaneously, modulating or regulating the adhesion of that cell to its ECM microenvironment by (partially or completely) deactivating or inhibiting at least one selectin expressed on the cell membrane of said neoplastic cell. In certain embodiments, and without wishing to be bound to any specific theory, the deactivation or inhibition of a selectin may be the result of, for example, selectin's inactivation, selectin's dimerisation inhibition, and/or selectin's gene expression inhibition.

[1082] In certain embodiments, the adhesion protein inhibitor as defined herein comprises (or is) an selectin deactivator or inhibitor which binds to/interacts with at least one selectin and/or to at least one selectin dimer. In one example, said selectin deactivator or inhibitor is a receptor competitive antagonist. In one example, said selectin deactivator or inhibitor is a receptor non-competitive antagonist. In one example, said selectin deactivator or inhibitor is a receptor uncompetitive antagonist. In one example, said selectin deactivator or inhibitor is a receptor silent antagonist. In one example, said selectin deactivator or inhibitor is a receptor partial agonist. In one example, said selectin deactivator or inhibitor is a receptor inverse agonist.

[1083] In one aspect, the present disclosure thus provides a pharmaceutical association or combination or (therapeutic, dermatologic, ophthalmologic, diagnostic, etc.) composition as defined herein comprising at least one GFR-binding compound as defined herein and at least one inhibitor of selectin engagement.

[1084] In one aspect, the present disclosure thus provides a pharmaceutical association or combination or (therapeutic, dermatologic, ophthalmologic, diagnostic, etc.) composition defined herein comprising at least one GFR-binding compound as defined herein and at least one selectin antibody.

[1085] In one example, said selectin antibody is selected from the group consisting of E-Selectin (H-300), E-Selectin (D-7), E-Selectin (CTB202), E-Selectin (A-10), E-Selectin (C-20), E-Selectin (P2H3), E-Selectin (M-20), E-Selectin (HAE-lf), E-Selectin (1.2B6), E-Selectin (UZ5), E-Selectin (UZ6), E-Selectin (2Q780), E-Selectin (UZ4), L-Selectin (laml-116), L-Selectin (N-18), L-Selectin (H-149), L-Selectin (FMC46), L-Selectin (DREG56), L-Selectin (B-8), L-Selectin (DREG55), L-Selectin (OX85), L-Selectin (3H1611), P-Selectin (CTB201), P-Selectin (H-150), P-Selectin (C-20), P-Selectin (M-20), P-Selectin (AK4), P-Selectin (1 E 3), P-Selectin (H-2), P-Selectin (P8G6), P-Selectin (Psel.KO.2.9), P-Selectin (Psel.KO.2.7) and P-Selectin (CLB/thromb/6). Conveniently, the selectin antibody or antibodies is/are the antibody or antibodies which is/are predominantly expressed on the surface of a given neoplastic cell and will thus vary according to the type and nature of the neoplastic cell to be treated using the recoding therapy as defined herein.

[1086] In certain embodiments, the adhesion protein inhibitor as defined herein comprises (or is) a selectin deactivator or inhibitor which inhibits or down-regulates the gene or protein expression of at least one selectin by e.g. alteration of the chromatin structure (e.g. through histone modifications), regulation of gene transcription (e.g. by acting on specificity factors, repressors, general transcription factors, activators, enhancers and/or silencers), post-transcriptional regulation, and/or regulation of translation.

[1087] In one aspect, the present disclosure thus provides a pharmaceutical association or combination or (therapeutic, dermatologic, ophthalmologic, diagnostic, etc.) composition defined herein comprising at least one GFR-binding compound as defined herein and at least one small-interfering RNA (si-RNA) which interferes with or inhibit the gene or protein expression of at least one selectin.

[1088] Selectins expressed on the cell membrane of neoplastic cells may be identified using various methods. However, for the avoidance of doubts and for the purpose of the present disclosure, identification of such selectin(s) is performed using e.g. RT-PCR or western blot. Because, the type of selectins expressed on the cell membrane of a given cell (e.g. a neoplastic cell) may differ from the selectins expressed in the cell membrane of another (neoplastic) cell, prior identification of the selectins expressed on the cell membrane of a cell to be treated using a method such as RT-PCR, allows for a more tailored, personalised and/or efficient treatment to be provided.

[1089] In certain embodiments, the modulation or regulation of a neoplastic cell adhesion thus comprises (or is exclusively constituted of, or exclusively consists of) the inhibition, deactivation or down-regulation of the gene or protein expression of one or more identified selectins or dimers of selectins expressed by the neoplastic cell to be treated using, for example, conventional techniques known in the art such as gene silencing using small-interfering RNAs, microRNAs, or shRNAs, selectin extracellular antibodies and/or selectin antagonists. The identification of said specific one or more selectins or dimers of selectins may be carried for each specific neoplastic cell using conventional methods in the art such as the one described herein.

[1090] Various methods known in the art may be used to qualify and/or quantify the degree of deactivation or inhibitory activity of a given adhesion protein inhibitor on the gene expression of selectins. However, for the avoidance of doubts and for the purpose of the present disclosure, assessment of selectins gene expression of a given cell by an adhesion protein inhibitor as defined herein is performed using RT-PCR as already defined herein.

[1091] Various methods known in the art may be used to qualify and/or quantify the degree of deactivation or inhibitory activity of a given adhesion protein inhibitor on the protein expression of selectins. However, for the avoidance of doubts and for the purpose of the present disclosure, assessment of selectins protein expression of a given cell by an adhesion protein inhibitor as defined herein is performed using the western blot method as already defined herein.

[1092] Various methods known in the art may be used to qualify and/or quantify the degree of activation or inactivation/inhibition state of selectins. However, for the avoidance of doubts and for the purpose of the present disclosure, assessment of the selectins activation or inactivation state of a given cell by an adhesion protein inhibitor as defined herein is performed using FRET as already defined herein.

[1093] Also provided is a method of treating a neoplastic cell or a neoplastic disease by (partially or completely) deactivating or inhibiting at least one selectin or dimer of selectins expressed on the cell membrane of said neoplastic cell, comprising administering to a subject in need thereof an effective amount of a pharmaceutical association, combination or (therapeutic, dermatologic, ophthalmologic, diagnostic, etc.) composition as defined herein.

[1094] Also provided is a method of treating a neoplastic cell or a neoplastic disease comprising identifying at least one selectin or dimer of selectin expressed on the membrane of said neoplastic cell, and (partially or completely) deactivating or inhibiting said at least one selectin or dimer of selectin by administering to a subject in need thereof an effective amount of a pharmaceutical association, combination or (therapeutic, dermatologic, ophthalmologic, diagnostic, etc.) composition as defined herein.

[1095] III.4. Dystroglycans

[1096] Dystroglycan is a protein that in humans is encoded by the DAG1 gene. Dystroglycan is one of the dystrophin-associated glycoproteins, which is encoded by a 5.5 kb transcript in Homo sapiens on chromosome 3. There are two exons that are separated by a large intron. The spliced exons code for a protein product that is finally cleaved into two non-covalently associated subunits, [alpha] (N-terminal) and [beta] (C-terminal). The dystroglycan complex works as a transmembrane linkage between the extracellular matrix and the cytoskeleton. [alpha]-dystroglycan is extracellular and binds to merosin [alpha]-2 laminin in the basement membrane, while [beta]-dystroglycan is a transmembrane protein and binds to dystrophin, which is a large rod-like cytoskeletal protein. Dystrophin binds to intracellular actin fibers. In this way, the dystroglycan complex, which links the extracellular matrix to the intracellular actin fibers, is thought to provide structural integrity in muscle tissues.

[1097] In the present disclosure, the pharmaceutical association, combination or (therapeutic, dermatologic, ophthalmologic, diagnostic, etc.) composition defined herein is thus suitable for treating a neoplastic cell or a neoplastic disease (i) by activating one or more growth factor receptors and (ii) by, simultaneously or non-simultaneously, modulating or regulating the adhesion of that cell to its ECM microenvironment by (partially or completely) deactivating or inhibiting at least one dystroglycan expressed on the cell membrane of said neoplastic cell. In certain embodiments, and without wishing to be bound to any specific theory, the deactivation or inhibition of a dystroglycan may be the result of, for example, dystroglycan's inactivation and/or dystroglycan's gene expression inhibition.

[1098] In certain embodiments, the adhesion protein inhibitor as defined herein comprises (or is) an dystroglycan deactivator or inhibitor which binds to/interacts with at least one dystroglycan and/or to at least one dystroglycan dimer. In one example, said dystroglycan deactivator or inhibitor is a receptor competitive antagonist. In one example, said dystroglycan deactivator or inhibitor is a receptor non-competitive antagonist. In one example, said dystroglycan deactivator or inhibitor is a receptor uncompetitive antagonist. In one example, said dystroglycan deactivator or inhibitor is a receptor silent antagonist. In one example, said dystroglycan deactivator or inhibitor is a receptor partial agonist. In one example, said dystroglycan deactivator or inhibitor is a receptor inverse agonist.

[1099] In one aspect, the present disclosure thus provides a pharmaceutical association or combination or (therapeutic, dermatologic, ophthalmologic, diagnostic, etc.) composition as defined herein comprising at least one GFR-binding compound as defined herein and at least one inhibitor of dystroglycan engagement.

[1100] In one aspect, the present disclosure thus provides a pharmaceutical association or combination or (therapeutic, dermatologic, ophthalmologic, diagnostic, etc.) composition defined herein comprising at least one GFR-binding compound as defined herein and at least one dystroglycan antibody.

[1101] In certain embodiments, the adhesion protein inhibitor as defined herein comprises (or is) a dystroglycan deactivator or inhibitor which inhibits or down-regulates the gene or protein expression of at least one dystroglycan by e.g. alteration of the chromatin structure (e.g. through histone modifications), regulation of gene transcription (e.g. by acting on specificity factors, repressors, general transcription factors, activators, enhancers and/or silencers), post-transcriptional regulation, and/or regulation of translation.

[1102] In one aspect, the present disclosure thus provides a pharmaceutical association or combination or (therapeutic, dermatologic, ophthalmologic, diagnostic, etc.) composition defined herein comprising at least one GFR-binding compound as defined herein and at least one small-interfering RNA (si-RNA) which interferes with or inhibit the gene or protein expression of at least one dystroglycan.

[1103] Dystroglycans expressed on the cell membrane of neoplastic cells may be identified using various methods. However, for the avoidance of doubts and for the purpose of the present disclosure, identification of such dystroglycan(s) is performed using e.g. RT-PCR or western blot. Because, the type of dystroglycans expressed on the cell membrane of a given cell (e.g. a neoplastic cell) may differ from the dystroglycans expressed in the cell membrane of another (neoplastic) cell, prior identification of the dystroglycans expressed on the cell membrane of a cell to be treated using a method such as RT-PCR, allows for a more tailored, personalised and/or efficient treatment to be provided.

[1104] In certain embodiments, the modulation or regulation of a neoplastic cell adhesion thus comprises (or is exclusively constituted of, or exclusively consists of) the inhibition, deactivation or down-regulation of the gene or protein expression of one or more identified dystroglycans expressed by the neoplastic cell to be treated using, for example, conventional techniques known in the art such as gene silencing using small-interfering RNAs, microRNAs, or shRNAs, dystroglycan extracellular antibodies and/or dystroglycan antagonists. The identification of said specific one or more dystroglycans may be carried for each specific neoplastic cell using conventional methods in the art such as the one described herein.

[1105] Various methods known in the art may be used to qualify and/or quantify the degree of deactivation or inhibitory activity of a given adhesion protein inhibitor on the gene expression of dystroglycans. However, for the avoidance of doubts and for the purpose of the present disclosure, assessment of dystroglycans gene expression of a given cell by an adhesion protein inhibitor as defined herein is performed using RT-PCR as already defined herein.

[1106] Various methods known in the art may be used to qualify and/or quantify the degree of deactivation or inhibitory activity of a given adhesion protein inhibitor on the protein expression of dystroglycans. However, for the avoidance of doubts and for the purpose of the present disclosure, assessment of dystroglycans protein expression of a given cell by an adhesion protein inhibitor as defined herein is performed using the western blot method as already defined herein.

[1107] Various methods known in the art may be used to qualify and/or quantify the degree of activation or inactivation/inhibition state of dystroglycans. However, for the avoidance of doubts and for the purpose of the present disclosure, assessment of the dystroglycans activation or inactivation state of a given cell by an adhesion protein inhibitor as defined herein is performed using FRET as already defined herein.

[1108] Also provided is a method of treating a neoplastic cell or a neoplastic disease by (partially or completely) deactivating or inhibiting at least one dystroglycan expressed on the cell membrane of said neoplastic cell, comprising administering to a subject in need thereof an effective amount of a pharmaceutical association, combination or (therapeutic, dermatologic, ophthalmologic, diagnostic, etc.) composition as defined herein.

[1109] Also provided is a method of treating a neoplastic cell or a neoplastic disease comprising identifying at least one dystroglycan expressed on the membrane of said neoplastic cell, and (partially or completely) deactivating or inhibiting said at least one dystroglycan by administering to a subject in need thereof an effective amount of a pharmaceutical association, combination or (therapeutic, dermatologic, ophthalmologic, diagnostic, etc.) composition as defined herein.

### IV. Pharmaceutical Associations or Combinations

[1110] In one aspect, the present disclosure provides a pharmaceutical association or combination which may be used for converting or recoding, in-vitro, ex-vivo or in-vivo, a neoplastic cell into a non-neoplastic cell comprising at least one GFR-binding compound and at least one adhesion protein inhibitor, both as defined herein. In one example, said adhesion protein inhibitor is an integrin inhibitor inhibiting or preventing the activation of at least one integrin expressed on the surface of said neoplastic cell. In one example, said adhesion protein inhibitor comprises a syndecan inhibitor inhibiting or preventing the activation of at least one syndecan expressed on the surface of said neoplastic cell. In one example, said adhesion protein inhibitor comprises an integrin inhibitor and a syndecan inhibitor inhibiting or preventing the activation of at least one integrin and at least one syndecan expressed on the surface of said neoplastic cell.

[1111] The present pharmaceutical associations or combinations may thus also be used for protecting a subject carrying a neoplastic cell from a neoplastic disease.

[1112] In one aspect, the present disclosure provides a pharmaceutical association or combination for the uses disclosed herein, substantially free from any cell adhesion promoter. As used herein, the term “substantially free”, as applied to a given component such as a cell adhesion promoter, means that the amount of such a component is less than 20%, 15%, 10%, 5%, 1%, 0.5%, 0.1% or less in mole with respect to the mole content of GFR-binding compound unless otherwise indicated, self-evident or contradictory in context.

[1113] In one aspect, the present disclosure provides a pharmaceutical association as defined herein further comprising (another) anti-cancer agent thus forming a pharmaceutical composition of the invention. In one example, said pharmaceutical composition further comprises at least one pharmaceutically acceptable excipient. In one example, said further anti-cancer agent is functionally associated with said GFR-binding compound and/or said adhesion protein inhibitor. Suitable further anti-cancer agents include but are not limited to, agents that inhibit the synthesis of DNA molecule building blocks, agents that directly damage DNA in the cell nucleus, agents that affect the synthesis or breakdown of mitotic spindles, and agents that inhibit kinase proteins by interacting with the kinase active site. Preferred examples of agents that inhibit the synthesis of DNA molecule building blocks include, but are not limited to, methotrexate (Abitrexate®), fluorouracil (Adrucil®), gemcitabine (Gemzar®), arabinosylcytosine (araC), hydroxyurea (Hydrea®), and mercaptopurine (Purinethol®). Preferred examples of agents that directly damage DNA in the cell nucleus include, but are not limited to, carboplatin (Paraplatin@ and paraplatin-AQ®), cisplatin (Platinol®) and antibiotics such as daunorubicin (Cerubidine®), doxorubicin (Adriamycin®), and etoposide (VePesid®). Preferred examples of agents that affect the synthesis or breakdown of mitotic spindles include, but are not limited to, miotic disrupters such as Vinblastine (Velban@), Vincristine (Oncovin@) and Pacitaxel (Taxol®). Preferred examples of agents that inhibit kinase proteins include, but are not limited to, Afatinib®, Axitinib®, Bosulif®, Bosutinib®, Cabozantinib@, Caprelsa®, Cometriq®, Crizotinib®, Dasatinib®, Erlotinib®, Gilotrif®, Gleevec®, Ibrutinib@, Iclusig®, Imatinib®, Imbruvica@, Inlyta@, Lapatinib@, Nexavar®, Nilotinib®, Pazopanib®, Ponatinib@, Regorafenib®, Sorafenib®, Sprycel®, Stivarga®, Sunitinib®, Sutent®, Tarceva®, Tasigna®, Tivopath®, Tivozanib®, Tykerb®, Vandetanib®, Votrient®, Xalkori®, Zaltrap®, and ziv-aflibercept@.

[1114] In one example, the L-asparaginase enzyme may also be used as a further agent in combination with the pharmaceutical association or composition as defined herein. L-asparaginase enzyme has been reported e.g. in L-Asparaginase: A Promising Enzyme for Treatment of Acute Lymphoblastic Leukiemia, People's Journal of Scientific Research, Vol. 5(1), January 2012, which is incorporated herein by reference in its entirety, to act by depriving cancer cells (such as leukemia cells) of asparagine thus inducing their death.

[1115] Other anti-cancer agents may also be used such as nitrogen mustards, ethylenimes, alkylsulfonates, triazenes, piperazines, nitrosureas and antibiotics such as anthracyclines, dactinomycin, bleomycin, adriamycin, or mithramycin.

[1116] In one example, said pharmaceutical association or combination comprises one GFR-binding compound. In one example, said pharmaceutical association or combination comprises two or more distinct GFR-binding compounds. In one example, said pharmaceutical association or combination comprises three or more distinct GFR-binding compounds. In one example, said pharmaceutical association or combination comprises four or more distinct GFR-binding compounds.

[1117] In one aspect, the present disclosure provides a process or method for manufacturing a neoplastic disease medicament, said process or method comprising associating or combining an adhesion protein inhibitor with a GFR-binding compound both as defined herein. Said step of associating or combining may be carried out using any suitable method known in the art.

[1118] In one aspect, the present disclosure provides a process or method for manufacturing a neoplastic disease medicament precursor, said process or method comprising providing a GFR-binding compound and/or an adhesion protein inhibitor both as defined herein, wherein providing said adhesion protein inhibitor and/or said GFR-binding compound manufactures said neoplastic disease medicament.

[1119] In certain aspects, said pharmaceutical association or composition substantially down-regulates, reduces, inhibits or suppresses the gene and/or protein expression of at least one of cyclin-D1, cyclin-D2 or cyclin-D3. Because cyclins D1, D2 and D3 regulate the activity of Cyclin-dependent kinases (CDKs) 4 and 6 by forming cyclin-CDK protein complexes including Cyclin D1-CDK4 complex, Cyclin D1-CDK6 complex, Cyclin D2-CDK4 complex, Cyclin D2-CDK6 complex, Cyclin D3-CDK4 complex and Cyclin D3-CDK6 complex, said pharmaceutical association or composition was also observed to substantially reduce, inhibit, suppress or destabilise the formation of any one of such complexes.

[1120] There are many ways to test, measure and represent the inhibitory effect of a given substance on the gene or protein expression of cyclins D, but for the purpose of the present disclosure, and for the avoidance of any doubts, the inhibition values of a given pharmaceutical association or composition as defined herein is a measure of the gene expression of cyclins D as provided by RT-PCR. It is to be understood that the values of the gene expression of cyclins D disclosed herein correspond to the total gene expression of all cyclins D present in the tested cell i.e. D1, D2 and D3 as known at the date of the present disclosure.

[1121] As already stated above, pharmaceutical associations or compositions suitable for implementing embodiments of the present invention reduce the gene expression of cyclins D by at least 20% during at least one part of the G1 phase of the cell cycle as compared to the wild-type expression. The absolute and relative duration of each cell cycle phase (in other words, the cell cycle duration profile) usually varies (some phases such as the Gap phases may “shrink”) amongst healthy cells of different types (e.g. bone cells, skin cells, etc. . . . ) and between healthy cells and neoplastic cells of the same type (e.g. healthy bone cells and neoplastic bone cells). Typical average cell cycle duration is commonly accepted to be about 24 hours. Typically accepted phase durations for a healthy cell are 11 to 14 hours for the G1 phase, 5 to 12 hours for the S phase, 3 to 12 hours for the G2 phase and about 1 hour for the M phase. In neoplastic cells, such as in cancer cells, it is commonly admitted that, although the duration of the S and M phases may generally be conserved, the length of the G1 and G2 phases is generally shortened in order to increase cell division. Cell cycle phase's duration may thus vary significantly from one cell type to another. Consequently, conventionally and for the purpose of facilitating the comparative representation of the inhibition of the gene expression of cyclins D for different cell types, the gene expression is represented as a function of the cell cycle progression (starting from G1 and finishing with M) and not as a direct function of time.

[1122] Active or Bioactive Principles or Ingredients:

[1123] In the present description and unless otherwise indicated or contradictory in context, the term “(bio)active principle” or “(bio)active ingredient” generally refers to a molecule, compound or substance which is responsible for providing the desired biological effect. Without said active ingredient, the formulation or composition containing it, would not provide the desired biological effect. For example, in certain embodiments, formulation excipients are not considered as active ingredients in the pharmaceutical composition as defined herein.

[1124] In the present disclosure, said GFR-binding compound and adhesion protein inhibitor or antagonist are both active principles/ingredients.

[1125] Neoplastic Disease Medicament:

[1126] In the present description and unless otherwise indicated or contradictory in context, the term “neoplastic disease medicament” means a substance, compound, pharmaceutical association, combination, composition or formulation which is suitable for treating or preventing a neoplastic disease in a subject.

[1127] Subject Carrying a Neoplastic Cell:

[1128] In the present description and unless otherwise indicated or contradictory in context, the term “subject carrying a neoplastic cell” means that at least one cell constitutive of the subject is a neoplastic cell as defined herein.

[1129] In one particular example, said pharmaceutical association or combination comprises at least one GFR-binding compound selected from the group consisting of peptides of SEQ ID NO: 1 to 100371.

[1130] The present disclosure provides a pharmaceutical association or combination comprising a GFR-binding compound, wherein all of PEP1, PEP2, PEP3, PEP4, PEP5, PEP6, PEP9, PEP10, PEP11, PEP12, AA¹⁷, pairs, quadruplets, hexaplets and heptuplets thereof, disclaimers and provisos, are as already defined herein.

[1131] In one example, an adhesion protein inhibitor and a GFR-binding compound are covalently or non-covalently associated or combined using a method comprising, or exclusively consisting of, contacting an adhesion protein inhibitor and a GFR-binding compound under suitable reacting conditions thereby forming a covalent or non-covalent association between said adhesion protein inhibitor and said GFR-binding compound.

[1132] In one example, said pharmaceutical association, combination or composition comprises at least 1 part of said adhesion protein inhibitor for 100 parts of GFR-binding compound. In one example, said pharmaceutical association, combination or composition comprises at least 5 parts of said adhesion protein inhibitor for 100 parts of GFR-binding compound. In one example, said pharmaceutical association, combination or composition comprises at least 10 parts of said adhesion protein inhibitor for 100 parts of GFR-binding compound. In one example, said pharmaceutical association, combination or composition comprises at least 15 parts of said adhesion protein inhibitor for 100 parts of GFR-binding compound. In one example, said pharmaceutical association, combination or composition comprises at least 20 parts of said adhesion protein inhibitor for 100 parts of GFR-binding compound. In one example, said pharmaceutical association, combination or composition comprises at least 25 parts of said adhesion protein inhibitor for 100 parts of GFR-binding compound. In one example, said pharmaceutical association, combination or composition comprises at least 30 parts of said adhesion protein inhibitor for 100 parts of GFR-binding compound. In one example, said pharmaceutical association, combination or composition comprises at least 35 parts of said adhesion protein inhibitor for 100 parts of GFR-binding compound. In one example, said pharmaceutical association, combination or composition comprises at least 40 parts of said adhesion protein inhibitor for 100 parts of GFR-binding compound. In one example, said pharmaceutical association, combination or composition comprises at least 45 parts of said adhesion protein inhibitor for 100 parts of GFR-binding compound. In one example, said pharmaceutical association, combination or composition comprises at least 50 parts of said adhesion protein inhibitor for 100 parts of GFR-binding compound. In one example, said pharmaceutical association, combination or composition comprises at least 55 parts of said adhesion protein inhibitor for 100 parts of GFR-binding compound. In one example, said pharmaceutical association, combination or composition comprises at least 60 parts of said adhesion protein inhibitor for 100 parts of GFR-binding compound. In one example, said pharmaceutical association, combination or composition comprises at least 65 parts of said adhesion protein inhibitor for 100 parts of GFR-binding compound. In one example, said pharmaceutical association, combination or composition comprises at least 70 parts of said adhesion protein inhibitor for 100 parts of GFR-binding compound. In one example, said pharmaceutical association, combination or composition comprises at least 75 parts of said adhesion protein inhibitor for 100 parts of GFR-binding compound. In one example, said pharmaceutical association, combination or composition comprises at least 80 parts of said adhesion protein inhibitor for 100 parts of GFR-binding compound. In one example, said pharmaceutical association, combination or composition comprises at least 85 parts of said adhesion protein inhibitor for 100 parts of GFR-binding compound. In one example, said pharmaceutical association, combination or composition comprises at least 90 parts of said adhesion protein inhibitor for 100 parts of GFR-binding compound. In one example, said pharmaceutical association, combination or composition comprises at least 95 parts of said adhesion protein inhibitor for 100 parts of GFR-binding compound. In one example, said pharmaceutical association, combination or composition comprises at least 100 parts of said adhesion protein inhibitor for 100 parts of GFR-binding compound.

### V. Polynucleotides

[1133] The extracellular biological action of the herein-defined pharmaceutical association or combination may also be conveyed via expression, by a cell, of the appropriate polynucleotide sequence engineered to encode a particular GFR-binding peptide of interest and/or a particular adhesion protein inhibitor or antagonist of interest. One may thus inject or administer, to a mammal subject, at least one GFR-binding-peptide-encoding polynucleotide or at least one adhesion protein inhibitor- or antagonist-encoding polynucleotide (such as a messenger RNA), wherein said polynucleotide would enable the intracellular production of the encoded GFR-binding peptide or adhesion protein inhibitor or antagonist, which may, once released outside the host cell, exert its extracellular action on the host cell and/or on neighbouring cells and/or distant cells in combination with its complementary extracellular biologically active partner (i.e. a GFR-binding-peptide or an adhesion protein inhibitor or antagonist, as the case may be). In other words, GFR-binding peptides or adhesion protein inhibitors or antagonists may be produced ex-vivo (e.g. using a peptide synthesizer or recombinantly produced) or in-vivo (e.g. via cell expression of encoding polynucleotides), and in all cases have an extracellular combined biological action of (i) activation of growth factor receptors and (ii) inhibition, deactivation, or disengagement action of at least one adhesion protein, to induce cell conversion or recoding of a neoplastic cell into a non-neoplastic cell.

[1134] Alternatively, one may also inject or administer, to a mammal subject, at least one GFR-binding-peptide-encoding polynucleotide and at least one adhesion protein inhibitor- or antagonist-encoding polynucleotide (such as a messenger RNA), wherein said polynucleotides would enable the intracellular production of both, the encoded GFR-binding peptide and the adhesion protein inhibitor or antagonist, which may, once released outside the host cell, exert their combined extracellular action on the host cell and/or on neighbouring cells and/or distant cells. In other words, GFR-binding peptides and adhesion protein inhibitors or antagonists may all be produced ex-vivo (e.g. using a peptide synthesizer or recombinantly produced) or in-vivo (e.g. via cell expression of encoding polynucleotides), and in all cases have an extracellular combined biological action of (i) activation of growth factor receptors and (ii) inhibition, deactivation, or disengagement action of at least one adhesion protein, to induce cell conversion or recoding of a neoplastic cell into a non-neoplastic cell.

[1135] Thus, in one aspect, the present disclosure provides a pharmaceutical composition comprising at least one polynucleotide encoding a GFR-binding peptide as disclosed herein and at least one polypeptide encoding an adhesion protein inhibitor or antagonist.

[1136] Thus, in one aspect, the present disclosure also provides a pharmaceutical composition comprising at least one polynucleotide encoding a GFR-binding peptide as disclosed herein and at least one polypeptide encoding an adhesion protein inhibitor or antagonist having at least one, more than one, or all of, the features described herein with respect to the pharmaceutical association or combination comprising at least one GFR-binding peptide and at least one adhesion protein inhibitor or antagonist.

[1137] In one particular example, said polynucleotide is a messenger RNA or a primary construct thereof. Said messenger RNA may additionally have a 5′ cap structure chosen from the group consisting of m⁷G(5′)ppp (5′)A,G(5′)ppp(5′)A and G(5′)ppp(5′)G. In one example, the messenger RNA additionally has a poly-A tail of from about 10 to 200 adenosine nucleotides. In one example, the messenger RNA additionally has a poly-C tail of from about 10 to 200 cytosine nucleotides. In one example, the messenger RNA additionally codes a tag for purification chosen from the group consisting of a hexahistidine tag (HIS tag, polyhistidine tag), a streptavidin tag (Strep tag), an SBP tag (streptavidin-binding tag) or a GST (glutathione S-transferase) tag, or codes for a tag for purification via an antibody epitope chosen from the group consisting of antibody-binding tags, a Myc tag, a Swal 1 epitope, a FLAG tag or an HA tag. In one example, the messenger RNA additionally codes a signal peptide and/or a localization sequence, in particular a secretion sequence. In one example, said polynucleotide is a complementary DNA of said messenger RNA or a primary construct thereof.

[1138] In one aspect, the present disclosure also provides a vector comprising a polynucleotide as defined in the present disclosure.

[1139] In one aspect, the present disclosure also provides a cultured cell (or transfected cell) comprising a vector as defined in the present disclosure.

[1140] In one aspect, the present disclosure also provides a method of expressing a peptide of interest, variant or analog thereof, in a mammalian cell, said method comprising: (i) providing an mRNA as defined in the present disclosure; and (ii) introducing said mRNA to a mammalian cell under conditions that permit the expression of the peptide of interest by the mammalian cell.

[1141] In one aspect, the present disclosure also provides a method of expressing a pharmaceutical association or combination of interest, in a mammalian cell, said method comprising: (i) providing mRNAs for every components of a pharmaceutical association or combination as defined in the present disclosure; and (ii) introducing said mRNAs to a mammalian cell under conditions that permit the expression of all the components of the pharmaceutical association or combination by the mammalian cell.

[1142] In one aspect, the present disclosure also provides a pharmaceutical composition comprising mRNA molecules as disclosed herein for use in a medical treatment or prophylactic method. In one example, said medical treatment method is a therapeutic, surgical, or diagnostic method. In one particular example, said method is a method for converting or recoding a neoplastic cell into a non-neoplastic cell as defined in the present disclosure. In one particular example, said method is a method for protecting from cancer as disclosed herein.

[1143] In one aspect, the present disclosure also provides a use of mRNA molecules as defined herein, for the preparation of a pharmaceutical composition for the treatment or prevention of a neoplastic disease as defined herein.

[1144] In one aspect, the present disclosure also provides a medical composition comprising one or more polynucleotide(s), one or more vector(s), or one or more transfected cell(s), all as defined in the present disclosure, and a medically acceptable excipient or carrier.

[1145] Expression:

[1146] As used herein, “expression” of a nucleic acid sequence refers to one or more of the following events: (1) production of an RNA template from a DNA sequence (e.g., by transcription); (2) processing of an RNA transcript (e.g., by splicing, editing, 5′ cap formation, and/or 3′ end processing); (3) translation of an RNA into a polypeptide or protein; and (4) post-translational modification of a polypeptide or protein.

[1147] mRNA:

[1148] As used herein, the term “mRNA” refers to messenger RNA. Traditionally, the basic components of an mRNA molecule include at least a coding region, a 5′UTR, a 3′UTR, a 5′cap and a poly-A tail. Whereas the 5′UTR, 3′UTR, 5′cap and the poly-A tail are usually required to improve e.g. stability, translation and/or recognition by the ribosome, it is the coding region which comprises the sequence encoding the protein(s), polypeptide(s), or peptide(s) of (therapeutic) interest. Therefore, when the mRNA molecule as disclosed herein is conventionally described with reference to its coding region, any mRNA molecule also comprising at least one of a 5′UTR, a 3′UTR, a 5′cap or a poly-A tail forms an integral part of the present disclosure.

[1149] Coding Region:

[1150] As used herein, the term “coding region” or “coding sequence” refers to a portion of a polynucleotide that codes for a peptide or peptides of interest.

[1151] Primary RNA Construct or Transcript:

[1152] As used herein, unless indicated otherwise or contradictory in context, the term “Primary RNA construct” or “Primary RNA transcript” refers to any precursor RNA molecule from a mature and functional (i.e. translatable) RNA molecule may be obtained. For instance, a precursor messenger RNA (pre-mRNA) is a type of primary transcript that becomes a messenger RNA (mRNA) after processing. Newly synthesized primary transcripts are modified in several ways to yield their mature form before they can be translated into a protein of interest. Such modifications include, but are not limited to, excision of introns, splicing of exons, addition of 5′cap and poly-A tail. Therefore, when reference is made to an RNA molecule, it shall be understood that it aims to cover all RNA molecules including, but not limited to, primary RNA transcripts or constructs at any stage of the modification process leading to a mature and functional RNA molecule e.g. with or without introns, exons, 5′cap, poly-A tail and/or any other conventional modifications, insofar as the RNA molecule contains a coding region or a precursor thereof allowing for a peptide of interest encoded by said coding region or precursor thereof to be expressed.

[1153] 5′ Capping:

[1154] As used herein, unless indicated otherwise or contradictory in context, the term “5′ Capping” ou “5′ Cap” refers to a 5′ cap structure of an mRNA that is involved in nuclear export, increasing mRNA stability and binds the mRNA Cap Binding Protein (CBP), which is responsible for mRNA stability in the cell and translation competency through the association of CBP with poly(A) binding protein to form the mature cyclic mRNA species. The cap further assists the removal of 5′ proximal introns removal during mRNA splicing. Endogenous mRNA molecules may be 5′-end capped generating a 5′-ppp-5′-triphosphate linkage between a terminal guanosine cap residue and the 5′-terminal transcribed sense nucleotide of the mRNA molecule. This 5′-guanylate cap may then be methylated to generate an N7-methyl-guanylate residue.

[1155] Poly-A Tails:

[1156] During RNA processing, a long chain of adenine nucleotides (poly-A tail) may be added to a polynucleotide such as an mRNA molecules in order to increase stability. Immediately after transcription, the 3′ end of the transcript may be cleaved to free a 3′ hydroxyl. Then poly-A polymerase adds a chain of adenine nucleotides to the RNA. The process, called polyadenylation, adds a poly-A tail that can be between, for example, approximately 100 and 250 residues long.

[1157] Untranslated Regions:

[1158] As used herein, the term “Untranslated regions” or UTRs of a gene refers to regions that are transcribed but not translated. The 5′UTR starts at the transcription start site and continues to the start codon but does not include the start codon; whereas, the 3′UTR starts immediately following the stop codon and continues until the transcriptional termination signal. The regulatory features of a UTR can be incorporated into the polynucleotides, primary constructs and/or mRNA of the present disclosure to enhance the stability of the molecule.

[1159] 3′UTR:

[1160] As used herein, unless indicated otherwise or contradictory in context, the term “3′UTR” or “three prime untranslated region” refers to the section of messenger RNA that immediately follows the translation termination codon. The 3′-UTR often contains regulatory regions that post-transcriptionally influence gene expression.

[1161] 5′UTR:

[1162] As used herein, unless indicated otherwise or contradictory in context, the term “5′UTR” or “five prime untranslated region” refers to the section of mRNA that starts at the transcription start site and continues to the start codon but does not include the start codon. There is growing body of evidence about the regulatory roles played by the UTRs in terms of stability of the nucleic acid molecule and translation. Natural 5′UTRs bear features which play roles in for translation initiation. 5′UTR also have been known to form secondary structures which are involved in elongation factor binding.

[1163] Complementary DNA:

[1164] As used herein, the term “complementary DNA” or “cDNA” refers to a DNA molecule containing an eukaryote gene which has been tailored or engineered to be expressed in a prokaryote host cell. cDNA is also called “intron-free” DNA as it lacks the gene regions encoding introns, its transcription yielding an intron-free mRNA molecule.

[1165] Vector:

[1166] As used herein, unless indicated otherwise or contradictory in context, the term “vector” is used in its most general meaning and refers to any intermediary vehicle for a nucleic acid which enables said nucleic acid, for example, to be introduced into prokaryotic and/or eukaryotic cells and, where appropriate, to be integrated into a genome. Vectors of this kind are preferably replicated and/or expressed in the cells. Vectors may comprise plasmids, phagemids, bacteriophages or viral genomes.

[1167] Plasmid:

[1168] As used herein, unless indicated otherwise or contradictory in context, the term “plasmid” refers to a double-stranded (which may be circular) DNA sequence that is capable of automatically replicating in a host cell.

[1169] In one aspect, the present disclosure provides methods and uses for converting or recoding a neoplastic cell into a non-neoplastic cell and protecting a patient from neoplastic diseases, conditions, disorders or pathologies, using a medical combination of (i) a polynucleotide encoding at least one peptide, variant or analog thereof, having growth factor receptor-binding and activating capability or capabilities, as defined herein, a vector comprising such a polynucleotide, or a transfected cell comprising such a vector, and (ii) at least one adhesion protein inhibitor or antagonist, as defined herein.

[1170] In one aspect, the present disclosure provides methods and uses for converting or recoding a neoplastic cell into a non-neoplastic cell and protecting a patient from neoplastic diseases, conditions, disorders or pathologies, using a medical combination of (i) a polynucleotide encoding at least one peptide, variant or analog thereof, having growth factor receptor-binding and activating capability or capabilities, as defined herein, a vector comprising such a polynucleotide, or a transfected cell comprising such a vector, and (ii) a polynucleotide encoding at least one adhesion protein inhibitor or antagonist, as defined herein, a vector comprising such a polynucleotide, or a transfected cell comprising such a vector.

### VI. Pharmaceutical Compositions

[1171] In one aspect, the present disclosure provides a composition such as a pharmaceutical, prophylactic, surgical, diagnostic, or imaging composition (hereinafter shorten as pharmaceutical or medical composition) for the uses and methods already disclosed herein comprising at least one pharmaceutical association or combination as defined herein and further comprising at least one pharmaceutically acceptable excipient, carriers and/or vehicles.

[1172] Formulations of the pharmaceutical compositions described herein may be prepared by any method known or hereafter developed in the art of pharmacology. Generally, such methods of preparation include the step of bringing the active ingredient(s) into association with an excipient and/or one or more other accessory ingredients, and then, if necessary and/or desirable, shaping and/or packaging the product into a desired single- or multi-dose unit.

[1173] For example, in certain embodiments, a pharmaceutical composition as defined herein may contain between 0.01% and 100% by weight (over the total weight of the pharmaceutical composition) of a GFR-binding compound or a pharmaceutical association or combination, both as defined herein, as a pharmaceutically effective amount. The pharmaceutical composition particularly comprises between 0.01% and 95%, between 0.01% and 90%, between 0.01% and 85%, between 0.01% and 80%, between 0.01% and 75%, between 0.01% and 70%, between 0.01% and 65%, between 0.01% and 60%, between 0.01% and 55%, between 0.01% and 50%, between 0.01% and 45%, between 0.01% and 40%, between 0.01% and 35%, between 0.01% and 30%, between 0.01% and 25%, between 0.01% and 20%, between 0.01% and 15%, between 0.01% and 10%, between 0.01% and 5%, between 0.1% and 100%, between 0.1% and 95%, between 0.1% and 90%, between 0.1% and 85%, between 0.1% and 80%, between 0.1% and 75%, between 0.1% and 70%, between 0.1% and 65%, between 0.1% and 60%, between 0.1% and 55%, between 0.1% and 50%, between 0.1% and 45%, between 0.1% and 40%, between 0.1% and 35%, between 0.1% and 30%, between 0.1% and 25%, between 0.1% and 20%, between 0.1% and 15%, between 0.1% and 10%, and between 0.1% and 5% by weight (over the total weight of the pharmaceutical composition) of any one of a GFR-binding compound or an adhesion protein inhibitor or both.

[1174] Generally, the GFR-binding compounds or pharmaceutical associations or combinations as defined herein may thus be administered as such or as part of a formulation in association with one or more pharmaceutically acceptable excipients, carriers and/or vehicles so as to form what is generally referred to as a pharmaceutical composition or pharmaceutical formulation.

[1175] Pharmaceutical Effective Amount:

[1176] As used herein, unless indicated otherwise or contradictory in context, the term “pharmaceutical effective amount” or “therapeutically effective amount” refers to an amount of an agent to be delivered (e.g., nucleic acid, protein, peptide, drug, therapeutic agent, diagnostic agent, prophylactic agent, etc.) that is sufficient, when administered to a subject suffering from or susceptible to an infection, disease, disorder, condition and/or pathology, to produce/provide a therapeutically effective outcome. Thus, a “pharmaceutical effective amount” depends upon the context in which it is being applied. A pharmaceutical effective amount of a composition is provided based, at least in part, on the target tissue, target cell type, means of administration, physical characteristics of the pharmaceutical association or composition (e.g., size, 3D shape, etc.), and other determinants. For example, in certain embodiments, in the context of administering an agent that treats cancer, a pharmaceutical effective amount of an agent is, for example, in certain embodiments, an amount sufficient to achieve treatment, as defined herein, of cancer, as compared to the response obtained without administration of the agent. For example, in certain embodiments, a therapeutically effective amount as used herein is any of the herein disclosed weight or molar amounts, ratios or ranges of the GFR-binding compound, the adhesion protein inhibitor or the association/combination thereof.

[1177] Therapeutically Effective Outcome:

[1178] As used herein, unless indicated otherwise or contradictory in context, the term “therapeutically effective outcome” refers to an outcome that is sufficient in a subject suffering from or susceptible to an infection, disease, disorder, condition and/or pathology, to treat, improve symptoms of, diagnose, prevent, and/or delay the onset of the infection, disease, disorder, condition and/or pathology.

[1179] Therapeutic Agent:

[1180] As used herein, unless indicated otherwise or contradictory in context, the term “therapeutic agent” refers to any agent that, when administered to a subject/patient/individual, has a therapeutic, diagnostic, and/or prophylactic effect and/or elicits a desired biological and/or pharmacological effect.

[1181] Pharmaceutically Acceptable:

[1182] As used herein, unless indicated otherwise or contradictory in context, the term “pharmaceutically acceptable” refers to those compounds, materials, compositions, and/or dosage forms which are, within the ambit of sound medical judgment, suitable for use in contact with the tissues of human beings and animals without excessive toxicity, irritation, allergic response, or other problem or complication, commensurate with a reasonable benefit/risk ratio.

[1183] Pharmaceutically Acceptable Excipients:

[1184] As used herein, unless indicated otherwise or contradictory in context, the term “pharmaceutically acceptable excipient” refers to any ingredient other than the compounds described herein (i.e. GFR-binding compounds, adhesion protein inhibitor as defined herein or any further active principles such as additional anti-cancer agents or anti-inflammatory agents) and satisfying to the herein defined definition of pharmaceutically acceptable for a patient. Excipients may include, for example: inert diluents, dispersing and/or granulating agents, surface active agents and/or emulsifiers, disintegrating agents, binding agents, preservatives, buffering agents, lubricating agents, oils, printing inks, sweeteners, and/or waters of hydration. The choice of excipient(s) will largely depend on factors such as the particular mode of administration, the effect of the excipient(s) on solubility and stability, and the nature of the dosage form. In one embodiment, the pharmaceutically acceptable excipient is not a naturally occurring excipient.

[1185] Diluents:

[1186] As used herein, unless indicated otherwise or contradictory in context, diluents include, but are not limited to, calcium carbonate, sodium carbonate, calcium phosphate, dicalcium phosphate, calcium sulfate, calcium hydrogen phosphate, sodium phosphate lactose, sucrose, cellulose, microcrystalline cellulose, kaolin, mannitol, sorbitol, inositol, sodium chloride, dry starch, powdered sugar and/or any combinations thereof.

[1187] Buffering Agents:

[1188] As used herein, unless indicated otherwise or contradictory in context, buffering agents include, but are not limited to, citrate buffer solutions, acetate buffer solutions, phosphate buffer solutions, ammonium chloride, potassium acetate, potassium chloride, monobasic potassium phosphate, calcium carbonate, calcium chloride, calcium citrate, calcium gluconate, calcium lactate, propanoic acid, calcium levulinate, pentanoic acid, phosphoric acid, calcium hydroxide phosphate, sodium acetate, sodium bicarbonate, sodium chloride, sodium citrate, sodium lactate, magnesium hydroxide, aluminum hydroxide, alginic acid, pyrogen-free water, isotonic saline, Ringer's solution, ethyl alcohol and any combinations thereof.

[1189] Granulating and/or Dispersing Agents:

[1190] As used herein, unless indicated otherwise or contradictory in context, granulating and/or dispersing agents include, but are not limited to, potato starch, corn starch, tapioca starch, sodium starch glycolate, clays, alginic acid, guar gum, citrus pulp, agar, bentonite, cellulose and wood products, natural sponge, cation-exchange resins, calcium carbonate, silicates, sodium carbonate, cross-linked poly(vinyl-pyrrolidone), sodium carboxymethyl starch, carboxymethyl cellulose, cross-linked sodium carboxymethyl cellulose, methylcellulose, pregelatinized starch, microcrystalline starch, water insoluble starch, calcium carboxymethyl cellulose, magnesium aluminum silicate, sodium lauryl sulfate, quaternary ammonium compounds and/or any combinations thereof.

[1191] Surface Active Agents and/or Emulsifiers:

[1192] As used herein, unless indicated otherwise or contradictory in context, surface active agents and/or emulsifiers include, but are not limited to, colloidal clays (such as aluminum silicates and magnesium aluminum silicates), natural emulsifiers (such as acacia, agar, sodium alginate, cholesterol, xanthan, pectin, gelatin, egg yolk, casein, cholesterol, wax, and lecithin), long chain amino acid derivatives, high molecular weight alcohols (such as stearyl, cetyl and oleyl alcohols, triacetin monostearate, ethylene glycol distearate and glyceryl monostearate), carbomers (such as carboxy polymethylene, polyacrylic acid, acrylic acid polymer, and carboxyvinyl polymer), diethylene glycol monolaurate, triethanolamine oleate, sodium oleate, potassium oleate, ethyl oleate, oleic acid, ethyl laurate, sodium lauryl sulfate, cetrimonium bromide, cetylpyridinium chloride, benzalkonium chloride, docusate sodium, carrageenan, cellulosic derivatives (such as carboxymethylcellulose sodium, hydroxymethyl cellulose, hydroxypropyl methylcellulose and methylcellulose), sorbitan fatty acid esters (such as polyoxyethylene sorbitan monolaurate, polyoxyethylene sorbitan, polyoxyethylene sorbitan monooleate, sorbitan monopalmitate and glyceryl monooleate), polyoxyethylene esters, sucrose fatty acid esters, polyethylene glycol fatty acid esters, polyoxyethylene ethers, poly(vinyl-pyrrolidone), and any combinations thereof.

[1193] Binding Agents:

[1194] As used herein, unless indicated otherwise or contradictory in context, binding agents include, but are not limited to, natural and synthetic gums (such as acacia, sodium alginate, carboxymethylcellulose, methylcellulose, ethylcellulose, hydroxyethylcellulose, hydroxypropyl cellulose, hydroxypropyl methylcellulose, microcrystalline cellulose, cellulose acetate and poly(vinyl-pyrrolidone), gelatin, starch, sugars (such as sucrose, dextrose, glucose, dextrin, lactose, and mannitol), alignates, magnesium aluminum silicates, polyethylene glycol, polyethylene oxide, inorganic calcium salts, water, alcohol, silicic acid, waxes, and any combinations thereof.

[1195] Preservatives:

[1196] As used herein, unless indicated otherwise or contradictory in context, preservatives include, but are not limited to, antioxidants, chelating agents, antifungal preservatives, antimicrobial preservatives, acidic preservatives, and alcohol preservatives.

[1197] Antioxidants:

[1198] As used herein, unless indicated otherwise or contradictory in context, antioxidants include, but are not limited to, alpha tocopherol, ascorbic acid, acorbyl palmitate, butylated hydroxyanisole, propionic acid, potassium metabisulfite, propyl gallate, sodium metabisulfite, sodium ascorbate, and sodium sulfite.

[1199] Chelating Agents:

[1200] As used herein, unless indicated otherwise or contradictory in context, chelating agents include ethylenediaminetetraacetic acid (EDTA), fumaric acid, malic acid, phosphoric acid, citric acid monohydrate and tartaric acid.

[1201] Antimicrobial Preservatives:

[1202] As used herein, unless indicated otherwise or contradictory in context, antimicrobial preservatives include, but are not limited to, benzalkonium chloride, benzethonium chloride, chlorhexidine, chlorobutanol, chlorocresol, chloroxylenol, benzyl alcohol, bronopol, cetylpyridinium chloride, cresol, ethyl alcohol, glycerin, hexetidine, imidurea, phenoxyethanol, phenylmercuric nitrate, phenylethyl alcohol, phenol, and propylene glycol.

[1203] Antifungal Preservatives:

[1204] As used herein, unless indicated otherwise or contradictory in context, antifungal preservatives include, but are not limited to, benzoic acid, hydroxybenzoic acid, butyl paraben, methyl paraben, ethyl paraben, propyl paraben, potassium benzoate, sodium propionate, potassium sorbate, and/or sorbic acid.

[1205] Alcohol Preservatives:

[1206] As used herein, unless indicated otherwise or contradictory in context, alcohol preservatives include, but are not limited to, phenol, phenolic compounds, bisphenol, ethanol, polyethylene glycol, chlorobutanol and hydroxybenzoate.

[1207] Acidic Preservatives:

[1208] As used herein, unless indicated otherwise or contradictory in context, acidic preservatives include, but are not limited to, vitamin A, vitamin C, vitamin E, beta-carotene, acetic acid, citric acid, dehydroacetic acid, and sorbic acid.

[1209] Lubricating Agents:

[1210] As used herein, unless indicated otherwise or contradictory in context, lubricating agents include, but are not limited to, magnesium stearate, calcium stearate, stearic acid, sodium benzoate, sodium acetate, sodium chloride, silica, talc, malt, glyceryl behanate, hydrogenated vegetable oils, polyethylene glycol, magnesium lauryl sulphate and any combinations thereof.

[1211] Sweeteners:

[1212] As used herein, unless indicated otherwise or contradictory in context, sweeteners include, but are not limited to, any natural or synthetic sugar substitutes. Natural sugar substitutes include, but are not limited to, brazzein, curculin, erythritol, glycyrrhizin, glycerol, hydrogenated starch hydrolysates, inulin, isomalt, lactitol, mogroside mix, mabinlin, maltitol, malto-oligosaccharide, mannitol, miraculin, monatin, monellin, osladin, pentadin, sorbitol, stevia, tagatose, thaumatin, and xylitol. Synthetic sugar substitutes include, but are not limited to, acesulfame potassium, advantame, alitame, aspartame, salt of aspartame-acesulfame, sodium cyclamate, dulcin, glucin, neohesperidin dihydrochalcone, neotame, P-4000, saccharin, Sucralose.

[1213] Exemplary excipients include, but are not limited to: butylated hydroxytoluene (BHT), calcium carbonate, calcium phosphate (dibasic), calcium stearate, croscarmellose, crosslinked polyvinyl pyrrolidone, citric acid, crospovidone, cysteine, ethylcellulose, gelatin, hydroxypropyl cellulose, hydroxypropyl methylcellulose, lactose, magnesium stearate, maltitol, mannitol, methionine, methylcellulose, methyl paraben, microcrystalline cellulose, polyethylene glycol, polyvinyl pyrrolidone, povidone, pregelatinized starch, propyl paraben, retinyl palmitate, shellac, silicon dioxide, sodium carboxymethyl cellulose, sodium citrate, sodium starch glycolate, sorbitol, starch, stearic acid, sucrose, talc, titanium dioxide, vitamin A, vitamin E, vitamin C, and xylitol. Suitable excipients for use in the present invention also include, but are not limited to, water, phosphate buffered saline (PBS), Ringer's solution, dextrose solution, serum-containing solutions, Hank's solution, other aqueous physiologically balanced solutions, oils, esters and glycols. Aqueous excipients can contain suitable auxiliary substances required to approximate the physiological conditions of the recipient, for example, in certain embodiments, by enhancing chemical stability and isotonicity.

[1214] Pharmaceutically/Medically Acceptable Carriers:

[1215] As used herein, unless indicated otherwise or contradictory in context, the term “pharmaceutically acceptable carriers”, “medically acceptable carrier” or “carriers” refers to pharmaceutically acceptable excipients and/or delivery vehicles suitable for delivering a pharmaceutical or therapeutic composition useful in a therapeutic method and uses of the present invention to a suitable in-vivo or ex-vivo site. Preferred pharmaceutically acceptable carriers are capable of maintaining a composition containing an active combination or association of a GFR-binding compound and an adhesion protein inhibitor as defined herein, in a form that, upon arrival of the combination to a target cell, site or tissue, the active combination is capable of performing one or more biological functions thereof the protein at the cell or tissue site. One type of pharmaceutically acceptable carrier includes a controlled release formulation that is capable of slowly releasing a composition or combination into an animal. In one example, a controlled release formulation comprises an active combination or association as defined herein in a controlled release vehicle. Suitable controlled release vehicles include, but are not limited to, microparticles, biocompatible polymers, other polymeric matrices, capsules, microcapsules, osmotic pumps, bolus preparations, diffusion devices, liposomes, lipospheres, and transdermal delivery systems. Such suitable controlled release vehicle may be combined with at least one targeting moiety. In one embodiment, the pharmaceutically acceptable carrier is not a naturally occurring carrier. When polynucleotides such as mRNAs are used, it is preferable to use pharmaceutically acceptable carriers that would also effect/help transfection into the cells. Calcium Phosphate Transfection, Cationic Lipid Transfection, DEAE-Dextran Transfection, Electroporation, or viral transfection, are examples of transfection methods using pharmaceutically acceptable carriers that may also be used for implementing certain embodiments of the present disclosure.

[1216] Targeting Moieties:

[1217] In one example, the pharmaceutical association or combination disclosed herein includes at least one binding partner which functions to target the cell to a specific tissue space or to interact with a specific moiety, either in-vivo, ex-vivo or in-vitro. Suitable binding partners include antibodies and functional fragments thereof, scaffold proteins, or peptides.

[1218] In one example, said excipients, carriers or vehicles are compatible with the GFR-binding compounds or pharmaceutical association or combinations defined herein so that they do not disrupt, tamper, modify, de-organise, de-combine or de-associate said the GFR-binding compounds or pharmaceutical association or combinations. In contrast, said excipients, carriers or vehicles preserves, maintains or reinforces the stability of the GFR-binding compounds or pharmaceutical association or combinations so as to preserve their biological activity.

[1219] In one example, the present pharmaceutical compositions also include pharmaceutically acceptable salts and/or solvates and/or prodrugs and/or isotopically-labelled derivatives of the substances and compounds described herein such as the GFR-binding compounds or any other active principles.

[1220] Pharmaceutically Acceptable Salts:

[1221] As used herein, unless indicated otherwise or contradictory in context, the term “pharmaceutically acceptable salts” refers to derivatives of the disclosed substances and compounds wherein the parent substance or compound is modified by converting an existing acid or base moiety to its salt form (e.g., by reacting the free base group with a suitable organic acid). The degree of ionization in the salt may vary from completely ionized to almost non-ionized. Examples of pharmaceutically acceptable salts include, but are not limited to, mineral or organic acid salts of basic residues such as amines; alkali or organic salts of acidic residues such as carboxylic acids; and the like. Representative acid addition salts include acetate, adipate, alginate, ascorbate, aspartate, benzenesulfonate, benzoate, bisulfate, borate, butyrate, camphorate, camphorsulfonate, citrate, cyclopentanepropionate, digluconate, dodecylsulfate, ethanesulfonate, fumarate, glucoheptonate, glycerophosphate, hemisulfate, heptonate, hexanoate, hydrobromide, hydrochloride, hydroiodide, 2-hydroxy-ethanesulfonate, lactobionate, lactate, laurate, lauryl sulfate, malate, maleate, malonate, methanesulfonate, 2-naphthalenesulfonate, nicotinate, nitrate, oleate, oxalate, palmitate, pamoate, pectinate, persulfate, 3-phenylpropionate, phosphate, picrate, pivalate, propionate, stearate, succinate, sulfate, tartrate, thiocyanate, toluenesulfonate, undecanoate, valerate salts, and the like. Representative alkali or alkaline earth metal salts include sodium, lithium, potassium, calcium, magnesium, and the like, as well as nontoxic ammonium, quaternary ammonium, and amine cations, including, but not limited to ammonium, tetramethylammonium, tetraethylammonium, methylamine, dimethylamine, trimethylamine, triethylamine, ethylamine, and the like. The pharmaceutically acceptable salts of the present disclosure include the conventional non-toxic salts of the parent compound formed, for example, in certain embodiments, from non-toxic inorganic or organic acids. The pharmaceutically acceptable salts of the present disclosure can be synthesized from the parent compound which contains a basic or acidic moiety by conventional chemical methods. Generally, such salts can be prepared by reacting the free acid or base forms of these compounds with a stoichiometric amount of the appropriate base or acid in water or in an organic solvent, or in a mixture of the two; generally, non-aqueous media like ether, ethyl acetate, ethanol, isopropanol, or acetonitrile are preferred. Lists of suitable salts are generally found in Remington's Pharmaceutical Sciences, 17th ed., Mack Publishing Company, Easton, Pa., 1985, p. 1418 and in Pharmaceutical Salts: Properties, Selection, and Use, P. H. Stahl and C. G. Wermuth (eds.), Wiley-VCH, 2008, each of which being incorporated herein by reference in its entirety. In one embodiment, the pharmaceutically acceptable salt is not a naturally occurring salt.

[1222] Pharmaceutically Acceptable Solvate:

[1223] As used herein, unless indicated otherwise or contradictory in context, the term “pharmaceutically acceptable solvate,” refers to a compound, substance, association or combination wherein molecules of a suitable solvent are incorporated in the crystal lattice. A suitable solvent is physiologically tolerable at the dosage administered. For example, in certain embodiments, solvates may be prepared by crystallization, recrystallization, or precipitation from a solution that includes organic solvents, water, or a mixture thereof. Examples of suitable solvents are ethanol, water (For example, in certain embodiments, mono-, di-, and tri-hydrates), N-methylpyrrolidinone (NMP), dimethyl sulfoxide (DMSO), dimethylformamide (DMF), [Nu],[Nu]′-dimethylacetamide (DMAC), 1,3-dimethyl-2-imidazolidinone (DMEU), 1,3-dimethyl-3,4,5,6-tetrahydro-2-(1H)-pyrimidinone (DMPU), acetonitrile (ACN), propylene glycol, ethyl acetate, benzyl alcohol, 2-pyrrolidone, benzyl benzoate, and the like. When water is the solvent, the solvate is referred to as a “hydrate”. In one embodiment, the pharmaceutically acceptable solvate is not a naturally occurring solvate.

[1224] Pharmaceutically Acceptable Isotopically-Labelled Compounds:

[1225] In one example, the present invention also includes all pharmaceutically acceptable isotopically-labelled derivatives, which are identical to the compounds, substances, combinations or associations described herein but wherein one or more atoms are replaced by atoms having an atomic mass or mass number different from the atomic mass or mass number usually found in nature. Examples of isotopes that may be incorporated into GFR-binding compound(s) as defined herein include isotopes of hydrogen, carbon, chlorine, fluorine, iodine, nitrogen, oxygen, and sulfur, such as ²H, ³H, ¹¹C, ¹³C, ¹⁴C, ³⁶Cl, ¹⁸F, ¹²³I, ¹³N, ¹⁵N, ¹⁷O, ¹⁸O, and ³⁵S, respectively. It should be understood that compounds, substances, combinations, associations, prodrugs, and pharmaceutical acceptable salts thereof described herein which contain the aforementioned isotopes and/or other isotopes of other atoms are within the scope of the invention. Certain isotopically labeled of the compounds, substances, combinations, associations, prodrugs, and salts thereof such as, for example, in certain embodiments, those incorporating a radioactive isotope such as ³H and ¹⁴C, are useful in drug and/or substrate tissue distribution studies. Tritium, i.e. ³H, and carbon-14, i.e. ¹⁴C, are particularly preferred due to their ease of preparation and detection. Further, substitution with heavier isotopes such as deuterium, i.e. ²H, can afford certain therapeutic advantages resulting from greater metabolic stability, for example, in certain embodiments, increased in vivo half-life or reduced dosage requirements, and hence may be preferred in some circumstances. Isotopically labeled compounds, substances, combinations, associations, prodrugs, and salts thereof can generally be prepared by carrying out the procedures disclosed in the Schemes and/or in the Examples by substituting a readily available non-isotopically labeled reagent for an isotopically labeled reagent.

[1226] Prodrugs:

[1227] As used herein, unless indicated otherwise or contradictory in context, the term “prodrug” refers to a compound, substance, combination or association that is transformed in vivo to yield a compound, substance, combination or association as defined herein or a pharmaceutically acceptable salt or solvate thereof. The transformation may occur by various mechanisms, such as via hydrolysis in blood. A prodrug of a compound, substance, combination or association defined herein may be formed in a conventional manner with one or more functional groups in the compound, such as an amino, hydroxyl or carboxyl group. For example, in certain embodiments, if a compound defined herein contains a carboxylic acid functional group, a prodrug can comprise: (1) an ester formed by the replacement of a hydrogen of the acid group with a group such as (C1-C6)alkyl or (C6-C10) aryl; (2) an activated ester formed by the replacement of the hydrogen of the acid group with groups such as —(CR²)COOR′, where CR² is a spacer and R can be groups such as H or methyl and R′ can be groups such as (C1-C6)alkyl or (C6-C10) aryl; and/or (3) a carbonate formed by the replacement of the hydrogen of the acid with groups such as CHROCOOR′ where R can be groups such as H or methyl and R′ can be groups such as (C1-C6)alkyl or (C6-C10)aryl. Similarly, if a compound defined herein contains an alcohol functional group, a prodrug can be formed via the replacement of the hydrogen of the alcohol with groups such as (C1-C6)alkanoyloxymethyl or (C1-C6)alkanoyloxyaryl or by forming an ester via condensation with, for example, in certain embodiments, an amino acid. Where a compound defined herein contains a primary or secondary amino group, a prodrug may comprise, for example, in certain embodiments, an amide formed by the replacement of one or both of the hydrogen atoms of the amino group with (C1-C10)alkanoyl or (C6-C10)aroyl. Other prodrugs of amines are well known to those skilled in the art. Alternatively, certain compounds defined herein may themselves act as prodrugs of other compounds defined herein. Discussions regarding prodrugs and their use can be found in, for example, in certain embodiments, “Prodrugs as Novel Delivery Systems,” T. Higuchi and W. Stella, Vol. 14 of the ACS Symposium Series, and Bioreversible Carriers in Drug Design, Pergamon Press, 1987 (ed. E B Roche, American Pharmaceutical Association). Examples of other prodrug types may be found in the aforementioned reference which is hereby incorporated by reference.

[1228] In one particular example, alginate may be used as a carrier or matrice for the non-cyclic or cyclic GFR-binding compounds in association with the adhesion-protein-inhibitor, both as defined herein.

### VII. Administration Routes and Procedures

[1229] Compounds, substances, pharmaceutical associations or combinations to be delivered and/or pharmaceutical, dermatological, prophylactic, diagnostic, or imaging compositions or formulations thereof in accordance with the present disclosure may be administered by any route of administration effective for preventing, treating, diagnosing, or imaging a disease, disorder, and/or condition and/or treating or alleviating at least one symptoms thereof.

[1230] Suitable administration protocols include any in-vitro, in-vivo or ex-vivo administration protocol. The preferred types and routes of administration will be apparent to those of skill in the art, depending on the type of condition or disease to be prevented or treated; whether the composition is nucleic acid based, protein based, cell based or combinations or mixtures thereof; and/or the target cell/tissue.

[1231] Cells, tissues or organs can be contacted ex vivo or in vitro with a pharmaceutical association or combination for uses and methods of the invention by any suitable method, including mixing or the use of a delivery vehicle. Effective in vitro or ex vivo culture conditions include, but are not limited to, effective media, bioreactor, temperature, pH and oxygen conditions that permit cell culture. An effective medium refers to any medium in which a given host cell or tissue is typically cultured. Such medium typically comprises an aqueous medium having assimilable carbon, nitrogen and phosphate sources, and appropriate salts, minerals, metals and other nutrients, such as vitamins. Cells can be cultured in conventional fermentation bioreactors, shake flasks, test tubes, microtiter dishes, and petri plates. Culturing can be carried out at a temperature, pH and oxygen content appropriate for a cell or tissue. Such culturing conditions are within the expertise of one of ordinary skill in the art.

[1232] In one aspect, the present disclosure thus also provides a method for converting a neoplastic cell into a non-neoplastic cell, in-vitro or ex-vivo as defined herein, said method comprising the administration to a neoplastic cell of an effective amount of a pharmaceutical association, combination or composition as defined herein.

[1233] Ex-Vivo Administration:

[1234] As used herein, unless indicated otherwise or contradictory in context, the term “ex-vivo administration” refers to performing the regulatory step outside of the subject/patient, such as administering a pharmaceutical association, combination or composition as defined herein to a population of cells (e.g., neoplastic cells) removed from a subject/patient for e.g. diagnostic, analysis and/or academic purposes.

[1235] In-Vivo Administration:

[1236] In one example, pharmaceutical, prophylactic, diagnostic, or imaging associations, combinations or compositions are administered by one or more of a variety of routes, including oral, intravenous, intramuscular, intra-arterial, intramedullary, rectal, intravaginal, intrathecal, subcutaneous, intraventricular, transdermal, intradermal, intraperitoneal, topical (e.g. by ointments, creams, powders, lotions, gels, and/or drops), buccal, enteral, mucosal, nasal, vitreal, intratumoral, sublingual, by intra-tracheal instillation, bronchial instillation, and/or inhalation, as an oral spray, nasal spray, and/or aerosol, and/or through a portal vein catheter. In one example, pharmaceutical, prophylactic, diagnostic, or imaging associations, combinations or compositions are administered by systemic intravenous injection. In one example, pharmaceutical, prophylactic, diagnostic, or imaging associations, combinations or compositions may be administered in a way which allows them to cross the blood-brain barrier, vascular barrier, or other epithelial barrier. In one most particular example, pharmaceutical, prophylactic, diagnostic, or imaging associations, combinations or compositions may be administered locally by intratumoral administration or near tumor sites. Local administration may be performed e.g. using patches, syringes, or insertion of permeable macroscopic or microscopic vesicles containing the active principle(s).

[1237] Delivery:

[1238] As used herein, unless indicated otherwise or contradictory in context, the term “delivery” refers to the act or manner of delivering a compound, substance, association, combination, composition, entity, moiety, cargo or payload.

[1239] Delivery Agent:

[1240] As used herein, unless indicated otherwise or contradictory in context, the term “delivery agent” refers to any substance which facilitates, at least in part, the in vivo delivery of a pharmaceutical association, combination or composition defined herein to targeted cells.

[1241] Forms Suitable for Oral Administration:

[1242] A pharmaceutical association, combination or composition for uses and methods of the invention, for example, in certain embodiments, includes forms suitable for oral administration as a tablet, capsule, pill, powder, sustained release formulations, solution, suspension, or for parenteral injection as a sterile solution, suspension or emulsion. Pharmaceutical compositions suitable for the delivery of pharmaceutical associations or combinations defined herein and methods for their preparation will be readily apparent to those skilled in the art. Such compositions and methods for their preparation may be found, for example, in certain embodiments, in ‘Remington's Pharmaceutical Sciences’, 19th Edition (Mack Publishing Company, 1995), which is hereby incorporated by reference in its entirety. Oral administration may involve swallowing, so that the compounds or associations enters the gastrointestinal tract, or buccal or sublingual administration may be employed by which the compound enters the blood stream directly from the mouth. Formulations suitable for oral administration include solid formulations, such as tablets, capsules containing particulates, liquids, or powders; lozenges (including liquid-filled), chews; multi- and nano-particulates; gels, solid solution, liposome, films (including muco-adhesive), ovules, sprays and liquid formulations. Liquid formulations include suspensions, solutions, syrups and elixirs. Such formulations may be employed as fillers in soft or hard capsules and typically comprise a carrier, for example, in certain embodiments, water, ethanol, polyethylene glycol, propylene glycol, methylcellulose, or a suitable oil, and one or more emulsifying agents and/or suspending agents. Liquid formulations may also be prepared by the reconstitution of a solid, for example, in certain embodiments, from a sachet. The pharmaceutical associations defined herein may also be used in fast-dissolving, fast-disintegrating dosage forms such as those described in the art.

[1243] Forms Suitable for Parenteral Administration:

[1244] In one example, the pharmaceutical association, combination or composition for uses and methods of the invention may be administered by parenteral injection. Exemplary parenteral administration forms include sterile solutions, suspensions or emulsions of the pharmaceutical association defined herein in sterile aqueous media, for example, in certain embodiments, aqueous propylene glycol or dextrose. In another embodiment, the parenteral administration form is a solution. Such parenteral dosage forms can be suitably buffered, if desired. Preferred sterile solutions include sodium chloride, 0.9%, UPS solution. Injectable formulations can be sterilized, for example, in certain embodiments, by filtration through a bacterial-retaining filter, and/or by incorporating sterilizing agents in the form of sterile solid compositions which can be dissolved or dispersed in sterile water or other sterile injectable medium prior to use.

[1245] Forms Suitable for Rectal and Vaginal Administration:

[1246] Compositions for rectal or vaginal administration are typically suppositories which can be prepared by mixing compositions with suitable non-irritating excipients such as cocoa butter, polyethylene glycol or a suppository wax which are solid at ambient temperature but liquid at body temperature and therefore melt in the rectum or vaginal cavity and release the active ingredient.

[1247] Forms Suitable for Topical and/or Transdermal Administration:

[1248] Dosage forms for topical and/or transdermal administration of a composition may include ointments, pastes, creams, lotions, gels, powders, solutions, sprays, inhalants and/or patches. Generally, an active ingredient is admixed under sterile conditions with a pharmaceutically acceptable excipient and/or any needed preservatives and/or buffers as may be required.

[1249] Forms Suitable for Pulmonary Administration:

[1250] Dosage forms for pulmonary administration via the buccal cavity may comprise dry particles which comprise the active ingredient (e.g. the pharmaceutical association defined herein) and which have a diameter in the range from about 0.5 nm to about 7 nm. Such compositions are conveniently in the form of dry powders for administration using a device comprising a dry powder reservoir to which a stream of propellant may be directed to disperse the powder and/or using a self-propelling solvent/powder dispensing container such as a device comprising the active ingredient dissolved and/or suspended in a low-boiling propellant in a sealed container. Pharmaceutical compositions formulated for pulmonary delivery may provide an active ingredient in the form of droplets of a solution and/or suspension. Such formulations may be prepared, packaged, and/or sold as aqueous and/or dilute alcoholic solutions and/or suspensions, optionally sterile, comprising active ingredient, and may conveniently be administered using any nebulization and/or atomization device. Such formulations may further comprise one or more additional ingredients including, but not limited to, a flavoring agent such as saccharin sodium, a volatile oil, a buffering agent, a surface active agent, and/or a preservative such as methylhydroxybenzoate.

[1251] Forms Suitable for Nasal Administration:

[1252] Formulations described herein as being useful for pulmonary delivery are also useful for intranasal delivery of a pharmaceutical composition. Formulations suitable for nasal administration may, for example, in certain embodiments, comprise from about as little as 0.1% (w/w) and as much as 100% (w/w) of active ingredient (e.g. the pharmaceutical association defined herein), and may comprise one or more of the additional ingredients described herein. A pharmaceutical composition may be prepared, packaged, and/or sold in a formulation suitable for buccal administration. Such formulations may, for example, in certain embodiments, be in the form of tablets and/or lozenges made using conventional methods, and may, for example, in certain embodiments, 0.1% to 20% (w/w) active ingredient, the balance comprising an orally dissolvable and/or degradable composition and, optionally, one or more of the additional ingredients described herein. Alternately, formulations suitable for buccal administration may comprise a powder and/or an aerosolized and/or atomized solution and/or suspension comprising active ingredient. Such powdered, aerosolized, and/or aerosolized formulations, when dispersed, may have an average particle and/or droplet size in the range from about 0.1 nm to about 200 nm, and may further comprise one or more of any additional ingredients described herein.

[1253] Forms Suitable for Ophthalmic Administration:

[1254] Dosage forms for ophthalmic administration include, for example, in certain embodiments, eye drops including, for example, in certain embodiments, a 0.1/1.0% (w/w) solution and/or suspension of the active ingredient (e.g. the pharmaceutical association defined herein) in an aqueous or oily liquid excipient. Such drops may further comprise buffering agents, salts, and/or one or more other of any additional ingredients described herein. Other opthalmically-administrable formulations which are useful include those which comprise the active ingredient in microcrystalline form and/or in a liposomal preparation. Ear drops and/or eye drops are contemplated as being within the scope of this present disclosure.

[1255] Direct Injection:

[1256] One preferred administration method for delivering a pharmaceutical association, combination or composition as defined herein is by local administration, in particular, by direct injection. Direct injection techniques are particularly useful for administering a composition to a cell or tissue that is accessible by surgery, and particularly, on or near the surface of the body. Administration of a composition locally within the area of a target cell refers to injecting the composition centimeters and preferably, millimeters from the target cell or tissue.

[1257] Dosage Regimens:

[1258] The dosage regimen of the pharmaceutical associations or combinations and/or pharmaceutical compositions as defined herein may be adjusted to provide the optimum desired response. For example, in certain embodiments, a single bolus may be administered, several divided doses may be administered over time or the dose may be proportionally reduced or increased as indicated by the exigencies of the therapeutic situation. The appropriate dosing regimen, the amount of each dose administered and/or the intervals between doses will depend upon the pharmaceutical association being used, the type of pharmaceutical composition, the characteristics of the subject in need of treatment and the severity of the condition being treated. Thus, the skilled artisan would appreciate, based upon the disclosure provided herein, that the dose and dosing regimen is adjusted in accordance with methods well-known in the therapeutic arts. That is, the maximum tolerable dose can be readily established, and the effective amount providing a detectable therapeutic benefit to a patient may also be determined, as can the temporal requirements for administering each agent to provide a detectable therapeutic benefit to the patient. Accordingly, while certain dose and administration regimens are exemplified herein, these examples in no way limit the dose and administration regimen that may be provided to a patient in practicing the present invention. In general, pharmaceutical compositions in accordance with the present disclosure may be administered at dosage levels sufficient to deliver from about 0.0001 mg/kg to about 100 mg/kg, from about 0.01 mg/kg to about 50 mg/kg, from about 0.1 mg/kg to about 40 mg/kg, from about 0.5 mg/kg to about 30 mg/kg, from about 0.01 mg/kg to about 10 mg/kg, from about 0.1 mg/kg to about 10 mg/kg, or from about 1 mg/kg to about 25 mg/kg, of subject body weight per day, one or more times a day, to obtain the desired therapeutic, diagnostic, prophylactic, or imaging effect. The desired dosage may be delivered three times a day, two times a day, once a day, every other day, every third day, every week, every two weeks, every three weeks, or every four weeks. In certain embodiments, the desired dosage may be delivered using multiple administrations (e.g., two, three, four, five, six, seven, eight, nine, ten, eleven, twelve, thirteen, fourteen, or more administrations). It is to be further understood that for any particular subject, specific dosage regimens should be adjusted over time according to the individual need and the professional judgment of the person administering or supervising the administration of the compositions, and that dosage ranges set forth herein are exemplary only and are not intended to limit the scope or practice of the present invention. For example, in certain embodiments, doses may be adjusted based on pharmacokinetic or pharmacodynamic parameters, which may include clinical effects such as toxic effects and/or laboratory values. Thus, the present invention encompasses intra-patient dose-escalation as determined by the skilled artisan. Determining appropriate dosages and regiments for administration of the chemotherapeutic agent are well-known in the relevant art and would be understood to be encompassed by the skilled artisan once provided the teachings disclosed herein.

[1259] Effective Dose Parameters:

[1260] The dosage regimen of the pharmaceutical associations or combinations and/or pharmaceutical compositions as defined herein may be adjusted to obtain effective dose parameters. Effective dose parameters can be determined using methods standard in the art for a particular disease or condition. In particular, the effectiveness of dose parameters of a therapeutic composition as defined herein when treating cancer can be determined by assessing response rates. Such response rates refer to the percentage of treated patients in a population of patients that respond with either partial or complete remission. Remission can be determined by, for example, in certain embodiments, measuring tumor size or microscopic examination for the presence of cancer cells in a tissue sample.

[1261] A pharmaceutical composition as defined herein may be prepared, packaged, or sold in bulk, as a single unit dose, or as a plurality of single unit doses.

[1262] Unit Dose:

[1263] As used herein, unless indicated otherwise or contradictory in context, the term “unit dose” refers to a discrete amount of the pharmaceutical composition comprising a predetermined amount of the active ingredient. The amount of the active ingredient is generally equal to the dosage of the active ingredient which would be administered to a subject or a convenient fraction of such a dosage such as, for example, in certain embodiments, one-half or one-third of such a dosage.

[1264] Single Unit Dose:

[1265] As used herein, unless indicated otherwise or contradictory in context, the term “single unit dose” refers to a dose of any therapeutic association or composition administered in one dose/at one time/single route/single point of contact, i.e., single administration event.

[1266] Split Dose:

[1267] As used herein, unless indicated otherwise or contradictory in context, the term “split dose” refers to the division of single unit dose or total daily dose into two or more doses.

[1268] Total Daily Dose:

[1269] As used herein, unless indicated otherwise or contradictory in context, the term “total daily dose” refers to an amount given or prescribed in 24 hr period. It may be administered as a single unit dose.

[1270] The relative amounts of the active ingredient(s), the pharmaceutically acceptable excipients, carriers or vehicles, and any additional ingredients in a pharmaceutical composition defined herein will vary, depending upon the identity, size, and condition of the subject treated and further depending upon the route by which the composition is to be administered. In addition to the active ingredient, a pharmaceutical composition of the invention may further comprise one or more additional pharmaceutically active agents.

[1271] Combination Therapy:

[1272] Compounds, associations, compositions or formulations defined herein may be used in combination with one or more other therapeutic, prophylactic, diagnostic, or imaging agents. As used herein, the term “in combination with” is not intended to imply that the agents must be administered at the same time and/or formulated for delivery together, although these methods of delivery are within the scope of the present disclosure. Compounds, associations, compositions or formulations can be administered concurrently with, prior to, or subsequent to, one or more other desired therapeutics or medical procedures. In some embodiments, they are administered within about 90, 60, 30, 15, 10, 5, or 1 minute of one another. In some embodiments, the administrations of the agents are spaced sufficiently closely together such that a combinatorial (e.g., a synergistic) effect is achieved. In general, each agent will be administered at a dose and/or on a time schedule determined for that agent. In one example, the present disclosure encompasses the delivery of pharmaceutical, prophylactic, diagnostic, or imaging compositions in combination with agents that improve their bioavailability, reduce and/or modify their metabolism, inhibit their excretion, and/or modify their distribution within the body. It will further be appreciated that therapeutically, prophylactically, diagnostically, or imaging active agents used in combination may be administered together in a single composition or administered separately in different compositions. In general, it is expected that agents used in combination with be used at levels that do not exceed the levels at which they are used individually. In one example, the levels used in combination will be lower than those utilized individually. The particular combination of therapies to employ in a combination regimen will take into account compatibility of the desired therapeutics and/or procedures and the desired therapeutic effect to be achieved. It will also be appreciated that the therapies employed may achieve a desired effect for the same disorder (For example, in certain embodiments, a composition useful for treating cancer in accordance with the present disclosure may be administered concurrently with a chemotherapeutic agent), or they may achieve different effects (e.g., control of any adverse effects).

[1273] In certain embodiments, said adhesion protein inhibitor may be, separately from said GFR-binding compound, administered locally to the tumor or cancer site using appropriate means such as by injection or by incision, using one administration technique and said GFR-binding compound may then be administered locally (immediately or not) using another administration technique to the same tumor or cancer site.

[1274] In one aspect, the present disclosure thus provides at least one GFR-binding compound as defined herein for use in the prevention, diagnostic and/or treatment of a neoplastic disease in association or combination with at least one adhesion protein or molecule inhibitor as defined herein.

[1275] Also provided is a method of treating a neoplastic disease, comprising administering to a subject in need thereof an effective amount of at least one GFR-binding compound as defined herein in association or combination with at least one adhesion protein or molecule inhibitor as defined herein.

[1276] Although the descriptions of pharmaceutical associations, combinations or compositions provided herein are principally directed to pharmaceutical associations, combinations or compositions which are suitable for administration to mammals, in particular humans, it will be understood by the skilled artisan that such compositions are generally suitable for administration to animals of all sorts, in particular to any member of the Vertebrate class. Modification of pharmaceutical compositions suitable for administration to humans in order to render the compositions suitable for administration to various animals is well understood, and the ordinarily skilled veterinary pharmacologist can design and/or perform such modification with merely ordinary, if any, experimentation. Subjects to which administration of the pharmaceutical compositions is contemplated include, but are not limited to, humans and/or other primates; mammals, including commercially relevant mammals such as cattle, pigs, horses, sheep, cats, dogs, mice, and/or rats; and/or birds, including commercially relevant birds such as chickens, ducks, geese, and/or turkeys.

### VIII. Dermatological Applications

[1277] When the neoplastic disease to be prevented or treated involves neoplastic cells belonging to the skin cell lineage (mainly to the fibroblast lineage), the pharmaceutical composition defined herein may be a dermatological composition comprising a pharmaceutical association or combination of a GFR-binding compound and an adhesion protein inhibitor as all defined herein and at least one dermatologically acceptable excipient.

[1278] For example, in certain embodiments, a dermatological composition for the uses of the invention may contain between 0.01% and 100% by weight (over the total weight of the dermatological composition) of a GFR-binding compound and/or an adhesion protein inhibitor, both as defined herein, as a dermatological effective amount. The dermatological composition particularly comprises between 0.01% and 95%, between 0.01% and 90%, between 0.01% and 85%, between 0.01% and 80%, between 0.01% and 75%, between 0.01% and 70%, between 0.01% and 65%, between 0.01% and 60%, between 0.01% and 55%, between 0.01% and 50%, between 0.01% and 45%, between 0.01% and 40%, between 0.01% and 35%, between 0.01% and 30%, between 0.01% and 25%, between 0.01% and 20%, between 0.01% and 15%, between 0.01% and 10%, between 0.01% and 5%, between 0.1% and 100%, between 0.1% and 95%, between 0.1% and 90%, between 0.1% and 85%, between 0.1% and 80%, between 0.1% and 75%, between 0.1% and 70%, between 0.1% and 65%, between 0.1% and 60%, between 0.1% and 55%, between 0.1% and 50%, between 0.1% and 45%, between 0.1% and 40%, between 0.1% and 35%, between 0.1% and 30%, between 0.1% and 25%, between 0.1% and 20%, between 0.1% and 15%, between 0.1% and 10%, and between 0.1% and 5% by weight (over the total weight of the dermatological composition) of any one of a GFR-binding compound or an adhesion protein inhibitor or both.

[1279] Dermatologically Acceptable:

[1280] As used herein, unless indicated otherwise or contradictory in context, the term “dermatologically acceptable” means that the compound(s) or pharmaceutical association(s) used are adapted for use in contact with human skin without undue toxicity, incompatibility, instability, allergic response, or their equivalents.

[1281] Dermatological Formulations:

[1282] Suitable formulation for implementing dermatological embodiments of the invention include an aqueous or oil-based solution, a water-based cream or gel or an oily gel, usually in a jar or a tube, particularly a shower gel, shampoo, milk, emulsion, microemulsion or nanoemulsion, particularly oil-in-water or water-in-oil or multiple of silicone-based; a lotion, particularly in a glass or plastic bottle of a spray or aerosol bottle, a blister-pack, liquid soap, a dermatological bar of soap, a pomade, mousse, an anhydrous product, preferably liquid, cream or solid, for example in the form of a stick, particularly in the form of lipstick, a cataplasm or a patch.

[1283] Preferred administration routes include, but are not limited to, topical, intradermal and intra-tumoral as already defined herein.

[1284] Dermatologically Acceptable Excipients:

[1285] Suitable dermatologically acceptable excipients for implementing embodiments of the invention include, but are not limited to, preservatives, emollients, emulsifiers, surfactants, moisturizers, thickeners, conditioners, mattifying agents, stabilizers, antioxidants, texturizing agents, shine agents, filmogenic agents, solubilizers, pigments, colorants, perfumes, and solar filters. These excipients are preferably chosen from among the group consisting of amino acids and their derivatives, polyglycerols, esters, polymers and cellulose derivatives, lanoline derivatives, phospholipids, lactoferrins, lactoperoxidases, sucrose-based stabilizers, vitamin E and its derivatives, natural and synthetic waxes, vegetable oils, triglycerides, insaponifiables, phytosterols, plant esters, silicones and their derivatives, protein hydrolysates, jojoba oil and its derivatives, lipo/hydrosoluble esters, betaines, aminoxides, saccharose ester plant extracts, titanium dioxides, glycines, parabens, and even more preferably from among the group consisting of butylene glycol, glycol-15 stearyl ether, cetearyl alcohol, phenoxyethanol, methylparaben, propylparaben, butylparaben, butylenes glycol, natural tocopherols, glycerine, dihydroxycetyl sodium phosphate, isopropyl hydroxycetyl ether, le glycol stearate, triisononanoin, octyl cocoate, polyacrylamide, isoparaffin, laureth-7, carbomer, propylene glycol, glycerol, bisabolol, dimethicone, sodium hydroxide, PEG 30-dipolyhydroxysterate, capric/caprylic triglycerides, cetearyl octanoate, dibutyl adipate, grapeseed oil, jojoba oil, magnesium sulfate, EDTA, cyclomethicone, xanthan gum, citric acid, sodium lauryl sulfate, mineral waxes and oils, isostearyl isostearate, dipelargonate of propylene glycol, isostearate of propylene glycol, PEG 8, beeswax, glyceride of hydrogenated palm kernel oil, lanolin oil, sesame oil, cetyl lactate, lanolin alcohol, titanium dioxide, lactose, saccharose, low-density polyethylene, and isotonic salt solution.

[1286] In one example, the dermatological composition as defined herein may contain at least one other active agents and/or excipients and/or additives of pharmaceutical, especially dermatological, interest such as agents with the following properties:
[1287] wound-healing properties; such as panthenol and derivatives thereof, for example ethyl panthenol, aloe vera, pantothenic acid and derivatives thereof, allantoin, bisabolol, and dipotassium glycyrrhizinate;
[1288] anti-inflammatory properties: such as steroidal and non-steroidal antiinflammatories, in particular Inhibitors of the production of cytokines and chemokines, of cyclooxygenase, of nitric oxide (NO) and nitric oxide synthase (NOS). As an example of anti-inflammatory products, mention may be made of extracts of Ginkgo biloba, trilactone terpenes such as ginkgolides, especially ginkgolide B and bilobalide known for their platelet-activating factor (PAF) antagonist properties.

[1289] The CTFA Cosmetic Ingredient Handbook, Second Edition (1992), which is hereby incorporated by reference in its entirety, describes different cosmetic and pharmaceutical ingredients currently used in the cosmetic and pharmaceutical industry that are particularly adapted to topical use and which may be used in a dermatological composition of the invention. Examples of these types of ingredients include but are not limited to the following compounds: abrasives, absorbent compounds, compounds with aesthetic purposes such as perfumes, pigments, colorants, essential oils, astringents, etc. (for example: clove oil, menthol, camphor, eucalyptus oil, eugenol, menthyl lactate, and hamelis distillate), anti-acne agents, anti-flocculant agents, anti-foaming agents, anti-microbial agents (for example iodopropyl butylcarbamate), les antioxidants, bonding agents, biological additives, tampon agents, swelling agents, chelatants, additives, biocidal agents, denaturants, external analgesics, film-forming materials, polymers, opacifying agents, pH adjusters, reducing agents, depigmenting or lightening agents (for example: hydroquinone, kojic acid, ascorbic acid, magnesium ascorbyl phosphate, ascorbyl glucosamine), conditioning agents (for example: humectants), calming agents for the skin and/or scarring agents (for example: panthenol and its derivatives, for example ethyl panthenol), aloe vera, pantothenic acid and its derivatives, allantoin, bisabolol and dipotassium glycyrrhizinate), thickeners, vitamins, and the derivatives or equivalents of these.

[1290] In one aspect, the present disclosure provides a pharmaceutical association or combination as defined herein or a dermatological composition as defined herein for use in converting a neoplastic skin cell (i.e. any cell belonging to the fibroblast lineage as defined herein) into a non-neoplastic skin cell, in particular into a functional and/or healthy skin cell.

[1291] In one aspect, the present disclosure provides a pharmaceutical association or combination as defined herein or a dermatological composition as defined herein for use in protecting (i.e. preventing and/or treating) a subject or patient from a skin neoplastic disease, disorder or condition, in particular, but not limited to, basal and squamous cell skin cancers, melanoma skin cancer, Merkel cell carcinoma, lymphoma of the skin and Kaposi sarcoma.

[1292] Suitable as amounts of pharmaceutical association for implementing embodiments of the invention in the dermatological field include the group consisting of between about 0.0001 m g/day to about 5000 mg/day, between about 0.0001 m g/day to about 1000 mg/day, between about 0.0001 m g/day to about 10 mg/day, between about 0.0001 mg/day to about 1 mg/day, or between about 0.0001 mg/day to about 100 m g/day, all being preferred for implementing embodiments of the invention.

[1293] Advantageously, the subject who has need thereof is a subject chosen from a population having an average age of more than 30 years old or who has had sunlight over-exposure, has a family history of skin cancer, has or has had certain other skin conditions or previous radiotherapy, has been exposed to certain chemicals and has a weakened immune system.

### IX. Ophthalmic Applications

[1294] Preferable dosage forms for the pharmaceutical association, combination or composition as defined herein for treating ophthalmic neoplastic diseases, disorders or conditions include, for example, in certain embodiments, eye drops and eye ointments. These can be prepared using conventional techniques. For instance, eye drops may be prepared, using isotonic agents such as sodium chloride, buffers such as sodium phosphate, and preservatives such as benzalkonium chloride. A suitable pH is within an ophthalmologically acceptable range. Preferred pH is within pH 4 to 8.

[1295] Particularly preferred administration routes include vitreal, intraocular and intra-tumoral.

[1296] A suitable dose of pharmaceutical association, combination or composition for treating eye disorders is appropriately selected, depending on the symptoms, age of patients, dosage form and the like. For eye drops, suitable concentration may be 0.0001 to 10 w/v %, preferably 0.0001 to 0.01 w/v % for administration into eyes once or several times a day.

### X. Surgical Treatments

[1297] In one aspect, the pharmaceutical association, combination or composition as defined herein may be used in a surgical method suitable for treating or preventing a neoplastic disease such as a tumour or a cancer.

[1298] In one aspect, the present disclosure provides a surgical method for surgical treatment of a neoplastic disease comprising the provision of a pharmaceutical association, combination or composition as defined herein, and the contacting or administration of said pharmaceutical association, combination or composition with a body part of a patient to be treated.

[1299] For example, in certain embodiments, the surgical treatment of the invention may include the provision of a placement, insertion or depositing device and the contacting of said pharmaceutical association, combination or composition with a body part of a patient using said placement, insertion or depositing device.

[1300] In one example, said placement, insertion or depositing device comprises an injection device such as a syringe, and comprises the positioning of said pharmaceutical association, combination or composition inside said injection device for injection into a subject/patient or into a body part of a subject/patient.

### XI. Pharmaceutical Applications, Uses and Methods

[1301] The present invention provides for uses and methods of converting or inducing the conversion or the recoding of a neoplastic cell (e.g. a cancer cell) into a non-neoplastic cell (e.g. a non-cancerous cell) through extracellular, non-mutagenic, conversion or recoding of said neoplastic cell. In other words, the present disclosure provides methods for a neoplastic cell to perform self-healing or self-recovery into a more functional, healthy, non-neoplastic cell.

[1302] Conveniently, such a self-healing process is generally achieved within less than 7 days. In particular, such a self-healing process is generally achieved within less than 6 days. In particular, such a self-healing process is generally achieved within less than 5 days. In particular, such a self-healing process is generally achieved within less than 4 days. In particular, such a self-healing process is generally achieved within less than 3 days. In particular, such a self-healing process is generally achieved within less than 2 days. In particular, such a self-healing process is generally achieved within less than 24 hours. In particular, such a self-healing process is generally achieved within less than 18 hours.

[1303] Conveniently, such a self-healing process is achieved with a cell conversion yield greater than about 50%. In particular, such a self-healing process is achieved with a cell conversion yield greater than about 60%. In particular, such a self-healing process is achieved with a cell conversion yield greater than about 70%. In particular, such a self-healing process is achieved with a cell conversion yield greater than about 80%. In particular, such a self-healing process is achieved with a cell conversion yield greater than about 90%. In particular, such a self-healing process is achieved with a cell conversion yield greater than about 95%. In particular, such a self-healing process is achieved with a cell conversion yield is about 100%.

[1304] Cell Conversion Yield:

[1305] As used herein, “cell conversion yield” means the percentage of neoplastic cells that are transformed into non-neoplastic cells. It is considered significant when it is higher than 10%. There are many ways to measure a cell conversion yield, but for the purpose of the present disclosure, and for the avoidance of any doubts, the cell conversion yield is herein measured by using a haemocytometer for precise cell counting using, for instance, a haemocytometer from Baxter Scientific and following the standard procedure below:
[1306] (a) Cleaning the chamber and cover slip with alcohol. Drying and fixing the coverslip in position.
[1307] (b) Harvesting the cells. Adding 10 μL of the cells to the haemocytometer.
[1308] (c) Placing the chamber in the inverted microscope under a 10× objective. Using phase contrast to distinguish the cells.
[1309] (d) Counting the cells in the large, central gridded square (1 mm²). The gridded square is circled in the graphic below. Multiplying by 10⁴ to estimate the number of cells per mL.
[1310] (e) Preparing duplicate samples and averaging the count.

[1311] In certain embodiments, the present disclosure provides methods to convert a neoplastic cell into a non-neoplastic cell, wherein said obtained neoplastic cell is homogeneous and/or of substantially the same differentiation state. Conveniently, the converted non-neoplastic cells obtained using a method as defined herein, have a homogeneity of greater than 20%. In particular, the converted non-neoplastic cells obtained using a method as defined herein, have a homogeneity of greater than 50%. In particular, the converted non-neoplastic cells obtained using a method as defined herein, have a homogeneity of greater than 70%. In particular, the converted non-neoplastic cells obtained using a method as defined herein, have a homogeneity of greater than 90%. In particular, the converted non-neoplastic cells obtained using a method as defined herein, have a homogeneity of greater than 99%.

[1312] Homogeneous:

[1313] As used herein, “homogeneous”, when used in relation to a non-neoplastic cell population obtained using methods as defined herein, means that substantially all of the obtained non-neoplastic cells within the population are in a G0 phase. There are many ways to test and measure the homogeneity of a cell population, but for the purpose of the present disclosure, and for the avoidance of any doubts, the cell homogeneity is herein measured using cell immunofluorescence staining by detecting phosphorylation of the Rb protein, an absence of phosphorylation meaning that substantially all cells are in a G0 phase.

[1314] Conveniently, the converted non-neoplastic cells obtained using a method as defined herein, are more than 20% identical. In particular, the converted non-neoplastic cells obtained using a method as defined herein, are more than 50% identical. In particular, the converted non-neoplastic cells obtained using a method as defined herein, are more than 70% identical. In particular, the converted non-neoplastic cells obtained using a method as defined herein, are more than 90% identical. In particular, the converted non-neoplastic cells obtained using a method as defined herein, are more than 99% identical.

[1315] As used herein, “substantially the same differentiation state” or “substantially identical differentiation state”, when used in relation to non-neoplastic cells obtained using methods as defined herein, means exhibiting the same gene expression pattern. There are many ways to test and measure the differentiation state of a cell and group of cells, but for the purpose of the present disclosure, and for the avoidance of any doubts, the differentiation state of a cell or a group of cell is herein measured using RT-PCR for the quantification of the expression of well-defined marker genes for the particular differentiation state.

[1316] In certain aspects, a pharmaceutical association, combination or composition as defined herein is thus useful in the protection of a subject/patient from (e.g. in the treatment and/or prevention of) a neoplastic disease, condition, disorder or pathology and/or at least one symptom thereof such as tumors and cancers. In one aspect, the present disclosure provides a pharmaceutical association, combination or (therapeutic, dermatologic, ophthalmologic, diagnostic, etc.) composition defined herein for use in the treatment of a neoplastic disease, condition, disorder or pathology and/or at least one symptom thereof, said composition comprising a GFR-binding compound and an adhesion protein inhibitor, all as already defined herein. Also provided is a method of treating a neoplastic disease, comprising administering to a subject in need thereof an effective amount of a pharmaceutical association, combination or (therapeutic, dermatologic, ophthalmologic, diagnostic, etc.) composition as defined herein.

[1317] In one aspect, the present disclosure provides a pharmaceutical association, combination or (therapeutic, dermatologic, ophthalmologic, diagnostic, etc.) composition defined herein for use in a method of converting or recoding a neoplastic cell to induce and/or promote and/or improve self-healing and/or self-recovery thereof. Also provided is a method of converting or recoding a neoplastic cell to induce and/or promote and/or improve self-healing and/or self-recovery thereof, comprising administering to a subject in need thereof an effective amount of a pharmaceutical association, combination or (therapeutic, dermatologic, ophthalmologic, diagnostic, etc.) composition as defined herein.

[1318] In one example, the conversion or recoding of the neoplastic cell into a non-neoplastic cell is substantially permanent. As used herein, the term “permanent”, when used in relation to the conversion or recoding of a neoplastic cell into a non-neoplastic cell, means physiologically permanent conversion as the neoplastic cell treated by the method of the invention then becomes a normal, functional, healthy cell just like any other non-neoplastic cell of the subject's body and is thus not prevented to develop a new neoplastic state or any other abnormal state in the future (like any normal cell could/would).

[1319] In one aspect, the present disclosure provides a pharmaceutical association, combination or (therapeutic, dermatologic, ophthalmologic, diagnostic, etc.) composition defined herein for use in a method of restoring the ability of a neoplastic cell to undergo differentiation. Also provided is a method of restoring the ability of a neoplastic cell to undergo differentiation, comprising administering to a subject in need thereof an effective amount of a pharmaceutical association, combination or (therapeutic, dermatologic, ophthalmologic, diagnostic, etc.) composition as defined herein.

[1320] In one aspect, the present disclosure provides a pharmaceutical association, combination or (therapeutic, dermatologic, ophthalmologic, diagnostic, etc.) composition defined herein for use in a method of converting and/or recoding a circulating or non-circulating neoplastic cell such as a metastatic or non-metastatic cancer cell, into a non-neoplastic cell. Also provided is a method of converting and/or recoding a circulating or non-circulating neoplastic cell such as a metastatic or non-metastatic cancer cell, into a non-neoplastic cell, comprising administering to a subject in need thereof an effective amount of a pharmaceutical association, combination or (therapeutic, dermatologic, ophthalmologic, diagnostic, etc.) composition as defined herein.

[1321] In one aspect, the present disclosure provides a pharmaceutical association, combination or (therapeutic, dermatologic, ophthalmologic, diagnostic, etc.) composition defined herein for use in a method of providing and/or producing and/or inducing the formation of a physiologically functional and/or healthy cell of the bone, cartilage, vascular, blood, fibroblast, muscle, neural, epithelial, renal, retinal cell lineage from a neoplastic cell. Also provided is a method of providing and/or producing and/or inducing the formation of a physiologically functional and/or healthy cell of the bone, cartilage, vascular, blood, fibroblast, muscle, neural, epithelial, renal, retinal cell lineage from a neoplastic cell, comprising administering to a subject in need thereof an effective amount of a pharmaceutical association, combination or (therapeutic, dermatologic, ophthalmologic, diagnostic, etc.) composition as defined herein.

[1322] In one aspect, the present disclosure provides a pharmaceutical association, combination or (therapeutic, dermatologic, ophthalmologic, diagnostic, etc.) composition defined herein for use in a method of inducing and/or promoting and/or enhancing neoplastic cell differentiation. Also provided is a method of inducing and/or promoting and/or enhancing neoplastic cell differentiation, comprising administering to a subject in need thereof an effective amount of a pharmaceutical association, combination or (therapeutic, dermatologic, ophthalmologic, diagnostic, etc.) composition as defined herein.

[1323] In one aspect, the present disclosure provides a pharmaceutical association, combination or (therapeutic, dermatologic, ophthalmologic, diagnostic, etc.) composition defined herein for use in a method of non-mutagenically protecting a subject from a neoplastic disease i.e. without modifying or altering the genome of the treated neoplastic cells. Also provided is a method of non-mutagenically protecting a subject from a neoplastic disease i.e. without modifying or altering the genome of the treated neoplastic cells, comprising administering to a subject in need thereof an effective amount of a pharmaceutical association, combination or (therapeutic, dermatologic, ophthalmologic, diagnostic, etc.) composition as defined herein.

[1324] In one aspect, the present disclosure provides a pharmaceutical association, combination or (therapeutic, dermatologic, ophthalmologic, diagnostic, etc.) composition defined herein for use in a method of extracellular treatment of a neoplastic disease, disorder, condition, pathology, or any symptoms thereof.

[1325] Also provided is a method of extracellular treatment of a neoplastic disease, disorder, condition, pathology, or any symptoms thereof, comprising administering to a subject in need thereof an effective amount of a pharmaceutical association, combination or (therapeutic, dermatologic, ophthalmologic, diagnostic, etc.) composition as defined herein.

[1326] An extracellular treatment as used herein implies at least one (in particular, all) biological action/effect to be provided or to occur outside the cell to be treated (i.e. a neoplastic cell). In other words, the biologically active agent (e.g. the pharmaceutical association, combination or composition as defined herein) delivers/provides its biological/pharmaceutical effect to the outside of the cell (e.g. on the cell's surface) without the need to penetrate through the cell membrane, inside the neoplastic cell to be treated. Once the extracellular action/effect has been administered/delivered to the neoplastic cell to be treated, said active agent may be, for instance, excreted from the host organism with or without being metabolised, and/or tagged to be destroyed through apoptotic routes, and/or internalised by nearby cells, etc. . . . . Without being bound to any specific theory, it is believed that once the extracellular biological action/effect/message/signal has been delivered by the pharmaceutical association or composition defined herein to a neoplastic cell to be treated, said cell then undergo self-healing into a functional, healthy, non-neoplastic cell.

[1327] Data have shown (FIG. 6) that the administration or action of the pharmaceutical association or composition as defined herein on neoplastic cells to be treated, implicates and down-regulates (in particular, reduces, substantially reduces or suppress) the Ras/MAP kinase, FAK/Src kinase and/or PIP2 signalling pathways. Without wishing to be bound to any specific theory, it is conventionally known that these pathways control the expression of cyclins D, which in turn controls the activity of CDKs 4 and/or 6 so that down-regulating (in particular, reducing, significantly reducing or suppressing) the Ras/MAP kinase, FAK/Src kinase and/or PIP2 pathways would inhibit, reduce, damper or suppress the expression of cyclins D and/or CDK4 and CDK6 and/or the formation of the cyclins D-CDK4/6 complexes.

[1328] As already stated herein, cell cycle comprises four main phases: The S phase for DNA duplication, followed by a G2 phase for preparation of the entry into the M phase, the M or mitotic phase wherein the cell divides and finally the G1 phase for cell growth. During the G1 phase the cell makes decisions on whether to continue the cell cycle and undergo cell growth and further divide, or to exit the cycle in the G0 phase and remains quiescent, die or initiate differentiation. The progression through the cell cycle is governed by phosphorylation signals emitted by different bimolecular complexes composed of CDKs and cyclin proteins, both as defined herein.

[1329] The cyclin D-CDK4/6 complexes are capable of leading a cell through the restriction (R)-point which is generally known for controlling the passage of the cell from the G1 phase to the S phase of the cell cycle. This control gate is generally thought to be located at the end of the cell cycle's G1 phase, just before entry into S phase, and is involved in the decision of whether the cell should divide or proliferate, delay division, or enter the G0 resting state.

[1330] This control gate ensures that a series of surveillance or monitoring mechanisms are completed successfully before proceeding through to the next phase. These monitoring mechanisms are also commonly termed “checkpoints” or “checkpoint controls”. If a checkpoint is not validated by the control gate, the cell should halt further advance through the cell cycle and enter the G0 phase. However, neoplastic cells, such as cancer cells, have developed mechanisms that somehow “disconnect” or “impair” one or more checkpoints from the control gate so that the cell is “tricked to “believe that all checkpoints are validated (or, in other words, “tricked to ignore” the non-validated status of relevant checkpoints) and thus never or rarely enter into the G0 phase.

[1331] Without wishing to be bound to any specific theory, it is thought that the pharmaceutical associations, combination or composition as defined herein can restore or re-establish (the integrity of) one or more impaired cell cycle checkpoints so as to restore the lost ability of a neoplastic cell to detect a malfunction or a defect in the cell cycle regulation, induce the cell cycle arrest and exit the cell cycle in G0.

[1332] One particular checkpoint that the present invention is able to restore is the cell adhesion checkpoint. In one aspect, the present disclosure provides a pharmaceutical association, combination or (therapeutic, dermatologic, ophthalmologic, diagnostic, etc.) composition defined herein for use in a method of treating a neoplastic cell or a neoplastic disease by restoring the cell adhesion checkpoint of said neoplastic cell.

[1333] The cell adhesion checkpoint is known to be in charge of monitoring the cells attachments to the extracellular matrix (ECM). When a cell does not detect a “correct” attachment it should halt further advance through the cell cycle and enter the G0 phase. The ECM attachment is normally achieved via cell transmembrane proteins, such as the integrins, syndecans and different proteoglycans. The most important among these are the integrins, which assemble as alpha-beta heterodimers. In addition to physically linking the cell to the extracellular matrix, the binding of the extracellular integrin domains to specific components of the ECM activates the integrins and allows binding of different signalling molecules to its intracellular domain. This activates various signalling pathways that mediate signals to the adhesion checkpoint including the Ras/MAP kinase, FAK/Src kinase, and PIP2 pathways. These pathways are involved in the regulation of the expression of cyclins D, which in turn controls the activity of CDK4/6. The cyclins D-CDK4/6 complexes are capable of leading the cell through the R-point gate.

[1334] Data have also shown (FIGS. 6 and 7) that the administration or action of the pharmaceutical association or composition as defined herein on neoplastic cells to be treated down-regulated (in particular, substantially reduced) the expression of FAK genes and proteins and/or MAP kinase and/or reduced (in particular, substantially reduced) the expression or activity of GTPase Ras, Rho (Rho, Rac, Cdc42).

[1335] Focal adhesions are integrin-containing, multi-protein structures that can form mechanical links between the intracellular actin bundles and the extracellular substrate in many cell types. Focal adhesions are highly dynamic structures that grow or shrink due to the turnover of their component proteins in response to changing mechanical stresses (e.g. actomyosin-generated forces, external forces exerted by or through the surrounding matrix). Focal adhesions are consistently found at the end of stress fibers and are therefore highly integrated with the bulk of the cytoskeleton. Consequently, focal adhesions serve to transmit force, internally generated by the cytoskeletal network, to the ECM and vice versa vian adhesion receptors. Adhesion assembly and maturation are highly dependent on the presence of force, which is believed to instigate structural rearrangements that in turn foster the recruitment of additional proteins (growth) and induce signaling cascades leading to actin polymerization (strengthening). Focal adhesions serve as a biochemical signaling hub to concentrate and direct numerous signaling proteins as part of signal transduction cascades at sites of integrin binding and clustering.

[1336] Focal Adhesion Kinase (FAK) is a cytoplasmic tyrosine kinase that plays a role in integrin-mediated signal transductions and also participates in signalling via other cell surface receptors. FAK is typically located in structures known as focal adhesions. These are multi-protein structures that link the extracellular matrix (ECM) to the cytoplasmic cytoskeleton. FAK is known to be phosphorylated in response to integrin engagement, growth factor stimulation, and the action of mitogenic neuropeptides. This cytosolic kinase has been reported to participate to diverse cellular mechanisms including cell locomotion, mitogen response and cell survival. FAK has four defined regions, or tertiary structure domains. Two of these domains, the N-terminal FERM domain and the Kinase domain, form an auto-inhibitory interaction. This interaction is thought to be the result of hydrophobic interactions between the two domains and prevents the activation of the Kinase domain, thereby preventing the signalling function of FAK. Release of this auto-inhibitory interaction has been shown to occur within focal adhesions but not in the cytoplasm and therefore is thought to require interaction with focal adhesion proteins.

[1337] MAP kinase Mitogen-activated protein kinases or MAP kinases (or MAPK) include a large group of related serine/threonine eukaryotic protein kinases whose regulatory cell functions include proliferation, gene expression, differentiation, mitosis, cell survival, and apoptosis. All have been reported to become activated when they have been phosphorylated at a Tyrosine and a Threonine amino acid. MAP kinases are catalytically inactive in their basic form. In order to become active, (potentially multiple) phosphorylation events is required to occur in their activation loops. MAP kinases typically form multi-step pathways, receiving input signals at several levels above the actual MAP kinase. These pathways can effectively convey stimuli from the cell membrane to the nucleus or to many other subcellular targets.

[1338] GTPases (singular GTPase) are a large family of hydrolase enzymes that can bind and hydrolyze guanosine triphosphate (GTP). The GTP binding and hydrolysis takes place in the highly conserved G domain common to all GTPases. The hydrolysis of the γ phosphate of GTP into guanosine diphosphate (GDP) and Pi, inorganic phosphate, occurs by the SN2 mechanism of nucleophilic substitution via a pentavalent intermediate state and is dependent on the magnesium ion Mg²⁺. Regulatory GTPases, also called the GTPase superfamily, are GTPases used for regulation of other biochemical processes. Most prominent among the regulatory GTPases are the G proteins. Small GTPases have a molecular weight of about 21 kDa and generally serve as molecular switches for a variety of cellular signalling events.

[1339] According to their primary amino acid sequences and biochemical properties, the Ras superfamily is further divided into five subfamilies: Ras, Rho, Rab, Arf and Ran. The Rho subfamily is further divided into RHOA, RAC1, and CDC42.

[1340] Ras/MAP kinase signalling pathway (also known as the Ras-Raf-MEK-ERK pathway) is a chain of proteins in the cell that communicates a signal from a receptor on the surface of the cell to the DNA in the nucleus of the cell. The signal starts when a signalling molecule binds to the receptor on the cell surface and ends when the DNA in the nucleus expresses a protein and produces some change in the cell, such as cell division. The pathway includes many proteins, including MAPK (mitogen-activated protein kinases, originally called ERK, extracellular signal-regulated kinases), which communicate by adding phosphate groups to a neighbouring protein.

[1341] The FAK/Src kinase signalling pathway involves focal adhesion kinase (FAK) and steroid receptor coactivator (Src) which are intracellular (non-receptor) tyrosine kinases that physically and functionally interact to promote a variety of cellular responses. The linked activities of these two kinases are a common intracellular point of convergence in the signalling initiated by the integrin-extracellular matrix (ECM) interaction. Integrins, a family of transmembrane receptors, interact with the ECM and the intracellular actin-cytoskeleton. The integrins cluster upon binding to the ECM to form focal adhesion (FA) contacts. In response to this clustering, FAK associates to the cytoplasmic tail of the integrins and undergoes phosphorylation at its tyrosine 397 residue (Y397). This phosphorylated tyrosine provides a docking site for Src which is then able to phosphorylate additional sites on FAK, leading to a further increase in FAK activity and allowing the recruitment of proteins that contain Src homology 2 (SH2) domains such as Grb2 and PI3K. The mutually activated FAK/Src complex then initiates a cascade of phosphorylation events of new protein-protein interactions to trigger several signalling pathways that eventually leads to different cellular responses.

[1342] Phosphatidylinositol 4,5-bisphosphate or PIP2 is a minor phospholipid component of cell membranes. PIP2 is enriched at the plasma membrane where it is a substrate for a number of important signalling proteins. PIP2 is phosphorylated by the Class I PI 3-kinases. Class I PI 3-kinases are a subgroup of the enzyme family, phosphoinositide 3-kinase that possess a common protein domain structure, substrate specificity, and method of activation. Class I PI 3-kinases are further divided into two subclasses, class IA PI 3-kinases and class IB PI 3-kinases. Class IA PI 3-kinases are activated by receptor tyrosine kinases (RTKs). Class IB PI3-kinases are activated by G-protein-coupled receptors (GPCRs). After their activation these kinases phosphorylate PIP2 to form phosphatidylinositol (3,4,5)-trisphosphate PIP3. Both PIP2 and PIP3 not only act as substrates for enzymes but also serve as docking phospholipids that bind specific domains that promote the recruitment of proteins to the plasma membrane and subsequent activation of signalling cascades. PIP3 functions to activate downstream signalling components, the most notable one being the protein kinase AKT, which activates downstream anabolic signalling pathways required for cell growth and survival.

[1343] Consequently, any associations, combinations or compositions comprising a GFR-binding compound and an adhesion protein inhibitor as defined herein, which, when used to convert a neoplastic cell into a non-neoplastic cell and treat/prevent/diagnose a neoplastic disease, down-regulate (in particular, substantially reduce) the expression of FAK genes and proteins and/or MAP kinase and/or reduce (in particular, substantially reduce) the expression or activity of GTPase Ras, Rho (Rho, Rac, Cdc42) in-vitro or in-vivo, shall be considered as being comprised within the scope of the present invention.

[1344] In one aspect, the present disclosure provides a pharmaceutical association, combination or (therapeutic, dermatologic, ophthalmologic, diagnostic, etc.) composition defined herein for use in a method of treating a neoplastic cell or a neoplastic disease by down-regulating (in particular, substantially reducing) the expression of FAK genes and proteins and/or MAP kinase and/or reducing (in particular, substantially reducing) the expression or activity of GTPase Ras, Rho (Rho, Rac, Cdc42) in-vitro or in-vivo. Also provided is a method of treating a neoplastic cell or a neoplastic disease by down-regulating (in particular, substantially reducing) the expression of FAK genes and proteins and/or MAP kinase and/or reducing (in particular, substantially reducing) the expression or activity of GTPase Ras, Rho (Rho, Rac, Cdc42) in-vitro or in-vivo, comprising administering to a subject in need thereof an effective amount of a pharmaceutical association, combination or (therapeutic, dermatologic, ophthalmologic, diagnostic, etc.) composition as defined herein.

[1345] Consequently, in certain embodiments, any associations, combinations or compositions comprising a GFR-binding compound and an adhesion protein inhibitor as defined herein, which, when used to convert a neoplastic cell into a non-neoplastic cell and treat/prevent a neoplastic disease, possesses at least one, preferably more than one, of the above defined biological and/or therapeutic parameters or effects (e.g. down-regulation of the Ras/MAP kinase, FAK/Src kinase and/or PIP2 signalling pathways and/or inhibition of gene expression or formation of cyclins D and/or down-regulation of the cyclin D/CDKs complexes), shall be considered as being comprised within the scope of the present invention.

[1346] In one aspect, the present disclosure provides a pharmaceutical association, combination or (therapeutic, dermatologic, ophthalmologic, diagnostic, etc.) composition defined herein for use in a method of converting a neoplastic cell into a non-neoplastic cell or treating/preventing a neoplastic disease by substantially inhibiting, down-regulating or dampening the gene expression or formation of at least one of, in particular a plurality of, the cyclin D proteins. Also provided is a method of converting a neoplastic cell into a non-neoplastic cell or treating/preventing a neoplastic disease by substantially inhibiting, down-regulating or dampening the gene expression or formation of at least one of, in particular a plurality of, the cyclin D proteins, comprising administering to a subject in need thereof an effective amount of a pharmaceutical association, combination or (therapeutic, dermatologic, ophthalmologic, diagnostic, etc.) composition as defined herein.

[1347] In one aspect, the present disclosure provides a pharmaceutical association, combination or (therapeutic, dermatologic, ophthalmologic, diagnostic, etc.) composition defined herein for use in a method of converting a neoplastic cell into a non-neoplastic cell or treating/preventing a neoplastic disease by substantially inhibiting the formation of at least one of, in particular a plurality of, the protein complexes comprising at least one cyclin D and at least one CDK4 or CDK6. Also provided is a method of converting a neoplastic cell into a non-neoplastic cell or treating/preventing a neoplastic disease by substantially inhibiting the formation of at least one of, in particular a plurality of, the protein complexes comprising at least one cyclin D and at least one CDK4 or CDK6, comprising administering to a subject in need thereof an effective amount of a pharmaceutical association, combination or (therapeutic, dermatologic, ophthalmologic, diagnostic, etc.) composition as defined herein.

[1348] In one aspect, the present disclosure provides a pharmaceutical association, combination or (therapeutic, dermatologic, ophthalmologic, diagnostic, etc.) composition as defined herein for use in a method of converting a neoplastic cell into a non-neoplastic cell or treating/preventing a neoplastic disease without inducing the death of said neoplastic cell. Also provided is a method of converting a neoplastic cell into a non-neoplastic cell or treating/preventing a neoplastic disease without inducing the death of said neoplastic cell, comprising administering to a subject in need thereof an effective amount of a pharmaceutical association, combination or (therapeutic, dermatologic, ophthalmologic, diagnostic, etc.) composition as defined herein.

[1349] In one aspect, the present disclosure provides a pharmaceutical association, combination or (therapeutic, dermatologic, ophthalmologic, diagnostic, etc.) composition as defined herein for use as a G0 cell cycle phase inducer.

[1350] In one aspect, the present disclosure provides a pharmaceutical association, combination or (therapeutic, dermatologic, ophthalmologic, diagnostic, etc.) composition for use in a method of converting a neoplastic cell into a non-neoplastic cell or treating/preventing a neoplastic disease by dampening or arresting cell division and/or cell proliferation of said neoplastic cell. Also provided is a method of converting a neoplastic cell into a non-neoplastic cell or treating/preventing a neoplastic disease by dampening or arresting cell division and/or cell proliferation of said neoplastic cell, comprising administering to a subject in need thereof an effective amount of a pharmaceutical association, combination or (therapeutic, dermatologic, ophthalmologic, diagnostic, etc.) composition as defined herein.

[1351] In one aspect, the present disclosure provides a pharmaceutical association, combination or (therapeutic, dermatologic, ophthalmologic, diagnostic, etc.) composition for use in a method of converting a neoplastic cell into a non-neoplastic cell or treating/preventing a neoplastic disease by activating and/or promoting anti-mitogen activity and/or tumor suppressor pathways and/or anti-oncogenic activity in said neoplastic cell. Also provided is a method of converting a neoplastic cell into a non-neoplastic cell or treating/preventing a neoplastic disease by activating and/or promoting anti-mitogen activity and/or tumor suppressor pathways and/or anti-oncogenic activity in said neoplastic cell, comprising administering to a subject in need thereof an effective amount of a pharmaceutical association, combination or (therapeutic, dermatologic, ophthalmologic, diagnostic, etc.) composition as defined herein.

[1352] Data have also shown (FIG. 7) that the administration or action of the pharmaceutical association, combination or composition as defined herein on neoplastic cells to be treated, down-regulated (in particular, substantially reduced) the expression of paxillin and/or up-regulated (in particular, substantially increased) the expression of vinculin.

[1353] Paxillin is a signal transduction adaptor protein. The C-terminal region of paxillin contains four LIM domains that target paxillin to focal adhesions through a direct association with the cytoplasmic tail of beta-integrin. The N-terminal region of paxillin is rich in protein-protein interaction sites. The proteins that bind to paxillin are diverse and include protein tyrosine kinases, such as Src and focal adhesion kinase (FAK), structural proteins, such as vinculin and actopaxin, and regulators of actin organization, such as COOL/PIX and PKL/GIT. Paxillin is tyrosine-phosphorylated by FAK and Src upon integrin engagement or growth factor stimulation, creating binding sites for the adapter protein Crk.

[1354] Vinculin is a focal adhesion protein that is involved in linkage of integrin adhesion molecules to the actin cytoskeleton. Vinculin is a cytoskeletal protein associated with cell-cell and cell-matrix junctions, where it is thought to function as one of several interacting proteins involved in anchoring F-actin to the membrane. Vinculin is a 117-kDa cytoskeletal protein of 1066 amino acids. The protein contains an acidic N-terminal domain and a basic C-terminal domain separated by a proline-rich middle segment. Vinculin consists of a globular head domain that contains binding sites for talin and α-actinin as well as a tyrosine phosphorylation site, while the tail region contains binding sites for F-actin, paxillin, and lipids.

[1355] Consequently, any associations, combinations or compositions comprising a GFR-binding compound and an adhesion protein inhibitor as defined herein, which, when used to convert a neoplastic cell into a non-neoplastic cell and treat/prevent/diagnose a neoplastic disease, down-regulate the expression of paxillin and/or (preferably and) up-regulate the expression of vinculin in-vitro or in-vivo, shall be considered as being comprised within the scope of the present invention.

[1356] In one aspect, the present disclosure thus provides a pharmaceutical association, combination or (therapeutic, dermatologic, ophthalmologic, diagnostic, etc.) composition defined herein for use in a method of treating a neoplastic cell or a neoplastic disease by down-regulating the expression of paxillin and/or (preferably and) up-regulating the expression of vinculin in-vitro or in-vivo. Also provided is a method of treating a neoplastic cell or a neoplastic disease by down-regulating the expression of paxillin and/or (preferably and) up-regulating the expression of vinculin in-vitro or in-vivo, comprising administering to a subject in need thereof an effective amount of a pharmaceutical association, combination or (therapeutic, dermatologic, ophthalmologic, diagnostic, etc.) composition as defined herein.

[1357] Data have also shown (FIGS. 1 to 4) that the administration or action of the pharmaceutical association, combination or composition as defined herein on neoplastic cells to be treated, up-regulated (in particular, substantially increased) the expression of at least one differentiation genes and proteins such as ADIPOQ (ACRP30), FABP4 and/or PPARG for adipocytes; ACAN (AGC1), COL10A1, COMP, Sox9, IBSP (Sialoprotein II) and/or COL4 for chondrocytes; CDH5, KDR (VEGFR3) and/or PECAM1 for the general endothelium; DLL4, EFNB2 and/or NRP1 for the arterial endothelium; LYVE1 and/or PROX1 for the lymphatic endothelium; NR2F2 and/or NRP2 for the venous endothelium; KRT1, KRT10 and/or KRT14 for the keratinocyte epithelium; PMEL (SILV), TYR and/or TYRP1 for the melanocyte epithelium; MMP-9, α-SMA and/or Vimentin for the fibrocyte; BGLAP, COL2A1, IBSP, RANK-L, OCN, DMP-1, Sclerostin and/or MEPE for Osteoblasts/Osteocytes; CALCR and/or CTSK for Osteoclasts; ITGB4 and/or KRT19 for cholangiocytes; ALB, G6PC and/or TAT for Hepatocytes; CD79A for early B-cell development; CD3E and/or PTCRA for early T-cell development; CCR5, CXCR4 and/or EMR1 for macrophages; ITGAM for the monocytes; GALC and/or GFAP for glial cells; MAP2, NEFH and/or TUBB3 for mature neurons; CHAT for cholinergic neurons; TH for dopaminergic neurons; GAD1 and/or SLC32A1 for GABA neurons; SLC17A6 and/or SLC17A7 for glutamatergic neurons; ISL1 for motor neurons; MBP for oligodendrocytes; POU4F2 for ganglion cells; RLBP1 for Muller cells; PDE6B and/or RCVRN for photoreceptor cells; NPHS2 for podocytes; AQP1, CYP27B1 and/or MIOX for proximal tubule cells; AQP2 for collecting duct cells; UMOD for distal tubule cells; SFTPB, SFTPC and/or SFTPD for lung cells; MYH6, MYH7 and/or NPPA for cardiomyocytes; CAV3, MYH1, MYOD1, GATA4 and/or MLC1 for skeletal muscle cells; MYH11, SMTN and/or TAGLN for smooth muscle cells; GCG, MAFB and/or POU3F4 for alpha cells; INS, MAFA and/or SLC2A2 for beta cells; SST for delta cells; GHRL (Ghrelin, Obestatin) for epsilon cells; PPY for pancreatic polypeptide producing (PP) cells; and/or CPA1 for exocrine cells.

[1358] Consequently, any associations, combinations or compositions comprising a GFR-binding compound and an adhesion protein inhibitor as defined herein, which, when used to convert a neoplastic cell into a non-neoplastic cell and treat/prevent/diagnose a neoplastic disease, up-regulate (in particular, substantially increase) the expression of at least one differentiation genes and proteins such as ADIPOQ (ACRP30), FABP4, PPARG, ACAN (AGC1), COL10A1, COMP, Sox9, IBSP (Sialoprotein II), COL4, CDH5, KDR (VEGFR3), PECAM1, DLL4, EFNB2, NRP1, LYVE1, PROX1, NR2F2, NRP2, KRT1, KRT10, KRT14, PMEL (SILV), TYR, TYRP1, MMP-9, α-SMA, Vimentin, BGLAP, COL2A1, IBSP, RANK-L, OCN, DMP-1, Sclerostin, MEPE, CALCR, CTSK, ITGB4, KRT19, ALB, G6PC, TAT, CD79A, CD3E, PTCRA, CCR5, CXCR4, EMR1, ITGAM, GALC, GFAP, MAP2, NEFH, TUBB3, CHAT, TH, GAD1, SLC32A1, SLC17A6, SLC17A7, ISL1, MBP, POU4F2, RLBP1, PDE6B, RCVRN, NPHS2, AQP1, CYP27B1, MIOX, AQP2, UMOD, SFTPB, SFTPC, SFTPD, MYH6, MYH7, NPPA, CAV3, MYH1, MYOD1, GATA4, MLC1, MYH11, SMTN, TAGLN, GCG, MAFB, POU3F4, INS, MAFA, SLC2A2, SST, GHRL (Ghrelin, Obestatin), PPY and/or CPA1, in-vitro or in-vivo, shall be considered as being comprised within the scope of the present invention.

[1359] In one aspect, the present disclosure thus provides a pharmaceutical association, combination or (therapeutic, dermatologic, ophthalmologic, diagnostic, etc.) composition defined herein for use in a method of treating a neoplastic cell or a neoplastic disease by up-regulating (in particular, substantially increasing) the expression of differentiation genes and proteins such as ADIPOQ (ACRP30), FABP4, PPARG, ACAN (AGC1), COL10A1, COMP, Sox9, IBSP (Sialoprotein II), COL4, CDH5, KDR (VEGFR3), PECAM1, DLL4, EFNB2, NRP1, LYVE1, PROX1, NR2F2, NRP2, KRT1, KRT10, KRT14, PMEL (SILV), TYR, TYRP1, MMP-9, α-SMA, Vimentin, BGLAP, COL2A1, IBSP, RANK-L, OCN, DMP-1, Sclerostin, MEPE, CALCR, CTSK, ITGB4, KRT19, ALB, G6PC, TAT, CD79A, CD3E, PTCRA, CCR5, CXCR4, EMR1, ITGAM, GALC, GFAP, MAP2, NEFH, TUBB3, CHAT, TH, GAD1, SLC32A1, SLC17A6, SLC17A7, ISL1, MBP, POU4F2, RLBP1, PDE6B, RCVRN, NPHS2, AQP1, CYP27B1, MIOX, AQP2, UMOD, SFTPB, SFTPC, SFTPD, MYH6, MYH7, NPPA, CAV3, MYH1, MYOD1, GATA4, MLC1, MYH11, SMTN, TAGLN, GCG, MAFB, POU3F4, INS, MAFA, SLC2A2, SST, GHRL (Ghrelin, Obestatin), PPY and/or CPA1, in-vitro or in-vivo. Also provided is a method of treating a neoplastic cell or a neoplastic disease by up-regulating (in particular, substantially increasing) the expression of differentiation genes and proteins such as ADIPOQ (ACRP30), FABP4, PPARG, ACAN (AGC1), COL10A1, COMP, Sox9, IBSP (Sialoprotein II), COL4, CDH5, KDR (VEGFR3), PECAM1, DLL4, EFNB2, NRP1, LYVE1, PROX1, NR2F2, NRP2, KRT1, KRT10, KRT14, PMEL (SILV), TYR, TYRP1, MMP-9, α-SMA, Vimentin, BGLAP, COL2A1, IBSP, RANK-L, OCN, DMP-1, Sclerostin, MEPE, CALCR, CTSK, ITGB4, KRT19, ALB, G6PC, TAT, CD79A, CD3E, PTCRA, CCR5, CXCR4, EMR1, ITGAM, GALC, GFAP, MAP2, NEFH, TUBB3, CHAT, TH, GAD1, SLC32A1, SLC17A6, SLC17A7, ISL1, MBP, POU4F2, RLBP1, PDE6B, RCVRN, NPHS2, AQP1, CYP27B1, MIOX, AQP2, UMOD, SFTPB, SFTPC, SFTPD, MYH6, MYH7, NPPA, CAV3, MYH1, MYOD1, GATA4, MLC1, MYH11, SMTN, TAGLN, GCG, MAFB, POU3F4, INS, MAFA, SLC2A2, SST, GHRL (Ghrelin, Obestatin), PPY and/or CPA1, in-vitro or in-vivo, comprising administering to a subject in need thereof an effective amount of a pharmaceutical association, combination or (therapeutic, dermatologic, ophthalmologic, diagnostic, etc.) composition as defined herein.

[1360] Data have also shown (FIG. 5) that the administration or action of the pharmaceutical association, combination or composition as defined herein on neoplastic cells to be treated increased the phosphorylation of the protein p53.

[1361] Data have also shown (FIG. 5) that the administration or action of the pharmaceutical association, combination or composition as defined herein on neoplastic cells to be treated down-regulated (in particular, substantially decreased or suppressed) the phosphorylation of the protein pRb.

[1362] Data have also shown (FIG. 6) that the administration or action of the pharmaceutical association, combination or composition as defined herein on neoplastic cells to be treated down-regulated the protein Src.

[1363] Tumor protein p53, also known as p53, cellular tumor antigen p53, phosphoprotein p53, or tumor suppressor p53, is a protein that in humans is encoded by the TP53 gene. The p53 protein is involved in multicellular organisms, where it regulates the cell cycle and, thus, functions as a tumor suppressor, generally preventing neoplastic diseases such as cancers. As such, p53 has been described as “the guardian of the genome” because of its role in conserving stability by preventing genome mutation. TP53 is thus said to be a tumor suppressor gene.

[1364] Src is a non-receptor protein tyrosine kinase that plays a multitude of roles in cell signalling. Src is involved in the control of many functions, including cell adhesion, growth, movement and differentiation. Src is widely expressed in many cell types, and can have different locations within a cell. It appears that the subcellular location of Src can affect its function. Src can associate with cellular membranes, such as the plasma membrane, the perinuclear membrane and the endosomal membrane. At the plasma membrane, Src can transduce signals from a variety of receptors to internal signalling pathways that convey these signals to the nucleus, cytoskeleton and other cellular components. For example, Src can act through growth factor receptors to affect cell growth and proliferation. Within the nucleus, Src is thought to help regulate the cell cycle and cell division by its interactions with other proteins. For example, Src can interact with Sam68 to help regulate gene expression. In bone osteoclasts, Src acts to regulate the respiratory enzyme cytochrome C oxidase (Cox), where Src-induced phosphorylation of Cox is required for maintaining high levels of ATP to meet the cells' high energy requirements. Src can also be found in the cytoplasm, and between cells at adherens junctions, where it takes on different roles.

[1365] pRb (Retinoblastoma protein) is a tumor suppressor protein that is dysfunctional in several major cancers. One function of pRb is to prevent excessive cell growth by inhibiting cell cycle progression until a cell is ready to divide. It is also a recruiter of several chromatin remodeling enzymes such as methylases and acetylases. Rb restricts the cell's ability to replicate DNA by preventing its progression from the G1 (first gap phase) to S (synthesis phase) phase of the cell cycle. Rb binds and inhibits transcription factors of the E2F family, which are composed of dimers of an E2F protein and a dimerization partner (DP) protein. When Rb is bound to E2F, the complex acts as a growth suppressor and prevents progression through the cell cycle. Rb is phosphorylated to pRb by certain Cyclin Dependent Kinases (CDKs). pRb is described as being hyperphosphorylated and when in this state, it is unable to complex E2F and therefore, unable to restrict progression from the G1 phase to the S phase of the cell cycle. During the M-to-G1 transition, pRb is progressively dephosphorylated by PP1, returning to its growth-suppressive hypophosphorylated state Rb.

[1366] Consequently, any associations, combinations or compositions comprising a GFR-binding compound and an adhesion protein inhibitor as defined herein, which, when used to convert a neoplastic cell into a non-neoplastic cell and treat/prevent/diagnose a neoplastic disease, down-regulate (in particular, substantially decrease or suppress) the expression of genes and proteins p53 and/or Src, in-vitro or in-vivo, shall be considered as being comprised within the scope of the present invention.

[1367] In one aspect, the present disclosure thus provides a pharmaceutical association, combination or (therapeutic, dermatologic, ophthalmologic, diagnostic, etc.) composition defined herein for use in a method of treating a neoplastic cell or a neoplastic disease by down-regulating (in particular, substantially decreasing or suppressing) the expression of genes and proteins p53 and/or Src. Also provided is a method of treating a neoplastic cell or a neoplastic disease by down-regulating (in particular, substantially decreasing or suppressing) the expression of genes and proteins p53 and/or Src, comprising administering to a subject in need thereof an effective amount of a pharmaceutical association, combination or (therapeutic, dermatologic, ophthalmologic, diagnostic, etc.) composition as defined herein.

[1368] In one aspect, the present disclosure provides a pharmaceutical association, combination or (therapeutic, dermatologic, ophthalmologic, diagnostic, etc.) composition defined herein for use in a method of treating a neoplastic cell or a neoplastic disease by:
[1369] down-regulating (in particular, substantially reducing) the expression of FAK genes and proteins and/or MAP kinase; and/or
[1370] reducing (in particular, substantially reducing) the expression or activity of GTPase Ras, Rho (Rho, Rac, Cdc42); and/or
[1371] down-regulating (in particular, reducing, significantly reducing or suppressing) the Ras/MAP kinase, FAK/Src kinase and/or PIP2 signalling pathways; and/or
[1372] substantially inhibiting the formation of at least one of, in particular a plurality of, the protein complexes comprising at least one cyclin D and at least one CDK4 or CDK6; and/or
[1373] substantially inhibiting, down-regulating or dampening the gene expression or formation of at least one of, in particular a plurality of, the cyclin D proteins; and/or
[1374] down-regulating the expression of paxillin and/or (preferably and) up-regulating the expression of vinculin; and/or
[1375] up-regulating (in particular, substantially increasing) the expression of at least one of differentiation genes and proteins such as ADIPOQ (ACRP30), FABP4, PPARG, ACAN (AGC1), COL10A1, COMP, Sox9, IBSP (Sialoprotein II), COL4, CDH5, KDR (VEGFR3), PECAM1, DLL4, EFNB2, NRP1, LYVE1, PROX1, NR2F2, NRP2, KRT1, KRT10, KRT14, PMEL (SILV), TYR, TYRP1, MMP-9, α-SMA, Vimentin, BGLAP, COL2A1, IBSP, RANK-L, OCN, DMP-1, Sclerostin, MEPE, CALCR, CTSK, ITGB4, KRT19, ALB, G6PC, TAT, CD79A, CD3E, PTCRA, CCR5, CXCR4, EMR1, ITGAM, GALC, GFAP, MAP2, NEFH, TUBB3, CHAT, TH, GAD1, SLC32A1, SLC17A6, SLC17A7, ISL1, MBP, POU4F2, RLBP1, PDE6B, RCVRN, NPHS2, AQP1, CYP27B1, MIOX, AQP2, UMOD, SFTPB, SFTPC, SFTPD, MYH6, MYH7, NPPA, CAV3, MYH1, MYOD1, GATA4, MLC1, MYH11, SMTN, TAGLN, GCG, MAFB, POU3F4, INS, MAFA, SLC2A2, SST, GHRL (Ghrelin, Obestatin), PPY and/or CPA1; and/or
[1376] increasing the phosphorylation of protein p53; and/or
[1377] down-regulating (in particular, substantially decreasing or suppressing) the phosphorylation of the protein pRb; and/or
[1378] down-regulating (in particular, substantially decreasing or suppressing) the gene and protein expression of Src; and/or
[1379] not inducing the death of said neoplastic cell; and/or
[1380] dampening or arresting cell division or cell proliferation of said neoplastic cell.

[1381] In one example, the pharmaceutical association as defined herein may thus be an animal or mammal (preferably a human) anti-neoplastic disease agent (e.g. anti-cancer agent) which has demonstrated the ability to convert a neoplastic cell into a non-neoplastic cell in vitro, ex-vivo and/or in vivo and/or to protect a subject from a neoplastic disease, disorder, condition, pathology or any symptoms thereof.

[1382] In one aspect, the present disclosure also provides methods of converting a neoplastic cell into a non-neoplastic cell, said method comprising the administration to a cell, in-vitro, ex-vivo or in-vivo, of an effective amount of a pharmaceutical association, combination or composition as defined herein. In one example, said methods induce the differentiation of said neoplastic cell. In one example, said conversion is effected in less than 7 days, in less than 6 days, 5 days, 4 days, 3 days, 2 days, 24 hours or 18 hours, in particular in less than 24 hours. In other examples:
[1383] said neoplastic cell is a non-terminally differentiated cell and said methods comprise the differentiation of said non-terminally differentiated; and/or
[1384] said methods comprise the conversion and/or recoding of a neoplastic cell to induce and/or promote and/or improve self-healing and/or self-recovery thereof; and/or
[1385] said methods comprise restoring the ability of a neoplastic cell to undergo differentiation; and/or
[1386] said methods comprise converting and/or recoding a circulating or non-circulating neoplastic cell such as a metastatic or non-metastatic cancer cell, into a non-neoplastic cell; and/or
[1387] said methods comprise providing and/or producing and/or inducing the formation of a physiologically functional and/or healthy cell of the bone, chondrocyte, vascular, fibroblast, renal, retinal, neuronal, ligament, tendon, reproduction system, lung, blood, adipocyte cell lineage from a neoplastic cell; and/or
[1388] said methods comprise inducing and/or promoting and/or enhancing neoplastic cell differentiation; and/or
[1389] said methods comprise non-mutagenically protecting a subject from a neoplastic disease i.e. without modifying or altering the genome of the treated neoplastic cells; and/or
[1390] said methods comprise the extracellular treatment of a neoplastic disease, disorder, condition, pathology, or any symptoms thereof; and/or
[1391] said methods comprise down-regulating (in particular, substantially reducing) the expression of FAK genes and proteins and/or MAP kinase and/or reducing (in particular, substantially reducing) the expression or activity of GTPase Ras, Rho (Rho, Rac, Cdc42) in-vitro or in-vivo; and/or
[1392] said methods comprise restoring the cell adhesion checkpoint of said neoplastic cell; and/or
[1393] said methods comprise inhibiting the ECM binding of at least one integrin or one syndecan transmembrane proteins of said neoplastic cell; and/or
[1394] said methods comprise substantially inhibiting, down-regulating or dampening the gene expression or formation of at least one of, in particular a plurality of, the cyclin D proteins; and/or
[1395] said methods comprise substantially inhibiting the formation of at least one of, in particular a plurality of, the protein complexes comprising at least one cyclin D and at least one CDK4 or CDK6; and/or
[1396] said methods comprise not inducing the death of said neoplastic cell; and/or
[1397] said methods comprise dampening or arresting cell division and/or cell proliferation of said neoplastic cell; and/or
[1398] said methods comprise activating and/or promoting anti-mitogen activity and/or tumor suppressor pathways and/or anti-oncogenic activity in said neoplastic cell; and/or
[1399] said methods comprise down-regulating the gene expression of paxillin and/or (preferably and) up-regulating the gene expression or increasing turn-over of vinculin in-vitro or in-vivo; and/or
[1400] said methods comprise up-regulating (in particular, substantially increasing) the expression of differentiation genes and proteins such as ADIPOQ (ACRP30), FABP4, PPARG, ACAN (AGC1), COL10A1, COMP, Sox9, IBSP (Sialoprotein II), COL4, CDH5, KDR (VEGFR3), PECAM1, DLL4, EFNB2, NRP1, LYVE1, PROX1, NR2F2, NRP2, KRT1, KRT10, KRT14, PMEL (SILV), TYR, TYRP1, MMP-9, α-SMA, Vimentin, BGLAP, COL2A1, IBSP, RANK-L, OCN, DMP-1, Sclerostin, MEPE, CALCR, CTSK, ITGB4, KRT19, ALB, G6PC, TAT, CD79A, CD3E, PTCRA, CCR5, CXCR4, EMR1, ITGAM, GALC, GFAP, MAP2, NEFH, TUBB3, CHAT, TH, GAD1, SLC32A1, SLC17A6, SLC17A7, ISL1, MBP, POU4F2, RLBP1, PDE6B, RCVRN, NPHS2, AQP1, CYP27B1, MIOX, AQP2, UMOD, SFTPB, SFTPC, SFTPD, MYH6, MYH7, NPPA, CAV3, MYH1, MYOD1, GATA4, MLC1, MYH11, SMTN, TAGLN, GCG, MAFB, POU3F4, INS, MAFA, SLC2A2, SST, GHRL (Ghrelin, Obestatin), PPY and/or CPA1, in-vitro or in-vivo; and/or
[1401] said methods comprise down-regulating (in particular, substantially decreasing or suppressing) the gene expression of proteins p53, pRb and/or Src.

[1402] In one example, the pharmaceutical association as defined herein may thus be an animal or mammal (preferably a human) anti-neoplastic disease agent (e.g. anti-cancer agent) which has demonstrated the ability to convert a neoplastic cell into a non-neoplastic cell in vitro, ex-vivo and/or in vivo and/or to protect a subject from a neoplastic disease, disorder, condition, pathology or any symptoms thereof.

[1403] In one example, said administration induces the quiescence of the neoplastic cell. In one example, said administration prevents, reduces or suppresses the cell division and/or cell proliferation of said neoplastic cell. In one example, said administration regulates or promotes anti-mitogen activity and/or tumor suppressor activity and/or anti-oncogenic activity in said neoplastic cell. In one example, said method is cytostatic for the treated cell. In one example, said method is not cytotoxic for the treated cell. In one example, said method is non-mutagenic.

[1404] In one aspect, the present disclosure provides a method of producing a physiologically functional and healthy cell, comprising the administration in-vitro, ex-vivo or in-vivo to a neoplastic cell an effective amount of a pharmaceutical association or composition as defined herein and wherein said physiologically functional and healthy cell is selected from the group consisting of an osteoblast, osteocyte, chondroblast, chondrocyte, neuroblast, neurocyte, Sertoli cells, Leydig cell, Germ cell, Myoblast, Myocyte, keratinocyte, endothelial cells, angioblast, fibroblast, fibrocyte, podocyte.

[1405] In one aspect, the present disclosure provides a method of converting a cell “X” into a cell “Y”, said method comprising the administration to a neoplastic cell of an effective amount of a pharmaceutical association, combination or composition as defined herein, wherein cell X is a neoplastic cell selected from the group consisting of:
[1406] a. a metastatic or non-metastatic neoplastic cell;
[1407] b. a cell comprising at least one alteration, mutation and/or deregulation of at least one tumour suppressor gene or of at least one of their gene-encoded product (such as for example the Rb and/or P53 genes or gene products);
[1408] c. a cell comprising at least one alteration, mutation and/or deregulation of at least one of proto-oncogene or of at least one of their gene-encoded product (such as for example Src -tyrosine kinase- and/or Ras -small GTPase);
[1409] d. a cell having an impaired DNA repair mechanism (such as for example BRCA1 and BRCA2);
[1410] e. a cell comprising at least one alteration, mutation and/or deregulation of at least one mitogen and/or anti-mitogen gene or at least one of their gene-encoded products (such as for example TGF-beta);
[1411] f. a cell having an defective, altered or impaired cell cycle or cell cycle control, wherein said defective cell cycle is due to either at least one alteration, mutation and/or deregulation of at least one cell cycle gene or gene-encoded product (for example Cyclin E1, Cyclin D1, CDK 4/6) at least one alteration, mutation and/or deregulation of at least one cell cycle checkpoint or diminution or reduction of a checkpoint sensibility and/or responsiveness;
[1412] g. a stem cell-like cell comprising a Stro-1 positive marker and having multi-potency;
[1413] h. a cell comprising at least one specific differentiation marker such as ADIPOQ (ACRP30), FABP4, PPARG, ACAN (AGC1), COL10A1, COMP, Sox9, IBSP (Sialoprotein II), COL4, CDH5, KDR (VEGFR3), PECAM1, DLL4, EFNB2, NRP1, LYVE1, PROX1, NR2F2, NRP2, KRT1, KRT10, KRT14, PMEL (SILV), TYR, TYRP1, MMP-9, α-SMA, Vimentin, BGLAP, COL2A1, IBSP, RANK-L, OCN, DMP-1, Sclerostin, MEPE, CALCR, CTSK, ITGB4, KRT19, ALB, G6PC, TAT, CD79A, CD3E, PTCRA, CCR5, CXCR4, EMR1, ITGAM, GALC, GFAP, MAP2, NEFH, TUBB3, CHAT, TH, GAD1, SLC32A1, SLC17A6, SLC17A7, ISL1, MBP, POU4F2, RLBP1, PDE6B, RCVRN, NPHS2, AQP1, CYP27B1, MIOX, AQP2, UMOD, SFTPB, SFTPC, SFTPD, MYH6, MYH7, NPPA, CAV3, MYH1, MYOD1, GATA4, MLC1, MYH11, SMTN, TAGLN, GCG, MAFB, POU3F4, INS, MAFA, SLC2A2, SST, GHRL (Ghrelin, Obestatin), PPY and/or CPA1;
[1414] i. a cell having increased cytoplasmic and nuclear stiffness;
[1415] j. a cell having high cytoskeleton dynamics; and
[1416] k. any combination thereof;

[1417] and wherein cell Y is a non-neoplastic cell selected from the group consisting of:
[1418] a. a cell in a terminal differentiation state;
[1419] b. a cell in a non-terminal differentiation state and more differentiated than the X cell;
[1420] c. a cell having a physiologically normal proliferation;
[1421] d. a physiologically functional cell having healthy or normal genes expression and proteins activity.

[1422] In one aspect, the present disclosure provides methods to activate a growth factor receptor present on the surface of a neoplastic cell, said method comprising administering to said neoplastic cell an effective amount of a pharmaceutical association, combination or composition as defined herein, wherein administering said pharmaceutical association, combination or composition activates the growth factor receptor present on the surface of the neoplastic cell.

[1423] In one aspect, the present disclosure provides methods of delivering a pharmaceutical composition in-vitro, ex-vivo or in-vivo to a neoplastic cell, comprising the contacting of said neoplastic cell with said pharmaceutical composition, and wherein said pharmaceutical composition comprises a GFR-binding compound and an adhesion protein inhibitor as defined herein.

[1424] In one aspect, the present disclosure provides methods of administering a pharmaceutical association, combination or composition comprising a GFR-binding compound and an adhesion protein inhibitor to a subject comprising the contacting of at least one body part of said subject with said pharmaceutical association, combination or composition.

[1425] Protected from a disease, condition, disorder or pathology refers to the treatment of the underlying cause of the disease, condition, disorder or pathology as well as reducing the symptoms of the disease, condition, disorder or pathology; and/or reducing the occurrence of the disease, condition, disorder or pathology; and/or reducing the severity of the disease, condition, disorder or pathology. Protecting a patient can refer to the ability of a therapeutic composition of the present invention, when administered to a patient, to prevent a disease, condition, disorder or pathology from occurring and/or to cure or to alleviate disease, condition, disorder or pathology symptoms, signs or causes. As such, to protect a patient from a disease, condition, disorder or pathology includes both preventing disease, condition, disorder or pathology occurrence (prophylactic treatment) and treating a patient that has a disease, condition, disorder or pathology or that is experiencing initial symptoms or later stage symptoms of a disease, condition, disorder or pathology (therapeutic treatment).

[1426] Treating:

[1427] As used herein, unless indicated otherwise or contradictory in context, the term “treating” or “treatment” refers to partially or completely alleviating, ameliorating, improving, relieving, delaying onset of, inhibiting progression of, reducing severity of, and/or reducing incidence of one or more symptoms or features of a particular disease, disorder, pathology and/or condition. For example, in certain embodiments, “treating” or “treatment of” cancer may refer to inhibiting survival, growth, and/or spread of a tumor. Treatment may be administered to a subject who does not exhibit signs of a disease, disorder, and/or condition and/or to a subject who exhibits only early signs of a disease, disorder, pathology and/or condition for the purpose of decreasing the risk of developing pathology associated with the disease, disorder, and/or condition.

[1428] As used herein, “treating a neoplastic cell” is used interchangeably with the expression “converting a neoplastic cell into a non-neoplastic cell”.

[1429] Preventing:

[1430] As used herein, unless indicated otherwise or contradictory in context, the term “preventing” refers to partially or completely delaying onset of an infection, disease, disorder and/or condition; partially or completely delaying onset of one or more symptoms, features, or clinical manifestations of a particular infection, disease, disorder, and/or condition; partially or completely delaying onset of one or more symptoms, features, or manifestations of a particular infection, disease, disorder, and/or condition; partially or completely delaying progression from an infection, a particular disease, disorder and/or condition; and/or decreasing the risk of developing pathology associated with the infection, the disease, disorder, and/or condition.

[1431] Substantially Diminished, Reduced or Inhibited:

[1432] As used herein, unless indicated otherwise or contradictory in context, the term “substantially diminished” or “substantially inhibited” as it relates to cellular activity and/or function, protein expression or complexes formation, refers to a diminution or reduction in activity or function, in comparison with the activity and/or function of a normal or healthy cell (e.g. a non-neoplastic cell), of 1%, 2%, 3%, 4%, 5%, 6%, 7%, 8%, 9%, 10%, 11%, 12%, 13%, 14%, 15%, 16%, 17%, 18%, 19%, 20%, 21%, 22%, 23%, 24%, 25%, 26%, 27%, 28%, 29%, 30%, 31%, 32%, 33%, 34%, 35%, 36%, 37%, 38%, 39%, 40%, 41%, 42%, 43%, 44%, 45%, 46%, 47%, 48%, 49%, 50%, 51%, 52%, 53%, 54%, 55%, 56%, 57%, 58%, 59%, 60%, 61%, 62%, 63%, 64%, 65%, 66%, 67%, 68%, 69%, 70%, 71%, 72%, 73%, 74%, 75%, 76%, 77%, 78%, 79%, 80%, 81%, 82%, 83%, 84%, 85%, 86%, 87%, 88%, 89%, 90%, 91%, 92%, 93%, 94%, 95%, 96%, 97%, 98%, or 99%, in particular of 50% to 99%, 55% to 99%, 60% to 99%, 65% to 99%, 70% to 99%, 75% to 99%, 80% to 99%, 85% to 99% or 90% to 99%. The same applies conversely to the term “substantially increased”.

[1433] Disease:

[1434] As used herein, unless indicated otherwise or contradictory in context, the term “disease” refers to any deviation from the normal health of a patient and includes a state when disease symptoms are present, as well as conditions in which a deviation has occurred, but symptoms are not yet manifested. A defective, ill-functioning, malfunctioning, dysfunctioning, and/or deleterious cell, such as e.g. a neoplastic cell, may be a cause of a disease. The same applies to “condition”, “disorder” and “pathology”.

[1435] Neoplasm:

[1436] As used herein, unless indicated otherwise or contradictory in context, the term “neoplasm” (sometimes also referred to as tumor or tumour) refers to an abnormal growth of tissue. This abnormal growth usually but not always forms a mass. The World Health Organization classifies neoplasms into four main groups: benign neoplasms, in situ neoplasms, malignant neoplasms, and neoplasms of uncertain or unknown behavior. A malignant neoplasm is a cancer.

[1437] Neoplastic Cell:

[1438] As used herein, unless indicated otherwise or contradictory in context, the term “neoplastic cell” refers to a cell with abnormal proliferation, generally due the presence of a defective cell cycle, as well as cells which may become neoplastic such as cancer stem cell for which a definition is given in “Refining the role for adult stem cells as cancer cells of origin”, White A C, Lowry W E, Trends Cell Biol. 2014 Sep. 18. pii: S0962-8924(14)00145-7, and “review article Stem cells, cancer, and cancer stem cells”, Tannishtha Reya et al., Nature 414, 105-111 (1 Nov. 2001), which are incorporated herein by reference in their entirety.

[1439] Neoplastic Disease:

[1440] As used herein, unless indicated otherwise or contradictory in context, the term “neoplastic disease”, used interchangeably with “neoplastic conditions”, “neoplastic disorder” and “neoplastic pathology”, refers to a disease associated with an abnormal growth of tissue, generally due to the presence of a neoplastic cell.

[1441] Circulating:

[1442] As used herein, unless indicated otherwise or contradictory in context, the term “circulating”, when used in relation to a neoplastic cell, refers to a neoplastic cell that has detached itself from a primary tumor site and migrates to a different location in the body to become a metastatic tumor.

[1443] Cancers:

[1444] As used herein, unless indicated otherwise or contradictory in context, the term “cancer” refers to a malign form of neoplasm which includes sarcomas, carcinomas, lymphomas, leukemias (or leukaemias), teratomas, mesotheliomas, myelomas and germinomas. Cancers include, but are not limited to, Acute lymphoblastic leukaemia (ALL), Acute myeloid leukaemia, Adrenocortical carcinoma, AIDS-related cancers, AIDS-related lymphoma, Anal cancer, Appendix cancer, Astrocytoma, childhood cerebellar or cerebral, Basal-cell carcinoma, Bile duct cancer, Bladder cancer, Bone tumor, osteosarcoma/malignant fibrous histiocytoma, Brainstem glioma, Brain cancer, Breast cancer, Bronchial adenomas/carcinoids, Burkitt's lymphoma, Carcinoid tumor, Central nervous system lymphoma, Cerebellar astrocytoma, Cerebral astrocytoma/malignant glioma, Cervical cancer, Childhood cancers, Chronic bronchitis, Chronic lymphocytic leukaemia, Chronic myelogenous leukaemia, Chronic myeloproliferative disorders, Chronic obstructive pulmonary disease (COPD), Colon cancer, Cutaneous T-cell lymphoma, Desmoplastic small round cell tumor, Emphysema, Endometrial cancer, Ependymoma, Esophageal cancer, Ewing's sarcoma in the Ewing family of tumors, Extracranial germ cell tumor, Extragonadal germ cell tumor, Extrahepatic bile duct cancer, Eye cancer, Gallbladder cancer, Gastric (stomach) cancer, Gastrointestinal carcinoid tumor, Gastrointestinal stromal tumor (GIST), Germ cell tumor: extracranial, extragonadal, or ovarian, Gestational trophoblastic tumor, Glioma of the brain stem, Glioma, Gastric carcinoid, Hairy cell leukemia, Head and neck cancer, Heart cancer, Hepatocellular (liver) cancer, Hodgkin lymphoma, Hypopharyngeal cancer, Hypothalamic and visual pathway glioma, childhood, Intraocular melanoma, Islet cell carcinoma (endocrine pancreas), Kaposi sarcoma, Kidney cancer (renal cell cancer), Laryngeal cancer, Leukemias, acute lymphoblastic leukemia, acute myeloid leukemia, chronic lymphocytic leukemia, chronic myelogenous leukemia, hairy cell Leukemia, Lip and oral cavity cancer, Liposarcoma, Liver cancer, Lung cancer, AIDS-related lymphoma, Burkitt lymphoma, cutaneous T-Cell lymphoma, Hodgkin lymphoma, Non-Hodgkin lymphoma, primary central nervous system lymphoma, Macroglobulinemia, Male breast cancer, Malignant fibrous histiocytoma of bone/osteosarcoma, Medulloblastoma, intraocular (eye) Melanoma, Merkel cell cancer, Mesothelioma, Metastatic squamous neck cancer with occult primary, Mouth cancer, Multiple endocrine neoplasia syndrome, Multiple myeloma/plasma cell neoplasm, Mycosis fungoides, Myelodysplastic syndromes, Myelodysplastic/myeloproliferative diseases, multiple Myeloma, Myeloproliferative disorders, Nasal cavity and paranasal sinus cancer, Nasopharyngeal carcinoma, Neuroblastoma, Oral cancer, Oropharyngeal cancer, Osteosarcoma/malignant fibrous histiocytoma of bone, Ovarian cancer, Ovarian epithelial cancer, Ovarian germ cell tumor, Ovarian low malignant potential tumor, Pancreatic cancer, Pancreatic cancer, islet cell Paranasal sinus and nasal cavity cancer, Parathyroid cancer, Penile cancer, Pharyngeal cancer, Pheochromocytoma, Pineal astrocytoma, Pineal germinoma, Pineoblastoma and supratentorial primitive neuroectodermal tumors, Pituitary adenoma, Plasma cell neoplasia/Multiple myeloma, Pleuropulmonary blastoma, Primary central nervous system lymphoma, Prostate cancer, Rectal cancer, Renal cell carcinoma (kidney cancer), Renal pelvis and ureter, transitional cell cancer, Retinoblastoma, Rhabdomyosarcoma, Salivary gland cancer, Ewing family of tumors Sarcoma, Kaposi Sarcoma, soft tissue Sarcoma, uterine Sarcoma, Sézary syndrome, Skin cancer (non-melanoma), Skin cancer (melanoma), Merkel cell Skin carcinoma, Small intestine cancer, Soft tissue sarcoma, metastatic squamous neck cancer with occult primary, Stomach cancer, Supratentorial primitive neuroectodermal tumor, cutaneous T-Cell lymphoma, Testicular cancer, Throat cancer, Thymoma and thymic carcinoma, Thyroid cancer, Transitional cell cancer of the renal pelvis and ureter, Trophoblastic tumor, transitional cell cancer, Urethral cancer, Uterine cancer, Uterine sarcoma, Vaginal cancer, Visual pathway and hypothalamic glioma, Vulvar cancer, Waldenstrom macroglobulinemia, and Wilms tumor (kidney cancer). In certain embodiments, cancers that may be treated using the recoding therapy disclosed herein are selected from the group consisting of sarcomas such as Osteosarcoma, Osteoma, Chondrosarcoma, Chondroma, Leiomyosarcoma, Leiomyoma, Rhabdomyosarcoma, Rhabdomyoma, Mesothelioma, Fibrosarcoma, Fibroma, Malignant Histiocytoma, Hisitocytoma, Angiosarcoma, Hemangiosarcoma, Hemangioma, Hemangiopericytoma, Lymphangiosarcoma, Lymphangioma, Liposarcoma, Lipid Cell Tumor, Lipoma, Myxosarcoma, Chordoma, Cystosarcoma Phylloides, Fibroadenoma, Seminoma, Dysgerminoma, Sertoli-Leydig Cell Tumor, Arrhenoblastoma, Granulose-Theca Cell Tumor, Hilar Cell Tumor, Prostate Cancer, Prostatic Hypertrophy, Wilms Tumor, Melanoma, Nevus, Neurofibrosarcoma, Glioma, Anaplastic Glioma, Glioblastoma, Neuroblastoma, Medulloblastoma, Ganglioneuroma, Malignant meningioma, Meningioma, Malignant Schwannoma, Schwannoma, Neurilemmoma, Neurofibroma and Mesenchymous Tumor; Carcinomas such as Squamous Cell Carcinoma, Merkel Cell Neoplasm, Epidermoid Carcinoma, malignant Skin Adnexal Tumor, Adenocarcinoma, Hepatocellular Carcinoma, Renal Cell Carcinoma, Choriocarcinoma, Hypernephroma, Cholangiocarcinoma, Transitional Cell Carcinoma, Seminoma, Embryonal Cell Carcinoma, Papilloma, Seborrheic Keratosis, Skin Adnexal Tumors, Hepatoma, Adenoma, Hepatic Adenoma, Renal Tubular Adenoma, Bile Duct Adenoma, Transitional Cell Papilloma, Hydatidiform Mole, Parathyroid Carcinoma, Parathyroid Adenoma, Medullary Carcinoma of Thyroid, C Cell Hyperplasia, Malignant Pheochromocytoma, Pheochromocytoma, Islet Cell Carcinoma, Islet Cell Adenoma, Insulinoma, Gastrinoma, Malignant Carcinoid, Carcinoid, Malignant Paraganglioma, Chemodectoma and Paraganglioma; Myelomas; Leukemias such as Myelogenous Leukemia, Lymphatic Leukemia, Policythemia, Aleukemic Leukemia, Preleukemia and Myeloproliferative Disorders; Lymphoma such as Myeloma, Hodgkin Lymphoma, Non-Hodgkin Lymphoma, Plasmacytoma and Plasmacytosis; Adenosquamous Carcinoma, Mesodermal Tumor, Carcinosarcoma and Teratocarcinoma.

[1445] Symptoms of Neoplastic Diseases:

[1446] In one example, the present invention treats or alleviates at least one symptom selected from Angina, Bradypnea, Breathing difficulties, Gradual vision change in both eyes, Gradual vision changes in one eye, Head symptoms, Heartburn, Muscle symptoms, Nerve symptoms, Perforated gastric ulcer, Perforated ulcer, Respirations, shallow, Sexual symptoms, Weight loss, Oesophagus symptoms, Weight symptoms, Anaemia, Bad breath, Breath odors, Burning feet, Burning Legs, Cleft lip with or without cleft palate in children, Communication symptoms, Diarrhea, Dyspepsia, Easily fatigued, Enlarged liver, Face symptoms, Foot pain, Gastritis, Gastrooesophageal reflux in pregnancy, Glossitis, Hairy Tongue, Hyperlipidaemia, Hypertriglyceridemia, Impotence, Lack of energy, Lag in breathing, Male infertility, Meniere's disease, Movement symptoms, Musculoskeletal symptoms, Night sweats in children, Non-respiratory causes of shallow respiration, Raised ambulatory 24 hr pH monitoring, Rapid heartbeat, Respiratory lag, Sleep symptoms, Sleeplessness, Speech symptoms, Sweat symptoms, Trauma-related symptoms, Voice symptoms, Vomiting, White tongue, Abdominal symptoms, Abnormal blood test symptoms, Acute reflux-like regurgitation in pregnancy, Acute reflux-like symptoms in pregnancy, Acute reflux-like vomiting in pregnancy, Acute stomach ulcer-like symptoms in pregnancy, Birth symptoms, Blanching in the fingers, Bleeding symptoms, Blood symptoms, Blood vessel damage, Chronic pain in multiple muscles, Digestive symptoms, Elevated blood pressure in pregnancy, Episodic arterial vasospasm, Female infertility, Female reproductive symptoms, Fertility symptoms, Heart enlargement, Hiatus hernia, Hiatus hernia related to chronic digestive disorders, High blood pressure, Hypertension-like symptoms in pregnancy, Impaired myocardial contractility, Increased Systolic pressure, Infection, Infertility, Intermittent claudication, Intermittent claudication of both lower limbs, Intermittent claudication of one lower limb, Intermittent pain of the lower limb, Lower abdominal symptoms, Lower blood pressure in the legs than in the arms, Mouth symptoms, Mycocardial ischemia, Noncompliance, Occlusion of renal arteries, Pain, Peripheral arterial trauma, Poor appetite, Poor wound healing, Pregnancy symptoms, Pulsatile Abdominal swelling, Red blood cell symptoms, Reflux-like symptoms, Respiratory symptoms, Sensory symptoms, Severe chronic pain in multiple bones, Sore throat, Sweating, Throat symptoms, Urinary incontinence, Venous insufficiency, Women's health symptoms, Birth defects, Eating symptoms, 1 litre of sweat per hour, Aberrant behaviour in pregnancy, Abnormal eye movements, Abnormal Liver Function Tests in Pregnancy, Abnormal thinking in pregnancy, Absenteeism, Accentuated fall in systolic pressure, Acidosis, Action tremor, Acute epilepsy-like symptoms, Acute forgetfulness in pregnancy, Acute hemorrhagic pancreatitis, Acute intermittent forgetfulness in pregnancy, Acute onset of daytime sleepiness, Acute onset of daytime sleepiness in adults, Acute onset of daytime sleepiness in the elderly, Acute pancreatitis, Addiction symptoms, Aggression, Alcohol abuse, Alcohol breath odor, Alcohol use, Altered bladder habits in pregnancy, Altered mental state, Altered vital signs, Anxiety disorder in pregnancy, Anxiety in pregnancy, Apprehension in pregnancy, Arrhythmia, Arrhythmias, Atrial fibrillation, Balance symptoms, Behavior problems at school, Behavior problems at work, Behavior problems in adults, Behavior problems in children, Behavior problems in teens, Behavioral symptoms, Behaviour changes in pregnancy, Blackouts, Cerebellar ataxia, Chronic Diarrhea, Chronic orthostatic hypotension, Cleft palate in children, Clumsiness, CNS depression in children, Cognitive impairment, Coma, Confusion, Confusion in children, Coordination problems, De-personalization, Decreased level of consciousness, Deep stupor, Dehydration, Delayed ejaculation, Delirium, Delusions, Dementia, Depressed mental status, Depressive symptoms, Diabetic retinopathy, Diaphoresis of the feet, Diaphoresis of the forehead, Diaphoresis of the palms, Diaphoresis of the soles, Difficulty concentrating in adults, Disoriented state, Diuresis, Dramatic fall in blood pressure, Drowsiness, Drug abuse, Drug withdrawal causing new-onset seizures, Drugs, Drugs causing diarrhea, Drugs causing macrocytosis, Drugs causing persistent hypoglycemia, Drugs causing persistent hypoglycemia in adolescents, Drugs causing persistent hypoglycemia in children, Drugs causing persistent hypoglycemia in infants, Dysphagia due to esophagitis, Emotional symptoms, Energy symptoms, Epilepsy-like symptoms, Episodic Diaphoresis, Episodic Diaphoresis as in case of diabetes mellitus, Euphoria, Excessive diaphoresis, Eye symptoms, Fainting, Fainting episodes similar as in pulmonary hypertension, Falls, Fatigue, Feeling the heartbeat, Flushing, Forgetfulness, Forgetfulness in pregnancy, Frequency of urination in pregnancy, Frequent urination, Frequent urination in pregnancy, Generalised diaphoresis, Generalised diaphoresis with heat loss via evaporation, Hallucinations, Headache, Heart arrhythmia, Heart arrhythmias, Heart flutters, High ALP, High ALT, High AST, Hyperosmolarity, Hypoperfusion state, Hypothermia, Hypothermic attack, Imbalance, Impaired circulation, Inadequate intravascular pressure, Inattention, Inattention symptoms, Increased bilirubin, Increased GGT, Increased prothrombin time, Increased sweating, Intercourse symptoms, Intermittent diaphoresis, Intermittent epilepsy-like symptoms, Intermittent seizures in early childhood, Involuntary tonic movements, Irregular heartbeat, Irritability, Jaundice in pregnancy, Level of consciousness symptoms, Liver tenderness in pregnancy, Low albumin, Low blood platelet level in pregnancy, Low blood pressure, Low blood sugar, Low temperature, Major depression in pregnancy, Male impotence, Memory disturbances, Memory Disturbances in pregnancy, Memory loss in pregnancy, Memory symptoms, Memory symptoms in pregnancy, Mental changes in pregnancy, Mental depression, Mental depression in pregnancy, Mental problems, Mental problems in pregnancy, Mild depression in pregnancy, Mild depression-like symptoms in pregnancy, Mild personality changes, Moderate depression in pregnancy, Mood swings, Muscle pain, Muscle weakness, Myoclonus, Nerve damage, Nervousness, Nervousness in pregnancy, Neuromuscular irritability, Neuromuscular irritability of lower limbs, Neuropathy, Night time urination in pregnancy, Night urination in pregnancy, Nocturia in pregnancy, Numbness in Both Feet, Numbness in one foot, Nystagmus, Ocular myokymia, Orthostatic hypotension, Ototoxic medications, Palpitations, Pancreatitis, Paresthesias, Penile Burning Sensation, Persistent painful erection, Personality change, Personality symptoms, Phobia, Progressive mental deterioration, Prolonged exposure to cold, Psychiatric symptom, Pulse irregularity in pregnancy, Red face, Reduced immune response, Reduced intravascular pressure, Reduced sperm count, Retinopathy, School problems, Seizures, Seizures in infants and early childhood, Self-esteem symptoms, Severe epilepsy-like symptoms, Sexual dysfunction in pregnancy, Short-term memory loss, Signs of circulatory collapse, Signs of circulatory collapse as seen in intestinal hemorrhage, Sleeping problems, Slurred speech, Social problems, Society problems, Sole numbness, Standing symptoms, Stupor, Subfertility, Substance abuse causing school underachievement and academic failure, Substances of abuse causing delirium, Sudden onset of confusion in children, Syncopal episode, Thigh Burning Sensation, Thrombocytopenia, Thrombocytopenia in pregnancy, Tingling in Both Feet, Tingling in both hands, Tingling in one foot, Tingling in one hand, Tonic-clonic seizure, Toxins causing vomiting, Tremor, Unusual body odor in children, Urinary burning, Urinary urgency, Urine retention, Vascular collapse, Vertigo, Violent behaviour, Walking symptoms, Weight loss in pregnancy, Abnormal uterine bleeding, Abortion, Abruptio Placentae in Pregnancy, Abscessed teeth, Acid Reflux in pregnancy, Acquired mental retardation, Acute acid reflux into mouth during pregnancy, Acute attack of asthma, Acute cerebral infarct, Acute seasonal asthma-like symptoms, Aphthous Ulcer, Arm burning sensation, Arm coldness, Arm infection, Arm inflammation, Arm numbness, Arm paresthesia, Arm redness, Arm sensitive, Arm spasm, Arm swelling, Atelectasis, Biceps burning sensation, Biceps cold, Biceps infection, Biceps inflammation, Biceps numb, Biceps redness, Biceps spasm, Biceps swelling, Biceps tingling, Bilateral cleft lip and palate, Bilateral complete cleft lip, Bilateral stroke, Black hairy tongue, Bladder symptoms, Blood clots, Blood lead concentration, Blood pressure symptoms, Blood vessel symptoms, Blue lips, Bone changes, Breath sound symptoms, Breath symptoms, Bronchial cancer, Bronchitis, Brown nails, Cancer-related symptoms, Cardiovascular symptoms, Cervix symptoms, Chronic bronchitis, Chronic cough, Chronic cough in adolescents, Circulation symptoms, Claudication, Cluster headache, Constant leg pain, Coracobrachialis infection, Coracobrachialis redness, Coracobrachialis swelling, Cough, Cramping leg pain, Cramping pain in both legs, Dark spots on teeth, Darkened tongue, Death, Death-related symptoms, Decreased salivary function, Digit burning sensation, Digit cold, Digit infection, Digit inflammation, Digit numb, Digit redness, Digit sensitive, Digit spasm, Digit swelling, Digit tingling, Disc herniation, Disc prolapse, Discolored teeth in children, Dry cough, Dry Gangrene, Dry mucous membrane as in case of Sjogren's syndrome, Dry skin, Electrocardiogram changes, Eructation, Exercise symptoms, Female genital symptoms, Female sexual symptoms, Femur burning sensation, Femur numb, Femur tingling, Fetal symptoms, Fibula burning sensation, Fibula numb, Fibula tingling, Finger burning sensation, Finger pulp burning sensation, Fingernail burning sensation, Fingers burning sensation, Fingers cold, Fingers infection, Fingers inflammation, Fingers numb, Fingers redness, Fingers sensitive, Fingers spasm, Fingers swelling, Fingers tingling, Forearm burning sensation, Forearm cold, Forearm infection, Forearm inflammation, Forearm numb, Forearm redness, Forearm sensitive, Forearm spasm, Forearm swelling, Forearm tingling, Foul mouth odour, Genital symptoms, Growth symptoms, Heart damage, Heart disease, Heart rhythm symptoms, Heart symptoms, Heartburn after eating in pregnancy, Heartburn after exercise in pregnancy, Heartburn in pregnancy, Heartburn pain resistant to treatment in pregnancy, Heartburn that worsens if lying down after eating in pregnancy, Heartburn unrelated to eating in pregnancy, Heartburn with acid reflux in pregnancy, Heartburn without reflux in pregnancy, Herniated disk, Hiccups, High lipoprotein level, Hoarse, Humerus burning sensation, Humerus numb, Humerus tingling, Hypoxia in pregnancy, Increased capillary refill time, Increased secretions in the lung, Indigestion in pregnancy, Infant symptoms, Inflammatory symptoms, Irregular rhythm, Kidney symptoms, Knee joint burning sensation, Knee joint cold, Knee joint numb, Knee joint sensitive, Knee joint tingling, Kneecap burning sensation, Kneecap cold, and any combinations thereof.

[1447] In one aspect, the present disclosure provides methods to activate, promote, support, improve, or increase the activity of a growth factor receptor present in, on the surface of a neoplastic cell such that the neoplastic cell in converted into a non-neoplastic cell and/or a subject carrying said cell is protected from a neoplastic disease, said methods optionally comprising the administration of a pharmaceutical association as defined herein.

[1448] In one aspect, the present disclosure provides methods to activate, promote, support, improve, or increase the tumor suppressor activity of proteins p53 and/or pRb (retinoblastoma protein) in a neoplastic cell such that the neoplastic cell in converted into a non-neoplastic cell and/or a subject carrying said cell is protected from a neoplastic disease, said methods comprising the administration of a pharmaceutical association as defined herein.

[1449] In one aspect, the present disclosure provides methods to convert a neoplastic cell (e.g. a cancer cell) into a non-neoplastic cell (e.g. a non-cancerous cell) and/or to protect a subject carrying this cell from a neoplastic disease, disorder, condition, pathology or at least one symptom thereof, which involves dampening or inhibiting cell division and/or regulating, re-establishing or restoring a cell adhesion checkpoint and/or inducing differentiation of said neoplastic cell.

[1450] In one aspect, the present disclosure provides a GFR-binding compound as defined herein, for use in the prevention, diagnostic and/or treatment of a neoplastic disease in combination with at least one adhesion protein inhibitor as defined herein.

[1451] In one aspect, the present disclosure provides an adhesion protein inhibitor, for use in the prevention, diagnostic and/or treatment of a neoplastic disease in combination with at least one growth factor receptor-binding compound as defined herein.

### XII. Diagnostic Methods

[1452] In one aspect, the present disclosure provides methods of identifying, diagnosing, and optionally classifying subjects on these bases, which may include clinical diagnosis, biomarker levels, and other methods known in the art.

[1453] In one aspect, the present disclosure provides a pharmaceutical association or composition as defined herein for use in a diagnostic method of a neoplastic disease (e.g. a cancer). In one example, such a diagnostic method comprises the detection of a cancer using a method described in US patent application No. 2002/0159986 A1, which is incorporated herein by reference in its entirety.

[1454] In one aspect, the present disclosure provides a diagnostic method for diagnosing of a neoplastic disease or condition comprising the provision of a pharmaceutical association or composition as defined herein, and the contacting or administration of said pharmaceutical association or composition with a body part of a subject to be diagnosed.

[1455] A method for the diagnosis of cancer in a patient, comprising obtaining a biological sample from a patient and apply fluorescent and/or radiolabeled GFR binding compounds, wherein high localisation of these compounds indicates cancer in the patient.

[1456] In one aspect, the present disclosure provides methods of determining the effectiveness of a pharmaceutical association, combination or composition as defined herein for converting a neoplastic cell into a non-neoplastic cell and/or for treating a neoplastic disease or at least one symptom thereof, comprising the administration of said pharmaceutical association to a cell; the measurement of the expression of specific differentiation and/or cancerous markers as defined herein in the cell; the comparison of the expression of said specific differentiation and/or cancerous markers in the cell to the expression of said specific differentiation and/or cancerous markers in a cell treated with a reference (or control) pharmaceutical association, compound or solvent; and determining the effectiveness of the pharmaceutical association or composition relative to the reference pharmaceutical association or compound.

### XIII. Screening Methods

[1457] In one aspect, the present disclosure provides a screening method for selecting a GFR-binding compound having the ability, after being associated or combined with an adhesion protein inhibitor as defined herein (thus forming a pharmaceutical association or combination as defined herein), to convert or recode a neoplastic cell into a non-neoplastic cell.

[1458] In one aspect, the present disclosure provides a screening method for selecting a peptide or a peptidomimetic having the ability, after being associated or combined with an adhesion protein inhibitor as defined herein (thus forming a pharmaceutical association or combination as defined herein), to convert or recode a neoplastic cell into a non-neoplastic cell.

[1459] In one aspect, the present disclosure provides a screening method for selecting a peptide or peptidomimetic having the ability, after being associated or combined with an adhesion protein inhibitor as defined herein (thus forming a pharmaceutical association or combination as defined herein), to convert or recode a neoplastic cell into a non-neoplastic cell, the method comprising the steps of (a) providing a molecular model of the 3D structure coordinates of PEPREF as defined herein and (b) identifying a candidate analog having a RMSD value of 2.45 Å or less, in particular of 2 Å or less, and more particularly of 1.79 Å or less. In one particular example, step (b) is performed using the method of RMSD calculation as already defined herein.

[1460] In certain embodiments, the method can be performed using a computer (i.e., in silico). In some embodiments, the method can include providing the three-dimensional models of a plurality of peptides or peptidomimetics (i.e., a library or database of peptides or peptidomimetics) and screening each compound individually. Thus, in one aspect, the method of screening peptides or peptidomimetics generally includes computationally evaluating the potential of a selected peptide(s) or peptidomimetic(s) to structurally match with the computational model of the three-dimensional structure of PEPREF. For example, this method can include the steps of (a) employing a computational approach to perform a fitting operation between the selected peptide(s) or peptidomimetic(s) and the three-dimensional structure of PEPREF; and (b) analysing the results of the fitting operation to quantify the three-dimensional structural similarities between the peptide(s) or peptidomimetic(s) and PEPREF using the RMSD procedure as defined herein.

[1461] In one aspect, the present disclosure provides a method of producing a peptide or peptidomimetic having the ability, after being associated or combined with an adhesion protein inhibitor as defined herein (thus forming a pharmaceutical association or combination as defined herein), to convert or recode a neoplastic cell into a non-neoplastic cell, the method comprising the steps of (a) providing a molecular model of the following 3D structure coordinates of PEPREF; b) identifying a candidate analog having a RMSD as defined herein of 2.45 Å or less (in particular 2, more particularly 1.79); and (c) producing the candidate analog identified in step (b). In one particular example, said method further comprising the step of determining whether the compound produced in step (c) has a neoplastic cell recoding activity. In one particular example, steps (a) and (b) are performed by means of an electronic processor. In certain embodiments, step (a) comprises storing a representation of the atomic co-ordinates of PEPREF in a computer memory.

[1462] In one aspect, the present disclosure provides a method of producing a peptide or peptidomimetic having the ability, after being associated or combined with an adhesion protein inhibitor as defined herein (thus forming a pharmaceutical association or combination as defined herein), to convert or recode a neoplastic cell into a non-neoplastic cell, the method comprising the steps of: (a) providing in a computer memory atomic X-ray crystallographic co-ordinates of PEPREF; (b) generating with a processor a molecular model having a three-dimensional shape of PEPREF; (c) identifying a candidate analog having a RMSD of 2.45 Å or less (in particular 2, more particularly 1.79); (d) producing the candidate analog identified in step (c); and (e) determining whether the candidate analog produced in step (d), once associated or combined with an adhesion protein inhibitor as defined herein (thus forming a pharmaceutical association or combination as defined herein), has the ability to convert or recode a neoplastic cell into a non-neoplastic cell. In one particular example, said method comprises the additional step of producing the peptide or peptidomimetic in a commercially useful quantity.

[1463] In one aspect, the present disclosure provides a computer system comprising: (a) a memory comprising atomic X-ray crystallographic coordinates of PEPREF; and (b) a processor in electrical communication with the memory; wherein the processor generates a molecular model having a three dimensional shape representative of PEPREF. In one particular example, said coordinates are stored on a computer readable diskette.

### XIV. Kits

[1464] The present disclosure provides a variety of kits for conveniently and/or effectively carrying out methods and uses of the present invention. Typically, kits will comprise sufficient amounts and/or numbers of components to allow a user to perform multiple treatments of a subject(s) and/or to perform multiple experiments.

[1465] In one aspect, the present disclosure provides kits for pharmaceutical association production, comprising at least one GFR-binding compound as defined herein, at least one adhesion protein inhibitor as defined herein, both provided in an amount effective to produce a pharmaceutical association to convert a neoplastic cell into a non-neoplastic cell and/or treat, prevent or diagnose a neoplastic disease when administered in-vitro, ex-vivo or in-vivo to a neoplastic cell or a subject carrying such a neoplastic cell, and packaging and instructions.

[1466] In one aspect, the present disclosure provides kits for pharmaceutical composition production, comprising a GFR-binding compound as defined herein, an adhesion protein inhibitor as defined herein, and a pharmaceutically acceptable excipient, carrier or vehicle, each of them provided in an amount effective to produce a pharmaceutical composition to convert a neoplastic cell into a non-neoplastic cell and/or treat or prevent a neoplastic disease when administered in-vitro, ex-vivo or in-vivo to a neoplastic cell or a subject carrying such a neoplastic cell, and packaging and instructions.

[1467] Suitable as solvents for use in kits of the invention include physiologically acceptable solvents, PBS, filtered and deionised water such as Milli-Q® water, alpha-MEM, DMEM and/or IMDM. All physiologically acceptable solvents suitable for implementing embodiments of the present invention are preferably deoxygenated before use.

[1468] In one example, said kit further comprises an administration device. In one example, said administration device is a dispensing device such as a syringe.

[1469] In one example, said kit comprises a first container containing a GFR-binding compound as defined herein and a second container containing an adhesion protein inhibitor.

[1470] In one particular example, said kits of the invention may suitably be provided in the form of a sterile packaging.

[1471] For example, in certain embodiments, said kits of the invention comprises more than 2, between 2 and 25, between 2 and 15, or between 2 and 10 of GFR-binding compound as defined herein, and more than 2, between 2 and 25, between 2 and 15, or between 2 and 10 GFR-binding compound as defined herein.

[1472] In one example, each GFR-binding compound and each adhesion protein inhibitor is conditioned in distinct and separated compartments, in lyophilised form, in solution or in suspension in a pharmaceutically dermatologically, prophylactically, diagnostically, imaging or cosmetically acceptable excipient, carrier or vehicle.

[1473] In one aspect, the invention discloses kit-of-parts comprising an adhesion protein inhibitor and a GFR-binding compound both as defined herein for uses and methods as defined herein.

### XV. Sequence Listing

[1474] Examples of (modified) non-cyclic GFR-binding compounds as defined herein are listed in the appended sequence listing which forms an integral part of the present application.

[1475] Examples of (modified) cyclic GFR-binding compounds as defined herein are listed in the appended sequence listing which forms an integral part of the present application. (Modified) cyclic GFR-binding compounds of the present disclosure may be represented in non-cyclic, linear, form solely for the purpose of ease of representation but nevertheless remains cyclic compounds wherein the first and the last functional group (e.g. an amino acid) of the linearly represented compound are covalently connected to each other thereby forming a cyclic structure.

[1476] Pharmaceutical associations, combinations and compositions as defined in the present disclosure, has been found to lead to multiple and distinct advantages in terms of neoplastic diseases treatment.

[1477] As supported by the examples of the present application, pharmaceutical associations, combinations and compositions as defined in the present disclosure provide for a new area of treatment of neoplastic diseases by extracellularly converting or recoding neoplastic cells into functional and healthy cells. The therapy of the invention containing pharmaceutical associations, combinations or compositions as defined herein display advantages over therapies that do not contain it, such as any one of, and preferably a plurality of:
[1478] Enhanced and/or more practical and/or more efficient and/or more cost-effective and/or more adapted to the end-user needs;
[1479] Converting or recoding a neoplastic cell to induce and/or promote and/or improve self-healing and/or self-recovery thereof, particularly in a shorter period of time;
[1480] Converting a neoplastic cell into a non-neoplastic cell and/or protecting a subject from a neoplastic disease, disorder, condition, pathology, such as cancer, or symptoms thereof using non-mutagenic means;
[1481] Converting a neoplastic cell into a non-neoplastic cell and/or protecting a subject from a neoplastic disease, disorder, condition, pathology, such as cancer, or symptoms thereof using extracellular means;
[1482] Restoring a neoplastic cell ability to undergo differentiation, particularly in a shorter period of time;
[1483] Converting and/or recoding a circulating or non-circulating neoplastic cell such as a metastatic or non-metastatic cancer cell, into a non-neoplastic cell, particularly in a shorter period of time;
[1484] Protecting a subject from a neoplastic disease, disorder, condition or pathology such as cancer, and/or any symptoms thereof, particularly in a shorter period of time;
[1485] Providing and/or producing a physiologically functional and/or healthy osteoblast, osteocyte, chondroblast, chondrocyte, neuroblast, neurocyte, Sertoli cells, Leydig cell, Germ cell, Myoblast, Myocyte, keratinocyte, endothelial cells, angioblast, fibroblast, fibrocyte or podocyte from a neoplastic cell, particularly within a shorter period of time;
[1486] Re-establishing, reactivating or restoring the cell adhesion checkpoint of a neoplastic cell;
[1487] Treating a neoplastic cell without substantially inducing cell death;
[1488] Inducing quiescence of a neoplastic cell;
[1489] Dampening, reducing or suppressing cell division/proliferation of a neoplastic cell;
[1490] Activating and/or promoting and/or up-regulating anti-mitogen activity and/or tumor suppressor pathways and/or anti-oncogenic activity in a neoplastic cell;
[1491] Adapted to the treatment of any neoplastic cell;
[1492] Safer for the patient being treated as providing less or no harmful side-effects;
[1493] Offers the possibility for local treatments of neoplastic diseases;
[1494] Relies mainly or only on the activation of physiological cell mechanisms which increases the general safety of the herein defined therapy.

[1495] For example, in certain embodiments, pharmaceutical association or combinations, or compositions according to the present disclosure in which PEP1 is a peptide selected from the group consisting of SAIS, NAIS, SATS and SPIS, in which PEP2 is a peptide selected from the group consisting of LKNYQ, LKKYR, LRKHR and LKYHY, have been found to lead to unexpectedly fast conversion of a cancerous cell into a healthy and functional cell of the bone lineage.

[1496] For example, in certain embodiments, pharmaceutical association or combinations, or compositions according to the present disclosure in which PEP1 is a peptide selected from the group consisting of SAIS, NAIS, SPIS, EPLP, and EPLT, in which PEP2 is a peptide selected from the group consisting of LKNYQ, LKKYR, YKQYE and EQLSN, have been found to lead to unexpectedly fast conversion of a cancerous cell into a healthy and functional cell of the chondrocytic cell lineage.

[1497] For example, in certain embodiments, pharmaceutical association or combinations, or compositions according to the present disclosure in which PEP1 is a peptide selected from the group consisting of SNIT, RPVQ and RSVK, in which PEP2 is a peptide selected from the group consisting of IGEMS, LGEMS, KEVQV and KKATV, have been found to lead to unexpectedly fast conversion of a cancerous cell into a healthy and functional cell of the vascular lineage.

[1498] For example, in certain embodiments, pharmaceutical association or combinations, or compositions according to the present disclosure in which PEP1 is selected from the group consisting of NAIS, SPIS and EPIS, wherein PEP2 is selected from the group consisting of LKKYR, LKYHY, YKQYE and KFKYE, have been found to lead to unexpectedly fast conversion of a cancerous cell into a healthy and functional cell of the neuron lineage.

[1499] For example, in certain embodiments, pharmaceutical association or combinations, or compositions according to the present disclosure in which PEP1 is SPIN, in which PEP2 is YGKIP, have been found to lead to unexpectedly fast conversion of a cancerous cell into a healthy and functional cell of the eye-retina lineage.

[1500] For example, in certain embodiments, pharmaceutical association or combinations, or compositions according to the present disclosure in which PEP1 is SPIN, and in which PEP2 is YGKIP, have been found to lead to unexpectedly fast conversion of a cancerous cell into a healthy and functional cell of the renal lineage.

[1501] For example, in certain embodiments, pharmaceutical association or combinations, or compositions according to the present disclosure in which PEP1 is a peptide selected from the group consisting of NAIS, SPIS, EPLP and EPLT, in which PEP2 is selected from the group consisting of LKKYR, YKQYE and EQLSN, have been found to lead to unexpectedly fast conversion of a cancerous cell into a healthy and functional cell of the ligament and tendon lineage.

[1502] For example, in certain embodiments, pharmaceutical association or combinations, or compositions according to the present disclosure in which PEP1 is a peptide selected from the group consisting of EPLP, EPLT, RSVK and RPVQ, in which PEP2 is a peptide selected from the group consisting of EQLSN, IGEMS, KEVQV and KKATV, have been found to lead to unexpectedly fast conversion of a cancerous cell into a healthy and functional cell of the fibroblast lineage.

[1503] For example, in certain embodiments, pharmaceutical association or combinations, or compositions according to the present disclosure in which PEP1 is NAIS, in which PEP2 is LKKYR, have been found to lead to unexpectedly fast conversion of a cancerous cell into a healthy and functional cell of the reproduction system lineage.

[1504] For example, in certain embodiments, pharmaceutical association or combinations, or compositions according to the present disclosure in which PEP1 is selected from the group consisting of NAIS, SATS, SPIS, EPIS and SPIN, in which PEP2 is selected from the group consisting of LKKYR, LRKHR, LKYHY, KFKYE and YGKIP, have been found to lead to unexpectedly fast conversion of a cancerous cell into a healthy and functional cell of the lung cell lineage.

[1505] For example, in certain embodiments, pharmaceutical association or combinations, or compositions according to the present disclosure in which PEP1 is selected from the group consisting of RSVK or RPVQ, in which PEP2 is selected from the group consisting of KEVQV or KKATV, have been found to lead to unexpectedly fast and qualitatively and quantitatively important muscle cells induction, producing highly functional differentiated cells.

[1506] For example, in certain embodiments, pharmaceutical association or combinations, or compositions according to the present disclosure in which PEP1 is SNIT, in which PEP2 is IGEMS or LGEMS, have been found to lead to unexpectedly fast conversion of a cancerous cell into a healthy and functional cell of the blood cell lineage.

[1507] For example, in certain embodiments, pharmaceutical association or combinations, or compositions according to the present disclosure in which PEP1 is SAIS or NAIS, in which PEP2 is LKNYQ or LKKYR, have been found to lead to unexpectedly fast conversion of a cancerous cell into a healthy and functional cell of the adipocyte lineage.

[1508] Accordingly, it is possible to achieve the conversion of a neoplastic cell (e.g. a cancer cell) into a non-neoplastic cell (e.g. a functional and/or healthy cell of the bone, chondrocytic, muscle, vascular, neuronal, retinal, renal, ligament, tendon, fibroblast, blood, lung, adipocyte, reproduction system cell lineages) using extracellular, non-mutagenic active principles and is thus useful in the treatment of neoplastic diseases such as cancers.

[1509] The present invention provides a recoding therapy for the treatment of neoplastic diseases, conditions or disorders such as cancer and aims at providing a suitable micro-environment to the neoplastic cell containing suitable biological signals so that the neoplastic cell is able to undergo self-healing and become a functional, healthy, non-neoplastic cell.

[1510] In addition, it has been found that using the recoding therapy of the invention instead of conventional therapies allows for improved treatment selectivity in such a way that reduced or substantially no adverse side-effect is observed. Without wishing to be bound to any specific theory, this may be explained by considering that the present therapy relies on the activation of physiological cell mechanisms without imposing or forcing the treated cell to undergo e.g. apoptosis or cell cycle arrest (which would then most likely unselectively target any cells, healthy and neoplastic) but instead reestablishes the correct cellular microenvironment surrounding this neoplastic cell so that the cell is able to operate self-healing. As a result, a non-neoplastic cell i.e. a cell in which the cell cycle and/or cell adhesion checkpoint(s) need not be repaired, brought in contact with such a microenvironment would be less or not be substantially affected.

[1511] Remarkably, it has also been found that using the pharmaceutical associations or compositions as defined herein allows for the reduction (in most cases, important reduction) of the time of treatment of a neoplastic cell and by extension of a neoplastic disease in comparison with known technologies.

[1512] It is another aspect of the present invention to solve the technical problem of providing a therapy for treating neoplastic diseases being completely or at least partially devoid of one or more, preferably a plurality of the disadvantages of known treatments.

[1513] All combinations of any of the above-mentioned features described in all above part of the present description are specifically contemplated by the Applicant to be within the scope of the present invention unless contradictory in context. Examples of such combinations are detailed throughout the present description.

[1514] Further embodiments and advantages will become apparent to a skilled reader in light of the examples provided below.

### EXAMPLES

[1515] Disclosed and described, it is to be understood that this invention is not limited to the particular examples, process steps, and materials disclosed herein as such process steps and materials may vary somewhat. It is also to be understood that the terminology used herein is used for the purpose of describing particular embodiments only and not intended to be limiting since the scope of the present invention will be limited only by the appended claims and equivalents thereof.

[1516] The following Examples are representative of techniques employed by the inventor in carrying out aspects of the present invention. It should be appreciated that while these techniques are exemplary of preferred embodiments for the practice of the invention, those of skill in the art, in light of the present disclosure, will recognize that numerous modifications can be made without departing from the spirit and intended scope of the invention.

[1517] The following starting materials and reagents were used:
[1518] Type-I collagen sponge was obtained from Sigma®.
[1519] PBS 1× was obtained from Gibco®.
[1520] MilliQ water: is water characterised in terms of resistivity (typically 18.2 MΩ·cm at 25° C.).
[1521] Low glucose Dulbecco's Modified Eagle Medium (DMEM) was obtained from Invitrogen®
[1522] Minimum Essential Medium Eagle without ascorbic acid (αMEM) was obtained from Invitrogen®.
[1523] All of the cell culture experiments were carried out without any serum in the medium for the first 8 hours of culture.
[1524] Osteosarcoma cells: MG63 cells were obtained from ATCC®. These cells were cultured in DMEM (Eagle's Minimum Essential Medium) medium supplemented with 10% fetal calf serum (FCS) and 1% penicillin/streptomycin. All cells were used at a low passage number (passage 10), were subconfluently cultured and were seeded at 10⁴ cells/cm² for the purpose of the experiments.
[1525] Chondrosarcoma cells Hs819.T cells were obtained from ATCC®. These cells were cultured in DMEM (Eagle's Minimum Essential Medium) medium supplemented with 10% fetal calf serum (FCS) and 1% penicillin/streptomycin. All cells were used at a low passage number (passage 10), were subconfluently cultured and were seeded at 10⁴ cells/cm² for the purpose of the experiments.
[1526] Rhabdomyosarcoma cells: A-673 cells were obtained from ATCC®. These cells were cultured in DMEM (Eagle's Minimum Essential Medium) medium supplemented with 10% fetal calf serum (FCS) and 1% penicillin/streptomycin. All cells were used at a low passage number (passage 10), were subconfluently cultured and were seeded at 10⁴ cells/cm² for the purpose of the experiments.
[1527] Adenocarcinoma cells: HCC4006 cells were obtained from ATCC®. These cells were cultured in RPMI-1640 medium (obtained from ATCC®) supplemented with 10% fetal calf serum (FCS) and 1% penicillin/streptomycin. All cells were used at a low passage number (passage 10), were subconfluently cultured and were seeded at 10⁴ cells/cm² for the purpose of the experiments.
[1528] CMFDA is a Cell Tracker Green obtained from Invitrogen®.
[1529] DAPI was obtained from Sigma®.
[1530] Fetal bovine serum (FBS) was obtained from Gibco®.
[1531] Penicillin/streptomycin was obtained from Invitrogen®.
[1532] The AlamarBlue® assay was obtained from Molecular Probes®.
[1533] Anti phospho-p53 antibody was obtained from Santa Cruz Biotechnology®,
[1534] Anti pRB antibody was obtained from Santa Cruz Biotechnology®,
[1535] Monoclonal anti-integrin (extracellular domain) αv, α5, α3, α4, β1, β3, β5 and β9 antibodies were obtained from Santa Cruz Biotechnology®,
[1536] Cell cytoskeletal filamentous actin (F-actin) was visualized by Alexa Fluor® 488 phalloidin Sigma® labeling.
[1537] Monoclonal anti-vinculin antibody (clone hVIN-1, produced in mouse) was obtained from Sigma®.

Primers for Cyclin D1:
5′-CCGTCCATGCGGAAGATC-3′ (Forward)
and
5′-GAAGACCTCCTCCTCGCACT-3′ (Reverse)
were obtained from Invitrogen ®
Primers for Cyclin D2:
5′-CATCCAACCGTACATGCGCAG-3′ (Forward)
and
5′-CATGGCCAGAGGAAAGACCTC-3′ (Reverse)
were obtained from Invitrogen ®
Primers for Cyclin 03:
5′-TGATTTCCTGGCCTTCATTC-3′ (Forward)
and
5′-CGGGTACATGGCAAAGGTAT-3′ (Reverse)
were obtained from Invitrogen ®
Primers for Paxillin:
5′-AATTCCAGTGCCTCCAACAC-3′ (Forward)
and
5′-GAGCTCATGACGGTAGGTGA-3′ (Reverse)
were obtained from Invitrogen ®
Primers for Vinculin:
5′-GCCAAGCAGTGCACAGATAA-3′ (Forward)
and
5′-TTCCTTTCTGGTGTGTGAAGC-3′ (Reverse)
were obtained from Invitrogen ®
Primers for DMP-1:
5′-AGCATCCTGCTCATGTTCCTTT-3′ (Forward)
and
5′-GAGCCAAATGACCCTTCCATT-3′ (Reverse)
were obtained from Invitrogen ®
Primers for Sclerostin:
5′-CTTAGTTTTCTCAGTCTGTGGTTGAAAT-3′ (Forward)
and
5′-AGAGTACCCCGAGCCTCC-3′ (Reverse)
were obtained from Invitrogen ®
Primers for RANK-L:
5′-CTCAGCCTTTTGCTCATCTCACT-3′ (Forward)
and
5′-CCAAGAGGACAGACTCACTTTATGG-3′ (Reverse)
were obtained from Invitrogen ®
Primers for MLC-1:
5′-AGAAGGGCTCCATGTCTGACA-3′ (Forward)
and
5′-AAGATTTCAGGACCCGAGCAG-3′ (Reverse)
were obtained from Invitrogen ®
Primers for GATA-4:
5′-AGGCCTCTTGCAATGCGGA-3′ (Forward)
and
5′-CTGGTGGTGGCGTTGCTGG-3′ (Reverse)
were obtained from Invitrogen ®
Primers for a-Sarcomeric actin:
5′-GACCACAGCTGAACGTGAGA-3′ (Forward)
and
5′-CATAGCACGATGGTCGATTG-3′ (Reverse)
were obtained from Invitrogen ®
Primers for Sox9:
5′-GACTTCCGCGACGTGGAC-3′ (Forward)
and
5′-GTTGGGCGGCAGGTACTG-3′ (Reverse)
were obtained from Invitrogen ®
Primers for IBSP:
5′-TGCCTTGAGCCTGCTTCC-3′ (Forward)
and
5′-GCAAAATTAAAGCAGTCTTCATTTTG-3′ (Reverse)
were obtained from Invitrogen ®
Primers for Collagen IV:
5′-CCTGGTCTTGAAAGGTGATAAG-3′ (Forward)
and
5′-CCCGCTATCCCTTGATCTC-3′ (Reverse)
were obtained from Invitrogen ®
Primers for Vimentin:
5′-TGTCCAAATCGATGTGGATGTTTC-3′ (Forward)
and
5′-TTGTACCATTCTTCTGCCTCCTG-3′ (Reverse)
were obtained from Invitrogen ®
Primers for MMP-9:
5′-AATCTCTTCTAGAGACTGGGAAGG AG-3′ (Forward)
and
5′-AGCTGATTGACTAAAGTAGCTGGA-3′ (Reverse)
were obtained from Invitrogen ®
Primers for α-SMA:
5′-CCGACCGAATGCAGAAGGA-3′ (Forward)
and
5′-ACAGAGTATTTGCGCTCCGAA-3′ (Reverse)
were obtained from Invitrogen ®
Primers for GAPDH:
5′-GCAGTACAGCCCCAAAATGG-3′ (Forward)
and
5′-ACAAAGTCCGGCCTGTATCCAA-3′ (Reverse)
were obtained from Invitrogen ®

[1538] All of the peptides were synthetized using conventional solution and/or solid phase peptide synthesis methods.
[1539] All of the experiments were performed with a concentration of 400 ng/mL of GFR-binding compound(s) as defined herein.
[1540] All cell culture experiments were performed with cultures on plastic coated with type-I collagen in order to mimic the physiological conditions of the human body.
[1541] The compositions of pharmaceutical compositions used in the examples below are summarized in the following table:

| | Pharmaceutical associations according to |
|---|---|
| | certain embodiments of the present |
| Compositions | disclosure |
| Composition A | SEQ ID NO: 10 + RGD (peptide) |
| Composition B | SEQ ID NO: 10 + SiRNA Integrin |
| | alpha 3 + SiRNA Integrin beta 1 |
| Composition C | SEQ ID NO: 9 + integrin alpha 3 |
| | Antibody + integrin beta 1 Antibody |
| Composition D | SEQ ID NO: 3 + SiRNA Integrin |
| | alpha 3 + RGDSPC |
| Composition E | SEQ ID NO: 11 + RGD (peptide) |
| Composition F | SEQ ID NO: 14 + SiRNA Syndecan |
| | 1 + SiRNA Syndecan 4 + integrin alpha 3 |
| | antibody |
| Composition 1 | SEQ ID NO: 16 + E-Selectin |
| | antibody + L-Selectin antibody |
| Composition J | SEQ ID NO: 22 + RGD (peptide) |
| Composition K | SEQ ID NO: 24 + SiRNA Integrin |
| | alpha v + SiRNA Integrin beta 3 + |
| | SiRNA Integrin alpha 5 |
| Composition L | SEQ ID NO: 36 + RGDC (peptide) |
| Composition M | SEQ ID NO: 37 + RGDC + REDV (peptides) |
| Composition N | SEQ ID NO: 35 + integrin alpha 2 |
| | Antibody + integrin beta 1 Antibody |

[1542] The two target sequences of human integrin α3 (Genbank accession number NM_002204) were designed to be unique relative to the sequences of other integrin members; catalogue number sc-35684 from Santa Cruz Biotechnology.
[1543] The two target sequences of human integrin B1 (Genbank accession number NM_002211) were designed to be unique relative to the sequences of other integrin members; catalogue number sc-44310 from Santa Cruz Biotechnology.
[1544] Integrin α3 Antibody is a goat polyclonal IgG, epitope mapping extracellular domain of Integrin α3 of human origin; catalogue number sc-28665 from Santa Cruz Biotechnology.
[1545] Integrin β1 Antibody is a goat polyclonal IgG, epitope mapping extracellular domain of Integrin β1 of human origin; catalogue number sc-9936 from Santa Cruz Biotechnology.
[1546] The two target sequences of human integrin a 3 (Genbank accession number NM_002204) were designed to be unique relative to the sequences of other integrin members; catalogue number sc-35684 from Santa Cruz Biotechnology.
[1547] The two target sequences of human Syndecan 1 (Genbank accession number NM_002997) were designed to be unique relative to the sequences of other integrin members; catalogue number sc-36587 from Santa Cruz Biotechnology.
[1548] The two target sequences of human Syndecan 4 (Genbank accession number NM_002999) were designed to be unique relative to the sequences of other integrin members; catalogue number sc-36588 from Santa Cruz Biotechnology.
[1549] Integrin α3 Antibody is a goat polyclonal IgG, epitope mapping extracellular domain of Integrin α3 of human origin; catalogue number sc-28665 from Santa Cruz Biotechnology.
[1550] E-Selectin Antibody is a goat polyclonal IgG, epitope mapping extracellular domain of E-Selectin of human origin; catalogue number sc-6937 from Santa Cruz Biotechnology.
[1551] E-Selectin Antibody is a goat polyclonal IgG, epitope mapping extracellular domain of E-Selectin of human origin; catalogue number sc-6946 from Santa Cruz Biotechnology.
[1552] The two target sequences of human integrin a v (Genbank accession number NM_002210) were designed to be unique relative to the sequences of other integrin members; catalogue number sc-29373 from Santa Cruz Biotechnology.
[1553] The two target sequences of human integrin β3 (Genbank accession number NM_000212) were designed to be unique relative to the sequences of other integrin members; catalogue number sc-29375 from Santa Cruz Biotechnology.
[1554] The two target sequences of human integrin α5 (Genbank accession number NM_002205) were designed to be unique relative to the sequences of other integrin members; catalogue number sc-29372 from Santa Cruz Biotechnology.
[1555] Integrin β2 Antibody is a goat polyclonal IgG, epitope mapping extracellular domain of Integrin β2 of human origin; catalogue number sc-6586 from Santa Cruz Biotechnology.
[1556] Integrin β3 Antibody is a goat polyclonal IgG, epitope mapping extracellular domain of Integrin β3 of human origin; catalogue number sc-9936 from Santa Cruz Biotechnology.

[1557] The following general methods were used:

[1558] Immunostaining:

[1559] The cells were first fixed for 20 min with 4% paraformaldehyde/PBS at 4° C. After fixation, the cells were permeabilized in PBS containing 1% Triton X-100 for 15 min. Protein immunofluorescent visualization was performed by first treating the cells with 1% (v/v) specific monoclonal antibodies for 1 hour at 37° C. Then the samples were incubated with Alexa Fluor® 568 or 647 (F(ab′)2 fragment of IgG(H+L)) during 30 min at room temperature. The cell nuclei were counterstained in 20 ng/mL DAPI for 10 min at room temperature.

[1560] Quantification of Positive Contact Numbers and Areas:

[1561] For this type of quantification the freeware image analysis ImageJ® software was used. The raw image was first converted to an 8-bit file, and then the unsharp mask feature was used (settings 1:0.2) to remove the image background (rolling ball radius 10). After smoothing, the resulting image, which appears similar to the original photomicrograph but with minimal background, was then converted to a binary image by setting a threshold. Threshold values were determined empirically by selecting a setting, which gave the most accurate binary image for a subset of randomly selected photomicrographs. The cell area was determined by manual delineation on raw fluorescent images. Total contact area and mean contact area per cell were calculated by “analyse particules” in ImageJ®. A minimum of 50 cells per condition were analyzed.

[1562] Quantitative Real Time Polymerase Chain Reaction (RT-PCR):

[1563] After 24 hours of culture, total RNA was extracted by using the RNeasy total RNA kit (Qiagen®) according to the manufacturer's instructions. Purified total RNA was used as a template in order to make cDNA by a reverse transcription reaction (Gibco Brl®) with random primers (Invitrogen®). The cDNA was then used as a template for a real-time PCR amplification in the presence of SYBR green reagents (Bio-Rad®) by using a thermocycler (iCycler, Biorad®). Data were analyzed with the iCycler IQ™® software and compared by the ΔΔCt method. Briefly, the mean Ct value of the target gene was normalized to its averaged Ct values of the housekeeping gene (GAPDH) to give a ΔCt value, which was then normalized to a control sample to obtain a ΔΔCt value. The results were obtained from two series of experiments performed in triplicate.

[1564] Western Blot:

[1565] After 24 hours of culture, cells were permeabilized (10% SDS, 25 mM NaCl, 10 nM pepstatin and 10 nM leupeptin in distilled water and loading buffer), boiled for 10 minutes and resolved by reducing PAGE (Invitrogen). Proteins were transferred onto nitrocellulose, blocked, and labeled with HRP-conjugated antibodies (Invitrogen). Integrin αv, α5, α3, α4, β1, β3, β5, β9, phosphorylated ERK, phosphorylated Src Kinase, PDK1 and phosphorylated pRB and p53 were blotted by treating the nitrocellulose with monoclonal anti-integrin (extracellular domain) αv, α5, α3, α4, β1, β3, β5 and β6 antibodies (Santa Cruz Biotechnology). Phospho-Smad1/5/8 was blotted by treating the nitrocellulose with monoclonal anti-p-Smad1/5/8 (Santa Cruz Biotechnology). For all of the experiments the western blot was performed in triplicate, along with an additional blot for actin and coomassie blue staining to ensure constant protein load among samples. An integrins α3, αv, α5 shRNAs, integrins β1, β3 shRNAs, Syndecans 1, 4 were obtained from Santa Cruz Biotechnology.

[1566] Statistical Analysis:

[1567] In terms of real-time PCR assay, all of the data were expressed as mean±standard error, and analyzed statistically by the paired Student's t test method.

[1568] Covalent Association with Polymers (Such as PET or PEEK)

[1569] The polymer used in this study is poly(ethylene terephthalate) (PET). The polymers were first treated in order to create -COOH (carboxyl) functions on the PET surfaces from -OH (hydroxyl) functions. Next, the PET-COOH samples were immersed in a solution of dimethylaminopropyl-3-ethylcarbodiimide hydrochloride (EDC, 0.2 M)+N-hydroxysuccinimide (NHS, 0.1 M) in 2-(N-morpholino)-ethanesulfonic acid (MES) buffer (0.1 M in MilliQ water) and the samples were rinsed in MilliQ water (50 mL for 30 min). Finally, the covalent immobilization of the compounds (e.g. peptides) was achieved by using a solution of compound/IX PBS (C=10⁻³ M) incubated for 18 hours at room temperature. After grafting, the materials were rinsed in MilliQ water (100 ml) for 1 week.

### Example 1: Osteosarcoma Recoding

[1570] Pharmaceutical associations according to certain embodiments of the present disclosure were added to tumor cells, hereinafter osteosarcoma cells. Human osteosarcoma cells were obtained from ATCC®. Tumor cells were then cultured in Dulbecco's Modified Eagle Medium (DMEM, Invitrogen®) supplemented with 10% (v/v) fetal bovine serum (FBS), 1% penicillin/streptomycin and incubated in a humidified atmosphere containing 5% (v/v) CO₂ at 37° C. All of the cell culture experiments were performed without any serum in the medium for the first 8 hours of culture. All cells were used at a low passage number (<passage 10), were subconfluently cultured and were seeded at 10 000 cells/cm² for the purpose of the experiments.

[1571] The cell phenotype was analyzed after 24 hours of cell culture. The human sarcoma cells adhere, spread, and differentiate into osteocyte cells as confirmed by analysis of DMP-1 (Dentin matrix acidic phosphoprotein 1), Sclerostin and RANK-L (receptor activator of nuclear factor kappa B ligand) expression (FIG. 1). During cell recoding, osteosarcoma cells undergo important changes in their cell morphology such as cell shape modification, cell body size reduction and increase in cell processes in order to obtain the characteristic osteocyte morphology. These cells presented a characteristic dendritic-like morphology, a total reduction in cell body volume of around 50% and expressed a set of known osteocytic markers. These results demonstrate that pharmaceutical associations according to certain embodiments of the present disclosure induce the recoding of human osteosarcoma cells into osteocytes in a short period of time (24 hours).

### Example 2: Rhabdosarcoma Recoding

[1572] Pharmaceutical associations according to certain embodiments of the present disclosure were added to tumor cells, hereinafter rhabdomyosarcoma cells. Human rhabdosarcoma cells were obtained from ATCC®. Tumor cells were then cultured in Dulbecco's Modified Eagle Medium (DMEM, Invitrogen®) supplemented with 10% (v/v) fetal bovine serum (FBS), 1% penicillin/streptomycin and incubated in a humidified atmosphere containing 5% (v/v) CO₂ at 37° C. All cell culture experiments were performed without any serum in the medium for the first 8 hours of culture. All cells were used at a low passage number (<passage 10), were subconfluently cultured and were seeded at 10 000 cells/cm² for the purpose of the experiments.

[1573] It was observed that these tumor cells cultured in the presence of pharmaceutical associations according to certain embodiments of the present disclosure were converted into muscle cells (myocyte like-cells) by analyzing the expression of the myogenic biomarkers MLC-1 (myocyte light chain 1), GATA-4 and a-Sarcomeric actin. An increased expression of these genes was observed after 24 hours of culture (FIG. 2) as characterized using Quantitative Real Time PCR as described in the Methods section.

### Example 3: Mesenchymal Chondrosarcoma Recoding

[1574] Pharmaceutical associations according to certain embodiments of the present disclosure were added to tumor cells, hereinafter chondrosarsoma cells. Human chondrosarcoma cells were obtained from ATCC®. Tumor cells were then cultured in Dulbecco's Modified Eagle Medium (DMEM, Invitrogen®) supplemented with 10% (v/v) fetal bovine serum (FBS), 1% penicillin/streptomycin and incubated in a humidified atmosphere containing 5% (v/v) CO₂ at 37° C. All cell culture experiments were performed without any serum in the medium for the first 8 hours of culture. All cells were used at a low passage number (≤passage 10), were subconfluently cultured and were seeded at 10 000 cells/cm² for the purpose of the experiments.

[1575] It was observed that these tumor cells cultured in the presence of pharmaceutical associations according to certain embodiments of the present disclosure were converted into cartilage cells (chondrocyte like-cells) by analyzing the expression of the chondrocytic biomarkers Sox9, IBSP (Sialoprotein II) and collagen IV. An increased expression of these genes was observed after 24 hours of culture (FIG. 3) as characterized using Quantitative Real Time PCR as described in the Methods section.

### Example 4: Adenocarcinoma Recoding

[1576] Pharmaceutical associations according to certain embodiments of the present disclosure were added to tumor cells, hereinafter adenocarcinoma cells. Human adenocarcinoma cells were obtained from ATCC®. Tumor cells were then cultured in RPMI-1640 medium supplemented with 10% (v/v) fetal bovine serum (FBS), 1% penicillin/streptomycin and incubated in a humidified atmosphere containing 5% (v/v) CO₂ at 37° C. All cell culture experiments were carried out without any serum in the medium for the first 8 hours of culture. All cells were used at a low passage number (≤passage 10), were subconfluently cultured and were seeded at 10 000 cells/cm² for the purpose of the experiments.

[1577] It was observed that these tumor cells cultured in the presence of pharmaceutical associations according to certain embodiments of the present disclosure were converted into epithelial cells (fibrocyte like-cells) by analyzing the expression of the fibrocytic biomarkers MMP-9, Vimentin and α-SMA. An increased expression of these genes was observed after 24 hours of culture (FIG. 4) as characterized using Quantitative Real Time PCR as described in the Methods section.

### Example 5: Recoding of Neoplastic Cells Indicated by Significantly Reduced Proliferation Markers

[1578] Neoplastic cells (in this example osteosarcoma cells) were cultured in the presence of pharmaceutical associations according to certain embodiments of the present disclosure. A rapid (24 hours) decrease of the tumor markers was observed (FIG. 5). The adhesion checkpoint then activates the tumor suppressor proteins p53 and pRB. It was observed that, in tumor cells cultured in the presence of pharmaceutical associations according to certain embodiments of the present disclosure, the expression of p53 decreases as demonstrated by quantification of protein expression level (immunofluorescence staining and quantification using ImageJ as described in the general methods section) (FIG. 5A) and the pRB is dephosphorylated as demonstrated by a quantification of protein phosphorylation level (immunofluorescence staining and subsequent quantification by using the ImageJ software as described in the general methods section) (FIG. 5B).

[1579] Cyclic GFR-binding peptides in association with SiRNA Integrin alpha 3 and SiRNA Integrin beta 1 were also tested against MG63 cells using the same procedure and displayed significant recoding activity as shown in Table 4 below:

TABLE 4

| | | p53 | pRB |
|---|---|---|---|
| SEQ ID No | Sequences | (%) | (%) |
| SEQ ID NO: 38200 | VPTAASAISILYLDAANNVVLKNYQAAVVEDKGVVTY | 41 | 17 |
| SEQ ID NO: 38201 | VPEAASSLSMLFFEIVRKKPIFLKVYPAATVEDKGVVTY | 40 | 19 |
| SEQ ID NO: 38202 | VPTVVSAISTLYLRIKPHQGQHLKNYQVVVVENDKQQII | 42 | 9 |
| SEQ ID NO: 38203 | APTLLNAISMLYFNDKQQIILKKYRLLVVRNDKQQII | 44 | 12 |
| SEQ ID NO: 38204 | APTGGSATSMLYYDKGVVTYLRKHRGGVVKDKGVVTY | 37 | 11 |
| SEQ ID NO: 38205 | VPTSSSPISTLYIDKGVVTYLKYHYSSVAEDEYDKVV | 40 | 16 |
| SEQ ID NO: 38206 | VPTAAEPISMLYLDEYDKVVKFKYEAAAVSNDKQQII | 36 | 8 |
| SEQ ID NO: 38207 | TPTSSSPINTLYFDDMGVPTYGKIPSSVVDDEYDKVV | 41 | 13 |
| SEQ ID NO: 38208 | VPTVVSPISMLYIDDMGVPTYKQYEVVVVEDDMGVPT | 39 | 9 |
| SEQ ID NO: 38209 | APVAAKPLSMLYVDKGVVTYDHHKDAAVEEDEYDKVV | 38 | 11 |
| SEQ ID NO: 38210 | VPQAAEPLPMLYYDKGVVTYEQLSNAAVRSDKGVVTY | 40 | 12 |
| SEQ ID NO: 38211 | VPQQQEPLTTLYYDEYDKVVEQLSNQQVKSNDKQQII | 47 | 14 |
| SEQ ID NO: 38212 | VPTMMSNITTQIMRIKPHQGQHIGEMSMMQHNDEYDKVV | 51 | 14 |
| SEQ ID NO: 38213 | SRVAARSVKMAKVGGGGGGGKEVQVAAEEHGGGGGG | 49 | 21 |
| SEQ ID NO: 38214 | VPTDDSATSTLYYDKGVVTYLRKHRDDEHSDKGVVTY | 48 | 18 |
| SEQ ID NO: 38215 | VPTGGEPLTTLYYNDKQQIIEQLSNGGEHSDDMGVPT | 39 | 16 |
| SEQ ID NO: 38216 | SRVLLRPVQMRKIDKGVVTYKKATVLLEEHDKGVVTY | 41 | 11 |
| SEQ ID NO: 38217 | TQVAARPVQTRKIDDMGVPTKKATVAAEDHDKGVVTY | 42 | 9 |

[1580] Cyclic GFR-binding peptides in association with SiRNA Integrin alpha 3+RGDSPC+SiRNA Integrin beta 1+SiRNA Syndecan 1 were also tested against human rhabdosarcoma cells using the same procedure and displayed significant recoding activity as shown in Table 5 below:

TABLE 5

| | | P53 | pRB |
|---|---|---|---|
| SEQ ID No | Sequences | (%) | (%) |
| SEQ ID NO: 38218 | IPKASSAPVGQRPVQMRKIDKGVVT | 36 | 12 |
| | YKKATVSSVEESGSLDKGVVTY | | |
| SEQ ID NO: 38219 | KASSVPQEERPVQMRKIGGGGGGGK | 38 | 15 |
| | KATVMIVRSSKSSDDMGVPT | | |
| SEQ ID NO: 38220 | VSQAARPVQTRKIDDMGVPTKKATV | 42 | 9 |
| | AAVKSDDMGVPT | | |
| SEQ ID NO: 38221 | PTSSAPTDLRSVKMAKVEIVRKKPI | 48 | 11 |
| | FKEVQVDMVVKASGDKGVVTY | | |
| SEQ ID NO: 38222 | KASSSRVKMSNITVQIMRIKPHQGQ | 52 | 15 |
| | HIGEMSVVEEHASGSHDKGVVTY | | |
| SEQ ID NO: 38223 | VPTAAEPLTMLYYEIVRKKPIFEQL | 44 | 17 |
| | SNMVEHSDDMGVPT | | |
| SEQ ID NO: 38224 | EPSSSRVRLEPLTTLYYGGGGGGGE | 46 | 8 |
| | QLSNVVEEHSKDKGVVTY | | |
| SEQ ID NO: 38225 | APVKMEPLPTVYYDDMGVPTEQLSN | 49 | 9 |
| | DMVEESGSLDDMGVPT | | |
| SEQ ID NO: 38226 | EPSSVSQAAEPLPIVYYRIKPHQGQ | 29 | 12 |
| | HEQLSNMIVKSSKSSDDMGVPT | | |

### Example 6: Adhesion Checkpoint Activation

[1581] Neoplastic cells (in this example osteosarcoma cells) were cultured in the presence of pharmaceutical associations according to certain embodiments of the present disclosure. The main signaling pathways include: Ras/MAP kinase, FAK/Src kinase and PIP2 which are decreased after 24 hours as shown by western blot quantifications (FIG. 6). This demonstrated by the absence of phosphorylation at Thr202 and Tyr204 on ERK (FIG. 6A). Moreover, no phosphorylation at Thr416 but phosphorylation of Tyr527 was observed on Src kinase (FIG. 6B). Finally, a decrease of 3-phosphoinositide-dependent protein kinase 1 (PDK1) protein expression was also was observed (FIG. 6C).

### Example 7: Decrease of Paxillin and Vinculin Gene Expression

[1582] Neoplastic cells (in this example osteosarcoma cells) were cultured in the presence of pharmaceutical associations according to certain embodiments of the present disclosure. After 24 hours, the Paxillin and Vinculin gene expression decreased as shown by RT-PCR (FIG. 7).

### Example 8: Cyclin D Profile

[1583] Neoplastic cells (in this example osteosarcoma cells) were cultured in the presence of pharmaceutical associations according to certain embodiments of the present disclosure. The Cyclin D (the arithmetic mean of Cyclin D1, Cyclin D2 and Cyclin D3) gene expression decreased after the first 30 min of cell culture as shown by RT-PCR (FIG. 8). These data indicate the entry of the cells into G0 quiescence phase.

### Example 9: Growth Factor Receptor Activation

[1584] The data summarized in Table 6 below demonstrate that the tumor cell recoding action ((in this example: human osteosarcoma cells, MG63, via quantification of pRB) of pharmaceutical associations according to certain embodiments of the present disclosure involves the activation of growth factor receptors as demonstrated by the activation of the Smad1/5/8 signaling pathway (via quantification of western blots of phospho-smad1/5/8):

| | | p- | |
|---|---|---|---|
| | | Smad1/5/8 | pRB |
| Compositions | Pharmaceutical associations | (%) | (%) |
| Composition R | SEQ ID NO: 54 + SiRNA Integrin | 41 | 12 |
| | alpha 3, v, 4 + SiRNA Integrin beta 1 | | |
| Composition V | SEQ ID NO: 55 + SiRNA Integrin | 32 | 17 |
| | alpha 3 + SiRNA Integrin beta 1 | | |
| Composition W | SEQ ID NO: 56 + integrin | 47 | 21 |
| | alpha 3 Antibody + integrin beta 1 | | |
| | Antibody + RGDSPC | | |
| Composition S | SEQ ID NO: 57 + SiRNA Integrin | 38 | 9 |
| | alpha 3 + RGDSPC + SiRNA | | |
| | Syndecan 1 | | |
| Composition Z | SEQ ID NO: 59 + E-Selectin | 34 | 22 |
| | antibody + L-Selectin antibody | | |
| Composition X | SEQ ID NO: 61 + SiRNA Syndecan | 44 | 18 |
| | 1 + SiRNA Syndecan 4 + integrin | | |
| | alpha 3 antibody | | |
| Composition Y | SEQ ID NO: 58 + RGD + SiRNA | 49 | 19 |
| | Integrin alpha 3, v, 4 + SiRNA | | |
| | Integrin beta 1 | | |

### Example 10: RMSD Measurement and Recoding Activity

[1585] The data summarized in Table 7 below demonstrate that pharmaceutical associations according to certain embodiments of the present disclosure containing GFR-binding compounds as disclosed herein having a RMSD value of 2.45 Å or less, induce the particularly efficient recoding (as shown via quantification of pRB) of neoplastic cells (in this example: human osteosarcoma cells, MG63) into healthy cells:

TABLE 7

| | | RMSD | pRB |
|---|---|---|---|
| SEQ ID No | AA Sequences | (A) | (%) |
| SEQ ID NO: 54 | NDEGLECVPTEERPVQVRKIRIK | 1.23 | 12 |
| | PHQGQKKATVFLQHNK | | |
| SEQ ID NO: 55 | ASASPSSVPQDLEPLTILYYVGR | 1.51 | 17 |
| | TPKVEQLSNMV | | |
| SEQ ID NO: 56 | RNVQCRPTQLEPLPIVYYEIVRK | 1.7 | 21 |
| | KPEQLSNTLEDHLA | | |
| SEQ ID NO: 59 | NDEGLECVPTEERPVQVRKIRIK | 1.1 | 22 |
| | PHQGQKKATVFLQHNK | | |
| SEQ ID NO: 61 | RNVQCRPTQLEPLPIVYYEIVRK | 1.1 | 18 |
| | KPEQLSNTLEDHLA | | |
| SEQ ID NO: 58 | VSQDLSAISTLYLKIVRKEPLKN | 0.79 | 19 |
| | YQEMVEE | | |

[1586] Likewise, using the method detailed in the description, the data summarized in Table 8 below demonstrate that pharmaceutical associations according to certain embodiments of the present disclosure containing GFR-binding peptides as disclosed herein in association with SiRNA Integrin alpha 3, v, 4 and SiRNA Integrin beta 1, induce the particularly efficient recoding (as shown via quantification of pRB et P53) of neoplastic cells (in this example: human rhabdosarcoma cells) into healthy cells. It should also be noted that GFR-binding peptides having a RMSD value of 2.45 Å or less, are particularly advantageous and efficient in recoding cells:

TABLE 8

| | | | P53 | pRB |
|---|---|---|---|---|
| SEQ ID No | Sequences | RMSD | (%) | (%) |
| SEQ ID NO: 123 | VPTAASAISILYLDAANNVVLKNYQAAVVE | 1.02 | 32 | 11 |
| SEQ ID NO: 124 | VPEAASSLSMLFFEIVRKKPIFLKVYPAATVE | 1.32 | 37 | 12 |
| SEQ ID NO: 125 | VPTVVSAISTLYLRIKPHQGQHLKNYQVVVVE | 1.56 | 42 | 9 |
| SEQ ID NO: 126 | APTLLNAISMLYFNDKQQIILKKYRLLVVR | 0.97 | 41 | 8 |
| SEQ ID NO: 127 | APTGGSATSMLYYDKGVVTYLRKHRGGVVK | 1.12 | 33 | 16 |
| SEQ ID NO: 128 | VPTSSSPISTLYIDKGVVTYLKYHYSSVAE | 1.52 | 36 | 21 |
| SEQ ID NO: 129 | VPTAAEPISMLYLDEYDKVVKFKYEAAAVS | 1.61 | 42 | 20 |
| SEQ ID NO: 130 | TPTSSSPINTLYFDDMGVPTYGKIPSSVVD | 1.31 | 48 | 15 |
| SEQ ID NO: 131 | VPTVVSPISMLYIDDMGVPTYKQYEVVVVE | 1.41 | 36 | 12 |
| SEQ ID NO: 132 | APVAAKPLSMLYVDKGVVTYDHHKDAAVEE | 0.98 | 38 | 9 |
| SEQ ID NO: 133 | VPQAAEPLPMLYYDKGVVTYEQLSNAAVRS | 0.95 | 42 | 7 |
| SEQ ID NO: 134 | VPQQQEPLTTLYYDEYDKVVEQLSNQQVKS | 1.16 | 50 | 8 |
| SEQ ID NO: 135 | VPTMMSNITTQIMRIKPHQGQHIGEMSMMQHN | 1.56 | 48 | 16 |
| SEQ ID NO: 136 | SRVAARSVKMAKVGGGGGGGKEVQVAAEEH | 2.08 | 38 | 10 |
| SEQ ID NO: 137 | VPTDDSATSTLYYDKGVVTYLRKHRDDEHS | 1.73 | 42 | 12 |
| SEQ ID NO: 138 | VPTGGEPLTTLYYNDKQQIIEQLSNGGEHS | 1.92 | 45 | 20 |
| SEQ ID NO: 139 | SRVLLRPVQMRKIDKGVVTYKKATVLLEEH | 1.85 | 49 | 18 |
| SEQ ID NO: 140 | TQVAARPVQTRKIDDMGVPTKKATVAAEDH | 1.93 | 35 | 17 |

[1587] Likewise, using the method detailed in the description, the data summarized in Table 9 below demonstrate that pharmaceutical associations according to certain embodiments of the present disclosure containing GFR-binding peptides as disclosed herein in association with:
[1588] SiRNA Integrin alpha 3+SiRNA Integrin beta 1, for SEQ ID NO: 141 to 163, on MG63 cells; and
[1589] SiRNA Integrin alpha 3+RGDSPC+SiRNA Integrin beta 1+SiRNA Syndecan 1, for SEQ ID NO: 31, 32, and 164 to 187, on human rhabdosarcoma cells;

[1590] induce the particularly efficient recoding (as shown via quantification of pRB et P53) of neoplastic cells (in these examples: MG63 cells and human rhabdosarcoma cells as stated above) into healthy cells. It should also be noted that GFR-binding peptides having a RMSD value of 2.45 Å or less, are particularly advantageous and efficient in recoding cells:

TABLE 9

| SEQ ID No | Sequences | RMSD | P53 | pRB |
|---|---|---|---|---|
| SEQ ID NO: 141 | CKVPKPSSAPTQLSAISTLYLDEYDKVVLKNYQNMVVRA | 1.23 | 41 | 11 |
| SEQ ID NO: 142 | CKVGKASSVPTKLSAISTLYLDDMGVPTLKNYQNMVVRASGSH | 1.33 | 36 | 8 |
| SEQ ID NO: 143 | CASASPSSVSQDLSAISTLYLIGKTPKILKNYQMIVKSSKSS | 0.98 | 37 | 14 |
| SEQ ID NO: 144 | CKIPKASSVPTELNAISVLYFDENEKVILKKYRDMVVEGSG | 1.09 | 40 | 7 |
| SEQ ID NO: 145 | CASASPSSVSQDLNAISVLYFIGKTPKILKKYRMIVKSSKSS | 1.34 | 38 | 6 |
| SEQ ID NO: 146 | CAVPKASSAPTKLSATSVLYYDSSNNVVLRKHRNMVVK | 1.33 | 38 | 11 |
| SEQ ID NO: 147 | CTVPKPSSAPTQLSPISVLYKDDSSNVILKYHYNMVVRASGSH | 0.88 | 37 | 8 |
| SEQ ID NO: 148 | CAPTQLSPISVLYKDDSSNVILKYHYTLEDH | 1.93 | 42 | 9 |
| SEQ ID NO: 149 | CRNVQCRPTQVQLSAISTLYLEIVRKKPLKNYQTLEDH | 1.12 | 35 | 12 |
| SEQ ID NO: 150 | CPSSAPTQLSATSVLYYDDSSNVILRKHRQHNK | 1.33 | 41 | 11 |
| SEQ ID NO: 151 | CPKPSSAPTQLNAISMLYFGGGGGGGLKKYRNMVVRA | 2.16 | 39 | 9 |
| SEQ ID NO: 152 | CKVPKASSVPTELSAISTLYLAAAALKNYQEM | 2.21 | 37 | 8 |
| SEQ ID NO: 153 | CSIPKASSVPTELSATSVLYYDEYDEKVVLRKHEMVVEG | 1.43 | 39 | 10 |
| SEQ ID NO: 154 | CAPTKLSAISMLYLDSSNNVILKNYQ | 0.56 | 40 | 14 |
| SEQ ID NO: 155 | CASSAVSQELSAISMLYLGGGLKNYQDM | 2.01 | 47 | 6 |
| SEQ ID NO: 156 | CKASSVPTELSPISTLYKDENEKVVLKYHYDMVVEGSGSR | 1.03 | 45 | 8 |
| SEQ ID NO: 157 | CASAAPSSVPQKLNAISMLYFVGRKPKVLKKYRMIVRS | 1.04 | 34 | 11 |
| SEQ ID NO: 158 | CKVGKASSVPTKLNAISTLYLDENEKVVLKKYREGMS | 1.03 | 39 | 9 |
| SEQ ID NO: 159 | CPKPSSAPTQLSAISTLYLDDSSNVILKNYQMIVVRA | 1.41 | 44 | 9 |
| SEQ ID NO: 160 | CKVGKASSVPTKLNAISTLYLDDSSNVILKNYQ | 0.94 | 38 | 8 |
| SEQ ID NO: 161 | CGGGSSVPTELSAISTLYLDDYDKVILKKYRNM | 2.11 | 52 | 10 |
| SEQ ID NO: 162 | WWFWGKVPKPSSAPTQLSAISTLYLDEYDKVVLKNYQNMVVR | 0.87 | 39 | 8 |
| SEQ ID NO: 163 | GTPGPKVPKPSSAPTQLSAISTLYLDEYDKVVLKNYQNMAVR | 0.89 | 41 | 7 |
| SEQ ID NO: 164 | GTPGPPSSAPTQLSATSVLYYDDSSNVILRKHRMIVKS | 1.33 | 47 | 10 |
| SEQ ID NO: 31 | GTPGPAPTQLSPISVLYKDDSSNVILKYHY | 1.82 | 34 | 5 |
| SEQ ID NO: 32 | GTPGPASSAVSQELSAISMLYLGGGLKNYQDM | 2.3 | 46 | 7 |
| SEQ ID NO: 165 | GTPGPAPTKLSAISMLYLDSSNNVILRKHR | 1.44 | 42 | 9 |
| SEQ ID NO: 166 | GTPGPAPTKLSAISMLYLDSSNNVILKKYR | 1.67 | 37 | 10 |
| SEQ ID NO: 167 | GTPGPKASSVPTELSPISTLYKDENEKVVLKYHYDMVVEGSG | 1.17 | 41 | 11 |
| | SR | | | |
| SEQ ID NO: 168 | GTPGPKASSVPTELSPISTLYKDENEKVVLKYHYDM | 1.65 | 51 | 13 |
| SEQ ID NO: 169 | GTPGPPKPSSAPTQLNAISMLYFGGGGGLKKYRDMQHN | 2.36 | 37 | 8 |
| SEQ ID NO: 170 | WWFWGKASSVPTELSPISTLYKDENEKVVLKYHYDMVVEGSG | 1.18 | 44 | 7 |
| | SR | | | |
| SEQ ID NO: 171 | WWFWGASSAVSQELSAISMLYLGGGLKNYQDMQHN | 1.97 | 47 | 8 |
| SEQ ID NO: 172 | GTPGPRNVQCRPTQVQLSAISTLYLEIVRKKPLKNYQTLEDH | 1.27 | 33 | 12 |
| SEQ ID NO: 173 | GTPGPRNVQCRPTQVQLSAISTLYLAAALKNYQTLE | 2.06 | 37 | 15 |
| SEQ ID NO: 174 | CKIPKASSVPTELEPLPIVYYVGRKPKVEQLSNMIVRS | 1.84 | 40 | 6 |
| SEQ ID NO: 175 | CASAAPSSVPQALEPLPIVYYVGRTPKVEQLSNMIVRSSK | 1.54 | 45 | 7 |
| SEQ ID NO: 176 | CVPTEERSVKVAKVRIKPHQGQHKEVQV | 1.8 | 33 | 7 |
| SEQ ID NO: 177 | CVPTEESNITMQIMRIKPHQGQHIGEMSFL | 0.79 | 43 | 8 |
| SEQ ID NO: 178 | CRNVQCRPTQVQLRPVQVRKIEYVRKKPKLKKATVRLEDHLA | 0.88 | 42 | 6 |
| SEQ ID NO: 179 | CGIPEPSSVPEKMSSLSILFFDENKNVVLKVYPNM | 1.08 | 40 | 11 |
| SEQ ID NO: 180 | CGIPEPSSVPEKTSSLSLLFFDENKNVVLKVYPNM | 1.04 | 29 | 9 |
| SEQ ID NO: 181 | CAAPASSSVPARLSPISILYIDAANNVVYKQYEDMVVEASG | 1.11 | 45 | 9 |
| SEQ ID NO: 182 | CAAPASSSVPARLSPISILYIDAANNVVYKQYEDMVVE | 1.47 | 41 | 8 |
| SEQ ID NO: 183 | CAAPASSSVPARLSPISLLYIDAANNVVYKQYEDM | 1.45 | 44 | 13 |
| SEQ ID NO: 184 | CPARLSPISLLYIDAANNVVYKQYEDM | 1.82 | 39 | 11 |
| SEQ ID NO: 185 | CAAAPASSSVPARLSPISILYIAAAYKQYEDM | 1.77 | 47 | 8 |
| SEQ ID NO: 186 | CVPQRLSPISILYIDAANNVVYKQYE | 0.95 | 38 | 12 |
| SEQ ID NO: 187 | CTVPKPSSAPTQLSPISILYIDAANNVVYKQYEDMVVRA | 0.74 | 42 | 9 |

### Example 11: The Presence of Adhesion Components in the Extracellular Microenvironment Inhibits the Cell Conversion

[1591] In order to demonstrate the importance of adhesion proteins inhibition in the recoding process of a neoplastic cell, a PET substrate was covalently functionalized with RGD peptides (the primary integrin recognition site present in many ECM proteins (e.g., fibronectin)) and an exemplary GFR-binding compound according to the present disclosure using methods already described herein.

[1592] This modified substrate was then cultured with human osteosarcoma cells from ATCC® in Dulbecco's Modified Eagle Medium (DMEM, Invitrogen®) supplemented with 10% (v/v) fetal bovine serum (FBS), 1% penicillin/streptomycin and incubated in a humidified atmosphere containing 5% (v/v) CO₂ at 37° C. All cell culture experiments were performed without any serum in the medium for the first 8 hours of culture. All cells were used at a low passage number (≤passage 10), were subconfluently cultured and were seeded at 10 000 cells/cm² for the purpose of the experiments. As shown in FIGS. 9A and 9B, the presence of covalently immobilized components favorising the adhesion inhibited the process of recoding of the osteosarcoma cells into osteocytes as characterized by RT-PCR and cell morphology observation. It was also confirmed that the presence of RGD peptides did not modify the density of covently grafted GFR-binding compounds. Indeed, it was observed that the GFR-binding compound density was stable (around 1.36 pmol/mm²) with or without RGD peptides (FIG. 9C).

[1593] It was also shown that the RGD peptides interacted specifically with integrin α3β1. Indeed, inhibition of α3β1, α5β3 and αvβ3 integrins (i.e., the three predominant receptor dimers involved in binding ECM molecules containing RGD motifs for the osteosarcoma cells) by specific antibodies, indicated that cells predominantly engaged α3β1 integrins to interact with the RGD-modified substrate on the basis of the observed decrease of osteosarcoma cells adhesion in response to anti-α3β1 treatment (FIG. 9D). This was not observed when αvβ3 and α5β3 were blocked (FIG. 9E). For these antibody inhibition studies, cells were preincubated with 5 g/mL anti-α331 (clone JBS5), anti-αvβ1 (clone LM609) and anti-α5β3.

### Example 12: Integrin Engagement Inhibits Cell Conversion

[1594] Using the same setup as in Example 11 (tumor cell and PET functionalized with RGD peptides and an exemplary GFR-binding compound), silencing of integrin a 3 and integrin β 1 expression using shRNA was shown to reduce integrin α3 and integrin β1 mRNA levels by 60-70% and 50-60% respectively and integrin α3 and integrin β1 proteins levels by 60-70% after 24 h. It was then shown that both integrins α3 and β1 shRNAs modulated osteosarcoma adhesion and spreading on RGD-modified substrates (FIG. 10 A, B).

[1595] Without being bound to any specific theory, integrin α3β1 thus appears to be an important factor in the conservation of osteosarcomas tumourous profile and appears to play an important role in the recoding of osteosarcomas into osteocytes. Herein, α3β1 integrin engagement appears to be involved in the inhibition of osteocytic recoding but not in osteosarcoma induction. Indeed, it was observed, within the framework of this experiment, that spheroid-like structures of osteosarcomas became progressively predominant (FIG. 10C). These results seems to demonstrate that integrin engagement has the ability to influence the behavior of human osteosarcoma towards spheroid-like structures or towards osteocytes.

The application's sequence listing, which the Patent Office published only in electronic form, follows.

SEQUENCE LISTING (100449 sequences)

SEQ ID NO: 1 - protein, 37 aa, Artificial Sequence
  Non-cyclic GFR-binding peptide
KVPKPSSVPTQLSAISMLYLDEYDKVVLKNYQNMVVR

SEQ ID NO: 2 - protein, 37 aa, Artificial Sequence
  Non-cyclic GFR-binding peptide
KVGKASSAPTKLSAISMLYLDDMGVPTLKNYQNMVVR

SEQ ID NO: 3 - protein, 33 aa, Artificial Sequence
  Non-cyclic GFR-binding peptide
ASPSSVSQDLSAISTLYLRGKTRKILKNYQMIV

SEQ ID NO: 4 - protein, 35 aa, Artificial Sequence
  Non-cyclic GFR-binding peptide
KVQCRPTQVQLSAISTLYLEIVRKKPLKNYQTLED

SEQ ID NO: 5 - protein, 31 aa, Artificial Sequence
  Non-cyclic GFR-binding peptide
HSGSSRVVMNRYKKLIVNSSDDFYLVSIANL

SEQ ID NO: 6 - protein, 31 aa, Artificial Sequence
  Non-cyclic GFR-binding peptide
RSGSGEVVMDRYKKLVVKENEDFYLVSIANL

SEQ ID NO: 7 - protein, 31 aa, Artificial Sequence
  Non-cyclic GFR-binding peptide
HSGSARVVMNRHKRLIVNSSDDYYLVSTASL

SEQ ID NO: 8 - protein, 38 aa, Artificial Sequence
  Non-cyclic GFR-binding peptide
KVPKPSSAPTQLSAISTLYLDEYDKVVLKNYQNMVVRA

SEQ ID NO: 9 - protein, 41 aa, Artificial Sequence
  Non-cyclic GFR-binding peptide
ASASPSSVSQDLSAISTLYLIGKTPKILKNYQMIVKSSKSS

SEQ ID NO: 10 - protein, 32 aa, Artificial Sequence
  Non-cyclic GFR-binding peptide
PSSVPTQLSATSTLYYEESSNVILRKHRQHNK

SEQ ID NO: 11 - protein, 40 aa, Artificial Sequence
  Non-cyclic GFR-binding peptide
AAPASSSVPARLSPISILYIDAANNVVYKQYEDMVVEASG

SEQ ID NO: 12 - protein, 37 aa, Artificial Sequence
  Non-cyclic GFR-binding peptide
AAPASSSVPARLSPISILYIDAANNVVYKQYEDMVVE

SEQ ID NO: 13 - protein, 34 aa, Artificial Sequence
  Non-cyclic GFR-binding peptide
AAPASSSVPARLSPISLLYIDAANNVVYKQYEDM

SEQ ID NO: 14 - protein, 32 aa, Artificial Sequence
  Non-cyclic GFR-binding peptide
KPSSAPTQLNAISMLYFDEYDGGGLKKYRNMV

SEQ ID NO: 15 - protein, 25 aa, Artificial Sequence
  Non-cyclic GFR-binding peptide
APTKLSAISMLYLDSSNNVILKNYQ

SEQ ID NO: 16 - protein, 27 aa, Artificial Sequence
  Non-cyclic GFR-binding peptide
ASSAVSQELSAISMLYLDEYDKNYQDM

SEQ ID NO: 17 - protein, 30 aa, Artificial Sequence
  Non-cyclic GFR-binding peptide
RSGSAEVVMDEYQKYVVNNAADIYLISIPS

SEQ ID NO: 18 - protein, 30 aa, Artificial Sequence
  Non-cyclic GFR-binding peptide
RSGSAEVVMDEYQKYVVNNAADIYLLSIPS

SEQ ID NO: 19 - protein, 26 aa, Artificial Sequence
  Non-cyclic GFR-binding peptide
RSGSAEVVMDEYQKYGGGIYLISIPS

SEQ ID NO: 20 - protein, 28 aa, Artificial Sequence
  Non-cyclic GFR-binding peptide
VSQDLSAISTLYLKIVRKEPLKNYQEMV

SEQ ID NO: 21 - protein, 37 aa, Artificial Sequence
  Non-cyclic GFR-binding peptide
KIPKASSVPTELEPLPIVYYVGRKPKVEQLSNMIVRS

SEQ ID NO: 22 - protein, 39 aa, Artificial Sequence
  Non-cyclic GFR-binding peptide
ASAAPSSVPQALEPLPIVYYVGRTPKVEQLSNMIVRSSK

SEQ ID NO: 23 - protein, 29 aa, Artificial Sequence
  Non-cyclic GFR-binding peptide
KAPTQLSATSVLYYDDSSNVILRKHRMIV

SEQ ID NO: 24 - protein, 26 aa, Artificial Sequence
  Non-cyclic GFR-binding peptide
KAPTQLSPISVLYKDDSSNVILKYHY

SEQ ID NO: 25 - protein, 29 aa, Artificial Sequence
  Non-cyclic GFR-binding peptide
GGKSSRVIMNSLQEVKPKRGVYYVIPLPE

SEQ ID NO: 26 - protein, 29 aa, Artificial Sequence
  Non-cyclic GFR-binding peptide
GGSARVVMNNSLQEIVNSSDDYYVIPLPE

SEQ ID NO: 27 - protein, 33 aa, Artificial Sequence
  Non-cyclic GFR-binding peptide
KASSVPTELSPISTLYKDENEKVVLKYHYDMVV

SEQ ID NO: 28 - protein, 31 aa, Artificial Sequence
  Non-cyclic GFR-binding peptide
KASSVPTELSPISMLYKDENEKVVLKYHYDM

SEQ ID NO: 29 - protein, 31 aa, Artificial Sequence
  Non-cyclic GFR-binding peptide
KASSVPTELSPISTLYKDENEKVVLKYHYDM

SEQ ID NO: 30 - protein, 31 aa, Artificial Sequence
  Non-cyclic GFR-binding peptide
KASSVPTELSPISTLYKGGGGKVVLKYHYDM

SEQ ID NO: 31 - protein, 30 aa, Artificial Sequence
  Non-cyclic GFR-binding peptide
GTPGPAPTQLSPISVLYKDDSSNVILKYHY

SEQ ID NO: 32 - protein, 32 aa, Artificial Sequence
  Non-cyclic GFR-binding peptide
GTPGPASSAVSQELSAISMLYLGGGLKNYQDM

SEQ ID NO: 33 - protein, 35 aa, Artificial Sequence
  Non-cyclic GFR-binding peptide
KIPKASSVPTELEPLPIVYYVGRKPKVEQLSNMIV

SEQ ID NO: 34 - protein, 27 aa, Artificial Sequence
  Non-cyclic GFR-binding peptide
VPTEERSVKVAKVRIKPHQGQHKEVQV

SEQ ID NO: 35 - protein, 38 aa, Artificial Sequence
  Non-cyclic GFR-binding peptide
TVPKPSSAPTQLSPISILYIDAANNVVYKQYEDMVVRA

SEQ ID NO: 36 - protein, 34 aa, Artificial Sequence
  Non-cyclic GFR-binding peptide
RNVQCRPTQLEPLPMVYYEIVRKKPEQLSNTLED

SEQ ID NO: 37 - protein, 29 aa, Artificial Sequence
  Non-cyclic GFR-binding peptide
APTKLEPLTIVYYDDSSNVIEQLSNNMVV

SEQ ID NO: 38 - protein, 35 aa, Artificial Sequence
  Non-cyclic GFR-binding peptide
KIPKASSVPTELEPLPTVYYVGRKPKVEQLSNMIV

SEQ ID NO: 39 - protein, 34 aa, Artificial Sequence
  Non-cyclic GFR-binding peptide
SAAPSSVPQALEPLPIVYYVGRTPKVEQLSNMIV

SEQ ID NO: 40 - protein, 28 aa, Artificial Sequence
  Non-cyclic GFR-binding peptide
VPTELEPLTTLYYDSANNAVEQLSNDMV

SEQ ID NO: 41 - protein, 30 aa, Artificial Sequence
  Non-cyclic GFR-binding peptide
SRVHHNAISTLYFDESSNVILKKYRGMSVV

SEQ ID NO: 42 - protein, 30 aa, Artificial Sequence
  Non-cyclic GFR-binding peptide
VPEKMSSLSILFFDENKNAALKVYPNMTVE

SEQ ID NO: 43 - protein, 30 aa, Artificial Sequence
  Non-cyclic GFR-binding peptide
VPARLSPISILYIDAANNVVYKQYEDMVKS

SEQ ID NO: 44 - protein, 30 aa, Artificial Sequence
  Non-cyclic GFR-binding peptide
VPTEESPINMLYFNEKNQIIYGKIPMIVVE

SEQ ID NO: 45 - protein, 30 aa, Artificial Sequence
  Non-cyclic GFR-binding peptide
TPTKMSPINMLYFNEKNNIIYGKIPGMVVD

SEQ ID NO: 46 - protein, 30 aa, Artificial Sequence
  Non-cyclic GFR-binding peptide
VPTHHSAISTLYLELAGEKPLKNYQFLQHN

SEQ ID NO: 47 - protein, 30 aa, Artificial Sequence
  Non-cyclic GFR-binding peptide
APTKLSAISTLYLEIVREEPLKNYQEMVVD

SEQ ID NO: 48 - protein, 33 aa, Artificial Sequence
  Non-cyclic GFR-binding peptide
KASSVPTELSPISMLYKDENEKVVLKYHYDMVV

SEQ ID NO: 49 - protein, 33 aa, Artificial Sequence
  Non-cyclic GFR-binding peptide
KPSSVPQKLNAISMLYFGGAKPKVLKKYRMIVR

SEQ ID NO: 50 - protein, 39 aa, Artificial Sequence
  Non-cyclic GFR-binding peptide
NDEGLECVPTEERPVQVRKIRIKPHQGQKKATVFLQHNK

SEQ ID NO: 51 - protein, 34 aa, Artificial Sequence
  Non-cyclic GFR-binding peptide
ASASPSSVPQDLEPLTILYYVGRTPKVEQLSNMV

SEQ ID NO: 52 - protein, 20 aa, Artificial Sequence
  Non-cyclic GFR-binding peptide
SPISILFIVGRKPKVYKQYE

SEQ ID NO: 53 - protein, 20 aa, Artificial Sequence
  Non-cyclic GFR-binding peptide
NAISTLYFDDSSNVILKKYR

SEQ ID NO: 54 - protein, 39 aa, Artificial Sequence; identical to SEQ ID NO: 50
  Non-cyclic GFR-binding peptide

SEQ ID NO: 55 - protein, 34 aa, Artificial Sequence; identical to SEQ ID NO: 51
  Non-cyclic GFR-binding peptide

SEQ ID NO: 56 - protein, 37 aa, Artificial Sequence
  Non-cyclic GFR-binding peptide
RNVQCRPTQLEPLPIVYYEIVRKKPEQLSNTLEDHLA

SEQ ID NO: 57 - protein, 31 aa, Artificial Sequence
  Non-cyclic GFR-binding peptide
VPTHHSAISTLYLELAGEKPLKNYQFLQHNK

SEQ ID NO: 58 - protein, 30 aa, Artificial Sequence
  Non-cyclic GFR-binding peptide
VSQDLSAISTLYLKIVRKEPLKNYQEMVEE

SEQ ID NO: 59 - protein, 39 aa, Artificial Sequence; identical to SEQ ID NO: 50
  Non-cyclic GFR-binding peptide

SEQ ID NO: 60 - protein, 37 aa, Artificial Sequence
  Non-cyclic GFR-binding peptide
ASASPSSVPQDLEPLTILYYVGRTPKVEQLSNMVEDH

SEQ ID NO: 61 - protein, 37 aa, Artificial Sequence; identical to SEQ ID NO: 56
  Non-cyclic GFR-binding peptide

SEQ ID NO: 62 - protein, 37 aa, Artificial Sequence
  Non-cyclic GFR-binding peptide
RVVMNQYNKLVVKDYEDLYLMSIASLQTPVSSPKPVK

SEQ ID NO: 63 - protein, 37 aa, Artificial Sequence
  Non-cyclic GFR-binding peptide
RVVMNQYNKLTPVGMDDLYLMSIASLKTPASSAKGVK

SEQ ID NO: 64 - protein, 33 aa, Artificial Sequence
  Non-cyclic GFR-binding peptide
VIMQYNKLIKRTKGRLYLTSIASLDQSVSSPSA

SEQ ID NO: 65 - protein, 35 aa, Artificial Sequence
  Non-cyclic GFR-binding peptide
DELTQYNKLPKKRVIELYLTSIASLQVQTPRCQVK

SEQ ID NO: 66 - protein, 31 aa, Artificial Sequence
  Non-cyclic GFR-binding peptide
LNAISVLYFDDSSNVILKKYRNMVVRSSGSH

SEQ ID NO: 67 - protein, 31 aa, Artificial Sequence
  Non-cyclic GFR-binding peptide
LNAISVLYFDENEKVVLKKYRDMVVEGSGSR

SEQ ID NO: 68 - protein, 31 aa, Artificial Sequence
  Non-cyclic GFR-binding peptide
LSATSVLYYDDSSNVILRKHRNMVVRASGSH

SEQ ID NO: 69 - protein, 38 aa, Artificial Sequence
  Non-cyclic GFR-binding peptide
ARVVMNQYNKLVVKDYEDLYLTSIASLQTPASSPKPVK

SEQ ID NO: 70 - protein, 41 aa, Artificial Sequence
  Non-cyclic GFR-binding peptide
SSKSSKVIMQYNKLIKPTKGILYLTSIASLDQSVSSPSASA

SEQ ID NO: 71 - protein, 32 aa, Artificial Sequence
  Non-cyclic GFR-binding peptide
KNHQRHKRLIVNSSEEYYLTSTASLQTPVSSP

SEQ ID NO: 72 - protein, 40 aa, Artificial Sequence
  Non-cyclic GFR-binding peptide
GSAEVVMDEYQKYVVNNAADIYLISIPSLRAPVSSSAPAA

SEQ ID NO: 73 - protein, 37 aa, Artificial Sequence
  Non-cyclic GFR-binding peptide
EVVMDEYQKYVVNNAADIYLISIPSLRAPVSSSAPAA

SEQ ID NO: 74 - protein, 34 aa, Artificial Sequence
  Non-cyclic GFR-binding peptide
MDEYQKYVVNNAADIYLLSIPSLRAPVSSSAPAA

SEQ ID NO: 75 - protein, 32 aa, Artificial Sequence
  Non-cyclic GFR-binding peptide
VMNRYKKLGGGDYEDFYLMSIANLQTPASSPK

SEQ ID NO: 76 - protein, 25 aa, Artificial Sequence
  Non-cyclic GFR-binding peptide
QYNKLIVNNSSDLYLMSIASLKTPA

SEQ ID NO: 77 - protein, 27 aa, Artificial Sequence
  Non-cyclic GFR-binding peptide
MDQYNKDYEDLYLMSIASLEQSVASSA

SEQ ID NO: 78 - protein, 30 aa, Artificial Sequence
  Non-cyclic GFR-binding peptide
SPISILYIDAANNVVYKQYEDMVVEASGSR

SEQ ID NO: 79 - protein, 30 aa, Artificial Sequence
  Non-cyclic GFR-binding peptide
SPISLLYIDAANNVVYKQYEDMVVEASGSR

SEQ ID NO: 80 - protein, 26 aa, Artificial Sequence
  Non-cyclic GFR-binding peptide
SPISILYIGGGYKQYEDMVVEASGSR

SEQ ID NO: 81 - protein, 28 aa, Artificial Sequence
  Non-cyclic GFR-binding peptide
VMEQYNKLPEKRVIKLYLTSIASLDQSV

SEQ ID NO: 82 - protein, 37 aa, Artificial Sequence
  Non-cyclic GFR-binding peptide
SRVIMNSLQEVKPKRGVYYVIPLPELETPVSSAKPIK

SEQ ID NO: 83 - protein, 39 aa, Artificial Sequence
  Non-cyclic GFR-binding peptide
KSSRVIMNSLQEVKPTRGVYYVIPLPELAQPVSSPAASA

SEQ ID NO: 84 - protein, 29 aa, Artificial Sequence
  Non-cyclic GFR-binding peptide
VIMRHKRLIVNSSDDYYLVSTASLQTPAK

SEQ ID NO: 85 - protein, 26 aa, Artificial Sequence
  Non-cyclic GFR-binding peptide
YHYKLIVNSSDDKYLVSIPSLQTPAK

SEQ ID NO: 86 - protein, 29 aa, Artificial Sequence
  Non-cyclic GFR-binding peptide
EPLPIVYYVGRKPKVEQLSNMIVRSSKGG

SEQ ID NO: 87 - protein, 29 aa, Artificial Sequence
  Non-cyclic GFR-binding peptide
EPLPIVYYDDSSNVIEQLSNNMVVRASGG

SEQ ID NO: 88 - protein, 33 aa, Artificial Sequence
  Non-cyclic GFR-binding peptide
VVMDYHYKLVVKENEDKYLTSIPSLETPVSSAK

SEQ ID NO: 89 - protein, 31 aa, Artificial Sequence
  Non-cyclic GFR-binding peptide
MDYHYKLVVKENEDKYLMSIPSLETPVSSAK

SEQ ID NO: 90 - protein, 31 aa, Artificial Sequence
  Non-cyclic GFR-binding peptide
MDYHYKLVVKENEDKYLTSIPSLETPVSSAK

SEQ ID NO: 91 - protein, 31 aa, Artificial Sequence
  Non-cyclic GFR-binding peptide
MDYHYKLVVKGGGGKYLTSIPSLETPVSSAK

SEQ ID NO: 92 - protein, 30 aa, Artificial Sequence
  Non-cyclic GFR-binding peptide
YHYKLIVNSSDDKYLVSIPSLQTPAPGPTG

SEQ ID NO: 93 - protein, 32 aa, Artificial Sequence
  Non-cyclic GFR-binding peptide
MDQYNKLGGGLYLMSIASLEQSVASSAPGPTG

SEQ ID NO: 94 - protein, 35 aa, Artificial Sequence
  Non-cyclic GFR-binding peptide
VIMNSLQEVKPKRGVYYVIPLPELETPVSSAKPIK

SEQ ID NO: 95 - protein, 27 aa, Artificial Sequence
  Non-cyclic GFR-binding peptide
VQVEKHQGQHPKIRVKAVKVSREETPV

SEQ ID NO: 96 - protein, 38 aa, Artificial Sequence
  Non-cyclic GFR-binding peptide
ARVVMDEYQKYVVNNAADIYLISIPSLQTPASSPKPVT

SEQ ID NO: 97 - protein, 34 aa, Artificial Sequence
  Non-cyclic GFR-binding peptide
DELTNSLQEPKKRVIEYYVMPLPELQTPRCQVNR

SEQ ID NO: 98 - protein, 29 aa, Artificial Sequence
  Non-cyclic GFR-binding peptide
VVMNNSLQEIVNSSDDYYVITLPELKTPA

SEQ ID NO: 99 - protein, 35 aa, Artificial Sequence
  Non-cyclic GFR-binding peptide
VIMNSLQEVKPKRGVYYVTPLPELETPVSSAKPIK

SEQ ID NO: 100 - protein, 34 aa, Artificial Sequence
  Non-cyclic GFR-binding peptide
VIMNSLQEVKPTRGVYYVIPLPELAQPVSSPAAS

SEQ ID NO: 101 - protein, 28 aa, Artificial Sequence
  Non-cyclic GFR-binding peptide
VMDNSLQEVANNASDYYLTTLPELETPV

SEQ ID NO: 102 - protein, 30 aa, Artificial Sequence
  Non-cyclic GFR-binding peptide
VVSMGRYKKLIVNSSEDFYLTSIANHHVRS

SEQ ID NO: 103 - protein, 30 aa, Artificial Sequence
  Non-cyclic GFR-binding peptide
EVTMNPYVKLAANKNEDFFLISLSSMKEPV

SEQ ID NO: 104 - protein, 30 aa, Artificial Sequence
  Non-cyclic GFR-binding peptide
SKVMDEYQKYVVNNAADIYLISIPSLRAPV

SEQ ID NO: 105 - protein, 30 aa, Artificial Sequence
  Non-cyclic GFR-binding peptide
EVVIMPIKGYIIQNKENFYLMNIPSEETPV

SEQ ID NO: 106 - protein, 30 aa, Artificial Sequence
  Non-cyclic GFR-binding peptide
DVVMGPIKGYIINNKENFYLMNIPSMKTPT

SEQ ID NO: 107 - protein, 30 aa, Artificial Sequence
  Non-cyclic GFR-binding peptide
NHQLFQYNKLPKEGALELYLTSIASHHTPV

SEQ ID NO: 108 - protein, 30 aa, Artificial Sequence
  Non-cyclic GFR-binding peptide
DVVMEQYNKLPEERVIELYLTSIASLKTPA

SEQ ID NO: 109 - protein, 33 aa, Artificial Sequence
  Non-cyclic GFR-binding peptide
VVMDYHYKLVVKENEDKYLMSIPSLETPVSSAK

SEQ ID NO: 110 - protein, 33 aa, Artificial Sequence
  Non-cyclic GFR-binding peptide
RVIMRYKKLVKPKAGGFYLMSIANLKQPVSSPK

SEQ ID NO: 111 - protein, 39 aa, Artificial Sequence
  Non-cyclic GFR-binding peptide
KNHQLFVTAKKQGQHPKIRIKRVQVPREETPVCELGEDN

SEQ ID NO: 112 - protein, 34 aa, Artificial Sequence
  Non-cyclic GFR-binding peptide
VMNSLQEVKPTRGVYYLITLPELDQPVSSPSASA

SEQ ID NO: 113 - protein, 20 aa, Artificial Sequence
  Non-cyclic GFR-binding peptide
EYQKYVKPKRGVIFLISIPS

SEQ ID NO: 114 - protein, 20 aa, Artificial Sequence
  Non-cyclic GFR-binding peptide
RYKKLIVNSSDDFYLTSIAN

SEQ ID NO: 115 - protein, 39 aa, Artificial Sequence; identical to SEQ ID NO: 111
  Non-cyclic GFR-binding peptide

SEQ ID NO: 116 - protein, 34 aa, Artificial Sequence; identical to SEQ ID NO: 112
  Non-cyclic GFR-binding peptide

SEQ ID NO: 117 - protein, 37 aa, Artificial Sequence
  Non-cyclic GFR-binding peptide
ALHDELTNSLQEPKKRVIEYYVIPLPELQTPRCQVNR

SEQ ID NO: 118 - protein, 31 aa, Artificial Sequence
  Non-cyclic GFR-binding peptide
KNHQLFQYNKLPKEGALELYLTSIASHHTPV

SEQ ID NO: 119 - protein, 30 aa, Artificial Sequence
  Non-cyclic GFR-binding peptide
EEVMEQYNKLPEKRVIKLYLTSIASLDQSV

SEQ ID NO: 120 - protein, 39 aa, Artificial Sequence; identical to SEQ ID NO: 111
  Non-cyclic GFR-binding peptide

SEQ ID NO: 121 - protein, 37 aa, Artificial Sequence
  Non-cyclic GFR-binding peptide
HDEVMNSLQEVKPTRGVYYLITLPELDQPVSSPSASA

SEQ ID NO: 122 - protein, 37 aa, Artificial Sequence; identical to SEQ ID NO: 117
  Non-cyclic GFR-binding peptide

SEQ ID NO: 123 - protein, 30 aa, Artificial Sequence
  Non-cyclic GFR-binding peptide
VPTAASAISILYLDAANNVVLKNYQAAVVE

SEQ ID NO: 124 - protein, 32 aa, Artificial Sequence
  Non-cyclic GFR-binding peptide
VPEAASSLSMLFFEIVRKKPIFLKVYPAATVE

SEQ ID NO: 125 - protein, 32 aa, Artificial Sequence
  Non-cyclic GFR-binding peptide
VPTVVSAISTLYLRIKPHQGQHLKNYQVVVVE

SEQ ID NO: 126 - protein, 30 aa, Artificial Sequence
  Non-cyclic GFR-binding peptide
APTLLNAISMLYFNDKQQIILKKYRLLVVR

SEQ ID NO: 127 - protein, 30 aa, Artificial Sequence
  Non-cyclic GFR-binding peptide
APTGGSATSMLYYDKGVVTYLRKHRGGVVK

SEQ ID NO: 128 - protein, 30 aa, Artificial Sequence
  Non-cyclic GFR-binding peptide
VPTSSSPISTLYIDKGVVTYLKYHYSSVAE

SEQ ID NO: 129 - protein, 30 aa, Artificial Sequence
  Non-cyclic GFR-binding peptide
VPTAAEPISMLYLDEYDKVVKFKYEAAAVS

SEQ ID NO: 130 - protein, 30 aa, Artificial Sequence
  Non-cyclic GFR-binding peptide
TPTSSSPINTLYFDDMGVPTYGKIPSSVVD

SEQ ID NO: 131 - protein, 30 aa, Artificial Sequence
  Non-cyclic GFR-binding peptide
VPTVVSPISMLYIDDMGVPTYKQYEVVVVE

SEQ ID NO: 132 - protein, 30 aa, Artificial Sequence
  Non-cyclic GFR-binding peptide
APVAAKPLSMLYVDKGVVTYDHHKDAAVEE

SEQ ID NO: 133 - protein, 30 aa, Artificial Sequence
  Non-cyclic GFR-binding peptide
VPQAAEPLPMLYYDKGVVTYEQLSNAAVRS

SEQ ID NO: 134 - protein, 30 aa, Artificial Sequence
  Non-cyclic GFR-binding peptide
VPQQQEPLTTLYYDEYDKVVEQLSNQQVKS

SEQ ID NO: 135 - protein, 32 aa, Artificial Sequence
  Non-cyclic GFR-binding peptide
VPTMMSNITTQIMRIKPHQGQHIGEMSMMQHN

SEQ ID NO: 136 - protein, 30 aa, Artificial Sequence
  Non-cyclic GFR-binding peptide
SRVAARSVKMAKVGGGGGGGKEVQVAAEEH

SEQ ID NO: 137 - protein, 30 aa, Artificial Sequence
  Non-cyclic GFR-binding peptide
VPTDDSATSTLYYDKGVVTYLRKHRDDEHS

SEQ ID NO: 138 - protein, 30 aa, Artificial Sequence
  Non-cyclic GFR-binding peptide
VPTGGEPLTTLYYNDKQQIIEQLSNGGEHS

SEQ ID NO: 139 - protein, 30 aa, Artificial Sequence
  Non-cyclic GFR-binding peptide
SRVLLRPVQMRKIDKGVVTYKKATVLLEEH

SEQ ID NO: 140 - protein, 30 aa, Artificial Sequence
  Non-cyclic GFR-binding peptide
TQVAARPVQTRKIDDMGVPTKKATVAAEDH

SEQ ID NO: 141 - protein, 39 aa, Artificial Sequence
  Non-cyclic GFR-binding peptide
CKVPKPSSAPTQLSAISTLYLDEYDKVVLKNYQNMVVRA

SEQ ID NO: 142 - protein, 43 aa, Artificial Sequence
  Non-cyclic GFR-binding peptide
CKVGKASSVPTKLSAISTLYLDDMGVPTLKNYQNMVVRASGSH

SEQ ID NO: 143 - protein, 42 aa, Artificial Sequence
  Non-cyclic GFR-binding peptide
CASASPSSVSQDLSAISTLYLIGKTPKILKNYQMIVKSSKSS

SEQ ID NO: 144 - protein, 41 aa, Artificial Sequence
  Non-cyclic GFR-binding peptide
CKIPKASSVPTELNAISVLYFDENEKVILKKYRDMVVEGSG

SEQ ID NO: 145 - protein, 42 aa, Artificial Sequence
  Non-cyclic GFR-binding peptide
CASASPSSVSQDLNAISVLYFIGKTPKILKKYRMIVKSSKSS

SEQ ID NO: 146 - protein, 38 aa, Artificial Sequence
  Non-cyclic GFR-binding peptide
CAVPKASSAPTKLSATSVLYYDSSNNVVLRKHRNMVVK

SEQ ID NO: 147 - protein, 43 aa, Artificial Sequence
  Non-cyclic GFR-binding peptide
CTVPKPSSAPTQLSPISVLYKDDSSNVILKYHYNMVVRASGSH

SEQ ID NO: 148 - protein, 31 aa, Artificial Sequence
  Non-cyclic GFR-binding peptide
CAPTQLSPISVLYKDDSSNVILKYHYTLEDH

SEQ ID NO: 149 - protein, 38 aa, Artificial Sequence
  Non-cyclic GFR-binding peptide
CRNVQCRPTQVQLSAISTLYLEIVRKKPLKNYQTLEDH

SEQ ID NO: 150 - protein, 33 aa, Artificial Sequence
  Non-cyclic GFR-binding peptide
CPSSAPTQLSATSVLYYDDSSNVILRKHRQHNK

SEQ ID NO: 151 - protein, 37 aa, Artificial Sequence
  Non-cyclic GFR-binding peptide
CPKPSSAPTQLNAISMLYFGGGGGGGLKKYRNMVVRA

SEQ ID NO: 152 - protein, 32 aa, Artificial Sequence
  Non-cyclic GFR-binding peptide
CKVPKASSVPTELSAISTLYLAAAALKNYQEM

SEQ ID NO: 153 - protein, 39 aa, Artificial Sequence
  Non-cyclic GFR-binding peptide
CSIPKASSVPTELSATSVLYYDEYDEKVVLRKHEMVVEG

SEQ ID NO: 154 - protein, 26 aa, Artificial Sequence
  Non-cyclic GFR-binding peptide
CAPTKLSAISMLYLDSSNNVILKNYQ

SEQ ID NO: 155 - protein, 28 aa, Artificial Sequence
  Non-cyclic GFR-binding peptide
CASSAVSQELSAISMLYLGGGLKNYQDM

SEQ ID NO: 156 - protein, 40 aa, Artificial Sequence
  Non-cyclic GFR-binding peptide
CKASSVPTELSPISTLYKDENEKVVLKYHYDMVVEGSGSR

SEQ ID NO: 157 - protein, 38 aa, Artificial Sequence
  Non-cyclic GFR-binding peptide
CASAAPSSVPQKLNAISMLYFVGRKPKVLKKYRMIVRS

SEQ ID NO: 158 - protein, 37 aa, Artificial Sequence
  Non-cyclic GFR-binding peptide
CKVGKASSVPTKLNAISTLYLDENEKVVLKKYREGMS

SEQ ID NO: 159 - protein, 37 aa, Artificial Sequence
  Non-cyclic GFR-binding peptide
CPKPSSAPTQLSAISTLYLDDSSNVILKNYQMIVVRA

SEQ ID NO: 160 - protein, 33 aa, Artificial Sequence
  Non-cyclic GFR-binding peptide
CKVGKASSVPTKLNAISTLYLDDSSNVILKNYQ

SEQ ID NO: 161 - protein, 33 aa, Artificial Sequence
  Non-cyclic GFR-binding peptide
CGGGSSVPTELSAISTLYLDDYDKVILKKYRNM

SEQ ID NO: 162 - protein, 42 aa, Artificial Sequence
  Non-cyclic GFR-binding peptide
WWFWGKVPKPSSAPTQLSAISTLYLDEYDKVVLKNYQNMVVR

SEQ ID NO: 163 - protein, 42 aa, Artificial Sequence
  Non-cyclic GFR-binding peptide
GTPGPKVPKPSSAPTQLSAISTLYLDEYDKVVLKNYQNMAVR

SEQ ID NO: 164 - protein, 38 aa, Artificial Sequence
  Non-cyclic GFR-binding peptide
GTPGPPSSAPTQLSATSVLYYDDSSNVILRKHRMIVKS

SEQ ID NO: 165 - protein, 30 aa, Artificial Sequence
  Non-cyclic GFR-binding peptide
GTPGPAPTKLSAISMLYLDSSNNVILRKHR

SEQ ID NO: 166 - protein, 30 aa, Artificial Sequence
  Non-cyclic GFR-binding peptide
GTPGPAPTKLSAISMLYLDSSNNVILKKYR

SEQ ID NO: 167 - protein, 44 aa, Artificial Sequence
  Non-cyclic GFR-binding peptide
GTPGPKASSVPTELSPISTLYKDENEKVVLKYHYDMVVEGSGSR

SEQ ID NO: 168 - protein, 36 aa, Artificial Sequence
  Non-cyclic GFR-binding peptide
GTPGPKASSVPTELSPISTLYKDENEKVVLKYHYDM

SEQ ID NO: 169 - protein, 38 aa, Artificial Sequence
  Non-cyclic GFR-binding peptide
GTPGPPKPSSAPTQLNAISMLYFGGGGGLKKYRDMQHN

SEQ ID NO: 170 - protein, 44 aa, Artificial Sequence
  Non-cyclic GFR-binding peptide
WWFWGKASSVPTELSPISTLYKDENEKVVLKYHYDMVVEGSGSR

SEQ ID NO: 171 - protein, 35 aa, Artificial Sequence
  Non-cyclic GFR-binding peptide
WWFWGASSAVSQELSAISMLYLGGGLKNYQDMQHN

SEQ ID NO: 172 - protein, 42 aa, Artificial Sequence
  Non-cyclic GFR-binding peptide
GTPGPRNVQCRPTQVQLSAISTLYLEIVRKKPLKNYQTLEDH

SEQ ID NO: 173 - protein, 36 aa, Artificial Sequence
  Non-cyclic GFR-binding peptide
GTPGPRNVQCRPTQVQLSAISTLYLAAALKNYQTLE

SEQ ID NO: 174 - protein, 38 aa, Artificial Sequence
  Non-cyclic GFR-binding peptide
CKIPKASSVPTELEPLPIVYYVGRKPKVEQLSNMIVRS

SEQ ID NO: 175 - protein, 40 aa, Artificial Sequence
  Non-cyclic GFR-binding peptide
CASAAPSSVPQALEPLPIVYYVGRTPKVEQLSNMIVRSSK

SEQ ID NO: 176 - protein, 28 aa, Artificial Sequence
  Non-cyclic GFR-binding peptide
CVPTEERSVKVAKVRIKPHQGQHKEVQV

SEQ ID NO: 177 - protein, 30 aa, Artificial Sequence
  Non-cyclic GFR-binding peptide
CVPTEESNITMQIMRIKPHQGQHIGEMSFL

SEQ ID NO: 178 - protein, 42 aa, Artificial Sequence
  Non-cyclic GFR-binding peptide
CRNVQCRPTQVQLRPVQVRKIEYVRKKPKLKKATVRLEDHLA

SEQ ID NO: 179 - protein, 35 aa, Artificial Sequence
  Non-cyclic GFR-binding peptide
CGIPEPSSVPEKMSSLSILFFDENKNVVLKVYPNM

SEQ ID NO: 180 - protein, 35 aa, Artificial Sequence
  Non-cyclic GFR-binding peptide
CGIPEPSSVPEKTSSLSLLFFDENKNVVLKVYPNM

SEQ ID NO: 181 - protein, 41 aa, Artificial Sequence
  Non-cyclic GFR-binding peptide
CAAPASSSVPARLSPISILYIDAANNVVYKQYEDMVVEASG

SEQ ID NO: 182 - protein, 38 aa, Artificial Sequence
  Non-cyclic GFR-binding peptide
CAAPASSSVPARLSPISILYIDAANNVVYKQYEDMVVE

SEQ ID NO: 183 - protein, 35 aa, Artificial Sequence
  Non-cyclic GFR-binding peptide
CAAPASSSVPARLSPISLLYIDAANNVVYKQYEDM

SEQ ID NO: 184 - protein, 27 aa, Artificial Sequence
  Non-cyclic GFR-binding peptide
CPARLSPISLLYIDAANNVVYKQYEDM

SEQ ID NO: 185 - protein, 32 aa, Artificial Sequence
  Non-cyclic GFR-binding peptide
CAAAPASSSVPARLSPISILYIAAAYKQYEDM

SEQ ID NO: 186 - protein, 26 aa, Artificial Sequence
  Non-cyclic GFR-binding peptide
CVPQRLSPISILYIDAANNVVYKQYE

SEQ ID NO: 187 - protein, 39 aa, Artificial Sequence
  Non-cyclic GFR-binding peptide
CTVPKPSSAPTQLSPISILYIDAANNVVYKQYEDMVVRA

SEQ ID NO: 188 - protein, 42 aa, Artificial Sequence
  Non-cyclic GFR-binding peptide
GIPEPSSVPTKMSAISMLYLDENKNVVLKNYQNMVVESSASR

SEQ ID NO: 189 - protein, 42 aa, Artificial Sequence
  Non-cyclic GFR-binding peptide
HVTKPTSVPTKLSAISMLYLDDSSNVILKNYQNMVVESSGSH

SEQ ID NO: 190 - protein, 42 aa, Artificial Sequence
  Non-cyclic GFR-binding peptide
YVPKPSSVPTKLSAISMLYLDDSSNVILKNYQNMVVESSGSH

SEQ ID NO: 191 - protein, 42 aa, Artificial Sequence
  Non-cyclic GFR-binding peptide
TVPKPSSVPTQLSAISMLYLDDSSNVILKNYQNMVVEASGSH

SEQ ID NO: 192 - protein, 42 aa, Artificial Sequence
  Non-cyclic GFR-binding peptide
AVPKASSVPTKLSAISMLYLDSSNNVILKNYQNMVVEASGSH

SEQ ID NO: 193 - protein, 43 aa, Artificial Sequence
  Non-cyclic GFR-binding peptide
KVGKASSVPTKLSAISMLYLDDMGVPTLKNYQEGMSVVESGSR

SEQ ID NO: 194 - protein, 42 aa, Artificial Sequence
  Non-cyclic GFR-binding peptide
KASKASSVPTKLSAISMLYLDKGVVTYLKNYQGMVVEESGSR

SEQ ID NO: 195 - protein, 42 aa, Artificial Sequence
  Non-cyclic GFR-binding peptide
GSAGPSSVPTKMSAISMLYLNDKQQIILKNYQGMVVERSGSS

SEQ ID NO: 196 - protein, 42 aa, Artificial Sequence
  Non-cyclic GFR-binding peptide
AAPASSSVPTRLSAISMLYLDAANNVVLKNYQDMVVEASGSR

SEQ ID NO: 197 - protein, 42 aa, Artificial Sequence
  Non-cyclic GFR-binding peptide
STPPTSSVPTRLSAISMLYLDSANNVVLKNYQDMVVESSGSR

SEQ ID NO: 198 - protein, 42 aa, Artificial Sequence
  Non-cyclic GFR-binding peptide
HVPKPSSVPTKLSAISMLYLDDSSNVILKNYQNMVVESSGSH

SEQ ID NO: 199 - protein, 41 aa, Artificial Sequence
  Non-cyclic GFR-binding peptide
RVPSTSSVPTKTSAISMLYLDNGRVLLLKNYQMIVVESGSL

SEQ ID NO: 200 - protein, 41 aa, Artificial Sequence
  Non-cyclic GFR-binding peptide
ASAAPSSVPTALSAISMLYLVGRKPKVLKNYQMIVVESKSS

SEQ ID NO: 201 - protein, 41 aa, Artificial Sequence
  Non-cyclic GFR-binding peptide
ASASPSSVPTDLSAISMLYLIGKTPKILKNYQMIVVESKSS

SEQ ID NO: 202 - protein, 41 aa, Artificial Sequence
  Non-cyclic GFR-binding peptide
ASASPSSVPTDLSAISMLYLVGRTPKVLKNYQMVVVESKSS

SEQ ID NO: 203 - protein, 42 aa, Artificial Sequence
  Non-cyclic GFR-binding peptide
GIPEPSSVPEKMSAISMLYLDENKNVVLKNYQNMTVESSASR

SEQ ID NO: 204 - protein, 42 aa, Artificial Sequence
  Non-cyclic GFR-binding peptide
HVTKPTSAPTKLSAISMLYLDDSSNVILKNYQNMVVRSSGSH

SEQ ID NO: 205 - protein, 42 aa, Artificial Sequence
  Non-cyclic GFR-binding peptide
YVPKPSSAPTKLSAISMLYLDDSSNVILKNYQNMVVRSSGSH

SEQ ID NO: 206 - protein, 42 aa, Artificial Sequence
  Non-cyclic GFR-binding peptide
TVPKPSSAPTQLSAISMLYLDDSSNVILKNYQNMVVRASGSH

SEQ ID NO: 207 - protein, 42 aa, Artificial Sequence
  Non-cyclic GFR-binding peptide
AVPKASSAPTKLSAISMLYLDSSNNVILKNYQNMVVKASGSH

SEQ ID NO: 208 - protein, 43 aa, Artificial Sequence
  Non-cyclic GFR-binding peptide
KVGKASSVPTKLSAISMLYLDDMGVPTLKNYQEGMSVAESGSR

SEQ ID NO: 209 - protein, 42 aa, Artificial Sequence
  Non-cyclic GFR-binding peptide
KASKASSVPTKLSAISMLYLDKGVVTYLKNYQGMAVSESGSR

SEQ ID NO: 210 - protein, 42 aa, Artificial Sequence
  Non-cyclic GFR-binding peptide
GSAGPSSTPTKMSAISMLYLNDKQQIILKNYQGMVVDRSGSS

SEQ ID NO: 211 - protein, 42 aa, Artificial Sequence
  Non-cyclic GFR-binding peptide
AAPASSSVPARLSAISMLYLDAANNVVLKNYQDMVVEASGSR

SEQ ID NO: 212 - protein, 42 aa, Artificial Sequence
  Non-cyclic GFR-binding peptide
HVPKPSSAPTKLSAISMLYLDDSSNVILKNYQNMVVRSSGSH

SEQ ID NO: 213 - protein, 41 aa, Artificial Sequence
  Non-cyclic GFR-binding peptide
RVPSTSSAPVKTSAISMLYLDNGRVLLLKNYQMIVEESGSL

SEQ ID NO: 214 - protein, 41 aa, Artificial Sequence
  Non-cyclic GFR-binding peptide
ASAAPSSVPQALSAISMLYLVGRKPKVLKNYQMIVRSSKSS

SEQ ID NO: 215 - protein, 41 aa, Artificial Sequence
  Non-cyclic GFR-binding peptide
ASASPSSVSQDLSAISMLYLIGKTPKILKNYQMIVKSSKSS

SEQ ID NO: 216 - protein, 41 aa, Artificial Sequence
  Non-cyclic GFR-binding peptide
ASASPSSVPQDLSAISMLYLVGRTPKVLKNYQMVVKSSKSS

SEQ ID NO: 217 - protein, 44 aa, Artificial Sequence
  Non-cyclic GFR-binding peptide
NDEGLESVPTEESAISMLYLRIKPHQGQHLKNYQFLQHNKSESR

SEQ ID NO: 218 - protein, 44 aa, Artificial Sequence
  Non-cyclic GFR-binding peptide
NDEGLESVPTGQSAISMLYLRIKPHQGQHLKNYQLEEHSQSESR

SEQ ID NO: 219 - protein, 45 aa, Artificial Sequence
  Non-cyclic GFR-binding peptide
SSVKSQPSRVHHSAISMLYLEYVRKKPKLLKNYQRLEEHLESASA

SEQ ID NO: 220 - protein, 45 aa, Artificial Sequence
  Non-cyclic GFR-binding peptide
RNVQSRPTQVQLSAISMLYLEIVRKKPIFLKNYQTLEDHLASKSE

SEQ ID NO: 221 - protein, 42 aa, Artificial Sequence
  Non-cyclic GFR-binding peptide
KIPKASSVPEELSSLSILFFDENEKVVLKVYPDMTVEGSGSR

SEQ ID NO: 222 - protein, 42 aa, Artificial Sequence
  Non-cyclic GFR-binding peptide
SIPKASSVPEELSSLSILFFDEYDKVVLKVYPEMTVEGSGSR

SEQ ID NO: 223 - protein, 42 aa, Artificial Sequence
  Non-cyclic GFR-binding peptide
HVTKPTSVPEKLSSLSILFFDDSSNVILKVYPNMTVESSGSH

SEQ ID NO: 224 - protein, 42 aa, Artificial Sequence
  Non-cyclic GFR-binding peptide
YVPKPSSVPEKLSSLSILFFDDSSNVILKVYPNMTVESSGSH

SEQ ID NO: 225 - protein, 42 aa, Artificial Sequence
  Non-cyclic GFR-binding peptide
TVPKPSSVPEQLSSLSILFFDDSSNVILKVYPNMTVEASGSH

SEQ ID NO: 226 - protein, 42 aa, Artificial Sequence
  Non-cyclic GFR-binding peptide
AVPKASSVPEKLSSLSILFFDSSNNVILKVYPNMTVEASGSH

SEQ ID NO: 227 - protein, 43 aa, Artificial Sequence
  Non-cyclic GFR-binding peptide
KVGKASSVPEKLSSLSILFFDDMGVPTLKVYPEGMSTVESGSR

SEQ ID NO: 228 - protein, 42 aa, Artificial Sequence
  Non-cyclic GFR-binding peptide
KASKASSVPEKLSSLSILFFDKGVVTYLKVYPGMTVEESGSR

SEQ ID NO: 229 - protein, 42 aa, Artificial Sequence
  Non-cyclic GFR-binding peptide
GSAGPSSVPEKMSSLSILFFNDKQQIILKVYPGMTVERSGSS

SEQ ID NO: 230 - protein, 42 aa, Artificial Sequence
  Non-cyclic GFR-binding peptide
AAPASSSVPERLSSLSILFFDAANNVVLKVYPDMTVEASGSR

SEQ ID NO: 231 - protein, 42 aa, Artificial Sequence
  Non-cyclic GFR-binding peptide
STPPTSSVPERLSSLSILFFDSANNVVLKVYPDMTVESSGSR

SEQ ID NO: 232 - protein, 42 aa, Artificial Sequence
  Non-cyclic GFR-binding peptide
HVPKPSSVPEKLSSLSILFFDDSSNVILKVYPNMTVESSGSH

SEQ ID NO: 233 - protein, 41 aa, Artificial Sequence
  Non-cyclic GFR-binding peptide
RVPSTSSVPEKTSSLSILFFDNGRVLLLKVYPMITVESGSL

SEQ ID NO: 234 - protein, 41 aa, Artificial Sequence
  Non-cyclic GFR-binding peptide
ASAAPSSVPEALSSLSILFFVGRKPKVLKVYPMITVESKSS

SEQ ID NO: 235 - protein, 41 aa, Artificial Sequence
  Non-cyclic GFR-binding peptide
ASASPSSVPEDLSSLSILFFIGKTPKILKVYPMITVESKSS

SEQ ID NO: 236 - protein, 41 aa, Artificial Sequence
  Non-cyclic GFR-binding peptide
ASASPSSVPEDLSSLSILFFVGRTPKVLKVYPMVTVESKSS

SEQ ID NO: 237 - protein, 42 aa, Artificial Sequence
  Non-cyclic GFR-binding peptide
KIPKASSVPTELSSLSILFFDENEKVVLKVYPDMVVEGSGSR

SEQ ID NO: 238 - protein, 42 aa, Artificial Sequence
  Non-cyclic GFR-binding peptide
SIPKASSVPTELSSLSILFFDEYDKVVLKVYPEMVVEGSGSR

SEQ ID NO: 239 - protein, 42 aa, Artificial Sequence
  Non-cyclic GFR-binding peptide
HVTKPTSAPTKLSSLSILFFDDSSNVILKVYPNMVVRSSGSH

SEQ ID NO: 240 - protein, 42 aa, Artificial Sequence
  Non-cyclic GFR-binding peptide
YVPKPSSAPTKLSSLSILFFDDSSNVILKVYPNMVVRSSGSH

SEQ ID NO: 241 - protein, 42 aa, Artificial Sequence
  Non-cyclic GFR-binding peptide
TVPKPSSAPTQLSSLSILFFDDSSNVILKVYPNMVVRASGSH

SEQ ID NO: 242 - protein, 42 aa, Artificial Sequence
  Non-cyclic GFR-binding peptide
AVPKASSAPTKLSSLSILFFDSSNNVILKVYPNMVVKASGSH

SEQ ID NO: 243 - protein, 43 aa, Artificial Sequence
  Non-cyclic GFR-binding peptide
KVGKASSVPTKLSSLSILFFDDMGVPTLKVYPEGMSVAESGSR

SEQ ID NO: 244 - protein, 42 aa, Artificial Sequence
  Non-cyclic GFR-binding peptide
KASKASSVPTKLSSLSILFFDKGVVTYLKVYPGMAVSESGSR

SEQ ID NO: 245 - protein, 42 aa, Artificial Sequence
  Non-cyclic GFR-binding peptide
GSAGPSSTPTKMSSLSILFFNDKQQIILKVYPGMVVDRSGSS

SEQ ID NO: 246 - protein, 42 aa, Artificial Sequence
  Non-cyclic GFR-binding peptide
AAPASSSVPARLSSLSILFFDAANNVVLKVYPDMVVEASGSR

SEQ ID NO: 247 - protein, 42 aa, Artificial Sequence
  Non-cyclic GFR-binding peptide
STPPTSSVPTRLSSLSILFFDSANNVVLKVYPDMVVESSGSR

SEQ ID NO: 248 - protein, 42 aa, Artificial Sequence
  Non-cyclic GFR-binding peptide
HVPKPSSAPTKLSSLSILFFDDSSNVILKVYPNMVVRSSGSH

SEQ ID NO: 249 - protein, 41 aa, Artificial Sequence
  Non-cyclic GFR-binding peptide
RVPSTSSAPVKTSSLSILFFDNGRVLLLKVYPMIVEESGSL

SEQ ID NO: 250 - protein, 41 aa, Artificial Sequence
  Non-cyclic GFR-binding peptide
ASAAPSSVPQALSSLSILFFVGRKPKVLKVYPMIVRSSKSS

SEQ ID NO: 251 - protein, 41 aa, Artificial Sequence
  Non-cyclic GFR-binding peptide
ASASPSSVSQDLSSLSILFFIGKTPKILKVYPMIVKSSKSS

SEQ ID NO: 252 - protein, 41 aa, Artificial Sequence
  Non-cyclic GFR-binding peptide
ASASPSSVPQDLSSLSILFFVGRTPKVLKVYPMVVKSSKSS

SEQ ID NO: 253 - protein, 44 aa, Artificial Sequence
  Non-cyclic GFR-binding peptide
NDEGLESVPTEESSLSILFFRIKPHQGQHLKVYPFLQHNKSESR

SEQ ID NO: 254 - protein, 44 aa, Artificial Sequence
  Non-cyclic GFR-binding peptide
NDEGLESVPTGQSSLSILFFRIKPHQGQHLKVYPLEEHSQSESR

SEQ ID NO: 255 - protein, 45 aa, Artificial Sequence
  Non-cyclic GFR-binding peptide
SSVKSQPSRVHHSSLSILFFEYVRKKPKLLKVYPRLEEHLESASA

SEQ ID NO: 256 - protein, 45 aa, Artificial Sequence
  Non-cyclic GFR-binding peptide
RNVQSRPTQVQLSSLSILFFEIVRKKPIFLKVYPTLEDHLASKSE

SEQ ID NO: 257 - protein, 42 aa, Artificial Sequence
  Non-cyclic GFR-binding peptide
KIPKASSAPTELNAISVLYFDENEKVVLKKYRDMVVRGSGSR

SEQ ID NO: 258 - protein, 42 aa, Artificial Sequence
  Non-cyclic GFR-binding peptide
GIPEPSSAPTKMNAISVLYFDENKNVVLKKYRNMVVRSSASR

SEQ ID NO: 259 - protein, 42 aa, Artificial Sequence
  Non-cyclic GFR-binding peptide
SIPKASSAPTELNAISVLYFDEYDKVVLKKYREMVVRGSGSR

SEQ ID NO: 260 - protein, 42 aa, Artificial Sequence
  Non-cyclic GFR-binding peptide
AVPKASSAPTKLNAISVLYFDSSNNVILKKYRNMVVRASGSH

SEQ ID NO: 261 - protein, 43 aa, Artificial Sequence
  Non-cyclic GFR-binding peptide
KVGKASSAPTKLNAISVLYFDDMGVPTLKKYREGMSVVRSGSR

SEQ ID NO: 262 - protein, 42 aa, Artificial Sequence
  Non-cyclic GFR-binding peptide
KASKASSAPTKLNAISVLYFDKGVVTYLKKYRGMVVRESGSR

SEQ ID NO: 263 - protein, 42 aa, Artificial Sequence
  Non-cyclic GFR-binding peptide
GSAGPSSAPTKMNAISVLYFNDKQQIILKKYRGMVVRRSGSS

SEQ ID NO: 264 - protein, 42 aa, Artificial Sequence
  Non-cyclic GFR-binding peptide
AAPASSSAPTRLNAISVLYFDAANNVVLKKYRDMVVRASGSR

SEQ ID NO: 265 - protein, 42 aa, Artificial Sequence
  Non-cyclic GFR-binding peptide
STPPTSSAPTRLNAISVLYFDSANNVVLKKYRDMVVRSSGSR

SEQ ID NO: 266 - protein, 41 aa, Artificial Sequence
  Non-cyclic GFR-binding peptide
RVPSTSSAPTKTNAISVLYFDNGRVLLLKKYRMIVVRSGSL

SEQ ID NO: 267 - protein, 41 aa, Artificial Sequence
  Non-cyclic GFR-binding peptide
ASAAPSSAPTALNAISVLYFVGRKPKVLKKYRMIVVRSKSS

SEQ ID NO: 268 - protein, 41 aa, Artificial Sequence
  Non-cyclic GFR-binding peptide
ASASPSSAPTDLNAISVLYFIGKTPKILKKYRMIVVRSKSS

SEQ ID NO: 269 - protein, 41 aa, Artificial Sequence
  Non-cyclic GFR-binding peptide
ASASPSSAPTDLNAISVLYFVGRTPKVLKKYRMVVVRSKSS

SEQ ID NO: 270 - protein, 42 aa, Artificial Sequence
  Non-cyclic GFR-binding peptide
KIPKASSVPTELNAISVLYFDENEKVVLKKYRDMVVEGSGSR

SEQ ID NO: 271 - protein, 42 aa, Artificial Sequence
  Non-cyclic GFR-binding peptide
GIPEPSSVPEKMNAISVLYFDENKNVVLKKYRNMTVESSASR

SEQ ID NO: 272 - protein, 42 aa, Artificial Sequence
  Non-cyclic GFR-binding peptide
SIPKASSVPTELNAISVLYFDEYDKVVLKKYREMVVEGSGSR

SEQ ID NO: 273 - protein, 42 aa, Artificial Sequence
  Non-cyclic GFR-binding peptide
AVPKASSAPTKLNAISVLYFDSSNNVILKKYRNMVVKASGSH

SEQ ID NO: 274 - protein, 43 aa, Artificial Sequence
  Non-cyclic GFR-binding peptide
KVGKASSVPTKLNAISVLYFDDMGVPTLKKYREGMSVAESGSR

SEQ ID NO: 275 - protein, 42 aa, Artificial Sequence
  Non-cyclic GFR-binding peptide
KASKASSVPTKLNAISVLYFDKGVVTYLKKYRGMAVSESGSR

SEQ ID NO: 276 - protein, 42 aa, Artificial Sequence
  Non-cyclic GFR-binding peptide
GSAGPSSTPTKMNAISVLYFNDKQQIILKKYRGMVVDRSGSS

SEQ ID NO: 277 - protein, 42 aa, Artificial Sequence
  Non-cyclic GFR-binding peptide
AAPASSSVPARLNAISVLYFDAANNVVLKKYRDMVVEASGSR

SEQ ID NO: 278 - protein, 42 aa, Artificial Sequence
  Non-cyclic GFR-binding peptide
STPPTSSVPTRLNAISVLYFDSANNVVLKKYRDMVVESSGSR

SEQ ID NO: 279 - protein, 41 aa, Artificial Sequence
  Non-cyclic GFR-binding peptide
RVPSTSSAPVKTNAISVLYFDNGRVLLLKKYRMIVEESGSL

SEQ ID NO: 280 - protein, 41 aa, Artificial Sequence
  Non-cyclic GFR-binding peptide
ASAAPSSVPQALNAISVLYFVGRKPKVLKKYRMIVRSSKSS

SEQ ID NO: 281 - protein, 41 aa, Artificial Sequence
  Non-cyclic GFR-binding peptide
ASASPSSVSQDLNAISVLYFIGKTPKILKKYRMIVKSSKSS

SEQ ID NO: 282 - protein, 41 aa, Artificial Sequence
  Non-cyclic GFR-binding peptide
ASASPSSVPQDLNAISVLYFVGRTPKVLKKYRMVVKSSKSS

SEQ ID NO: 283 - protein, 44 aa, Artificial Sequence
  Non-cyclic GFR-binding peptide
NDEGLESVPTEENAISVLYFRIKPHQGQHLKKYRFLQHNKSESR

SEQ ID NO: 284 - protein, 44 aa, Artificial Sequence
  Non-cyclic GFR-binding peptide
NDEGLESVPTGQNAISVLYFRIKPHQGQHLKKYRLEEHSQSESR

SEQ ID NO: 285 - protein, 45 aa, Artificial Sequence
  Non-cyclic GFR-binding peptide
SSVKSQPSRVHHNAISVLYFEYVRKKPKLLKKYRRLEEHLESASA

SEQ ID NO: 286 - protein, 45 aa, Artificial Sequence
  Non-cyclic GFR-binding peptide
RNVQSRPTQVQLNAISVLYFEIVRKKPIFLKKYRTLEDHLASKSE

SEQ ID NO: 287 - protein, 42 aa, Artificial Sequence
  Non-cyclic GFR-binding peptide
KIPKASSAPTELSATSVLYYDENEKVVLRKHRDMVVKGSGSR

SEQ ID NO: 288 - protein, 42 aa, Artificial Sequence
  Non-cyclic GFR-binding peptide
GIPEPSSAPTKMSATSVLYYDENKNVVLRKHRNMVVKSSASR

SEQ ID NO: 289 - protein, 42 aa, Artificial Sequence
  Non-cyclic GFR-binding peptide
SIPKASSAPTELSATSVLYYDEYDKVVLRKHREMVVKGSGSR

SEQ ID NO: 290 - protein, 42 aa, Artificial Sequence
  Non-cyclic GFR-binding peptide
HVTKPTSAPTKLSATSVLYYDDSSNVILRKHRNMVVKSSGSH

SEQ ID NO: 291 - protein, 42 aa, Artificial Sequence
  Non-cyclic GFR-binding peptide
YVPKPSSAPTKLSATSVLYYDDSSNVILRKHRNMVVKSSGSH

SEQ ID NO: 292 - protein, 42 aa, Artificial Sequence
  Non-cyclic GFR-binding peptide
TVPKPSSAPTQLSATSVLYYDDSSNVILRKHRNMVVKASGSH

SEQ ID NO: 293 - protein, 43 aa, Artificial Sequence
  Non-cyclic GFR-binding peptide
KVGKASSAPTKLSATSVLYYDDMGVPTLRKHREGMSVVKSGSR

SEQ ID NO: 294 - protein, 42 aa, Artificial Sequence
  Non-cyclic GFR-binding peptide
KASKASSAPTKLSATSVLYYDKGVVTYLRKHRGMVVKESGSR

SEQ ID NO: 295 - protein, 42 aa, Artificial Sequence
  Non-cyclic GFR-binding peptide
GSAGPSSAPTKMSATSVLYYNDKQQIILRKHRGMVVKRSGSS

SEQ ID NO: 296 - protein, 42 aa, Artificial Sequence
  Non-cyclic GFR-binding peptide
AAPASSSAPTRLSATSVLYYDAANNVVLRKHRDMVVKASGSR

SEQ ID NO: 297 - protein, 42 aa, Artificial Sequence
  Non-cyclic GFR-binding peptide
STPPTSSAPTRLSATSVLYYDSANNVVLRKHRDMVVKSSGSR

SEQ ID NO: 298 - protein, 42 aa, Artificial Sequence
  Non-cyclic GFR-binding peptide
HVPKPSSAPTKLSATSVLYYDDSSNVILRKHRNMVVKSSGSH

SEQ ID NO: 299 - protein, 41 aa, Artificial Sequence
  Non-cyclic GFR-binding peptide
RVPSTSSAPTKTSATSVLYYDNGRVLLLRKHRMIVVKSGSL

SEQ ID NO: 300 - protein, 41 aa, Artificial Sequence
  Non-cyclic GFR-binding peptide
ASAAPSSAPTALSATSVLYYVGRKPKVLRKHRMIVVKSKSS

SEQ ID NO: 301 - protein, 41 aa, Artificial Sequence
  Non-cyclic GFR-binding peptide
ASASPSSAPTDLSATSVLYYIGKTPKILRKHRMIVVKSKSS

SEQ ID NO: 302 - protein, 41 aa, Artificial Sequence
  Non-cyclic GFR-binding peptide
ASASPSSAPTDLSATSVLYYVGRTPKVLRKHRMVVVKSKSS

SEQ ID NO: 303 - protein, 42 aa, Artificial Sequence
  Non-cyclic GFR-binding peptide
KIPKASSVPTELSATSVLYYDENEKVVLRKHRDMVVEGSGSR

SEQ ID NO: 304 - protein, 42 aa, Artificial Sequence
  Non-cyclic GFR-binding peptide
GIPEPSSVPEKMSATSVLYYDENKNVVLRKHRNMTVESSASR

SEQ ID NO: 305 - protein, 42 aa, Artificial Sequence
  Non-cyclic GFR-binding peptide
SIPKASSVPTELSATSVLYYDEYDKVVLRKHREMVVEGSGSR

SEQ ID NO: 306 - protein, 42 aa, Artificial Sequence
  Non-cyclic GFR-binding peptide
HVTKPTSAPTKLSATSVLYYDDSSNVILRKHRNMVVRSSGSH

SEQ ID NO: 307 - protein, 42 aa, Artificial Sequence
  Non-cyclic GFR-binding peptide
YVPKPSSAPTKLSATSVLYYDDSSNVILRKHRNMVVRSSGSH

SEQ ID NO: 308 - protein, 42 aa, Artificial Sequence
  Non-cyclic GFR-binding peptide
TVPKPSSAPTQLSATSVLYYDDSSNVILRKHRNMVVRASGSH

SEQ ID NO: 309 - protein, 43 aa, Artificial Sequence
  Non-cyclic GFR-binding peptide
KVGKASSVPTKLSATSVLYYDDMGVPTLRKHREGMSVAESGSR

SEQ ID NO: 310 - protein, 42 aa, Artificial Sequence
  Non-cyclic GFR-binding peptide
KASKASSVPTKLSATSVLYYDKGVVTYLRKHRGMAVSESGSR

SEQ ID NO: 311 - protein, 42 aa, Artificial Sequence
  Non-cyclic GFR-binding peptide
GSAGPSSTPTKMSATSVLYYNDKQQIILRKHRGMVVDRSGSS

SEQ ID NO: 312 - protein, 42 aa, Artificial Sequence
  Non-cyclic GFR-binding peptide
AAPASSSVPARLSATSVLYYDAANNVVLRKHRDMVVEASGSR

SEQ ID NO: 313 - protein, 42 aa, Artificial Sequence
  Non-cyclic GFR-binding peptide
STPPTSSVPTRLSATSVLYYDSANNVVLRKHRDMVVESSGSR

SEQ ID NO: 314 - protein, 42 aa, Artificial Sequence
  Non-cyclic GFR-binding peptide
HVPKPSSAPTKLSATSVLYYDDSSNVILRKHRNMVVRSSGSH

SEQ ID NO: 315 - protein, 41 aa, Artificial Sequence
  Non-cyclic GFR-binding peptide
RVPSTSSAPVKTSATSVLYYDNGRVLLLRKHRMIVEESGSL

SEQ ID NO: 316 - protein, 41 aa, Artificial Sequence
  Non-cyclic GFR-binding peptide
ASAAPSSVPQALSATSVLYYVGRKPKVLRKHRMIVRSSKSS

SEQ ID NO: 317 - protein, 41 aa, Artificial Sequence
  Non-cyclic GFR-binding peptide
ASASPSSVSQDLSATSVLYYIGKTPKILRKHRMIVKSSKSS

SEQ ID NO: 318 - protein, 41 aa, Artificial Sequence
  Non-cyclic GFR-binding peptide
ASASPSSVPQDLSATSVLYYVGRTPKVLRKHRMVVKSSKSS

SEQ ID NO: 319 - protein, 44 aa, Artificial Sequence
  Non-cyclic GFR-binding peptide
NDEGLESVPTEESATSVLYYRIKPHQGQHLRKHRFLQHNKSESR

SEQ ID NO: 320 - protein, 44 aa, Artificial Sequence
  Non-cyclic GFR-binding peptide
NDEGLESVPTGQSATSVLYYRIKPHQGQHLRKHRLEEHSQSESR

SEQ ID NO: 321 - protein, 45 aa, Artificial Sequence
  Non-cyclic GFR-binding peptide
SSVKSQPSRVHHSATSVLYYEYVRKKPKLLRKHRRLEEHLESASA

SEQ ID NO: 322 - protein, 45 aa, Artificial Sequence
  Non-cyclic GFR-binding peptide
RNVQSRPTQVQLSATSVLYYEIVRKKPIFLRKHRTLEDHLASKSE

SEQ ID NO: 323 - protein, 42 aa, Artificial Sequence
  Non-cyclic GFR-binding peptide
KIPKASSVPTELSPISVLYKDENEKVVLKYHYDMVAEGSGSR

SEQ ID NO: 324 - protein, 42 aa, Artificial Sequence
  Non-cyclic GFR-binding peptide
GIPEPSSVPTKMSPISVLYKDENKNVVLKYHYNMVAESSASR

SEQ ID NO: 325 - protein, 42 aa, Artificial Sequence
  Non-cyclic GFR-binding peptide
SIPKASSVPTELSPISVLYKDEYDKVVLKYHYEMVAEGSGSR

SEQ ID NO: 326 - protein, 42 aa, Artificial Sequence
  Non-cyclic GFR-binding peptide
HVTKPTSVPTKLSPISVLYKDDSSNVILKYHYNMVAESSGSH

SEQ ID NO: 327 - protein, 42 aa, Artificial Sequence
  Non-cyclic GFR-binding peptide
YVPKPSSVPTKLSPISVLYKDDSSNVILKYHYNMVAESSGSH

SEQ ID NO: 328 - protein, 42 aa, Artificial Sequence
  Non-cyclic GFR-binding peptide
TVPKPSSVPTQLSPISVLYKDDSSNVILKYHYNMVAEASGSH

SEQ ID NO: 329 - protein, 42 aa, Artificial Sequence
  Non-cyclic GFR-binding peptide
AVPKASSVPTKLSPISVLYKDSSNNVILKYHYNMVAEASGSH

SEQ ID NO: 330 - protein, 42 aa, Artificial Sequence
  Non-cyclic GFR-binding peptide
KASKASSVPTKLSPISVLYKDKGVVTYLKYHYGMVAEESGSR

SEQ ID NO: 331 - protein, 42 aa, Artificial Sequence
  Non-cyclic GFR-binding peptide
GSAGPSSVPTKMSPISVLYKNDKQQIILKYHYGMVAERSGSS

SEQ ID NO: 332 - protein, 42 aa, Artificial Sequence
  Non-cyclic GFR-binding peptide
AAPASSSVPTRLSPISVLYKDAANNVVLKYHYDMVAEASGSR

SEQ ID NO: 333 - protein, 42 aa, Artificial Sequence
  Non-cyclic GFR-binding peptide
STPPTSSVPTRLSPISVLYKDSANNVVLKYHYDMVAESSGSR

SEQ ID NO: 334 - protein, 42 aa, Artificial Sequence
  Non-cyclic GFR-binding peptide
HVPKPSSVPTKLSPISVLYKDDSSNVILKYHYNMVAESSGSH

SEQ ID NO: 335 - protein, 41 aa, Artificial Sequence
  Non-cyclic GFR-binding peptide
RVPSTSSVPTKTSPISVLYKDNGRVLLLKYHYMIVAESGSL

SEQ ID NO: 336 - protein, 41 aa, Artificial Sequence
  Non-cyclic GFR-binding peptide
ASAAPSSVPTALSPISVLYKVGRKPKVLKYHYMIVAESKSS

SEQ ID NO: 337 - protein, 41 aa, Artificial Sequence
  Non-cyclic GFR-binding peptide
ASASPSSVPTDLSPISVLYKIGKTPKILKYHYMIVAESKSS

SEQ ID NO: 338 - protein, 41 aa, Artificial Sequence
  Non-cyclic GFR-binding peptide
ASASPSSVPTDLSPISVLYKVGRTPKVLKYHYMVVAESKSS

SEQ ID NO: 339 - protein, 42 aa, Artificial Sequence
  Non-cyclic GFR-binding peptide
KIPKASSVPTELSPISVLYKDENEKVVLKYHYDMVVEGSGSR

SEQ ID NO: 340 - protein, 42 aa, Artificial Sequence
  Non-cyclic GFR-binding peptide
GIPEPSSVPEKMSPISVLYKDENKNVVLKYHYNMTVESSASR

SEQ ID NO: 341 - protein, 42 aa, Artificial Sequence
  Non-cyclic GFR-binding peptide
SIPKASSVPTELSPISVLYKDEYDKVVLKYHYEMVVEGSGSR

SEQ ID NO: 342 - protein, 42 aa, Artificial Sequence
  Non-cyclic GFR-binding peptide
HVTKPTSAPTKLSPISVLYKDDSSNVILKYHYNMVVRSSGSH

SEQ ID NO: 343 - protein, 42 aa, Artificial Sequence
  Non-cyclic GFR-binding peptide
YVPKPSSAPTKLSPISVLYKDDSSNVILKYHYNMVVRSSGSH

SEQ ID NO: 344 - protein, 42 aa, Artificial Sequence
  Non-cyclic GFR-binding peptide
TVPKPSSAPTQLSPISVLYKDDSSNVILKYHYNMVVRASGSH

SEQ ID NO: 345 - protein, 42 aa, Artificial Sequence
  Non-cyclic GFR-binding peptide
AVPKASSAPTKLSPISVLYKDSSNNVILKYHYNMVVKASGSH

SEQ ID NO: 346 - protein, 42 aa, Artificial Sequence
  Non-cyclic GFR-binding peptide
KASKASSVPTKLSPISVLYKDKGVVTYLKYHYGMAVSESGSR

SEQ ID NO: 347 - protein, 42 aa, Artificial Sequence
  Non-cyclic GFR-binding peptide
GSAGPSSTPTKMSPISVLYKNDKQQIILKYHYGMVVDRSGSS

SEQ ID NO: 348 - protein, 42 aa, Artificial Sequence
  Non-cyclic GFR-binding peptide
AAPASSSVPARLSPISVLYKDAANNVVLKYHYDMVVEASGSR

SEQ ID NO: 349 - protein, 42 aa, Artificial Sequence
  Non-cyclic GFR-binding peptide
STPPTSSVPTRLSPISVLYKDSANNVVLKYHYDMVVESSGSR

SEQ ID NO: 350 - protein, 42 aa, Artificial Sequence
  Non-cyclic GFR-binding peptide
HVPKPSSAPTKLSPISVLYKDDSSNVILKYHYNMVVRSSGSH

SEQ ID NO: 351 - protein, 41 aa, Artificial Sequence
  Non-cyclic GFR-binding peptide
RVPSTSSAPVKTSPISVLYKDNGRVLLLKYHYMIVEESGSL

SEQ ID NO: 352 - protein, 41 aa, Artificial Sequence
  Non-cyclic GFR-binding peptide
ASAAPSSVPQALSPISVLYKVGRKPKVLKYHYMIVRSSKSS

SEQ ID NO: 353 - protein, 41 aa, Artificial Sequence
  Non-cyclic GFR-binding peptide
ASASPSSVSQDLSPISVLYKIGKTPKILKYHYMIVKSSKSS

SEQ ID NO: 354 - protein, 41 aa, Artificial Sequence
  Non-cyclic GFR-binding peptide
ASASPSSVPQDLSPISVLYKVGRTPKVLKYHYMVVKSSKSS

SEQ ID NO: 355 - protein, 44 aa, Artificial Sequence
  Non-cyclic GFR-binding peptide
NDEGLESVPTEESPISVLYKRIKPHQGQHLKYHYFLQHNKSESR

SEQ ID NO: 356 - protein, 44 aa, Artificial Sequence
  Non-cyclic GFR-binding peptide
NDEGLESVPTGQSPISVLYKRIKPHQGQHLKYHYLEEHSQSESR

SEQ ID NO: 357 - protein, 45 aa, Artificial Sequence
  Non-cyclic GFR-binding peptide
SSVKSQPSRVHHSPISVLYKEYVRKKPKLLKYHYRLEEHLESASA

SEQ ID NO: 358 - protein, 45 aa, Artificial Sequence
  Non-cyclic GFR-binding peptide
RNVQSRPTQVQLSPISVLYKEIVRKKPIFLKYHYTLEDHLASKSE

SEQ ID NO: 359 - protein, 42 aa, Artificial Sequence
  Non-cyclic GFR-binding peptide
KIPKASSVPTELEPISILYLDENEKVVKFKYEDMAVSGSGSR

SEQ ID NO: 360 - protein, 42 aa, Artificial Sequence
  Non-cyclic GFR-binding peptide
GIPEPSSVPTKMEPISILYLDENKNVVKFKYENMAVSSSASR

SEQ ID NO: 361 - protein, 42 aa, Artificial Sequence
  Non-cyclic GFR-binding peptide
SIPKASSVPTELEPISILYLDEYDKVVKFKYEEMAVSGSGSR

SEQ ID NO: 362 - protein, 42 aa, Artificial Sequence
  Non-cyclic GFR-binding peptide
HVTKPTSVPTKLEPISILYLDDSSNVIKFKYENMAVSSSGSH

SEQ ID NO: 363 - protein, 42 aa, Artificial Sequence
  Non-cyclic GFR-binding peptide
YVPKPSSVPTKLEPISILYLDDSSNVIKFKYENMAVSSSGSH

SEQ ID NO: 364 - protein, 42 aa, Artificial Sequence
  Non-cyclic GFR-binding peptide
TVPKPSSVPTQLEPISILYLDDSSNVIKFKYENMAVSASGSH

SEQ ID NO: 365 - protein, 42 aa, Artificial Sequence
  Non-cyclic GFR-binding peptide
AVPKASSVPTKLEPISILYLDSSNNVIKFKYENMAVSASGSH

SEQ ID NO: 366 - protein, 43 aa, Artificial Sequence
  Non-cyclic GFR-binding peptide
KVGKASSVPTKLEPISILYLDDMGVPTKFKYEEGMSAVSSGSR

SEQ ID NO: 367 - protein, 42 aa, Artificial Sequence
  Non-cyclic GFR-binding peptide
GSAGPSSVPTKMEPISILYLNDKQQIIKFKYEGMAVSRSGSS

SEQ ID NO: 368 - protein, 42 aa, Artificial Sequence
  Non-cyclic GFR-binding peptide
AAPASSSVPTRLEPISILYLDAANNVVKFKYEDMAVSASGSR

SEQ ID NO: 369 - protein, 42 aa, Artificial Sequence
  Non-cyclic GFR-binding peptide
STPPTSSVPTRLEPISILYLDSANNVVKFKYEDMAVSSSGSR

SEQ ID NO: 370 - protein, 42 aa, Artificial Sequence
  Non-cyclic GFR-binding peptide
HVPKPSSVPTKLEPISILYLDDSSNVIKFKYENMAVSSSGSH

SEQ ID NO: 371 - protein, 41 aa, Artificial Sequence
  Non-cyclic GFR-binding peptide
RVPSTSSVPTKTEPISILYLDNGRVLLKFKYEMIAVSSGSL

SEQ ID NO: 372 - protein, 41 aa, Artificial Sequence
  Non-cyclic GFR-binding peptide
ASAAPSSVPTALEPISILYLVGRKPKVKFKYEMIAVSSKSS

SEQ ID NO: 373 - protein, 41 aa, Artificial Sequence
  Non-cyclic GFR-binding peptide
ASASPSSVPTDLEPISILYLIGKTPKIKFKYEMIAVSSKSS

SEQ ID NO: 374 - protein, 41 aa, Artificial Sequence
  Non-cyclic GFR-binding peptide
ASASPSSVPTDLEPISILYLVGRTPKVKFKYEMVAVSSKSS

SEQ ID NO: 375 - protein, 42 aa, Artificial Sequence
  Non-cyclic GFR-binding peptide
KIPKASSVPTELEPISILYLDENEKVVKFKYEDMVVEGSGSR

SEQ ID NO: 376 - protein, 42 aa, Artificial Sequence
  Non-cyclic GFR-binding peptide
GIPEPSSVPEKMEPISILYLDENKNVVKFKYENMTVESSASR

SEQ ID NO: 377 - protein, 42 aa, Artificial Sequence
  Non-cyclic GFR-binding peptide
SIPKASSVPTELEPISILYLDEYDKVVKFKYEEMVVEGSGSR

SEQ ID NO: 378 - protein, 42 aa, Artificial Sequence
  Non-cyclic GFR-binding peptide
HVTKPTSAPTKLEPISILYLDDSSNVIKFKYENMVVRSSGSH

SEQ ID NO: 379 - protein, 42 aa, Artificial Sequence
  Non-cyclic GFR-binding peptide
YVPKPSSAPTKLEPISILYLDDSSNVIKFKYENMVVRSSGSH

SEQ ID NO: 380 - protein, 42 aa, Artificial Sequence
  Non-cyclic GFR-binding peptide
TVPKPSSAPTQLEPISILYLDDSSNVIKFKYENMVVRASGSH

SEQ ID NO: 381 - protein, 42 aa, Artificial Sequence
  Non-cyclic GFR-binding peptide
AVPKASSAPTKLEPISILYLDSSNNVIKFKYENMVVKASGSH

SEQ ID NO: 382 - protein, 43 aa, Artificial Sequence
  Non-cyclic GFR-binding peptide
KVGKASSVPTKLEPISILYLDDMGVPTKFKYEEGMSVAESGSR

SEQ ID NO: 383 - protein, 42 aa, Artificial Sequence
  Non-cyclic GFR-binding peptide
GSAGPSSTPTKMEPISILYLNDKQQIIKFKYEGMVVDRSGSS

SEQ ID NO: 384 - protein, 42 aa, Artificial Sequence
  Non-cyclic GFR-binding peptide
AAPASSSVPARLEPISILYLDAANNVVKFKYEDMVVEASGSR

SEQ ID NO: 385 - protein, 42 aa, Artificial Sequence
  Non-cyclic GFR-binding peptide
STPPTSSVPTRLEPISILYLDSANNVVKFKYEDMVVESSGSR

SEQ ID NO: 386 - protein, 42 aa, Artificial Sequence
  Non-cyclic GFR-binding peptide
HVPKPSSAPTKLEPISILYLDDSSNVIKFKYENMVVRSSGSH

SEQ ID NO: 387 - protein, 41 aa, Artificial Sequence
  Non-cyclic GFR-binding peptide
RVPSTSSAPVKTEPISILYLDNGRVLLKFKYEMIVEESGSL

SEQ ID NO: 388 - protein, 41 aa, Artificial Sequence
  Non-cyclic GFR-binding peptide
ASAAPSSVPQALEPISILYLVGRKPKVKFKYEMIVRSSKSS

SEQ ID NO: 389 - protein, 41 aa, Artificial Sequence
  Non-cyclic GFR-binding peptide
ASASPSSVSQDLEPISILYLIGKTPKIKFKYEMIVKSSKSS

SEQ ID NO: 390 - protein, 41 aa, Artificial Sequence
  Non-cyclic GFR-binding peptide
ASASPSSVPQDLEPISILYLVGRTPKVKFKYEMVVKSSKSS

SEQ ID NO: 391 - protein, 44 aa, Artificial Sequence
  Non-cyclic GFR-binding peptide
NDEGLESVPTEEEPISILYLRIKPHQGQHKFKYEFLQHNKSESR

SEQ ID NO: 392 - protein, 44 aa, Artificial Sequence
  Non-cyclic GFR-binding peptide
NDEGLESVPTGQEPISILYLRIKPHQGQHKFKYELEEHSQSESR

SEQ ID NO: 393 - protein, 45 aa, Artificial Sequence
  Non-cyclic GFR-binding peptide
SSVKSQPSRVHHEPISILYLEYVRKKPKLKFKYERLEEHLESASA

SEQ ID NO: 394 - protein, 45 aa, Artificial Sequence
  Non-cyclic GFR-binding peptide
RNVQSRPTQVQLEPISILYLEIVRKKPIFKFKYETLEDHLASKSE

SEQ ID NO: 395 - protein, 42 aa, Artificial Sequence
  Non-cyclic GFR-binding peptide
KIPKASSTPTELSPINMLYFDENEKVVYGKIPDMVVDGSGSR

SEQ ID NO: 396 - protein, 42 aa, Artificial Sequence
  Non-cyclic GFR-binding peptide
GIPEPSSTPTKMSPINMLYFDENKNVVYGKIPNMVVDSSASR

SEQ ID NO: 397 - protein, 42 aa, Artificial Sequence
  Non-cyclic GFR-binding peptide
SIPKASSTPTELSPINMLYFDEYDKVVYGKIPEMVVDGSGSR

SEQ ID NO: 398 - protein, 42 aa, Artificial Sequence
  Non-cyclic GFR-binding peptide
HVTKPTSTPTKLSPINMLYFDDSSNVIYGKIPNMVVDSSGSH

SEQ ID NO: 399 - protein, 42 aa, Artificial Sequence
  Non-cyclic GFR-binding peptide
YVPKPSSTPTKLSPINMLYFDDSSNVIYGKIPNMVVDSSGSH

SEQ ID NO: 400 - protein, 42 aa, Artificial Sequence
  Non-cyclic GFR-binding peptide
TVPKPSSTPTQLSPINMLYFDDSSNVIYGKIPNMVVDASGSH

SEQ ID NO: 401 - protein, 42 aa, Artificial Sequence
  Non-cyclic GFR-binding peptide
AVPKASSTPTKLSPINMLYFDSSNNVIYGKIPNMVVDASGSH

SEQ ID NO: 402 - protein, 43 aa, Artificial Sequence
  Non-cyclic GFR-binding peptide
KVGKASSTPTKLSPINMLYFDDMGVPTYGKIPEGMSVVDSGSR

SEQ ID NO: 403 - protein, 42 aa, Artificial Sequence
  Non-cyclic GFR-binding peptide
KASKASSTPTKLSPINMLYFDKGVVTYYGKIPGMVVDESGSR

SEQ ID NO: 404 - protein, 42 aa, Artificial Sequence
  Non-cyclic GFR-binding peptide
AAPASSSTPTRLSPINMLYFDAANNVVYGKIPDMVVDASGSR

SEQ ID NO: 405 - protein, 42 aa, Artificial Sequence
  Non-cyclic GFR-binding peptide
STPPTSSTPTRLSPINMLYFDSANNVVYGKIPDMVVDSSGSR

SEQ ID NO: 406 - protein, 42 aa, Artificial Sequence
  Non-cyclic GFR-binding peptide
HVPKPSSTPTKLSPINMLYFDDSSNVIYGKIPNMVVDSSGSH

SEQ ID NO: 407 - protein, 41 aa, Artificial Sequence
  Non-cyclic GFR-binding peptide
RVPSTSSTPTKTSPINMLYFDNGRVLLYGKIPMIVVDSGSL

SEQ ID NO: 408 - protein, 41 aa, Artificial Sequence
  Non-cyclic GFR-binding peptide
ASAAPSSTPTALSPINMLYFVGRKPKVYGKIPMIVVDSKSS

SEQ ID NO: 409 - protein, 41 aa, Artificial Sequence
  Non-cyclic GFR-binding peptide
ASASPSSTPTDLSPINMLYFIGKTPKIYGKIPMIVVDSKSS

SEQ ID NO: 410 - protein, 41 aa, Artificial Sequence
  Non-cyclic GFR-binding peptide
ASASPSSTPTDLSPINMLYFVGRTPKVYGKIPMVVVDSKSS

SEQ ID NO: 411 - protein, 42 aa, Artificial Sequence
  Non-cyclic GFR-binding peptide
KIPKASSVPTELSPINMLYFDENEKVVYGKIPDMVVEGSGSR

SEQ ID NO: 412 - protein, 42 aa, Artificial Sequence
  Non-cyclic GFR-binding peptide
GIPEPSSVPEKMSPINMLYFDENKNVVYGKIPNMTVESSASR

SEQ ID NO: 413 - protein, 42 aa, Artificial Sequence
  Non-cyclic GFR-binding peptide
SIPKASSVPTELSPINMLYFDEYDKVVYGKIPEMVVEGSGSR

SEQ ID NO: 414 - protein, 42 aa, Artificial Sequence
  Non-cyclic GFR-binding peptide
HVTKPTSAPTKLSPINMLYFDDSSNVIYGKIPNMVVRSSGSH

SEQ ID NO: 415 - protein, 42 aa, Artificial Sequence
  Non-cyclic GFR-binding peptide
YVPKPSSAPTKLSPINMLYFDDSSNVIYGKIPNMVVRSSGSH

SEQ ID NO: 416 - protein, 42 aa, Artificial Sequence
  Non-cyclic GFR-binding peptide
TVPKPSSAPTQLSPINMLYFDDSSNVIYGKIPNMVVRASGSH

SEQ ID NO: 417 - protein, 42 aa, Artificial Sequence
  Non-cyclic GFR-binding peptide
AVPKASSAPTKLSPINMLYFDSSNNVIYGKIPNMVVKASGSH

SEQ ID NO: 418 - protein, 43 aa, Artificial Sequence
  Non-cyclic GFR-binding peptide
KVGKASSVPTKLSPINMLYFDDMGVPTYGKIPEGMSVAESGSR

SEQ ID NO: 419 - protein, 42 aa, Artificial Sequence
  Non-cyclic GFR-binding peptide
KASKASSVPTKLSPINMLYFDKGVVTYYGKIPGMAVSESGSR

SEQ ID NO: 420 - protein, 42 aa, Artificial Sequence
  Non-cyclic GFR-binding peptide
AAPASSSVPARLSPINMLYFDAANNVVYGKIPDMVVEASGSR

SEQ ID NO: 421 - protein, 42 aa, Artificial Sequence
  Non-cyclic GFR-binding peptide
STPPTSSVPTRLSPINMLYFDSANNVVYGKIPDMVVESSGSR

SEQ ID NO: 422 - protein, 42 aa, Artificial Sequence
  Non-cyclic GFR-binding peptide
HVPKPSSAPTKLSPINMLYFDDSSNVIYGKIPNMVVRSSGSH

SEQ ID NO: 423 - protein, 41 aa, Artificial Sequence
  Non-cyclic GFR-binding peptide
RVPSTSSAPVKTSPINMLYFDNGRVLLYGKIPMIVEESGSL

SEQ ID NO: 424 - protein, 41 aa, Artificial Sequence
  Non-cyclic GFR-binding peptide
ASAAPSSVPQALSPINMLYFVGRKPKVYGKIPMIVRSSKSS

SEQ ID NO: 425 - protein, 41 aa, Artificial Sequence
  Non-cyclic GFR-binding peptide
ASASPSSVSQDLSPINMLYFIGKTPKIYGKIPMIVKSSKSS

SEQ ID NO: 426 - protein, 41 aa, Artificial Sequence
  Non-cyclic GFR-binding peptide
ASASPSSVPQDLSPINMLYFVGRTPKVYGKIPMVVKSSKSS

SEQ ID NO: 427 - protein, 44 aa, Artificial Sequence
  Non-cyclic GFR-binding peptide
NDEGLESVPTEESPINMLYFRIKPHQGQHYGKIPFLQHNKSESR

SEQ ID NO: 428 - protein, 44 aa, Artificial Sequence
  Non-cyclic GFR-binding peptide
NDEGLESVPTGQSPINMLYFRIKPHQGQHYGKIPLEEHSQSESR

SEQ ID NO: 429 - protein, 45 aa, Artificial Sequence
  Non-cyclic GFR-binding peptide
SSVKSQPSRVHHSPINMLYFEYVRKKPKLYGKIPRLEEHLESASA

SEQ ID NO: 430 - protein, 45 aa, Artificial Sequence
  Non-cyclic GFR-binding peptide
RNVQSRPTQVQLSPINMLYFEIVRKKPIFYGKIPTLEDHLASKSE

SEQ ID NO: 431 - protein, 42 aa, Artificial Sequence
  Non-cyclic GFR-binding peptide
KIPKASSVPAELSPISILYIDENEKVVYKQYEDMVVEGSGSR

SEQ ID NO: 432 - protein, 42 aa, Artificial Sequence
  Non-cyclic GFR-binding peptide
GIPEPSSVPAKMSPISILYIDENKNVVYKQYENMVVESSASR

SEQ ID NO: 433 - protein, 42 aa, Artificial Sequence
  Non-cyclic GFR-binding peptide
SIPKASSVPAELSPISILYIDEYDKVVYKQYEEMVVEGSGSR

SEQ ID NO: 434 - protein, 42 aa, Artificial Sequence
  Non-cyclic GFR-binding peptide
HVTKPTSVPAKLSPISILYIDDSSNVIYKQYENMVVESSGSH

SEQ ID NO: 435 - protein, 42 aa, Artificial Sequence
  Non-cyclic GFR-binding peptide
YVPKPSSVPAKLSPISILYIDDSSNVIYKQYENMVVESSGSH

SEQ ID NO: 436 - protein, 42 aa, Artificial Sequence
  Non-cyclic GFR-binding peptide
TVPKPSSVPAQLSPISILYIDDSSNVIYKQYENMVVEASGSH

SEQ ID NO: 437 - protein, 42 aa, Artificial Sequence
  Non-cyclic GFR-binding peptide
AVPKASSVPAKLSPISILYIDSSNNVIYKQYENMVVEASGSH

SEQ ID NO: 438 - protein, 43 aa, Artificial Sequence
  Non-cyclic GFR-binding peptide
KVGKASSVPAKLSPISILYIDDMGVPTYKQYEEGMSVVESGSR

SEQ ID NO: 439 - protein, 42 aa, Artificial Sequence
  Non-cyclic GFR-binding peptide
KASKASSVPAKLSPISILYIDKGVVTYYKQYEGMVVEESGSR

SEQ ID NO: 440 - protein, 42 aa, Artificial Sequence
  Non-cyclic GFR-binding peptide
GSAGPSSVPAKMSPISILYINDKQQIIYKQYEGMVVERSGSS

SEQ ID NO: 441 - protein, 42 aa, Artificial Sequence
  Non-cyclic GFR-binding peptide
STPPTSSVPARLSPISILYIDSANNVVYKQYEDMVVESSGSR

SEQ ID NO: 442 - protein, 42 aa, Artificial Sequence
  Non-cyclic GFR-binding peptide
HVPKPSSVPAKLSPISILYIDDSSNVIYKQYENMVVESSGSH

SEQ ID NO: 443 - protein, 41 aa, Artificial Sequence
  Non-cyclic GFR-binding peptide
RVPSTSSVPAKTSPISILYIDNGRVLLYKQYEMIVVESGSL

SEQ ID NO: 444 - protein, 41 aa, Artificial Sequence
  Non-cyclic GFR-binding peptide
ASAAPSSVPAALSPISILYIVGRKPKVYKQYEMIVVESKSS

SEQ ID NO: 445 - protein, 41 aa, Artificial Sequence
  Non-cyclic GFR-binding peptide
ASASPSSVPADLSPISILYIIGKTPKIYKQYEMIVVESKSS

SEQ ID NO: 446 - protein, 41 aa, Artificial Sequence
  Non-cyclic GFR-binding peptide
ASASPSSVPADLSPISILYIVGRTPKVYKQYEMVVVESKSS

SEQ ID NO: 447 - protein, 42 aa, Artificial Sequence
  Non-cyclic GFR-binding peptide
KIPKASSVPTELSPISILYIDENEKVVYKQYEDMVVEGSGSR

SEQ ID NO: 448 - protein, 42 aa, Artificial Sequence
  Non-cyclic GFR-binding peptide
GIPEPSSVPEKMSPISILYIDENKNVVYKQYENMTVESSASR

SEQ ID NO: 449 - protein, 42 aa, Artificial Sequence
  Non-cyclic GFR-binding peptide
SIPKASSVPTELSPISILYIDEYDKVVYKQYEEMVVEGSGSR

SEQ ID NO: 450 - protein, 42 aa, Artificial Sequence
  Non-cyclic GFR-binding peptide
HVTKPTSAPTKLSPISILYIDDSSNVIYKQYENMVVRSSGSH

SEQ ID NO: 451 - protein, 42 aa, Artificial Sequence
  Non-cyclic GFR-binding peptide
YVPKPSSAPTKLSPISILYIDDSSNVIYKQYENMVVRSSGSH

SEQ ID NO: 452 - protein, 42 aa, Artificial Sequence
  Non-cyclic GFR-binding peptide
TVPKPSSAPTQLSPISILYIDDSSNVIYKQYENMVVRASGSH

SEQ ID NO: 453 - protein, 42 aa, Artificial Sequence
  Non-cyclic GFR-binding peptide
AVPKASSAPTKLSPISILYIDSSNNVIYKQYENMVVKASGSH

SEQ ID NO: 454 - protein, 43 aa, Artificial Sequence
  Non-cyclic GFR-binding peptide
KVGKASSVPTKLSPISILYIDDMGVPTYKQYEEGMSVAESGSR

SEQ ID NO: 455 - protein, 42 aa, Artificial Sequence
  Non-cyclic GFR-binding peptide
KASKASSVPTKLSPISILYIDKGVVTYYKQYEGMAVSESGSR

SEQ ID NO: 456 - protein, 42 aa, Artificial Sequence
  Non-cyclic GFR-binding peptide
GSAGPSSTPTKMSPISILYINDKQQIIYKQYEGMVVDRSGSS

SEQ ID NO: 457 - protein, 42 aa, Artificial Sequence
  Non-cyclic GFR-binding peptide
STPPTSSVPTRLSPISILYIDSANNVVYKQYEDMVVESSGSR

SEQ ID NO: 458 - protein, 42 aa, Artificial Sequence
  Non-cyclic GFR-binding peptide
HVPKPSSAPTKLSPISILYIDDSSNVIYKQYENMVVRSSGSH

SEQ ID NO: 459 - protein, 41 aa, Artificial Sequence
  Non-cyclic GFR-binding peptide
RVPSTSSAPVKTSPISILYIDNGRVLLYKQYEMIVEESGSL

SEQ ID NO: 460 - protein, 41 aa, Artificial Sequence
  Non-cyclic GFR-binding peptide
ASAAPSSVPQALSPISILYIVGRKPKVYKQYEMIVRSSKSS

SEQ ID NO: 461 - protein, 41 aa, Artificial Sequence
  Non-cyclic GFR-binding peptide
ASASPSSVSQDLSPISILYIIGKTPKIYKQYEMIVKSSKSS

SEQ ID NO: 462 - protein, 41 aa, Artificial Sequence
  Non-cyclic GFR-binding peptide
ASASPSSVPQDLSPISILYIVGRTPKVYKQYEMVVKSSKSS

SEQ ID NO: 463 - protein, 44 aa, Artificial Sequence
  Non-cyclic GFR-binding peptide
NDEGLESVPTEESPISILYIRIKPHQGQHYKQYEFLQHNKSESR

SEQ ID NO: 464 - protein, 44 aa, Artificial Sequence
  Non-cyclic GFR-binding peptide
NDEGLESVPTGQSPISILYIRIKPHQGQHYKQYELEEHSQSESR

SEQ ID NO: 465 - protein, 45 aa, Artificial Sequence
  Non-cyclic GFR-binding peptide
SSVKSQPSRVHHSPISILYIEYVRKKPKLYKQYERLEEHLESASA

SEQ ID NO: 466 - protein, 45 aa, Artificial Sequence
  Non-cyclic GFR-binding peptide
RNVQSRPTQVQLSPISILYIEIVRKKPIFYKQYETLEDHLASKSE

SEQ ID NO: 467 - protein, 42 aa, Artificial Sequence
  Non-cyclic GFR-binding peptide
KIPKASSVPTELSPISILFIDENEKVVYKQYEDMVVEGSGSR

SEQ ID NO: 468 - protein, 42 aa, Artificial Sequence
  Non-cyclic GFR-binding peptide
GIPEPSSVPTKMSPISILFIDENKNVVYKQYENMVVESSASR

SEQ ID NO: 469 - protein, 42 aa, Artificial Sequence
  Non-cyclic GFR-binding peptide
SIPKASSVPTELSPISILFIDEYDKVVYKQYEEMVVEGSGSR

SEQ ID NO: 470 - protein, 42 aa, Artificial Sequence
  Non-cyclic GFR-binding peptide
HVTKPTSVPTKLSPISILFIDDSSNVIYKQYENMVVESSGSH

SEQ ID NO: 471 - protein, 42 aa, Artificial Sequence
  Non-cyclic GFR-binding peptide
YVPKPSSVPTKLSPISILFIDDSSNVIYKQYENMVVESSGSH

SEQ ID NO: 472 - protein, 42 aa, Artificial Sequence
  Non-cyclic GFR-binding peptide
TVPKPSSVPTQLSPISILFIDDSSNVIYKQYENMVVEASGSH

SEQ ID NO: 473 - protein, 42 aa, Artificial Sequence
  Non-cyclic GFR-binding peptide
AVPKASSVPTKLSPISILFIDSSNNVIYKQYENMVVEASGSH

SEQ ID NO: 474 - protein, 43 aa, Artificial Sequence
  Non-cyclic GFR-binding peptide
KVGKASSVPTKLSPISILFIDDMGVPTYKQYEEGMSVVESGSR

SEQ ID NO: 475 - protein, 42 aa, Artificial Sequence
  Non-cyclic GFR-binding peptide
KASKASSVPTKLSPISILFIDKGVVTYYKQYEGMVVEESGSR

SEQ ID NO: 476 - protein, 42 aa, Artificial Sequence
  Non-cyclic GFR-binding peptide
GSAGPSSVPTKMSPISILFINDKQQIIYKQYEGMVVERSGSS

SEQ ID NO: 477 - protein, 42 aa, Artificial Sequence
  Non-cyclic GFR-binding peptide
AAPASSSVPTRLSPISILFIDAANNVVYKQYEDMVVEASGSR

SEQ ID NO: 478 - protein, 42 aa, Artificial Sequence
  Non-cyclic GFR-binding peptide
HVPKPSSVPTKLSPISILFIDDSSNVIYKQYENMVVESSGSH

SEQ ID NO: 479 - protein, 41 aa, Artificial Sequence
  Non-cyclic GFR-binding peptide
RVPSTSSVPTKTSPISILFIDNGRVLLYKQYEMIVVESGSL

SEQ ID NO: 480 - protein, 41 aa, Artificial Sequence
  Non-cyclic GFR-binding peptide
ASAAPSSVPTALSPISILFIVGRKPKVYKQYEMIVVESKSS

SEQ ID NO: 481 - protein, 41 aa, Artificial Sequence
  Non-cyclic GFR-binding peptide
ASASPSSVPTDLSPISILFIIGKTPKIYKQYEMIVVESKSS

SEQ ID NO: 482 - protein, 41 aa, Artificial Sequence
  Non-cyclic GFR-binding peptide
ASASPSSVPTDLSPISILFIVGRTPKVYKQYEMVVVESKSS

SEQ ID NO: 483 - protein, 42 aa, Artificial Sequence
  Non-cyclic GFR-binding peptide
GIPEPSSVPEKMSPISILFIDENKNVVYKQYENMTVESSASR

SEQ ID NO: 484 - protein, 42 aa, Artificial Sequence
  Non-cyclic GFR-binding peptide
HVTKPTSAPTKLSPISILFIDDSSNVIYKQYENMVVRSSGSH

SEQ ID NO: 485 - protein, 42 aa, Artificial Sequence
  Non-cyclic GFR-binding peptide
YVPKPSSAPTKLSPISILFIDDSSNVIYKQYENMVVRSSGSH

SEQ ID NO: 486 - protein, 42 aa, Artificial Sequence
  Non-cyclic GFR-binding peptide
TVPKPSSAPTQLSPISILFIDDSSNVIYKQYENMVVRASGSH

SEQ ID NO: 487 - protein, 42 aa, Artificial Sequence
  Non-cyclic GFR-binding peptide
AVPKASSAPTKLSPISILFIDSSNNVIYKQYENMVVKASGSH

SEQ ID NO: 488 - protein, 43 aa, Artificial Sequence
  Non-cyclic GFR-binding peptide
KVGKASSVPTKLSPISILFIDDMGVPTYKQYEEGMSVAESGSR

SEQ ID NO: 489 - protein, 42 aa, Artificial Sequence
  Non-cyclic GFR-binding peptide
KASKASSVPTKLSPISILFIDKGVVTYYKQYEGMAVSESGSR

SEQ ID NO: 490 - protein, 42 aa, Artificial Sequence
  Non-cyclic GFR-binding peptide
GSAGPSSTPTKMSPISILFINDKQQIIYKQYEGMVVDRSGSS

SEQ ID NO: 491 - protein, 42 aa, Artificial Sequence
  Non-cyclic GFR-binding peptide
AAPASSSVPARLSPISILFIDAANNVVYKQYEDMVVEASGSR

SEQ ID NO: 492 - protein, 42 aa, Artificial Sequence
  Non-cyclic GFR-binding peptide
HVPKPSSAPTKLSPISILFIDDSSNVIYKQYENMVVRSSGSH

SEQ ID NO: 493 - protein, 41 aa, Artificial Sequence
  Non-cyclic GFR-binding peptide
RVPSTSSAPVKTSPISILFIDNGRVLLYKQYEMIVEESGSL

SEQ ID NO: 494 - protein, 41 aa, Artificial Sequence
  Non-cyclic GFR-binding peptide
ASAAPSSVPQALSPISILFIVGRKPKVYKQYEMIVRSSKSS

SEQ ID NO: 495 - protein, 41 aa, Artificial Sequence
  Non-cyclic GFR-binding peptide
ASASPSSVSQDLSPISILFIIGKTPKIYKQYEMIVKSSKSS

SEQ ID NO: 496 - protein, 41 aa, Artificial Sequence
  Non-cyclic GFR-binding peptide
ASASPSSVPQDLSPISILFIVGRTPKVYKQYEMVVKSSKSS

SEQ ID NO: 497 - protein, 44 aa, Artificial Sequence
  Non-cyclic GFR-binding peptide
NDEGLESVPTEESPISILFIRIKPHQGQHYKQYEFLQHNKSESR

SEQ ID NO: 498 - protein, 44 aa, Artificial Sequence
  Non-cyclic GFR-binding peptide
NDEGLESVPTGQSPISILFIRIKPHQGQHYKQYELEEHSQSESR

SEQ ID NO: 499 - protein, 45 aa, Artificial Sequence
  Non-cyclic GFR-binding peptide
SSVKSQPSRVHHSPISILFIEYVRKKPKLYKQYERLEEHLESASA

SEQ ID NO: 500 - protein, 45 aa, Artificial Sequence
  Non-cyclic GFR-binding peptide
RNVQSRPTQVQLSPISILFIEIVRKKPIFYKQYETLEDHLASKSE

SEQ ID NO: 501 - protein, 42 aa, Artificial Sequence
  Non-cyclic GFR-binding peptide
KIPKASSAPVELKPLSMLYVDENEKVVDHHKDDMVEEGSGSR

SEQ ID NO: 502 - protein, 42 aa, Artificial Sequence
  Non-cyclic GFR-binding peptide
GIPEPSSAPVKMKPLSMLYVDENKNVVDHHKDNMVEESSASR

SEQ ID NO: 503 - protein, 42 aa, Artificial Sequence
  Non-cyclic GFR-binding peptide
SIPKASSAPVELKPLSMLYVDEYDKVVDHHKDEMVEEGSGSR

SEQ ID NO: 504 - protein, 42 aa, Artificial Sequence
  Non-cyclic GFR-binding peptide
HVTKPTSAPVKLKPLSMLYVDDSSNVIDHHKDNMVEESSGSH

SEQ ID NO: 505 - protein, 42 aa, Artificial Sequence
  Non-cyclic GFR-binding peptide
YVPKPSSAPVKLKPLSMLYVDDSSNVIDHHKDNMVEESSGSH

SEQ ID NO: 506 - protein, 42 aa, Artificial Sequence
  Non-cyclic GFR-binding peptide
TVPKPSSAPVQLKPLSMLYVDDSSNVIDHHKDNMVEEASGSH

SEQ ID NO: 507 - protein, 42 aa, Artificial Sequence
  Non-cyclic GFR-binding peptide
AVPKASSAPVKLKPLSMLYVDSSNNVIDHHKDNMVEEASGSH

SEQ ID NO: 508 - protein, 43 aa, Artificial Sequence
  Non-cyclic GFR-binding peptide
KVGKASSAPVKLKPLSMLYVDDMGVPTDHHKDEGMSVEESGSR

SEQ ID NO: 509 - protein, 42 aa, Artificial Sequence
  Non-cyclic GFR-binding peptide
KASKASSAPVKLKPLSMLYVDKGVVTYDHHKDGMVEEESGSR

SEQ ID NO: 510 - protein, 42 aa, Artificial Sequence
  Non-cyclic GFR-binding peptide
GSAGPSSAPVKMKPLSMLYVNDKQQIIDHHKDGMVEERSGSS

SEQ ID NO: 511 - protein, 42 aa, Artificial Sequence
  Non-cyclic GFR-binding peptide
AAPASSSAPVRLKPLSMLYVDAANNVVDHHKDDMVEEASGSR

SEQ ID NO: 512 - protein, 42 aa, Artificial Sequence
  Non-cyclic GFR-binding peptide
STPPTSSAPVRLKPLSMLYVDSANNVVDHHKDDMVEESSGSR

SEQ ID NO: 513 - protein, 42 aa, Artificial Sequence
  Non-cyclic GFR-binding peptide
HVPKPSSAPVKLKPLSMLYVDDSSNVIDHHKDNMVEESSGSH

SEQ ID NO: 514 - protein, 41 aa, Artificial Sequence
  Non-cyclic GFR-binding peptide
ASAAPSSAPVALKPLSMLYVVGRKPKVDHHKDMIVEESKSS

SEQ ID NO: 515 - protein, 41 aa, Artificial Sequence
  Non-cyclic GFR-binding peptide
ASASPSSAPVDLKPLSMLYVIGKTPKIDHHKDMIVEESKSS

SEQ ID NO: 516 - protein, 41 aa, Artificial Sequence
  Non-cyclic GFR-binding peptide
ASASPSSAPVDLKPLSMLYVVGRTPKVDHHKDMVVEESKSS

SEQ ID NO: 517 - protein, 42 aa, Artificial Sequence
  Non-cyclic GFR-binding peptide
KIPKASSVPTELKPLSMLYVDENEKVVDHHKDDMVVEGSGSR

SEQ ID NO: 518 - protein, 42 aa, Artificial Sequence
  Non-cyclic GFR-binding peptide
GIPEPSSVPEKMKPLSMLYVDENKNVVDHHKDNMTVESSASR

SEQ ID NO: 519 - protein, 42 aa, Artificial Sequence
  Non-cyclic GFR-binding peptide
SIPKASSVPTELKPLSMLYVDEYDKVVDHHKDEMVVEGSGSR

SEQ ID NO: 520 - protein, 42 aa, Artificial Sequence
  Non-cyclic GFR-binding peptide
HVTKPTSAPTKLKPLSMLYVDDSSNVIDHHKDNMVVRSSGSH

SEQ ID NO: 521 - protein, 42 aa, Artificial Sequence
  Non-cyclic GFR-binding peptide
YVPKPSSAPTKLKPLSMLYVDDSSNVIDHHKDNMVVRSSGSH

SEQ ID NO: 522 - protein, 42 aa, Artificial Sequence
  Non-cyclic GFR-binding peptide
TVPKPSSAPTQLKPLSMLYVDDSSNVIDHHKDNMVVRASGSH

SEQ ID NO: 523 - protein, 42 aa, Artificial Sequence
  Non-cyclic GFR-binding peptide
AVPKASSAPTKLKPLSMLYVDSSNNVIDHHKDNMVVKASGSH

SEQ ID NO: 524 - protein, 43 aa, Artificial Sequence
  Non-cyclic GFR-binding peptide
KVGKASSVPTKLKPLSMLYVDDMGVPTDHHKDEGMSVAESGSR

SEQ ID NO: 525 - protein, 42 aa, Artificial Sequence
  Non-cyclic GFR-binding peptide
KASKASSVPTKLKPLSMLYVDKGVVTYDHHKDGMAVSESGSR

SEQ ID NO: 526 - protein, 42 aa, Artificial Sequence
  Non-cyclic GFR-binding peptide
GSAGPSSTPTKMKPLSMLYVNDKQQIIDHHKDGMVVDRSGSS

SEQ ID NO: 527 - protein, 42 aa, Artificial Sequence
  Non-cyclic GFR-binding peptide
AAPASSSVPARLKPLSMLYVDAANNVVDHHKDDMVVEASGSR

SEQ ID NO: 528 - protein, 42 aa, Artificial Sequence
  Non-cyclic GFR-binding peptide
STPPTSSVPTRLKPLSMLYVDSANNVVDHHKDDMVVESSGSR

SEQ ID NO: 529 - protein, 42 aa, Artificial Sequence
  Non-cyclic GFR-binding peptide
HVPKPSSAPTKLKPLSMLYVDDSSNVIDHHKDNMVVRSSGSH

SEQ ID NO: 530 - protein, 41 aa, Artificial Sequence
  Non-cyclic GFR-binding peptide
ASAAPSSVPQALKPLSMLYVVGRKPKVDHHKDMIVRSSKSS

SEQ ID NO: 531 - protein, 41 aa, Artificial Sequence
  Non-cyclic GFR-binding peptide
ASASPSSVSQDLKPLSMLYVIGKTPKIDHHKDMIVKSSKSS

SEQ ID NO: 532 - protein, 41 aa, Artificial Sequence
  Non-cyclic GFR-binding peptide
ASASPSSVPQDLKPLSMLYVVGRTPKVDHHKDMVVKSSKSS

SEQ ID NO: 533 - protein, 44 aa, Artificial Sequence
  Non-cyclic GFR-binding peptide
NDEGLESVPTEEKPLSMLYVRIKPHQGQHDHHKDFLQHNKSESR

SEQ ID NO: 534 - protein, 44 aa, Artificial Sequence
  Non-cyclic GFR-binding peptide
NDEGLESVPTGQKPLSMLYVRIKPHQGQHDHHKDLEEHSQSESR

SEQ ID NO: 535 - protein, 45 aa, Artificial Sequence
  Non-cyclic GFR-binding peptide
SSVKSQPSRVHHKPLSMLYVEYVRKKPKLDHHKDRLEEHLESASA

SEQ ID NO: 536 - protein, 45 aa, Artificial Sequence
  Non-cyclic GFR-binding peptide
RNVQSRPTQVQLKPLSMLYVEIVRKKPIFDHHKDTLEDHLASKSE

SEQ ID NO: 537 - protein, 42 aa, Artificial Sequence
  Non-cyclic GFR-binding peptide
KIPKASSVPQELEPLPIVYYDENEKVVEQLSNDMVRSGSGSR

SEQ ID NO: 538 - protein, 42 aa, Artificial Sequence
  Non-cyclic GFR-binding peptide
GIPEPSSVPQKMEPLPIVYYDENKNVVEQLSNNMVRSSSASR

SEQ ID NO: 539 - protein, 42 aa, Artificial Sequence
  Non-cyclic GFR-binding peptide
SIPKASSVPQELEPLPIVYYDEYDKVVEQLSNEMVRSGSGSR

SEQ ID NO: 540 - protein, 42 aa, Artificial Sequence
  Non-cyclic GFR-binding peptide
HVTKPTSVPQKLEPLPIVYYDDSSNVIEQLSNNMVRSSSGSH

SEQ ID NO: 541 - protein, 42 aa, Artificial Sequence
  Non-cyclic GFR-binding peptide
YVPKPSSVPQKLEPLPIVYYDDSSNVIEQLSNNMVRSSSGSH

SEQ ID NO: 542 - protein, 42 aa, Artificial Sequence
  Non-cyclic GFR-binding peptide
TVPKPSSVPQQLEPLPIVYYDDSSNVIEQLSNNMVRSASGSH

SEQ ID NO: 543 - protein, 42 aa, Artificial Sequence
  Non-cyclic GFR-binding peptide
AVPKASSVPQKLEPLPIVYYDSSNNVIEQLSNNMVRSASGSH

SEQ ID NO: 544 - protein, 43 aa, Artificial Sequence
  Non-cyclic GFR-binding peptide
KVGKASSVPQKLEPLPIVYYDDMGVPTEQLSNEGMSVRSSGSR

SEQ ID NO: 545 - protein, 42 aa, Artificial Sequence
  Non-cyclic GFR-binding peptide
KASKASSVPQKLEPLPIVYYDKGVVTYEQLSNGMVRSESGSR

SEQ ID NO: 546 - protein, 42 aa, Artificial Sequence
  Non-cyclic GFR-binding peptide
GSAGPSSVPQKMEPLPIVYYNDKQQIIEQLSNGMVRSRSGSS

SEQ ID NO: 547 - protein, 42 aa, Artificial Sequence
  Non-cyclic GFR-binding peptide
AAPASSSVPQRLEPLPIVYYDAANNVVEQLSNDMVRSASGSR

SEQ ID NO: 548 - protein, 42 aa, Artificial Sequence
  Non-cyclic GFR-binding peptide
STPPTSSVPQRLEPLPIVYYDSANNVVEQLSNDMVRSSSGSR

SEQ ID NO: 549 - protein, 42 aa, Artificial Sequence
  Non-cyclic GFR-binding peptide
HVPKPSSVPQKLEPLPIVYYDDSSNVIEQLSNNMVRSSSGSH

SEQ ID NO: 550 - protein, 41 aa, Artificial Sequence
  Non-cyclic GFR-binding peptide
RVPSTSSVPQKTEPLPIVYYDNGRVLLEQLSNMIVRSSGSL

SEQ ID NO: 551 - protein, 41 aa, Artificial Sequence
  Non-cyclic GFR-binding peptide
ASASPSSVPQDLEPLPIVYYIGKTPKIEQLSNMIVRSSKSS

SEQ ID NO: 552 - protein, 41 aa, Artificial Sequence
  Non-cyclic GFR-binding peptide
ASASPSSVPQDLEPLPIVYYVGRTPKVEQLSNMVVRSSKSS

SEQ ID NO: 553 - protein, 42 aa, Artificial Sequence
  Non-cyclic GFR-binding peptide
KIPKASSVPTELEPLPIVYYDENEKVVEQLSNDMVVEGSGSR

SEQ ID NO: 554 - protein, 42 aa, Artificial Sequence
  Non-cyclic GFR-binding peptide
GIPEPSSVPEKMEPLPIVYYDENKNVVEQLSNNMTVESSASR

SEQ ID NO: 555 - protein, 42 aa, Artificial Sequence
  Non-cyclic GFR-binding peptide
SIPKASSVPTELEPLPIVYYDEYDKVVEQLSNEMVVEGSGSR

SEQ ID NO: 556 - protein, 42 aa, Artificial Sequence
  Non-cyclic GFR-binding peptide
HVTKPTSAPTKLEPLPIVYYDDSSNVIEQLSNNMVVRSSGSH

SEQ ID NO: 557 - protein, 42 aa, Artificial Sequence
  Non-cyclic GFR-binding peptide
YVPKPSSAPTKLEPLPIVYYDDSSNVIEQLSNNMVVRSSGSH

SEQ ID NO: 558 - protein, 42 aa, Artificial Sequence
  Non-cyclic GFR-binding peptide
TVPKPSSAPTQLEPLPIVYYDDSSNVIEQLSNNMVVRASGSH

SEQ ID NO: 559 - protein, 42 aa, Artificial Sequence
  Non-cyclic GFR-binding peptide
AVPKASSAPTKLEPLPIVYYDSSNNVIEQLSNNMVVKASGSH

SEQ ID NO: 560 - protein, 43 aa, Artificial Sequence
  Non-cyclic GFR-binding peptide
KVGKASSVPTKLEPLPIVYYDDMGVPTEQLSNEGMSVAESGSR

SEQ ID NO: 561 - protein, 42 aa, Artificial Sequence
  Non-cyclic GFR-binding peptide
KASKASSVPTKLEPLPIVYYDKGVVTYEQLSNGMAVSESGSR

SEQ ID NO: 562 - protein, 42 aa, Artificial Sequence
  Non-cyclic GFR-binding peptide
GSAGPSSTPTKMEPLPIVYYNDKQQIIEQLSNGMVVDRSGSS

SEQ ID NO: 563 - protein, 42 aa, Artificial Sequence
  Non-cyclic GFR-binding peptide
AAPASSSVPARLEPLPIVYYDAANNVVEQLSNDMVVEASGSR

SEQ ID NO: 564 - protein, 42 aa, Artificial Sequence
  Non-cyclic GFR-binding peptide
STPPTSSVPTRLEPLPIVYYDSANNVVEQLSNDMVVESSGSR

SEQ ID NO: 565 - protein, 42 aa, Artificial Sequence
  Non-cyclic GFR-binding peptide
HVPKPSSAPTKLEPLPIVYYDDSSNVIEQLSNNMVVRSSGSH

SEQ ID NO: 566 - protein, 41 aa, Artificial Sequence
  Non-cyclic GFR-binding peptide
RVPSTSSAPVKTEPLPIVYYDNGRVLLEQLSNMIVEESGSL

SEQ ID NO: 567 - protein, 41 aa, Artificial Sequence
  Non-cyclic GFR-binding peptide
ASASPSSVSQDLEPLPIVYYIGKTPKIEQLSNMIVKSSKSS

SEQ ID NO: 568 - protein, 41 aa, Artificial Sequence
  Non-cyclic GFR-binding peptide
ASASPSSVPQDLEPLPIVYYVGRTPKVEQLSNMVVKSSKSS

SEQ ID NO: 569 - protein, 44 aa, Artificial Sequence
  Non-cyclic GFR-binding peptide
NDEGLESVPTEEEPLPIVYYRIKPHQGQHEQLSNFLQHNKSESR

SEQ ID NO: 570 - protein, 44 aa, Artificial Sequence
  Non-cyclic GFR-binding peptide
NDEGLESVPTGQEPLPIVYYRIKPHQGQHEQLSNLEEHSQSESR

SEQ ID NO: 571 - protein, 45 aa, Artificial Sequence
  Non-cyclic GFR-binding peptide
SSVKSQPSRVHHEPLPIVYYEYVRKKPKLEQLSNRLEEHLESASA

SEQ ID NO: 572 - protein, 45 aa, Artificial Sequence
  Non-cyclic GFR-binding peptide
RNVQSRPTQVQLEPLPIVYYEIVRKKPIFEQLSNTLEDHLASKSE

SEQ ID NO: 573 - protein, 42 aa, Artificial Sequence
  Non-cyclic GFR-binding peptide
KIPKASSVSQELEPLTILYYDENEKVVEQLSNDMVKSGSGSR

SEQ ID NO: 574 - protein, 42 aa, Artificial Sequence
  Non-cyclic GFR-binding peptide
GIPEPSSVSQKMEPLTILYYDENKNVVEQLSNNMVKSSSASR

SEQ ID NO: 575 - protein, 42 aa, Artificial Sequence
  Non-cyclic GFR-binding peptide
SIPKASSVSQELEPLTILYYDEYDKVVEQLSNEMVKSGSGSR

SEQ ID NO: 576 - protein, 42 aa, Artificial Sequence
  Non-cyclic GFR-binding peptide
HVTKPTSVSQKLEPLTILYYDDSSNVIEQLSNNMVKSSSGSH

SEQ ID NO: 577 - protein, 42 aa, Artificial Sequence
  Non-cyclic GFR-binding peptide
YVPKPSSVSQKLEPLTILYYDDSSNVIEQLSNNMVKSSSGSH

SEQ ID NO: 578 - protein, 42 aa, Artificial Sequence
  Non-cyclic GFR-binding peptide
TVPKPSSVSQQLEPLTILYYDDSSNVIEQLSNNMVKSASGSH

SEQ ID NO: 579 - protein, 42 aa, Artificial Sequence
  Non-cyclic GFR-binding peptide
AVPKASSVSQKLEPLTILYYDSSNNVIEQLSNNMVKSASGSH

SEQ ID NO: 580 - protein, 43 aa, Artificial Sequence
  Non-cyclic GFR-binding peptide
KVGKASSVSQKLEPLTILYYDDMGVPTEQLSNEGMSVKSSGSR

SEQ ID NO: 581 - protein, 42 aa, Artificial Sequence
  Non-cyclic GFR-binding peptide
KASKASSVSQKLEPLTILYYDKGVVTYEQLSNGMVKSESGSR

SEQ ID NO: 582 - protein, 42 aa, Artificial Sequence
  Non-cyclic GFR-binding peptide
GSAGPSSVSQKMEPLTILYYNDKQQIIEQLSNGMVKSRSGSS

SEQ ID NO: 583 - protein, 42 aa, Artificial Sequence
  Non-cyclic GFR-binding peptide
AAPASSSVSQRLEPLTILYYDAANNVVEQLSNDMVKSASGSR

SEQ ID NO: 584 - protein, 42 aa, Artificial Sequence
  Non-cyclic GFR-binding peptide
STPPTSSVSQRLEPLTILYYDSANNVVEQLSNDMVKSSSGSR

SEQ ID NO: 585 - protein, 42 aa, Artificial Sequence
  Non-cyclic GFR-binding peptide
HVPKPSSVSQKLEPLTILYYDDSSNVIEQLSNNMVKSSSGSH

SEQ ID NO: 586 - protein, 41 aa, Artificial Sequence
  Non-cyclic GFR-binding peptide
RVPSTSSVSQKTEPLTILYYDNGRVLLEQLSNMIVKSSGSL

SEQ ID NO: 587 - protein, 41 aa, Artificial Sequence
  Non-cyclic GFR-binding peptide
ASAAPSSVSQALEPLTILYYVGRKPKVEQLSNMIVKSSKSS

SEQ ID NO: 588 - protein, 41 aa, Artificial Sequence
  Non-cyclic GFR-binding peptide
ASASPSSVSQDLEPLTILYYVGRTPKVEQLSNMVVKSSKSS

SEQ ID NO: 589 - protein, 42 aa, Artificial Sequence
  Non-cyclic GFR-binding peptide
KIPKASSVPTELEPLTILYYDENEKVVEQLSNDMVVEGSGSR

SEQ ID NO: 590 - protein, 42 aa, Artificial Sequence
  Non-cyclic GFR-binding peptide
GIPEPSSVPEKMEPLTILYYDENKNVVEQLSNNMTVESSASR

SEQ ID NO: 591 - protein, 42 aa, Artificial Sequence
  Non-cyclic GFR-binding peptide
SIPKASSVPTELEPLTILYYDEYDKVVEQLSNEMVVEGSGSR

SEQ ID NO: 592 - protein, 42 aa, Artificial Sequence
  Non-cyclic GFR-binding peptide
HVTKPTSAPTKLEPLTILYYDDSSNVIEQLSNNMVVRSSGSH

SEQ ID NO: 593 - protein, 42 aa, Artificial Sequence
  Non-cyclic GFR-binding peptide
YVPKPSSAPTKLEPLTILYYDDSSNVIEQLSNNMVVRSSGSH

SEQ ID NO: 594 - protein, 42 aa, Artificial Sequence
  Non-cyclic GFR-binding peptide
TVPKPSSAPTQLEPLTILYYDDSSNVIEQLSNNMVVRASGSH

SEQ ID NO: 595 - protein, 42 aa, Artificial Sequence
  Non-cyclic GFR-binding peptide
AVPKASSAPTKLEPLTILYYDSSNNVIEQLSNNMVVKASGSH

SEQ ID NO: 596 - protein, 43 aa, Artificial Sequence
  Non-cyclic GFR-binding peptide
KVGKASSVPTKLEPLTILYYDDMGVPTEQLSNEGMSVAESGSR

SEQ ID NO: 597 - protein, 42 aa, Artificial Sequence
  Non-cyclic GFR-binding peptide
KASKASSVPTKLEPLTILYYDKGVVTYEQLSNGMAVSESGSR

SEQ ID NO: 598 - protein, 42 aa, Artificial Sequence
  Non-cyclic GFR-binding peptide
GSAGPSSTPTKMEPLTILYYNDKQQIIEQLSNGMVVDRSGSS

SEQ ID NO: 599 - protein, 42 aa, Artificial Sequence
  Non-cyclic GFR-binding peptide
AAPASSSVPARLEPLTILYYDAANNVVEQLSNDMVVEASGSR

SEQ ID NO: 600 - protein, 42 aa, Artificial Sequence
  Non-cyclic GFR-binding peptide
STPPTSSVPTRLEPLTILYYDSANNVVEQLSNDMVVESSGSR

SEQ ID NO: 601 - protein, 42 aa, Artificial Sequence
  Non-cyclic GFR-binding peptide
HVPKPSSAPTKLEPLTILYYDDSSNVIEQLSNNMVVRSSGSH

SEQ ID NO: 602 - protein, 41 aa, Artificial Sequence
  Non-cyclic GFR-binding peptide
RVPSTSSAPVKTEPLTILYYDNGRVLLEQLSNMIVEESGSL

SEQ ID NO: 603 - protein, 41 aa, Artificial Sequence
  Non-cyclic GFR-binding peptide
ASAAPSSVPQALEPLTILYYVGRKPKVEQLSNMIVRSSKSS

SEQ ID NO: 604 - protein, 44 aa, Artificial Sequence
  Non-cyclic GFR-binding peptide
NDEGLESVPTEEEPLTILYYRIKPHQGQHEQLSNFLQHNKSESR

SEQ ID NO: 605 - protein, 44 aa, Artificial Sequence
  Non-cyclic GFR-binding peptide
NDEGLESVPTGQEPLTILYYRIKPHQGQHEQLSNLEEHSQSESR

SEQ ID NO: 606 - protein, 45 aa, Artificial Sequence
  Non-cyclic GFR-binding peptide
SSVKSQPSRVHHEPLTILYYEYVRKKPKLEQLSNRLEEHLESASA

SEQ ID NO: 607 - protein, 45 aa, Artificial Sequence
  Non-cyclic GFR-binding peptide
RNVQSRPTQVQLEPLTILYYEIVRKKPIFEQLSNTLEDHLASKSE

SEQ ID NO: 608 - protein, 42 aa, Artificial Sequence
  Non-cyclic GFR-binding peptide
KIPKASSVPQELEPLTILYYDENEKVVEQLSNDMVKSGSGSR

SEQ ID NO: 609 - protein, 42 aa, Artificial Sequence
  Non-cyclic GFR-binding peptide
GIPEPSSVPQKMEPLTILYYDENKNVVEQLSNNMVKSSSASR

SEQ ID NO: 610 - protein, 42 aa, Artificial Sequence
  Non-cyclic GFR-binding peptide
SIPKASSVPQELEPLTILYYDEYDKVVEQLSNEMVKSGSGSR

SEQ ID NO: 611 - protein, 42 aa, Artificial Sequence
  Non-cyclic GFR-binding peptide
HVTKPTSVPQKLEPLTILYYDDSSNVIEQLSNNMVKSSSGSH

SEQ ID NO: 612 - protein, 42 aa, Artificial Sequence
  Non-cyclic GFR-binding peptide
YVPKPSSVPQKLEPLTILYYDDSSNVIEQLSNNMVKSSSGSH

SEQ ID NO: 613 - protein, 42 aa, Artificial Sequence
  Non-cyclic GFR-binding peptide
TVPKPSSVPQQLEPLTILYYDDSSNVIEQLSNNMVKSASGSH

SEQ ID NO: 614 - protein, 42 aa, Artificial Sequence
  Non-cyclic GFR-binding peptide
AVPKASSVPQKLEPLTILYYDSSNNVIEQLSNNMVKSASGSH

SEQ ID NO: 615 - protein, 43 aa, Artificial Sequence
  Non-cyclic GFR-binding peptide
KVGKASSVPQKLEPLTILYYDDMGVPTEQLSNEGMSVKSSGSR

SEQ ID NO: 616 - protein, 42 aa, Artificial Sequence
  Non-cyclic GFR-binding peptide
KASKASSVPQKLEPLTILYYDKGVVTYEQLSNGMVKSESGSR

SEQ ID NO: 617 - protein, 42 aa, Artificial Sequence
  Non-cyclic GFR-binding peptide
GSAGPSSVPQKMEPLTILYYNDKQQIIEQLSNGMVKSRSGSS

SEQ ID NO: 618 - protein, 42 aa, Artificial Sequence
  Non-cyclic GFR-binding peptide
AAPASSSVPQRLEPLTILYYDAANNVVEQLSNDMVKSASGSR

SEQ ID NO: 619 - protein, 42 aa, Artificial Sequence
  Non-cyclic GFR-binding peptide
STPPTSSVPQRLEPLTILYYDSANNVVEQLSNDMVKSSSGSR

SEQ ID NO: 620 - protein, 42 aa, Artificial Sequence
  Non-cyclic GFR-binding peptide
HVPKPSSVPQKLEPLTILYYDDSSNVIEQLSNNMVKSSSGSH

SEQ ID NO: 621 - protein, 41 aa, Artificial Sequence
  Non-cyclic GFR-binding peptide
RVPSTSSVPQKTEPLTILYYDNGRVLLEQLSNMIVKSSGSL

SEQ ID NO: 622 - protein, 41 aa, Artificial Sequence
  Non-cyclic GFR-binding peptide
ASAAPSSVPQALEPLTILYYVGRKPKVEQLSNMIVKSSKSS

SEQ ID NO: 623 - protein, 41 aa, Artificial Sequence
  Non-cyclic GFR-binding peptide
ASASPSSVPQDLEPLTILYYIGKTPKIEQLSNMIVKSSKSS

SEQ ID NO: 624 - protein, 44 aa, Artificial Sequence
  Non-cyclic GFR-binding peptide
NDEGLESVPTGQSNITMQIMRIKPHQGQHIGEMSLEQHNQSESR

SEQ ID NO: 625 - protein, 42 aa, Artificial Sequence
  Non-cyclic GFR-binding peptide
KIPKASSVPTELSNITMQIMDENEKVVIGEMSDMVVEGSGSR

SEQ ID NO: 626 - protein, 42 aa, Artificial Sequence
  Non-cyclic GFR-binding peptide
GIPEPSSVPEKMSNITMQIMDENKNVVIGEMSNMTVESSASR

SEQ ID NO: 627 - protein, 42 aa, Artificial Sequence
  Non-cyclic GFR-binding peptide
SIPKASSVPTELSNITMQIMDEYDKVVIGEMSEMVVEGSGSR

SEQ ID NO: 628 - protein, 42 aa, Artificial Sequence
  Non-cyclic GFR-binding peptide
HVTKPTSAPTKLSNITMQIMDDSSNVIIGEMSNMVVRSSGSH

SEQ ID NO: 629 - protein, 42 aa, Artificial Sequence
  Non-cyclic GFR-binding peptide
YVPKPSSAPTKLSNITMQIMDDSSNVIIGEMSNMVVRSSGSH

SEQ ID NO: 630 - protein, 42 aa, Artificial Sequence
  Non-cyclic GFR-binding peptide
TVPKPSSAPTQLSNITMQIMDDSSNVIIGEMSNMVVRASGSH

SEQ ID NO: 631 - protein, 42 aa, Artificial Sequence
  Non-cyclic GFR-binding peptide
AVPKASSAPTKLSNITMQIMDSSNNVIIGEMSNMVVKASGSH

SEQ ID NO: 632 - protein, 43 aa, Artificial Sequence
  Non-cyclic GFR-binding peptide
KVGKASSVPTKLSNITMQIMDDMGVPTIGEMSEGMSVAESGSR

SEQ ID NO: 633 - protein, 42 aa, Artificial Sequence
  Non-cyclic GFR-binding peptide
KASKASSVPTKLSNITMQIMDKGVVTYIGEMSGMAVSESGSR

SEQ ID NO: 634 - protein, 42 aa, Artificial Sequence
  Non-cyclic GFR-binding peptide
GSAGPSSTPTKMSNITMQIMNDKQQIIIGEMSGMVVDRSGSS

SEQ ID NO: 635 - protein, 42 aa, Artificial Sequence
  Non-cyclic GFR-binding peptide
AAPASSSVPARLSNITMQIMDAANNVVIGEMSDMVVEASGSR

SEQ ID NO: 636 - protein, 42 aa, Artificial Sequence
  Non-cyclic GFR-binding peptide
STPPTSSVPTRLSNITMQIMDSANNVVIGEMSDMVVESSGSR

SEQ ID NO: 637 - protein, 42 aa, Artificial Sequence
  Non-cyclic GFR-binding peptide
HVPKPSSAPTKLSNITMQIMDDSSNVIIGEMSNMVVRSSGSH

SEQ ID NO: 638 - protein, 41 aa, Artificial Sequence
  Non-cyclic GFR-binding peptide
RVPSTSSAPVKTSNITMQIMDNGRVLLIGEMSMIVEESGSL

SEQ ID NO: 639 - protein, 41 aa, Artificial Sequence
  Non-cyclic GFR-binding peptide
ASAAPSSVPQALSNITMQIMVGRKPKVIGEMSMIVRSSKSS

SEQ ID NO: 640 - protein, 41 aa, Artificial Sequence
  Non-cyclic GFR-binding peptide
ASASPSSVSQDLSNITMQIMIGKTPKIIGEMSMIVKSSKSS

SEQ ID NO: 641 - protein, 41 aa, Artificial Sequence
  Non-cyclic GFR-binding peptide
ASASPSSVPQDLSNITMQIMVGRTPKVIGEMSMVVKSSKSS

SEQ ID NO: 642 - protein, 44 aa, Artificial Sequence
  Non-cyclic GFR-binding peptide
NDEGLESVPTGQSNITMQIMRIKPHQGQHIGEMSLEEHSQSESR

SEQ ID NO: 643 - protein, 45 aa, Artificial Sequence
  Non-cyclic GFR-binding peptide
SSVKSQPSRVHHSNITMQIMEYVRKKPKLIGEMSRLEEHLESASA

SEQ ID NO: 644 - protein, 45 aa, Artificial Sequence
  Non-cyclic GFR-binding peptide
RNVQSRPTQVQLSNITMQIMEIVRKKPIFIGEMSTLEDHLASKSE

SEQ ID NO: 645 - protein, 44 aa, Artificial Sequence
  Non-cyclic GFR-binding peptide
NDEGLESVPTEESNITMQIMRIKPHQGQHLGEMSFLEHSKSESR

SEQ ID NO: 646 - protein, 42 aa, Artificial Sequence
  Non-cyclic GFR-binding peptide
KIPKASSVPTELSNITMQIMDENEKVVLGEMSDMVVEGSGSR

SEQ ID NO: 647 - protein, 42 aa, Artificial Sequence
  Non-cyclic GFR-binding peptide
GIPEPSSVPEKMSNITMQIMDENKNVVLGEMSNMTVESSASR

SEQ ID NO: 648 - protein, 42 aa, Artificial Sequence
  Non-cyclic GFR-binding peptide
SIPKASSVPTELSNITMQIMDEYDKVVLGEMSEMVVEGSGSR

SEQ ID NO: 649 - protein, 42 aa, Artificial Sequence
  Non-cyclic GFR-binding peptide
HVTKPTSAPTKLSNITMQIMDDSSNVILGEMSNMVVRSSGSH

SEQ ID NO: 650 - protein, 42 aa, Artificial Sequence
  Non-cyclic GFR-binding peptide
YVPKPSSAPTKLSNITMQIMDDSSNVILGEMSNMVVRSSGSH

SEQ ID NO: 651 - protein, 42 aa, Artificial Sequence
  Non-cyclic GFR-binding peptide
TVPKPSSAPTQLSNITMQIMDDSSNVILGEMSNMVVRASGSH

SEQ ID NO: 652 - protein, 42 aa, Artificial Sequence
  Non-cyclic GFR-binding peptide
AVPKASSAPTKLSNITMQIMDSSNNVILGEMSNMVVKASGSH

SEQ ID NO: 653 - protein, 43 aa, Artificial Sequence
  Non-cyclic GFR-binding peptide
KVGKASSVPTKLSNITMQIMDDMGVPTLGEMSEGMSVAESGSR

SEQ ID NO: 654 - protein, 42 aa, Artificial Sequence
  Non-cyclic GFR-binding peptide
KASKASSVPTKLSNITMQIMDKGVVTYLGEMSGMAVSESGSR

SEQ ID NO: 655 - protein, 42 aa, Artificial Sequence
  Non-cyclic GFR-binding peptide
GSAGPSSTPTKMSNITMQIMNDKQQIILGEMSGMVVDRSGSS

SEQ ID NO: 656 - protein, 42 aa, Artificial Sequence
  Non-cyclic GFR-binding peptide
AAPASSSVPARLSNITMQIMDAANNVVLGEMSDMVVEASGSR

SEQ ID NO: 657 - protein, 42 aa, Artificial Sequence
  Non-cyclic GFR-binding peptide
STPPTSSVPTRLSNITMQIMDSANNVVLGEMSDMVVESSGSR

SEQ ID NO: 658 - protein, 42 aa, Artificial Sequence
  Non-cyclic GFR-binding peptide
HVPKPSSAPTKLSNITMQIMDDSSNVILGEMSNMVVRSSGSH

SEQ ID NO: 659 - protein, 41 aa, Artificial Sequence
  Non-cyclic GFR-binding peptide
RVPSTSSAPVKTSNITMQIMDNGRVLLLGEMSMIVEESGSL

SEQ ID NO: 660 - protein, 41 aa, Artificial Sequence
  Non-cyclic GFR-binding peptide
ASAAPSSVPQALSNITMQIMVGRKPKVLGEMSMIVRSSKSS

SEQ ID NO: 661 - protein, 41 aa, Artificial Sequence
  Non-cyclic GFR-binding peptide
ASASPSSVSQDLSNITMQIMIGKTPKILGEMSMIVKSSKSS

SEQ ID NO: 662 - protein, 41 aa, Artificial Sequence
  Non-cyclic GFR-binding peptide
ASASPSSVPQDLSNITMQIMVGRTPKVLGEMSMVVKSSKSS

SEQ ID NO: 663 - protein, 44 aa, Artificial Sequence
  Non-cyclic GFR-binding peptide
NDEGLESVPTEESNITMQIMRIKPHQGQHLGEMSFLQHNKSESR

SEQ ID NO: 664 - protein, 45 aa, Artificial Sequence
  Non-cyclic GFR-binding peptide
SSVKSQPSRVHHSNITMQIMEYVRKKPKLLGEMSRLEEHLESASA

SEQ ID NO: 665 - protein, 45 aa, Artificial Sequence
  Non-cyclic GFR-binding peptide
RNVQSRPTQVQLSNITMQIMEIVRKKPIFLGEMSTLEDHLASKSE

SEQ ID NO: 666 - protein, 45 aa, Artificial Sequence
  Non-cyclic GFR-binding peptide
RNVQSRPSRVQLRSVKVAKVEIVRKKPIFKEVQVTLEEHLASKSE

SEQ ID NO: 667 - protein, 42 aa, Artificial Sequence
  Non-cyclic GFR-binding peptide
KIPKASSVPTELRSVKVAKVDENEKVVKEVQVDMVVEGSGSR

SEQ ID NO: 668 - protein, 42 aa, Artificial Sequence
  Non-cyclic GFR-binding peptide
GIPEPSSVPEKMRSVKVAKVDENKNVVKEVQVNMTVESSASR

SEQ ID NO: 669 - protein, 42 aa, Artificial Sequence
  Non-cyclic GFR-binding peptide
SIPKASSVPTELRSVKVAKVDEYDKVVKEVQVEMVVEGSGSR

SEQ ID NO: 670 - protein, 42 aa, Artificial Sequence
  Non-cyclic GFR-binding peptide
HVTKPTSAPTKLRSVKVAKVDDSSNVIKEVQVNMVVRSSGSH

SEQ ID NO: 671 - protein, 42 aa, Artificial Sequence
  Non-cyclic GFR-binding peptide
YVPKPSSAPTKLRSVKVAKVDDSSNVIKEVQVNMVVRSSGSH

SEQ ID NO: 672 - protein, 42 aa, Artificial Sequence
  Non-cyclic GFR-binding peptide
TVPKPSSAPTQLRSVKVAKVDDSSNVIKEVQVNMVVRASGSH

SEQ ID NO: 673 - protein, 42 aa, Artificial Sequence
  Non-cyclic GFR-binding peptide
AVPKASSAPTKLRSVKVAKVDSSNNVIKEVQVNMVVKASGSH

SEQ ID NO: 674 - protein, 43 aa, Artificial Sequence
  Non-cyclic GFR-binding peptide
KVGKASSVPTKLRSVKVAKVDDMGVPTKEVQVEGMSVAESGSR

SEQ ID NO: 675 - protein, 42 aa, Artificial Sequence
  Non-cyclic GFR-binding peptide
KASKASSVPTKLRSVKVAKVDKGVVTYKEVQVGMAVSESGSR

SEQ ID NO: 676 - protein, 42 aa, Artificial Sequence
  Non-cyclic GFR-binding peptide
GSAGPSSTPTKMRSVKVAKVNDKQQIIKEVQVGMVVDRSGSS

SEQ ID NO: 677 - protein, 42 aa, Artificial Sequence
  Non-cyclic GFR-binding peptide
AAPASSSVPARLRSVKVAKVDAANNVVKEVQVDMVVEASGSR

SEQ ID NO: 678 - protein, 42 aa, Artificial Sequence
  Non-cyclic GFR-binding peptide
STPPTSSVPTRLRSVKVAKVDSANNVVKEVQVDMVVESSGSR

SEQ ID NO: 679 - protein, 42 aa, Artificial Sequence
  Non-cyclic GFR-binding peptide
HVPKPSSAPTKLRSVKVAKVDDSSNVIKEVQVNMVVRSSGSH

SEQ ID NO: 680 - protein, 41 aa, Artificial Sequence
  Non-cyclic GFR-binding peptide
RVPSTSSAPVKTRSVKVAKVDNGRVLLKEVQVMIVEESGSL

SEQ ID NO: 681 - protein, 41 aa, Artificial Sequence
  Non-cyclic GFR-binding peptide
ASAAPSSVPQALRSVKVAKVVGRKPKVKEVQVMIVRSSKSS

SEQ ID NO: 682 - protein, 41 aa, Artificial Sequence
  Non-cyclic GFR-binding peptide
ASASPSSVSQDLRSVKVAKVIGKTPKIKEVQVMIVKSSKSS

SEQ ID NO: 683 - protein, 41 aa, Artificial Sequence
  Non-cyclic GFR-binding peptide
ASASPSSVPQDLRSVKVAKVVGRTPKVKEVQVMVVKSSKSS

SEQ ID NO: 684 - protein, 44 aa, Artificial Sequence
  Non-cyclic GFR-binding peptide
NDEGLESVPTEERSVKVAKVRIKPHQGQHKEVQVFLQHNKSESR

SEQ ID NO: 685 - protein, 44 aa, Artificial Sequence
  Non-cyclic GFR-binding peptide
NDEGLESVPTGQRSVKVAKVRIKPHQGQHKEVQVLEEHSQSESR

SEQ ID NO: 686 - protein, 45 aa, Artificial Sequence
  Non-cyclic GFR-binding peptide
RNVQSRPTQVQLRSVKVAKVEIVRKKPIFKEVQVTLEDHLASKSE

SEQ ID NO: 687 - protein, 45 aa, Artificial Sequence
  Non-cyclic GFR-binding peptide
SSVKSQPTQVHHRPVQVRKIEYVRKKPKLKKATVRLEDHLESASA

SEQ ID NO: 688 - protein, 42 aa, Artificial Sequence
  Non-cyclic GFR-binding peptide
KIPKASSVPTELRPVQVRKIDENEKVVKKATVDMVVEGSGSR

SEQ ID NO: 689 - protein, 42 aa, Artificial Sequence
  Non-cyclic GFR-binding peptide
GIPEPSSVPEKMRPVQVRKIDENKNVVKKATVNMTVESSASR

SEQ ID NO: 690 - protein, 42 aa, Artificial Sequence
  Non-cyclic GFR-binding peptide
SIPKASSVPTELRPVQVRKIDEYDKVVKKATVEMVVEGSGSR

SEQ ID NO: 691 - protein, 42 aa, Artificial Sequence
  Non-cyclic GFR-binding peptide
HVTKPTSAPTKLRPVQVRKIDDSSNVIKKATVNMVVRSSGSH

SEQ ID NO: 692 - protein, 42 aa, Artificial Sequence
  Non-cyclic GFR-binding peptide
YVPKPSSAPTKLRPVQVRKIDDSSNVIKKATVNMVVRSSGSH

SEQ ID NO: 693 - protein, 42 aa, Artificial Sequence
  Non-cyclic GFR-binding peptide
TVPKPSSAPTQLRPVQVRKIDDSSNVIKKATVNMVVRASGSH

SEQ ID NO: 694 - protein, 42 aa, Artificial Sequence
  Non-cyclic GFR-binding peptide
AVPKASSAPTKLRPVQVRKIDSSNNVIKKATVNMVVKASGSH

SEQ ID NO: 695 - protein, 43 aa, Artificial Sequence
  Non-cyclic GFR-binding peptide
KVGKASSVPTKLRPVQVRKIDDMGVPTKKATVEGMSVAESGSR

SEQ ID NO: 696 - protein, 42 aa, Artificial Sequence
  Non-cyclic GFR-binding peptide
KASKASSVPTKLRPVQVRKIDKGVVTYKKATVGMAVSESGSR

SEQ ID NO: 697 - protein, 42 aa, Artificial Sequence
  Non-cyclic GFR-binding peptide
GSAGPSSTPTKMRPVQVRKINDKQQIIKKATVGMVVDRSGSS

SEQ ID NO: 698 - protein, 42 aa, Artificial Sequence
  Non-cyclic GFR-binding peptide
AAPASSSVPARLRPVQVRKIDAANNVVKKATVDMVVEASGSR

SEQ ID NO: 699 - protein, 42 aa, Artificial Sequence
  Non-cyclic GFR-binding peptide
STPPTSSVPTRLRPVQVRKIDSANNVVKKATVDMVVESSGSR

SEQ ID NO: 700 - protein, 42 aa, Artificial Sequence
  Non-cyclic GFR-binding peptide
HVPKPSSAPTKLRPVQVRKIDDSSNVIKKATVNMVVRSSGSH

SEQ ID NO: 701 - protein, 41 aa, Artificial Sequence
  Non-cyclic GFR-binding peptide
RVPSTSSAPVKTRPVQVRKIDNGRVLLKKATVMIVEESGSL

SEQ ID NO: 702 - protein, 41 aa, Artificial Sequence
  Non-cyclic GFR-binding peptide
ASAAPSSVPQALRPVQVRKIVGRKPKVKKATVMIVRSSKSS

SEQ ID NO: 703 - protein, 41 aa, Artificial Sequence
  Non-cyclic GFR-binding peptide
ASASPSSVSQDLRPVQVRKIIGKTPKIKKATVMIVKSSKSS

SEQ ID NO: 704 - protein, 41 aa, Artificial Sequence
  Non-cyclic GFR-binding peptide
ASASPSSVPQDLRPVQVRKIVGRTPKVKKATVMVVKSSKSS

SEQ ID NO: 705 - protein, 44 aa, Artificial Sequence
  Non-cyclic GFR-binding peptide
NDEGLESVPTEERPVQVRKIRIKPHQGQHKKATVFLQHNKSESR

SEQ ID NO: 706 - protein, 44 aa, Artificial Sequence
  Non-cyclic GFR-binding peptide
NDEGLESVPTGQRPVQVRKIRIKPHQGQHKKATVLEEHSQSESR

SEQ ID NO: 707 - protein, 45 aa, Artificial Sequence
  Non-cyclic GFR-binding peptide
SSVKSQPSRVHHRPVQVRKIEYVRKKPKLKKATVRLEEHLESASA

SEQ ID NO: 708 - protein, 30 aa, Artificial Sequence
  Non-cyclic GFR-binding peptide
VPTKMSAISMLYLDENKNVVLKNYQNMVVE

SEQ ID NO: 709 - protein, 30 aa, Artificial Sequence
  Non-cyclic GFR-binding peptide
VPTKLSAISMLYLDDSSNVILKNYQNMVVE

SEQ ID NO: 710 - protein, 30 aa, Artificial Sequence
  Non-cyclic GFR-binding peptide
VPTQLSAISMLYLDDSSNVILKNYQNMVVE

SEQ ID NO: 711 - protein, 30 aa, Artificial Sequence
  Non-cyclic GFR-binding peptide
VPTKLSAISMLYLDSSNNVILKNYQNMVVE

SEQ ID NO: 712 - protein, 32 aa, Artificial Sequence
  Non-cyclic GFR-binding peptide
VPTKLSAISMLYLDDMGVPTLKNYQEGMSVVE

SEQ ID NO: 713 - protein, 30 aa, Artificial Sequence
  Non-cyclic GFR-binding peptide
VPTKLSAISMLYLDKGVVTYLKNYQGMVVE

SEQ ID NO: 714 - protein, 30 aa, Artificial Sequence
  Non-cyclic GFR-binding peptide
VPTKMSAISMLYLNDKQQIILKNYQGMVVE

SEQ ID NO: 715 - protein, 30 aa, Artificial Sequence
  Non-cyclic GFR-binding peptide
VPTRLSAISMLYLDAANNVVLKNYQDMVVE

SEQ ID NO: 716 - protein, 30 aa, Artificial Sequence
  Non-cyclic GFR-binding peptide
VPTRLSAISMLYLDSANNVVLKNYQDMVVE

SEQ ID NO: 717 - protein, 30 aa, Artificial Sequence
  Non-cyclic GFR-binding peptide
VPTKTSAISMLYLDNGRVLLLKNYQMIVVE

SEQ ID NO: 718 - protein, 30 aa, Artificial Sequence
  Non-cyclic GFR-binding peptide
VPTALSAISMLYLVGRKPKVLKNYQMIVVE

SEQ ID NO: 719 - protein, 30 aa, Artificial Sequence
  Non-cyclic GFR-binding peptide
VPTDLSAISMLYLIGKTPKILKNYQMIVVE

SEQ ID NO: 720 - protein, 30 aa, Artificial Sequence
  Non-cyclic GFR-binding peptide
VPTDLSAISMLYLVGRTPKVLKNYQMVVVE

SEQ ID NO: 721 - protein, 30 aa, Artificial Sequence
  Non-cyclic GFR-binding peptide
VPEKMSAISMLYLDENKNVVLKNYQNMTVE

SEQ ID NO: 722 - protein, 30 aa, Artificial Sequence
  Non-cyclic GFR-binding peptide
APTKLSAISMLYLDDSSNVILKNYQNMVVR

SEQ ID NO: 723 - protein, 30 aa, Artificial Sequence
  Non-cyclic GFR-binding peptide
APTQLSAISMLYLDDSSNVILKNYQNMVVR

SEQ ID NO: 724 - protein, 30 aa, Artificial Sequence
  Non-cyclic GFR-binding peptide
APTKLSAISMLYLDSSNNVILKNYQNMVVK

SEQ ID NO: 725 - protein, 32 aa, Artificial Sequence
  Non-cyclic GFR-binding peptide
VPTKLSAISMLYLDDMGVPTLKNYQEGMSVAE

SEQ ID NO: 726 - protein, 30 aa, Artificial Sequence
  Non-cyclic GFR-binding peptide
VPTKLSAISMLYLDKGVVTYLKNYQGMAVS

SEQ ID NO: 727 - protein, 30 aa, Artificial Sequence
  Non-cyclic GFR-binding peptide
TPTKMSAISMLYLNDKQQIILKNYQGMVVD

SEQ ID NO: 728 - protein, 30 aa, Artificial Sequence
  Non-cyclic GFR-binding peptide
VPARLSAISMLYLDAANNVVLKNYQDMVVE

SEQ ID NO: 729 - protein, 30 aa, Artificial Sequence
  Non-cyclic GFR-binding peptide
APVKTSAISMLYLDNGRVLLLKNYQMIVEE

SEQ ID NO: 730 - protein, 30 aa, Artificial Sequence
  Non-cyclic GFR-binding peptide
VPQALSAISMLYLVGRKPKVLKNYQMIVRS

SEQ ID NO: 731 - protein, 30 aa, Artificial Sequence
  Non-cyclic GFR-binding peptide
VSQDLSAISMLYLIGKTPKILKNYQMIVKS

SEQ ID NO: 732 - protein, 30 aa, Artificial Sequence
  Non-cyclic GFR-binding peptide
VPQDLSAISMLYLVGRTPKVLKNYQMVVKS

SEQ ID NO: 733 - protein, 32 aa, Artificial Sequence
  Non-cyclic GFR-binding peptide
VPTEESAISMLYLRIKPHQGQHLKNYQFLQHN

SEQ ID NO: 734 - protein, 32 aa, Artificial Sequence
  Non-cyclic GFR-binding peptide
VPTGQSAISMLYLRIKPHQGQHLKNYQLEEHS

SEQ ID NO: 735 - protein, 32 aa, Artificial Sequence
  Non-cyclic GFR-binding peptide
SRVHHSAISMLYLEYVRKKPKLLKNYQRLEEH

SEQ ID NO: 736 - protein, 32 aa, Artificial Sequence
  Non-cyclic GFR-binding peptide
TQVQLSAISMLYLEIVRKKPIFLKNYQTLEDH

SEQ ID NO: 737 - protein, 30 aa, Artificial Sequence
  Non-cyclic GFR-binding peptide
VPEELSSLSILFFDENEKVVLKVYPDMTVE

SEQ ID NO: 738 - protein, 30 aa, Artificial Sequence
  Non-cyclic GFR-binding peptide
VPEELSSLSILFFDEYDKVVLKVYPEMTVE

SEQ ID NO: 739 - protein, 30 aa, Artificial Sequence
  Non-cyclic GFR-binding peptide
VPEKLSSLSILFFDDSSNVILKVYPNMTVE

SEQ ID NO: 740 - protein, 30 aa, Artificial Sequence
  Non-cyclic GFR-binding peptide
VPEQLSSLSILFFDDSSNVILKVYPNMTVE

SEQ ID NO: 741 - protein, 30 aa, Artificial Sequence
  Non-cyclic GFR-binding peptide
VPEKLSSLSILFFDSSNNVILKVYPNMTVE

SEQ ID NO: 742 - protein, 32 aa, Artificial Sequence
  Non-cyclic GFR-binding peptide
VPEKLSSLSILFFDDMGVPTLKVYPEGMSTVE

SEQ ID NO: 743 - protein, 30 aa, Artificial Sequence
  Non-cyclic GFR-binding peptide
VPEKLSSLSILFFDKGVVTYLKVYPGMTVE

SEQ ID NO: 744 - protein, 30 aa, Artificial Sequence
  Non-cyclic GFR-binding peptide
VPEKMSSLSILFFNDKQQIILKVYPGMTVE

SEQ ID NO: 745 - protein, 30 aa, Artificial Sequence
  Non-cyclic GFR-binding peptide
VPERLSSLSILFFDAANNVVLKVYPDMTVE

SEQ ID NO: 746 - protein, 30 aa, Artificial Sequence
  Non-cyclic GFR-binding peptide
VPERLSSLSILFFDSANNVVLKVYPDMTVE

SEQ ID NO: 747 - protein, 30 aa, Artificial Sequence
  Non-cyclic GFR-binding peptide
VPEKTSSLSILFFDNGRVLLLKVYPMITVE

SEQ ID NO: 748 - protein, 30 aa, Artificial Sequence
  Non-cyclic GFR-binding peptide
VPEALSSLSILFFVGRKPKVLKVYPMITVE

SEQ ID NO: 749 - protein, 30 aa, Artificial Sequence
  Non-cyclic GFR-binding peptide
VPEDLSSLSILFFIGKTPKILKVYPMITVE

SEQ ID NO: 750 - protein, 30 aa, Artificial Sequence
  Non-cyclic GFR-binding peptide
VPEDLSSLSILFFVGRTPKVLKVYPMVTVE

SEQ ID NO: 751 - protein, 30 aa, Artificial Sequence
  Non-cyclic GFR-binding peptide
VPTELSSLSILFFDENEKVVLKVYPDMVVE

SEQ ID NO: 752 - protein, 30 aa, Artificial Sequence
  Non-cyclic GFR-binding peptide
VPTELSSLSILFFDEYDKVVLKVYPEMVVE

SEQ ID NO: 753 - protein, 30 aa, Artificial Sequence
  Non-cyclic GFR-binding peptide
APTKLSSLSILFFDDSSNVILKVYPNMVVR

SEQ ID NO: 754 - protein, 30 aa, Artificial Sequence
  Non-cyclic GFR-binding peptide
APTQLSSLSILFFDDSSNVILKVYPNMVVR

SEQ ID NO: 755 - protein, 30 aa, Artificial Sequence
  Non-cyclic GFR-binding peptide
APTKLSSLSILFFDSSNNVILKVYPNMVVK

SEQ ID NO: 756 - protein, 32 aa, Artificial Sequence
  Non-cyclic GFR-binding peptide
VPTKLSSLSILFFDDMGVPTLKVYPEGMSVAE

SEQ ID NO: 757 - protein, 30 aa, Artificial Sequence
  Non-cyclic GFR-binding peptide
VPTKLSSLSILFFDKGVVTYLKVYPGMAVS

SEQ ID NO: 758 - protein, 30 aa, Artificial Sequence
  Non-cyclic GFR-binding peptide
TPTKMSSLSILFFNDKQQIILKVYPGMVVD

SEQ ID NO: 759 - protein, 30 aa, Artificial Sequence
  Non-cyclic GFR-binding peptide
VPARLSSLSILFFDAANNVVLKVYPDMVVE

SEQ ID NO: 760 - protein, 30 aa, Artificial Sequence
  Non-cyclic GFR-binding peptide
VPTRLSSLSILFFDSANNVVLKVYPDMVVE

SEQ ID NO: 761 - protein, 30 aa, Artificial Sequence
  Non-cyclic GFR-binding peptide
APVKTSSLSILFFDNGRVLLLKVYPMIVEE

SEQ ID NO: 762 - protein, 30 aa, Artificial Sequence
  Non-cyclic GFR-binding peptide
VPQALSSLSILFFVGRKPKVLKVYPMIVRS

SEQ ID NO: 763 - protein, 30 aa, Artificial Sequence
  Non-cyclic GFR-binding peptide
VSQDLSSLSILFFIGKTPKILKVYPMIVKS

SEQ ID NO: 764 - protein, 30 aa, Artificial Sequence
  Non-cyclic GFR-binding peptide
VPQDLSSLSILFFVGRTPKVLKVYPMVVKS

SEQ ID NO: 765 - protein, 32 aa, Artificial Sequence
  Non-cyclic GFR-binding peptide
VPTEESSLSILFFRIKPHQGQHLKVYPFLQHN

SEQ ID NO: 766 - protein, 32 aa, Artificial Sequence
  Non-cyclic GFR-binding peptide
VPTGQSSLSILFFRIKPHQGQHLKVYPLEEHS

SEQ ID NO: 767 - protein, 32 aa, Artificial Sequence
  Non-cyclic GFR-binding peptide
SRVHHSSLSILFFEYVRKKPKLLKVYPRLEEH

SEQ ID NO: 768 - protein, 32 aa, Artificial Sequence
  Non-cyclic GFR-binding peptide
TQVQLSSLSILFFEIVRKKPIFLKVYPTLEDH

SEQ ID NO: 769 - protein, 30 aa, Artificial Sequence
  Non-cyclic GFR-binding peptide
APTELNAISVLYFDENEKVVLKKYRDMVVR

SEQ ID NO: 770 - protein, 30 aa, Artificial Sequence
  Non-cyclic GFR-binding peptide
APTKMNAISVLYFDENKNVVLKKYRNMVVR

SEQ ID NO: 771 - protein, 30 aa, Artificial Sequence
  Non-cyclic GFR-binding peptide
APTELNAISVLYFDEYDKVVLKKYREMVVR

SEQ ID NO: 772 - protein, 30 aa, Artificial Sequence
  Non-cyclic GFR-binding peptide
APTKLNAISVLYFDSSNNVILKKYRNMVVR

SEQ ID NO: 773 - protein, 32 aa, Artificial Sequence
  Non-cyclic GFR-binding peptide
APTKLNAISVLYFDDMGVPTLKKYREGMSVVR

SEQ ID NO: 774 - protein, 30 aa, Artificial Sequence
  Non-cyclic GFR-binding peptide
APTKLNAISVLYFDKGVVTYLKKYRGMVVR

SEQ ID NO: 775 - protein, 30 aa, Artificial Sequence
  Non-cyclic GFR-binding peptide
APTKMNAISVLYFNDKQQIILKKYRGMVVR

SEQ ID NO: 776 - protein, 30 aa, Artificial Sequence
  Non-cyclic GFR-binding peptide
APTRLNAISVLYFDAANNVVLKKYRDMVVR

SEQ ID NO: 777 - protein, 30 aa, Artificial Sequence
  Non-cyclic GFR-binding peptide
APTRLNAISVLYFDSANNVVLKKYRDMVVR

SEQ ID NO: 778 - protein, 30 aa, Artificial Sequence
  Non-cyclic GFR-binding peptide
APTKTNAISVLYFDNGRVLLLKKYRMIVVR

SEQ ID NO: 779 - protein, 30 aa, Artificial Sequence
  Non-cyclic GFR-binding peptide
APTALNAISVLYFVGRKPKVLKKYRMIVVR

SEQ ID NO: 780 - protein, 30 aa, Artificial Sequence
  Non-cyclic GFR-binding peptide
APTDLNAISVLYFIGKTPKILKKYRMIVVR

SEQ ID NO: 781 - protein, 30 aa, Artificial Sequence
  Non-cyclic GFR-binding peptide
APTDLNAISVLYFVGRTPKVLKKYRMVVVR

SEQ ID NO: 782 - protein, 30 aa, Artificial Sequence
  Non-cyclic GFR-binding peptide
VPTELNAISVLYFDENEKVVLKKYRDMVVE

SEQ ID NO: 783 - protein, 30 aa, Artificial Sequence
  Non-cyclic GFR-binding peptide
VPEKMNAISVLYFDENKNVVLKKYRNMTVE

SEQ ID NO: 784 - protein, 30 aa, Artificial Sequence
  Non-cyclic GFR-binding peptide
VPTELNAISVLYFDEYDKVVLKKYREMVVE

SEQ ID NO: 785 - protein, 30 aa, Artificial Sequence
  Non-cyclic GFR-binding peptide
APTKLNAISVLYFDSSNNVILKKYRNMVVK

SEQ ID NO: 786 - protein, 32 aa, Artificial Sequence
  Non-cyclic GFR-binding peptide
VPTKLNAISVLYFDDMGVPTLKKYREGMSVAE

SEQ ID NO: 787 - protein, 30 aa, Artificial Sequence
  Non-cyclic GFR-binding peptide
VPTKLNAISVLYFDKGVVTYLKKYRGMAVS

SEQ ID NO: 788 - protein, 30 aa, Artificial Sequence
  Non-cyclic GFR-binding peptide
TPTKMNAISVLYFNDKQQIILKKYRGMVVD

SEQ ID NO: 789 - protein, 30 aa, Artificial Sequence
  Non-cyclic GFR-binding peptide
VPARLNAISVLYFDAANNVVLKKYRDMVVE

SEQ ID NO: 790 - protein, 30 aa, Artificial Sequence
  Non-cyclic GFR-binding peptide
VPTRLNAISVLYFDSANNVVLKKYRDMVVE

SEQ ID NO: 791 - protein, 30 aa, Artificial Sequence
  Non-cyclic GFR-binding peptide
APVKTNAISVLYFDNGRVLLLKKYRMIVEE

SEQ ID NO: 792 - protein, 30 aa, Artificial Sequence
  Non-cyclic GFR-binding peptide
VPQALNAISVLYFVGRKPKVLKKYRMIVRS

SEQ ID NO: 793 - protein, 30 aa, Artificial Sequence
  Non-cyclic GFR-binding peptide
VSQDLNAISVLYFIGKTPKILKKYRMIVKS

SEQ ID NO: 794 - protein, 30 aa, Artificial Sequence
  Non-cyclic GFR-binding peptide
VPQDLNAISVLYFVGRTPKVLKKYRMVVKS

SEQ ID NO: 795 - protein, 32 aa, Artificial Sequence
  Non-cyclic GFR-binding peptide
VPTEENAISVLYFRIKPHQGQHLKKYRFLQHN

SEQ ID NO: 796 - protein, 32 aa, Artificial Sequence
  Non-cyclic GFR-binding peptide
VPTGQNAISVLYFRIKPHQGQHLKKYRLEEHS

SEQ ID NO: 797 - protein, 32 aa, Artificial Sequence
  Non-cyclic GFR-binding peptide
SRVHHNAISVLYFEYVRKKPKLLKKYRRLEEH

SEQ ID NO: 798 - protein, 32 aa, Artificial Sequence
  Non-cyclic GFR-binding peptide
TQVQLNAISVLYFEIVRKKPIFLKKYRTLEDH

SEQ ID NO: 799 - protein, 30 aa, Artificial Sequence
  Non-cyclic GFR-binding peptide
APTELSATSVLYYDENEKVVLRKHRDMVVK

SEQ ID NO: 800 - protein, 30 aa, Artificial Sequence
  Non-cyclic GFR-binding peptide
APTKMSATSVLYYDENKNVVLRKHRNMVVK

SEQ ID NO: 801 - protein, 30 aa, Artificial Sequence
  Non-cyclic GFR-binding peptide
APTELSATSVLYYDEYDKVVLRKHREMVVK

SEQ ID NO: 802 - protein, 30 aa, Artificial Sequence
  Non-cyclic GFR-binding peptide
APTKLSATSVLYYDDSSNVILRKHRNMVVK

SEQ ID NO: 803 - protein, 30 aa, Artificial Sequence
  Non-cyclic GFR-binding peptide
APTQLSATSVLYYDDSSNVILRKHRNMVVK

SEQ ID NO: 804 - protein, 32 aa, Artificial Sequence
  Non-cyclic GFR-binding peptide
APTKLSATSVLYYDDMGVPTLRKHREGMSVVK

SEQ ID NO: 805 - protein, 30 aa, Artificial Sequence
  Non-cyclic GFR-binding peptide
APTKLSATSVLYYDKGVVTYLRKHRGMVVK

SEQ ID NO: 806 - protein, 30 aa, Artificial Sequence
  Non-cyclic GFR-binding peptide
APTKMSATSVLYYNDKQQIILRKHRGMVVK

SEQ ID NO: 807 - protein, 30 aa, Artificial Sequence
  Non-cyclic GFR-binding peptide
APTRLSATSVLYYDAANNVVLRKHRDMVVK

SEQ ID NO: 808 - protein, 30 aa, Artificial Sequence
  Non-cyclic GFR-binding peptide
APTRLSATSVLYYDSANNVVLRKHRDMVVK

SEQ ID NO: 809 - protein, 30 aa, Artificial Sequence
  Non-cyclic GFR-binding peptide
APTKTSATSVLYYDNGRVLLLRKHRMIVVK

SEQ ID NO: 810 - protein, 30 aa, Artificial Sequence
  Non-cyclic GFR-binding peptide
APTALSATSVLYYVGRKPKVLRKHRMIVVK

SEQ ID NO: 811 - protein, 30 aa, Artificial Sequence
  Non-cyclic GFR-binding peptide
APTDLSATSVLYYIGKTPKILRKHRMIVVK

SEQ ID NO: 812 - protein, 30 aa, Artificial Sequence
  Non-cyclic GFR-binding peptide
APTDLSATSVLYYVGRTPKVLRKHRMVVVK

SEQ ID NO: 813 - protein, 30 aa, Artificial Sequence
  Non-cyclic GFR-binding peptide
VPTELSATSVLYYDENEKVVLRKHRDMVVE

SEQ ID NO: 814 - protein, 30 aa, Artificial Sequence
  Non-cyclic GFR-binding peptide
VPEKMSATSVLYYDENKNVVLRKHRNMTVE

SEQ ID NO: 815 - protein, 30 aa, Artificial Sequence
  Non-cyclic GFR-binding peptide
VPTELSATSVLYYDEYDKVVLRKHREMVVE

SEQ ID NO: 816 - protein, 30 aa, Artificial Sequence
  Non-cyclic GFR-binding peptide
APTKLSATSVLYYDDSSNVILRKHRNMVVR

SEQ ID NO: 817 - protein, 30 aa, Artificial Sequence
  Non-cyclic GFR-binding peptide
APTQLSATSVLYYDDSSNVILRKHRNMVVR

SEQ ID NO: 818 - protein, 32 aa, Artificial Sequence
  Non-cyclic GFR-binding peptide
VPTKLSATSVLYYDDMGVPTLRKHREGMSVAE

SEQ ID NO: 819 - protein, 30 aa, Artificial Sequence
  Non-cyclic GFR-binding peptide
VPTKLSATSVLYYDKGVVTYLRKHRGMAVS

SEQ ID NO: 820 - protein, 30 aa, Artificial Sequence
  Non-cyclic GFR-binding peptide
TPTKMSATSVLYYNDKQQIILRKHRGMVVD

SEQ ID NO: 821 - protein, 30 aa, Artificial Sequence
  Non-cyclic GFR-binding peptide
VPARLSATSVLYYDAANNVVLRKHRDMVVE

SEQ ID NO: 822 - protein, 30 aa, Artificial Sequence
  Non-cyclic GFR-binding peptide
VPTRLSATSVLYYDSANNVVLRKHRDMVVE

SEQ ID NO: 823 - protein, 30 aa, Artificial Sequence
  Non-cyclic GFR-binding peptide
APVKTSATSVLYYDNGRVLLLRKHRMIVEE

SEQ ID NO: 824 - protein, 30 aa, Artificial Sequence
  Non-cyclic GFR-binding peptide
VPQALSATSVLYYVGRKPKVLRKHRMIVRS

SEQ ID NO: 825 - protein, 30 aa, Artificial Sequence
  Non-cyclic GFR-binding peptide
VSQDLSATSVLYYIGKTPKILRKHRMIVKS

SEQ ID NO: 826 - protein, 30 aa, Artificial Sequence
  Non-cyclic GFR-binding peptide
VPQDLSATSVLYYVGRTPKVLRKHRMVVKS

SEQ ID NO: 827 - protein, 32 aa, Artificial Sequence
  Non-cyclic GFR-binding peptide
VPTEESATSVLYYRIKPHQGQHLRKHRFLQHN

SEQ ID NO: 828 - protein, 32 aa, Artificial Sequence
  Non-cyclic GFR-binding peptide
VPTGQSATSVLYYRIKPHQGQHLRKHRLEEHS

SEQ ID NO: 829 - protein, 32 aa, Artificial Sequence
  Non-cyclic GFR-binding peptide
SRVHHSATSVLYYEYVRKKPKLLRKHRRLEEH

SEQ ID NO: 830 - protein, 32 aa, Artificial Sequence
  Non-cyclic GFR-binding peptide
TQVQLSATSVLYYEIVRKKPIFLRKHRTLEDH

SEQ ID NO: 831 - protein, 30 aa, Artificial Sequence
  Non-cyclic GFR-binding peptide
VPTELSPISVLYKDENEKVVLKYHYDMVAE

SEQ ID NO: 832 - protein, 30 aa, Artificial Sequence
  Non-cyclic GFR-binding peptide
VPTKMSPISVLYKDENKNVVLKYHYNMVAE

SEQ ID NO: 833 - protein, 30 aa, Artificial Sequence
  Non-cyclic GFR-binding peptide
VPTELSPISVLYKDEYDKVVLKYHYEMVAE

SEQ ID NO: 834 - protein, 30 aa, Artificial Sequence
  Non-cyclic GFR-binding peptide
VPTKLSPISVLYKDDSSNVILKYHYNMVAE

SEQ ID NO: 835 - protein, 30 aa, Artificial Sequence
  Non-cyclic GFR-binding peptide
VPTQLSPISVLYKDDSSNVILKYHYNMVAE

SEQ ID NO: 836 - protein, 30 aa, Artificial Sequence
  Non-cyclic GFR-binding peptide
VPTKLSPISVLYKDSSNNVILKYHYNMVAE

SEQ ID NO: 837 - protein, 30 aa, Artificial Sequence
  Non-cyclic GFR-binding peptide
VPTKLSPISVLYKDKGVVTYLKYHYGMVAE

SEQ ID NO: 838 - protein, 30 aa, Artificial Sequence
  Non-cyclic GFR-binding peptide
VPTKMSPISVLYKNDKQQIILKYHYGMVAE

SEQ ID NO: 839 - protein, 30 aa, Artificial Sequence
  Non-cyclic GFR-binding peptide
VPTRLSPISVLYKDAANNVVLKYHYDMVAE

SEQ ID NO: 840 - protein, 30 aa, Artificial Sequence
  Non-cyclic GFR-binding peptide
VPTRLSPISVLYKDSANNVVLKYHYDMVAE

SEQ ID NO: 841 - protein, 30 aa, Artificial Sequence
  Non-cyclic GFR-binding peptide
VPTKTSPISVLYKDNGRVLLLKYHYMIVAE

SEQ ID NO: 842 - protein, 30 aa, Artificial Sequence
  Non-cyclic GFR-binding peptide
VPTALSPISVLYKVGRKPKVLKYHYMIVAE

SEQ ID NO: 843 - protein, 30 aa, Artificial Sequence
  Non-cyclic GFR-binding peptide
VPTDLSPISVLYKIGKTPKILKYHYMIVAE

SEQ ID NO: 844 - protein, 30 aa, Artificial Sequence
  Non-cyclic GFR-binding peptide
VPTDLSPISVLYKVGRTPKVLKYHYMVVAE

SEQ ID NO: 845 - protein, 30 aa, Artificial Sequence
  Non-cyclic GFR-binding peptide
VPTELSPISVLYKDENEKVVLKYHYDMVVE

SEQ ID NO: 846 - protein, 30 aa, Artificial Sequence
  Non-cyclic GFR-binding peptide
VPEKMSPISVLYKDENKNVVLKYHYNMTVE

SEQ ID NO: 847 - protein, 30 aa, Artificial Sequence
  Non-cyclic GFR-binding peptide
VPTELSPISVLYKDEYDKVVLKYHYEMVVE

SEQ ID NO: 848 - protein, 30 aa, Artificial Sequence
  Non-cyclic GFR-binding peptide
APTKLSPISVLYKDDSSNVILKYHYNMVVR

SEQ ID NO: 849 - protein, 30 aa, Artificial Sequence
  Non-cyclic GFR-binding peptide
APTQLSPISVLYKDDSSNVILKYHYNMVVR

SEQ ID NO: 850 - protein, 30 aa, Artificial Sequence
  Non-cyclic GFR-binding peptide
APTKLSPISVLYKDSSNNVILKYHYNMVVK

SEQ ID NO: 851 - protein, 30 aa, Artificial Sequence
  Non-cyclic GFR-binding peptide
VPTKLSPISVLYKDKGVVTYLKYHYGMAVS

SEQ ID NO: 852 - protein, 30 aa, Artificial Sequence
  Non-cyclic GFR-binding peptide
TPTKMSPISVLYKNDKQQIILKYHYGMVVD

SEQ ID NO: 853 - protein, 30 aa, Artificial Sequence
  Non-cyclic GFR-binding peptide
VPARLSPISVLYKDAANNVVLKYHYDMVVE

SEQ ID NO: 854 - protein, 30 aa, Artificial Sequence
  Non-cyclic GFR-binding peptide
VPTRLSPISVLYKDSANNVVLKYHYDMVVE

SEQ ID NO: 855 - protein, 30 aa, Artificial Sequence
  Non-cyclic GFR-binding peptide
APVKTSPISVLYKDNGRVLLLKYHYMIVEE

SEQ ID NO: 856 - protein, 30 aa, Artificial Sequence
  Non-cyclic GFR-binding peptide
VPQALSPISVLYKVGRKPKVLKYHYMIVRS

SEQ ID NO: 857 - protein, 30 aa, Artificial Sequence
  Non-cyclic GFR-binding peptide
VSQDLSPISVLYKIGKTPKILKYHYMIVKS

SEQ ID NO: 858 - protein, 30 aa, Artificial Sequence
  Non-cyclic GFR-binding peptide
VPQDLSPISVLYKVGRTPKVLKYHYMVVKS

SEQ ID NO: 859 - protein, 32 aa, Artificial Sequence
  Non-cyclic GFR-binding peptide
VPTEESPISVLYKRIKPHQGQHLKYHYFLQHN

SEQ ID NO: 860 - protein, 32 aa, Artificial Sequence
  Non-cyclic GFR-binding peptide
VPTGQSPISVLYKRIKPHQGQHLKYHYLEEHS

SEQ ID NO: 861 - protein, 32 aa, Artificial Sequence
  Non-cyclic GFR-binding peptide
SRVHHSPISVLYKEYVRKKPKLLKYHYRLEEH

SEQ ID NO: 862 - protein, 32 aa, Artificial Sequence
  Non-cyclic GFR-binding peptide
TQVQLSPISVLYKEIVRKKPIFLKYHYTLEDH

SEQ ID NO: 863 - protein, 30 aa, Artificial Sequence
  Non-cyclic GFR-binding peptide
VPTELEPISILYLDENEKVVKFKYEDMAVS

SEQ ID NO: 864 - protein, 30 aa, Artificial Sequence
  Non-cyclic GFR-binding peptide
VPTKMEPISILYLDENKNVVKFKYENMAVS

SEQ ID NO: 865 - protein, 30 aa, Artificial Sequence
  Non-cyclic GFR-binding peptide
VPTELEPISILYLDEYDKVVKFKYEEMAVS

SEQ ID NO: 866 - protein, 30 aa, Artificial Sequence
  Non-cyclic GFR-binding peptide
VPTKLEPISILYLDDSSNVIKFKYENMAVS

SEQ ID NO: 867 - protein, 30 aa, Artificial Sequence
  Non-cyclic GFR-binding peptide
VPTQLEPISILYLDDSSNVIKFKYENMAVS

SEQ ID NO: 868 - protein, 30 aa, Artificial Sequence
  Non-cyclic GFR-binding peptide
VPTKLEPISILYLDSSNNVIKFKYENMAVS

SEQ ID NO: 869 - protein, 32 aa, Artificial Sequence
  Non-cyclic GFR-binding peptide
VPTKLEPISILYLDDMGVPTKFKYEEGMSAVS

SEQ ID NO: 870 - protein, 30 aa, Artificial Sequence
  Non-cyclic GFR-binding peptide
VPTKMEPISILYLNDKQQIIKFKYEGMAVS

SEQ ID NO: 871 - protein, 30 aa, Artificial Sequence
  Non-cyclic GFR-binding peptide
VPTRLEPISILYLDAANNVVKFKYEDMAVS

SEQ ID NO: 872 - protein, 30 aa, Artificial Sequence
  Non-cyclic GFR-binding peptide
VPTRLEPISILYLDSANNVVKFKYEDMAVS

SEQ ID NO: 873 - protein, 30 aa, Artificial Sequence
  Non-cyclic GFR-binding peptide
VPTKTEPISILYLDNGRVLLKFKYEMIAVS

SEQ ID NO: 874 - protein, 30 aa, Artificial Sequence
  Non-cyclic GFR-binding peptide
VPTALEPISILYLVGRKPKVKFKYEMIAVS

SEQ ID NO: 875 - protein, 30 aa, Artificial Sequence
  Non-cyclic GFR-binding peptide
VPTDLEPISILYLIGKTPKIKFKYEMIAVS

SEQ ID NO: 876 - protein, 30 aa, Artificial Sequence
  Non-cyclic GFR-binding peptide
VPTDLEPISILYLVGRTPKVKFKYEMVAVS

SEQ ID NO: 877 - protein, 30 aa, Artificial Sequence
  Non-cyclic GFR-binding peptide
VPTELEPISILYLDENEKVVKFKYEDMVVE

SEQ ID NO: 878 - protein, 30 aa, Artificial Sequence
  Non-cyclic GFR-binding peptide
VPEKMEPISILYLDENKNVVKFKYENMTVE

SEQ ID NO: 879 - protein, 30 aa, Artificial Sequence
  Non-cyclic GFR-binding peptide
VPTELEPISILYLDEYDKVVKFKYEEMVVE

SEQ ID NO: 880 - protein, 30 aa, Artificial Sequence
  Non-cyclic GFR-binding peptide
APTKLEPISILYLDDSSNVIKFKYENMVVR

SEQ ID NO: 881 - protein, 30 aa, Artificial Sequence
  Non-cyclic GFR-binding peptide
APTQLEPISILYLDDSSNVIKFKYENMVVR

SEQ ID NO: 882 - protein, 30 aa, Artificial Sequence
  Non-cyclic GFR-binding peptide
APTKLEPISILYLDSSNNVIKFKYENMVVK

SEQ ID NO: 883 - protein, 32 aa, Artificial Sequence
  Non-cyclic GFR-binding peptide
VPTKLEPISILYLDDMGVPTKFKYEEGMSVAE

SEQ ID NO: 884 - protein, 30 aa, Artificial Sequence
  Non-cyclic GFR-binding peptide
TPTKMEPISILYLNDKQQIIKFKYEGMVVD

SEQ ID NO: 885 - protein, 30 aa, Artificial Sequence
  Non-cyclic GFR-binding peptide
VPARLEPISILYLDAANNVVKFKYEDMVVE

SEQ ID NO: 886 - protein, 30 aa, Artificial Sequence
  Non-cyclic GFR-binding peptide
VPTRLEPISILYLDSANNVVKFKYEDMVVE

SEQ ID NO: 887 - protein, 30 aa, Artificial Sequence
  Non-cyclic GFR-binding peptide
APVKTEPISILYLDNGRVLLKFKYEMIVEE

SEQ ID NO: 888 - protein, 30 aa, Artificial Sequence
  Non-cyclic GFR-binding peptide
VPQALEPISILYLVGRKPKVKFKYEMIVRS

SEQ ID NO: 889 - protein, 30 aa, Artificial Sequence
  Non-cyclic GFR-binding peptide
VSQDLEPISILYLIGKTPKIKFKYEMIVKS

SEQ ID NO: 890 - protein, 30 aa, Artificial Sequence
  Non-cyclic GFR-binding peptide
VPQDLEPISILYLVGRTPKVKFKYEMVVKS

SEQ ID NO: 891 - protein, 32 aa, Artificial Sequence
  Non-cyclic GFR-binding peptide
VPTEEEPISILYLRIKPHQGQHKFKYEFLQHN

SEQ ID NO: 892 - protein, 32 aa, Artificial Sequence
  Non-cyclic GFR-binding peptide
VPTGQEPISILYLRIKPHQGQHKFKYELEEHS

SEQ ID NO: 893 - protein, 32 aa, Artificial Sequence
  Non-cyclic GFR-binding peptide
SRVHHEPISILYLEYVRKKPKLKFKYERLEEH

SEQ ID NO: 894 - protein, 32 aa, Artificial Sequence
  Non-cyclic GFR-binding peptide
TQVQLEPISILYLEIVRKKPIFKFKYETLEDH

SEQ ID NO: 895 - protein, 30 aa, Artificial Sequence
  Non-cyclic GFR-binding peptide
TPTELSPINMLYFDENEKVVYGKIPDMVVD

SEQ ID NO: 896 - protein, 30 aa, Artificial Sequence
  Non-cyclic GFR-binding peptide
TPTKMSPINMLYFDENKNVVYGKIPNMVVD

SEQ ID NO: 897 - protein, 30 aa, Artificial Sequence
  Non-cyclic GFR-binding peptide
TPTELSPINMLYFDEYDKVVYGKIPEMVVD

SEQ ID NO: 898 - protein, 30 aa, Artificial Sequence
  Non-cyclic GFR-binding peptide
TPTKLSPINMLYFDDSSNVIYGKIPNMVVD

SEQ ID NO: 899 - protein, 30 aa, Artificial Sequence
  Non-cyclic GFR-binding peptide
TPTQLSPINMLYFDDSSNVIYGKIPNMVVD

SEQ ID NO: 900 - protein, 30 aa, Artificial Sequence
  Non-cyclic GFR-binding peptide
TPTKLSPINMLYFDSSNNVIYGKIPNMVVD

SEQ ID NO: 901 - protein, 32 aa, Artificial Sequence
  Non-cyclic GFR-binding peptide
TPTKLSPINMLYFDDMGVPTYGKIPEGMSVVD

SEQ ID NO: 902 - protein, 30 aa, Artificial Sequence
  Non-cyclic GFR-binding peptide
TPTKLSPINMLYFDKGVVTYYGKIPGMVVD

SEQ ID NO: 903 - protein, 30 aa, Artificial Sequence
  Non-cyclic GFR-binding peptide
TPTRLSPINMLYFDAANNVVYGKIPDMVVD

SEQ ID NO: 904 - protein, 30 aa, Artificial Sequence
  Non-cyclic GFR-binding peptide
TPTRLSPINMLYFDSANNVVYGKIPDMVVD

SEQ ID NO: 905 - protein, 30 aa, Artificial Sequence
  Non-cyclic GFR-binding peptide
TPTKTSPINMLYFDNGRVLLYGKIPMIVVD

SEQ ID NO: 906 - protein, 30 aa, Artificial Sequence
  Non-cyclic GFR-binding peptide
TPTALSPINMLYFVGRKPKVYGKIPMIVVD

SEQ ID NO: 907 - protein, 30 aa, Artificial Sequence
  Non-cyclic GFR-binding peptide
TPTDLSPINMLYFIGKTPKIYGKIPMIVVD

SEQ ID NO: 908 - protein, 30 aa, Artificial Sequence
  Non-cyclic GFR-binding peptide
TPTDLSPINMLYFVGRTPKVYGKIPMVVVD

SEQ ID NO: 909 - protein, 30 aa, Artificial Sequence
  Non-cyclic GFR-binding peptide
VPTELSPINMLYFDENEKVVYGKIPDMVVE

SEQ ID NO: 910 - protein, 30 aa, Artificial Sequence
  Non-cyclic GFR-binding peptide
VPEKMSPINMLYFDENKNVVYGKIPNMTVE

SEQ ID NO: 911 - protein, 30 aa, Artificial Sequence
  Non-cyclic GFR-binding peptide
VPTELSPINMLYFDEYDKVVYGKIPEMVVE

SEQ ID NO: 912 - protein, 30 aa, Artificial Sequence
  Non-cyclic GFR-binding peptide
APTKLSPINMLYFDDSSNVIYGKIPNMVVR

SEQ ID NO: 913 - protein, 30 aa, Artificial Sequence
  Non-cyclic GFR-binding peptide
APTQLSPINMLYFDDSSNVIYGKIPNMVVR

SEQ ID NO: 914 - protein, 30 aa, Artificial Sequence
  Non-cyclic GFR-binding peptide
APTKLSPINMLYFDSSNNVIYGKIPNMVVK

SEQ ID NO: 915 - protein, 32 aa, Artificial Sequence
  Non-cyclic GFR-binding peptide
VPTKLSPINMLYFDDMGVPTYGKIPEGMSVAE

SEQ ID NO: 916 - protein, 30 aa, Artificial Sequence
  Non-cyclic GFR-binding peptide
VPTKLSPINMLYFDKGVVTYYGKIPGMAVS

SEQ ID NO: 917 - protein, 30 aa, Artificial Sequence
  Non-cyclic GFR-binding peptide
VPARLSPINMLYFDAANNVVYGKIPDMVVE

SEQ ID NO: 918 - protein, 30 aa, Artificial Sequence
  Non-cyclic GFR-binding peptide
VPTRLSPINMLYFDSANNVVYGKIPDMVVE

SEQ ID NO: 919 - protein, 30 aa, Artificial Sequence
  Non-cyclic GFR-binding peptide
APVKTSPINMLYFDNGRVLLYGKIPMIVEE

SEQ ID NO: 920 - protein, 30 aa, Artificial Sequence
  Non-cyclic GFR-binding peptide
VPQALSPINMLYFVGRKPKVYGKIPMIVRS

SEQ ID NO: 921 - protein, 30 aa, Artificial Sequence
  Non-cyclic GFR-binding peptide
VSQDLSPINMLYFIGKTPKIYGKIPMIVKS

SEQ ID NO: 922 - protein, 30 aa, Artificial Sequence
  Non-cyclic GFR-binding peptide
VPQDLSPINMLYFVGRTPKVYGKIPMVVKS

SEQ ID NO: 923 - protein, 32 aa, Artificial Sequence
  Non-cyclic GFR-binding peptide
VPTEESPINMLYFRIKPHQGQHYGKIPFLQHN

SEQ ID NO: 924 - protein, 32 aa, Artificial Sequence
  Non-cyclic GFR-binding peptide
VPTGQSPINMLYFRIKPHQGQHYGKIPLEEHS

SEQ ID NO: 925 - protein, 32 aa, Artificial Sequence
  Non-cyclic GFR-binding peptide
SRVHHSPINMLYFEYVRKKPKLYGKIPRLEEH

SEQ ID NO: 926 - protein, 32 aa, Artificial Sequence
  Non-cyclic GFR-binding peptide
TQVQLSPINMLYFEIVRKKPIFYGKIPTLEDH

SEQ ID NO: 927 - protein, 30 aa, Artificial Sequence
  Non-cyclic GFR-binding peptide
VPAELSPISILYIDENEKVVYKQYEDMVVE

SEQ ID NO: 928 - protein, 30 aa, Artificial Sequence
  Non-cyclic GFR-binding peptide
VPAKMSPISILYIDENKNVVYKQYENMVVE

SEQ ID NO: 929 - protein, 30 aa, Artificial Sequence
  Non-cyclic GFR-binding peptide
VPAELSPISILYIDEYDKVVYKQYEEMVVE

SEQ ID NO: 930 - protein, 30 aa, Artificial Sequence
  Non-cyclic GFR-binding peptide
VPAKLSPISILYIDDSSNVIYKQYENMVVE

SEQ ID NO: 931 - protein, 30 aa, Artificial Sequence
  Non-cyclic GFR-binding peptide
VPAQLSPISILYIDDSSNVIYKQYENMVVE

SEQ ID NO: 932 - protein, 30 aa, Artificial Sequence
  Non-cyclic GFR-binding peptide
VPAKLSPISILYIDSSNNVIYKQYENMVVE

SEQ ID NO: 933 - protein, 32 aa, Artificial Sequence
  Non-cyclic GFR-binding peptide
VPAKLSPISILYIDDMGVPTYKQYEEGMSVVE

SEQ ID NO: 934 - protein, 30 aa, Artificial Sequence
  Non-cyclic GFR-binding peptide
VPAKLSPISILYIDKGVVTYYKQYEGMVVE

SEQ ID NO: 935 - protein, 30 aa, Artificial Sequence
  Non-cyclic GFR-binding peptide
VPAKMSPISILYINDKQQIIYKQYEGMVVE

SEQ ID NO: 936 - protein, 30 aa, Artificial Sequence
  Non-cyclic GFR-binding peptide
VPARLSPISILYIDSANNVVYKQYEDMVVE

SEQ ID NO: 937 - protein, 30 aa, Artificial Sequence
  Non-cyclic GFR-binding peptide
VPAKTSPISILYIDNGRVLLYKQYEMIVVE

SEQ ID NO: 938 - protein, 30 aa, Artificial Sequence
  Non-cyclic GFR-binding peptide
VPAALSPISILYIVGRKPKVYKQYEMIVVE

SEQ ID NO: 939 - protein, 30 aa, Artificial Sequence
  Non-cyclic GFR-binding peptide
VPADLSPISILYIIGKTPKIYKQYEMIVVE

SEQ ID NO: 940 - protein, 30 aa, Artificial Sequence
  Non-cyclic GFR-binding peptide
VPADLSPISILYIVGRTPKVYKQYEMVVVE

SEQ ID NO: 941 - protein, 30 aa, Artificial Sequence
  Non-cyclic GFR-binding peptide
VPTELSPISILYIDENEKVVYKQYEDMVVE

SEQ ID NO: 942 - protein, 30 aa, Artificial Sequence
  Non-cyclic GFR-binding peptide
VPEKMSPISILYIDENKNVVYKQYENMTVE

SEQ ID NO: 943 - protein, 30 aa, Artificial Sequence
  Non-cyclic GFR-binding peptide
VPTELSPISILYIDEYDKVVYKQYEEMVVE

SEQ ID NO: 944 - protein, 30 aa, Artificial Sequence
  Non-cyclic GFR-binding peptide
APTKLSPISILYIDDSSNVIYKQYENMVVR

SEQ ID NO: 945 - protein, 30 aa, Artificial Sequence
  Non-cyclic GFR-binding peptide
APTQLSPISILYIDDSSNVIYKQYENMVVR

SEQ ID NO: 946 - protein, 30 aa, Artificial Sequence
  Non-cyclic GFR-binding peptide
APTKLSPISILYIDSSNNVIYKQYENMVVK

SEQ ID NO: 947 - protein, 30 aa, Artificial Sequence
  Non-cyclic GFR-binding peptide
VPTKLSPISILYIDKGVVTYYKQYEGMAVS

SEQ ID NO: 948 - protein, 30 aa, Artificial Sequence
  Non-cyclic GFR-binding peptide
TPTKMSPISILYINDKQQIIYKQYEGMVVD

SEQ ID NO: 949 - protein, 30 aa, Artificial Sequence
  Non-cyclic GFR-binding peptide
VPTRLSPISILYIDSANNVVYKQYEDMVVE

SEQ ID NO: 950 - protein, 30 aa, Artificial Sequence
  Non-cyclic GFR-binding peptide
APVKTSPISILYIDNGRVLLYKQYEMIVEE

SEQ ID NO: 951 - protein, 30 aa, Artificial Sequence
  Non-cyclic GFR-binding peptide
VPQALSPISILYIVGRKPKVYKQYEMIVRS

SEQ ID NO: 952 - protein, 30 aa, Artificial Sequence
  Non-cyclic GFR-binding peptide
VSQDLSPISILYIIGKTPKIYKQYEMIVKS

SEQ ID NO: 953 - protein, 30 aa, Artificial Sequence
  Non-cyclic GFR-binding peptide
VPQDLSPISILYIVGRTPKVYKQYEMVVKS

SEQ ID NO: 954 - protein, 32 aa, Artificial Sequence
  Non-cyclic GFR-binding peptide
VPTEESPISILYIRIKPHQGQHYKQYEFLQHN

SEQ ID NO: 955 - protein, 32 aa, Artificial Sequence
  Non-cyclic GFR-binding peptide
VPTGQSPISILYIRIKPHQGQHYKQYELEEHS

SEQ ID NO: 956 - protein, 32 aa, Artificial Sequence
  Non-cyclic GFR-binding peptide
SRVHHSPISILYIEYVRKKPKLYKQYERLEEH

SEQ ID NO: 957 - protein, 32 aa, Artificial Sequence
  Non-cyclic GFR-binding peptide
TQVQLSPISILYIEIVRKKPIFYKQYETLEDH

SEQ ID NO: 958 - protein, 30 aa, Artificial Sequence
  Non-cyclic GFR-binding peptide
VPTELSPISILFIDENEKVVYKQYEDMVVE

SEQ ID NO: 959 - protein, 30 aa, Artificial Sequence
  Non-cyclic GFR-binding peptide
VPTKMSPISILFIDENKNVVYKQYENMVVE

SEQ ID NO: 960 - protein, 30 aa, Artificial Sequence
  Non-cyclic GFR-binding peptide
VPTELSPISILFIDEYDKVVYKQYEEMVVE

SEQ ID NO: 961 - protein, 30 aa, Artificial Sequence
  Non-cyclic GFR-binding peptide
VPTKLSPISILFIDDSSNVIYKQYENMVVE

SEQ ID NO: 962 - protein, 30 aa, Artificial Sequence
  Non-cyclic GFR-binding peptide
VPTQLSPISILFIDDSSNVIYKQYENMVVE

SEQ ID NO: 963 - protein, 30 aa, Artificial Sequence
  Non-cyclic GFR-binding peptide
VPTKLSPISILFIDSSNNVIYKQYENMVVE

SEQ ID NO: 964 - protein, 32 aa, Artificial Sequence
  Non-cyclic GFR-binding peptide
VPTKLSPISILFIDDMGVPTYKQYEEGMSVVE

SEQ ID NO: 965 - protein, 30 aa, Artificial Sequence
  Non-cyclic GFR-binding peptide
VPTKLSPISILFIDKGVVTYYKQYEGMVVE

SEQ ID NO: 966 - protein, 30 aa, Artificial Sequence
  Non-cyclic GFR-binding peptide
VPTKMSPISILFINDKQQIIYKQYEGMVVE

SEQ ID NO: 967 - protein, 30 aa, Artificial Sequence
  Non-cyclic GFR-binding peptide
VPTRLSPISILFIDAANNVVYKQYEDMVVE

SEQ ID NO: 968 - protein, 30 aa, Artificial Sequence
  Non-cyclic GFR-binding peptide
VPTKTSPISILFIDNGRVLLYKQYEMIVVE

SEQ ID NO: 969 - protein, 30 aa, Artificial Sequence
  Non-cyclic GFR-binding peptide
VPTALSPISILFIVGRKPKVYKQYEMIVVE

SEQ ID NO: 970 - protein, 30 aa, Artificial Sequence
  Non-cyclic GFR-binding peptide
VPTDLSPISILFIIGKTPKIYKQYEMIVVE

SEQ ID NO: 971 - protein, 30 aa, Artificial Sequence
  Non-cyclic GFR-binding peptide
VPTDLSPISILFIVGRTPKVYKQYEMVVVE

SEQ ID NO: 972 - protein, 30 aa, Artificial Sequence
  Non-cyclic GFR-binding peptide
VPEKMSPISILFIDENKNVVYKQYENMTVE

SEQ ID NO: 973 - protein, 30 aa, Artificial Sequence
  Non-cyclic GFR-binding peptide
APTKLSPISILFIDDSSNVIYKQYENMVVR

SEQ ID NO: 974 - protein, 30 aa, Artificial Sequence
  Non-cyclic GFR-binding peptide
APTQLSPISILFIDDSSNVIYKQYENMVVR

SEQ ID NO: 975 - protein, 30 aa, Artificial Sequence
  Non-cyclic GFR-binding peptide
APTKLSPISILFIDSSNNVIYKQYENMVVK

SEQ ID NO: 976 - protein, 32 aa, Artificial Sequence
  Non-cyclic GFR-binding peptide
VPTKLSPISILFIDDMGVPTYKQYEEGMSVAE

SEQ ID NO: 977 - protein, 30 aa, Artificial Sequence
  Non-cyclic GFR-binding peptide
VPTKLSPISILFIDKGVVTYYKQYEGMAVS

SEQ ID NO: 978 - protein, 30 aa, Artificial Sequence
  Non-cyclic GFR-binding peptide
TPTKMSPISILFINDKQQIIYKQYEGMVVD

SEQ ID NO: 979 - protein, 30 aa, Artificial Sequence
  Non-cyclic GFR-binding peptide
VPARLSPISILFIDAANNVVYKQYEDMVVE

SEQ ID NO: 980 - protein, 30 aa, Artificial Sequence
  Non-cyclic GFR-binding peptide
APVKTSPISILFIDNGRVLLYKQYEMIVEE

SEQ ID NO: 981 - protein, 30 aa, Artificial Sequence
  Non-cyclic GFR-binding peptide
VPQALSPISILFIVGRKPKVYKQYEMIVRS

SEQ ID NO: 982 - protein, 30 aa, Artificial Sequence
  Non-cyclic GFR-binding peptide
VSQDLSPISILFIIGKTPKIYKQYEMIVKS

SEQ ID NO: 983 - protein, 30 aa, Artificial Sequence
  Non-cyclic GFR-binding peptide
VPQDLSPISILFIVGRTPKVYKQYEMVVKS

SEQ ID NO: 984 - protein, 32 aa, Artificial Sequence
  Non-cyclic GFR-binding peptide
VPTEESPISILFIRIKPHQGQHYKQYEFLQHN

SEQ ID NO: 985 - protein, 32 aa, Artificial Sequence
  Non-cyclic GFR-binding peptide
VPTGQSPISILFIRIKPHQGQHYKQYELEEHS

SEQ ID NO: 986 - protein, 32 aa, Artificial Sequence
  Non-cyclic GFR-binding peptide
SRVHHSPISILFIEYVRKKPKLYKQYERLEEH

SEQ ID NO: 987 - protein, 32 aa, Artificial Sequence
  Non-cyclic GFR-binding peptide
TQVQLSPISILFIEIVRKKPIFYKQYETLEDH

SEQ ID NO: 988 - protein, 30 aa, Artificial Sequence
  Non-cyclic GFR-binding peptide
APVELKPLSMLYVDENEKVVDHHKDDMVEE

SEQ ID NO: 989 - protein, 30 aa, Artificial Sequence
  Non-cyclic GFR-binding peptide
APVKMKPLSMLYVDENKNVVDHHKDNMVEE

SEQ ID NO: 990 - protein, 30 aa, Artificial Sequence
  Non-cyclic GFR-binding peptide
APVELKPLSMLYVDEYDKVVDHHKDEMVEE

SEQ ID NO: 991 - protein, 30 aa, Artificial Sequence
  Non-cyclic GFR-binding peptide
APVKLKPLSMLYVDDSSNVIDHHKDNMVEE

SEQ ID NO: 992 - protein, 30 aa, Artificial Sequence
  Non-cyclic GFR-binding peptide
APVQLKPLSMLYVDDSSNVIDHHKDNMVEE

SEQ ID NO: 993 - protein, 30 aa, Artificial Sequence
  Non-cyclic GFR-binding peptide
APVKLKPLSMLYVDSSNNVIDHHKDNMVEE

SEQ ID NO: 994 - protein, 32 aa, Artificial Sequence
  Non-cyclic GFR-binding peptide
APVKLKPLSMLYVDDMGVPTDHHKDEGMSVEE

SEQ ID NO: 995 - protein, 30 aa, Artificial Sequence
  Non-cyclic GFR-binding peptide
APVKLKPLSMLYVDKGVVTYDHHKDGMVEE

SEQ ID NO: 996 - protein, 30 aa, Artificial Sequence
  Non-cyclic GFR-binding peptide
APVKMKPLSMLYVNDKQQIIDHHKDGMVEE

SEQ ID NO: 997 - protein, 30 aa, Artificial Sequence
  Non-cyclic GFR-binding peptide
APVRLKPLSMLYVDAANNVVDHHKDDMVEE

SEQ ID NO: 998 - protein, 30 aa, Artificial Sequence
  Non-cyclic GFR-binding peptide
APVRLKPLSMLYVDSANNVVDHHKDDMVEE

SEQ ID NO: 999 - protein, 30 aa, Artificial Sequence
  Non-cyclic GFR-binding peptide
APVALKPLSMLYVVGRKPKVDHHKDMIVEE

SEQ ID NO: 1000 - protein, 30 aa, Artificial Sequence
  Non-cyclic GFR-binding peptide
APVDLKPLSMLYVIGKTPKIDHHKDMIVEE

SEQ ID NO: 1001 - protein, 30 aa, Artificial Sequence
  Non-cyclic GFR-binding peptide
APVDLKPLSMLYVVGRTPKVDHHKDMVVEE

SEQ ID NO: 1002 - protein, 30 aa, Artificial Sequence
  Non-cyclic GFR-binding peptide
VPTELKPLSMLYVDENEKVVDHHKDDMVVE

SEQ ID NO: 1003 - protein, 30 aa, Artificial Sequence
  Non-cyclic GFR-binding peptide
VPEKMKPLSMLYVDENKNVVDHHKDNMTVE

SEQ ID NO: 1004 - protein, 30 aa, Artificial Sequence
  Non-cyclic GFR-binding peptide
VPTELKPLSMLYVDEYDKVVDHHKDEMVVE

SEQ ID NO: 1005 - protein, 30 aa, Artificial Sequence
  Non-cyclic GFR-binding peptide
APTKLKPLSMLYVDDSSNVIDHHKDNMVVR

SEQ ID NO: 1006 - protein, 30 aa, Artificial Sequence
  Non-cyclic GFR-binding peptide
APTQLKPLSMLYVDDSSNVIDHHKDNMVVR

SEQ ID NO: 1007 - protein, 30 aa, Artificial Sequence
  Non-cyclic GFR-binding peptide
APTKLKPLSMLYVDSSNNVIDHHKDNMVVK

SEQ ID NO: 1008 - protein, 32 aa, Artificial Sequence
  Non-cyclic GFR-binding peptide
VPTKLKPLSMLYVDDMGVPTDHHKDEGMSVAE

SEQ ID NO: 1009 - protein, 30 aa, Artificial Sequence
  Non-cyclic GFR-binding peptide
VPTKLKPLSMLYVDKGVVTYDHHKDGMAVS

SEQ ID NO: 1010 - protein, 30 aa, Artificial Sequence
  Non-cyclic GFR-binding peptide
TPTKMKPLSMLYVNDKQQIIDHHKDGMVVD

SEQ ID NO: 1011 - protein, 30 aa, Artificial Sequence
  Non-cyclic GFR-binding peptide
VPARLKPLSMLYVDAANNVVDHHKDDMVVE

SEQ ID NO: 1012 - protein, 30 aa, Artificial Sequence
  Non-cyclic GFR-binding peptide
VPTRLKPLSMLYVDSANNVVDHHKDDMVVE

SEQ ID NO: 1013 - protein, 30 aa, Artificial Sequence
  Non-cyclic GFR-binding peptide
VPQALKPLSMLYVVGRKPKVDHHKDMIVRS

SEQ ID NO: 1014 - protein, 30 aa, Artificial Sequence
  Non-cyclic GFR-binding peptide
VSQDLKPLSMLYVIGKTPKIDHHKDMIVKS

SEQ ID NO: 1015 - protein, 30 aa, Artificial Sequence
  Non-cyclic GFR-binding peptide
VPQDLKPLSMLYVVGRTPKVDHHKDMVVKS

SEQ ID NO: 1016 - protein, 32 aa, Artificial Sequence
  Non-cyclic GFR-binding peptide
VPTEEKPLSMLYVRIKPHQGQHDHHKDFLQHN

SEQ ID NO: 1017 - protein, 32 aa, Artificial Sequence
  Non-cyclic GFR-binding peptide
VPTGQKPLSMLYVRIKPHQGQHDHHKDLEEHS

SEQ ID NO: 1018 - protein, 32 aa, Artificial Sequence
  Non-cyclic GFR-binding peptide
SRVHHKPLSMLYVEYVRKKPKLDHHKDRLEEH

SEQ ID NO: 1019 - protein, 32 aa, Artificial Sequence
  Non-cyclic GFR-binding peptide
TQVQLKPLSMLYVEIVRKKPIFDHHKDTLEDH

SEQ ID NO: 1020 - protein, 30 aa, Artificial Sequence
  Non-cyclic GFR-binding peptide
VPQELEPLPIVYYDENEKVVEQLSNDMVRS

SEQ ID NO: 1021 - protein, 30 aa, Artificial Sequence
  Non-cyclic GFR-binding peptide
VPQKMEPLPIVYYDENKNVVEQLSNNMVRS

SEQ ID NO: 1022 - protein, 30 aa, Artificial Sequence
  Non-cyclic GFR-binding peptide
VPQELEPLPIVYYDEYDKVVEQLSNEMVRS

SEQ ID NO: 1023 - protein, 30 aa, Artificial Sequence
  Non-cyclic GFR-binding peptide
VPQKLEPLPIVYYDDSSNVIEQLSNNMVRS

SEQ ID NO: 1024 - protein, 30 aa, Artificial Sequence
  Non-cyclic GFR-binding peptide
VPQQLEPLPIVYYDDSSNVIEQLSNNMVRS

SEQ ID NO: 1025 - protein, 30 aa, Artificial Sequence
  Non-cyclic GFR-binding peptide
VPQKLEPLPIVYYDSSNNVIEQLSNNMVRS

SEQ ID NO: 1026 - protein, 32 aa, Artificial Sequence
  Non-cyclic GFR-binding peptide
VPQKLEPLPIVYYDDMGVPTEQLSNEGMSVRS

SEQ ID NO: 1027 - protein, 30 aa, Artificial Sequence
  Non-cyclic GFR-binding peptide
VPQKLEPLPIVYYDKGVVTYEQLSNGMVRS

SEQ ID NO: 1028 - protein, 30 aa, Artificial Sequence
  Non-cyclic GFR-binding peptide
VPQKMEPLPIVYYNDKQQIIEQLSNGMVRS

SEQ ID NO: 1029 - protein, 30 aa, Artificial Sequence
  Non-cyclic GFR-binding peptide
VPQRLEPLPIVYYDAANNVVEQLSNDMVRS

SEQ ID NO: 1030 - protein, 30 aa, Artificial Sequence
  Non-cyclic GFR-binding peptide
VPQRLEPLPIVYYDSANNVVEQLSNDMVRS

SEQ ID NO: 1031 - protein, 30 aa, Artificial Sequence
  Non-cyclic GFR-binding peptide
VPQKTEPLPIVYYDNGRVLLEQLSNMIVRS

SEQ ID NO: 1032 - protein, 30 aa, Artificial Sequence
  Non-cyclic GFR-binding peptide
VPQDLEPLPIVYYIGKTPKIEQLSNMIVRS

SEQ ID NO: 1033 - protein, 30 aa, Artificial Sequence
  Non-cyclic GFR-binding peptide
VPQDLEPLPIVYYVGRTPKVEQLSNMVVRS

SEQ ID NO: 1034 - protein, 30 aa, Artificial Sequence
  Non-cyclic GFR-binding peptide
VPTELEPLPIVYYDENEKVVEQLSNDMVVE

SEQ ID NO: 1035 - protein, 30 aa, Artificial Sequence
  Non-cyclic GFR-binding peptide
VPEKMEPLPIVYYDENKNVVEQLSNNMTVE

SEQ ID NO: 1036 - protein, 30 aa, Artificial Sequence
  Non-cyclic GFR-binding peptide
VPTELEPLPIVYYDEYDKVVEQLSNEMVVE

SEQ ID NO: 1037 - protein, 30 aa, Artificial Sequence
  Non-cyclic GFR-binding peptide
APTKLEPLPIVYYDDSSNVIEQLSNNMVVR

SEQ ID NO: 1038 - protein, 30 aa, Artificial Sequence
  Non-cyclic GFR-binding peptide
APTQLEPLPIVYYDDSSNVIEQLSNNMVVR

SEQ ID NO: 1039 - protein, 30 aa, Artificial Sequence
  Non-cyclic GFR-binding peptide
APTKLEPLPIVYYDSSNNVIEQLSNNMVVK

SEQ ID NO: 1040 - protein, 32 aa, Artificial Sequence
  Non-cyclic GFR-binding peptide
VPTKLEPLPIVYYDDMGVPTEQLSNEGMSVAE

SEQ ID NO: 1041 - protein, 30 aa, Artificial Sequence
  Non-cyclic GFR-binding peptide
VPTKLEPLPIVYYDKGVVTYEQLSNGMAVS

SEQ ID NO: 1042 - protein, 30 aa, Artificial Sequence
  Non-cyclic GFR-binding peptide
TPTKMEPLPIVYYNDKQQIIEQLSNGMVVD

SEQ ID NO: 1043 - protein, 30 aa, Artificial Sequence
  Non-cyclic GFR-binding peptide
VPARLEPLPIVYYDAANNVVEQLSNDMVVE

SEQ ID NO: 1044 - protein, 30 aa, Artificial Sequence
  Non-cyclic GFR-binding peptide
VPTRLEPLPIVYYDSANNVVEQLSNDMVVE

SEQ ID NO: 1045 - protein, 30 aa, Artificial Sequence
  Non-cyclic GFR-binding peptide
APVKTEPLPIVYYDNGRVLLEQLSNMIVEE

SEQ ID NO: 1046 - protein, 30 aa, Artificial Sequence
  Non-cyclic GFR-binding peptide
VSQDLEPLPIVYYIGKTPKIEQLSNMIVKS

SEQ ID NO: 1047 - protein, 30 aa, Artificial Sequence
  Non-cyclic GFR-binding peptide
VPQDLEPLPIVYYVGRTPKVEQLSNMVVKS

SEQ ID NO: 1048 - protein, 32 aa, Artificial Sequence
  Non-cyclic GFR-binding peptide
VPTEEEPLPIVYYRIKPHQGQHEQLSNFLQHN

SEQ ID NO: 1049 - protein, 32 aa, Artificial Sequence
  Non-cyclic GFR-binding peptide
VPTGQEPLPIVYYRIKPHQGQHEQLSNLEEHS

SEQ ID NO: 1050 - protein, 32 aa, Artificial Sequence
  Non-cyclic GFR-binding peptide
SRVHHEPLPIVYYEYVRKKPKLEQLSNRLEEH

SEQ ID NO: 1051 - protein, 32 aa, Artificial Sequence
  Non-cyclic GFR-binding peptide
TQVQLEPLPIVYYEIVRKKPIFEQLSNTLEDH

SEQ ID NO: 1052 - protein, 30 aa, Artificial Sequence
  Non-cyclic GFR-binding peptide
VSQELEPLTILYYDENEKVVEQLSNDMVKS

SEQ ID NO: 1053 - protein, 30 aa, Artificial Sequence
  Non-cyclic GFR-binding peptide
VSQKMEPLTILYYDENKNVVEQLSNNMVKS

SEQ ID NO: 1054 - protein, 30 aa, Artificial Sequence
  Non-cyclic GFR-binding peptide
VSQELEPLTILYYDEYDKVVEQLSNEMVKS

SEQ ID NO: 1055 - protein, 30 aa, Artificial Sequence
  Non-cyclic GFR-binding peptide
VSQKLEPLTILYYDDSSNVIEQLSNNMVKS

SEQ ID NO: 1056 - protein, 30 aa, Artificial Sequence
  Non-cyclic GFR-binding peptide
VSQQLEPLTILYYDDSSNVIEQLSNNMVKS

SEQ ID NO: 1057 - protein, 30 aa, Artificial Sequence
  Non-cyclic GFR-binding peptide
VSQKLEPLTILYYDSSNNVIEQLSNNMVKS

SEQ ID NO: 1058 - protein, 32 aa, Artificial Sequence
  Non-cyclic GFR-binding peptide
VSQKLEPLTILYYDDMGVPTEQLSNEGMSVKS

SEQ ID NO: 1059 - protein, 30 aa, Artificial Sequence
  Non-cyclic GFR-binding peptide
VSQKLEPLTILYYDKGVVTYEQLSNGMVKS

SEQ ID NO: 1060 - protein, 30 aa, Artificial Sequence
  Non-cyclic GFR-binding peptide
VSQKMEPLTILYYNDKQQIIEQLSNGMVKS

SEQ ID NO: 1061 - protein, 30 aa, Artificial Sequence
  Non-cyclic GFR-binding peptide
VSQRLEPLTILYYDAANNVVEQLSNDMVKS

SEQ ID NO: 1062 - protein, 30 aa, Artificial Sequence
  Non-cyclic GFR-binding peptide
VSQRLEPLTILYYDSANNVVEQLSNDMVKS

SEQ ID NO: 1063 - protein, 30 aa, Artificial Sequence
  Non-cyclic GFR-binding peptide
VSQKTEPLTILYYDNGRVLLEQLSNMIVKS

SEQ ID NO: 1064 - protein, 30 aa, Artificial Sequence
  Non-cyclic GFR-binding peptide
VSQALEPLTILYYVGRKPKVEQLSNMIVKS

SEQ ID NO: 1065 - protein, 30 aa, Artificial Sequence
  Non-cyclic GFR-binding peptide
VSQDLEPLTILYYVGRTPKVEQLSNMVVKS

SEQ ID NO: 1066 - protein, 30 aa, Artificial Sequence
  Non-cyclic GFR-binding peptide
VPTELEPLTILYYDENEKVVEQLSNDMVVE

SEQ ID NO: 1067 - protein, 30 aa, Artificial Sequence
  Non-cyclic GFR-binding peptide
VPEKMEPLTILYYDENKNVVEQLSNNMTVE

SEQ ID NO: 1068 - protein, 30 aa, Artificial Sequence
  Non-cyclic GFR-binding peptide
VPTELEPLTILYYDEYDKVVEQLSNEMVVE

SEQ ID NO: 1069 - protein, 30 aa, Artificial Sequence
  Non-cyclic GFR-binding peptide
APTKLEPLTILYYDDSSNVIEQLSNNMVVR

SEQ ID NO: 1070 - protein, 30 aa, Artificial Sequence
  Non-cyclic GFR-binding peptide
APTQLEPLTILYYDDSSNVIEQLSNNMVVR

SEQ ID NO: 1071 - protein, 30 aa, Artificial Sequence
  Non-cyclic GFR-binding peptide
APTKLEPLTILYYDSSNNVIEQLSNNMVVK

SEQ ID NO: 1072 - protein, 32 aa, Artificial Sequence
  Non-cyclic GFR-binding peptide
VPTKLEPLTILYYDDMGVPTEQLSNEGMSVAE

SEQ ID NO: 1073 - protein, 30 aa, Artificial Sequence
  Non-cyclic GFR-binding peptide
VPTKLEPLTILYYDKGVVTYEQLSNGMAVS

SEQ ID NO: 1074 - protein, 30 aa, Artificial Sequence
  Non-cyclic GFR-binding peptide
TPTKMEPLTILYYNDKQQIIEQLSNGMVVD

SEQ ID NO: 1075 - protein, 30 aa, Artificial Sequence
  Non-cyclic GFR-binding peptide
VPARLEPLTILYYDAANNVVEQLSNDMVVE

SEQ ID NO: 1076 - protein, 30 aa, Artificial Sequence
  Non-cyclic GFR-binding peptide
VPTRLEPLTILYYDSANNVVEQLSNDMVVE

SEQ ID NO: 1077 - protein, 30 aa, Artificial Sequence
  Non-cyclic GFR-binding peptide
APVKTEPLTILYYDNGRVLLEQLSNMIVEE

SEQ ID NO: 1078 - protein, 30 aa, Artificial Sequence
  Non-cyclic GFR-binding peptide
VPQALEPLTILYYVGRKPKVEQLSNMIVRS

SEQ ID NO: 1079 - protein, 32 aa, Artificial Sequence
  Non-cyclic GFR-binding peptide
VPTEEEPLTILYYRIKPHQGQHEQLSNFLQHN

SEQ ID NO: 1080 - protein, 32 aa, Artificial Sequence
  Non-cyclic GFR-binding peptide
VPTGQEPLTILYYRIKPHQGQHEQLSNLEEHS

SEQ ID NO: 1081 - protein, 32 aa, Artificial Sequence
  Non-cyclic GFR-binding peptide
SRVHHEPLTILYYEYVRKKPKLEQLSNRLEEH

SEQ ID NO: 1082 - protein, 32 aa, Artificial Sequence
  Non-cyclic GFR-binding peptide
TQVQLEPLTILYYEIVRKKPIFEQLSNTLEDH

SEQ ID NO: 1083 - protein, 30 aa, Artificial Sequence
  Non-cyclic GFR-binding peptide
VPQELEPLTILYYDENEKVVEQLSNDMVKS

SEQ ID NO: 1084 - protein, 30 aa, Artificial Sequence
  Non-cyclic GFR-binding peptide
VPQKMEPLTILYYDENKNVVEQLSNNMVKS

SEQ ID NO: 1085 - protein, 30 aa, Artificial Sequence
  Non-cyclic GFR-binding peptide
VPQELEPLTILYYDEYDKVVEQLSNEMVKS

SEQ ID NO: 1086 - protein, 30 aa, Artificial Sequence
  Non-cyclic GFR-binding peptide
VPQKLEPLTILYYDDSSNVIEQLSNNMVKS

SEQ ID NO: 1087 - protein, 30 aa, Artificial Sequence
  Non-cyclic GFR-binding peptide
VPQQLEPLTILYYDDSSNVIEQLSNNMVKS

SEQ ID NO: 1088 - protein, 30 aa, Artificial Sequence
  Non-cyclic GFR-binding peptide
VPQKLEPLTILYYDSSNNVIEQLSNNMVKS

SEQ ID NO: 1089 - protein, 32 aa, Artificial Sequence
  Non-cyclic GFR-binding peptide
VPQKLEPLTILYYDDMGVPTEQLSNEGMSVKS

SEQ ID NO: 1090 - protein, 30 aa, Artificial Sequence
  Non-cyclic GFR-binding peptide
VPQKLEPLTILYYDKGVVTYEQLSNGMVKS

SEQ ID NO: 1091 - protein, 30 aa, Artificial Sequence
  Non-cyclic GFR-binding peptide
VPQKMEPLTILYYNDKQQIIEQLSNGMVKS

SEQ ID NO: 1092 - protein, 30 aa, Artificial Sequence
  Non-cyclic GFR-binding peptide
VPQRLEPLTILYYDAANNVVEQLSNDMVKS

SEQ ID NO: 1093 - protein, 30 aa, Artificial Sequence
  Non-cyclic GFR-binding peptide
VPQRLEPLTILYYDSANNVVEQLSNDMVKS

SEQ ID NO: 1094 - protein, 30 aa, Artificial Sequence
  Non-cyclic GFR-binding peptide
VPQKTEPLTILYYDNGRVLLEQLSNMIVKS

SEQ ID NO: 1095 - protein, 30 aa, Artificial Sequence
  Non-cyclic GFR-binding peptide
VPQALEPLTILYYVGRKPKVEQLSNMIVKS

SEQ ID NO: 1096 - protein, 30 aa, Artificial Sequence
  Non-cyclic GFR-binding peptide
VPQDLEPLTILYYIGKTPKIEQLSNMIVKS

SEQ ID NO: 1097 - protein, 32 aa, Artificial Sequence
  Non-cyclic GFR-binding peptide
VPTGQSNITMQIMRIKPHQGQHIGEMSLEQHN

SEQ ID NO: 1098 - protein, 30 aa, Artificial Sequence
  Non-cyclic GFR-binding peptide
VPTELSNITMQIMDENEKVVIGEMSDMVVE

SEQ ID NO: 1099 - protein, 30 aa, Artificial Sequence
  Non-cyclic GFR-binding peptide
VPEKMSNITMQIMDENKNVVIGEMSNMTVE

SEQ ID NO: 1100 - protein, 30 aa, Artificial Sequence
  Non-cyclic GFR-binding peptide
VPTELSNITMQIMDEYDKVVIGEMSEMVVE

SEQ ID NO: 1101 - protein, 30 aa, Artificial Sequence
  Non-cyclic GFR-binding peptide
APTKLSNITMQIMDDSSNVIIGEMSNMVVR

SEQ ID NO: 1102 - protein, 30 aa, Artificial Sequence
  Non-cyclic GFR-binding peptide
APTQLSNITMQIMDDSSNVIIGEMSNMVVR

SEQ ID NO: 1103 - protein, 30 aa, Artificial Sequence
  Non-cyclic GFR-binding peptide
APTKLSNITMQIMDSSNNVIIGEMSNMVVK

SEQ ID NO: 1104 - protein, 32 aa, Artificial Sequence
  Non-cyclic GFR-binding peptide
VPTKLSNITMQIMDDMGVPTIGEMSEGMSVAE

SEQ ID NO: 1105 - protein, 30 aa, Artificial Sequence
  Non-cyclic GFR-binding peptide
VPTKLSNITMQIMDKGVVTYIGEMSGMAVS

SEQ ID NO: 1106 - protein, 30 aa, Artificial Sequence
  Non-cyclic GFR-binding peptide
TPTKMSNITMQIMNDKQQIIIGEMSGMVVD

SEQ ID NO: 1107 - protein, 30 aa, Artificial Sequence
  Non-cyclic GFR-binding peptide
VPARLSNITMQIMDAANNVVIGEMSDMVVE

SEQ ID NO: 1108 - protein, 30 aa, Artificial Sequence
  Non-cyclic GFR-binding peptide
VPTRLSNITMQIMDSANNVVIGEMSDMVVE

SEQ ID NO: 1109 - protein, 30 aa, Artificial Sequence
  Non-cyclic GFR-binding peptide
APVKTSNITMQIMDNGRVLLIGEMSMIVEE

SEQ ID NO: 1110 - protein, 30 aa, Artificial Sequence
  Non-cyclic GFR-binding peptide
VPQALSNITMQIMVGRKPKVIGEMSMIVRS

SEQ ID NO: 1111 - protein, 30 aa, Artificial Sequence
  Non-cyclic GFR-binding peptide
VSQDLSNITMQIMIGKTPKIIGEMSMIVKS

SEQ ID NO: 1112 - protein, 30 aa, Artificial Sequence
  Non-cyclic GFR-binding peptide
VPQDLSNITMQIMVGRTPKVIGEMSMVVKS

SEQ ID NO: 1113 - protein, 32 aa, Artificial Sequence
  Non-cyclic GFR-binding peptide
VPTGQSNITMQIMRIKPHQGQHIGEMSLEEHS

SEQ ID NO: 1114 - protein, 32 aa, Artificial Sequence
  Non-cyclic GFR-binding peptide
SRVHHSNITMQIMEYVRKKPKLIGEMSRLEEH

SEQ ID NO: 1115 - protein, 32 aa, Artificial Sequence
  Non-cyclic GFR-binding peptide
TQVQLSNITMQIMEIVRKKPIFIGEMSTLEDH

SEQ ID NO: 1116 - protein, 32 aa, Artificial Sequence
  Non-cyclic GFR-binding peptide
VPTEESNITMQIMRIKPHQGQHLGEMSFLEHS

SEQ ID NO: 1117 - protein, 30 aa, Artificial Sequence
  Non-cyclic GFR-binding peptide
VPTELSNITMQIMDENEKVVLGEMSDMVVE

SEQ ID NO: 1118 - protein, 30 aa, Artificial Sequence
  Non-cyclic GFR-binding peptide
VPEKMSNITMQIMDENKNVVLGEMSNMTVE

SEQ ID NO: 1119 - protein, 30 aa, Artificial Sequence
  Non-cyclic GFR-binding peptide
VPTELSNITMQIMDEYDKVVLGEMSEMVVE

SEQ ID NO: 1120 - protein, 30 aa, Artificial Sequence
  Non-cyclic GFR-binding peptide
APTKLSNITMQIMDDSSNVILGEMSNMVVR

SEQ ID NO: 1121 - protein, 30 aa, Artificial Sequence
  Non-cyclic GFR-binding peptide
APTQLSNITMQIMDDSSNVILGEMSNMVVR

SEQ ID NO: 1122 - protein, 30 aa, Artificial Sequence
  Non-cyclic GFR-binding peptide
APTKLSNITMQIMDSSNNVILGEMSNMVVK

SEQ ID NO: 1123 - protein, 32 aa, Artificial Sequence
  Non-cyclic GFR-binding peptide
VPTKLSNITMQIMDDMGVPTLGEMSEGMSVAE

SEQ ID NO: 1124 - protein, 30 aa, Artificial Sequence
  Non-cyclic GFR-binding peptide
VPTKLSNITMQIMDKGVVTYLGEMSGMAVS

SEQ ID NO: 1125 - protein, 30 aa, Artificial Sequence
  Non-cyclic GFR-binding peptide
TPTKMSNITMQIMNDKQQIILGEMSGMVVD

SEQ ID NO: 1126 - protein, 30 aa, Artificial Sequence
  Non-cyclic GFR-binding peptide
VPARLSNITMQIMDAANNVVLGEMSDMVVE

SEQ ID NO: 1127 - protein, 30 aa, Artificial Sequence
  Non-cyclic GFR-binding peptide
VPTRLSNITMQIMDSANNVVLGEMSDMVVE

SEQ ID NO: 1128 - protein, 30 aa, Artificial Sequence
  Non-cyclic GFR-binding peptide
APVKTSNITMQIMDNGRVLLLGEMSMIVEE

SEQ ID NO: 1129 - protein, 30 aa, Artificial Sequence
  Non-cyclic GFR-binding peptide
VPQALSNITMQIMVGRKPKVLGEMSMIVRS

SEQ ID NO: 1130 - protein, 30 aa, Artificial Sequence
  Non-cyclic GFR-binding peptide
VSQDLSNITMQIMIGKTPKILGEMSMIVKS

SEQ ID NO: 1131 - protein, 30 aa, Artificial Sequence
  Non-cyclic GFR-binding peptide
VPQDLSNITMQIMVGRTPKVLGEMSMVVKS

SEQ ID NO: 1132 - protein, 32 aa, Artificial Sequence
  Non-cyclic GFR-binding peptide
VPTEESNITMQIMRIKPHQGQHLGEMSFLQHN

SEQ ID NO: 1133 - protein, 32 aa, Artificial Sequence
  Non-cyclic GFR-binding peptide
SRVHHSNITMQIMEYVRKKPKLLGEMSRLEEH

SEQ ID NO: 1134 - protein, 32 aa, Artificial Sequence
  Non-cyclic GFR-binding peptide
TQVQLSNITMQIMEIVRKKPIFLGEMSTLEDH

SEQ ID NO: 1135 - protein, 32 aa, Artificial Sequence
  Non-cyclic GFR-binding peptide
SRVQLRSVKVAKVEIVRKKPIFKEVQVTLEEH

SEQ ID NO: 1136 - protein, 30 aa, Artificial Sequence
  Non-cyclic GFR-binding peptide
VPTELRSVKVAKVDENEKVVKEVQVDMVVE

SEQ ID NO: 1137 - protein, 30 aa, Artificial Sequence
  Non-cyclic GFR-binding peptide
VPEKMRSVKVAKVDENKNVVKEVQVNMTVE

SEQ ID NO: 1138 - protein, 30 aa, Artificial Sequence
  Non-cyclic GFR-binding peptide
VPTELRSVKVAKVDEYDKVVKEVQVEMVVE

SEQ ID NO: 1139 - protein, 30 aa, Artificial Sequence
  Non-cyclic GFR-binding peptide
APTKLRSVKVAKVDDSSNVIKEVQVNMVVR

SEQ ID NO: 1140 - protein, 30 aa, Artificial Sequence
  Non-cyclic GFR-binding peptide
APTQLRSVKVAKVDDSSNVIKEVQVNMVVR

SEQ ID NO: 1141 - protein, 30 aa, Artificial Sequence
  Non-cyclic GFR-binding peptide
APTKLRSVKVAKVDSSNNVIKEVQVNMVVK

SEQ ID NO: 1142 - protein, 32 aa, Artificial Sequence
  Non-cyclic GFR-binding peptide
VPTKLRSVKVAKVDDMGVPTKEVQVEGMSVAE

SEQ ID NO: 1143 - protein, 30 aa, Artificial Sequence
  Non-cyclic GFR-binding peptide
VPTKLRSVKVAKVDKGVVTYKEVQVGMAVS

SEQ ID NO: 1144 - protein, 30 aa, Artificial Sequence
  Non-cyclic GFR-binding peptide
TPTKMRSVKVAKVNDKQQIIKEVQVGMVVD

SEQ ID NO: 1145 - protein, 30 aa, Artificial Sequence
  Non-cyclic GFR-binding peptide
VPARLRSVKVAKVDAANNVVKEVQVDMVVE

SEQ ID NO: 1146 - protein, 30 aa, Artificial Sequence
  Non-cyclic GFR-binding peptide
VPTRLRSVKVAKVDSANNVVKEVQVDMVVE

SEQ ID NO: 1147 - protein, 30 aa, Artificial Sequence
  Non-cyclic GFR-binding peptide
APVKTRSVKVAKVDNGRVLLKEVQVMIVEE

SEQ ID NO: 1148 - protein, 30 aa, Artificial Sequence
  Non-cyclic GFR-binding peptide
VPQALRSVKVAKVVGRKPKVKEVQVMIVRS

SEQ ID NO: 1149 - protein, 30 aa, Artificial Sequence
  Non-cyclic GFR-binding peptide
VSQDLRSVKVAKVIGKTPKIKEVQVMIVKS

SEQ ID NO: 1150 - protein, 30 aa, Artificial Sequence
  Non-cyclic GFR-binding peptide
VPQDLRSVKVAKVVGRTPKVKEVQVMVVKS

SEQ ID NO: 1151 - protein, 32 aa, Artificial Sequence
  Non-cyclic GFR-binding peptide
VPTEERSVKVAKVRIKPHQGQHKEVQVFLQHN

SEQ ID NO: 1152 - protein, 32 aa, Artificial Sequence
  Non-cyclic GFR-binding peptide
VPTGQRSVKVAKVRIKPHQGQHKEVQVLEEHS

SEQ ID NO: 1153 - protein, 32 aa, Artificial Sequence
  Non-cyclic GFR-binding peptide
TQVQLRSVKVAKVEIVRKKPIFKEVQVTLEDH

SEQ ID NO: 1154 - protein, 32 aa, Artificial Sequence
  Non-cyclic GFR-binding peptide
TQVHHRPVQVRKIEYVRKKPKLKKATVRLEDH

SEQ ID NO: 1155 - protein, 30 aa, Artificial Sequence
  Non-cyclic GFR-binding peptide
VPTELRPVQVRKIDENEKVVKKATVDMVVE

SEQ ID NO: 1156 - protein, 30 aa, Artificial Sequence
  Non-cyclic GFR-binding peptide
VPEKMRPVQVRKIDENKNVVKKATVNMTVE

SEQ ID NO: 1157 - protein, 30 aa, Artificial Sequence
  Non-cyclic GFR-binding peptide
VPTELRPVQVRKIDEYDKVVKKATVEMVVE

SEQ ID NO: 1158 - protein, 30 aa, Artificial Sequence
  Non-cyclic GFR-binding peptide
APTKLRPVQVRKIDDSSNVIKKATVNMVVR

SEQ ID NO: 1159 - protein, 30 aa, Artificial Sequence
  Non-cyclic GFR-binding peptide
APTQLRPVQVRKIDDSSNVIKKATVNMVVR

SEQ ID NO: 1160 - protein, 30 aa, Artificial Sequence
  Non-cyclic GFR-binding peptide
APTKLRPVQVRKIDSSNNVIKKATVNMVVK

SEQ ID NO: 1161 - protein, 32 aa, Artificial Sequence
  Non-cyclic GFR-binding peptide
VPTKLRPVQVRKIDDMGVPTKKATVEGMSVAE

SEQ ID NO: 1162 - protein, 30 aa, Artificial Sequence
  Non-cyclic GFR-binding peptide
VPTKLRPVQVRKIDKGVVTYKKATVGMAVS

SEQ ID NO: 1163 - protein, 30 aa, Artificial Sequence
  Non-cyclic GFR-binding peptide
TPTKMRPVQVRKINDKQQIIKKATVGMVVD

SEQ ID NO: 1164 - protein, 30 aa, Artificial Sequence
  Non-cyclic GFR-binding peptide
VPARLRPVQVRKIDAANNVVKKATVDMVVE

SEQ ID NO: 1165 - protein, 30 aa, Artificial Sequence
  Non-cyclic GFR-binding peptide
VPTRLRPVQVRKIDSANNVVKKATVDMVVE

SEQ ID NO: 1166 - protein, 30 aa, Artificial Sequence
  Non-cyclic GFR-binding peptide
APVKTRPVQVRKIDNGRVLLKKATVMIVEE

SEQ ID NO: 1167 - protein, 30 aa, Artificial Sequence
  Non-cyclic GFR-binding peptide
VPQALRPVQVRKIVGRKPKVKKATVMIVRS

SEQ ID NO: 1168 - protein, 30 aa, Artificial Sequence
  Non-cyclic GFR-binding peptide
VSQDLRPVQVRKIIGKTPKIKKATVMIVKS

SEQ ID NO: 1169 - protein, 30 aa, Artificial Sequence
  Non-cyclic GFR-binding peptide
VPQDLRPVQVRKIVGRTPKVKKATVMVVKS

SEQ ID NO: 1170 - protein, 32 aa, Artificial Sequence
  Non-cyclic GFR-binding peptide
VPTEERPVQVRKIRIKPHQGQHKKATVFLQHN

SEQ ID NO: 1171 - protein, 32 aa, Artificial Sequence
  Non-cyclic GFR-binding peptide
VPTGQRPVQVRKIRIKPHQGQHKKATVLEEHS

SEQ ID NO: 1172 - protein, 32 aa, Artificial Sequence
  Non-cyclic GFR-binding peptide
SRVHHRPVQVRKIEYVRKKPKLKKATVRLEEH

SEQ ID NO: 1173 - protein, 39 aa, Artificial Sequence
  Non-cyclic GFR-binding peptide
ARVVMNQYNKLVVKDYEDLYLTSIASLQTPASSPKPVKC

SEQ ID NO: 1174 - protein, 43 aa, Artificial Sequence
  Non-cyclic GFR-binding peptide
HSGSARVVMNQYNKLTPVGMDDLYLTSIASLKTPVSSAKGVKC

SEQ ID NO: 1175 - protein, 42 aa, Artificial Sequence
  Non-cyclic GFR-binding peptide
SSKSSKVIMQYNKLIKPTKGILYLTSIASLDQSVSSPSASAC

SEQ ID NO: 1176 - protein, 41 aa, Artificial Sequence
  Non-cyclic GFR-binding peptide
GSGEVVMDRYKKLIVKENEDFYLVSIANLETPVSSAKPIKC

SEQ ID NO: 1177 - protein, 42 aa, Artificial Sequence
  Non-cyclic GFR-binding peptide
SSKSSKVIMRYKKLIKPTKGIFYLVSIANLDQSVSSPSASAC

SEQ ID NO: 1178 - protein, 38 aa, Artificial Sequence
  Non-cyclic GFR-binding peptide
KVVMNRHKRLVVNNSSDYYLVSTASLKTPASSAKPVAC

SEQ ID NO: 1179 - protein, 43 aa, Artificial Sequence
  Non-cyclic GFR-binding peptide
HSGSARVVMNYHYKLIVNSSDDKYLVSIPSLQTPASSPKPVTC

SEQ ID NO: 1180 - protein, 31 aa, Artificial Sequence
  Non-cyclic GFR-binding peptide
HDELTYHYKLIVNSSDDKYLVSIPSLQTPAC

SEQ ID NO: 1181 - protein, 38 aa, Artificial Sequence
  Non-cyclic GFR-binding peptide
HDELTQYNKLPKKRVIELYLTSIASLQVQTPRCQVNRC

SEQ ID NO: 1182 - protein, 33 aa, Artificial Sequence
  Non-cyclic GFR-binding peptide
KNHQRHKRLIVNSSDDYYLVSTASLQTPASSPC

SEQ ID NO: 1183 - protein, 37 aa, Artificial Sequence
  Non-cyclic GFR-binding peptide
ARVVMNRYKKLGGGGGGGFYLMSIANLQTPASSPKPC

SEQ ID NO: 1184 - protein, 32 aa, Artificial Sequence
  Non-cyclic GFR-binding peptide
MEQYNKLAAAALYLTSIASLETPVSSAKPVKC

SEQ ID NO: 1185 - protein, 39 aa, Artificial Sequence
  Non-cyclic GFR-binding peptide
GEVVMEHKRLVVKEDYEDYYLVSTASLETPVSSAKPISC

SEQ ID NO: 1186 - protein, 26 aa, Artificial Sequence
  Non-cyclic GFR-binding peptide
QYNKLIVNNSSDLYLMSIASLKTPAC

SEQ ID NO: 1187 - protein, 28 aa, Artificial Sequence
  Non-cyclic GFR-binding peptide
MDQYNKLGGGLYLMSIASLEQSVASSAC

SEQ ID NO: 1188 - protein, 40 aa, Artificial Sequence
  Non-cyclic GFR-binding peptide
RSGSGEVVMDYHYKLVVKENEDKYLTSIPSLETPVSSAKC

SEQ ID NO: 1189 - protein, 38 aa, Artificial Sequence
  Non-cyclic GFR-binding peptide
SRVIMRYKKLVKPKRGVFYLMSIANLKQPVSSPAASAC

SEQ ID NO: 1190 - protein, 37 aa, Artificial Sequence
  Non-cyclic GFR-binding peptide
SMGERYKKLVVKENEDLYLTSIANLKTPVSSAKGVKC

SEQ ID NO: 1191 - protein, 37 aa, Artificial Sequence
  Non-cyclic GFR-binding peptide
ARVVIMQYNKLIVNSSDDLYLTSIASLQTPASSPKPC

SEQ ID NO: 1192 - protein, 33 aa, Artificial Sequence
  Non-cyclic GFR-binding peptide
QYNKLIVNSSDDLYLTSIANLKTPVSSAKGVKC

SEQ ID NO: 1193 - protein, 33 aa, Artificial Sequence
  Non-cyclic GFR-binding peptide
MNRYKKLIVKDYDDLYLTSIASLETPVSSGGGC

SEQ ID NO: 1194 - protein, 42 aa, Artificial Sequence
  Non-cyclic GFR-binding peptide
RVVMNQYNKLVVKDYEDLYLTSIASLQTPASSPKPVKGWFWW

SEQ ID NO: 1195 - protein, 42 aa, Artificial Sequence
  Non-cyclic GFR-binding peptide
RVAMNQYNKLVVKDYEDLYLTSIASLQTPASSPKPVKPGPTG

SEQ ID NO: 1196 - protein, 38 aa, Artificial Sequence
  Non-cyclic GFR-binding peptide
SKVIMRHKRLIVNSSDDYYLVSTASLQTPASSPPGPTG

SEQ ID NO: 1197 - protein, 30 aa, Artificial Sequence
  Non-cyclic GFR-binding peptide
RHKRLIVNNSSDLYLMSIASLKTPAPGPTG

SEQ ID NO: 1198 - protein, 30 aa, Artificial Sequence
  Non-cyclic GFR-binding peptide
RYKKLIVNNSSDLYLMSIASLKTPAPGPTG

SEQ ID NO: 1199 - protein, 44 aa, Artificial Sequence
  Non-cyclic GFR-binding peptide
RSGSGEVVMDYHYKLVVKENEDKYLTSIPSLETPVSSAKPGPTG

SEQ ID NO: 1200 - protein, 36 aa, Artificial Sequence
  Non-cyclic GFR-binding peptide
MDYHYKLVVKENEDKYLTSIPSLETPVSSAKPGPTG

SEQ ID NO: 1201 - protein, 38 aa, Artificial Sequence
  Non-cyclic GFR-binding peptide
NHQMDRYKKLGGGGGFYLMSIANLQTPASSPKPPGPTG

SEQ ID NO: 1202 - protein, 44 aa, Artificial Sequence
  Non-cyclic GFR-binding peptide
RSGSGEVVMDYHYKLVVKENEDKYLTSIPSLETPVSSAKGWFWW

SEQ ID NO: 1203 - protein, 35 aa, Artificial Sequence
  Non-cyclic GFR-binding peptide
NHQMDQYNKLGGGLYLMSIASLEQSVASSAGWFWW

SEQ ID NO: 1204 - protein, 42 aa, Artificial Sequence
  Non-cyclic GFR-binding peptide
HDELTQYNKLPKKRVIELYLTSIASLQVQTPRCQVNRPGPTG

SEQ ID NO: 1205 - protein, 36 aa, Artificial Sequence
  Non-cyclic GFR-binding peptide
ELTQYNKLAAALYLTSIASLQVQTPRCQVNRPGPTG

SEQ ID NO: 1206 - protein, 38 aa, Artificial Sequence
  Non-cyclic GFR-binding peptide
SRVIMNSLQEVKPKRGVYYVIPLPELETPVSSAKPIKC

SEQ ID NO: 1207 - protein, 40 aa, Artificial Sequence
  Non-cyclic GFR-binding peptide
KSSRVIMNSLQEVKPTRGVYYVIPLPELAQPVSSPAASAC

SEQ ID NO: 1208 - protein, 28 aa, Artificial Sequence
  Non-cyclic GFR-binding peptide
VQVEKHQGQHPKIRVKAVKVSREETPVC

SEQ ID NO: 1209 - protein, 30 aa, Artificial Sequence
  Non-cyclic GFR-binding peptide
LFSMEGIHQGQHPKIRMIQMTINSEETPVC

SEQ ID NO: 1210 - protein, 42 aa, Artificial Sequence
  Non-cyclic GFR-binding peptide
ALHDELRVTAKKLKPKKRVYEIKRVQVPRLQVQTPRCQVNRC

SEQ ID NO: 1211 - protein, 35 aa, Artificial Sequence
  Non-cyclic GFR-binding peptide
MNPYVKLVVNKNEDFFLISLSSMKEPVSSPEPIGC

SEQ ID NO: 1212 - protein, 35 aa, Artificial Sequence
  Non-cyclic GFR-binding peptide
MNPYVKLVVNKNEDFFLLSLSSTKEPVSSPEPIGC

SEQ ID NO: 1213 - protein, 41 aa, Artificial Sequence
  Non-cyclic GFR-binding peptide
GSAEVVMDEYQKYVVNNAADIYLISIPSLRAPVSSSAPAAC

SEQ ID NO: 1214 - protein, 38 aa, Artificial Sequence
  Non-cyclic GFR-binding peptide
EVVMDEYQKYVVNNAADIYLISIPSLRAPVSSSAPAAC

SEQ ID NO: 1215 - protein, 35 aa, Artificial Sequence
  Non-cyclic GFR-binding peptide
MDEYQKYVVNNAADIYLLSIPSLRAPVSSSAPAAC

SEQ ID NO: 1216 - protein, 27 aa, Artificial Sequence
  Non-cyclic GFR-binding peptide
MDEYQKYVVNNAADIYLLSIPSLRAPC

SEQ ID NO: 1217 - protein, 32 aa, Artificial Sequence
  Non-cyclic GFR-binding peptide
MDEYQKYAAAIYLISIPSLRAPVSSSAPAAAC

SEQ ID NO: 1218 - protein, 26 aa, Artificial Sequence
  Non-cyclic GFR-binding peptide
EYQKYVVNNAADIYLISIPSLRQPVC

SEQ ID NO: 1219 - protein, 39 aa, Artificial Sequence
  Non-cyclic GFR-binding peptide
ARVVMDEYQKYVVNNAADIYLISIPSLQTPASSPKPVTC

SEQ ID NO: 1220 - protein, 32 aa, Artificial Sequence
  Non-cyclic GFR-binding peptide
EAVSMGEEYQKYTPVGMDDIYLISIPSLKTPV

SEQ ID NO: 1221 - protein, 32 aa, Artificial Sequence
  Non-cyclic GFR-binding peptide
EAVSMGEEYQKYTPVGMDDIYLISIPSLAQPV

SEQ ID NO: 1222 - protein, 31 aa, Artificial Sequence
  Non-cyclic GFR-binding peptide
HQLFSMEGIHQGQHPKIRMIQTTINSEETPV

SEQ ID NO: 1223 - protein, 31 aa, Artificial Sequence
  Non-cyclic GFR-binding peptide
EVVAASMEGLHGQHPKIRIFLISIPSLETPV

SEQ ID NO: 1224 - protein, 30 aa, Artificial Sequence
  Non-cyclic GFR-binding peptide
EVVMDNSLQEIVKENEDYYLLTLPELQVQT

SEQ ID NO: 1225 - protein, 30 aa, Artificial Sequence
  Non-cyclic GFR-binding peptide
RVVMDNSLQEVVNNASDYYLITLPELRLQV

SEQ ID NO: 1226 - protein, 30 aa, Artificial Sequence
  Non-cyclic GFR-binding peptide
RVVMNNSLQEIVNSSDDYYVIELPELKTPA

SEQ ID NO: 1227 - protein, 31 aa, Artificial Sequence
  Non-cyclic GFR-binding peptide
SREVIMEYQKYVKPKRGVIFLISIPSLAQPV

SEQ ID NO: 1228 - protein, 30 aa, Artificial Sequence
  Non-cyclic GFR-binding peptide
HEELREYQKYVKPKRGVIFLISIPSLQTPA

SEQ ID NO: 1229 - protein, 30 aa, Artificial Sequence
  Non-cyclic GFR-binding peptide
SVAMNRYKKLIVNSSDDFYLTSIANLAQPV

SEQ ID NO: 1230 - protein, 30 aa, Artificial Sequence
  Non-cyclic GFR-binding peptide
SVAMNPYVKLVVNKNEDFFLISLSSMKEPV

SEQ ID NO: 1231 - protein, 27 aa, Artificial Sequence
  Non-cyclic GFR-binding peptide
MDEYQKYVVNNAADIYLISIPSLRAPV

SEQ ID NO: 1232 - protein, 31 aa, Artificial Sequence
  Non-cyclic GFR-binding peptide
KNHQLFPIKGYIIQNKENFYLMNIPSLAQPV

SEQ ID NO: 1233 - protein, 31 aa, Artificial Sequence
  Non-cyclic GFR-binding peptide
KNHQLFQYNKLPKKRVIELYLTSIASLQTPA

SEQ ID NO: 1234 - protein, 30 aa, Artificial Sequence
  Non-cyclic GFR-binding peptide
HDEMEQYNKLPKKRVIELYLTSIASLQTPA

SEQ ID NO: 1235 - protein, 32 aa, Artificial Sequence
  Non-cyclic GFR-binding peptide
EAVSMGEEYQKYTPVGMKDIYLISIPSLKTPV

SEQ ID NO: 1236 - protein, 32 aa, Artificial Sequence
  Non-cyclic GFR-binding peptide
EAVSMGEEYQKYTPVGMEDIYLISIPSLRAPV

SEQ ID NO: 1237 - protein, 31 aa, Artificial Sequence
  Non-cyclic GFR-binding peptide
RVVMNSMEGLHGQHPKLRIFLISIPSLAQPV

SEQ ID NO: 1238 - protein, 30 aa, Artificial Sequence
  Non-cyclic GFR-binding peptide
EVVMDNSLQEIVKENEDYYLLTLPELAQPV

SEQ ID NO: 1239 - protein, 30 aa, Artificial Sequence
  Non-cyclic GFR-binding peptide
SKVMDNSLQEVANNASDYYLITLPELETPV

SEQ ID NO: 1240 - protein, 30 aa, Artificial Sequence
  Non-cyclic GFR-binding peptide
RVVMNNSLQEIVNSSDDYYVITLPELKTPA

SEQ ID NO: 1241 - protein, 30 aa, Artificial Sequence
  Non-cyclic GFR-binding peptide
EVVMNEYQKYVKPKGGVIFLISIPSLETPV

SEQ ID NO: 1242 - protein, 31 aa, Artificial Sequence
  Non-cyclic GFR-binding peptide
EVVSMGRYKKLIVNSSEDFYLTSIANHHVRS

SEQ ID NO: 1243 - protein, 42 aa, Artificial Sequence
  Non-cyclic GFR-binding peptide
RSASSEVVMNQYNKLVVNKNEDLYLMSIASMKTPVSSPEPIG

SEQ ID NO: 1244 - protein, 42 aa, Artificial Sequence
  Non-cyclic GFR-binding peptide
HSGSSEVVMNQYNKLIVNSSDDLYLMSIASLKTPVSTPKTVH

SEQ ID NO: 1245 - protein, 42 aa, Artificial Sequence
  Non-cyclic GFR-binding peptide
HSGSSEVVMNQYNKLIVNSSDDLYLMSIASLKTPVSSPKPVY

SEQ ID NO: 1246 - protein, 42 aa, Artificial Sequence
  Non-cyclic GFR-binding peptide
HSGSAEVVMNQYNKLIVNSSDDLYLMSIASLQTPVSSPKPVT

SEQ ID NO: 1247 - protein, 42 aa, Artificial Sequence
  Non-cyclic GFR-binding peptide
HSGSAEVVMNQYNKLIVNNSSDLYLMSIASLKTPVSSAKPVA

SEQ ID NO: 1248 - protein, 43 aa, Artificial Sequence
  Non-cyclic GFR-binding peptide
RSGSEVVSMGEQYNKLTPVGMDDLYLMSIASLKTPVSSAKGVK

SEQ ID NO: 1249 - protein, 42 aa, Artificial Sequence
  Non-cyclic GFR-binding peptide
RSGSEEVVMGQYNKLYTVVGKDLYLMSIASLKTPVSSAKSAK

SEQ ID NO: 1250 - protein, 42 aa, Artificial Sequence
  Non-cyclic GFR-binding peptide
SSGSREVVMGQYNKLIIQQKDNLYLMSIASMKTPVSSPGASG

SEQ ID NO: 1251 - protein, 42 aa, Artificial Sequence
  Non-cyclic GFR-binding peptide
RSGSAEVVMDQYNKLVVNNAADLYLMSIASLRTPVSSSAPAA

SEQ ID NO: 1252 - protein, 42 aa, Artificial Sequence
  Non-cyclic GFR-binding peptide
RSGSSEVVMDQYNKLVVNNASDLYLMSIASLRTPVSSTPPTS

SEQ ID NO: 1253 - protein, 42 aa, Artificial Sequence
  Non-cyclic GFR-binding peptide
HSGSSEVVMNQYNKLIVNSSDDLYLMSIASLKTPVSSPKPVH

SEQ ID NO: 1254 - protein, 41 aa, Artificial Sequence
  Non-cyclic GFR-binding peptide
LSGSEVVIMQYNKLLLVRGNDLYLMSIASTKTPVSSTSPVR

SEQ ID NO: 1255 - protein, 41 aa, Artificial Sequence
  Non-cyclic GFR-binding peptide
SSKSEVVIMQYNKLVKPKRGVLYLMSIASLATPVSSPAASA

SEQ ID NO: 1256 - protein, 41 aa, Artificial Sequence
  Non-cyclic GFR-binding peptide
SSKSEVVIMQYNKLIKPTKGILYLMSIASLDTPVSSPSASA

SEQ ID NO: 1257 - protein, 41 aa, Artificial Sequence
  Non-cyclic GFR-binding peptide
SSKSEVVVMQYNKLVKPTRGVLYLMSIASLDTPVSSPSASA

SEQ ID NO: 1258 - protein, 42 aa, Artificial Sequence
  Non-cyclic GFR-binding peptide
RSASSEVTMNQYNKLVVNKNEDLYLMSIASMKEPVSSPEPIG

SEQ ID NO: 1259 - protein, 42 aa, Artificial Sequence
  Non-cyclic GFR-binding peptide
HSGSSRVVMNQYNKLIVNSSDDLYLMSIASLKTPASTPKTVH

SEQ ID NO: 1260 - protein, 42 aa, Artificial Sequence
  Non-cyclic GFR-binding peptide
HSGSSRVVMNQYNKLIVNSSDDLYLMSIASLKTPASSPKPVY

SEQ ID NO: 1261 - protein, 42 aa, Artificial Sequence
  Non-cyclic GFR-binding peptide
HSGSARVVMNQYNKLIVNSSDDLYLMSIASLQTPASSPKPVT

SEQ ID NO: 1262 - protein, 42 aa, Artificial Sequence
  Non-cyclic GFR-binding peptide
HSGSAKVVMNQYNKLIVNNSSDLYLMSIASLKTPASSAKPVA

SEQ ID NO: 1263 - protein, 43 aa, Artificial Sequence
  Non-cyclic GFR-binding peptide
RSGSEAVSMGEQYNKLTPVGMDDLYLMSIASLKTPVSSAKGVK

SEQ ID NO: 1264 - protein, 42 aa, Artificial Sequence
  Non-cyclic GFR-binding peptide
RSGSESVAMGQYNKLYTVVGKDLYLMSIASLKTPVSSAKSAK

SEQ ID NO: 1265 - protein, 42 aa, Artificial Sequence
  Non-cyclic GFR-binding peptide
SSGSRDVVMGQYNKLIIQQKDNLYLMSIASMKTPTSSPGASG

SEQ ID NO: 1266 - protein, 42 aa, Artificial Sequence
  Non-cyclic GFR-binding peptide
RSGSAEVVMDQYNKLVVNNAADLYLMSIASLRAPVSSSAPAA

SEQ ID NO: 1267 - protein, 42 aa, Artificial Sequence
  Non-cyclic GFR-binding peptide
HSGSSRVVMNQYNKLIVNSSDDLYLMSIASLKTPASSPKPVH

SEQ ID NO: 1268 - protein, 41 aa, Artificial Sequence
  Non-cyclic GFR-binding peptide
LSGSEEVIMQYNKLLLVRGNDLYLMSIASTKVPASSTSPVR

SEQ ID NO: 1269 - protein, 41 aa, Artificial Sequence
  Non-cyclic GFR-binding peptide
SSKSSRVIMQYNKLVKPKRGVLYLMSIASLAQPVSSPAASA

SEQ ID NO: 1270 - protein, 41 aa, Artificial Sequence
  Non-cyclic GFR-binding peptide
SSKSSKVIMQYNKLIKPTKGILYLMSIASLDQSVSSPSASA

SEQ ID NO: 1271 - protein, 41 aa, Artificial Sequence
  Non-cyclic GFR-binding peptide
SSKSSKVVMQYNKLVKPTRGVLYLMSIASLDQPVSSPSASA

SEQ ID NO: 1272 - protein, 44 aa, Artificial Sequence
  Non-cyclic GFR-binding peptide
RSESKNHQLFQYNKLHQGQHPKIRLYLMSIASEETPVSELGEDN

SEQ ID NO: 1273 - protein, 44 aa, Artificial Sequence
  Non-cyclic GFR-binding peptide
RSESQSHEELQYNKLHQGQHPKIRLYLMSIASQGTPVSELGEDN

SEQ ID NO: 1274 - protein, 45 aa, Artificial Sequence
  Non-cyclic GFR-binding peptide
ASASELHEELRQYNKLLKPKKRVYELYLMSIASHHVRSPQSKVSS

SEQ ID NO: 1275 - protein, 45 aa, Artificial Sequence
  Non-cyclic GFR-binding peptide
ESKSALHDELTQYNKLFIPKKRVIELYLMSIASLQVQTPRSQVNR

SEQ ID NO: 1276 - protein, 42 aa, Artificial Sequence
  Non-cyclic GFR-binding peptide
RSGSGEVTMDPYVKLVVKENEDFFLISLSSLEEPVSSAKPIK

SEQ ID NO: 1277 - protein, 42 aa, Artificial Sequence
  Non-cyclic GFR-binding peptide
RSGSGEVTMEPYVKLVVKDYEDFFLISLSSLEEPVSSAKPIS

SEQ ID NO: 1278 - protein, 42 aa, Artificial Sequence
  Non-cyclic GFR-binding peptide
HSGSSEVTMNPYVKLIVNSSDDFFLISLSSLKEPVSTPKTVH

SEQ ID NO: 1279 - protein, 42 aa, Artificial Sequence
  Non-cyclic GFR-binding peptide
HSGSSEVTMNPYVKLIVNSSDDFFLISLSSLKEPVSSPKPVY

SEQ ID NO: 1280 - protein, 42 aa, Artificial Sequence
  Non-cyclic GFR-binding peptide
HSGSAEVTMNPYVKLIVNSSDDFFLISLSSLQEPVSSPKPVT

SEQ ID NO: 1281 - protein, 42 aa, Artificial Sequence
  Non-cyclic GFR-binding peptide
HSGSAEVTMNPYVKLIVNNSSDFFLISLSSLKEPVSSAKPVA

SEQ ID NO: 1282 - protein, 43 aa, Artificial Sequence
  Non-cyclic GFR-binding peptide
RSGSEVTSMGEPYVKLTPVGMDDFFLISLSSLKEPVSSAKGVK

SEQ ID NO: 1283 - protein, 42 aa, Artificial Sequence
  Non-cyclic GFR-binding peptide
RSGSEEVTMGPYVKLYTVVGKDFFLISLSSLKEPVSSAKSAK

SEQ ID NO: 1284 - protein, 42 aa, Artificial Sequence
  Non-cyclic GFR-binding peptide
SSGSREVTMGPYVKLIIQQKDNFFLISLSSMKEPVSSPGASG

SEQ ID NO: 1285 - protein, 42 aa, Artificial Sequence
  Non-cyclic GFR-binding peptide
RSGSAEVTMDPYVKLVVNNAADFFLISLSSLREPVSSSAPAA

SEQ ID NO: 1286 - protein, 42 aa, Artificial Sequence
  Non-cyclic GFR-binding peptide
RSGSSEVTMDPYVKLVVNNASDFFLISLSSLREPVSSTPPTS

SEQ ID NO: 1287 - protein, 42 aa, Artificial Sequence
  Non-cyclic GFR-binding peptide
HSGSSEVTMNPYVKLIVNSSDDFFLISLSSLKEPVSSPKPVH

SEQ ID NO: 1288 - protein, 41 aa, Artificial Sequence
  Non-cyclic GFR-binding peptide
LSGSEVTIMPYVKLLLVRGNDFFLISLSSTKEPVSSTSPVR

SEQ ID NO: 1289 - protein, 41 aa, Artificial Sequence
  Non-cyclic GFR-binding peptide
SSKSEVTIMPYVKLVKPKRGVFFLISLSSLAEPVSSPAASA

SEQ ID NO: 1290 - protein, 41 aa, Artificial Sequence
  Non-cyclic GFR-binding peptide
SSKSEVTIMPYVKLIKPTKGIFFLISLSSLDEPVSSPSASA

SEQ ID NO: 1291 - protein, 41 aa, Artificial Sequence
  Non-cyclic GFR-binding peptide
SSKSEVTVMPYVKLVKPTRGVFFLISLSSLDEPVSSPSASA

SEQ ID NO: 1292 - protein, 42 aa, Artificial Sequence
  Non-cyclic GFR-binding peptide
RSGSGEVVMDPYVKLVVKENEDFFLISLSSLETPVSSAKPIK

SEQ ID NO: 1293 - protein, 42 aa, Artificial Sequence
  Non-cyclic GFR-binding peptide
RSGSGEVVMEPYVKLVVKDYEDFFLISLSSLETPVSSAKPIS

SEQ ID NO: 1294 - protein, 42 aa, Artificial Sequence
  Non-cyclic GFR-binding peptide
HSGSSRVVMNPYVKLIVNSSDDFFLISLSSLKTPASTPKTVH

SEQ ID NO: 1295 - protein, 42 aa, Artificial Sequence
  Non-cyclic GFR-binding peptide
HSGSSRVVMNPYVKLIVNSSDDFFLISLSSLKTPASSPKPVY

SEQ ID NO: 1296 - protein, 42 aa, Artificial Sequence
  Non-cyclic GFR-binding peptide
HSGSARVVMNPYVKLIVNSSDDFFLISLSSLQTPASSPKPVT

SEQ ID NO: 1297 - protein, 42 aa, Artificial Sequence
  Non-cyclic GFR-binding peptide
HSGSAKVVMNPYVKLIVNNSSDFFLISLSSLKTPASSAKPVA

SEQ ID NO: 1298 - protein, 43 aa, Artificial Sequence
  Non-cyclic GFR-binding peptide
RSGSEAVSMGEPYVKLTPVGMDDFFLISLSSLKTPVSSAKGVK

SEQ ID NO: 1299 - protein, 42 aa, Artificial Sequence
  Non-cyclic GFR-binding peptide
RSGSESVAMGPYVKLYTVVGKDFFLISLSSLKTPVSSAKSAK

SEQ ID NO: 1300 - protein, 42 aa, Artificial Sequence
  Non-cyclic GFR-binding peptide
SSGSRDVVMGPYVKLIIQQKDNFFLISLSSMKTPTSSPGASG

SEQ ID NO: 1301 - protein, 42 aa, Artificial Sequence
  Non-cyclic GFR-binding peptide
RSGSAEVVMDPYVKLVVNNAADFFLISLSSLRAPVSSSAPAA

SEQ ID NO: 1302 - protein, 42 aa, Artificial Sequence
  Non-cyclic GFR-binding peptide
RSGSSEVVMDPYVKLVVNNASDFFLISLSSLRTPVSSTPPTS

SEQ ID NO: 1303 - protein, 42 aa, Artificial Sequence
  Non-cyclic GFR-binding peptide
HSGSSRVVMNPYVKLIVNSSDDFFLISLSSLKTPASSPKPVH

SEQ ID NO: 1304 - protein, 41 aa, Artificial Sequence
  Non-cyclic GFR-binding peptide
LSGSEEVIMPYVKLLLVRGNDFFLISLSSTKVPASSTSPVR

SEQ ID NO: 1305 - protein, 41 aa, Artificial Sequence
  Non-cyclic GFR-binding peptide
SSKSSRVIMPYVKLVKPKRGVFFLISLSSLAQPVSSPAASA

SEQ ID NO: 1306 - protein, 41 aa, Artificial Sequence
  Non-cyclic GFR-binding peptide
SSKSSKVIMPYVKLIKPTKGIFFLISLSSLDQSVSSPSASA

SEQ ID NO: 1307 - protein, 41 aa, Artificial Sequence
  Non-cyclic GFR-binding peptide
SSKSSKVVMPYVKLVKPTRGVFFLISLSSLDQPVSSPSASA

SEQ ID NO: 1308 - protein, 44 aa, Artificial Sequence
  Non-cyclic GFR-binding peptide
RSESKNHQLFPYVKLHQGQHPKIRFFLISLSSEETPVSELGEDN

SEQ ID NO: 1309 - protein, 44 aa, Artificial Sequence
  Non-cyclic GFR-binding peptide
RSESQSHEELPYVKLHQGQHPKIRFFLISLSSQGTPVSELGEDN

SEQ ID NO: 1310 - protein, 45 aa, Artificial Sequence
  Non-cyclic GFR-binding peptide
ASASELHEELRPYVKLLKPKKRVYEFFLISLSSHHVRSPQSKVSS

SEQ ID NO: 1311 - protein, 45 aa, Artificial Sequence
  Non-cyclic GFR-binding peptide
ESKSALHDELTPYVKLFIPKKRVIEFFLISLSSLQVQTPRSQVNR

SEQ ID NO: 1312 - protein, 42 aa, Artificial Sequence
  Non-cyclic GFR-binding peptide
RSGSGRVVMDRYKKLVVKENEDFYLVSIANLETPASSAKPIK

SEQ ID NO: 1313 - protein, 42 aa, Artificial Sequence
  Non-cyclic GFR-binding peptide
RSASSRVVMNRYKKLVVNKNEDFYLVSIANMKTPASSPEPIG

SEQ ID NO: 1314 - protein, 42 aa, Artificial Sequence
  Non-cyclic GFR-binding peptide
RSGSGRVVMERYKKLVVKDYEDFYLVSIANLETPASSAKPIS

SEQ ID NO: 1315 - protein, 42 aa, Artificial Sequence
  Non-cyclic GFR-binding peptide
HSGSARVVMNRYKKLIVNNSSDFYLVSIANLKTPASSAKPVA

SEQ ID NO: 1316 - protein, 43 aa, Artificial Sequence
  Non-cyclic GFR-binding peptide
RSGSRVVSMGERYKKLTPVGMDDFYLVSIANLKTPASSAKGVK

SEQ ID NO: 1317 - protein, 42 aa, Artificial Sequence
  Non-cyclic GFR-binding peptide
RSGSERVVMGRYKKLYTVVGKDFYLVSIANLKTPASSAKSAK

SEQ ID NO: 1318 - protein, 42 aa, Artificial Sequence
  Non-cyclic GFR-binding peptide
SSGSRRVVMGRYKKLIIQQKDNFYLVSIANMKTPASSPGASG

SEQ ID NO: 1319 - protein, 42 aa, Artificial Sequence
  Non-cyclic GFR-binding peptide
RSGSARVVMDRYKKLVVNNAADFYLVSIANLRTPASSSAPAA

SEQ ID NO: 1320 - protein, 42 aa, Artificial Sequence
  Non-cyclic GFR-binding peptide
RSGSSRVVMDRYKKLVVNNASDFYLVSIANLRTPASSTPPTS

SEQ ID NO: 1321 - protein, 41 aa, Artificial Sequence
  Non-cyclic GFR-binding peptide
LSGSRVVIMRYKKLLLVRGNDFYLVSIANTKTPASSTSPVR

SEQ ID NO: 1322 - protein, 41 aa, Artificial Sequence
  Non-cyclic GFR-binding peptide
SSKSRVVIMRYKKLVKPKRGVFYLVSIANLATPASSPAASA

SEQ ID NO: 1323 - protein, 41 aa, Artificial Sequence
  Non-cyclic GFR-binding peptide
SSKSRVVIMRYKKLIKPTKGIFYLVSIANLDTPASSPSASA

SEQ ID NO: 1324 - protein, 41 aa, Artificial Sequence
  Non-cyclic GFR-binding peptide
SSKSRVVVMRYKKLVKPTRGVFYLVSIANLDTPASSPSASA

SEQ ID NO: 1325 - protein, 42 aa, Artificial Sequence
  Non-cyclic GFR-binding peptide
RSGSGEVVMDRYKKLVVKENEDFYLVSIANLETPVSSAKPIK

SEQ ID NO: 1326 - protein, 42 aa, Artificial Sequence
  Non-cyclic GFR-binding peptide
RSASSEVTMNRYKKLVVNKNEDFYLVSIANMKEPVSSPEPIG

SEQ ID NO: 1327 - protein, 42 aa, Artificial Sequence
  Non-cyclic GFR-binding peptide
RSGSGEVVMERYKKLVVKDYEDFYLVSIANLETPVSSAKPIS

SEQ ID NO: 1328 - protein, 42 aa, Artificial Sequence
  Non-cyclic GFR-binding peptide
HSGSAKVVMNRYKKLIVNNSSDFYLVSIANLKTPASSAKPVA

SEQ ID NO: 1329 - protein, 43 aa, Artificial Sequence
  Non-cyclic GFR-binding peptide
RSGSEAVSMGERYKKLTPVGMDDFYLVSIANLKTPVSSAKGVK

SEQ ID NO: 1330 - protein, 42 aa, Artificial Sequence
  Non-cyclic GFR-binding peptide
RSGSESVAMGRYKKLYTVVGKDFYLVSIANLKTPVSSAKSAK

SEQ ID NO: 1331 - protein, 42 aa, Artificial Sequence
  Non-cyclic GFR-binding peptide
SSGSRDVVMGRYKKLIIQQKDNFYLVSIANMKTPTSSPGASG

SEQ ID NO: 1332 - protein, 42 aa, Artificial Sequence
  Non-cyclic GFR-binding peptide
RSGSAEVVMDRYKKLVVNNAADFYLVSIANLRAPVSSSAPAA

SEQ ID NO: 1333 - protein, 42 aa, Artificial Sequence
  Non-cyclic GFR-binding peptide
RSGSSEVVMDRYKKLVVNNASDFYLVSIANLRTPVSSTPPTS

SEQ ID NO: 1334 - protein, 41 aa, Artificial Sequence
  Non-cyclic GFR-binding peptide
LSGSEEVIMRYKKLLLVRGNDFYLVSIANTKVPASSTSPVR

SEQ ID NO: 1335 - protein, 41 aa, Artificial Sequence
  Non-cyclic GFR-binding peptide
SSKSSRVIMRYKKLVKPKRGVFYLVSIANLAQPVSSPAASA

SEQ ID NO: 1336 - protein, 41 aa, Artificial Sequence
  Non-cyclic GFR-binding peptide
SSKSSKVIMRYKKLIKPTKGIFYLVSIANLDQSVSSPSASA

SEQ ID NO: 1337 - protein, 41 aa, Artificial Sequence
  Non-cyclic GFR-binding peptide
SSKSSKVVMRYKKLVKPTRGVFYLVSIANLDQPVSSPSASA

SEQ ID NO: 1338 - protein, 44 aa, Artificial Sequence
  Non-cyclic GFR-binding peptide
RSESKNHQLFRYKKLHQGQHPKIRFYLVSIANEETPVSELGEDN

SEQ ID NO: 1339 - protein, 44 aa, Artificial Sequence
  Non-cyclic GFR-binding peptide
RSESQSHEELRYKKLHQGQHPKIRFYLVSIANQGTPVSELGEDN

SEQ ID NO: 1340 - protein, 45 aa, Artificial Sequence
  Non-cyclic GFR-binding peptide
ASASELHEELRRYKKLLKPKKRVYEFYLVSIANHHVRSPQSKVSS

SEQ ID NO: 1341 - protein, 45 aa, Artificial Sequence
  Non-cyclic GFR-binding peptide
ESKSALHDELTRYKKLFIPKKRVIEFYLVSIANLQVQTPRSQVNR

SEQ ID NO: 1342 - protein, 42 aa, Artificial Sequence
  Non-cyclic GFR-binding peptide
RSGSGKVVMDRHKRLVVKENEDYYLVSTASLETPASSAKPIK

SEQ ID NO: 1343 - protein, 42 aa, Artificial Sequence
  Non-cyclic GFR-binding peptide
RSASSKVVMNRHKRLVVNKNEDYYLVSTASMKTPASSPEPIG

SEQ ID NO: 1344 - protein, 42 aa, Artificial Sequence
  Non-cyclic GFR-binding peptide
RSGSGKVVMERHKRLVVKDYEDYYLVSTASLETPASSAKPIS

SEQ ID NO: 1345 - protein, 42 aa, Artificial Sequence
  Non-cyclic GFR-binding peptide
HSGSSKVVMNRHKRLIVNSSDDYYLVSTASLKTPASTPKTVH

SEQ ID NO: 1346 - protein, 42 aa, Artificial Sequence
  Non-cyclic GFR-binding peptide
HSGSSKVVMNRHKRLIVNSSDDYYLVSTASLKTPASSPKPVY

SEQ ID NO: 1347 - protein, 42 aa, Artificial Sequence
  Non-cyclic GFR-binding peptide
HSGSAKVVMNRHKRLIVNSSDDYYLVSTASLQTPASSPKPVT

SEQ ID NO: 1348 - protein, 43 aa, Artificial Sequence
  Non-cyclic GFR-binding peptide
RSGSKVVSMGERHKRLTPVGMDDYYLVSTASLKTPASSAKGVK

SEQ ID NO: 1349 - protein, 42 aa, Artificial Sequence
  Non-cyclic GFR-binding peptide
RSGSEKVVMGRHKRLYTVVGKDYYLVSTASLKTPASSAKSAK

SEQ ID NO: 1350 - protein, 42 aa, Artificial Sequence
  Non-cyclic GFR-binding peptide
SSGSRKVVMGRHKRLIIQQKDNYYLVSTASMKTPASSPGASG

SEQ ID NO: 1351 - protein, 42 aa, Artificial Sequence
  Non-cyclic GFR-binding peptide
RSGSAKVVMDRHKRLVVNNAADYYLVSTASLRTPASSSAPAA

SEQ ID NO: 1352 - protein, 42 aa, Artificial Sequence
  Non-cyclic GFR-binding peptide
RSGSSKVVMDRHKRLVVNNASDYYLVSTASLRTPASSTPPTS

SEQ ID NO: 1353 - protein, 42 aa, Artificial Sequence
  Non-cyclic GFR-binding peptide
HSGSSKVVMNRHKRLIVNSSDDYYLVSTASLKTPASSPKPVH

SEQ ID NO: 1354 - protein, 41 aa, Artificial Sequence
  Non-cyclic GFR-binding peptide
LSGSKVVIMRHKRLLLVRGNDYYLVSTASTKTPASSTSPVR

SEQ ID NO: 1355 - protein, 41 aa, Artificial Sequence
  Non-cyclic GFR-binding peptide
SSKSKVVIMRHKRLVKPKRGVYYLVSTASLATPASSPAASA

SEQ ID NO: 1356 - protein, 41 aa, Artificial Sequence
  Non-cyclic GFR-binding peptide
SSKSKVVIMRHKRLIKPTKGIYYLVSTASLDTPASSPSASA

SEQ ID NO: 1357 - protein, 41 aa, Artificial Sequence
  Non-cyclic GFR-binding peptide
SSKSKVVVMRHKRLVKPTRGVYYLVSTASLDTPASSPSASA

SEQ ID NO: 1358 - protein, 42 aa, Artificial Sequence
  Non-cyclic GFR-binding peptide
RSGSGEVVMDRHKRLVVKENEDYYLVSTASLETPVSSAKPIK

SEQ ID NO: 1359 - protein, 42 aa, Artificial Sequence
  Non-cyclic GFR-binding peptide
RSASSEVTMNRHKRLVVNKNEDYYLVSTASMKEPVSSPEPIG

SEQ ID NO: 1360 - protein, 42 aa, Artificial Sequence
  Non-cyclic GFR-binding peptide
RSGSGEVVMERHKRLVVKDYEDYYLVSTASLETPVSSAKPIS

SEQ ID NO: 1361 - protein, 42 aa, Artificial Sequence
  Non-cyclic GFR-binding peptide
HSGSSRVVMNRHKRLIVNSSDDYYLVSTASLKTPASTPKTVH

SEQ ID NO: 1362 - protein, 42 aa, Artificial Sequence
  Non-cyclic GFR-binding peptide
HSGSSRVVMNRHKRLIVNSSDDYYLVSTASLKTPASSPKPVY

SEQ ID NO: 1363 - protein, 42 aa, Artificial Sequence
  Non-cyclic GFR-binding peptide
HSGSARVVMNRHKRLIVNSSDDYYLVSTASLQTPASSPKPVT

SEQ ID NO: 1364 - protein, 43 aa, Artificial Sequence
  Non-cyclic GFR-binding peptide
RSGSEAVSMGERHKRLTPVGMDDYYLVSTASLKTPVSSAKGVK

SEQ ID NO: 1365 - protein, 42 aa, Artificial Sequence
  Non-cyclic GFR-binding peptide
RSGSESVAMGRHKRLYTVVGKDYYLVSTASLKTPVSSAKSAK

SEQ ID NO: 1366 - protein, 42 aa, Artificial Sequence
  Non-cyclic GFR-binding peptide
SSGSRDVVMGRHKRLIIQQKDNYYLVSTASMKTPTSSPGASG

SEQ ID NO: 1367 - protein, 42 aa, Artificial Sequence
  Non-cyclic GFR-binding peptide
RSGSAEVVMDRHKRLVVNNAADYYLVSTASLRAPVSSSAPAA

SEQ ID NO: 1368 - protein, 42 aa, Artificial Sequence
  Non-cyclic GFR-binding peptide
RSGSSEVVMDRHKRLVVNNASDYYLVSTASLRTPVSSTPPTS

SEQ ID NO: 1369 - protein, 42 aa, Artificial Sequence
  Non-cyclic GFR-binding peptide
HSGSSRVVMNRHKRLIVNSSDDYYLVSTASLKTPASSPKPVH

SEQ ID NO: 1370 - protein, 41 aa, Artificial Sequence
  Non-cyclic GFR-binding peptide
LSGSEEVIMRHKRLLLVRGNDYYLVSTASTKVPASSTSPVR

SEQ ID NO: 1371 - protein, 41 aa, Artificial Sequence
  Non-cyclic GFR-binding peptide
SSKSSRVIMRHKRLVKPKRGVYYLVSTASLAQPVSSPAASA

SEQ ID NO: 1372 - protein, 41 aa, Artificial Sequence
  Non-cyclic GFR-binding peptide
SSKSSKVIMRHKRLIKPTKGIYYLVSTASLDQSVSSPSASA

SEQ ID NO: 1373 - protein, 41 aa, Artificial Sequence
  Non-cyclic GFR-binding peptide
SSKSSKVVMRHKRLVKPTRGVYYLVSTASLDQPVSSPSASA

SEQ ID NO: 1374 - protein, 44 aa, Artificial Sequence
  Non-cyclic GFR-binding peptide
RSESKNHQLFRHKRLHQGQHPKIRYYLVSTASEETPVSELGEDN

SEQ ID NO: 1375 - protein, 44 aa, Artificial Sequence
  Non-cyclic GFR-binding peptide
RSESQSHEELRHKRLHQGQHPKIRYYLVSTASQGTPVSELGEDN

SEQ ID NO: 1376 - protein, 45 aa, Artificial Sequence
  Non-cyclic GFR-binding peptide
ASASELHEELRRHKRLLKPKKRVYEYYLVSTASHHVRSPQSKVSS

SEQ ID NO: 1377 - protein, 45 aa, Artificial Sequence
  Non-cyclic GFR-binding peptide
ESKSALHDELTRHKRLFIPKKRVIEYYLVSTASLQVQTPRSQVNR

SEQ ID NO: 1378 - protein, 42 aa, Artificial Sequence
  Non-cyclic GFR-binding peptide
RSGSGEAVMDYHYKLVVKENEDKYLVSIPSLETPVSSAKPIK

SEQ ID NO: 1379 - protein, 42 aa, Artificial Sequence
  Non-cyclic GFR-binding peptide
RSASSEAVMNYHYKLVVNKNEDKYLVSIPSMKTPVSSPEPIG

SEQ ID NO: 1380 - protein, 42 aa, Artificial Sequence
  Non-cyclic GFR-binding peptide
RSGSGEAVMEYHYKLVVKDYEDKYLVSIPSLETPVSSAKPIS

SEQ ID NO: 1381 - protein, 42 aa, Artificial Sequence
  Non-cyclic GFR-binding peptide
HSGSSEAVMNYHYKLIVNSSDDKYLVSIPSLKTPVSTPKTVH

SEQ ID NO: 1382 - protein, 42 aa, Artificial Sequence
  Non-cyclic GFR-binding peptide
HSGSSEAVMNYHYKLIVNSSDDKYLVSIPSLKTPVSSPKPVY

SEQ ID NO: 1383 - protein, 42 aa, Artificial Sequence
  Non-cyclic GFR-binding peptide
HSGSAEAVMNYHYKLIVNSSDDKYLVSIPSLQTPVSSPKPVT

SEQ ID NO: 1384 - protein, 42 aa, Artificial Sequence
  Non-cyclic GFR-binding peptide
HSGSAEAVMNYHYKLIVNNSSDKYLVSIPSLKTPVSSAKPVA

SEQ ID NO: 1385 - protein, 42 aa, Artificial Sequence
  Non-cyclic GFR-binding peptide
RSGSEEAVMGYHYKLYTVVGKDKYLVSIPSLKTPVSSAKSAK

SEQ ID NO: 1386 - protein, 42 aa, Artificial Sequence
  Non-cyclic GFR-binding peptide
SSGSREAVMGYHYKLIIQQKDNKYLVSIPSMKTPVSSPGASG

SEQ ID NO: 1387 - protein, 42 aa, Artificial Sequence
  Non-cyclic GFR-binding peptide
RSGSAEAVMDYHYKLVVNNAADKYLVSIPSLRTPVSSSAPAA

SEQ ID NO: 1388 - protein, 42 aa, Artificial Sequence
  Non-cyclic GFR-binding peptide
RSGSSEAVMDYHYKLVVNNASDKYLVSIPSLRTPVSSTPPTS

SEQ ID NO: 1389 - protein, 42 aa, Artificial Sequence
  Non-cyclic GFR-binding peptide
HSGSSEAVMNYHYKLIVNSSDDKYLVSIPSLKTPVSSPKPVH

SEQ ID NO: 1390 - protein, 41 aa, Artificial Sequence
  Non-cyclic GFR-binding peptide
LSGSEAVIMYHYKLLLVRGNDKYLVSIPSTKTPVSSTSPVR

SEQ ID NO: 1391 - protein, 41 aa, Artificial Sequence
  Non-cyclic GFR-binding peptide
SSKSEAVIMYHYKLVKPKRGVKYLVSIPSLATPVSSPAASA

SEQ ID NO: 1392 - protein, 41 aa, Artificial Sequence
  Non-cyclic GFR-binding peptide
SSKSEAVIMYHYKLIKPTKGIKYLVSIPSLDTPVSSPSASA

SEQ ID NO: 1393 - protein, 41 aa, Artificial Sequence
  Non-cyclic GFR-binding peptide
SSKSEAVVMYHYKLVKPTRGVKYLVSIPSLDTPVSSPSASA

SEQ ID NO: 1394 - protein, 42 aa, Artificial Sequence
  Non-cyclic GFR-binding peptide
RSGSGEVVMDYHYKLVVKENEDKYLVSIPSLETPVSSAKPIK

SEQ ID NO: 1395 - protein, 42 aa, Artificial Sequence
  Non-cyclic GFR-binding peptide
RSASSEVTMNYHYKLVVNKNEDKYLVSIPSMKEPVSSPEPIG

SEQ ID NO: 1396 - protein, 42 aa, Artificial Sequence
  Non-cyclic GFR-binding peptide
RSGSGEVVMEYHYKLVVKDYEDKYLVSIPSLETPVSSAKPIS

SEQ ID NO: 1397 - protein, 42 aa, Artificial Sequence
  Non-cyclic GFR-binding peptide
HSGSSRVVMNYHYKLIVNSSDDKYLVSIPSLKTPASTPKTVH

SEQ ID NO: 1398 - protein, 42 aa, Artificial Sequence
  Non-cyclic GFR-binding peptide
HSGSSRVVMNYHYKLIVNSSDDKYLVSIPSLKTPASSPKPVY

SEQ ID NO: 1399 - protein, 42 aa, Artificial Sequence
  Non-cyclic GFR-binding peptide
HSGSARVVMNYHYKLIVNSSDDKYLVSIPSLQTPASSPKPVT

SEQ ID NO: 1400 - protein, 42 aa, Artificial Sequence
  Non-cyclic GFR-binding peptide
HSGSAKVVMNYHYKLIVNNSSDKYLVSIPSLKTPASSAKPVA

SEQ ID NO: 1401 - protein, 42 aa, Artificial Sequence
  Non-cyclic GFR-binding peptide
RSGSESVAMGYHYKLYTVVGKDKYLVSIPSLKTPVSSAKSAK

SEQ ID NO: 1402 - protein, 42 aa, Artificial Sequence
  Non-cyclic GFR-binding peptide
SSGSRDVVMGYHYKLIIQQKDNKYLVSIPSMKTPTSSPGASG

SEQ ID NO: 1403 - protein, 42 aa, Artificial Sequence
  Non-cyclic GFR-binding peptide
RSGSAEVVMDYHYKLVVNNAADKYLVSIPSLRAPVSSSAPAA

SEQ ID NO: 1404 - protein, 42 aa, Artificial Sequence
  Non-cyclic GFR-binding peptide
RSGSSEVVMDYHYKLVVNNASDKYLVSIPSLRTPVSSTPPTS

SEQ ID NO: 1405 - protein, 42 aa, Artificial Sequence
  Non-cyclic GFR-binding peptide
HSGSSRVVMNYHYKLIVNSSDDKYLVSIPSLKTPASSPKPVH

SEQ ID NO: 1406 - protein, 41 aa, Artificial Sequence
  Non-cyclic GFR-binding peptide
LSGSEEVIMYHYKLLLVRGNDKYLVSIPSTKVPASSTSPVR

SEQ ID NO: 1407 - protein, 41 aa, Artificial Sequence
  Non-cyclic GFR-binding peptide
SSKSSRVIMYHYKLVKPKRGVKYLVSIPSLAQPVSSPAASA

SEQ ID NO: 1408 - protein, 41 aa, Artificial Sequence
  Non-cyclic GFR-binding peptide
SSKSSKVIMYHYKLIKPTKGIKYLVSIPSLDQSVSSPSASA

SEQ ID NO: 1409 - protein, 41 aa, Artificial Sequence
  Non-cyclic GFR-binding peptide
SSKSSKVVMYHYKLVKPTRGVKYLVSIPSLDQPVSSPSASA

SEQ ID NO: 1410 - protein, 44 aa, Artificial Sequence
  Non-cyclic GFR-binding peptide
RSESKNHQLFYHYKLHQGQHPKIRKYLVSIPSEETPVSELGEDN

SEQ ID NO: 1411 - protein, 44 aa, Artificial Sequence
  Non-cyclic GFR-binding peptide
RSESQSHEELYHYKLHQGQHPKIRKYLVSIPSQGTPVSELGEDN

SEQ ID NO: 1412 - protein, 45 aa, Artificial Sequence
  Non-cyclic GFR-binding peptide
ASASELHEELRYHYKLLKPKKRVYEKYLVSIPSHHVRSPQSKVSS

SEQ ID NO: 1413 - protein, 45 aa, Artificial Sequence
  Non-cyclic GFR-binding peptide
ESKSALHDELTYHYKLFIPKKRVIEKYLVSIPSLQVQTPRSQVNR

SEQ ID NO: 1414 - protein, 42 aa, Artificial Sequence
  Non-cyclic GFR-binding peptide
RSGSGSVAMDEYKFKVVKENEDLYLISIPELETPVSSAKPIK

SEQ ID NO: 1415 - protein, 42 aa, Artificial Sequence
  Non-cyclic GFR-binding peptide
RSASSSVAMNEYKFKVVNKNEDLYLISIPEMKTPVSSPEPIG

SEQ ID NO: 1416 - protein, 42 aa, Artificial Sequence
  Non-cyclic GFR-binding peptide
RSGSGSVAMEEYKFKVVKDYEDLYLISIPELETPVSSAKPIS

SEQ ID NO: 1417 - protein, 42 aa, Artificial Sequence
  Non-cyclic GFR-binding peptide
HSGSSSVAMNEYKFKIVNSSDDLYLISIPELKTPVSTPKTVH

SEQ ID NO: 1418 - protein, 42 aa, Artificial Sequence
  Non-cyclic GFR-binding peptide
HSGSSSVAMNEYKFKIVNSSDDLYLISIPELKTPVSSPKPVY

SEQ ID NO: 1419 - protein, 42 aa, Artificial Sequence
  Non-cyclic GFR-binding peptide
HSGSASVAMNEYKFKIVNSSDDLYLISIPELQTPVSSPKPVT

SEQ ID NO: 1420 - protein, 42 aa, Artificial Sequence
  Non-cyclic GFR-binding peptide
HSGSASVAMNEYKFKIVNNSSDLYLISIPELKTPVSSAKPVA

SEQ ID NO: 1421 - protein, 43 aa, Artificial Sequence
  Non-cyclic GFR-binding peptide
RSGSSVASMGEEYKFKTPVGMDDLYLISIPELKTPVSSAKGVK

SEQ ID NO: 1422 - protein, 42 aa, Artificial Sequence
  Non-cyclic GFR-binding peptide
SSGSRSVAMGEYKFKIIQQKDNLYLISIPEMKTPVSSPGASG

SEQ ID NO: 1423 - protein, 42 aa, Artificial Sequence
  Non-cyclic GFR-binding peptide
RSGSASVAMDEYKFKVVNNAADLYLISIPELRTPVSSSAPAA

SEQ ID NO: 1424 - protein, 42 aa, Artificial Sequence
  Non-cyclic GFR-binding peptide
RSGSSSVAMDEYKFKVVNNASDLYLISIPELRTPVSSTPPTS

SEQ ID NO: 1425 - protein, 42 aa, Artificial Sequence
  Non-cyclic GFR-binding peptide
HSGSSSVAMNEYKFKIVNSSDDLYLISIPELKTPVSSPKPVH

SEQ ID NO: 1426 - protein, 41 aa, Artificial Sequence
  Non-cyclic GFR-binding peptide
LSGSSVAIMEYKFKLLVRGNDLYLISIPETKTPVSSTSPVR

SEQ ID NO: 1427 - protein, 41 aa, Artificial Sequence
  Non-cyclic GFR-binding peptide
SSKSSVAIMEYKFKVKPKRGVLYLISIPELATPVSSPAASA

SEQ ID NO: 1428 - protein, 41 aa, Artificial Sequence
  Non-cyclic GFR-binding peptide
SSKSSVAIMEYKFKIKPTKGILYLISIPELDTPVSSPSASA

SEQ ID NO: 1429 - protein, 41 aa, Artificial Sequence
  Non-cyclic GFR-binding peptide
SSKSSVAVMEYKFKVKPTRGVLYLISIPELDTPVSSPSASA

SEQ ID NO: 1430 - protein, 42 aa, Artificial Sequence
  Non-cyclic GFR-binding peptide
RSGSGEVVMDEYKFKVVKENEDLYLISIPELETPVSSAKPIK

SEQ ID NO: 1431 - protein, 42 aa, Artificial Sequence
  Non-cyclic GFR-binding peptide
RSASSEVTMNEYKFKVVNKNEDLYLISIPEMKEPVSSPEPIG

SEQ ID NO: 1432 - protein, 42 aa, Artificial Sequence
  Non-cyclic GFR-binding peptide
RSGSGEVVMEEYKFKVVKDYEDLYLISIPELETPVSSAKPIS

SEQ ID NO: 1433 - protein, 42 aa, Artificial Sequence
  Non-cyclic GFR-binding peptide
HSGSSRVVMNEYKFKIVNSSDDLYLISIPELKTPASTPKTVH

SEQ ID NO: 1434 - protein, 42 aa, Artificial Sequence
  Non-cyclic GFR-binding peptide
HSGSSRVVMNEYKFKIVNSSDDLYLISIPELKTPASSPKPVY

SEQ ID NO: 1435 - protein, 42 aa, Artificial Sequence
  Non-cyclic GFR-binding peptide
HSGSARVVMNEYKFKIVNSSDDLYLISIPELQTPASSPKPVT

SEQ ID NO: 1436 - protein, 42 aa, Artificial Sequence
  Non-cyclic GFR-binding peptide
HSGSAKVVMNEYKFKIVNNSSDLYLISIPELKTPASSAKPVA

SEQ ID NO: 1437 - protein, 43 aa, Artificial Sequence
  Non-cyclic GFR-binding peptide
RSGSEAVSMGEEYKFKTPVGMDDLYLISIPELKTPVSSAKGVK

SEQ ID NO: 1438 - protein, 42 aa, Artificial Sequence
  Non-cyclic GFR-binding peptide
SSGSRDVVMGEYKFKIIQQKDNLYLISIPEMKTPTSSPGASG

SEQ ID NO: 1439 - protein, 42 aa, Artificial Sequence
  Non-cyclic GFR-binding peptide
RSGSAEVVMDEYKFKVVNNAADLYLISIPELRAPVSSSAPAA

SEQ ID NO: 1440 - protein, 42 aa, Artificial Sequence
  Non-cyclic GFR-binding peptide
RSGSSEVVMDEYKFKVVNNASDLYLISIPELRTPVSSTPPTS

SEQ ID NO: 1441 - protein, 42 aa, Artificial Sequence
  Non-cyclic GFR-binding peptide
HSGSSRVVMNEYKFKIVNSSDDLYLISIPELKTPASSPKPVH

SEQ ID NO: 1442 - protein, 41 aa, Artificial Sequence
  Non-cyclic GFR-binding peptide
LSGSEEVIMEYKFKLLVRGNDLYLISIPETKVPASSTSPVR

SEQ ID NO: 1443 - protein, 41 aa, Artificial Sequence
  Non-cyclic GFR-binding peptide
SSKSSRVIMEYKFKVKPKRGVLYLISIPELAQPVSSPAASA

SEQ ID NO: 1444 - protein, 41 aa, Artificial Sequence
  Non-cyclic GFR-binding peptide
SSKSSKVIMEYKFKIKPTKGILYLISIPELDQSVSSPSASA

SEQ ID NO: 1445 - protein, 41 aa, Artificial Sequence
  Non-cyclic GFR-binding peptide
SSKSSKVVMEYKFKVKPTRGVLYLISIPELDQPVSSPSASA

SEQ ID NO: 1446 - protein, 44 aa, Artificial Sequence
  Non-cyclic GFR-binding peptide
RSESKNHQLFEYKFKHQGQHPKIRLYLISIPEEETPVSELGEDN

SEQ ID NO: 1447 - protein, 44 aa, Artificial Sequence
  Non-cyclic GFR-binding peptide
RSESQSHEELEYKFKHQGQHPKIRLYLISIPEQGTPVSELGEDN

SEQ ID NO: 1448 - protein, 45 aa, Artificial Sequence
  Non-cyclic GFR-binding peptide
ASASELHEELREYKFKLKPKKRVYELYLISIPEHHVRSPQSKVSS

SEQ ID NO: 1449 - protein, 45 aa, Artificial Sequence
  Non-cyclic GFR-binding peptide
ESKSALHDELTEYKFKFIPKKRVIELYLISIPELQVQTPRSQVNR

SEQ ID NO: 1450 - protein, 42 aa, Artificial Sequence
  Non-cyclic GFR-binding peptide
RSGSGDVVMDPIKGYVVKENEDFYLMNIPSLETPTSSAKPIK

SEQ ID NO: 1451 - protein, 42 aa, Artificial Sequence
  Non-cyclic GFR-binding peptide
RSASSDVVMNPIKGYVVNKNEDFYLMNIPSMKTPTSSPEPIG

SEQ ID NO: 1452 - protein, 42 aa, Artificial Sequence
  Non-cyclic GFR-binding peptide
RSGSGDVVMEPIKGYVVKDYEDFYLMNIPSLETPTSSAKPIS

SEQ ID NO: 1453 - protein, 42 aa, Artificial Sequence
  Non-cyclic GFR-binding peptide
HSGSSDVVMNPIKGYIVNSSDDFYLMNIPSLKTPTSTPKTVH

SEQ ID NO: 1454 - protein, 42 aa, Artificial Sequence
  Non-cyclic GFR-binding peptide
HSGSSDVVMNPIKGYIVNSSDDFYLMNIPSLKTPTSSPKPVY

SEQ ID NO: 1455 - protein, 42 aa, Artificial Sequence
  Non-cyclic GFR-binding peptide
HSGSADVVMNPIKGYIVNSSDDFYLMNIPSLQTPTSSPKPVT

SEQ ID NO: 1456 - protein, 42 aa, Artificial Sequence
  Non-cyclic GFR-binding peptide
HSGSADVVMNPIKGYIVNNSSDFYLMNIPSLKTPTSSAKPVA

SEQ ID NO: 1457 - protein, 43 aa, Artificial Sequence
  Non-cyclic GFR-binding peptide
RSGSDVVSMGEPIKGYTPVGMDDFYLMNIPSLKTPTSSAKGVK

SEQ ID NO: 1458 - protein, 42 aa, Artificial Sequence
  Non-cyclic GFR-binding peptide
RSGSEDVVMGPIKGYYTVVGKDFYLMNIPSLKTPTSSAKSAK

SEQ ID NO: 1459 - protein, 42 aa, Artificial Sequence
  Non-cyclic GFR-binding peptide
RSGSADVVMDPIKGYVVNNAADFYLMNIPSLRTPTSSSAPAA

SEQ ID NO: 1460 - protein, 42 aa, Artificial Sequence
  Non-cyclic GFR-binding peptide
RSGSSDVVMDPIKGYVVNNASDFYLMNIPSLRTPTSSTPPTS

SEQ ID NO: 1461 - protein, 42 aa, Artificial Sequence
  Non-cyclic GFR-binding peptide
HSGSSDVVMNPIKGYIVNSSDDFYLMNIPSLKTPTSSPKPVH

SEQ ID NO: 1462 - protein, 41 aa, Artificial Sequence
  Non-cyclic GFR-binding peptide
LSGSDVVIMPIKGYLLVRGNDFYLMNIPSTKTPTSSTSPVR

SEQ ID NO: 1463 - protein, 41 aa, Artificial Sequence
  Non-cyclic GFR-binding peptide
SSKSDVVIMPIKGYVKPKRGVFYLMNIPSLATPTSSPAASA

SEQ ID NO: 1464 - protein, 41 aa, Artificial Sequence
  Non-cyclic GFR-binding peptide
SSKSDVVIMPIKGYIKPTKGIFYLMNIPSLDTPTSSPSASA

SEQ ID NO: 1465 - protein, 41 aa, Artificial Sequence
  Non-cyclic GFR-binding peptide
SSKSDVVVMPIKGYVKPTRGVFYLMNIPSLDTPTSSPSASA

SEQ ID NO: 1466 - protein, 42 aa, Artificial Sequence
  Non-cyclic GFR-binding peptide
RSGSGEVVMDPIKGYVVKENEDFYLMNIPSLETPVSSAKPIK

SEQ ID NO: 1467 - protein, 42 aa, Artificial Sequence
  Non-cyclic GFR-binding peptide
RSASSEVTMNPIKGYVVNKNEDFYLMNIPSMKEPVSSPEPIG

SEQ ID NO: 1468 - protein, 42 aa, Artificial Sequence
  Non-cyclic GFR-binding peptide
RSGSGEVVMEPIKGYVVKDYEDFYLMNIPSLETPVSSAKPIS

SEQ ID NO: 1469 - protein, 42 aa, Artificial Sequence
  Non-cyclic GFR-binding peptide
HSGSSRVVMNPIKGYIVNSSDDFYLMNIPSLKTPASTPKTVH

SEQ ID NO: 1470 - protein, 42 aa, Artificial Sequence
  Non-cyclic GFR-binding peptide
HSGSSRVVMNPIKGYIVNSSDDFYLMNIPSLKTPASSPKPVY

SEQ ID NO: 1471 - protein, 42 aa, Artificial Sequence
  Non-cyclic GFR-binding peptide
HSGSARVVMNPIKGYIVNSSDDFYLMNIPSLQTPASSPKPVT

SEQ ID NO: 1472 - protein, 42 aa, Artificial Sequence
  Non-cyclic GFR-binding peptide
HSGSAKVVMNPIKGYIVNNSSDFYLMNIPSLKTPASSAKPVA

SEQ ID NO: 1473 - protein, 43 aa, Artificial Sequence
  Non-cyclic GFR-binding peptide
RSGSEAVSMGEPIKGYTPVGMDDFYLMNIPSLKTPVSSAKGVK

SEQ ID NO: 1474 - protein, 42 aa, Artificial Sequence
  Non-cyclic GFR-binding peptide
RSGSESVAMGPIKGYYTVVGKDFYLMNIPSLKTPVSSAKSAK

SEQ ID NO: 1475 - protein, 42 aa, Artificial Sequence
  Non-cyclic GFR-binding peptide
RSGSAEVVMDPIKGYVVNNAADFYLMNIPSLRAPVSSSAPAA

SEQ ID NO: 1476 - protein, 42 aa, Artificial Sequence
  Non-cyclic GFR-binding peptide
RSGSSEVVMDPIKGYVVNNASDFYLMNIPSLRTPVSSTPPTS

SEQ ID NO: 1477 - protein, 42 aa, Artificial Sequence
  Non-cyclic GFR-binding peptide
HSGSSRVVMNPIKGYIVNSSDDFYLMNIPSLKTPASSPKPVH

SEQ ID NO: 1478 - protein, 41 aa, Artificial Sequence
  Non-cyclic GFR-binding peptide
LSGSEEVIMPIKGYLLVRGNDFYLMNIPSTKVPASSTSPVR

SEQ ID NO: 1479 - protein, 41 aa, Artificial Sequence
  Non-cyclic GFR-binding peptide
SSKSSRVIMPIKGYVKPKRGVFYLMNIPSLAQPVSSPAASA

SEQ ID NO: 1480 - protein, 41 aa, Artificial Sequence
  Non-cyclic GFR-binding peptide
SSKSSKVIMPIKGYIKPTKGIFYLMNIPSLDQSVSSPSASA

SEQ ID NO: 1481 - protein, 41 aa, Artificial Sequence
  Non-cyclic GFR-binding peptide
SSKSSKVVMPIKGYVKPTRGVFYLMNIPSLDQPVSSPSASA

SEQ ID NO: 1482 - protein, 44 aa, Artificial Sequence
  Non-cyclic GFR-binding peptide
RSESKNHQLFPIKGYHQGQHPKIRFYLMNIPSEETPVSELGEDN

SEQ ID NO: 1483 - protein, 44 aa, Artificial Sequence
  Non-cyclic GFR-binding peptide
RSESQSHEELPIKGYHQGQHPKIRFYLMNIPSQGTPVSELGEDN

SEQ ID NO: 1484 - protein, 45 aa, Artificial Sequence
  Non-cyclic GFR-binding peptide
ASASELHEELRPIKGYLKPKKRVYEFYLMNIPSHHVRSPQSKVSS

SEQ ID NO: 1485 - protein, 45 aa, Artificial Sequence
  Non-cyclic GFR-binding peptide
ESKSALHDELTPIKGYFIPKKRVIEFYLMNIPSLQVQTPRSQVNR

SEQ ID NO: 1486 - protein, 42 aa, Artificial Sequence
  Non-cyclic GFR-binding peptide
RSGSGEVVMDEYQKYVVKENEDIYLISIPSLEAPVSSAKPIK

SEQ ID NO: 1487 - protein, 42 aa, Artificial Sequence
  Non-cyclic GFR-binding peptide
RSASSEVVMNEYQKYVVNKNEDIYLISIPSMKAPVSSPEPIG

SEQ ID NO: 1488 - protein, 42 aa, Artificial Sequence
  Non-cyclic GFR-binding peptide
RSGSGEVVMEEYQKYVVKDYEDIYLISIPSLEAPVSSAKPIS

SEQ ID NO: 1489 - protein, 42 aa, Artificial Sequence
  Non-cyclic GFR-binding peptide
HSGSSEVVMNEYQKYIVNSSDDIYLISIPSLKAPVSTPKTVH

SEQ ID NO: 1490 - protein, 42 aa, Artificial Sequence
  Non-cyclic GFR-binding peptide
HSGSSEVVMNEYQKYIVNSSDDIYLISIPSLKAPVSSPKPVY

SEQ ID NO: 1491 - protein, 42 aa, Artificial Sequence
  Non-cyclic GFR-binding peptide
HSGSAEVVMNEYQKYIVNSSDDIYLISIPSLQAPVSSPKPVT

SEQ ID NO: 1492 - protein, 42 aa, Artificial Sequence
  Non-cyclic GFR-binding peptide
HSGSAEVVMNEYQKYIVNNSSDIYLISIPSLKAPVSSAKPVA

SEQ ID NO: 1493 - protein, 43 aa, Artificial Sequence
  Non-cyclic GFR-binding peptide
RSGSEVVSMGEEYQKYTPVGMDDIYLISIPSLKAPVSSAKGVK

SEQ ID NO: 1494 - protein, 42 aa, Artificial Sequence
  Non-cyclic GFR-binding peptide
RSGSEEVVMGEYQKYYTVVGKDIYLISIPSLKAPVSSAKSAK

SEQ ID NO: 1495 - protein, 42 aa, Artificial Sequence
  Non-cyclic GFR-binding peptide
SSGSREVVMGEYQKYIIQQKDNIYLISIPSMKAPVSSPGASG

SEQ ID NO: 1496 - protein, 42 aa, Artificial Sequence
  Non-cyclic GFR-binding peptide
RSGSSEVVMDEYQKYVVNNASDIYLISIPSLRAPVSSTPPTS

SEQ ID NO: 1497 - protein, 42 aa, Artificial Sequence
  Non-cyclic GFR-binding peptide
HSGSSEVVMNEYQKYIVNSSDDIYLISIPSLKAPVSSPKPVH

SEQ ID NO: 1498 - protein, 41 aa, Artificial Sequence
  Non-cyclic GFR-binding peptide
LSGSEVVIMEYQKYLLVRGNDIYLISIPSTKAPVSSTSPVR

SEQ ID NO: 1499 - protein, 41 aa, Artificial Sequence
  Non-cyclic GFR-binding peptide
SSKSEVVIMEYQKYVKPKRGVIYLISIPSLAAPVSSPAASA

SEQ ID NO: 1500 - protein, 41 aa, Artificial Sequence
  Non-cyclic GFR-binding peptide
SSKSEVVIMEYQKYIKPTKGIIYLISIPSLDAPVSSPSASA

SEQ ID NO: 1501 - protein, 41 aa, Artificial Sequence
  Non-cyclic GFR-binding peptide
SSKSEVVVMEYQKYVKPTRGVIYLISIPSLDAPVSSPSASA

SEQ ID NO: 1502 - protein, 42 aa, Artificial Sequence
  Non-cyclic GFR-binding peptide
RSGSGEVVMDEYQKYVVKENEDIYLISIPSLETPVSSAKPIK

SEQ ID NO: 1503 - protein, 42 aa, Artificial Sequence
  Non-cyclic GFR-binding peptide
RSASSEVTMNEYQKYVVNKNEDIYLISIPSMKEPVSSPEPIG

SEQ ID NO: 1504 - protein, 42 aa, Artificial Sequence
  Non-cyclic GFR-binding peptide
RSGSGEVVMEEYQKYVVKDYEDIYLISIPSLETPVSSAKPIS

SEQ ID NO: 1505 - protein, 42 aa, Artificial Sequence
  Non-cyclic GFR-binding peptide
HSGSSRVVMNEYQKYIVNSSDDIYLISIPSLKTPASTPKTVH

SEQ ID NO: 1506 - protein, 42 aa, Artificial Sequence
  Non-cyclic GFR-binding peptide
HSGSSRVVMNEYQKYIVNSSDDIYLISIPSLKTPASSPKPVY

SEQ ID NO: 1507 - protein, 42 aa, Artificial Sequence
  Non-cyclic GFR-binding peptide
HSGSARVVMNEYQKYIVNSSDDIYLISIPSLQTPASSPKPVT

SEQ ID NO: 1508 - protein, 42 aa, Artificial Sequence
  Non-cyclic GFR-binding peptide
HSGSAKVVMNEYQKYIVNNSSDIYLISIPSLKTPASSAKPVA

SEQ ID NO: 1509 - protein, 43 aa, Artificial Sequence
  Non-cyclic GFR-binding peptide
RSGSEAVSMGEEYQKYTPVGMDDIYLISIPSLKTPVSSAKGVK

SEQ ID NO: 1510 - protein, 42 aa, Artificial Sequence
  Non-cyclic GFR-binding peptide
RSGSESVAMGEYQKYYTVVGKDIYLISIPSLKTPVSSAKSAK

SEQ ID NO: 1511 - protein, 42 aa, Artificial Sequence
  Non-cyclic GFR-binding peptide
SSGSRDVVMGEYQKYIIQQKDNIYLISIPSMKTPTSSPGASG

SEQ ID NO: 1512 - protein, 42 aa, Artificial Sequence
  Non-cyclic GFR-binding peptide
RSGSSEVVMDEYQKYVVNNASDIYLISIPSLRTPVSSTPPTS

SEQ ID NO: 1513 - protein, 42 aa, Artificial Sequence
  Non-cyclic GFR-binding peptide
HSGSSRVVMNEYQKYIVNSSDDIYLISIPSLKTPASSPKPVH

SEQ ID NO: 1514 - protein, 41 aa, Artificial Sequence
  Non-cyclic GFR-binding peptide
LSGSEEVIMEYQKYLLVRGNDIYLISIPSTKVPASSTSPVR

SEQ ID NO: 1515 - protein, 41 aa, Artificial Sequence
  Non-cyclic GFR-binding peptide
SSKSSRVIMEYQKYVKPKRGVIYLISIPSLAQPVSSPAASA

SEQ ID NO: 1516 - protein, 41 aa, Artificial Sequence
  Non-cyclic GFR-binding peptide
SSKSSKVIMEYQKYIKPTKGIIYLISIPSLDQSVSSPSASA

SEQ ID NO: 1517 - protein, 41 aa, Artificial Sequence
  Non-cyclic GFR-binding peptide
SSKSSKVVMEYQKYVKPTRGVIYLISIPSLDQPVSSPSASA

SEQ ID NO: 1518 - protein, 44 aa, Artificial Sequence
  Non-cyclic GFR-binding peptide
RSESKNHQLFEYQKYHQGQHPKIRIYLISIPSEETPVSELGEDN

SEQ ID NO: 1519 - protein, 44 aa, Artificial Sequence
  Non-cyclic GFR-binding peptide
RSESQSHEELEYQKYHQGQHPKIRIYLISIPSQGTPVSELGEDN

SEQ ID NO: 1520 - protein, 45 aa, Artificial Sequence
  Non-cyclic GFR-binding peptide
ASASELHEELREYQKYLKPKKRVYEIYLISIPSHHVRSPQSKVSS

SEQ ID NO: 1521 - protein, 45 aa, Artificial Sequence
  Non-cyclic GFR-binding peptide
ESKSALHDELTEYQKYFIPKKRVIEIYLISIPSLQVQTPRSQVNR

SEQ ID NO: 1522 - protein, 42 aa, Artificial Sequence
  Non-cyclic GFR-binding peptide
RSGSGEVVMDEYQKYVVKENEDIFLISIPSLETPVSSAKPIK

SEQ ID NO: 1523 - protein, 42 aa, Artificial Sequence
  Non-cyclic GFR-binding peptide
RSASSEVVMNEYQKYVVNKNEDIFLISIPSMKTPVSSPEPIG

SEQ ID NO: 1524 - protein, 42 aa, Artificial Sequence
  Non-cyclic GFR-binding peptide
RSGSGEVVMEEYQKYVVKDYEDIFLISIPSLETPVSSAKPIS

SEQ ID NO: 1525 - protein, 42 aa, Artificial Sequence
  Non-cyclic GFR-binding peptide
HSGSSEVVMNEYQKYIVNSSDDIFLISIPSLKTPVSTPKTVH

SEQ ID NO: 1526 - protein, 42 aa, Artificial Sequence
  Non-cyclic GFR-binding peptide
HSGSSEVVMNEYQKYIVNSSDDIFLISIPSLKTPVSSPKPVY

SEQ ID NO: 1527 - protein, 42 aa, Artificial Sequence
  Non-cyclic GFR-binding peptide
HSGSAEVVMNEYQKYIVNSSDDIFLISIPSLQTPVSSPKPVT

SEQ ID NO: 1528 - protein, 42 aa, Artificial Sequence
  Non-cyclic GFR-binding peptide
HSGSAEVVMNEYQKYIVNNSSDIFLISIPSLKTPVSSAKPVA

SEQ ID NO: 1529 - protein, 43 aa, Artificial Sequence
  Non-cyclic GFR-binding peptide
RSGSEVVSMGEEYQKYTPVGMDDIFLISIPSLKTPVSSAKGVK

SEQ ID NO: 1530 - protein, 42 aa, Artificial Sequence
  Non-cyclic GFR-binding peptide
RSGSEEVVMGEYQKYYTVVGKDIFLISIPSLKTPVSSAKSAK

SEQ ID NO: 1531 - protein, 42 aa, Artificial Sequence
  Non-cyclic GFR-binding peptide
SSGSREVVMGEYQKYIIQQKDNIFLISIPSMKTPVSSPGASG

SEQ ID NO: 1532 - protein, 42 aa, Artificial Sequence
  Non-cyclic GFR-binding peptide
RSGSAEVVMDEYQKYVVNNAADIFLISIPSLRTPVSSSAPAA

SEQ ID NO: 1533 - protein, 42 aa, Artificial Sequence
  Non-cyclic GFR-binding peptide
HSGSSEVVMNEYQKYIVNSSDDIFLISIPSLKTPVSSPKPVH

SEQ ID NO: 1534 - protein, 41 aa, Artificial Sequence
  Non-cyclic GFR-binding peptide
LSGSEVVIMEYQKYLLVRGNDIFLISIPSTKTPVSSTSPVR

SEQ ID NO: 1535 - protein, 41 aa, Artificial Sequence
  Non-cyclic GFR-binding peptide
SSKSEVVIMEYQKYVKPKRGVIFLISIPSLATPVSSPAASA

SEQ ID NO: 1536 - protein, 41 aa, Artificial Sequence
  Non-cyclic GFR-binding peptide
SSKSEVVIMEYQKYIKPTKGIIFLISIPSLDTPVSSPSASA

SEQ ID NO: 1537 - protein, 41 aa, Artificial Sequence
  Non-cyclic GFR-binding peptide
SSKSEVVVMEYQKYVKPTRGVIFLISIPSLDTPVSSPSASA

SEQ ID NO: 1538 - protein, 42 aa, Artificial Sequence
  Non-cyclic GFR-binding peptide
RSASSEVTMNEYQKYVVNKNEDIFLISIPSMKEPVSSPEPIG

SEQ ID NO: 1539 - protein, 42 aa, Artificial Sequence
  Non-cyclic GFR-binding peptide
HSGSSRVVMNEYQKYIVNSSDDIFLISIPSLKTPASTPKTVH

SEQ ID NO: 1540 - protein, 42 aa, Artificial Sequence
  Non-cyclic GFR-binding peptide
HSGSSRVVMNEYQKYIVNSSDDIFLISIPSLKTPASSPKPVY

SEQ ID NO: 1541 - protein, 42 aa, Artificial Sequence
  Non-cyclic GFR-binding peptide
HSGSARVVMNEYQKYIVNSSDDIFLISIPSLQTPASSPKPVT

SEQ ID NO: 1542 - protein, 42 aa, Artificial Sequence
  Non-cyclic GFR-binding peptide
HSGSAKVVMNEYQKYIVNNSSDIFLISIPSLKTPASSAKPVA

SEQ ID NO: 1543 - protein, 43 aa, Artificial Sequence
  Non-cyclic GFR-binding peptide
RSGSEAVSMGEEYQKYTPVGMDDIFLISIPSLKTPVSSAKGVK

SEQ ID NO: 1544 - protein, 42 aa, Artificial Sequence
  Non-cyclic GFR-binding peptide
RSGSESVAMGEYQKYYTVVGKDIFLISIPSLKTPVSSAKSAK

SEQ ID NO: 1545 - protein, 42 aa, Artificial Sequence
  Non-cyclic GFR-binding peptide
SSGSRDVVMGEYQKYIIQQKDNIFLISIPSMKTPTSSPGASG

SEQ ID NO: 1546 - protein, 42 aa, Artificial Sequence
  Non-cyclic GFR-binding peptide
RSGSAEVVMDEYQKYVVNNAADIFLISIPSLRAPVSSSAPAA

SEQ ID NO: 1547 - protein, 42 aa, Artificial Sequence
  Non-cyclic GFR-binding peptide
HSGSSRVVMNEYQKYIVNSSDDIFLISIPSLKTPASSPKPVH

SEQ ID NO: 1548 - protein, 41 aa, Artificial Sequence
  Non-cyclic GFR-binding peptide
LSGSEEVIMEYQKYLLVRGNDIFLISIPSTKVPASSTSPVR

SEQ ID NO: 1549 - protein, 41 aa, Artificial Sequence
  Non-cyclic GFR-binding peptide
SSKSSRVIMEYQKYVKPKRGVIFLISIPSLAQPVSSPAASA

SEQ ID NO: 1550 - protein, 41 aa, Artificial Sequence
  Non-cyclic GFR-binding peptide
SSKSSKVIMEYQKYIKPTKGIIFLISIPSLDQSVSSPSASA

SEQ ID NO: 1551 - protein, 41 aa, Artificial Sequence
  Non-cyclic GFR-binding peptide
SSKSSKVVMEYQKYVKPTRGVIFLISIPSLDQPVSSPSASA

SEQ ID NO: 1552 - protein, 44 aa, Artificial Sequence
  Non-cyclic GFR-binding peptide
RSESKNHQLFEYQKYHQGQHPKIRIFLISIPSEETPVSELGEDN

SEQ ID NO: 1553 - protein, 44 aa, Artificial Sequence
  Non-cyclic GFR-binding peptide
RSESQSHEELEYQKYHQGQHPKIRIFLISIPSQGTPVSELGEDN

SEQ ID NO: 1554 - protein, 45 aa, Artificial Sequence
  Non-cyclic GFR-binding peptide
ASASELHEELREYQKYLKPKKRVYEIFLISIPSHHVRSPQSKVSS

SEQ ID NO: 1555 - protein, 45 aa, Artificial Sequence
  Non-cyclic GFR-binding peptide
ESKSALHDELTEYQKYFIPKKRVIEIFLISIPSLQVQTPRSQVNR

SEQ ID NO: 1556 - protein, 42 aa, Artificial Sequence
  Non-cyclic GFR-binding peptide
RSGSGEEVMDDKHHDVVKENEDVYLMSLPKLEVPASSAKPIK

SEQ ID NO: 1557 - protein, 42 aa, Artificial Sequence
  Non-cyclic GFR-binding peptide
RSASSEEVMNDKHHDVVNKNEDVYLMSLPKMKVPASSPEPIG

SEQ ID NO: 1558 - protein, 42 aa, Artificial Sequence
  Non-cyclic GFR-binding peptide
RSGSGEEVMEDKHHDVVKDYEDVYLMSLPKLEVPASSAKPIS

SEQ ID NO: 1559 - protein, 42 aa, Artificial Sequence
  Non-cyclic GFR-binding peptide
HSGSSEEVMNDKHHDIVNSSDDVYLMSLPKLKVPASTPKTVH

SEQ ID NO: 1560 - protein, 42 aa, Artificial Sequence
  Non-cyclic GFR-binding peptide
HSGSSEEVMNDKHHDIVNSSDDVYLMSLPKLKVPASSPKPVY

SEQ ID NO: 1561 - protein, 42 aa, Artificial Sequence
  Non-cyclic GFR-binding peptide
HSGSAEEVMNDKHHDIVNSSDDVYLMSLPKLQVPASSPKPVT

SEQ ID NO: 1562 - protein, 42 aa, Artificial Sequence
  Non-cyclic GFR-binding peptide
HSGSAEEVMNDKHHDIVNNSSDVYLMSLPKLKVPASSAKPVA

SEQ ID NO: 1563 - protein, 43 aa, Artificial Sequence
  Non-cyclic GFR-binding peptide
RSGSEEVSMGEDKHHDTPVGMDDVYLMSLPKLKVPASSAKGVK

SEQ ID NO: 1564 - protein, 42 aa, Artificial Sequence
  Non-cyclic GFR-binding peptide
RSGSEEEVMGDKHHDYTVVGKDVYLMSLPKLKVPASSAKSAK

SEQ ID NO: 1565 - protein, 42 aa, Artificial Sequence
  Non-cyclic GFR-binding peptide
SSGSREEVMGDKHHDIIQQKDNVYLMSLPKMKVPASSPGASG

SEQ ID NO: 1566 - protein, 42 aa, Artificial Sequence
  Non-cyclic GFR-binding peptide
RSGSAEEVMDDKHHDVVNNAADVYLMSLPKLRVPASSSAPAA

SEQ ID NO: 1567 - protein, 42 aa, Artificial Sequence
  Non-cyclic GFR-binding peptide
RSGSSEEVMDDKHHDVVNNASDVYLMSLPKLRVPASSTPPTS

SEQ ID NO: 1568 - protein, 42 aa, Artificial Sequence
  Non-cyclic GFR-binding peptide
HSGSSEEVMNDKHHDIVNSSDDVYLMSLPKLKVPASSPKPVH

SEQ ID NO: 1569 - protein, 41 aa, Artificial Sequence
  Non-cyclic GFR-binding peptide
SSKSEEVIMDKHHDVKPKRGVVYLMSLPKLAVPASSPAASA

SEQ ID NO: 1570 - protein, 41 aa, Artificial Sequence
  Non-cyclic GFR-binding peptide
SSKSEEVIMDKHHDIKPTKGIVYLMSLPKLDVPASSPSASA

SEQ ID NO: 1571 - protein, 41 aa, Artificial Sequence
  Non-cyclic GFR-binding peptide
SSKSEEVVMDKHHDVKPTRGVVYLMSLPKLDVPASSPSASA

SEQ ID NO: 1572 - protein, 42 aa, Artificial Sequence
  Non-cyclic GFR-binding peptide
RSGSGEVVMDDKHHDVVKENEDVYLMSLPKLETPVSSAKPIK

SEQ ID NO: 1573 - protein, 42 aa, Artificial Sequence
  Non-cyclic GFR-binding peptide
RSASSEVTMNDKHHDVVNKNEDVYLMSLPKMKEPVSSPEPIG

SEQ ID NO: 1574 - protein, 42 aa, Artificial Sequence
  Non-cyclic GFR-binding peptide
RSGSGEVVMEDKHHDVVKDYEDVYLMSLPKLETPVSSAKPIS

SEQ ID NO: 1575 - protein, 42 aa, Artificial Sequence
  Non-cyclic GFR-binding peptide
HSGSSRVVMNDKHHDIVNSSDDVYLMSLPKLKTPASTPKTVH

SEQ ID NO: 1576 - protein, 42 aa, Artificial Sequence
  Non-cyclic GFR-binding peptide
HSGSSRVVMNDKHHDIVNSSDDVYLMSLPKLKTPASSPKPVY

SEQ ID NO: 1577 - protein, 42 aa, Artificial Sequence
  Non-cyclic GFR-binding peptide
HSGSARVVMNDKHHDIVNSSDDVYLMSLPKLQTPASSPKPVT

SEQ ID NO: 1578 - protein, 42 aa, Artificial Sequence
  Non-cyclic GFR-binding peptide
HSGSAKVVMNDKHHDIVNNSSDVYLMSLPKLKTPASSAKPVA

SEQ ID NO: 1579 - protein, 43 aa, Artificial Sequence
  Non-cyclic GFR-binding peptide
RSGSEAVSMGEDKHHDTPVGMDDVYLMSLPKLKTPVSSAKGVK

SEQ ID NO: 1580 - protein, 42 aa, Artificial Sequence
  Non-cyclic GFR-binding peptide
RSGSESVAMGDKHHDYTVVGKDVYLMSLPKLKTPVSSAKSAK

SEQ ID NO: 1581 - protein, 42 aa, Artificial Sequence
  Non-cyclic GFR-binding peptide
SSGSRDVVMGDKHHDIIQQKDNVYLMSLPKMKTPTSSPGASG

SEQ ID NO: 1582 - protein, 42 aa, Artificial Sequence
  Non-cyclic GFR-binding peptide
RSGSAEVVMDDKHHDVVNNAADVYLMSLPKLRAPVSSSAPAA

SEQ ID NO: 1583 - protein, 42 aa, Artificial Sequence
  Non-cyclic GFR-binding peptide
RSGSSEVVMDDKHHDVVNNASDVYLMSLPKLRTPVSSTPPTS

SEQ ID NO: 1584 - protein, 42 aa, Artificial Sequence
  Non-cyclic GFR-binding peptide
HSGSSRVVMNDKHHDIVNSSDDVYLMSLPKLKTPASSPKPVH

SEQ ID NO: 1585 - protein, 41 aa, Artificial Sequence
  Non-cyclic GFR-binding peptide
SSKSSRVIMDKHHDVKPKRGVVYLMSLPKLAQPVSSPAASA

SEQ ID NO: 1586 - protein, 41 aa, Artificial Sequence
  Non-cyclic GFR-binding peptide
SSKSSKVIMDKHHDIKPTKGIVYLMSLPKLDQSVSSPSASA

SEQ ID NO: 1587 - protein, 41 aa, Artificial Sequence
  Non-cyclic GFR-binding peptide
SSKSSKVVMDKHHDVKPTRGVVYLMSLPKLDQPVSSPSASA

SEQ ID NO: 1588 - protein, 44 aa, Artificial Sequence
  Non-cyclic GFR-binding peptide
RSESKNHQLFDKHHDHQGQHPKIRVYLMSLPKEETPVSELGEDN

SEQ ID NO: 1589 - protein, 44 aa, Artificial Sequence
  Non-cyclic GFR-binding peptide
RSESQSHEELDKHHDHQGQHPKIRVYLMSLPKQGTPVSELGEDN

SEQ ID NO: 1590 - protein, 45 aa, Artificial Sequence
  Non-cyclic GFR-binding peptide
ASASELHEELRDKHHDLKPKKRVYEVYLMSLPKHHVRSPQSKVSS

SEQ ID NO: 1591 - protein, 45 aa, Artificial Sequence
  Non-cyclic GFR-binding peptide
ESKSALHDELTDKHHDFIPKKRVIEVYLMSLPKLQVQTPRSQVNR

SEQ ID NO: 1592 - protein, 42 aa, Artificial Sequence
  Non-cyclic GFR-binding peptide
RSGSGSRVMDNSLQEVVKENEDYYVIPLPELEQPVSSAKPIK

SEQ ID NO: 1593 - protein, 42 aa, Artificial Sequence
  Non-cyclic GFR-binding peptide
RSASSSRVMNNSLQEVVNKNEDYYVIPLPEMKQPVSSPEPIG

SEQ ID NO: 1594 - protein, 42 aa, Artificial Sequence
  Non-cyclic GFR-binding peptide
RSGSGSRVMENSLQEVVKDYEDYYVIPLPELEQPVSSAKPIS

SEQ ID NO: 1595 - protein, 42 aa, Artificial Sequence
  Non-cyclic GFR-binding peptide
HSGSSSRVMNNSLQEIVNSSDDYYVIPLPELKQPVSTPKTVH

SEQ ID NO: 1596 - protein, 42 aa, Artificial Sequence
  Non-cyclic GFR-binding peptide
HSGSSSRVMNNSLQEIVNSSDDYYVIPLPELKQPVSSPKPVY

SEQ ID NO: 1597 - protein, 42 aa, Artificial Sequence
  Non-cyclic GFR-binding peptide
HSGSASRVMNNSLQEIVNSSDDYYVIPLPELQQPVSSPKPVT

SEQ ID NO: 1598 - protein, 42 aa, Artificial Sequence
  Non-cyclic GFR-binding peptide
HSGSASRVMNNSLQEIVNNSSDYYVIPLPELKQPVSSAKPVA

SEQ ID NO: 1599 - protein, 43 aa, Artificial Sequence
  Non-cyclic GFR-binding peptide
RSGSSRVSMGENSLQETPVGMDDYYVIPLPELKQPVSSAKGVK

SEQ ID NO: 1600 - protein, 42 aa, Artificial Sequence
  Non-cyclic GFR-binding peptide
RSGSESRVMGNSLQEYTVVGKDYYVIPLPELKQPVSSAKSAK

SEQ ID NO: 1601 - protein, 42 aa, Artificial Sequence
  Non-cyclic GFR-binding peptide
SSGSRSRVMGNSLQEIIQQKDNYYVIPLPEMKQPVSSPGASG

SEQ ID NO: 1602 - protein, 42 aa, Artificial Sequence
  Non-cyclic GFR-binding peptide
RSGSASRVMDNSLQEVVNNAADYYVIPLPELRQPVSSSAPAA

SEQ ID NO: 1603 - protein, 42 aa, Artificial Sequence
  Non-cyclic GFR-binding peptide
RSGSSSRVMDNSLQEVVNNASDYYVIPLPELRQPVSSTPPTS

SEQ ID NO: 1604 - protein, 42 aa, Artificial Sequence
  Non-cyclic GFR-binding peptide
HSGSSSRVMNNSLQEIVNSSDDYYVIPLPELKQPVSSPKPVH

SEQ ID NO: 1605 - protein, 41 aa, Artificial Sequence
  Non-cyclic GFR-binding peptide
LSGSSRVIMNSLQELLVRGNDYYVIPLPETKQPVSSTSPVR

SEQ ID NO: 1606 - protein, 41 aa, Artificial Sequence
  Non-cyclic GFR-binding peptide
SSKSSRVIMNSLQEIKPTKGIYYVIPLPELDQPVSSPSASA

SEQ ID NO: 1607 - protein, 41 aa, Artificial Sequence
  Non-cyclic GFR-binding peptide
SSKSSRVVMNSLQEVKPTRGVYYVIPLPELDQPVSSPSASA

SEQ ID NO: 1608 - protein, 42 aa, Artificial Sequence
  Non-cyclic GFR-binding peptide
RSGSGEVVMDNSLQEVVKENEDYYVIPLPELETPVSSAKPIK

SEQ ID NO: 1609 - protein, 42 aa, Artificial Sequence
  Non-cyclic GFR-binding peptide
RSASSEVTMNNSLQEVVNKNEDYYVIPLPEMKEPVSSPEPIG

SEQ ID NO: 1610 - protein, 42 aa, Artificial Sequence
  Non-cyclic GFR-binding peptide
RSGSGEVVMENSLQEVVKDYEDYYVIPLPELETPVSSAKPIS

SEQ ID NO: 1611 - protein, 42 aa, Artificial Sequence
  Non-cyclic GFR-binding peptide
HSGSSRVVMNNSLQEIVNSSDDYYVIPLPELKTPASTPKTVH

SEQ ID NO: 1612 - protein, 42 aa, Artificial Sequence
  Non-cyclic GFR-binding peptide
HSGSSRVVMNNSLQEIVNSSDDYYVIPLPELKTPASSPKPVY

SEQ ID NO: 1613 - protein, 42 aa, Artificial Sequence
  Non-cyclic GFR-binding peptide
HSGSARVVMNNSLQEIVNSSDDYYVIPLPELQTPASSPKPVT

SEQ ID NO: 1614 - protein, 42 aa, Artificial Sequence
  Non-cyclic GFR-binding peptide
HSGSAKVVMNNSLQEIVNNSSDYYVIPLPELKTPASSAKPVA

SEQ ID NO: 1615 - protein, 43 aa, Artificial Sequence
  Non-cyclic GFR-binding peptide
RSGSEAVSMGENSLQETPVGMDDYYVIPLPELKTPVSSAKGVK

SEQ ID NO: 1616 - protein, 42 aa, Artificial Sequence
  Non-cyclic GFR-binding peptide
RSGSESVAMGNSLQEYTVVGKDYYVIPLPELKTPVSSAKSAK

SEQ ID NO: 1617 - protein, 42 aa, Artificial Sequence
  Non-cyclic GFR-binding peptide
SSGSRDVVMGNSLQEIIQQKDNYYVIPLPEMKTPTSSPGASG

SEQ ID NO: 1618 - protein, 42 aa, Artificial Sequence
  Non-cyclic GFR-binding peptide
RSGSAEVVMDNSLQEVVNNAADYYVIPLPELRAPVSSSAPAA

SEQ ID NO: 1619 - protein, 42 aa, Artificial Sequence
  Non-cyclic GFR-binding peptide
RSGSSEVVMDNSLQEVVNNASDYYVIPLPELRTPVSSTPPTS

SEQ ID NO: 1620 - protein, 42 aa, Artificial Sequence
  Non-cyclic GFR-binding peptide
HSGSSRVVMNNSLQEIVNSSDDYYVIPLPELKTPASSPKPVH

SEQ ID NO: 1621 - protein, 41 aa, Artificial Sequence
  Non-cyclic GFR-binding peptide
LSGSEEVIMNSLQELLVRGNDYYVIPLPETKVPASSTSPVR

SEQ ID NO: 1622 - protein, 41 aa, Artificial Sequence
  Non-cyclic GFR-binding peptide
SSKSSKVIMNSLQEIKPTKGIYYVIPLPELDQSVSSPSASA

SEQ ID NO: 1623 - protein, 41 aa, Artificial Sequence
  Non-cyclic GFR-binding peptide
SSKSSKVVMNSLQEVKPTRGVYYVIPLPELDQPVSSPSASA

SEQ ID NO: 1624 - protein, 44 aa, Artificial Sequence
  Non-cyclic GFR-binding peptide
RSESKNHQLFNSLQEHQGQHPKIRYYVIPLPEEETPVSELGEDN

SEQ ID NO: 1625 - protein, 44 aa, Artificial Sequence
  Non-cyclic GFR-binding peptide
RSESQSHEELNSLQEHQGQHPKIRYYVIPLPEQGTPVSELGEDN

SEQ ID NO: 1626 - protein, 45 aa, Artificial Sequence
  Non-cyclic GFR-binding peptide
ASASELHEELRNSLQELKPKKRVYEYYVIPLPEHHVRSPQSKVSS

SEQ ID NO: 1627 - protein, 45 aa, Artificial Sequence
  Non-cyclic GFR-binding peptide
ESKSALHDELTNSLQEFIPKKRVIEYYVIPLPELQVQTPRSQVNR

SEQ ID NO: 1628 - protein, 42 aa, Artificial Sequence
  Non-cyclic GFR-binding peptide
RSGSGSKVMDNSLQEVVKENEDYYLITLPELEQSVSSAKPIK

SEQ ID NO: 1629 - protein, 42 aa, Artificial Sequence
  Non-cyclic GFR-binding peptide
RSASSSKVMNNSLQEVVNKNEDYYLITLPEMKQSVSSPEPIG

SEQ ID NO: 1630 - protein, 42 aa, Artificial Sequence
  Non-cyclic GFR-binding peptide
RSGSGSKVMENSLQEVVKDYEDYYLITLPELEQSVSSAKPIS

SEQ ID NO: 1631 - protein, 42 aa, Artificial Sequence
  Non-cyclic GFR-binding peptide
HSGSSSKVMNNSLQEIVNSSDDYYLITLPELKQSVSTPKTVH

SEQ ID NO: 1632 - protein, 42 aa, Artificial Sequence
  Non-cyclic GFR-binding peptide
HSGSSSKVMNNSLQEIVNSSDDYYLITLPELKQSVSSPKPVY

SEQ ID NO: 1633 - protein, 42 aa, Artificial Sequence
  Non-cyclic GFR-binding peptide
HSGSASKVMNNSLQEIVNSSDDYYLITLPELQQSVSSPKPVT

SEQ ID NO: 1634 - protein, 42 aa, Artificial Sequence
  Non-cyclic GFR-binding peptide
HSGSASKVMNNSLQEIVNNSSDYYLITLPELKQSVSSAKPVA

SEQ ID NO: 1635 - protein, 43 aa, Artificial Sequence
  Non-cyclic GFR-binding peptide
RSGSSKVSMGENSLQETPVGMDDYYLITLPELKQSVSSAKGVK

SEQ ID NO: 1636 - protein, 42 aa, Artificial Sequence
  Non-cyclic GFR-binding peptide
RSGSESKVMGNSLQEYTVVGKDYYLITLPELKQSVSSAKSAK

SEQ ID NO: 1637 - protein, 42 aa, Artificial Sequence
  Non-cyclic GFR-binding peptide
SSGSRSKVMGNSLQEIIQQKDNYYLITLPEMKQSVSSPGASG

SEQ ID NO: 1638 - protein, 42 aa, Artificial Sequence
  Non-cyclic GFR-binding peptide
RSGSASKVMDNSLQEVVNNAADYYLITLPELRQSVSSSAPAA

SEQ ID NO: 1639 - protein, 42 aa, Artificial Sequence
  Non-cyclic GFR-binding peptide
RSGSSSKVMDNSLQEVVNNASDYYLITLPELRQSVSSTPPTS

SEQ ID NO: 1640 - protein, 42 aa, Artificial Sequence
  Non-cyclic GFR-binding peptide
HSGSSSKVMNNSLQEIVNSSDDYYLITLPELKQSVSSPKPVH

SEQ ID NO: 1641 - protein, 41 aa, Artificial Sequence
  Non-cyclic GFR-binding peptide
LSGSSKVIMNSLQELLVRGNDYYLITLPETKQSVSSTSPVR

SEQ ID NO: 1642 - protein, 41 aa, Artificial Sequence
  Non-cyclic GFR-binding peptide
SSKSSKVIMNSLQEVKPKRGVYYLITLPELAQSVSSPAASA

SEQ ID NO: 1643 - protein, 41 aa, Artificial Sequence
  Non-cyclic GFR-binding peptide
SSKSSKVVMNSLQEVKPTRGVYYLITLPELDQSVSSPSASA

SEQ ID NO: 1644 - protein, 42 aa, Artificial Sequence
  Non-cyclic GFR-binding peptide
RSGSGEVVMDNSLQEVVKENEDYYLITLPELETPVSSAKPIK

SEQ ID NO: 1645 - protein, 42 aa, Artificial Sequence
  Non-cyclic GFR-binding peptide
RSASSEVTMNNSLQEVVNKNEDYYLITLPEMKEPVSSPEPIG

SEQ ID NO: 1646 - protein, 42 aa, Artificial Sequence
  Non-cyclic GFR-binding peptide
RSGSGEVVMENSLQEVVKDYEDYYLITLPELETPVSSAKPIS

SEQ ID NO: 1647 - protein, 42 aa, Artificial Sequence
  Non-cyclic GFR-binding peptide
HSGSSRVVMNNSLQEIVNSSDDYYLITLPELKTPASTPKTVH

SEQ ID NO: 1648 - protein, 42 aa, Artificial Sequence
  Non-cyclic GFR-binding peptide
HSGSSRVVMNNSLQEIVNSSDDYYLITLPELKTPASSPKPVY

SEQ ID NO: 1649 - protein, 42 aa, Artificial Sequence
  Non-cyclic GFR-binding peptide
HSGSARVVMNNSLQEIVNSSDDYYLITLPELQTPASSPKPVT

SEQ ID NO: 1650 - protein, 42 aa, Artificial Sequence
  Non-cyclic GFR-binding peptide
HSGSAKVVMNNSLQEIVNNSSDYYLITLPELKTPASSAKPVA

SEQ ID NO: 1651 - protein, 43 aa, Artificial Sequence
  Non-cyclic GFR-binding peptide
RSGSEAVSMGENSLQETPVGMDDYYLITLPELKTPVSSAKGVK

SEQ ID NO: 1652 - protein, 42 aa, Artificial Sequence
  Non-cyclic GFR-binding peptide
RSGSESVAMGNSLQEYTVVGKDYYLITLPELKTPVSSAKSAK

SEQ ID NO: 1653 - protein, 42 aa, Artificial Sequence
  Non-cyclic GFR-binding peptide
SSGSRDVVMGNSLQEIIQQKDNYYLITLPEMKTPTSSPGASG

SEQ ID NO: 1654 - protein, 42 aa, Artificial Sequence
  Non-cyclic GFR-binding peptide
RSGSAEVVMDNSLQEVVNNAADYYLITLPELRAPVSSSAPAA

SEQ ID NO: 1655 - protein, 42 aa, Artificial Sequence
  Non-cyclic GFR-binding peptide
RSGSSEVVMDNSLQEVVNNASDYYLITLPELRTPVSSTPPTS

SEQ ID NO: 1656 - protein, 42 aa, Artificial Sequence
  Non-cyclic GFR-binding peptide
HSGSSRVVMNNSLQEIVNSSDDYYLITLPELKTPASSPKPVH

SEQ ID NO: 1657 - protein, 41 aa, Artificial Sequence
  Non-cyclic GFR-binding peptide
LSGSEEVIMNSLQELLVRGNDYYLITLPETKVPASSTSPVR

SEQ ID NO: 1658 - protein, 41 aa, Artificial Sequence
  Non-cyclic GFR-binding peptide
SSKSSRVIMNSLQEVKPKRGVYYLITLPELAQPVSSPAASA

SEQ ID NO: 1659 - protein, 44 aa, Artificial Sequence
  Non-cyclic GFR-binding peptide
RSESKNHQLFNSLQEHQGQHPKIRYYLITLPEEETPVSELGEDN

SEQ ID NO: 1660 - protein, 44 aa, Artificial Sequence
  Non-cyclic GFR-binding peptide
RSESQSHEELNSLQEHQGQHPKIRYYLITLPEQGTPVSELGEDN

SEQ ID NO: 1661 - protein, 45 aa, Artificial Sequence
  Non-cyclic GFR-binding peptide
ASASELHEELRNSLQELKPKKRVYEYYLITLPEHHVRSPQSKVSS

SEQ ID NO: 1662 - protein, 45 aa, Artificial Sequence
  Non-cyclic GFR-binding peptide
ESKSALHDELTNSLQEFIPKKRVIEYYLITLPELQVQTPRSQVNR

SEQ ID NO: 1663 - protein, 42 aa, Artificial Sequence
  Non-cyclic GFR-binding peptide
RSGSGSKVMDNSLQEVVKENEDYYLITLPELEQPVSSAKPIK

SEQ ID NO: 1664 - protein, 42 aa, Artificial Sequence
  Non-cyclic GFR-binding peptide
RSASSSKVMNNSLQEVVNKNEDYYLITLPEMKQPVSSPEPIG

SEQ ID NO: 1665 - protein, 42 aa, Artificial Sequence
  Non-cyclic GFR-binding peptide
RSGSGSKVMENSLQEVVKDYEDYYLITLPELEQPVSSAKPIS

SEQ ID NO: 1666 - protein, 42 aa, Artificial Sequence
  Non-cyclic GFR-binding peptide
HSGSSSKVMNNSLQEIVNSSDDYYLITLPELKQPVSTPKTVH

SEQ ID NO: 1667 - protein, 42 aa, Artificial Sequence
  Non-cyclic GFR-binding peptide
HSGSSSKVMNNSLQEIVNSSDDYYLITLPELKQPVSSPKPVY

SEQ ID NO: 1668 - protein, 42 aa, Artificial Sequence
  Non-cyclic GFR-binding peptide
HSGSASKVMNNSLQEIVNSSDDYYLITLPELQQPVSSPKPVT

SEQ ID NO: 1669 - protein, 42 aa, Artificial Sequence
  Non-cyclic GFR-binding peptide
HSGSASKVMNNSLQEIVNNSSDYYLITLPELKQPVSSAKPVA

SEQ ID NO: 1670 - protein, 43 aa, Artificial Sequence
  Non-cyclic GFR-binding peptide
RSGSSKVSMGENSLQETPVGMDDYYLITLPELKQPVSSAKGVK

SEQ ID NO: 1671 - protein, 42 aa, Artificial Sequence
  Non-cyclic GFR-binding peptide
RSGSESKVMGNSLQEYTVVGKDYYLITLPELKQPVSSAKSAK

SEQ ID NO: 1672 - protein, 42 aa, Artificial Sequence
  Non-cyclic GFR-binding peptide
SSGSRSKVMGNSLQEIIQQKDNYYLITLPEMKQPVSSPGASG

SEQ ID NO: 1673 - protein, 42 aa, Artificial Sequence
  Non-cyclic GFR-binding peptide
RSGSASKVMDNSLQEVVNNAADYYLITLPELRQPVSSSAPAA

SEQ ID NO: 1674 - protein, 42 aa, Artificial Sequence
  Non-cyclic GFR-binding peptide
RSGSSSKVMDNSLQEVVNNASDYYLITLPELRQPVSSTPPTS

SEQ ID NO: 1675 - protein, 42 aa, Artificial Sequence
  Non-cyclic GFR-binding peptide
HSGSSSKVMNNSLQEIVNSSDDYYLITLPELKQPVSSPKPVH

SEQ ID NO: 1676 - protein, 41 aa, Artificial Sequence
  Non-cyclic GFR-binding peptide
LSGSSKVIMNSLQELLVRGNDYYLITLPETKQPVSSTSPVR

SEQ ID NO: 1677 - protein, 41 aa, Artificial Sequence
  Non-cyclic GFR-binding peptide
SSKSSKVIMNSLQEVKPKRGVYYLITLPELAQPVSSPAASA

SEQ ID NO: 1678 - protein, 41 aa, Artificial Sequence
  Non-cyclic GFR-binding peptide
SSKSSKVIMNSLQEIKPTKGIYYLITLPELDQPVSSPSASA

SEQ ID NO: 1679 - protein, 44 aa, Artificial Sequence
  Non-cyclic GFR-binding peptide
RSESQNHQELSMEGIHQGQHPKIRMIQMTINSQGTPVSELGEDN

SEQ ID NO: 1680 - protein, 42 aa, Artificial Sequence
  Non-cyclic GFR-binding peptide
RSGSGEVVMDSMEGIVVKENEDMIQMTINSLETPVSSAKPIK

SEQ ID NO: 1681 - protein, 42 aa, Artificial Sequence
  Non-cyclic GFR-binding peptide
RSASSEVTMNSMEGIVVNKNEDMIQMTINSMKEPVSSPEPIG

SEQ ID NO: 1682 - protein, 42 aa, Artificial Sequence
  Non-cyclic GFR-binding peptide
RSGSGEVVMESMEGIVVKDYEDMIQMTINSLETPVSSAKPIS

SEQ ID NO: 1683 - protein, 42 aa, Artificial Sequence
  Non-cyclic GFR-binding peptide
HSGSSRVVMNSMEGIIVNSSDDMIQMTINSLKTPASTPKTVH

SEQ ID NO: 1684 - protein, 42 aa, Artificial Sequence
  Non-cyclic GFR-binding peptide
HSGSSRVVMNSMEGIIVNSSDDMIQMTINSLKTPASSPKPVY

SEQ ID NO: 1685 - protein, 42 aa, Artificial Sequence
  Non-cyclic GFR-binding peptide
HSGSARVVMNSMEGIIVNSSDDMIQMTINSLQTPASSPKPVT

SEQ ID NO: 1686 - protein, 42 aa, Artificial Sequence
  Non-cyclic GFR-binding peptide
HSGSAKVVMNSMEGIIVNNSSDMIQMTINSLKTPASSAKPVA

SEQ ID NO: 1687 - protein, 43 aa, Artificial Sequence
  Non-cyclic GFR-binding peptide
RSGSEAVSMGESMEGITPVGMDDMIQMTINSLKTPVSSAKGVK

SEQ ID NO: 1688 - protein, 42 aa, Artificial Sequence
  Non-cyclic GFR-binding peptide
RSGSESVAMGSMEGIYTVVGKDMIQMTINSLKTPVSSAKSAK

SEQ ID NO: 1689 - protein, 42 aa, Artificial Sequence
  Non-cyclic GFR-binding peptide
SSGSRDVVMGSMEGIIIQQKDNMIQMTINSMKTPTSSPGASG

SEQ ID NO: 1690 - protein, 42 aa, Artificial Sequence
  Non-cyclic GFR-binding peptide
RSGSAEVVMDSMEGIVVNNAADMIQMTINSLRAPVSSSAPAA

SEQ ID NO: 1691 - protein, 42 aa, Artificial Sequence
  Non-cyclic GFR-binding peptide
RSGSSEVVMDSMEGIVVNNASDMIQMTINSLRTPVSSTPPTS

SEQ ID NO: 1692 - protein, 42 aa, Artificial Sequence
  Non-cyclic GFR-binding peptide
HSGSSRVVMNSMEGIIVNSSDDMIQMTINSLKTPASSPKPVH

SEQ ID NO: 1693 - protein, 41 aa, Artificial Sequence
  Non-cyclic GFR-binding peptide
LSGSEEVIMSMEGILLVRGNDMIQMTINSTKVPASSTSPVR

SEQ ID NO: 1694 - protein, 41 aa, Artificial Sequence
  Non-cyclic GFR-binding peptide
SSKSSRVIMSMEGIVKPKRGVMIQMTINSLAQPVSSPAASA

SEQ ID NO: 1695 - protein, 41 aa, Artificial Sequence
  Non-cyclic GFR-binding peptide
SSKSSKVIMSMEGIIKPTKGIMIQMTINSLDQSVSSPSASA

SEQ ID NO: 1696 - protein, 41 aa, Artificial Sequence
  Non-cyclic GFR-binding peptide
SSKSSKVVMSMEGIVKPTRGVMIQMTINSLDQPVSSPSASA

SEQ ID NO: 1697 - protein, 44 aa, Artificial Sequence
  Non-cyclic GFR-binding peptide
RSESQSHEELSMEGIHQGQHPKIRMIQMTINSQGTPVSELGEDN

SEQ ID NO: 1698 - protein, 45 aa, Artificial Sequence
  Non-cyclic GFR-binding peptide
ASASELHEELRSMEGILKPKKRVYEMIQMTINSHHVRSPQSKVSS

SEQ ID NO: 1699 - protein, 45 aa, Artificial Sequence
  Non-cyclic GFR-binding peptide
ESKSALHDELTSMEGIFIPKKRVIEMIQMTINSLQVQTPRSQVNR

SEQ ID NO: 1700 - protein, 44 aa, Artificial Sequence
  Non-cyclic GFR-binding peptide
RSESKSHELFSMEGLHQGQHPKIRMIQMTINSEETPVSELGEDN

SEQ ID NO: 1701 - protein, 42 aa, Artificial Sequence
  Non-cyclic GFR-binding peptide
RSGSGEVVMDSMEGLVVKENEDMIQMTINSLETPVSSAKPIK

SEQ ID NO: 1702 - protein, 42 aa, Artificial Sequence
  Non-cyclic GFR-binding peptide
RSASSEVTMNSMEGLVVNKNEDMIQMTINSMKEPVSSPEPIG

SEQ ID NO: 1703 - protein, 42 aa, Artificial Sequence
  Non-cyclic GFR-binding peptide
RSGSGEVVMESMEGLVVKDYEDMIQMTINSLETPVSSAKPIS

SEQ ID NO: 1704 - protein, 42 aa, Artificial Sequence
  Non-cyclic GFR-binding peptide
HSGSSRVVMNSMEGLIVNSSDDMIQMTINSLKTPASTPKTVH

SEQ ID NO: 1705 - protein, 42 aa, Artificial Sequence
  Non-cyclic GFR-binding peptide
HSGSSRVVMNSMEGLIVNSSDDMIQMTINSLKTPASSPKPVY

SEQ ID NO: 1706 - protein, 42 aa, Artificial Sequence
  Non-cyclic GFR-binding peptide
HSGSARVVMNSMEGLIVNSSDDMIQMTINSLQTPASSPKPVT

SEQ ID NO: 1707 - protein, 42 aa, Artificial Sequence
  Non-cyclic GFR-binding peptide
HSGSAKVVMNSMEGLIVNNSSDMIQMTINSLKTPASSAKPVA

SEQ ID NO: 1708 - protein, 43 aa, Artificial Sequence
  Non-cyclic GFR-binding peptide
RSGSEAVSMGESMEGLTPVGMDDMIQMTINSLKTPVSSAKGVK

SEQ ID NO: 1709 - protein, 42 aa, Artificial Sequence
  Non-cyclic GFR-binding peptide
RSGSESVAMGSMEGLYTVVGKDMIQMTINSLKTPVSSAKSAK

SEQ ID NO: 1710 - protein, 42 aa, Artificial Sequence
  Non-cyclic GFR-binding peptide
SSGSRDVVMGSMEGLIIQQKDNMIQMTINSMKTPTSSPGASG

SEQ ID NO: 1711 - protein, 42 aa, Artificial Sequence
  Non-cyclic GFR-binding peptide
RSGSAEVVMDSMEGLVVNNAADMIQMTINSLRAPVSSSAPAA

SEQ ID NO: 1712 - protein, 42 aa, Artificial Sequence
  Non-cyclic GFR-binding peptide
RSGSSEVVMDSMEGLVVNNASDMIQMTINSLRTPVSSTPPTS

SEQ ID NO: 1713 - protein, 42 aa, Artificial Sequence
  Non-cyclic GFR-binding peptide
HSGSSRVVMNSMEGLIVNSSDDMIQMTINSLKTPASSPKPVH

SEQ ID NO: 1714 - protein, 41 aa, Artificial Sequence
  Non-cyclic GFR-binding peptide
LSGSEEVIMSMEGLLLVRGNDMIQMTINSTKVPASSTSPVR

SEQ ID NO: 1715 - protein, 41 aa, Artificial Sequence
  Non-cyclic GFR-binding peptide
SSKSSRVIMSMEGLVKPKRGVMIQMTINSLAQPVSSPAASA

SEQ ID NO: 1716 - protein, 41 aa, Artificial Sequence
  Non-cyclic GFR-binding peptide
SSKSSKVIMSMEGLIKPTKGIMIQMTINSLDQSVSSPSASA

SEQ ID NO: 1717 - protein, 41 aa, Artificial Sequence
  Non-cyclic GFR-binding peptide
SSKSSKVVMSMEGLVKPTRGVMIQMTINSLDQPVSSPSASA

SEQ ID NO: 1718 - protein, 44 aa, Artificial Sequence
  Non-cyclic GFR-binding peptide
RSESKNHQLFSMEGLHQGQHPKIRMIQMTINSEETPVSELGEDN

SEQ ID NO: 1719 - protein, 45 aa, Artificial Sequence
  Non-cyclic GFR-binding peptide
ASASELHEELRSMEGLLKPKKRVYEMIQMTINSHHVRSPQSKVSS

SEQ ID NO: 1720 - protein, 45 aa, Artificial Sequence
  Non-cyclic GFR-binding peptide
ESKSALHDELTSMEGLFIPKKRVIEMIQMTINSLQVQTPRSQVNR

SEQ ID NO: 1721 - protein, 45 aa, Artificial Sequence
  Non-cyclic GFR-binding peptide
ESKSALHEELTVQVEKFIPKKRVIEVKAVKVSRLQVRSPRSQVNR

SEQ ID NO: 1722 - protein, 42 aa, Artificial Sequence
  Non-cyclic GFR-binding peptide
RSGSGEVVMDVQVEKVVKENEDVKAVKVSRLETPVSSAKPIK

SEQ ID NO: 1723 - protein, 42 aa, Artificial Sequence
  Non-cyclic GFR-binding peptide
RSASSEVTMNVQVEKVVNKNEDVKAVKVSRMKEPVSSPEPIG

SEQ ID NO: 1724 - protein, 42 aa, Artificial Sequence
  Non-cyclic GFR-binding peptide
RSGSGEVVMEVQVEKVVKDYEDVKAVKVSRLETPVSSAKPIS

SEQ ID NO: 1725 - protein, 42 aa, Artificial Sequence
  Non-cyclic GFR-binding peptide
HSGSSRVVMNVQVEKIVNSSDDVKAVKVSRLKTPASTPKTVH

SEQ ID NO: 1726 - protein, 42 aa, Artificial Sequence
  Non-cyclic GFR-binding peptide
HSGSSRVVMNVQVEKIVNSSDDVKAVKVSRLKTPASSPKPVY

SEQ ID NO: 1727 - protein, 42 aa, Artificial Sequence
  Non-cyclic GFR-binding peptide
HSGSARVVMNVQVEKIVNSSDDVKAVKVSRLQTPASSPKPVT

SEQ ID NO: 1728 - protein, 42 aa, Artificial Sequence
  Non-cyclic GFR-binding peptide
HSGSAKVVMNVQVEKIVNNSSDVKAVKVSRLKTPASSAKPVA

SEQ ID NO: 1729 - protein, 43 aa, Artificial Sequence
  Non-cyclic GFR-binding peptide
RSGSEAVSMGEVQVEKTPVGMDDVKAVKVSRLKTPVSSAKGVK

SEQ ID NO: 1730 - protein, 42 aa, Artificial Sequence
  Non-cyclic GFR-binding peptide
RSGSESVAMGVQVEKYTVVGKDVKAVKVSRLKTPVSSAKSAK

SEQ ID NO: 1731 - protein, 42 aa, Artificial Sequence
  Non-cyclic GFR-binding peptide
SSGSRDVVMGVQVEKIIQQKDNVKAVKVSRMKTPTSSPGASG

SEQ ID NO: 1732 - protein, 42 aa, Artificial Sequence
  Non-cyclic GFR-binding peptide
RSGSAEVVMDVQVEKVVNNAADVKAVKVSRLRAPVSSSAPAA

SEQ ID NO: 1733 - protein, 42 aa, Artificial Sequence
  Non-cyclic GFR-binding peptide
RSGSSEVVMDVQVEKVVNNASDVKAVKVSRLRTPVSSTPPTS

SEQ ID NO: 1734 - protein, 42 aa, Artificial Sequence
  Non-cyclic GFR-binding peptide
HSGSSRVVMNVQVEKIVNSSDDVKAVKVSRLKTPASSPKPVH

SEQ ID NO: 1735 - protein, 41 aa, Artificial Sequence
  Non-cyclic GFR-binding peptide
LSGSEEVIMVQVEKLLVRGNDVKAVKVSRTKVPASSTSPVR

SEQ ID NO: 1736 - protein, 41 aa, Artificial Sequence
  Non-cyclic GFR-binding peptide
SSKSSRVIMVQVEKVKPKRGVVKAVKVSRLAQPVSSPAASA

SEQ ID NO: 1737 - protein, 41 aa, Artificial Sequence
  Non-cyclic GFR-binding peptide
SSKSSKVIMVQVEKIKPTKGIVKAVKVSRLDQSVSSPSASA

SEQ ID NO: 1738 - protein, 41 aa, Artificial Sequence
  Non-cyclic GFR-binding peptide
SSKSSKVVMVQVEKVKPTRGVVKAVKVSRLDQPVSSPSASA

SEQ ID NO: 1739 - protein, 44 aa, Artificial Sequence
  Non-cyclic GFR-binding peptide
RSESKNHQLFVQVEKHQGQHPKIRVKAVKVSREETPVSELGEDN

SEQ ID NO: 1740 - protein, 44 aa, Artificial Sequence
  Non-cyclic GFR-binding peptide
RSESQSHEELVQVEKHQGQHPKIRVKAVKVSRQGTPVSELGEDN

SEQ ID NO: 1741 - protein, 45 aa, Artificial Sequence
  Non-cyclic GFR-binding peptide
ESKSALHDELTVQVEKFIPKKRVIEVKAVKVSRLQVQTPRSQVNR

SEQ ID NO: 1742 - protein, 45 aa, Artificial Sequence
  Non-cyclic GFR-binding peptide
ASASELHDELRVTAKKLKPKKRVYEIKRVQVPRHHVQTPQSKVSS

SEQ ID NO: 1743 - protein, 42 aa, Artificial Sequence
  Non-cyclic GFR-binding peptide
RSGSGEVVMDVTAKKVVKENEDIKRVQVPRLETPVSSAKPIK

SEQ ID NO: 1744 - protein, 42 aa, Artificial Sequence
  Non-cyclic GFR-binding peptide
RSASSEVTMNVTAKKVVNKNEDIKRVQVPRMKEPVSSPEPIG

SEQ ID NO: 1745 - protein, 42 aa, Artificial Sequence
  Non-cyclic GFR-binding peptide
RSGSGEVVMEVTAKKVVKDYEDIKRVQVPRLETPVSSAKPIS

SEQ ID NO: 1746 - protein, 42 aa, Artificial Sequence
  Non-cyclic GFR-binding peptide
HSGSSRVVMNVTAKKIVNSSDDIKRVQVPRLKTPASTPKTVH

SEQ ID NO: 1747 - protein, 42 aa, Artificial Sequence
  Non-cyclic GFR-binding peptide
HSGSSRVVMNVTAKKIVNSSDDIKRVQVPRLKTPASSPKPVY

SEQ ID NO: 1748 - protein, 42 aa, Artificial Sequence
  Non-cyclic GFR-binding peptide
HSGSARVVMNVTAKKIVNSSDDIKRVQVPRLQTPASSPKPVT

SEQ ID NO: 1749 - protein, 42 aa, Artificial Sequence
  Non-cyclic GFR-binding peptide
HSGSAKVVMNVTAKKIVNNSSDIKRVQVPRLKTPASSAKPVA

SEQ ID NO: 1750 - protein, 43 aa, Artificial Sequence
  Non-cyclic GFR-binding peptide
RSGSEAVSMGEVTAKKTPVGMDDIKRVQVPRLKTPVSSAKGVK

SEQ ID NO: 1751 - protein, 42 aa, Artificial Sequence
  Non-cyclic GFR-binding peptide
RSGSESVAMGVTAKKYTVVGKDIKRVQVPRLKTPVSSAKSAK

SEQ ID NO: 1752 - protein, 42 aa, Artificial Sequence
  Non-cyclic GFR-binding peptide
SSGSRDVVMGVTAKKIIQQKDNIKRVQVPRMKTPTSSPGASG

SEQ ID NO: 1753 - protein, 42 aa, Artificial Sequence
  Non-cyclic GFR-binding peptide
RSGSAEVVMDVTAKKVVNNAADIKRVQVPRLRAPVSSSAPAA

SEQ ID NO: 1754 - protein, 42 aa, Artificial Sequence
  Non-cyclic GFR-binding peptide
RSGSSEVVMDVTAKKVVNNASDIKRVQVPRLRTPVSSTPPTS

SEQ ID NO: 1755 - protein, 42 aa, Artificial Sequence
  Non-cyclic GFR-binding peptide
HSGSSRVVMNVTAKKIVNSSDDIKRVQVPRLKTPASSPKPVH

SEQ ID NO: 1756 - protein, 41 aa, Artificial Sequence
  Non-cyclic GFR-binding peptide
LSGSEEVIMVTAKKLLVRGNDIKRVQVPRTKVPASSTSPVR

SEQ ID NO: 1757 - protein, 41 aa, Artificial Sequence
  Non-cyclic GFR-binding peptide
SSKSSRVIMVTAKKVKPKRGVIKRVQVPRLAQPVSSPAASA

SEQ ID NO: 1758 - protein, 41 aa, Artificial Sequence
  Non-cyclic GFR-binding peptide
SSKSSKVIMVTAKKIKPTKGIIKRVQVPRLDQSVSSPSASA

SEQ ID NO: 1759 - protein, 41 aa, Artificial Sequence
  Non-cyclic GFR-binding peptide
SSKSSKVVMVTAKKVKPTRGVIKRVQVPRLDQPVSSPSASA

SEQ ID NO: 1760 - protein, 44 aa, Artificial Sequence
  Non-cyclic GFR-binding peptide
RSESKNHQLFVTAKKHQGQHPKIRIKRVQVPREETPVSELGEDN

SEQ ID NO: 1761 - protein, 44 aa, Artificial Sequence
  Non-cyclic GFR-binding peptide
RSESQSHEELVTAKKHQGQHPKIRIKRVQVPRQGTPVSELGEDN

SEQ ID NO: 1762 - protein, 45 aa, Artificial Sequence
  Non-cyclic GFR-binding peptide
ASASELHEELRVTAKKLKPKKRVYEIKRVQVPRHHVRSPQSKVSS

SEQ ID NO: 1763 - protein, 30 aa, Artificial Sequence
  Non-cyclic GFR-binding peptide
EVVMNQYNKLVVNKNEDLYLMSIASMKTPV

SEQ ID NO: 1764 - protein, 30 aa, Artificial Sequence
  Non-cyclic GFR-binding peptide
EVVMNQYNKLIVNSSDDLYLMSIASLKTPV

SEQ ID NO: 1765 - protein, 30 aa, Artificial Sequence
  Non-cyclic GFR-binding peptide
EVVMNQYNKLIVNSSDDLYLMSIASLQTPV

SEQ ID NO: 1766 - protein, 30 aa, Artificial Sequence
  Non-cyclic GFR-binding peptide
EVVMNQYNKLIVNNSSDLYLMSIASLKTPV

SEQ ID NO: 1767 - protein, 32 aa, Artificial Sequence
  Non-cyclic GFR-binding peptide
EVVSMGEQYNKLTPVGMDDLYLMSIASLKTPV

SEQ ID NO: 1768 - protein, 30 aa, Artificial Sequence
  Non-cyclic GFR-binding peptide
EVVMGQYNKLYTVVGKDLYLMSIASLKTPV

SEQ ID NO: 1769 - protein, 30 aa, Artificial Sequence
  Non-cyclic GFR-binding peptide
EVVMGQYNKLIIQQKDNLYLMSIASMKTPV

SEQ ID NO: 1770 - protein, 30 aa, Artificial Sequence
  Non-cyclic GFR-binding peptide
EVVMDQYNKLVVNNAADLYLMSIASLRTPV

SEQ ID NO: 1771 - protein, 30 aa, Artificial Sequence
  Non-cyclic GFR-binding peptide
EVVMDQYNKLVVNNASDLYLMSIASLRTPV

SEQ ID NO: 1772 - protein, 30 aa, Artificial Sequence
  Non-cyclic GFR-binding peptide
EVVIMQYNKLLLVRGNDLYLMSIASTKTPV

SEQ ID NO: 1773 - protein, 30 aa, Artificial Sequence
  Non-cyclic GFR-binding peptide
EVVIMQYNKLVKPKRGVLYLMSIASLATPV

SEQ ID NO: 1774 - protein, 30 aa, Artificial Sequence
  Non-cyclic GFR-binding peptide
EVVIMQYNKLIKPTKGILYLMSIASLDTPV

SEQ ID NO: 1775 - protein, 30 aa, Artificial Sequence
  Non-cyclic GFR-binding peptide
EVVVMQYNKLVKPTRGVLYLMSIASLDTPV

SEQ ID NO: 1776 - protein, 30 aa, Artificial Sequence
  Non-cyclic GFR-binding peptide
EVTMNQYNKLVVNKNEDLYLMSIASMKEPV

SEQ ID NO: 1777 - protein, 30 aa, Artificial Sequence
  Non-cyclic GFR-binding peptide
RVVMNQYNKLIVNSSDDLYLMSIASLKTPA

SEQ ID NO: 1778 - protein, 30 aa, Artificial Sequence
  Non-cyclic GFR-binding peptide
RVVMNQYNKLIVNSSDDLYLMSIASLQTPA

SEQ ID NO: 1779 - protein, 30 aa, Artificial Sequence
  Non-cyclic GFR-binding peptide
KVVMNQYNKLIVNNSSDLYLMSIASLKTPA

SEQ ID NO: 1780 - protein, 32 aa, Artificial Sequence
  Non-cyclic GFR-binding peptide
EAVSMGEQYNKLTPVGMDDLYLMSIASLKTPV

SEQ ID NO: 1781 - protein, 30 aa, Artificial Sequence
  Non-cyclic GFR-binding peptide
SVAMGQYNKLYTVVGKDLYLMSIASLKTPV

SEQ ID NO: 1782 - protein, 30 aa, Artificial Sequence
  Non-cyclic GFR-binding peptide
DVVMGQYNKLIIQQKDNLYLMSIASMKTPT

SEQ ID NO: 1783 - protein, 30 aa, Artificial Sequence
  Non-cyclic GFR-binding peptide
EVVMDQYNKLVVNNAADLYLMSIASLRAPV

SEQ ID NO: 1784 - protein, 30 aa, Artificial Sequence
  Non-cyclic GFR-binding peptide
EEVIMQYNKLLLVRGNDLYLMSIASTKVPA

SEQ ID NO: 1785 - protein, 30 aa, Artificial Sequence
  Non-cyclic GFR-binding peptide
SRVIMQYNKLVKPKRGVLYLMSIASLAQPV

SEQ ID NO: 1786 - protein, 30 aa, Artificial Sequence
  Non-cyclic GFR-binding peptide
SKVIMQYNKLIKPTKGILYLMSIASLDQSV

SEQ ID NO: 1787 - protein, 30 aa, Artificial Sequence
  Non-cyclic GFR-binding peptide
SKVVMQYNKLVKPTRGVLYLMSIASLDQPV

SEQ ID NO: 1788 - protein, 32 aa, Artificial Sequence
  Non-cyclic GFR-binding peptide
NHQLFQYNKLHQGQHPKIRLYLMSIASEETPV

SEQ ID NO: 1789 - protein, 32 aa, Artificial Sequence
  Non-cyclic GFR-binding peptide
SHEELQYNKLHQGQHPKIRLYLMSIASQGTPV

SEQ ID NO: 1790 - protein, 32 aa, Artificial Sequence
  Non-cyclic GFR-binding peptide
HEELRQYNKLLKPKKRVYELYLMSIASHHVRS

SEQ ID NO: 1791 - protein, 32 aa, Artificial Sequence
  Non-cyclic GFR-binding peptide
HDELTQYNKLFIPKKRVIELYLMSIASLQVQT

SEQ ID NO: 1792 - protein, 30 aa, Artificial Sequence
  Non-cyclic GFR-binding peptide
EVTMDPYVKLVVKENEDFFLISLSSLEEPV

SEQ ID NO: 1793 - protein, 30 aa, Artificial Sequence
  Non-cyclic GFR-binding peptide
EVTMEPYVKLVVKDYEDFFLISLSSLEEPV

SEQ ID NO: 1794 - protein, 30 aa, Artificial Sequence
  Non-cyclic GFR-binding peptide
EVTMNPYVKLIVNSSDDFFLISLSSLKEPV

SEQ ID NO: 1795 - protein, 30 aa, Artificial Sequence
  Non-cyclic GFR-binding peptide
EVTMNPYVKLIVNSSDDFFLISLSSLQEPV

SEQ ID NO: 1796 - protein, 30 aa, Artificial Sequence
  Non-cyclic GFR-binding peptide
EVTMNPYVKLIVNNSSDFFLISLSSLKEPV

SEQ ID NO: 1797 - protein, 32 aa, Artificial Sequence
  Non-cyclic GFR-binding peptide
EVTSMGEPYVKLTPVGMDDFFLISLSSLKEPV

SEQ ID NO: 1798 - protein, 30 aa, Artificial Sequence
  Non-cyclic GFR-binding peptide
EVTMGPYVKLYTVVGKDFFLISLSSLKEPV

SEQ ID NO: 1799 - protein, 30 aa, Artificial Sequence
  Non-cyclic GFR-binding peptide
EVTMGPYVKLIIQQKDNFFLISLSSMKEPV

SEQ ID NO: 1800 - protein, 30 aa, Artificial Sequence
  Non-cyclic GFR-binding peptide
EVTMDPYVKLVVNNAADFFLISLSSLREPV

SEQ ID NO: 1801 - protein, 30 aa, Artificial Sequence
  Non-cyclic GFR-binding peptide
EVTMDPYVKLVVNNASDFFLISLSSLREPV

SEQ ID NO: 1802 - protein, 30 aa, Artificial Sequence
  Non-cyclic GFR-binding peptide
EVTIMPYVKLLLVRGNDFFLISLSSTKEPV

SEQ ID NO: 1803 - protein, 30 aa, Artificial Sequence
  Non-cyclic GFR-binding peptide
EVTIMPYVKLVKPKRGVFFLISLSSLAEPV

SEQ ID NO: 1804 - protein, 30 aa, Artificial Sequence
  Non-cyclic GFR-binding peptide
EVTIMPYVKLIKPTKGIFFLISLSSLDEPV

SEQ ID NO: 1805 - protein, 30 aa, Artificial Sequence
  Non-cyclic GFR-binding peptide
EVTVMPYVKLVKPTRGVFFLISLSSLDEPV

SEQ ID NO: 1806 - protein, 30 aa, Artificial Sequence
  Non-cyclic GFR-binding peptide
EVVMDPYVKLVVKENEDFFLISLSSLETPV

SEQ ID NO: 1807 - protein, 30 aa, Artificial Sequence
  Non-cyclic GFR-binding peptide
EVVMEPYVKLVVKDYEDFFLISLSSLETPV

SEQ ID NO: 1808 - protein, 30 aa, Artificial Sequence
  Non-cyclic GFR-binding peptide
RVVMNPYVKLIVNSSDDFFLISLSSLKTPA

SEQ ID NO: 1809 - protein, 30 aa, Artificial Sequence
  Non-cyclic GFR-binding peptide
RVVMNPYVKLIVNSSDDFFLISLSSLQTPA

SEQ ID NO: 1810 - protein, 30 aa, Artificial Sequence
  Non-cyclic GFR-binding peptide
KVVMNPYVKLIVNNSSDFFLISLSSLKTPA

SEQ ID NO: 1811 - protein, 32 aa, Artificial Sequence
  Non-cyclic GFR-binding peptide
EAVSMGEPYVKLTPVGMDDFFLISLSSLKTPV

SEQ ID NO: 1812 - protein, 30 aa, Artificial Sequence
  Non-cyclic GFR-binding peptide
SVAMGPYVKLYTVVGKDFFLISLSSLKTPV

SEQ ID NO: 1813 - protein, 30 aa, Artificial Sequence
  Non-cyclic GFR-binding peptide
DVVMGPYVKLIIQQKDNFFLISLSSMKTPT

SEQ ID NO: 1814 - protein, 30 aa, Artificial Sequence
  Non-cyclic GFR-binding peptide
EVVMDPYVKLVVNNAADFFLISLSSLRAPV

SEQ ID NO: 1815 - protein, 30 aa, Artificial Sequence
  Non-cyclic GFR-binding peptide
EVVMDPYVKLVVNNASDFFLISLSSLRTPV

SEQ ID NO: 1816 - protein, 30 aa, Artificial Sequence
  Non-cyclic GFR-binding peptide
EEVIMPYVKLLLVRGNDFFLISLSSTKVPA

SEQ ID NO: 1817 - protein, 30 aa, Artificial Sequence
  Non-cyclic GFR-binding peptide
SRVIMPYVKLVKPKRGVFFLISLSSLAQPV

SEQ ID NO: 1818 - protein, 30 aa, Artificial Sequence
  Non-cyclic GFR-binding peptide
SKVIMPYVKLIKPTKGIFFLISLSSLDQSV

SEQ ID NO: 1819 - protein, 30 aa, Artificial Sequence
  Non-cyclic GFR-binding peptide
SKVVMPYVKLVKPTRGVFFLISLSSLDQPV

SEQ ID NO: 1820 - protein, 32 aa, Artificial Sequence
  Non-cyclic GFR-binding peptide
NHQLFPYVKLHQGQHPKIRFFLISLSSEETPV

SEQ ID NO: 1821 - protein, 32 aa, Artificial Sequence
  Non-cyclic GFR-binding peptide
SHEELPYVKLHQGQHPKIRFFLISLSSQGTPV

SEQ ID NO: 1822 - protein, 32 aa, Artificial Sequence
  Non-cyclic GFR-binding peptide
HEELRPYVKLLKPKKRVYEFFLISLSSHHVRS

SEQ ID NO: 1823 - protein, 32 aa, Artificial Sequence
  Non-cyclic GFR-binding peptide
HDELTPYVKLFIPKKRVIEFFLISLSSLQVQT

SEQ ID NO: 1824 - protein, 30 aa, Artificial Sequence
  Non-cyclic GFR-binding peptide
RVVMDRYKKLVVKENEDFYLVSIANLETPA

SEQ ID NO: 1825 - protein, 30 aa, Artificial Sequence
  Non-cyclic GFR-binding peptide
RVVMNRYKKLVVNKNEDFYLVSIANMKTPA

SEQ ID NO: 1826 - protein, 30 aa, Artificial Sequence
  Non-cyclic GFR-binding peptide
RVVMERYKKLVVKDYEDFYLVSIANLETPA

SEQ ID NO: 1827 - protein, 30 aa, Artificial Sequence
  Non-cyclic GFR-binding peptide
RVVMNRYKKLIVNNSSDFYLVSIANLKTPA

SEQ ID NO: 1828 - protein, 32 aa, Artificial Sequence
  Non-cyclic GFR-binding peptide
RVVSMGERYKKLTPVGMDDFYLVSIANLKTPA

SEQ ID NO: 1829 - protein, 30 aa, Artificial Sequence
  Non-cyclic GFR-binding peptide
RVVMGRYKKLYTVVGKDFYLVSIANLKTPA

SEQ ID NO: 1830 - protein, 30 aa, Artificial Sequence
  Non-cyclic GFR-binding peptide
RVVMGRYKKLIIQQKDNFYLVSIANMKTPA

SEQ ID NO: 1831 - protein, 30 aa, Artificial Sequence
  Non-cyclic GFR-binding peptide
RVVMDRYKKLVVNNAADFYLVSIANLRTPA

SEQ ID NO: 1832 - protein, 30 aa, Artificial Sequence
  Non-cyclic GFR-binding peptide
RVVMDRYKKLVVNNASDFYLVSIANLRTPA

SEQ ID NO: 1833 - protein, 30 aa, Artificial Sequence
  Non-cyclic GFR-binding peptide
RVVIMRYKKLLLVRGNDFYLVSIANTKTPA

SEQ ID NO: 1834 - protein, 30 aa, Artificial Sequence
  Non-cyclic GFR-binding peptide
RVVIMRYKKLVKPKRGVFYLVSIANLATPA

SEQ ID NO: 1835 - protein, 30 aa, Artificial Sequence
  Non-cyclic GFR-binding peptide
RVVIMRYKKLIKPTKGIFYLVSIANLDTPA

SEQ ID NO: 1836 - protein, 30 aa, Artificial Sequence
  Non-cyclic GFR-binding peptide
RVVVMRYKKLVKPTRGVFYLVSIANLDTPA

SEQ ID NO: 1837 - protein, 30 aa, Artificial Sequence
  Non-cyclic GFR-binding peptide
EVVMDRYKKLVVKENEDFYLVSIANLETPV

SEQ ID NO: 1838 - protein, 30 aa, Artificial Sequence
  Non-cyclic GFR-binding peptide
EVTMNRYKKLVVNKNEDFYLVSIANMKEPV

SEQ ID NO: 1839 - protein, 30 aa, Artificial Sequence
  Non-cyclic GFR-binding peptide
EVVMERYKKLVVKDYEDFYLVSIANLETPV

SEQ ID NO: 1840 - protein, 30 aa, Artificial Sequence
  Non-cyclic GFR-binding peptide
KVVMNRYKKLIVNNSSDFYLVSIANLKTPA

SEQ ID NO: 1841 - protein, 32 aa, Artificial Sequence
  Non-cyclic GFR-binding peptide
EAVSMGERYKKLTPVGMDDFYLVSIANLKTPV

SEQ ID NO: 1842 - protein, 30 aa, Artificial Sequence
  Non-cyclic GFR-binding peptide
SVAMGRYKKLYTVVGKDFYLVSIANLKTPV

SEQ ID NO: 1843 - protein, 30 aa, Artificial Sequence
  Non-cyclic GFR-binding peptide
DVVMGRYKKLIIQQKDNFYLVSIANMKTPT

SEQ ID NO: 1844 - protein, 30 aa, Artificial Sequence
  Non-cyclic GFR-binding peptide
EVVMDRYKKLVVNNAADFYLVSIANLRAPV

SEQ ID NO: 1845 - protein, 30 aa, Artificial Sequence
  Non-cyclic GFR-binding peptide
EVVMDRYKKLVVNNASDFYLVSIANLRTPV

SEQ ID NO: 1846 - protein, 30 aa, Artificial Sequence
  Non-cyclic GFR-binding peptide
EEVIMRYKKLLLVRGNDFYLVSIANTKVPA

SEQ ID NO: 1847 - protein, 30 aa, Artificial Sequence
  Non-cyclic GFR-binding peptide
SRVIMRYKKLVKPKRGVFYLVSIANLAQPV

SEQ ID NO: 1848 - protein, 30 aa, Artificial Sequence
  Non-cyclic GFR-binding peptide
SKVIMRYKKLIKPTKGIFYLVSIANLDQSV

SEQ ID NO: 1849 - protein, 30 aa, Artificial Sequence
  Non-cyclic GFR-binding peptide
SKVVMRYKKLVKPTRGVFYLVSIANLDQPV

SEQ ID NO: 1850 - protein, 32 aa, Artificial Sequence
  Non-cyclic GFR-binding peptide
NHQLFRYKKLHQGQHPKIRFYLVSIANEETPV

SEQ ID NO: 1851 - protein, 32 aa, Artificial Sequence
  Non-cyclic GFR-binding peptide
SHEELRYKKLHQGQHPKIRFYLVSIANQGTPV

SEQ ID NO: 1852 - protein, 32 aa, Artificial Sequence
  Non-cyclic GFR-binding peptide
HEELRRYKKLLKPKKRVYEFYLVSIANHHVRS

SEQ ID NO: 1853 - protein, 32 aa, Artificial Sequence
  Non-cyclic GFR-binding peptide
HDELTRYKKLFIPKKRVIEFYLVSIANLQVQT

SEQ ID NO: 1854 - protein, 30 aa, Artificial Sequence
  Non-cyclic GFR-binding peptide
KVVMDRHKRLVVKENEDYYLVSTASLETPA

SEQ ID NO: 1855 - protein, 30 aa, Artificial Sequence
  Non-cyclic GFR-binding peptide
KVVMNRHKRLVVNKNEDYYLVSTASMKTPA

SEQ ID NO: 1856 - protein, 30 aa, Artificial Sequence
  Non-cyclic GFR-binding peptide
KVVMERHKRLVVKDYEDYYLVSTASLETPA

SEQ ID NO: 1857 - protein, 30 aa, Artificial Sequence
  Non-cyclic GFR-binding peptide
KVVMNRHKRLIVNSSDDYYLVSTASLKTPA

SEQ ID NO: 1858 - protein, 30 aa, Artificial Sequence
  Non-cyclic GFR-binding peptide
KVVMNRHKRLIVNSSDDYYLVSTASLQTPA

SEQ ID NO: 1859 - protein, 32 aa, Artificial Sequence
  Non-cyclic GFR-binding peptide
KVVSMGERHKRLTPVGMDDYYLVSTASLKTPA

SEQ ID NO: 1860 - protein, 30 aa, Artificial Sequence
  Non-cyclic GFR-binding peptide
KVVMGRHKRLYTVVGKDYYLVSTASLKTPA

SEQ ID NO: 1861 - protein, 30 aa, Artificial Sequence
  Non-cyclic GFR-binding peptide
KVVMGRHKRLIIQQKDNYYLVSTASMKTPA

SEQ ID NO: 1862 - protein, 30 aa, Artificial Sequence
  Non-cyclic GFR-binding peptide
KVVMDRHKRLVVNNAADYYLVSTASLRTPA

SEQ ID NO: 1863 - protein, 30 aa, Artificial Sequence
  Non-cyclic GFR-binding peptide
KVVMDRHKRLVVNNASDYYLVSTASLRTPA

SEQ ID NO: 1864 - protein, 30 aa, Artificial Sequence
  Non-cyclic GFR-binding peptide
KVVIMRHKRLLLVRGNDYYLVSTASTKTPA

SEQ ID NO: 1865 - protein, 30 aa, Artificial Sequence
  Non-cyclic GFR-binding peptide
KVVIMRHKRLVKPKRGVYYLVSTASLATPA

SEQ ID NO: 1866 - protein, 30 aa, Artificial Sequence
  Non-cyclic GFR-binding peptide
KVVIMRHKRLIKPTKGIYYLVSTASLDTPA

SEQ ID NO: 1867 - protein, 30 aa, Artificial Sequence
  Non-cyclic GFR-binding peptide
KVVVMRHKRLVKPTRGVYYLVSTASLDTPA

SEQ ID NO: 1868 - protein, 30 aa, Artificial Sequence
  Non-cyclic GFR-binding peptide
EVVMDRHKRLVVKENEDYYLVSTASLETPV

SEQ ID NO: 1869 - protein, 30 aa, Artificial Sequence
  Non-cyclic GFR-binding peptide
EVTMNRHKRLVVNKNEDYYLVSTASMKEPV

SEQ ID NO: 1870 - protein, 30 aa, Artificial Sequence
  Non-cyclic GFR-binding peptide
EVVMERHKRLVVKDYEDYYLVSTASLETPV

SEQ ID NO: 1871 - protein, 30 aa, Artificial Sequence
  Non-cyclic GFR-binding peptide
RVVMNRHKRLIVNSSDDYYLVSTASLKTPA

SEQ ID NO: 1872 - protein, 30 aa, Artificial Sequence
  Non-cyclic GFR-binding peptide
RVVMNRHKRLIVNSSDDYYLVSTASLQTPA

SEQ ID NO: 1873 - protein, 32 aa, Artificial Sequence
  Non-cyclic GFR-binding peptide
EAVSMGERHKRLTPVGMDDYYLVSTASLKTPV

SEQ ID NO: 1874 - protein, 30 aa, Artificial Sequence
  Non-cyclic GFR-binding peptide
SVAMGRHKRLYTVVGKDYYLVSTASLKTPV

SEQ ID NO: 1875 - protein, 30 aa, Artificial Sequence
  Non-cyclic GFR-binding peptide
DVVMGRHKRLIIQQKDNYYLVSTASMKTPT

SEQ ID NO: 1876 - protein, 30 aa, Artificial Sequence
  Non-cyclic GFR-binding peptide
EVVMDRHKRLVVNNAADYYLVSTASLRAPV

SEQ ID NO: 1877 - protein, 30 aa, Artificial Sequence
  Non-cyclic GFR-binding peptide
EVVMDRHKRLVVNNASDYYLVSTASLRTPV

SEQ ID NO: 1878 - protein, 30 aa, Artificial Sequence
  Non-cyclic GFR-binding peptide
EEVIMRHKRLLLVRGNDYYLVSTASTKVPA

SEQ ID NO: 1879 - protein, 30 aa, Artificial Sequence
  Non-cyclic GFR-binding peptide
SRVIMRHKRLVKPKRGVYYLVSTASLAQPV

SEQ ID NO: 1880 - protein, 30 aa, Artificial Sequence
  Non-cyclic GFR-binding peptide
SKVIMRHKRLIKPTKGIYYLVSTASLDQSV

SEQ ID NO: 1881 - protein, 30 aa, Artificial Sequence
  Non-cyclic GFR-binding peptide
SKVVMRHKRLVKPTRGVYYLVSTASLDQPV

SEQ ID NO: 1882 - protein, 32 aa, Artificial Sequence
  Non-cyclic GFR-binding peptide
NHQLFRHKRLHQGQHPKIRYYLVSTASEETPV

SEQ ID NO: 1883 - protein, 32 aa, Artificial Sequence
  Non-cyclic GFR-binding peptide
SHEELRHKRLHQGQHPKIRYYLVSTASQGTPV

SEQ ID NO: 1884 - protein, 32 aa, Artificial Sequence
  Non-cyclic GFR-binding peptide
HEELRRHKRLLKPKKRVYEYYLVSTASHHVRS

SEQ ID NO: 1885 - protein, 32 aa, Artificial Sequence
  Non-cyclic GFR-binding peptide
HDELTRHKRLFIPKKRVIEYYLVSTASLQVQT

SEQ ID NO: 1886 - protein, 30 aa, Artificial Sequence
  Non-cyclic GFR-binding peptide
EAVMDYHYKLVVKENEDKYLVSIPSLETPV

SEQ ID NO: 1887 - protein, 30 aa, Artificial Sequence
  Non-cyclic GFR-binding peptide
EAVMNYHYKLVVNKNEDKYLVSIPSMKTPV

SEQ ID NO: 1888 - protein, 30 aa, Artificial Sequence
  Non-cyclic GFR-binding peptide
EAVMEYHYKLVVKDYEDKYLVSIPSLETPV

SEQ ID NO: 1889 - protein, 30 aa, Artificial Sequence
  Non-cyclic GFR-binding peptide
EAVMNYHYKLIVNSSDDKYLVSIPSLKTPV

SEQ ID NO: 1890 - protein, 30 aa, Artificial Sequence
  Non-cyclic GFR-binding peptide
EAVMNYHYKLIVNSSDDKYLVSIPSLQTPV

SEQ ID NO: 1891 - protein, 30 aa, Artificial Sequence
  Non-cyclic GFR-binding peptide
EAVMNYHYKLIVNNSSDKYLVSIPSLKTPV

SEQ ID NO: 1892 - protein, 30 aa, Artificial Sequence
  Non-cyclic GFR-binding peptide
EAVMGYHYKLYTVVGKDKYLVSIPSLKTPV

SEQ ID NO: 1893 - protein, 30 aa, Artificial Sequence
  Non-cyclic GFR-binding peptide
EAVMGYHYKLIIQQKDNKYLVSIPSMKTPV

SEQ ID NO: 1894 - protein, 30 aa, Artificial Sequence
  Non-cyclic GFR-binding peptide
EAVMDYHYKLVVNNAADKYLVSIPSLRTPV

SEQ ID NO: 1895 - protein, 30 aa, Artificial Sequence
  Non-cyclic GFR-binding peptide
EAVMDYHYKLVVNNASDKYLVSIPSLRTPV

SEQ ID NO: 1896 - protein, 30 aa, Artificial Sequence
  Non-cyclic GFR-binding peptide
EAVIMYHYKLLLVRGNDKYLVSIPSTKTPV

SEQ ID NO: 1897 - protein, 30 aa, Artificial Sequence
  Non-cyclic GFR-binding peptide
EAVIMYHYKLVKPKRGVKYLVSIPSLATPV

SEQ ID NO: 1898 - protein, 30 aa, Artificial Sequence
  Non-cyclic GFR-binding peptide
EAVIMYHYKLIKPTKGIKYLVSIPSLDTPV

SEQ ID NO: 1899 - protein, 30 aa, Artificial Sequence
  Non-cyclic GFR-binding peptide
EAVVMYHYKLVKPTRGVKYLVSIPSLDTPV

SEQ ID NO: 1900 - protein, 30 aa, Artificial Sequence
  Non-cyclic GFR-binding peptide
EVVMDYHYKLVVKENEDKYLVSIPSLETPV

SEQ ID NO: 1901 - protein, 30 aa, Artificial Sequence
  Non-cyclic GFR-binding peptide
EVTMNYHYKLVVNKNEDKYLVSIPSMKEPV

SEQ ID NO: 1902 - protein, 30 aa, Artificial Sequence
  Non-cyclic GFR-binding peptide
EVVMEYHYKLVVKDYEDKYLVSIPSLETPV

SEQ ID NO: 1903 - protein, 30 aa, Artificial Sequence
  Non-cyclic GFR-binding peptide
RVVMNYHYKLIVNSSDDKYLVSIPSLKTPA

SEQ ID NO: 1904 - protein, 30 aa, Artificial Sequence
  Non-cyclic GFR-binding peptide
RVVMNYHYKLIVNSSDDKYLVSIPSLQTPA

SEQ ID NO: 1905 - protein, 30 aa, Artificial Sequence
  Non-cyclic GFR-binding peptide
KVVMNYHYKLIVNNSSDKYLVSIPSLKTPA

SEQ ID NO: 1906 - protein, 30 aa, Artificial Sequence
  Non-cyclic GFR-binding peptide
SVAMGYHYKLYTVVGKDKYLVSIPSLKTPV

SEQ ID NO: 1907 - protein, 30 aa, Artificial Sequence
  Non-cyclic GFR-binding peptide
DVVMGYHYKLIIQQKDNKYLVSIPSMKTPT

SEQ ID NO: 1908 - protein, 30 aa, Artificial Sequence
  Non-cyclic GFR-binding peptide
EVVMDYHYKLVVNNAADKYLVSIPSLRAPV

SEQ ID NO: 1909 - protein, 30 aa, Artificial Sequence
  Non-cyclic GFR-binding peptide
EVVMDYHYKLVVNNASDKYLVSIPSLRTPV

SEQ ID NO: 1910 - protein, 30 aa, Artificial Sequence
  Non-cyclic GFR-binding peptide
EEVIMYHYKLLLVRGNDKYLVSIPSTKVPA

SEQ ID NO: 1911 - protein, 30 aa, Artificial Sequence
  Non-cyclic GFR-binding peptide
SRVIMYHYKLVKPKRGVKYLVSIPSLAQPV

SEQ ID NO: 1912 - protein, 30 aa, Artificial Sequence
  Non-cyclic GFR-binding peptide
SKVIMYHYKLIKPTKGIKYLVSIPSLDQSV

SEQ ID NO: 1913 - protein, 30 aa, Artificial Sequence
  Non-cyclic GFR-binding peptide
SKVVMYHYKLVKPTRGVKYLVSIPSLDQPV

SEQ ID NO: 1914 - protein, 32 aa, Artificial Sequence
  Non-cyclic GFR-binding peptide
NHQLFYHYKLHQGQHPKIRKYLVSIPSEETPV

SEQ ID NO: 1915 - protein, 32 aa, Artificial Sequence
  Non-cyclic GFR-binding peptide
SHEELYHYKLHQGQHPKIRKYLVSIPSQGTPV

SEQ ID NO: 1916 - protein, 32 aa, Artificial Sequence
  Non-cyclic GFR-binding peptide
HEELRYHYKLLKPKKRVYEKYLVSIPSHHVRS

SEQ ID NO: 1917 - protein, 32 aa, Artificial Sequence
  Non-cyclic GFR-binding peptide
HDELTYHYKLFIPKKRVIEKYLVSIPSLQVQT

SEQ ID NO: 1918 - protein, 30 aa, Artificial Sequence
  Non-cyclic GFR-binding peptide
SVAMDEYKFKVVKENEDLYLISIPELETPV

SEQ ID NO: 1919 - protein, 30 aa, Artificial Sequence
  Non-cyclic GFR-binding peptide
SVAMNEYKFKVVNKNEDLYLISIPEMKTPV

SEQ ID NO: 1920 - protein, 30 aa, Artificial Sequence
  Non-cyclic GFR-binding peptide
SVAMEEYKFKVVKDYEDLYLISIPELETPV

SEQ ID NO: 1921 - protein, 30 aa, Artificial Sequence
  Non-cyclic GFR-binding peptide
SVAMNEYKFKIVNSSDDLYLISIPELKTPV

SEQ ID NO: 1922 - protein, 30 aa, Artificial Sequence
  Non-cyclic GFR-binding peptide
SVAMNEYKFKIVNSSDDLYLISIPELQTPV

SEQ ID NO: 1923 - protein, 30 aa, Artificial Sequence
  Non-cyclic GFR-binding peptide
SVAMNEYKFKIVNNSSDLYLISIPELKTPV

SEQ ID NO: 1924 - protein, 32 aa, Artificial Sequence
  Non-cyclic GFR-binding peptide
SVASMGEEYKFKTPVGMDDLYLISIPELKTPV

SEQ ID NO: 1925 - protein, 30 aa, Artificial Sequence
  Non-cyclic GFR-binding peptide
SVAMGEYKFKIIQQKDNLYLISIPEMKTPV

SEQ ID NO: 1926 - protein, 30 aa, Artificial Sequence
  Non-cyclic GFR-binding peptide
SVAMDEYKFKVVNNAADLYLISIPELRTPV

SEQ ID NO: 1927 - protein, 30 aa, Artificial Sequence
  Non-cyclic GFR-binding peptide
SVAMDEYKFKVVNNASDLYLISIPELRTPV

SEQ ID NO: 1928 - protein, 30 aa, Artificial Sequence
  Non-cyclic GFR-binding peptide
SVAIMEYKFKLLVRGNDLYLISIPETKTPV

SEQ ID NO: 1929 - protein, 30 aa, Artificial Sequence
  Non-cyclic GFR-binding peptide
SVAIMEYKFKVKPKRGVLYLISIPELATPV

SEQ ID NO: 1930 - protein, 30 aa, Artificial Sequence
  Non-cyclic GFR-binding peptide
SVAIMEYKFKIKPTKGILYLISIPELDTPV

SEQ ID NO: 1931 - protein, 30 aa, Artificial Sequence
  Non-cyclic GFR-binding peptide
SVAVMEYKFKVKPTRGVLYLISIPELDTPV

SEQ ID NO: 1932 - protein, 30 aa, Artificial Sequence
  Non-cyclic GFR-binding peptide
EVVMDEYKFKVVKENEDLYLISIPELETPV

SEQ ID NO: 1933 - protein, 30 aa, Artificial Sequence
  Non-cyclic GFR-binding peptide
EVTMNEYKFKVVNKNEDLYLISIPEMKEPV

SEQ ID NO: 1934 - protein, 30 aa, Artificial Sequence
  Non-cyclic GFR-binding peptide
EVVMEEYKFKVVKDYEDLYLISIPELETPV

SEQ ID NO: 1935 - protein, 30 aa, Artificial Sequence
  Non-cyclic GFR-binding peptide
RVVMNEYKFKIVNSSDDLYLISIPELKTPA

SEQ ID NO: 1936 - protein, 30 aa, Artificial Sequence
  Non-cyclic GFR-binding peptide
RVVMNEYKFKIVNSSDDLYLISIPELQTPA

SEQ ID NO: 1937 - protein, 30 aa, Artificial Sequence
  Non-cyclic GFR-binding peptide
KVVMNEYKFKIVNNSSDLYLISIPELKTPA

SEQ ID NO: 1938 - protein, 32 aa, Artificial Sequence
  Non-cyclic GFR-binding peptide
EAVSMGEEYKFKTPVGMDDLYLISIPELKTPV

SEQ ID NO: 1939 - protein, 30 aa, Artificial Sequence
  Non-cyclic GFR-binding peptide
DVVMGEYKFKIIQQKDNLYLISIPEMKTPT

SEQ ID NO: 1940 - protein, 30 aa, Artificial Sequence
  Non-cyclic GFR-binding peptide
EVVMDEYKFKVVNNAADLYLISIPELRAPV

SEQ ID NO: 1941 - protein, 30 aa, Artificial Sequence
  Non-cyclic GFR-binding peptide
EVVMDEYKFKVVNNASDLYLISIPELRTPV

SEQ ID NO: 1942 - protein, 30 aa, Artificial Sequence
  Non-cyclic GFR-binding peptide
EEVIMEYKFKLLVRGNDLYLISIPETKVPA

SEQ ID NO: 1943 - protein, 30 aa, Artificial Sequence
  Non-cyclic GFR-binding peptide
SRVIMEYKFKVKPKRGVLYLISIPELAQPV

SEQ ID NO: 1944 - protein, 30 aa, Artificial Sequence
  Non-cyclic GFR-binding peptide
SKVIMEYKFKIKPTKGILYLISIPELDQSV

SEQ ID NO: 1945 - protein, 30 aa, Artificial Sequence
  Non-cyclic GFR-binding peptide
SKVVMEYKFKVKPTRGVLYLISIPELDQPV

SEQ ID NO: 1946 - protein, 32 aa, Artificial Sequence
  Non-cyclic GFR-binding peptide
NHQLFEYKFKHQGQHPKIRLYLISIPEEETPV

SEQ ID NO: 1947 - protein, 32 aa, Artificial Sequence
  Non-cyclic GFR-binding peptide
SHEELEYKFKHQGQHPKIRLYLISIPEQGTPV

SEQ ID NO: 1948 - protein, 32 aa, Artificial Sequence
  Non-cyclic GFR-binding peptide
HEELREYKFKLKPKKRVYELYLISIPEHHVRS

SEQ ID NO: 1949 - protein, 32 aa, Artificial Sequence
  Non-cyclic GFR-binding peptide
HDELTEYKFKFIPKKRVIELYLISIPELQVQT

SEQ ID NO: 1950 - protein, 30 aa, Artificial Sequence
  Non-cyclic GFR-binding peptide
DVVMDPIKGYVVKENEDFYLMNIPSLETPT

SEQ ID NO: 1951 - protein, 30 aa, Artificial Sequence
  Non-cyclic GFR-binding peptide
DVVMNPIKGYVVNKNEDFYLMNIPSMKTPT

SEQ ID NO: 1952 - protein, 30 aa, Artificial Sequence
  Non-cyclic GFR-binding peptide
DVVMEPIKGYVVKDYEDFYLMNIPSLETPT

SEQ ID NO: 1953 - protein, 30 aa, Artificial Sequence
  Non-cyclic GFR-binding peptide
DVVMNPIKGYIVNSSDDFYLMNIPSLKTPT

SEQ ID NO: 1954 - protein, 30 aa, Artificial Sequence
  Non-cyclic GFR-binding peptide
DVVMNPIKGYIVNSSDDFYLMNIPSLQTPT

SEQ ID NO: 1955 - protein, 30 aa, Artificial Sequence
  Non-cyclic GFR-binding peptide
DVVMNPIKGYIVNNSSDFYLMNIPSLKTPT

SEQ ID NO: 1956 - protein, 32 aa, Artificial Sequence
  Non-cyclic GFR-binding peptide
DVVSMGEPIKGYTPVGMDDFYLMNIPSLKTPT

SEQ ID NO: 1957 - protein, 30 aa, Artificial Sequence
  Non-cyclic GFR-binding peptide
DVVMGPIKGYYTVVGKDFYLMNIPSLKTPT

SEQ ID NO: 1958 - protein, 30 aa, Artificial Sequence
  Non-cyclic GFR-binding peptide
DVVMDPIKGYVVNNAADFYLMNIPSLRTPT

SEQ ID NO: 1959 - protein, 30 aa, Artificial Sequence
  Non-cyclic GFR-binding peptide
DVVMDPIKGYVVNNASDFYLMNIPSLRTPT

SEQ ID NO: 1960 - protein, 30 aa, Artificial Sequence
  Non-cyclic GFR-binding peptide
DVVIMPIKGYLLVRGNDFYLMNIPSTKTPT

SEQ ID NO: 1961 - protein, 30 aa, Artificial Sequence
  Non-cyclic GFR-binding peptide
DVVIMPIKGYVKPKRGVFYLMNIPSLATPT

SEQ ID NO: 1962 - protein, 30 aa, Artificial Sequence
  Non-cyclic GFR-binding peptide
DVVIMPIKGYIKPTKGIFYLMNIPSLDTPT

SEQ ID NO: 1963 - protein, 30 aa, Artificial Sequence
  Non-cyclic GFR-binding peptide
DVVVMPIKGYVKPTRGVFYLMNIPSLDTPT

SEQ ID NO: 1964 - protein, 30 aa, Artificial Sequence
  Non-cyclic GFR-binding peptide
EVVMDPIKGYVVKENEDFYLMNIPSLETPV

SEQ ID NO: 1965 - protein, 30 aa, Artificial Sequence
  Non-cyclic GFR-binding peptide
EVTMNPIKGYVVNKNEDFYLMNIPSMKEPV

SEQ ID NO: 1966 - protein, 30 aa, Artificial Sequence
  Non-cyclic GFR-binding peptide
EVVMEPIKGYVVKDYEDFYLMNIPSLETPV

SEQ ID NO: 1967 - protein, 30 aa, Artificial Sequence
  Non-cyclic GFR-binding peptide
RVVMNPIKGYIVNSSDDFYLMNIPSLKTPA

SEQ ID NO: 1968 - protein, 30 aa, Artificial Sequence
  Non-cyclic GFR-binding peptide
RVVMNPIKGYIVNSSDDFYLMNIPSLQTPA

SEQ ID NO: 1969 - protein, 30 aa, Artificial Sequence
  Non-cyclic GFR-binding peptide
KVVMNPIKGYIVNNSSDFYLMNIPSLKTPA

SEQ ID NO: 1970 - protein, 32 aa, Artificial Sequence
  Non-cyclic GFR-binding peptide
EAVSMGEPIKGYTPVGMDDFYLMNIPSLKTPV

SEQ ID NO: 1971 - protein, 30 aa, Artificial Sequence
  Non-cyclic GFR-binding peptide
SVAMGPIKGYYTVVGKDFYLMNIPSLKTPV

SEQ ID NO: 1972 - protein, 30 aa, Artificial Sequence
  Non-cyclic GFR-binding peptide
EVVMDPIKGYVVNNAADFYLMNIPSLRAPV

SEQ ID NO: 1973 - protein, 30 aa, Artificial Sequence
  Non-cyclic GFR-binding peptide
EVVMDPIKGYVVNNASDFYLMNIPSLRTPV

SEQ ID NO: 1974 - protein, 30 aa, Artificial Sequence
  Non-cyclic GFR-binding peptide
EEVIMPIKGYLLVRGNDFYLMNIPSTKVPA

SEQ ID NO: 1975 - protein, 30 aa, Artificial Sequence
  Non-cyclic GFR-binding peptide
SRVIMPIKGYVKPKRGVFYLMNIPSLAQPV

SEQ ID NO: 1976 - protein, 30 aa, Artificial Sequence
  Non-cyclic GFR-binding peptide
SKVIMPIKGYIKPTKGIFYLMNIPSLDQSV

SEQ ID NO: 1977 - protein, 30 aa, Artificial Sequence
  Non-cyclic GFR-binding peptide
SKVVMPIKGYVKPTRGVFYLMNIPSLDQPV

SEQ ID NO: 1978 - protein, 32 aa, Artificial Sequence
  Non-cyclic GFR-binding peptide
NHQLFPIKGYHQGQHPKIRFYLMNIPSEETPV

SEQ ID NO: 1979 - protein, 32 aa, Artificial Sequence
  Non-cyclic GFR-binding peptide
SHEELPIKGYHQGQHPKIRFYLMNIPSQGTPV

SEQ ID NO: 1980 - protein, 32 aa, Artificial Sequence
  Non-cyclic GFR-binding peptide
HEELRPIKGYLKPKKRVYEFYLMNIPSHHVRS

SEQ ID NO: 1981 - protein, 32 aa, Artificial Sequence
  Non-cyclic GFR-binding peptide
HDELTPIKGYFIPKKRVIEFYLMNIPSLQVQT

SEQ ID NO: 1982 - protein, 30 aa, Artificial Sequence
  Non-cyclic GFR-binding peptide
EVVMDEYQKYVVKENEDIYLISIPSLEAPV

SEQ ID NO: 1983 - protein, 30 aa, Artificial Sequence
  Non-cyclic GFR-binding peptide
EVVMNEYQKYVVNKNEDIYLISIPSMKAPV

SEQ ID NO: 1984 - protein, 30 aa, Artificial Sequence
  Non-cyclic GFR-binding peptide
EVVMEEYQKYVVKDYEDIYLISIPSLEAPV

SEQ ID NO: 1985 - protein, 30 aa, Artificial Sequence
  Non-cyclic GFR-binding peptide
EVVMNEYQKYIVNSSDDIYLISIPSLKAPV

SEQ ID NO: 1986 - protein, 30 aa, Artificial Sequence
  Non-cyclic GFR-binding peptide
EVVMNEYQKYIVNSSDDIYLISIPSLQAPV

SEQ ID NO: 1987 - protein, 30 aa, Artificial Sequence
  Non-cyclic GFR-binding peptide
EVVMNEYQKYIVNNSSDIYLISIPSLKAPV

SEQ ID NO: 1988 - protein, 32 aa, Artificial Sequence
  Non-cyclic GFR-binding peptide
EVVSMGEEYQKYTPVGMDDIYLISIPSLKAPV

SEQ ID NO: 1989 - protein, 30 aa, Artificial Sequence
  Non-cyclic GFR-binding peptide
EVVMGEYQKYYTVVGKDIYLISIPSLKAPV

SEQ ID NO: 1990 - protein, 30 aa, Artificial Sequence
  Non-cyclic GFR-binding peptide
EVVMGEYQKYIIQQKDNIYLISIPSMKAPV

SEQ ID NO: 1991 - protein, 30 aa, Artificial Sequence
  Non-cyclic GFR-binding peptide
EVVMDEYQKYVVNNASDIYLISIPSLRAPV

SEQ ID NO: 1992 - protein, 30 aa, Artificial Sequence
  Non-cyclic GFR-binding peptide
EVVIMEYQKYLLVRGNDIYLISIPSTKAPV

SEQ ID NO: 1993 - protein, 30 aa, Artificial Sequence
  Non-cyclic GFR-binding peptide
EVVIMEYQKYVKPKRGVIYLISIPSLAAPV

SEQ ID NO: 1994 - protein, 30 aa, Artificial Sequence
  Non-cyclic GFR-binding peptide
EVVIMEYQKYIKPTKGIIYLISIPSLDAPV

SEQ ID NO: 1995 - protein, 30 aa, Artificial Sequence
  Non-cyclic GFR-binding peptide
EVVVMEYQKYVKPTRGVIYLISIPSLDAPV

SEQ ID NO: 1996 - protein, 30 aa, Artificial Sequence
  Non-cyclic GFR-binding peptide
EVVMDEYQKYVVKENEDIYLISIPSLETPV

SEQ ID NO: 1997 - protein, 30 aa, Artificial Sequence
  Non-cyclic GFR-binding peptide
EVTMNEYQKYVVNKNEDIYLISIPSMKEPV

SEQ ID NO: 1998 - protein, 30 aa, Artificial Sequence
  Non-cyclic GFR-binding peptide
EVVMEEYQKYVVKDYEDIYLISIPSLETPV

SEQ ID NO: 1999 - protein, 30 aa, Artificial Sequence
  Non-cyclic GFR-binding peptide
RVVMNEYQKYIVNSSDDIYLISIPSLKTPA

SEQ ID NO: 2000 - protein, 30 aa, Artificial Sequence
  Non-cyclic GFR-binding peptide
RVVMNEYQKYIVNSSDDIYLISIPSLQTPA

SEQ ID NO: 2001 - protein, 30 aa, Artificial Sequence
  Non-cyclic GFR-binding peptide
KVVMNEYQKYIVNNSSDIYLISIPSLKTPA

SEQ ID NO: 2002 - protein, 30 aa, Artificial Sequence
  Non-cyclic GFR-binding peptide
SVAMGEYQKYYTVVGKDIYLISIPSLKTPV

SEQ ID NO: 2003 - protein, 30 aa, Artificial Sequence
  Non-cyclic GFR-binding peptide
DVVMGEYQKYIIQQKDNIYLISIPSMKTPT

SEQ ID NO: 2004 - protein, 30 aa, Artificial Sequence
  Non-cyclic GFR-binding peptide
EVVMDEYQKYVVNNASDIYLISIPSLRTPV

SEQ ID NO: 2005 - protein, 30 aa, Artificial Sequence
  Non-cyclic GFR-binding peptide
EEVIMEYQKYLLVRGNDIYLISIPSTKVPA

SEQ ID NO: 2006 - protein, 30 aa, Artificial Sequence
  Non-cyclic GFR-binding peptide
SRVIMEYQKYVKPKRGVIYLISIPSLAQPV

SEQ ID NO: 2007 - protein, 30 aa, Artificial Sequence
  Non-cyclic GFR-binding peptide
SKVIMEYQKYIKPTKGIIYLISIPSLDQSV

SEQ ID NO: 2008 - protein, 30 aa, Artificial Sequence
  Non-cyclic GFR-binding peptide
SKVVMEYQKYVKPTRGVIYLISIPSLDQPV

SEQ ID NO: 2009 - protein, 32 aa, Artificial Sequence
  Non-cyclic GFR-binding peptide
NHQLFEYQKYHQGQHPKIRIYLISIPSEETPV

SEQ ID NO: 2010 - protein, 32 aa, Artificial Sequence
  Non-cyclic GFR-binding peptide
SHEELEYQKYHQGQHPKIRIYLISIPSQGTPV

SEQ ID NO: 2011 - protein, 32 aa, Artificial Sequence
  Non-cyclic GFR-binding peptide
HEELREYQKYLKPKKRVYEIYLISIPSHHVRS

SEQ ID NO: 2012 - protein, 32 aa, Artificial Sequence
  Non-cyclic GFR-binding peptide
HDELTEYQKYFIPKKRVIEIYLISIPSLQVQT

SEQ ID NO: 2013 - protein, 30 aa, Artificial Sequence
  Non-cyclic GFR-binding peptide
EVVMDEYQKYVVKENEDIFLISIPSLETPV

SEQ ID NO: 2014 - protein, 30 aa, Artificial Sequence
  Non-cyclic GFR-binding peptide
EVVMNEYQKYVVNKNEDIFLISIPSMKTPV

SEQ ID NO: 2015 - protein, 30 aa, Artificial Sequence
  Non-cyclic GFR-binding peptide
EVVMEEYQKYVVKDYEDIFLISIPSLETPV

SEQ ID NO: 2016 - protein, 30 aa, Artificial Sequence
  Non-cyclic GFR-binding peptide
EVVMNEYQKYIVNSSDDIFLISIPSLKTPV

SEQ ID NO: 2017 - protein, 30 aa, Artificial Sequence
  Non-cyclic GFR-binding peptide
EVVMNEYQKYIVNSSDDIFLISIPSLQTPV

SEQ ID NO: 2018 - protein, 30 aa, Artificial Sequence
  Non-cyclic GFR-binding peptide
EVVMNEYQKYIVNNSSDIFLISIPSLKTPV

SEQ ID NO: 2019 - protein, 32 aa, Artificial Sequence
  Non-cyclic GFR-binding peptide
EVVSMGEEYQKYTPVGMDDIFLISIPSLKTPV

SEQ ID NO: 2020 - protein, 30 aa, Artificial Sequence
  Non-cyclic GFR-binding peptide
EVVMGEYQKYYTVVGKDIFLISIPSLKTPV

SEQ ID NO: 2021 - protein, 30 aa, Artificial Sequence
  Non-cyclic GFR-binding peptide
EVVMGEYQKYIIQQKDNIFLISIPSMKTPV

SEQ ID NO: 2022 - protein, 30 aa, Artificial Sequence
  Non-cyclic GFR-binding peptide
EVVMDEYQKYVVNNAADIFLISIPSLRTPV

SEQ ID NO: 2023 - protein, 30 aa, Artificial Sequence
  Non-cyclic GFR-binding peptide
EVVIMEYQKYLLVRGNDIFLISIPSTKTPV

SEQ ID NO: 2024 - protein, 30 aa, Artificial Sequence
  Non-cyclic GFR-binding peptide
EVVIMEYQKYVKPKRGVIFLISIPSLATPV

SEQ ID NO: 2025 - protein, 30 aa, Artificial Sequence
  Non-cyclic GFR-binding peptide
EVVIMEYQKYIKPTKGIIFLISIPSLDTPV

SEQ ID NO: 2026 - protein, 30 aa, Artificial Sequence
  Non-cyclic GFR-binding peptide
EVVVMEYQKYVKPTRGVIFLISIPSLDTPV

SEQ ID NO: 2027 - protein, 30 aa, Artificial Sequence
  Non-cyclic GFR-binding peptide
EVTMNEYQKYVVNKNEDIFLISIPSMKEPV

SEQ ID NO: 2028 - protein, 30 aa, Artificial Sequence
  Non-cyclic GFR-binding peptide
RVVMNEYQKYIVNSSDDIFLISIPSLKTPA

SEQ ID NO: 2029 - protein, 30 aa, Artificial Sequence
  Non-cyclic GFR-binding peptide
RVVMNEYQKYIVNSSDDIFLISIPSLQTPA

SEQ ID NO: 2030 - protein, 30 aa, Artificial Sequence
  Non-cyclic GFR-binding peptide
KVVMNEYQKYIVNNSSDIFLISIPSLKTPA

SEQ ID NO: 2031 - protein, 32 aa, Artificial Sequence
  Non-cyclic GFR-binding peptide
EAVSMGEEYQKYTPVGMDDIFLISIPSLKTPV

SEQ ID NO: 2032 - protein, 30 aa, Artificial Sequence
  Non-cyclic GFR-binding peptide
SVAMGEYQKYYTVVGKDIFLISIPSLKTPV

SEQ ID NO: 2033 - protein, 30 aa, Artificial Sequence
  Non-cyclic GFR-binding peptide
DVVMGEYQKYIIQQKDNIFLISIPSMKTPT

SEQ ID NO: 2034 - protein, 30 aa, Artificial Sequence
  Non-cyclic GFR-binding peptide
EVVMDEYQKYVVNNAADIFLISIPSLRAPV

SEQ ID NO: 2035 - protein, 30 aa, Artificial Sequence
  Non-cyclic GFR-binding peptide
EEVIMEYQKYLLVRGNDIFLISIPSTKVPA

SEQ ID NO: 2036 - protein, 30 aa, Artificial Sequence
  Non-cyclic GFR-binding peptide
SRVIMEYQKYVKPKRGVIFLISIPSLAQPV

SEQ ID NO: 2037 - protein, 30 aa, Artificial Sequence
  Non-cyclic GFR-binding peptide
SKVIMEYQKYIKPTKGIIFLISIPSLDQSV

SEQ ID NO: 2038 - protein, 30 aa, Artificial Sequence
  Non-cyclic GFR-binding peptide
SKVVMEYQKYVKPTRGVIFLISIPSLDQPV

SEQ ID NO: 2039 - protein, 32 aa, Artificial Sequence
  Non-cyclic GFR-binding peptide
NHQLFEYQKYHQGQHPKIRIFLISIPSEETPV

SEQ ID NO: 2040 - protein, 32 aa, Artificial Sequence
  Non-cyclic GFR-binding peptide
SHEELEYQKYHQGQHPKIRIFLISIPSQGTPV

SEQ ID NO: 2041 - protein, 32 aa, Artificial Sequence
  Non-cyclic GFR-binding peptide
HEELREYQKYLKPKKRVYEIFLISIPSHHVRS

SEQ ID NO: 2042 - protein, 32 aa, Artificial Sequence
  Non-cyclic GFR-binding peptide
HDELTEYQKYFIPKKRVIEIFLISIPSLQVQT

SEQ ID NO: 2043 - protein, 30 aa, Artificial Sequence
  Non-cyclic GFR-binding peptide
EEVMDDKHHDVVKENEDVYLMSLPKLEVPA

SEQ ID NO: 2044 - protein, 30 aa, Artificial Sequence
  Non-cyclic GFR-binding peptide
EEVMNDKHHDVVNKNEDVYLMSLPKMKVPA

SEQ ID NO: 2045 - protein, 30 aa, Artificial Sequence
  Non-cyclic GFR-binding peptide
EEVMEDKHHDVVKDYEDVYLMSLPKLEVPA

SEQ ID NO: 2046 - protein, 30 aa, Artificial Sequence
  Non-cyclic GFR-binding peptide
EEVMNDKHHDIVNSSDDVYLMSLPKLKVPA

SEQ ID NO: 2047 - protein, 30 aa, Artificial Sequence
  Non-cyclic GFR-binding peptide
EEVMNDKHHDIVNSSDDVYLMSLPKLQVPA

SEQ ID NO: 2048 - protein, 30 aa, Artificial Sequence
  Non-cyclic GFR-binding peptide
EEVMNDKHHDIVNNSSDVYLMSLPKLKVPA

SEQ ID NO: 2049 - protein, 32 aa, Artificial Sequence
  Non-cyclic GFR-binding peptide
EEVSMGEDKHHDTPVGMDDVYLMSLPKLKVPA

SEQ ID NO: 2050 - protein, 30 aa, Artificial Sequence
  Non-cyclic GFR-binding peptide
EEVMGDKHHDYTVVGKDVYLMSLPKLKVPA

SEQ ID NO: 2051 - protein, 30 aa, Artificial Sequence
  Non-cyclic GFR-binding peptide
EEVMGDKHHDIIQQKDNVYLMSLPKMKVPA

SEQ ID NO: 2052 - protein, 30 aa, Artificial Sequence
  Non-cyclic GFR-binding peptide
EEVMDDKHHDVVNNAADVYLMSLPKLRVPA

SEQ ID NO: 2053 - protein, 30 aa, Artificial Sequence
  Non-cyclic GFR-binding peptide
EEVMDDKHHDVVNNASDVYLMSLPKLRVPA

SEQ ID NO: 2054 - protein, 30 aa, Artificial Sequence
  Non-cyclic GFR-binding peptide
EEVIMDKHHDVKPKRGVVYLMSLPKLAVPA

SEQ ID NO: 2055 - protein, 30 aa, Artificial Sequence
  Non-cyclic GFR-binding peptide
EEVIMDKHHDIKPTKGIVYLMSLPKLDVPA

SEQ ID NO: 2056 - protein, 30 aa, Artificial Sequence
  Non-cyclic GFR-binding peptide
EEVVMDKHHDVKPTRGVVYLMSLPKLDVPA

SEQ ID NO: 2057 - protein, 30 aa, Artificial Sequence
  Non-cyclic GFR-binding peptide
EVVMDDKHHDVVKENEDVYLMSLPKLETPV

SEQ ID NO: 2058 - protein, 30 aa, Artificial Sequence
  Non-cyclic GFR-binding peptide
EVTMNDKHHDVVNKNEDVYLMSLPKMKEPV

SEQ ID NO: 2059 - protein, 30 aa, Artificial Sequence
  Non-cyclic GFR-binding peptide
EVVMEDKHHDVVKDYEDVYLMSLPKLETPV

SEQ ID NO: 2060 - protein, 30 aa, Artificial Sequence
  Non-cyclic GFR-binding peptide
RVVMNDKHHDIVNSSDDVYLMSLPKLKTPA

SEQ ID NO: 2061 - protein, 30 aa, Artificial Sequence
  Non-cyclic GFR-binding peptide
RVVMNDKHHDIVNSSDDVYLMSLPKLQTPA

SEQ ID NO: 2062 - protein, 30 aa, Artificial Sequence
  Non-cyclic GFR-binding peptide
KVVMNDKHHDIVNNSSDVYLMSLPKLKTPA

SEQ ID NO: 2063 - protein, 32 aa, Artificial Sequence
  Non-cyclic GFR-binding peptide
EAVSMGEDKHHDTPVGMDDVYLMSLPKLKTPV

SEQ ID NO: 2064 - protein, 30 aa, Artificial Sequence
  Non-cyclic GFR-binding peptide
SVAMGDKHHDYTVVGKDVYLMSLPKLKTPV

SEQ ID NO: 2065 - protein, 30 aa, Artificial Sequence
  Non-cyclic GFR-binding peptide
DVVMGDKHHDIIQQKDNVYLMSLPKMKTPT

SEQ ID NO: 2066 - protein, 30 aa, Artificial Sequence
  Non-cyclic GFR-binding peptide
EVVMDDKHHDVVNNAADVYLMSLPKLRAPV

SEQ ID NO: 2067 - protein, 30 aa, Artificial Sequence
  Non-cyclic GFR-binding peptide
EVVMDDKHHDVVNNASDVYLMSLPKLRTPV

SEQ ID NO: 2068 - protein, 30 aa, Artificial Sequence
  Non-cyclic GFR-binding peptide
SRVIMDKHHDVKPKRGVVYLMSLPKLAQPV

SEQ ID NO: 2069 - protein, 30 aa, Artificial Sequence
  Non-cyclic GFR-binding peptide
SKVIMDKHHDIKPTKGIVYLMSLPKLDQSV

SEQ ID NO: 2070 - protein, 30 aa, Artificial Sequence
  Non-cyclic GFR-binding peptide
SKVVMDKHHDVKPTRGVVYLMSLPKLDQPV

SEQ ID NO: 2071 - protein, 32 aa, Artificial Sequence
  Non-cyclic GFR-binding peptide
NHQLFDKHHDHQGQHPKIRVYLMSLPKEETPV

SEQ ID NO: 2072 - protein, 32 aa, Artificial Sequence
  Non-cyclic GFR-binding peptide
SHEELDKHHDHQGQHPKIRVYLMSLPKQGTPV

SEQ ID NO: 2073 - protein, 32 aa, Artificial Sequence
  Non-cyclic GFR-binding peptide
HEELRDKHHDLKPKKRVYEVYLMSLPKHHVRS

SEQ ID NO: 2074 - protein, 32 aa, Artificial Sequence
  Non-cyclic GFR-binding peptide
HDELTDKHHDFIPKKRVIEVYLMSLPKLQVQT

SEQ ID NO: 2075 - protein, 30 aa, Artificial Sequence
  Non-cyclic GFR-binding peptide
SRVMDNSLQEVVKENEDYYVIPLPELEQPV

SEQ ID NO: 2076 - protein, 30 aa, Artificial Sequence
  Non-cyclic GFR-binding peptide
SRVMNNSLQEVVNKNEDYYVIPLPEMKQPV

SEQ ID NO: 2077 - protein, 30 aa, Artificial Sequence
  Non-cyclic GFR-binding peptide
SRVMENSLQEVVKDYEDYYVIPLPELEQPV

SEQ ID NO: 2078 - protein, 30 aa, Artificial Sequence
  Non-cyclic GFR-binding peptide
SRVMNNSLQEIVNSSDDYYVIPLPELKQPV

SEQ ID NO: 2079 - protein, 30 aa, Artificial Sequence
  Non-cyclic GFR-binding peptide
SRVMNNSLQEIVNSSDDYYVIPLPELQQPV

SEQ ID NO: 2080 - protein, 30 aa, Artificial Sequence
  Non-cyclic GFR-binding peptide
SRVMNNSLQEIVNNSSDYYVIPLPELKQPV

SEQ ID NO: 2081 - protein, 32 aa, Artificial Sequence
  Non-cyclic GFR-binding peptide
SRVSMGENSLQETPVGMDDYYVIPLPELKQPV

SEQ ID NO: 2082 - protein, 30 aa, Artificial Sequence
  Non-cyclic GFR-binding peptide
SRVMGNSLQEYTVVGKDYYVIPLPELKQPV

SEQ ID NO: 2083 - protein, 30 aa, Artificial Sequence
  Non-cyclic GFR-binding peptide
SRVMGNSLQEIIQQKDNYYVIPLPEMKQPV

SEQ ID NO: 2084 - protein, 30 aa, Artificial Sequence
  Non-cyclic GFR-binding peptide
SRVMDNSLQEVVNNAADYYVIPLPELRQPV

SEQ ID NO: 2085 - protein, 30 aa, Artificial Sequence
  Non-cyclic GFR-binding peptide
SRVMDNSLQEVVNNASDYYVIPLPELRQPV

SEQ ID NO: 2086 - protein, 30 aa, Artificial Sequence
  Non-cyclic GFR-binding peptide
SRVIMNSLQELLVRGNDYYVIPLPETKQPV

SEQ ID NO: 2087 - protein, 30 aa, Artificial Sequence
  Non-cyclic GFR-binding peptide
SRVIMNSLQEIKPTKGIYYVIPLPELDQPV

SEQ ID NO: 2088 - protein, 30 aa, Artificial Sequence
  Non-cyclic GFR-binding peptide
SRVVMNSLQEVKPTRGVYYVIPLPELDQPV

SEQ ID NO: 2089 - protein, 30 aa, Artificial Sequence
  Non-cyclic GFR-binding peptide
EVVMDNSLQEVVKENEDYYVIPLPELETPV

SEQ ID NO: 2090 - protein, 30 aa, Artificial Sequence
  Non-cyclic GFR-binding peptide
EVTMNNSLQEVVNKNEDYYVIPLPEMKEPV

SEQ ID NO: 2091 - protein, 30 aa, Artificial Sequence
  Non-cyclic GFR-binding peptide
EVVMENSLQEVVKDYEDYYVIPLPELETPV

SEQ ID NO: 2092 - protein, 30 aa, Artificial Sequence
  Non-cyclic GFR-binding peptide
RVVMNNSLQEIVNSSDDYYVIPLPELKTPA

SEQ ID NO: 2093 - protein, 30 aa, Artificial Sequence
  Non-cyclic GFR-binding peptide
RVVMNNSLQEIVNSSDDYYVIPLPELQTPA

SEQ ID NO: 2094 - protein, 30 aa, Artificial Sequence
  Non-cyclic GFR-binding peptide
KVVMNNSLQEIVNNSSDYYVIPLPELKTPA

SEQ ID NO: 2095 - protein, 32 aa, Artificial Sequence
  Non-cyclic GFR-binding peptide
EAVSMGENSLQETPVGMDDYYVIPLPELKTPV

SEQ ID NO: 2096 - protein, 30 aa, Artificial Sequence
  Non-cyclic GFR-binding peptide
SVAMGNSLQEYTVVGKDYYVIPLPELKTPV

SEQ ID NO: 2097 - protein, 30 aa, Artificial Sequence
  Non-cyclic GFR-binding peptide
DVVMGNSLQEIIQQKDNYYVIPLPEMKTPT

SEQ ID NO: 2098 - protein, 30 aa, Artificial Sequence
  Non-cyclic GFR-binding peptide
EVVMDNSLQEVVNNAADYYVIPLPELRAPV

SEQ ID NO: 2099 - protein, 30 aa, Artificial Sequence
  Non-cyclic GFR-binding peptide
EVVMDNSLQEVVNNASDYYVIPLPELRTPV

SEQ ID NO: 2100 - protein, 30 aa, Artificial Sequence
  Non-cyclic GFR-binding peptide
EEVIMNSLQELLVRGNDYYVIPLPETKVPA

SEQ ID NO: 2101 - protein, 30 aa, Artificial Sequence
  Non-cyclic GFR-binding peptide
SKVIMNSLQEIKPTKGIYYVIPLPELDQSV

SEQ ID NO: 2102 - protein, 30 aa, Artificial Sequence
  Non-cyclic GFR-binding peptide
SKVVMNSLQEVKPTRGVYYVIPLPELDQPV

SEQ ID NO: 2103 - protein, 32 aa, Artificial Sequence
  Non-cyclic GFR-binding peptide
NHQLFNSLQEHQGQHPKIRYYVIPLPEEETPV

SEQ ID NO: 2104 - protein, 32 aa, Artificial Sequence
  Non-cyclic GFR-binding peptide
SHEELNSLQEHQGQHPKIRYYVIPLPEQGTPV

SEQ ID NO: 2105 - protein, 32 aa, Artificial Sequence
  Non-cyclic GFR-binding peptide
HEELRNSLQELKPKKRVYEYYVIPLPEHHVRS

SEQ ID NO: 2106 - protein, 32 aa, Artificial Sequence
  Non-cyclic GFR-binding peptide
HDELTNSLQEFIPKKRVIEYYVIPLPELQVQT

SEQ ID NO: 2107 - protein, 30 aa, Artificial Sequence
  Non-cyclic GFR-binding peptide
SKVMDNSLQEVVKENEDYYLITLPELEQSV

SEQ ID NO: 2108 - protein, 30 aa, Artificial Sequence
  Non-cyclic GFR-binding peptide
SKVMNNSLQEVVNKNEDYYLITLPEMKQSV

SEQ ID NO: 2109 - protein, 30 aa, Artificial Sequence
  Non-cyclic GFR-binding peptide
SKVMENSLQEVVKDYEDYYLITLPELEQSV

SEQ ID NO: 2110 - protein, 30 aa, Artificial Sequence
  Non-cyclic GFR-binding peptide
SKVMNNSLQEIVNSSDDYYLITLPELKQSV

SEQ ID NO: 2111 - protein, 30 aa, Artificial Sequence
  Non-cyclic GFR-binding peptide
SKVMNNSLQEIVNSSDDYYLITLPELQQSV

SEQ ID NO: 2112 - protein, 30 aa, Artificial Sequence
  Non-cyclic GFR-binding peptide
SKVMNNSLQEIVNNSSDYYLITLPELKQSV

SEQ ID NO: 2113 - protein, 32 aa, Artificial Sequence
  Non-cyclic GFR-binding peptide
SKVSMGENSLQETPVGMDDYYLITLPELKQSV

SEQ ID NO: 2114 - protein, 30 aa, Artificial Sequence
  Non-cyclic GFR-binding peptide
SKVMGNSLQEYTVVGKDYYLITLPELKQSV

SEQ ID NO: 2115 - protein, 30 aa, Artificial Sequence
  Non-cyclic GFR-binding peptide
SKVMGNSLQEIIQQKDNYYLITLPEMKQSV

SEQ ID NO: 2116 - protein, 30 aa, Artificial Sequence
  Non-cyclic GFR-binding peptide
SKVMDNSLQEVVNNAADYYLITLPELRQSV

SEQ ID NO: 2117 - protein, 30 aa, Artificial Sequence
  Non-cyclic GFR-binding peptide
SKVMDNSLQEVVNNASDYYLITLPELRQSV

SEQ ID NO: 2118 - protein, 30 aa, Artificial Sequence
  Non-cyclic GFR-binding peptide
SKVIMNSLQELLVRGNDYYLITLPETKQSV

SEQ ID NO: 2119 - protein, 30 aa, Artificial Sequence
  Non-cyclic GFR-binding peptide
SKVIMNSLQEVKPKRGVYYLITLPELAQSV

SEQ ID NO: 2120 - protein, 30 aa, Artificial Sequence
  Non-cyclic GFR-binding peptide
SKVVMNSLQEVKPTRGVYYLITLPELDQSV

SEQ ID NO: 2121 - protein, 30 aa, Artificial Sequence
  Non-cyclic GFR-binding peptide
EVVMDNSLQEVVKENEDYYLITLPELETPV

SEQ ID NO: 2122 - protein, 30 aa, Artificial Sequence
  Non-cyclic GFR-binding peptide
EVTMNNSLQEVVNKNEDYYLITLPEMKEPV

SEQ ID NO: 2123 - protein, 30 aa, Artificial Sequence
  Non-cyclic GFR-binding peptide
EVVMENSLQEVVKDYEDYYLITLPELETPV

SEQ ID NO: 2124 - protein, 30 aa, Artificial Sequence
  Non-cyclic GFR-binding peptide
RVVMNNSLQEIVNSSDDYYLITLPELKTPA

SEQ ID NO: 2125 - protein, 30 aa, Artificial Sequence
  Non-cyclic GFR-binding peptide
RVVMNNSLQEIVNSSDDYYLITLPELQTPA

SEQ ID NO: 2126 - protein, 30 aa, Artificial Sequence
  Non-cyclic GFR-binding peptide
KVVMNNSLQEIVNNSSDYYLITLPELKTPA

SEQ ID NO: 2127 - protein, 32 aa, Artificial Sequence
  Non-cyclic GFR-binding peptide
EAVSMGENSLQETPVGMDDYYLITLPELKTPV

SEQ ID NO: 2128 - protein, 30 aa, Artificial Sequence
  Non-cyclic GFR-binding peptide
SVAMGNSLQEYTVVGKDYYLITLPELKTPV

SEQ ID NO: 2129 - protein, 30 aa, Artificial Sequence
  Non-cyclic GFR-binding peptide
DVVMGNSLQEIIQQKDNYYLITLPEMKTPT

SEQ ID NO: 2130 - protein, 30 aa, Artificial Sequence
  Non-cyclic GFR-binding peptide
EVVMDNSLQEVVNNAADYYLITLPELRAPV

SEQ ID NO: 2131 - protein, 30 aa, Artificial Sequence
  Non-cyclic GFR-binding peptide
EVVMDNSLQEVVNNASDYYLITLPELRTPV

SEQ ID NO: 2132 - protein, 30 aa, Artificial Sequence
  Non-cyclic GFR-binding peptide
EEVIMNSLQELLVRGNDYYLITLPETKVPA

SEQ ID NO: 2133 - protein, 30 aa, Artificial Sequence
  Non-cyclic GFR-binding peptide
SRVIMNSLQEVKPKRGVYYLITLPELAQPV

SEQ ID NO: 2134 - protein, 32 aa, Artificial Sequence
  Non-cyclic GFR-binding peptide
NHQLFNSLQEHQGQHPKIRYYLITLPEEETPV

SEQ ID NO: 2135 - protein, 32 aa, Artificial Sequence
  Non-cyclic GFR-binding peptide
SHEELNSLQEHQGQHPKIRYYLITLPEQGTPV

SEQ ID NO: 2136 - protein, 32 aa, Artificial Sequence
  Non-cyclic GFR-binding peptide
HEELRNSLQELKPKKRVYEYYLITLPEHHVRS

SEQ ID NO: 2137 - protein, 32 aa, Artificial Sequence
  Non-cyclic GFR-binding peptide
HDELTNSLQEFIPKKRVIEYYLITLPELQVQT

SEQ ID NO: 2138 - protein, 30 aa, Artificial Sequence
  Non-cyclic GFR-binding peptide
SKVMDNSLQEVVKENEDYYLITLPELEQPV

SEQ ID NO: 2139 - protein, 30 aa, Artificial Sequence
  Non-cyclic GFR-binding peptide
SKVMNNSLQEVVNKNEDYYLITLPEMKQPV

SEQ ID NO: 2140 - protein, 30 aa, Artificial Sequence
  Non-cyclic GFR-binding peptide
SKVMENSLQEVVKDYEDYYLITLPELEQPV

SEQ ID NO: 2141 - protein, 30 aa, Artificial Sequence
  Non-cyclic GFR-binding peptide
SKVMNNSLQEIVNSSDDYYLITLPELKQPV

SEQ ID NO: 2142 - protein, 30 aa, Artificial Sequence
  Non-cyclic GFR-binding peptide
SKVMNNSLQEIVNSSDDYYLITLPELQQPV

SEQ ID NO: 2143 - protein, 30 aa, Artificial Sequence
  Non-cyclic GFR-binding peptide
SKVMNNSLQEIVNNSSDYYLITLPELKQPV

SEQ ID NO: 2144 - protein, 32 aa, Artificial Sequence
  Non-cyclic GFR-binding peptide
SKVSMGENSLQETPVGMDDYYLITLPELKQPV

SEQ ID NO: 2145 - protein, 30 aa, Artificial Sequence
  Non-cyclic GFR-binding peptide
SKVMGNSLQEYTVVGKDYYLITLPELKQPV

SEQ ID NO: 2146 - protein, 30 aa, Artificial Sequence
  Non-cyclic GFR-binding peptide
SKVMGNSLQEIIQQKDNYYLITLPEMKQPV

SEQ ID NO: 2147 - protein, 30 aa, Artificial Sequence
  Non-cyclic GFR-binding peptide
SKVMDNSLQEVVNNAADYYLITLPELRQPV

SEQ ID NO: 2148 - protein, 30 aa, Artificial Sequence
  Non-cyclic GFR-binding peptide
SKVMDNSLQEVVNNASDYYLITLPELRQPV

SEQ ID NO: 2149 - protein, 30 aa, Artificial Sequence
  Non-cyclic GFR-binding peptide
SKVIMNSLQELLVRGNDYYLITLPETKQPV

SEQ ID NO: 2150 - protein, 30 aa, Artificial Sequence
  Non-cyclic GFR-binding peptide
SKVIMNSLQEVKPKRGVYYLITLPELAQPV

SEQ ID NO: 2151 - protein, 30 aa, Artificial Sequence
  Non-cyclic GFR-binding peptide
SKVIMNSLQEIKPTKGIYYLITLPELDQPV

SEQ ID NO: 2152 - protein, 32 aa, Artificial Sequence
  Non-cyclic GFR-binding peptide
NHQELSMEGIHQGQHPKIRMIQMTINSQGTPV

SEQ ID NO: 2153 - protein, 30 aa, Artificial Sequence
  Non-cyclic GFR-binding peptide
EVVMDSMEGIVVKENEDMIQMTINSLETPV

SEQ ID NO: 2154 - protein, 30 aa, Artificial Sequence
  Non-cyclic GFR-binding peptide
EVTMNSMEGIVVNKNEDMIQMTINSMKEPV

SEQ ID NO: 2155 - protein, 30 aa, Artificial Sequence
  Non-cyclic GFR-binding peptide
EVVMESMEGIVVKDYEDMIQMTINSLETPV

SEQ ID NO: 2156 - protein, 30 aa, Artificial Sequence
  Non-cyclic GFR-binding peptide
RVVMNSMEGIIVNSSDDMIQMTINSLKTPA

SEQ ID NO: 2157 - protein, 30 aa, Artificial Sequence
  Non-cyclic GFR-binding peptide
RVVMNSMEGIIVNSSDDMIQMTINSLQTPA

SEQ ID NO: 2158 - protein, 30 aa, Artificial Sequence
  Non-cyclic GFR-binding peptide
KVVMNSMEGIIVNNSSDMIQMTINSLKTPA

SEQ ID NO: 2159 - protein, 32 aa, Artificial Sequence
  Non-cyclic GFR-binding peptide
EAVSMGESMEGITPVGMDDMIQMTINSLKTPV

SEQ ID NO: 2160 - protein, 30 aa, Artificial Sequence
  Non-cyclic GFR-binding peptide
SVAMGSMEGIYTVVGKDMIQMTINSLKTPV

SEQ ID NO: 2161 - protein, 30 aa, Artificial Sequence
  Non-cyclic GFR-binding peptide
DVVMGSMEGIIIQQKDNMIQMTINSMKTPT

SEQ ID NO: 2162 - protein, 30 aa, Artificial Sequence
  Non-cyclic GFR-binding peptide
EVVMDSMEGIVVNNAADMIQMTINSLRAPV

SEQ ID NO: 2163 - protein, 30 aa, Artificial Sequence
  Non-cyclic GFR-binding peptide
EVVMDSMEGIVVNNASDMIQMTINSLRTPV

SEQ ID NO: 2164 - protein, 30 aa, Artificial Sequence
  Non-cyclic GFR-binding peptide
EEVIMSMEGILLVRGNDMIQMTINSTKVPA

SEQ ID NO: 2165 - protein, 30 aa, Artificial Sequence
  Non-cyclic GFR-binding peptide
SRVIMSMEGIVKPKRGVMIQMTINSLAQPV

SEQ ID NO: 2166 - protein, 30 aa, Artificial Sequence
  Non-cyclic GFR-binding peptide
SKVIMSMEGIIKPTKGIMIQMTINSLDQSV

SEQ ID NO: 2167 - protein, 30 aa, Artificial Sequence
  Non-cyclic GFR-binding peptide
SKVVMSMEGIVKPTRGVMIQMTINSLDQPV

SEQ ID NO: 2168 - protein, 32 aa, Artificial Sequence
  Non-cyclic GFR-binding peptide
SHEELSMEGIHQGQHPKIRMIQMTINSQGTPV

SEQ ID NO: 2169 - protein, 32 aa, Artificial Sequence
  Non-cyclic GFR-binding peptide
HEELRSMEGILKPKKRVYEMIQMTINSHHVRS

SEQ ID NO: 2170 - protein, 32 aa, Artificial Sequence
  Non-cyclic GFR-binding peptide
HDELTSMEGIFIPKKRVIEMIQMTINSLQVQT

SEQ ID NO: 2171 - protein, 32 aa, Artificial Sequence
  Non-cyclic GFR-binding peptide
SHELFSMEGLHQGQHPKIRMIQMTINSEETPV

SEQ ID NO: 2172 - protein, 30 aa, Artificial Sequence
  Non-cyclic GFR-binding peptide
EVVMDSMEGLVVKENEDMIQMTINSLETPV

SEQ ID NO: 2173 - protein, 30 aa, Artificial Sequence
  Non-cyclic GFR-binding peptide
EVTMNSMEGLVVNKNEDMIQMTINSMKEPV

SEQ ID NO: 2174 - protein, 30 aa, Artificial Sequence
  Non-cyclic GFR-binding peptide
EVVMESMEGLVVKDYEDMIQMTINSLETPV

SEQ ID NO: 2175 - protein, 30 aa, Artificial Sequence
  Non-cyclic GFR-binding peptide
RVVMNSMEGLIVNSSDDMIQMTINSLKTPA

SEQ ID NO: 2176 - protein, 30 aa, Artificial Sequence
  Non-cyclic GFR-binding peptide
RVVMNSMEGLIVNSSDDMIQMTINSLQTPA

SEQ ID NO: 2177 - protein, 30 aa, Artificial Sequence
  Non-cyclic GFR-binding peptide
KVVMNSMEGLIVNNSSDMIQMTINSLKTPA

SEQ ID NO: 2178 - protein, 32 aa, Artificial Sequence
  Non-cyclic GFR-binding peptide
EAVSMGESMEGLTPVGMDDMIQMTINSLKTPV

SEQ ID NO: 2179 - protein, 30 aa, Artificial Sequence
  Non-cyclic GFR-binding peptide
SVAMGSMEGLYTVVGKDMIQMTINSLKTPV

SEQ ID NO: 2180 - protein, 30 aa, Artificial Sequence
  Non-cyclic GFR-binding peptide
DVVMGSMEGLIIQQKDNMIQMTINSMKTPT

SEQ ID NO: 2181 - protein, 30 aa, Artificial Sequence
  Non-cyclic GFR-binding peptide
EVVMDSMEGLVVNNAADMIQMTINSLRAPV

SEQ ID NO: 2182 - protein, 30 aa, Artificial Sequence
  Non-cyclic GFR-binding peptide
EVVMDSMEGLVVNNASDMIQMTINSLRTPV

SEQ ID NO: 2183 - protein, 30 aa, Artificial Sequence
  Non-cyclic GFR-binding peptide
EEVIMSMEGLLLVRGNDMIQMTINSTKVPA

SEQ ID NO: 2184 - protein, 30 aa, Artificial Sequence
  Non-cyclic GFR-binding peptide
SRVIMSMEGLVKPKRGVMIQMTINSLAQPV

SEQ ID NO: 2185 - protein, 30 aa, Artificial Sequence
  Non-cyclic GFR-binding peptide
SKVIMSMEGLIKPTKGIMIQMTINSLDQSV

SEQ ID NO: 2186 - protein, 30 aa, Artificial Sequence
  Non-cyclic GFR-binding peptide
SKVVMSMEGLVKPTRGVMIQMTINSLDQPV

SEQ ID NO: 2187 - protein, 32 aa, Artificial Sequence
  Non-cyclic GFR-binding peptide
NHQLFSMEGLHQGQHPKIRMIQMTINSEETPV

SEQ ID NO: 2188 - protein, 32 aa, Artificial Sequence
  Non-cyclic GFR-binding peptide
HEELRSMEGLLKPKKRVYEMIQMTINSHHVRS

SEQ ID NO: 2189 - protein, 32 aa, Artificial Sequence
  Non-cyclic GFR-binding peptide
HDELTSMEGLFIPKKRVIEMIQMTINSLQVQT

SEQ ID NO: 2190 - protein, 32 aa, Artificial Sequence
  Non-cyclic GFR-binding peptide
HEELTVQVEKFIPKKRVIEVKAVKVSRLQVRS

SEQ ID NO: 2191 - protein, 30 aa, Artificial Sequence
  Non-cyclic GFR-binding peptide
EVVMDVQVEKVVKENEDVKAVKVSRLETPV

SEQ ID NO: 2192 - protein, 30 aa, Artificial Sequence
  Non-cyclic GFR-binding peptide
EVTMNVQVEKVVNKNEDVKAVKVSRMKEPV

SEQ ID NO: 2193 - protein, 30 aa, Artificial Sequence
  Non-cyclic GFR-binding peptide
EVVMEVQVEKVVKDYEDVKAVKVSRLETPV

SEQ ID NO: 2194 - protein, 30 aa, Artificial Sequence
  Non-cyclic GFR-binding peptide
RVVMNVQVEKIVNSSDDVKAVKVSRLKTPA

SEQ ID NO: 2195 - protein, 30 aa, Artificial Sequence
  Non-cyclic GFR-binding peptide
RVVMNVQVEKIVNSSDDVKAVKVSRLQTPA

SEQ ID NO: 2196 - protein, 30 aa, Artificial Sequence
  Non-cyclic GFR-binding peptide
KVVMNVQVEKIVNNSSDVKAVKVSRLKTPA

SEQ ID NO: 2197 - protein, 32 aa, Artificial Sequence
  Non-cyclic GFR-binding peptide
EAVSMGEVQVEKTPVGMDDVKAVKVSRLKTPV

SEQ ID NO: 2198 - protein, 30 aa, Artificial Sequence
  Non-cyclic GFR-binding peptide
SVAMGVQVEKYTVVGKDVKAVKVSRLKTPV

SEQ ID NO: 2199 - protein, 30 aa, Artificial Sequence
  Non-cyclic GFR-binding peptide
DVVMGVQVEKIIQQKDNVKAVKVSRMKTPT

SEQ ID NO: 2200 - protein, 30 aa, Artificial Sequence
  Non-cyclic GFR-binding peptide
EVVMDVQVEKVVNNAADVKAVKVSRLRAPV

SEQ ID NO: 2201 - protein, 30 aa, Artificial Sequence
  Non-cyclic GFR-binding peptide
EVVMDVQVEKVVNNASDVKAVKVSRLRTPV

SEQ ID NO: 2202 - protein, 30 aa, Artificial Sequence
  Non-cyclic GFR-binding peptide
EEVIMVQVEKLLVRGNDVKAVKVSRTKVPA

SEQ ID NO: 2203 - protein, 30 aa, Artificial Sequence
  Non-cyclic GFR-binding peptide
SRVIMVQVEKVKPKRGVVKAVKVSRLAQPV

SEQ ID NO: 2204 - protein, 30 aa, Artificial Sequence
  Non-cyclic GFR-binding peptide
SKVIMVQVEKIKPTKGIVKAVKVSRLDQSV

SEQ ID NO: 2205 - protein, 30 aa, Artificial Sequence
  Non-cyclic GFR-binding peptide
SKVVMVQVEKVKPTRGVVKAVKVSRLDQPV

SEQ ID NO: 2206 - protein, 32 aa, Artificial Sequence
  Non-cyclic GFR-binding peptide
NHQLFVQVEKHQGQHPKIRVKAVKVSREETPV

SEQ ID NO: 2207 - protein, 32 aa, Artificial Sequence
  Non-cyclic GFR-binding peptide
SHEELVQVEKHQGQHPKIRVKAVKVSRQGTPV

SEQ ID NO: 2208 - protein, 32 aa, Artificial Sequence
  Non-cyclic GFR-binding peptide
HDELTVQVEKFIPKKRVIEVKAVKVSRLQVQT

SEQ ID NO: 2209 - protein, 32 aa, Artificial Sequence
  Non-cyclic GFR-binding peptide
HDELRVTAKKLKPKKRVYEIKRVQVPRHHVQT

SEQ ID NO: 2210 - protein, 30 aa, Artificial Sequence
  Non-cyclic GFR-binding peptide
EVVMDVTAKKVVKENEDIKRVQVPRLETPV

SEQ ID NO: 2211 - protein, 30 aa, Artificial Sequence
  Non-cyclic GFR-binding peptide
EVTMNVTAKKVVNKNEDIKRVQVPRMKEPV

SEQ ID NO: 2212 - protein, 30 aa, Artificial Sequence
  Non-cyclic GFR-binding peptide
EVVMEVTAKKVVKDYEDIKRVQVPRLETPV

SEQ ID NO: 2213 - protein, 30 aa, Artificial Sequence
  Non-cyclic GFR-binding peptide
RVVMNVTAKKIVNSSDDIKRVQVPRLKTPA

SEQ ID NO: 2214 - protein, 30 aa, Artificial Sequence
  Non-cyclic GFR-binding peptide
RVVMNVTAKKIVNSSDDIKRVQVPRLQTPA

SEQ ID NO: 2215 - protein, 30 aa, Artificial Sequence
  Non-cyclic GFR-binding peptide
KVVMNVTAKKIVNNSSDIKRVQVPRLKTPA

SEQ ID NO: 2216 - protein, 32 aa, Artificial Sequence
  Non-cyclic GFR-binding peptide
EAVSMGEVTAKKTPVGMDDIKRVQVPRLKTPV

SEQ ID NO: 2217 - protein, 30 aa, Artificial Sequence
  Non-cyclic GFR-binding peptide
SVAMGVTAKKYTVVGKDIKRVQVPRLKTPV

SEQ ID NO: 2218 - protein, 30 aa, Artificial Sequence
  Non-cyclic GFR-binding peptide
DVVMGVTAKKIIQQKDNIKRVQVPRMKTPT

SEQ ID NO: 2219 - protein, 30 aa, Artificial Sequence
  Non-cyclic GFR-binding peptide
EVVMDVTAKKVVNNAADIKRVQVPRLRAPV

SEQ ID NO: 2220 - protein, 30 aa, Artificial Sequence
  Non-cyclic GFR-binding peptide
EVVMDVTAKKVVNNASDIKRVQVPRLRTPV

SEQ ID NO: 2221 - protein, 30 aa, Artificial Sequence
  Non-cyclic GFR-binding peptide
EEVIMVTAKKLLVRGNDIKRVQVPRTKVPA

SEQ ID NO: 2222 - protein, 30 aa, Artificial Sequence
  Non-cyclic GFR-binding peptide
SRVIMVTAKKVKPKRGVIKRVQVPRLAQPV

SEQ ID NO: 2223 - protein, 30 aa, Artificial Sequence
  Non-cyclic GFR-binding peptide
SKVIMVTAKKIKPTKGIIKRVQVPRLDQSV

SEQ ID NO: 2224 - protein, 30 aa, Artificial Sequence
  Non-cyclic GFR-binding peptide
SKVVMVTAKKVKPTRGVIKRVQVPRLDQPV

SEQ ID NO: 2225 - protein, 32 aa, Artificial Sequence
  Non-cyclic GFR-binding peptide
NHQLFVTAKKHQGQHPKIRIKRVQVPREETPV

SEQ ID NO: 2226 - protein, 32 aa, Artificial Sequence
  Non-cyclic GFR-binding peptide
SHEELVTAKKHQGQHPKIRIKRVQVPRQGTPV

SEQ ID NO: 2227 - protein, 32 aa, Artificial Sequence
  Non-cyclic GFR-binding peptide
HEELRVTAKKLKPKKRVYEIKRVQVPRHHVRS

SEQ ID NO: 2228 - protein, 42 aa, Artificial Sequence
  Non-cyclic GFR-binding peptide
KIPKASSVPTELSAISMLYLDENEKVVLKNYQDMVVEGSGSR

SEQ ID NO: 2229 - protein, 42 aa, Artificial Sequence
  Non-cyclic GFR-binding peptide
GIPEPSSVPEKMSSLSILFFDENKNVVLKVYPNMTVESSASR

SEQ ID NO: 2230 - protein, 42 aa, Artificial Sequence
  Non-cyclic GFR-binding peptide
SIPKASSVPTELSAISMLYLDEYDKVVLKNYQEMVVEGSGSR

SEQ ID NO: 2231 - protein, 42 aa, Artificial Sequence
  Non-cyclic GFR-binding peptide
HVTKPTSAPTKLNAISVLYFDDSSNVILKKYRNMVVRSSGSH

SEQ ID NO: 2232 - protein, 42 aa, Artificial Sequence
  Non-cyclic GFR-binding peptide
YVPKPSSAPTKLNAISVLYFDDSSNVILKKYRNMVVRSSGSH

SEQ ID NO: 2233 - protein, 42 aa, Artificial Sequence
  Non-cyclic GFR-binding peptide
TVPKPSSAPTQLNAISVLYFDDSSNVILKKYRNMVVRASGSH

SEQ ID NO: 2234 - protein, 42 aa, Artificial Sequence
  Non-cyclic GFR-binding peptide
AVPKASSAPTKLSATSVLYYDSSNNVILRKHRNMVVKASGSH

SEQ ID NO: 2235 - protein, 43 aa, Artificial Sequence
  Non-cyclic GFR-binding peptide
KVGKASSVPTKLSPISVLYKDDMGVPTLKYHYEGMSVAESGSR

SEQ ID NO: 2236 - protein, 42 aa, Artificial Sequence
  Non-cyclic GFR-binding peptide
KASKASSVPTKLEPISILYLDKGVVTYKFKYEGMAVSESGSR

SEQ ID NO: 2237 - protein, 42 aa, Artificial Sequence
  Non-cyclic GFR-binding peptide
GSAGPSSTPTKMSPINMLYFNDKQQIIYGKIPGMVVDRSGSS

SEQ ID NO: 2238 - protein, 42 aa, Artificial Sequence
  Non-cyclic GFR-binding peptide
AAPASSSVPARLSPISILYIDAANNVVYKQYEDMVVEASGSR

SEQ ID NO: 2239 - protein, 42 aa, Artificial Sequence
  Non-cyclic GFR-binding peptide
STPPTSSVPTRLSPISILFIDSANNVVYKQYEDMVVESSGSR

SEQ ID NO: 2240 - protein, 42 aa, Artificial Sequence
  Non-cyclic GFR-binding peptide
HVPKPSSAPTKLNAISVLYFDDSSNVILKKYRNMVVRSSGSH

SEQ ID NO: 2241 - protein, 41 aa, Artificial Sequence
  Non-cyclic GFR-binding peptide
RVPSTSSAPVKTKPLSMLYVDNGRVLLDHHKDMIVEESGSL

SEQ ID NO: 2242 - protein, 41 aa, Artificial Sequence
  Non-cyclic GFR-binding peptide
ASAAPSSVPQALEPLPIVYYVGRKPKVEQLSNMIVRSSKSS

SEQ ID NO: 2243 - protein, 41 aa, Artificial Sequence
  Non-cyclic GFR-binding peptide
ASASPSSVSQDLEPLTILYYIGKTPKIEQLSNMIVKSSKSS

SEQ ID NO: 2244 - protein, 41 aa, Artificial Sequence
  Non-cyclic GFR-binding peptide
ASASPSSVPQDLEPLTILYYVGRTPKVEQLSNMVVKSSKSS

SEQ ID NO: 2245 - protein, 44 aa, Artificial Sequence
  Non-cyclic GFR-binding peptide
NDEGLESVPTEESNITMQIMRIKPHQGQHIGEMSFLQHNKSESR

SEQ ID NO: 2246 - protein, 44 aa, Artificial Sequence
  Non-cyclic GFR-binding peptide
NDEGLESVPTGQSNITMQIMRIKPHQGQHLGEMSLEEHSQSESR

SEQ ID NO: 2247 - protein, 45 aa, Artificial Sequence
  Non-cyclic GFR-binding peptide
SSVKSQPSRVHHRSVKVAKVEYVRKKPKLKEVQVRLEEHLESASA

SEQ ID NO: 2248 - protein, 45 aa, Artificial Sequence
  Non-cyclic GFR-binding peptide
RNVQSRPTQVQLRPVQVRKIEIVRKKPIFKKATVTLEDHLASKSE

SEQ ID NO: 2249 - protein, 30 aa, Artificial Sequence
  Non-cyclic GFR-binding peptide
VPTELSAISMLYLDENEKVVLKNYQDMVVE

SEQ ID NO: 2250 - protein, 30 aa, Artificial Sequence
  Non-cyclic GFR-binding peptide
VPEKMSSLSILFFDENKNVVLKVYPNMTVE

SEQ ID NO: 2251 - protein, 30 aa, Artificial Sequence
  Non-cyclic GFR-binding peptide
VPTELSAISMLYLDEYDKVVLKNYQEMVVE

SEQ ID NO: 2252 - protein, 30 aa, Artificial Sequence
  Non-cyclic GFR-binding peptide
APTKLNAISVLYFDDSSNVILKKYRNMVVR

SEQ ID NO: 2253 - protein, 30 aa, Artificial Sequence
  Non-cyclic GFR-binding peptide
APTQLNAISVLYFDDSSNVILKKYRNMVVR

SEQ ID NO: 2254 - protein, 30 aa, Artificial Sequence
  Non-cyclic GFR-binding peptide
APTKLSATSVLYYDSSNNVILRKHRNMVVK

SEQ ID NO: 2255 - protein, 32 aa, Artificial Sequence
  Non-cyclic GFR-binding peptide
VPTKLSPISVLYKDDMGVPTLKYHYEGMSVAE

SEQ ID NO: 2256 - protein, 30 aa, Artificial Sequence
  Non-cyclic GFR-binding peptide
VPTKLEPISILYLDKGVVTYKFKYEGMAVS

SEQ ID NO: 2257 - protein, 30 aa, Artificial Sequence
  Non-cyclic GFR-binding peptide
TPTKMSPINMLYFNDKQQIIYGKIPGMVVD

SEQ ID NO: 2258 - protein, 30 aa, Artificial Sequence
  Non-cyclic GFR-binding peptide
VPARLSPISILYIDAANNVVYKQYEDMVVE

SEQ ID NO: 2259 - protein, 30 aa, Artificial Sequence
  Non-cyclic GFR-binding peptide
VPTRLSPISILFIDSANNVVYKQYEDMVVE

SEQ ID NO: 2260 - protein, 30 aa, Artificial Sequence
  Non-cyclic GFR-binding peptide
APVKTKPLSMLYVDNGRVLLDHHKDMIVEE

SEQ ID NO: 2261 - protein, 30 aa, Artificial Sequence
  Non-cyclic GFR-binding peptide
VPQALEPLPIVYYVGRKPKVEQLSNMIVRS

SEQ ID NO: 2262 - protein, 30 aa, Artificial Sequence
  Non-cyclic GFR-binding peptide
VSQDLEPLTILYYIGKTPKIEQLSNMIVKS

SEQ ID NO: 2263 - protein, 30 aa, Artificial Sequence
  Non-cyclic GFR-binding peptide
VPQDLEPLTILYYVGRTPKVEQLSNMVVKS

SEQ ID NO: 2264 - protein, 32 aa, Artificial Sequence
  Non-cyclic GFR-binding peptide
VPTEESNITMQIMRIKPHQGQHIGEMSFLQHN

SEQ ID NO: 2265 - protein, 32 aa, Artificial Sequence
  Non-cyclic GFR-binding peptide
VPTGQSNITMQIMRIKPHQGQHLGEMSLEEHS

SEQ ID NO: 2266 - protein, 32 aa, Artificial Sequence
  Non-cyclic GFR-binding peptide
SRVHHRSVKVAKVEYVRKKPKLKEVQVRLEEH

SEQ ID NO: 2267 - protein, 32 aa, Artificial Sequence
  Non-cyclic GFR-binding peptide
TQVQLRPVQVRKIEIVRKKPIFKKATVTLEDH

SEQ ID NO: 2268 - protein, 42 aa, Artificial Sequence
  Non-cyclic GFR-binding peptide
RSGSGEVVMDQYNKLVVKENEDLYLMSIASLETPVSSAKPIK

SEQ ID NO: 2269 - protein, 42 aa, Artificial Sequence
  Non-cyclic GFR-binding peptide
RSASSEVTMNPYVKLVVNKNEDFFLISLSSMKEPVSSPEPIG

SEQ ID NO: 2270 - protein, 42 aa, Artificial Sequence
  Non-cyclic GFR-binding peptide
RSGSGEVVMEQYNKLVVKDYEDLYLMSIASLETPVSSAKPIS

SEQ ID NO: 2271 - protein, 42 aa, Artificial Sequence
  Non-cyclic GFR-binding peptide
HSGSSRVVMNRYKKLIVNSSDDFYLVSIANLKTPASTPKTVH

SEQ ID NO: 2272 - protein, 42 aa, Artificial Sequence
  Non-cyclic GFR-binding peptide
HSGSSRVVMNRYKKLIVNSSDDFYLVSIANLKTPASSPKPVY

SEQ ID NO: 2273 - protein, 42 aa, Artificial Sequence
  Non-cyclic GFR-binding peptide
HSGSARVVMNRYKKLIVNSSDDFYLVSIANLQTPASSPKPVT

SEQ ID NO: 2274 - protein, 42 aa, Artificial Sequence
  Non-cyclic GFR-binding peptide
HSGSAKVVMNRHKRLIVNNSSDYYLVSTASLKTPASSAKPVA

SEQ ID NO: 2275 - protein, 43 aa, Artificial Sequence
  Non-cyclic GFR-binding peptide
RSGSEAVSMGEYHYKLTPVGMDDKYLVSIPSLKTPVSSAKGVK

SEQ ID NO: 2276 - protein, 42 aa, Artificial Sequence
  Non-cyclic GFR-binding peptide
RSGSESVAMGEYKFKYTVVGKDLYLISIPELKTPVSSAKSAK

SEQ ID NO: 2277 - protein, 42 aa, Artificial Sequence
  Non-cyclic GFR-binding peptide
SSGSRDVVMGPIKGYIIQQKDNFYLMNIPSMKTPTSSPGASG

SEQ ID NO: 2278 - protein, 42 aa, Artificial Sequence
  Non-cyclic GFR-binding peptide
RSGSAEVVMDEYQKYVVNNAADIYLISIPSLRAPVSSSAPAA

SEQ ID NO: 2279 - protein, 42 aa, Artificial Sequence
  Non-cyclic GFR-binding peptide
RSGSSEVVMDEYQKYVVNNASDIFLISIPSLRTPVSSTPPTS

SEQ ID NO: 2280 - protein, 42 aa, Artificial Sequence
  Non-cyclic GFR-binding peptide
HSGSSRVVMNRYKKLIVNSSDDFYLVSIANLKTPASSPKPVH

SEQ ID NO: 2281 - protein, 41 aa, Artificial Sequence
  Non-cyclic GFR-binding peptide
LSGSEEVIMDKHHDLLVRGNDVYLMSLPKTKVPASSTSPVR

SEQ ID NO: 2282 - protein, 41 aa, Artificial Sequence
  Non-cyclic GFR-binding peptide
SSKSSRVIMNSLQEVKPKRGVYYVIPLPELAQPVSSPAASA

SEQ ID NO: 2283 - protein, 41 aa, Artificial Sequence
  Non-cyclic GFR-binding peptide
SSKSSKVIMNSLQEIKPTKGIYYLITLPELDQSVSSPSASA

SEQ ID NO: 2284 - protein, 41 aa, Artificial Sequence
  Non-cyclic GFR-binding peptide
SSKSSKVVMNSLQEVKPTRGVYYLITLPELDQPVSSPSASA

SEQ ID NO: 2285 - protein, 44 aa, Artificial Sequence
  Non-cyclic GFR-binding peptide
RSESKNHQLFSMEGIHQGQHPKIRMIQMTINSEETPVSELGEDN

SEQ ID NO: 2286 - protein, 44 aa, Artificial Sequence
  Non-cyclic GFR-binding peptide
RSESQSHEELSMEGLHQGQHPKIRMIQMTINSQGTPVSELGEDN

SEQ ID NO: 2287 - protein, 45 aa, Artificial Sequence
  Non-cyclic GFR-binding peptide
ASASELHEELRVQVEKLKPKKRVYEVKAVKVSRHHVRSPQSKVSS

SEQ ID NO: 2288 - protein, 45 aa, Artificial Sequence
  Non-cyclic GFR-binding peptide
ESKSALHDELTVTAKKFIPKKRVIEIKRVQVPRLQVQTPRSQVNR

SEQ ID NO: 2289 - protein, 30 aa, Artificial Sequence
  Non-cyclic GFR-binding peptide
EVVMDQYNKLVVKENEDLYLMSIASLETPV

SEQ ID NO: 2290 - protein, 30 aa, Artificial Sequence
  Non-cyclic GFR-binding peptide
EVTMNPYVKLVVNKNEDFFLISLSSMKEPV

SEQ ID NO: 2291 - protein, 30 aa, Artificial Sequence
  Non-cyclic GFR-binding peptide
EVVMEQYNKLVVKDYEDLYLMSIASLETPV

SEQ ID NO: 2292 - protein, 30 aa, Artificial Sequence
  Non-cyclic GFR-binding peptide
RVVMNRYKKLIVNSSDDFYLVSIANLKTPA

SEQ ID NO: 2293 - protein, 30 aa, Artificial Sequence
  Non-cyclic GFR-binding peptide
RVVMNRYKKLIVNSSDDFYLVSIANLQTPA

SEQ ID NO: 2294 - protein, 30 aa, Artificial Sequence
  Non-cyclic GFR-binding peptide
KVVMNRHKRLIVNNSSDYYLVSTASLKTPA

SEQ ID NO: 2295 - protein, 32 aa, Artificial Sequence
  Non-cyclic GFR-binding peptide
EAVSMGEYHYKLTPVGMDDKYLVSIPSLKTPV

SEQ ID NO: 2296 - protein, 30 aa, Artificial Sequence
  Non-cyclic GFR-binding peptide
SVAMGEYKFKYTVVGKDLYLISIPELKTPV

SEQ ID NO: 2297 - protein, 30 aa, Artificial Sequence
  Non-cyclic GFR-binding peptide
DVVMGPIKGYIIQQKDNFYLMNIPSMKTPT

SEQ ID NO: 2298 - protein, 30 aa, Artificial Sequence
  Non-cyclic GFR-binding peptide
EVVMDEYQKYVVNNAADIYLISIPSLRAPV

SEQ ID NO: 2299 - protein, 30 aa, Artificial Sequence
  Non-cyclic GFR-binding peptide
EVVMDEYQKYVVNNASDIFLISIPSLRTPV

SEQ ID NO: 2300 - protein, 30 aa, Artificial Sequence
  Non-cyclic GFR-binding peptide
EEVIMDKHHDLLVRGNDVYLMSLPKTKVPA

SEQ ID NO: 2301 - protein, 30 aa, Artificial Sequence
  Non-cyclic GFR-binding peptide
SRVIMNSLQEVKPKRGVYYVIPLPELAQPV

SEQ ID NO: 2302 - protein, 30 aa, Artificial Sequence
  Non-cyclic GFR-binding peptide
SKVIMNSLQEIKPTKGIYYLITLPELDQSV

SEQ ID NO: 2303 - protein, 30 aa, Artificial Sequence
  Non-cyclic GFR-binding peptide
SKVVMNSLQEVKPTRGVYYLITLPELDQPV

SEQ ID NO: 2304 - protein, 32 aa, Artificial Sequence
  Non-cyclic GFR-binding peptide
NHQLFSMEGIHQGQHPKIRMIQMTINSEETPV

SEQ ID NO: 2305 - protein, 32 aa, Artificial Sequence
  Non-cyclic GFR-binding peptide
SHEELSMEGLHQGQHPKIRMIQMTINSQGTPV

SEQ ID NO: 2306 - protein, 32 aa, Artificial Sequence
  Non-cyclic GFR-binding peptide
HEELRVQVEKLKPKKRVYEVKAVKVSRHHVRS

SEQ ID NO: 2307 - protein, 32 aa, Artificial Sequence
  Non-cyclic GFR-binding peptide
HDELTVTAKKFIPKKRVIEIKRVQVPRLQVQT

SEQ ID NO: 2308 - protein, 38 aa, Artificial Sequence
  Non-cyclic GFR-binding peptide
  MOD_RES (32)..(33): Xaa is C or S
GEVVMDRYKKLVVKENEDFYLMSIANLETPVXXAKPIK

SEQ ID NO: 2309 - protein, 35 aa, Artificial Sequence
  Non-cyclic GFR-binding peptide
  MOD_RES (2)..(4): Xaa is C or S
HXGXARVVMNQYNKLIVNSSDDLYLVSIASLQTPA

SEQ ID NO: 2310 - protein, 34 aa, Artificial Sequence
  Non-cyclic GFR-binding peptide
  MOD_RES (13)..(14)..(15)..(16)..(17): Xaa is A or G
  MOD_RES (18)..(19)..(20)..(21): Xaa is A or G or absent
EAVSMGERYKKLXXXXXXXXXFYLVSIANLKTPV

SEQ ID NO: 2311 - protein, 38 aa, Artificial Sequence
  Non-cyclic GFR-binding peptide
  MOD_RES (1)..(38): Xaa is C or S
  MOD_RES (14)..(15)..(16)..(17)..(18): Xaa is A or G
  MOD_RES (19)..(20)..(21)..(22): Xaa is A or G or absent
XALHDELTRHKRLXXXXXXXXXYYLVSTASLQVQTPRX

SEQ ID NO: 2312 - protein, 42 aa, Artificial Sequence
  Non-cyclic GFR-binding peptide
  MOD_RES (1)..(3)..(38)..(39): Xaa is C or S
  MOD_RES (16)..(17)..(18)..(19)..(20): Xaa is A or G
  MOD_RES (21)..(22)..(23)..(24): Xaa is A or G or absent
XGXEAVSMGERYKKLXXXXXXXXXFYLVSIANLKTPVXXAKG

SEQ ID NO: 2313 - protein, 40 aa, Artificial Sequence
  Non-cyclic GFR-binding peptide
  MOD_RES (1)..(3)..(36)..(37): Xaa is C or S
  MOD_RES (14)..(15)..(16)..(17)..(18): Xaa is A or G
  MOD_RES (19)..(20)..(21)..(22): Xaa is A or G or absent
XKXSRVIMQYNKLXXXXXXXXXLYLISIASLAQPVXXPAA

SEQ ID NO: 2314 - protein, 38 aa, Artificial Sequence
  Non-cyclic GFR-binding peptide
  MOD_RES (32)..(32): Xaa is C or S
SRVVMNRHKRLIVNSSDDYYLVSTASLKTPAXTPKTVH

SEQ ID NO: 2315 - protein, 33 aa, Artificial Sequence
  Non-cyclic GFR-binding peptide
  MOD_RES (2)..(2): Xaa is C or S
GXGEVVMDRYKKLVVKENEDFYLMSIANLETPV

SEQ ID NO: 2316 - protein, 38 aa, Artificial Sequence
  Non-cyclic GFR-binding peptide
  MOD_RES (1)..(3)..(36)..(37): Xaa is C or S
  MOD_RES (14)..(15)..(16)..(17)..(18): Xaa is A or G
  MOD_RES (19)..(20)..(21)..(22): Xaa is A or G or absent
XKXSKVIMYHYKLXXXXXXXXXKYLISIPSLDQSVXXP

SEQ ID NO: 2317 - protein, 38 aa, Artificial Sequence
  Non-cyclic GFR-binding peptide
  MOD_RES (1)..(3)..(37)..(38): Xaa is C or S
  MOD_RES (15)..(16)..(17)..(18)..(19): Xaa is A or G
  MOD_RES (20)..(21)..(22)..(23): Xaa is A or G or absent
XGXSRVVMNQYNKLXXXXXXXXXLYLVSIASLKTPAXX

SEQ ID NO: 2318 - protein, 36 aa, Artificial Sequence
  Non-cyclic GFR-binding peptide
  MOD_RES (1)..(33)..(34): Xaa is C or S
XSRVVMNYHYKLIVNSSDDKYLVSIPSLKTPAXXPK

SEQ ID NO: 2319 - protein, 32 aa, Artificial Sequence
  Non-cyclic GFR-binding peptide
  MOD_RES (1)..(32): Xaa is C or S
XSKVVMYHYKLVKPTRGVKYLISIPSLDQPVX

SEQ ID NO: 2320 - protein, 37 aa, Artificial Sequence
  Non-cyclic GFR-binding peptide
  MOD_RES (33)..(34): Xaa is C or S
  MOD_RES (11)..(12)..(13)..(14)..(15): Xaa is A or G
  MOD_RES (16)..(17)..(18)..(19): Xaa is A or G or absent
RVVMNRHKRLXXXXXXXXXYYLVSTASLKTPAXXPKP

SEQ ID NO: 2321 - protein, 38 aa, Artificial Sequence
  Non-cyclic GFR-binding peptide
  MOD_RES (1)..(3)..(34)..(35): Xaa is C or S
XKXSRVIMQYNKLVKPKRGVLYLISIASLAQPVXXPAA

SEQ ID NO: 2322 - protein, 35 aa, Artificial Sequence
  Non-cyclic GFR-binding peptide
  MOD_RES (1)..(35): Xaa is C or S
  MOD_RES (13)..(14)..(15)..(16)..(17): Xaa is A or G
  MOD_RES (18)..(19)..(20)..(21): Xaa is A or G or absent
XSRVVMNRHKRLXXXXXXXXXYYLVSTASLKTPAX

SEQ ID NO: 2323 - protein, 39 aa, Artificial Sequence
  Non-cyclic GFR-binding peptide
  MOD_RES (1)..(34)..(35): Xaa is C or S
  MOD_RES (12)..(13)..(14)..(15)..(16): Xaa is A or G
  MOD_RES (17)..(18)..(19)..(20): Xaa is A or G or absent
XSRVIMRHKRLXXXXXXXXXYYLISTASLAQPVXXPAAS

SEQ ID NO: 2324 - protein, 38 aa, Artificial Sequence
  Non-cyclic GFR-binding peptide
  MOD_RES (32)..(33): Xaa is C or S
SRVVMNRHKRLIVNSSDDYYLVSTASLKTPAXXPKPVY

SEQ ID NO: 2325 - protein, 35 aa, Artificial Sequence
  Non-cyclic GFR-binding peptide
  MOD_RES (31)..(32): Xaa is C or S
SKVIMRYKKLIKPTKGIFYLISIANLDQSVXXPSA

SEQ ID NO: 2326 - protein, 42 aa, Artificial Sequence
  Non-cyclic GFR-binding peptide
  MOD_RES (1)..(3)..(37)..(38): Xaa is C or S
  MOD_RES (15)..(16)..(17)..(18)..(19): Xaa is A or G
  MOD_RES (20)..(21)..(22)..(23): Xaa is A or G or absent
XGXGEVVMEYHYKLXXXXXXXXXKYLMSIPSLETPVXXAKPI

SEQ ID NO: 2327 - protein, 39 aa, Artificial Sequence
  Non-cyclic GFR-binding peptide
  MOD_RES (2)..(36)..(37): Xaa is C or S
  MOD_RES (14)..(15)..(16)..(17)..(18): Xaa is A or G
  MOD_RES (19)..(20)..(21)..(22): Xaa is A or G or absent
GXARVVMNRHKRLXXXXXXXXXYYLVSTASLQTPAXXPK

SEQ ID NO: 2328 - protein, 35 aa, Artificial Sequence
  Non-cyclic GFR-binding peptide
  MOD_RES (13)..(14)..(15)..(16)..(17): Xaa is A or G
  MOD_RES (18)..(19)..(20)..(21): Xaa is A or G or absent
ALHDELTRHKRLXXXXXXXXXYYLVSTASLQVQTP

SEQ ID NO: 2329 - protein, 38 aa, Artificial Sequence
  Non-cyclic GFR-binding peptide
  MOD_RES (2)..(4)..(37)..(38): Xaa is C or S
  MOD_RES (15)..(16)..(17)..(18)..(19): Xaa is A or G
  MOD_RES (20)..(21)..(22)..(23): Xaa is A or G or absent
SXKXSKVVMYHYKLXXXXXXXXXKYLISIPSLDQPVXX

SEQ ID NO: 2330 - protein, 39 aa, Artificial Sequence
  Non-cyclic GFR-binding peptide
  MOD_RES (1)..(3)..(38)..(39): Xaa is C or S
  MOD_RES (16)..(17)..(18)..(19)..(20): Xaa is A or G
  MOD_RES (21)..(22)..(23)..(24): Xaa is A or G or absent
XGXEAVSMGEQYNKLXXXXXXXXXLYLVSIASLKTPVXX

SEQ ID NO: 2331 - protein, 33 aa, Artificial Sequence
  Non-cyclic GFR-binding peptide
  MOD_RES (12)..(13)..(14)..(15)..(16): Xaa is A or G
  MOD_RES (17)..(18)..(19)..(20): Xaa is A or G or absent
GEVVMDRHKRLXXXXXXXXXYYLMSTASLETPV

SEQ ID NO: 2332 - protein, 39 aa, Artificial Sequence
  Non-cyclic GFR-binding peptide
  MOD_RES (1)..(3)..(35)..(36): Xaa is C or S
XGXGEVVMDRYKKLVVKENEDFYLMSIANLETPVXXAKP

SEQ ID NO: 2333 - protein, 35 aa, Artificial Sequence
  Non-cyclic GFR-binding peptide
  MOD_RES (1)..(32)..(33): Xaa is C or S
XSKVIMQYNKLIKPTKGILYLISIASLDQSVXXPS

SEQ ID NO: 2334 - protein, 32 aa, Artificial Sequence
  Non-cyclic GFR-binding peptide
  MOD_RES (31)..(32): Xaa is C or S
SKVIMYHYKLIKPTKGIKYLISIPSLDQSVXX

SEQ ID NO: 2335 - protein, 40 aa, Artificial Sequence
  Non-cyclic GFR-binding peptide
  MOD_RES (1)..(3)..(36)..(37): Xaa is C or S
  MOD_RES (14)..(15)..(16)..(17)..(18): Xaa is A or G
  MOD_RES (19)..(20)..(21)..(22): Xaa is A or G or absent
XKXSKVIMQYNKLXXXXXXXXXLYLISIASLDQSVXXPSA

SEQ ID NO: 2336 - protein, 41 aa, Artificial Sequence
  Non-cyclic GFR-binding peptide
  MOD_RES (1)..(35)..(36): Xaa is C or S
  MOD_RES (13)..(14)..(15)..(16)..(17): Xaa is A or G
  MOD_RES (18)..(19)..(20)..(21): Xaa is A or G or absent
XGEVVMEYHYKLXXXXXXXXXKYLMSIPSLETPVXXAKPIS

SEQ ID NO: 2337 - protein, 34 aa, Artificial Sequence
  Non-cyclic GFR-binding peptide
  MOD_RES (2)..(2): Xaa is C or S
  MOD_RES (13)..(14)..(15)..(16)..(17): Xaa is A or G
  MOD_RES (18)..(19)..(20)..(21): Xaa is A or G or absent
KXSKVVMQYNKLXXXXXXXXXLYLISIASLDQPV

SEQ ID NO: 2338 - protein, 34 aa, Artificial Sequence
  Non-cyclic GFR-binding peptide
  MOD_RES (32)..(33): Xaa is C or S
GEVVMDRHKRLVVKENEDYYLMSTASLETPVXXA

SEQ ID NO: 2339 - protein, 32 aa, Artificial Sequence
  Non-cyclic GFR-binding peptide
  MOD_RES (11)..(12)..(13)..(14)..(15): Xaa is A or G
  MOD_RES (16)..(17)..(18)..(19): Xaa is A or G or absent
HDELTRHKRLXXXXXXXXXYYLVSTASLQVQT

SEQ ID NO: 2340 - protein, 30 aa, Artificial Sequence
  Non-cyclic GFR-binding peptide
EVVMEYHYKLVVKDYEDKYLMSIPSLETPV

SEQ ID NO: 2341 - protein, 43 aa, Artificial Sequence
  Non-cyclic GFR-binding peptide
  MOD_RES (2)..(4)..(38)..(39): Xaa is C or S
  MOD_RES (16)..(17)..(18)..(19)..(20): Xaa is A or G
  MOD_RES (21)..(22)..(23)..(24): Xaa is A or G or absent
RXGXGEVVMDYHYKLXXXXXXXXXKYLMSIPSLETPVXXAKPI

SEQ ID NO: 2342 - protein, 37 aa, Artificial Sequence
  Non-cyclic GFR-binding peptide
  MOD_RES (31)..(32): Xaa is C or S
RVVMNQYNKLIVNSSDDLYLVSIASLQTPAXXPKPVT

SEQ ID NO: 2343 - protein, 32 aa, Artificial Sequence
  Non-cyclic GFR-binding peptide
  MOD_RES (32)..(32): Xaa is C or S
GEVVMEYHYKLVVKDYEDKYLMSIPSLETPVX

SEQ ID NO: 2344 - protein, 35 aa, Artificial Sequence
  Non-cyclic GFR-binding peptide
  MOD_RES (1)..(33)..(34): Xaa is C or S
XGEVVMERHKRLVVKDYEDYYLMSTASLETPVXXA

SEQ ID NO: 2345 - protein, 35 aa, Artificial Sequence
  Non-cyclic GFR-binding peptide
  MOD_RES (2)..(35): Xaa is C or S
GXEAVSMGERHKRLTPVGMDDYYLVSTASLKTPVX

SEQ ID NO: 2346 - protein, 36 aa, Artificial Sequence
  Non-cyclic GFR-binding peptide
  MOD_RES (35)..(35): Xaa is C or S
HDELTRHKRLFIPKKRVIEYYLVSTASLQVQTPRXQ

SEQ ID NO: 2347 - protein, 38 aa, Artificial Sequence
  Non-cyclic GFR-binding peptide
  MOD_RES (32)..(32): Xaa is C or S
SRVVMNQYNKLIVNSSDDLYLVSIASLKTPAXTPKTVH

SEQ ID NO: 2348 - protein, 32 aa, Artificial Sequence
  Non-cyclic GFR-binding peptide
  MOD_RES (1)..(1): Xaa is C or S
XGEVVMEYHYKLVVKDYEDKYLMSIPSLETPV

SEQ ID NO: 2349 - protein, 40 aa, Artificial Sequence
  Non-cyclic GFR-binding peptide
  MOD_RES (2)..(35)..(36): Xaa is C or S
GXEAVSMGEQYNKLTPVGMDDLYLVSIASLKTPVXXAKGV

SEQ ID NO: 2350 - protein, 38 aa, Artificial Sequence
  Non-cyclic GFR-binding peptide
  MOD_RES (36)..(36): Xaa is C or S
  MOD_RES (12)..(13)..(14)..(15)..(16): Xaa is A or G
  MOD_RES (17)..(18)..(19)..(20): Xaa is A or G or absent
LHDELTQYNKLXXXXXXXXXLYLVSIASLQVQTPRXQV

SEQ ID NO: 2351 - protein, 39 aa, Artificial Sequence
  Non-cyclic GFR-binding peptide
  MOD_RES (2)..(39): Xaa is C or S
  MOD_RES (15)..(16)..(17)..(18)..(19): Xaa is A or G
  MOD_RES (20)..(21)..(22)..(23): Xaa is A or G or absent
KXALHDELTRHKRLXXXXXXXXXYYLVSTASLQVQTPRX

SEQ ID NO: 2352 - protein, 39 aa, Artificial Sequence
  Non-cyclic GFR-binding peptide
  MOD_RES (2)..(4)..(38)..(39): Xaa is C or S
  MOD_RES (16)..(17)..(18)..(19)..(20): Xaa is A or G
  MOD_RES (21)..(22)..(23)..(24): Xaa is A or G or absent
HXGXSRVVMNRHKRLXXXXXXXXXYYLVSTASLKTPAXX

SEQ ID NO: 2353 - protein, 37 aa, Artificial Sequence
  Non-cyclic GFR-binding peptide
  MOD_RES (2)..(4): Xaa is C or S
  MOD_RES (16)..(17)..(18)..(19)..(20): Xaa is A or G
  MOD_RES (21)..(22)..(23)..(24): Xaa is A or G or absent
HXGXAKVVMNRYKKLXXXXXXXXXFYLVSIANLKTPA

SEQ ID NO: 2354 - protein, 36 aa, Artificial Sequence
  Non-cyclic GFR-binding peptide
  MOD_RES (13)..(14)..(15)..(16)..(17): Xaa is A or G
  MOD_RES (18)..(19)..(20)..(21): Xaa is A or G or absent
ALHDELTRYKKLXXXXXXXXXFYLVSIANLQVQTPR

SEQ ID NO: 2355 - protein, 38 aa, Artificial Sequence
  Non-cyclic GFR-binding peptide
  MOD_RES (2)..(34)..(35): Xaa is C or S
GXGEVVMERHKRLVVKDYEDYYLMSTASLETPVXXAKP

SEQ ID NO: 2356 - protein, 34 aa, Artificial Sequence
  Non-cyclic GFR-binding peptide
  MOD_RES (1)..(34): Xaa is C or S
  MOD_RES (12)..(13)..(14)..(15)..(16): Xaa is A or G
  MOD_RES (17)..(18)..(19)..(20): Xaa is A or G or absent
XSKVIMYHYKLXXXXXXXXXKYLISIPSLDQSVX

SEQ ID NO: 2357 - protein, 42 aa, Artificial Sequence
  Non-cyclic GFR-binding peptide
  MOD_RES (2)..(4)..(37)..(38): Xaa is C or S
  MOD_RES (15)..(16)..(17)..(18)..(19): Xaa is A or G
  MOD_RES (20)..(21)..(22)..(23): Xaa is A or G or absent
SXKXSKVIMYHYKLXXXXXXXXXKYLISIPSLDQSVXXPSAS

SEQ ID NO: 2358 - protein, 36 aa, Artificial Sequence
  Non-cyclic GFR-binding peptide
  MOD_RES (1)..(35)..(36): Xaa is C or S
  MOD_RES (13)..(14)..(15)..(16)..(17): Xaa is A or G
  MOD_RES (18)..(19)..(20)..(21): Xaa is A or G or absent
XSRVVMNRHKRLXXXXXXXXXYYLVSTASLKTPAXX

SEQ ID NO: 2359 - protein, 33 aa, Artificial Sequence
  Non-cyclic GFR-binding peptide
  MOD_RES (1)..(1): Xaa is C or S
  MOD_RES (12)..(13)..(14)..(15)..(16): Xaa is A or G
  MOD_RES (17)..(18)..(19)..(20): Xaa is A or G or absent
XSKVVMYHYKLXXXXXXXXXKYLISIPSLDQPV

SEQ ID NO: 2360 - protein, 37 aa, Artificial Sequence
  Non-cyclic GFR-binding peptide
  MOD_RES (1)..(3): Xaa is C or S
  MOD_RES (16)..(17)..(18)..(19)..(20): Xaa is A or G
  MOD_RES (21)..(22)..(23)..(24): Xaa is A or G or absent
XKXALHDELTRHKRLXXXXXXXXXYYLVSTASLQVQT

SEQ ID NO: 2361 - protein, 35 aa, Artificial Sequence
  Non-cyclic GFR-binding peptide
  MOD_RES (2)..(4)..(35): Xaa is C or S
SXKXSKVIMQYNKLIKPTKGILYLISIASLDQSVX

SEQ ID NO: 2362 - protein, 40 aa, Artificial Sequence
  Non-cyclic GFR-binding peptide
  MOD_RES (1)..(3)..(36)..(37): Xaa is C or S
XGXEAVSMGERYKKLTPVGMDDFYLVSIANLKTPVXXAKG

SEQ ID NO: 2363 - protein, 36 aa, Artificial Sequence
  Non-cyclic GFR-binding peptide
  MOD_RES (1)..(3): Xaa is C or S
  MOD_RES (15)..(16)..(17)..(18)..(19): Xaa is A or G
  MOD_RES (20)..(21)..(22)..(23): Xaa is A or G or absent
XGXSRVVMNYHYKLXXXXXXXXXKYLVSIPSLKTPA

SEQ ID NO: 2364 - protein, 39 aa, Artificial Sequence
  Non-cyclic GFR-binding peptide
  MOD_RES (2)..(35)..(36): Xaa is C or S
  MOD_RES (13)..(14)..(15)..(16)..(17): Xaa is A or G
  MOD_RES (18)..(19)..(20)..(21): Xaa is A or G or absent
KXSKVIMQYNKLXXXXXXXXXLYLISIASLDQSVXXPSA

SEQ ID NO: 2365 - protein, 37 aa, Artificial Sequence
  Non-cyclic GFR-binding peptide
  MOD_RES (1)..(3)..(35)..(36): Xaa is C or S
XGXAKVVMNQYNKLIVNNSSDLYLVSIASLKTPAXXA

SEQ ID NO: 2366 - protein, 38 aa, Artificial Sequence
  Non-cyclic GFR-binding peptide
  MOD_RES (1)..(38): Xaa is C or S
XALHDELTRHKRLFIPKKRVIEYYLVSTASLQVQTPRX

SEQ ID NO: 2367 - protein, 37 aa, Artificial Sequence
  Non-cyclic GFR-binding peptide
  MOD_RES (1)..(33)..(34): Xaa is C or S
XARVVMNQYNKLIVNSSDDLYLVSIASLQTPAXXPKP

SEQ ID NO: 2368 - protein, 39 aa, Artificial Sequence
  Non-cyclic GFR-binding peptide
  MOD_RES (33)..(34): Xaa is C or S
  MOD_RES (11)..(12)..(13)..(14)..(15): Xaa is A or G
  MOD_RES (16)..(17)..(18)..(19): Xaa is A or G or absent
SKVVMYHYKLXXXXXXXXXKYLISIPSLDQPVXXPSASA

SEQ ID NO: 2369 - protein, 30 aa, Artificial Sequence
  Non-cyclic GFR-binding peptide
SRVIMRHKRLVKPKRGVYYLISTASLAQPV

SEQ ID NO: 2370 - protein, 41 aa, Artificial Sequence
  Non-cyclic GFR-binding peptide
  MOD_RES (1)..(3)..(37): Xaa is C or S
  MOD_RES (15)..(16)..(17)..(18)..(19): Xaa is A or G
  MOD_RES (20)..(21)..(22)..(23): Xaa is A or G or absent
XGXSRVVMNQYNKLXXXXXXXXXLYLVSIASLKTPAXTPKT

SEQ ID NO: 2371 - protein, 34 aa, Artificial Sequence
  Non-cyclic GFR-binding peptide
  MOD_RES (31)..(32): Xaa is C or S
SKVIMQYNKLIKPTKGILYLISIASLDQSVXXPS

SEQ ID NO: 2372 - protein, 43 aa, Artificial Sequence
  Non-cyclic GFR-binding peptide
  MOD_RES (1)..(3)..(40): Xaa is C or S
  MOD_RES (16)..(17)..(18)..(19)..(20): Xaa is A or G
  MOD_RES (21)..(22)..(23)..(24): Xaa is A or G or absent
XKXALHDELTRHKRLXXXXXXXXXYYLVSTASLQVQTPRXQVN

SEQ ID NO: 2373 - protein, 35 aa, Artificial Sequence
  Non-cyclic GFR-binding peptide
  MOD_RES (2)..(2): Xaa is C or S
  MOD_RES (14)..(15)..(16)..(17)..(18): Xaa is A or G
  MOD_RES (19)..(20)..(21)..(22): Xaa is A or G or absent
GXGEVVMERHKRLXXXXXXXXXYYLMSTASLETPV

SEQ ID NO: 2374 - protein, 43 aa, Artificial Sequence
  Non-cyclic GFR-binding peptide
  MOD_RES (2)..(4)..(38)..(39): Xaa is C or S
  MOD_RES (16)..(17)..(18)..(19)..(20): Xaa is A or G
  MOD_RES (21)..(22)..(23)..(24): Xaa is A or G or absent
HXGXSRVVMNYHYKLXXXXXXXXXKYLVSIPSLKTPAXXPKPV

SEQ ID NO: 2375 - protein, 38 aa, Artificial Sequence
  Non-cyclic GFR-binding peptide
  MOD_RES (34)..(35): Xaa is C or S
  MOD_RES (12)..(13)..(14)..(15)..(16): Xaa is A or G
  MOD_RES (17)..(18)..(19)..(20): Xaa is A or G or absent
SRVVMNQYNKLXXXXXXXXXLYLVSIASLKTPAXXPKP

SEQ ID NO: 2376 - protein, 33 aa, Artificial Sequence
  Non-cyclic GFR-binding peptide
  MOD_RES (2)..(33): Xaa is C or S
KXSKVIMYHYKLIKPTKGIKYLISIPSLDQSVX

SEQ ID NO: 2377 - protein, 42 aa, Artificial Sequence
  Non-cyclic GFR-binding peptide
  MOD_RES (1)..(3)..(37)..(38): Xaa is C or S
  MOD_RES (15)..(16)..(17)..(18)..(19): Xaa is A or G
  MOD_RES (20)..(21)..(22)..(23): Xaa is A or G or absent
XGXAKVVMNQYNKLXXXXXXXXXLYLVSIASLKTPAXXAKPV

SEQ ID NO: 2378 - protein, 36 aa, Artificial Sequence
  Non-cyclic GFR-binding peptide
  MOD_RES (36)..(36): Xaa is C or S
LHDELTYHYKLFIPKKRVIEKYLVSIPSLQVQTPRX

SEQ ID NO: 2379 - protein, 43 aa, Artificial Sequence
  Non-cyclic GFR-binding peptide
  MOD_RES (2)..(4)..(38)..(39): Xaa is C or S
  MOD_RES (16)..(17)..(18)..(19)..(20): Xaa is A or G
  MOD_RES (21)..(22)..(23)..(24): Xaa is A or G or absent
RXGXGEVVMDRHKRLXXXXXXXXXYYLMSTASLETPVXXAKPI

SEQ ID NO: 2380 - protein, 34 aa, Artificial Sequence
  Non-cyclic GFR-binding peptide
  MOD_RES (1)..(34): Xaa is C or S
  MOD_RES (12)..(13)..(14)..(15)..(16): Xaa is A or G
  MOD_RES (17)..(18)..(19)..(20): Xaa is A or G or absent
XSKVVMRYKKLXXXXXXXXXFYLISIANLDQPVX

SEQ ID NO: 2381 - protein, 33 aa, Artificial Sequence
  Non-cyclic GFR-binding peptide
  MOD_RES (33)..(33): Xaa is C or S
  MOD_RES (11)..(12)..(13)..(14)..(15): Xaa is A or G
  MOD_RES (16)..(17)..(18)..(19): Xaa is A or G or absent
SRVIMRYKKLXXXXXXXXXFYLISIANLAQPVX

SEQ ID NO: 2382 - protein, 38 aa, Artificial Sequence
  Non-cyclic GFR-binding peptide
  MOD_RES (1)..(34)..(35): Xaa is C or S
  MOD_RES (12)..(13)..(14)..(15)..(16): Xaa is A or G
  MOD_RES (17)..(18)..(19)..(20): Xaa is A or G or absent
XSKVVMRYKKLXXXXXXXXXFYLISIANLDQPVXXPSA

SEQ ID NO: 2383 - protein, 37 aa, Artificial Sequence
  Non-cyclic GFR-binding peptide
  MOD_RES (1)..(3)..(37): Xaa is C or S
  MOD_RES (15)..(16)..(17)..(18)..(19): Xaa is A or G
  MOD_RES (20)..(21)..(22)..(23): Xaa is A or G or absent
XGXGEVVMERYKKLXXXXXXXXXFYLMSIANLETPVX

SEQ ID NO: 2384 - protein, 34 aa, Artificial Sequence
  Non-cyclic GFR-binding peptide
  MOD_RES (1)..(33)..(34): Xaa is C or S
XSRVVMNQYNKLIVNSSDDLYLVSIASLKTPAXX

SEQ ID NO: 2385 - protein, 39 aa, Artificial Sequence
  Non-cyclic GFR-binding peptide
  MOD_RES (33)..(34): Xaa is C or S
  MOD_RES (11)..(12)..(13)..(14)..(15): Xaa is A or G
  MOD_RES (16)..(17)..(18)..(19): Xaa is A or G or absent
SRVIMRYKKLXXXXXXXXXFYLISIANLAQPVXXPAASA

SEQ ID NO: 2386 - protein, 41 aa, Artificial Sequence
  Non-cyclic GFR-binding peptide
  MOD_RES (2)..(4)..(37)..(38): Xaa is C or S
  MOD_RES (15)..(16)..(17)..(18)..(19): Xaa is A or G
  MOD_RES (20)..(21)..(22)..(23): Xaa is A or G or absent
SXKXSRVIMQYNKLXXXXXXXXXLYLISIASLAQPVXXPAA

SEQ ID NO: 2387 - protein, 42 aa, Artificial Sequence
  Non-cyclic GFR-binding peptide
  MOD_RES (1)..(3)..(40): Xaa is C or S
XKXALHDELTRYKKLFIPKKRVIEFYLVSIANLQVQTPRXQV

SEQ ID NO: 2388 - protein, 33 aa, Artificial Sequence
  Non-cyclic GFR-binding peptide
HDELTRHKRLFIPKKRVIEYYLVSTASLQVQTP

SEQ ID NO: 2389 - protein, 35 aa, Artificial Sequence
  Non-cyclic GFR-binding peptide
  MOD_RES (34)..(35): Xaa is C or S
  MOD_RES (12)..(13)..(14)..(15)..(16): Xaa is A or G
  MOD_RES (17)..(18)..(19)..(20): Xaa is A or G or absent
SRVVMNQYNKLXXXXXXXXXLYLVSIASLKTPAXX

SEQ ID NO: 2390 - protein, 33 aa, Artificial Sequence
  Non-cyclic GFR-binding peptide
  MOD_RES (2)..(2): Xaa is C or S
GXARVVMNRHKRLIVNSSDDYYLVSTASLQTPA

SEQ ID NO: 2391 - protein, 37 aa, Artificial Sequence
  Non-cyclic GFR-binding peptide
  MOD_RES (32)..(33): Xaa is C or S
GEVVMEYHYKLVVKDYEDKYLMSIPSLETPVXXAKPI

SEQ ID NO: 2392 - protein, 35 aa, Artificial Sequence
  Non-cyclic GFR-binding peptide
  MOD_RES (13)..(14)..(15)..(16)..(17): Xaa is A or G
  MOD_RES (18)..(19)..(20)..(21): Xaa is A or G or absent
ALHDELTQYNKLXXXXXXXXXLYLVSIASLQVQTP

SEQ ID NO: 2393 - protein, 39 aa, Artificial Sequence
  Non-cyclic GFR-binding peptide
  MOD_RES (2)..(4): Xaa is C or S
  MOD_RES (17)..(18)..(19)..(20)..(21): Xaa is A or G
  MOD_RES (22)..(23)..(24)..(25): Xaa is A or G or absent
EXKXALHDELTRHKRLXXXXXXXXXYYLVSTASLQVQTP

SEQ ID NO: 2394 - protein, 34 aa, Artificial Sequence
  Non-cyclic GFR-binding peptide
HDELTRYKKLFIPKKRVIEFYLVSIANLQVQTPR

SEQ ID NO: 2395 - protein, 38 aa, Artificial Sequence
  Non-cyclic GFR-binding peptide
  MOD_RES (1)..(33)..(34): Xaa is C or S
XAKVVMNYHYKLIVNNSSDKYLVSIPSLKTPAXXAKPV

SEQ ID NO: 2396 - protein, 37 aa, Artificial Sequence
  Non-cyclic GFR-binding peptide
  MOD_RES (1)..(3): Xaa is C or S
  MOD_RES (16)..(17)..(18)..(19)..(20): Xaa is A or G
  MOD_RES (21)..(22)..(23)..(24): Xaa is A or G or absent
XKXALHDELTYHYKLXXXXXXXXXKYLVSIPSLQVQT

SEQ ID NO: 2397 - protein, 39 aa, Artificial Sequence
  Non-cyclic GFR-binding peptide
  MOD_RES (2)..(34)..(35): Xaa is C or S
GXSRVVMNRHKRLIVNSSDDYYLVSTASLKTPAXXPKPV

SEQ ID NO: 2398 - protein, 37 aa, Artificial Sequence
  Non-cyclic GFR-binding peptide
  MOD_RES (2)..(4)..(37): Xaa is C or S
RXGXEAVSMGERHKRLTPVGMDDYYLVSTASLKTPVX

SEQ ID NO: 2399 - protein, 42 aa, Artificial Sequence
  Non-cyclic GFR-binding peptide
  MOD_RES (2)..(4)..(38)..(39): Xaa is C or S
  MOD_RES (16)..(17)..(18)..(19)..(20): Xaa is A or G
  MOD_RES (21)..(22)..(23)..(24): Xaa is A or G or absent
HXGXSRVVMNQYNKLXXXXXXXXXLYLVSIASLKTPAXXPKP

SEQ ID NO: 2400 - protein, 38 aa, Artificial Sequence
  Non-cyclic GFR-binding peptide
  MOD_RES (1)..(3)..(37)..(38): Xaa is C or S
  MOD_RES (15)..(16)..(17)..(18)..(19): Xaa is A or G
  MOD_RES (20)..(21)..(22)..(23): Xaa is A or G or absent
XGXGEVVMDYHYKLXXXXXXXXXKYLMSIPSLETPVXX

SEQ ID NO: 2401 - protein, 39 aa, Artificial Sequence
  Non-cyclic GFR-binding peptide
  MOD_RES (2)..(36)..(37): Xaa is C or S
  MOD_RES (14)..(15)..(16)..(17)..(18): Xaa is A or G
  MOD_RES (19)..(20)..(21)..(22): Xaa is A or G or absent
GXAKVVMNRYKKLXXXXXXXXXFYLVSIANLKTPAXXAK

SEQ ID NO: 2402 - protein, 42 aa, Artificial Sequence
  Non-cyclic GFR-binding peptide
  MOD_RES (2)..(36)..(37): Xaa is C or S
  MOD_RES (14)..(15)..(16)..(17)..(18): Xaa is A or G
  MOD_RES (19)..(20)..(21)..(22): Xaa is A or G or absent
GXGEVVMDYHYKLXXXXXXXXXKYLMSIPSLETPVXXAKPIK

SEQ ID NO: 2403 - protein, 37 aa, Artificial Sequence
  Non-cyclic GFR-binding peptide
  MOD_RES (31)..(32): Xaa is C or S
RVVMNYHYKLIVNSSDDKYLVSIPSLQTPAXXPKPVT

SEQ ID NO: 2404 - protein, 36 aa, Artificial Sequence
  Non-cyclic GFR-binding peptide
  MOD_RES (1)..(3)..(34)..(35): Xaa is C or S
XKXSKVVMYHYKLVKPTRGVKYLISIPSLDQPVXXP

SEQ ID NO: 2405 - protein, 34 aa, Artificial Sequence
  Non-cyclic GFR-binding peptide
  MOD_RES (33)..(34): Xaa is C or S
  MOD_RES (11)..(12)..(13)..(14)..(15): Xaa is A or G
  MOD_RES (16)..(17)..(18)..(19): Xaa is A or G or absent
SKVIMQYNKLXXXXXXXXXLYLISIASLDQSVXX

SEQ ID NO: 2406 - protein, 44 aa, Artificial Sequence
  Non-cyclic GFR-binding peptide
  MOD_RES (1)..(3)..(38)..(39): Xaa is C or S
  MOD_RES (16)..(17)..(18)..(19)..(20): Xaa is A or G
  MOD_RES (21)..(22)..(23)..(24): Xaa is A or G or absent
XGXEAVSMGERYKKLXXXXXXXXXFYLVSIANLKTPVXXAKGVK

SEQ ID NO: 2407 - protein, 35 aa, Artificial Sequence
  Non-cyclic GFR-binding peptide
  MOD_RES (1)..(32)..(33): Xaa is C or S
XSKVIMRYKKLIKPTKGIFYLISIANLDQSVXXPS

SEQ ID NO: 2408 - protein, 40 aa, Artificial Sequence
  Non-cyclic GFR-binding peptide
  MOD_RES (36)..(36): Xaa is C or S
LHDELTYHYKLFIPKKRVIEKYLVSIPSLQVQTPRXQVNR

SEQ ID NO: 2409 - protein, 35 aa, Artificial Sequence
  Non-cyclic GFR-binding peptide
  MOD_RES (1)..(3)..(35): Xaa is C or S
XGXGEVVMDYHYKLVVKENEDKYLMSIPSLETPVX

SEQ ID NO: 2410 - protein, 41 aa, Artificial Sequence
  Non-cyclic GFR-binding peptide
  MOD_RES (2)..(36)..(37): Xaa is C or S
  MOD_RES (14)..(15)..(16)..(17)..(18): Xaa is A or G
  MOD_RES (19)..(20)..(21)..(22): Xaa is A or G or absent
GXGEVVMDRYKKLXXXXXXXXXFYLMSIANLETPVXXAKPI

SEQ ID NO: 2411 - protein, 39 aa, Artificial Sequence
  Non-cyclic GFR-binding peptide
  MOD_RES (1)..(3)..(37)..(38): Xaa is C or S
  MOD_RES (15)..(16)..(17)..(18)..(19): Xaa is A or G
  MOD_RES (20)..(21)..(22)..(23): Xaa is A or G or absent
XGXGEVVMERHKRLXXXXXXXXXYYLMSTASLETPVXXA

SEQ ID NO: 2412 - protein, 38 aa, Artificial Sequence
  Non-cyclic GFR-binding peptide
  MOD_RES (37)..(37): Xaa is C or S
ALHDELTRYKKLFIPKKRVIEFYLVSIANLQVQTPRXQ

SEQ ID NO: 2413 - protein, 35 aa, Artificial Sequence
  Non-cyclic GFR-binding peptide
  MOD_RES (33)..(34): Xaa is C or S
  MOD_RES (11)..(12)..(13)..(14)..(15): Xaa is A or G
  MOD_RES (16)..(17)..(18)..(19): Xaa is A or G or absent
SRVIMRHKRLXXXXXXXXXYYLISTASLAQPVXXP

SEQ ID NO: 2414 - protein, 36 aa, Artificial Sequence
  Non-cyclic GFR-binding peptide
  MOD_RES (1)..(34)..(35): Xaa is C or S
  MOD_RES (12)..(13)..(14)..(15)..(16): Xaa is A or G
  MOD_RES (17)..(18)..(19)..(20): Xaa is A or G or absent
XSKVIMRYKKLXXXXXXXXXFYLISIANLDQSVXXP

SEQ ID NO: 2415 - protein, 34 aa, Artificial Sequence
  Non-cyclic GFR-binding peptide
  MOD_RES (1)..(32)..(33): Xaa is C or S
XSKVIMRHKRLIKPTKGIYYLISTASLDQSVXXP

SEQ ID NO: 2416 - protein, 30 aa, Artificial Sequence; identical to SEQ ID NO: 1871
  Non-cyclic GFR-binding peptide

SEQ ID NO: 2417 - protein, 41 aa, Artificial Sequence
  Non-cyclic GFR-binding peptide
  MOD_RES (1)..(3)..(35)..(36): Xaa is C or S
XGXARVVMNYHYKLIVNSSDDKYLVSIPSLQTPAXXPKPVT

SEQ ID NO: 2418 - protein, 38 aa, Artificial Sequence
  Non-cyclic GFR-binding peptide
  MOD_RES (2)..(4)..(36)..(37): Xaa is C or S
HXGXAKVVMNRYKKLIVNNSSDFYLVSIANLKTPAXXA

SEQ ID NO: 2419 - protein, 34 aa, Artificial Sequence
  Non-cyclic GFR-binding peptide
  MOD_RES (33)..(34): Xaa is C or S
  MOD_RES (11)..(12)..(13)..(14)..(15): Xaa is A or G
  MOD_RES (16)..(17)..(18)..(19): Xaa is A or G or absent
KVVMNQYNKLXXXXXXXXXLYLVSIASLKTPAXX

SEQ ID NO: 2420 - protein, 36 aa, Artificial Sequence
  Non-cyclic GFR-binding peptide
  MOD_RES (2)..(34)..(35): Xaa is C or S
GXARVVMNRHKRLIVNSSDDYYLVSTASLQTPAXXP

SEQ ID NO: 2421 - protein, 40 aa, Artificial Sequence
  Non-cyclic GFR-binding peptide
  MOD_RES (2)..(4)..(36)..(37): Xaa is C or S
HXGXARVVMNYHYKLIVNSSDDKYLVSIPSLQTPAXXPKP

SEQ ID NO: 2422 - protein, 38 aa, Artificial Sequence
  Non-cyclic GFR-binding peptide
  MOD_RES (33)..(34): Xaa is C or S
  MOD_RES (11)..(12)..(13)..(14)..(15): Xaa is A or G
  MOD_RES (16)..(17)..(18)..(19): Xaa is A or G or absent
SKVIMRYKKLXXXXXXXXXFYLISIANLDQSVXXPSAS

SEQ ID NO: 2423 - protein, 34 aa, Artificial Sequence
  Non-cyclic GFR-binding peptide
  MOD_RES (33)..(34): Xaa is C or S
  MOD_RES (11)..(12)..(13)..(14)..(15): Xaa is A or G
  MOD_RES (16)..(17)..(18)..(19): Xaa is A or G or absent
RVVMNQYNKLXXXXXXXXXLYLVSIASLKTPAXX

SEQ ID NO: 2424 - protein, 32 aa, Artificial Sequence
  Non-cyclic GFR-binding peptide
  MOD_RES (31)..(31): Xaa is C or S
RVVMNQYNKLIVNSSDDLYLVSIASLKTPAXT

SEQ ID NO: 2425 - protein, 34 aa, Artificial Sequence
  Non-cyclic GFR-binding peptide
  MOD_RES (31)..(32): Xaa is C or S
SKVIMYHYKLIKPTKGIKYLISIPSLDQSVXXPS

SEQ ID NO: 2426 - protein, 38 aa, Artificial Sequence
  Non-cyclic GFR-binding peptide
  MOD_RES (2)..(4)..(36)..(37): Xaa is C or S
RXGXGEVVMDYHYKLVVKENEDKYLMSIPSLETPVXXA

SEQ ID NO: 2427 - protein, 36 aa, Artificial Sequence
  Non-cyclic GFR-binding peptide
  MOD_RES (2)..(35)..(36): Xaa is C or S
  MOD_RES (13)..(14)..(15)..(16)..(17): Xaa is A or G
  MOD_RES (18)..(19)..(20)..(21): Xaa is A or G or absent
KXSKVIMRHKRLXXXXXXXXXYYLISTASLDQSVXX

SEQ ID NO: 2428 - protein, 39 aa, Artificial Sequence
  Non-cyclic GFR-binding peptide
  MOD_RES (1)..(3)..(35)..(36): Xaa is C or S
XGXARVVMNYHYKLIVNSSDDKYLVSIPSLQTPAXXPKP

SEQ ID NO: 2429 - protein, 36 aa, Artificial Sequence
  Non-cyclic GFR-binding peptide
  MOD_RES (35)..(35): Xaa is C or S
HDELTYHYKLFIPKKRVIEKYLVSIPSLQVQTPRXQ

SEQ ID NO: 2430 - protein, 38 aa, Artificial Sequence
  Non-cyclic GFR-binding peptide
  MOD_RES (1)..(33)..(34): Xaa is C or S
XARVVMNYHYKLIVNSSDDKYLVSIPSLQTPAXXPKPV

SEQ ID NO: 2431 - protein, 36 aa, Artificial Sequence
  Non-cyclic GFR-binding peptide
  MOD_RES (1)..(32)..(33): Xaa is C or S
XSKVIMRYKKLIKPTKGIFYLISIANLDQSVXXPSA

SEQ ID NO: 2432 - protein, 37 aa, Artificial Sequence
  Non-cyclic GFR-binding peptide
  MOD_RES (1)..(3)..(34)..(35): Xaa is C or S
XKXSKVVMRHKRLVKPTRGVYYLISTASLDQPVXXPS

SEQ ID NO: 2433 - protein, 40 aa, Artificial Sequence
  Non-cyclic GFR-binding peptide
  MOD_RES (2)..(4)..(36)..(37): Xaa is C or S
RXGXGEVVMEYHYKLVVKDYEDKYLMSIPSLETPVXXAKP

SEQ ID NO: 2434 - protein, 44 aa, Artificial Sequence
  Non-cyclic GFR-binding peptide
  MOD_RES (1)..(3)..(40): Xaa is C or S
  MOD_RES (16)..(17)..(18)..(19)..(20): Xaa is A or G
  MOD_RES (21)..(22)..(23)..(24): Xaa is A or G or absent
XKXALHDELTQYNKLXXXXXXXXXLYLVSIASLQVQTPRXQVNR

SEQ ID NO: 2435 - protein, 41 aa, Artificial Sequence
  Non-cyclic GFR-binding peptide
  MOD_RES (1)..(38): Xaa is C or S
XALHDELTRYKKLFIPKKRVIEFYLVSIANLQVQTPRXQVN

SEQ ID NO: 2436 - protein, 35 aa, Artificial Sequence
  Non-cyclic GFR-binding peptide
  MOD_RES (2)..(35): Xaa is C or S
  MOD_RES (13)..(14)..(15)..(16)..(17): Xaa is A or G
  MOD_RES (18)..(19)..(20)..(21): Xaa is A or G or absent
KXSKVIMQYNKLXXXXXXXXXLYLISIASLDQSVX

SEQ ID NO: 2437 - protein, 35 aa, Artificial Sequence
  Non-cyclic GFR-binding peptide
  MOD_RES (2)..(35): Xaa is C or S
  MOD_RES (13)..(14)..(15)..(16)..(17): Xaa is A or G
  MOD_RES (18)..(19)..(20)..(21): Xaa is A or G or absent
KXSKVVMRHKRLXXXXXXXXXYYLISTASLDQPVX

SEQ ID NO: 2438 - protein, 35 aa, Artificial Sequence
  Non-cyclic GFR-binding peptide
  MOD_RES (2)..(2): Xaa is C or S
  MOD_RES (14)..(15)..(16)..(17)..(18): Xaa is A or G
  MOD_RES (19)..(20)..(21)..(22): Xaa is A or G or absent
GXGEVVMERYKKLXXXXXXXXXFYLMSIANLETPV

SEQ ID NO: 2439 - protein, 36 aa, Artificial Sequence
  Non-cyclic GFR-binding peptide
  MOD_RES (1)..(33)..(34): Xaa is C or S
XGEVVMEYHYKLVVKDYEDKYLMSIPSLETPVXXAK

SEQ ID NO: 2440 - protein, 32 aa, Artificial Sequence
  Non-cyclic GFR-binding peptide
  MOD_RES (32)..(32): Xaa is C or S
AKVVMNYHYKLIVNNSSDKYLVSIPSLKTPAX

SEQ ID NO: 2441 - protein, 37 aa, Artificial Sequence
  Non-cyclic GFR-binding peptide
  MOD_RES (2)..(4)..(36)..(37): Xaa is C or S
RXGXGEVVMERHKRLVVKDYEDYYLMSTASLETPVXX

SEQ ID NO: 2442 - protein, 41 aa, Artificial Sequence
  Non-cyclic GFR-binding peptide
  MOD_RES (37)..(37): Xaa is C or S
ALHDELTQYNKLFIPKKRVIELYLVSIASLQVQTPRXQVNR

SEQ ID NO: 2443 - protein, 40 aa, Artificial Sequence
  Non-cyclic GFR-binding peptide
  MOD_RES (34)..(35): Xaa is C or S
  MOD_RES (12)..(13)..(14)..(15)..(16): Xaa is A or G
  MOD_RES (17)..(18)..(19)..(20): Xaa is A or G or absent
GEVVMERHKRLXXXXXXXXXYYLMSTASLETPVXXAKPIS

SEQ ID NO: 2444 - protein, 35 aa, Artificial Sequence
  Non-cyclic GFR-binding peptide
  MOD_RES (1)..(33)..(34): Xaa is C or S
XARVVMNRHKRLIVNSSDDYYLVSTASLQTPAXXP

SEQ ID NO: 2445 - protein, 37 aa, Artificial Sequence
  Non-cyclic GFR-binding peptide
  MOD_RES (2)..(36)..(37): Xaa is C or S
  MOD_RES (14)..(15)..(16)..(17)..(18): Xaa is A or G
  MOD_RES (19)..(20)..(21)..(22): Xaa is A or G or absent
GXGEVVMEYHYKLXXXXXXXXXKYLMSIPSLETPVXX

SEQ ID NO: 2446 - protein, 36 aa, Artificial Sequence
  Non-cyclic GFR-binding peptide
  MOD_RES (1)..(1): Xaa is C or S
  MOD_RES (14)..(15)..(16)..(17)..(18): Xaa is A or G
  MOD_RES (19)..(20)..(21)..(22): Xaa is A or G or absent
XALHDELTYHYKLXXXXXXXXXKYLVSIPSLQVQTP

SEQ ID NO: 2447 - protein, 42 aa, Artificial Sequence
  Non-cyclic GFR-binding peptide
  MOD_RES (2)..(39): Xaa is C or S
  MOD_RES (15)..(16)..(17)..(18)..(19): Xaa is A or G
  MOD_RES (20)..(21)..(22)..(23): Xaa is A or G or absent
KXALHDELTQYNKLXXXXXXXXXLYLVSIASLQVQTPRXQVN

SEQ ID NO: 2448 - protein, 41 aa, Artificial Sequence
  Non-cyclic GFR-binding peptide
  MOD_RES (2)..(36)..(37): Xaa is C or S
  MOD_RES (14)..(15)..(16)..(17)..(18): Xaa is A or G
  MOD_RES (19)..(20)..(21)..(22): Xaa is A or G or absent
GXGEVVMDRHKRLXXXXXXXXXYYLMSTASLETPVXXAKPI

SEQ ID NO: 2449 - protein, 34 aa, Artificial Sequence
  Non-cyclic GFR-binding peptide
  MOD_RES (1)..(3)..(34): Xaa is C or S
XKXSRVIMQYNKLVKPKRGVLYLISIASLAQPVX

SEQ ID NO: 2450 - protein, 33 aa, Artificial Sequence
  Non-cyclic GFR-binding peptide
  MOD_RES (31)..(32): Xaa is C or S
EVVMDRYKKLVVKENEDFYLMSIANLETPVXXA

SEQ ID NO: 2451 - protein, 36 aa, Artificial Sequence
  Non-cyclic GFR-binding peptide
  MOD_RES (33)..(34): Xaa is C or S
EAVSMGERHKRLTPVGMDDYYLVSTASLKTPVXXAK

SEQ ID NO: 2452 - protein, 32 aa, Artificial Sequence
  Non-cyclic GFR-binding peptide
  MOD_RES (11)..(12)..(13)..(14)..(15): Xaa is A or G
  MOD_RES (16)..(17)..(18)..(19): Xaa is A or G or absent
HDELTYHYKLXXXXXXXXXKYLVSIPSLQVQT

SEQ ID NO: 2453 - protein, 35 aa, Artificial Sequence
  Non-cyclic GFR-binding peptide
  MOD_RES (31)..(32): Xaa is C or S
EVVMERHKRLVVKDYEDYYLMSTASLETPVXXAKP

SEQ ID NO: 2454 - protein, 43 aa, Artificial Sequence
  Non-cyclic GFR-binding peptide
  MOD_RES (2)..(4)..(37)..(38): Xaa is C or S
  MOD_RES (15)..(16)..(17)..(18)..(19): Xaa is A or G
  MOD_RES (20)..(21)..(22)..(23): Xaa is A or G or absent
SXKXSRVIMRHKRLXXXXXXXXXYYLISTASLAQPVXXPAASA

SEQ ID NO: 2455 - protein, 37 aa, Artificial Sequence
  Non-cyclic GFR-binding peptide
  MOD_RES (2)..(2): Xaa is C or S
KXALHDELTRHKRLFIPKKRVIEYYLVSTASLQVQTP

SEQ ID NO: 2456 - protein, 37 aa, Artificial Sequence
  Non-cyclic GFR-binding peptide
  MOD_RES (2)..(36): Xaa is C or S
  MOD_RES (14)..(15)..(16)..(17)..(18): Xaa is A or G
  MOD_RES (19)..(20)..(21)..(22): Xaa is A or G or absent
GXSRVVMNYHYKLXXXXXXXXXKYLVSIPSLKTPAXT

SEQ ID NO: 2457 - protein, 39 aa, Artificial Sequence
  Non-cyclic GFR-binding peptide
  MOD_RES (2)..(35)..(36): Xaa is C or S
  MOD_RES (13)..(14)..(15)..(16)..(17): Xaa is A or G
  MOD_RES (18)..(19)..(20)..(21): Xaa is A or G or absent
KXSKVVMRHKRLXXXXXXXXXYYLISTASLDQPVXXPSA

SEQ ID NO: 2458 - protein, 41 aa, Artificial Sequence
  Non-cyclic GFR-binding peptide
  MOD_RES (1)..(3)..(40): Xaa is C or S
XKXALHDELTYHYKLFIPKKRVIEKYLVSIPSLQVQTPRXQ

SEQ ID NO: 2459 - protein, 31 aa, Artificial Sequence
  Non-cyclic GFR-binding peptide
  MOD_RES (31)..(31): Xaa is C or S
EVVMDRYKKLVVKENEDFYLMSIANLETPVX

SEQ ID NO: 2460 - protein, 33 aa, Artificial Sequence
  Non-cyclic GFR-binding peptide
  MOD_RES (32)..(32): Xaa is C or S
SRVVMNRHKRLIVNSSDDYYLVSTASLKTPAXT

SEQ ID NO: 2461 - protein, 41 aa, Artificial Sequence
  Non-cyclic GFR-binding peptide
  MOD_RES (1)..(3)..(37)..(38): Xaa is C or S
  MOD_RES (15)..(16)..(17)..(18)..(19): Xaa is A or G
  MOD_RES (20)..(21)..(22)..(23): Xaa is A or G or absent
XGXARVVMNRHKRLXXXXXXXXXYYLVSTASLQTPAXXPKP

SEQ ID NO: 2462 - protein, 35 aa, Artificial Sequence
  Non-cyclic GFR-binding peptide
  MOD_RES (2)..(2): Xaa is C or S
  MOD_RES (14)..(15)..(16)..(17)..(18): Xaa is A or G
  MOD_RES (19)..(20)..(21)..(22): Xaa is A or G or absent
GXARVVMNYHYKLXXXXXXXXXKYLVSIPSLQTPA

SEQ ID NO: 2463 - protein, 40 aa, Artificial Sequence
  Non-cyclic GFR-binding peptide
  MOD_RES (2)..(4)..(36)..(37): Xaa is C or S
RXGXGEVVMDRYKKLVVKENEDFYLMSIANLETPVXXAKP

SEQ ID NO: 2464 - protein, 34 aa, Artificial Sequence
  Non-cyclic GFR-binding peptide
  MOD_RES (1)..(3): Xaa is C or S
XGXSRVVMNRHKRLIVNSSDDYYLVSTASLKTPA

SEQ ID NO: 2465 - protein, 32 aa, Artificial Sequence
  Non-cyclic GFR-binding peptide
  MOD_RES (31)..(32): Xaa is C or S
SKVIMQYNKLIKPTKGILYLISIASLDQSVXX

SEQ ID NO: 2466 - protein, 33 aa, Artificial Sequence
  Non-cyclic GFR-binding peptide
  MOD_RES (33)..(33): Xaa is C or S
  MOD_RES (11)..(12)..(13)..(14)..(15): Xaa is A or G
  MOD_RES (16)..(17)..(18)..(19): Xaa is A or G or absent
EVVMERYKKLXXXXXXXXXFYLMSIANLETPVX

SEQ ID NO: 2467 - protein, 39 aa, Artificial Sequence
  Non-cyclic GFR-binding peptide
  MOD_RES (33)..(34): Xaa is C or S
  MOD_RES (11)..(12)..(13)..(14)..(15): Xaa is A or G
  MOD_RES (16)..(17)..(18)..(19): Xaa is A or G or absent
KVVMNYHYKLXXXXXXXXXKYLVSIPSLKTPAXXAKPVA

SEQ ID NO: 2468 - protein, 42 aa, Artificial Sequence
  Non-cyclic GFR-binding peptide
  MOD_RES (1)..(38): Xaa is C or S
XALHDELTYHYKLFIPKKRVIEKYLVSIPSLQVQTPRXQVNR

SEQ ID NO: 2469 - protein, 35 aa, Artificial Sequence
  Non-cyclic GFR-binding peptide
  MOD_RES (35)..(35): Xaa is C or S
  MOD_RES (13)..(14)..(15)..(16)..(17): Xaa is A or G
  MOD_RES (18)..(19)..(20)..(21): Xaa is A or G or absent
EAVSMGERHKRLXXXXXXXXXYYLVSTASLKTPVX

SEQ ID NO: 2470 - protein, 38 aa, Artificial Sequence
  Non-cyclic GFR-binding peptide
  MOD_RES (1)..(32)..(33): Xaa is C or S
XSRVIMQYNKLVKPKRGVLYLISIASLAQPVXXPAASA

SEQ ID NO: 2471 - protein, 36 aa, Artificial Sequence
  Non-cyclic GFR-binding peptide
  MOD_RES (2)..(36): Xaa is C or S
  MOD_RES (14)..(15)..(16)..(17)..(18): Xaa is A or G
  MOD_RES (19)..(20)..(21)..(22): Xaa is A or G or absent
GXSRVVMNRHKRLXXXXXXXXXYYLVSTASLKTPAX

SEQ ID NO: 2472 - protein, 33 aa, Artificial Sequence
  Non-cyclic GFR-binding peptide
  MOD_RES (33)..(33): Xaa is C or S
  MOD_RES (11)..(12)..(13)..(14)..(15): Xaa is A or G
  MOD_RES (16)..(17)..(18)..(19): Xaa is A or G or absent
SKVVMQYNKLXXXXXXXXXLYLISIASLDQPVX

SEQ ID NO: 2473 - protein, 35 aa, Artificial Sequence
  Non-cyclic GFR-binding peptide
  MOD_RES (35)..(35): Xaa is C or S
  MOD_RES (13)..(14)..(15)..(16)..(17): Xaa is A or G
  MOD_RES (18)..(19)..(20)..(21): Xaa is A or G or absent
EAVSMGEQYNKLXXXXXXXXXLYLVSIASLKTPVX

SEQ ID NO: 2474 - protein, 32 aa, Artificial Sequence
  Non-cyclic GFR-binding peptide
  MOD_RES (1)..(32): Xaa is C or S
XSRVIMQYNKLVKPKRGVLYLISIASLAQPVX

SEQ ID NO: 2475 - protein, 41 aa, Artificial Sequence
  Non-cyclic GFR-binding peptide
  MOD_RES (2)..(39): Xaa is C or S
  MOD_RES (15)..(16)..(17)..(18)..(19): Xaa is A or G
  MOD_RES (20)..(21)..(22)..(23): Xaa is A or G or absent
KXALHDELTYHYKLXXXXXXXXXKYLVSIPSLQVQTPRXQV

SEQ ID NO: 2476 - protein, 39 aa, Artificial Sequence
  Non-cyclic GFR-binding peptide
  MOD_RES (33)..(34): Xaa is C or S
  MOD_RES (11)..(12)..(13)..(14)..(15): Xaa is A or G
  MOD_RES (16)..(17)..(18)..(19): Xaa is A or G or absent
RVVMNYHYKLXXXXXXXXXKYLVSIPSLQTPAXXPKPVT

SEQ ID NO: 2477 - protein, 40 aa, Artificial Sequence
  Non-cyclic GFR-binding peptide
  MOD_RES (1)..(3)..(38)..(39): Xaa is C or S
  MOD_RES (16)..(17)..(18)..(19)..(20): Xaa is A or G
  MOD_RES (21)..(22)..(23)..(24): Xaa is A or G or absent
XGXEAVSMGERHKRLXXXXXXXXXYYLVSTASLKTPVXXA

SEQ ID NO: 2478 - protein, 35 aa, Artificial Sequence
  Non-cyclic GFR-binding peptide
  MOD_RES (34)..(35): Xaa is C or S
  MOD_RES (12)..(13)..(14)..(15)..(16): Xaa is A or G
  MOD_RES (17)..(18)..(19)..(20): Xaa is A or G or absent
AKVVMNQYNKLXXXXXXXXXLYLVSIASLKTPAXX

SEQ ID NO: 2479 - protein, 37 aa, Artificial Sequence
  Non-cyclic GFR-binding peptide
  MOD_RES (32)..(33): Xaa is C or S
SRVVMNYHYKLIVNSSDDKYLVSIPSLKTPAXXPKPV

SEQ ID NO: 2480 - protein, 43 aa, Artificial Sequence
  Non-cyclic GFR-binding peptide
  MOD_RES (2)..(4)..(39)..(40): Xaa is C or S
  MOD_RES (17)..(18)..(19)..(20)..(21): Xaa is A or G
  MOD_RES (22)..(23)..(24)..(25): Xaa is A or G or absent
RXGXEAVSMGERYKKLXXXXXXXXXFYLVSIANLKTPVXXAKG

SEQ ID NO: 2481 - protein, 31 aa, Artificial Sequence
  Non-cyclic GFR-binding peptide
  MOD_RES (1)..(1): Xaa is C or S
XSKVVMQYNKLVKPTRGVLYLISIASLDQPV

SEQ ID NO: 2482 - protein, 40 aa, Artificial Sequence
  Non-cyclic GFR-binding peptide
  MOD_RES (1)..(3)..(34)..(35): Xaa is C or S
XKXSRVIMYHYKLVKPKRGVKYLISIPSLAQPVXXPAASA

SEQ ID NO: 2483 - protein, 38 aa, Artificial Sequence
  Non-cyclic GFR-binding peptide
  MOD_RES (2)..(4): Xaa is C or S
  MOD_RES (17)..(18)..(19)..(20)..(21): Xaa is A or G
  MOD_RES (22)..(23)..(24)..(25): Xaa is A or G or absent
RXGXEAVSMGERYKKLXXXXXXXXXFYLVSIANLKTPV

SEQ ID NO: 2484 - protein, 35 aa, Artificial Sequence
  Non-cyclic GFR-binding peptide
  MOD_RES (31)..(32): Xaa is C or S
EVVMEYHYKLVVKDYEDKYLMSIPSLETPVXXAKP

SEQ ID NO: 2485 - protein, 36 aa, Artificial Sequence
  Non-cyclic GFR-binding peptide
  MOD_RES (33)..(34): Xaa is C or S
  MOD_RES (11)..(12)..(13)..(14)..(15): Xaa is A or G
  MOD_RES (16)..(17)..(18)..(19): Xaa is A or G or absent
EVVMEYHYKLXXXXXXXXXKYLMSIPSLETPVXXAK

SEQ ID NO: 2486 - protein, 37 aa, Artificial Sequence
  Non-cyclic GFR-binding peptide
  MOD_RES (1)..(3)..(35)..(36): Xaa is C or S
XGXARVVMNYHYKLIVNSSDDKYLVSIPSLQTPAXXP

SEQ ID NO: 2487 - protein, 35 aa, Artificial Sequence
  Non-cyclic GFR-binding peptide
  MOD_RES (1)..(1): Xaa is C or S
  MOD_RES (14)..(15)..(16)..(17)..(18): Xaa is A or G
  MOD_RES (19)..(20)..(21)..(22): Xaa is A or G or absent
XEAVSMGERYKKLXXXXXXXXXFYLVSIANLKTPV

SEQ ID NO: 2488 - protein, 40 aa, Artificial Sequence
  Non-cyclic GFR-binding peptide
  MOD_RES (2)..(4)..(37)..(38): Xaa is C or S
  MOD_RES (15)..(16)..(17)..(18)..(19): Xaa is A or G
  MOD_RES (20)..(21)..(22)..(23): Xaa is A or G or absent
SXKXSRVIMQYNKLXXXXXXXXXLYLISIASLAQPVXXPA

SEQ ID NO: 2489 - protein, 38 aa, Artificial Sequence
  Non-cyclic GFR-binding peptide
  MOD_RES (32)..(33): Xaa is C or S
SRVVMNQYNKLIVNSSDDLYLVSIASLKTPAXXPKPVY

SEQ ID NO: 2490 - protein, 39 aa, Artificial Sequence
  Non-cyclic GFR-binding peptide
  MOD_RES (2)..(4)..(35)..(36): Xaa is C or S
SXKXSKVVMRYKKLVKPTRGVFYLISIANLDQPVXXPSA

SEQ ID NO: 2491 - protein, 39 aa, Artificial Sequence
  Non-cyclic GFR-binding peptide
  MOD_RES (34)..(35): Xaa is C or S
  MOD_RES (12)..(13)..(14)..(15)..(16): Xaa is A or G
  MOD_RES (17)..(18)..(19)..(20): Xaa is A or G or absent
GEVVMERYKKLXXXXXXXXXFYLMSIANLETPVXXAKPI

SEQ ID NO: 2492 - protein, 35 aa, Artificial Sequence
  Non-cyclic GFR-binding peptide
  MOD_RES (1)..(3): Xaa is C or S
  MOD_RES (14)..(15)..(16)..(17)..(18): Xaa is A or G
  MOD_RES (19)..(20)..(21)..(22): Xaa is A or G or absent
XKXSKVIMQYNKLXXXXXXXXXLYLISIASLDQSV

SEQ ID NO: 2493 - protein, 40 aa, Artificial Sequence
  Non-cyclic GFR-binding peptide
  MOD_RES (2)..(4)..(35)..(36): Xaa is C or S
SXKXSKVVMYHYKLVKPTRGVKYLISIPSLDQPVXXPSAS

SEQ ID NO: 2494 - protein, 43 aa, Artificial Sequence
  Non-cyclic GFR-binding peptide
  MOD_RES (2)..(4)..(38)..(39): Xaa is C or S
  MOD_RES (16)..(17)..(18)..(19)..(20): Xaa is A or G
  MOD_RES (21)..(22)..(23)..(24): Xaa is A or G or absent
RXGXGEVVMERHKRLXXXXXXXXXYYLMSTASLETPVXXAKPI

SEQ ID NO: 2495 - protein, 40 aa, Artificial Sequence
  Non-cyclic GFR-binding peptide
  MOD_RES (2)..(34): Xaa is C or S
GXSRVVMNQYNKLIVNSSDDLYLVSIASLKTPAXTPKTVH

SEQ ID NO: 2496 - protein, 33 aa, Artificial Sequence
  Non-cyclic GFR-binding peptide
LHDELTQYNKLFIPKKRVIELYLVSIASLQVQT

SEQ ID NO: 2497 - protein, 34 aa, Artificial Sequence
  Non-cyclic GFR-binding peptide
  MOD_RES (1)..(32)..(33): Xaa is C or S
XSRVIMRHKRLVKPKRGVYYLISTASLAQPVXXP

SEQ ID NO: 2498 - protein, 38 aa, Artificial Sequence
  Non-cyclic GFR-binding peptide
  MOD_RES (34)..(35): Xaa is C or S
  MOD_RES (12)..(13)..(14)..(15)..(16): Xaa is A or G
  MOD_RES (17)..(18)..(19)..(20): Xaa is A or G or absent
GEVVMEYHYKLXXXXXXXXXKYLMSIPSLETPVXXAKP

SEQ ID NO: 2499 - protein, 38 aa, Artificial Sequence
  Non-cyclic GFR-binding peptide
  MOD_RES (2)..(34)..(35): Xaa is C or S
GXGEVVMDYHYKLVVKENEDKYLMSIPSLETPVXXAKP

SEQ ID NO: 2500 - protein, 34 aa, Artificial Sequence
  Non-cyclic GFR-binding peptide
  MOD_RES (1)..(3): Xaa is C or S
XGXSRVVMNQYNKLIVNSSDDLYLVSIASLKTPA

SEQ ID NO: 2501 - protein, 33 aa, Artificial Sequence
  Non-cyclic GFR-binding peptide
HDELTYHYKLFIPKKRVIEKYLVSIPSLQVQTP

SEQ ID NO: 2502 - protein, 38 aa, Artificial Sequence
  Non-cyclic GFR-binding peptide
  MOD_RES (2)..(4)..(35)..(36): Xaa is C or S
SXKXSKVVMQYNKLVKPTRGVLYLISIASLDQPVXXPS

SEQ ID NO: 2503 - protein, 37 aa, Artificial Sequence
  Non-cyclic GFR-binding peptide
  MOD_RES (33)..(34): Xaa is C or S
  MOD_RES (11)..(12)..(13)..(14)..(15): Xaa is A or G
  MOD_RES (16)..(17)..(18)..(19): Xaa is A or G or absent
EVVMDRHKRLXXXXXXXXXYYLMSTASLETPVXXAKP

SEQ ID NO: 2504 - protein, 34 aa, Artificial Sequence
  Non-cyclic GFR-binding peptide
  MOD_RES (2)..(4): Xaa is C or S
SXKXSKVIMYHYKLIKPTKGIKYLISIPSLDQSV

SEQ ID NO: 2505 - protein, 34 aa, Artificial Sequence
  Non-cyclic GFR-binding peptide
  MOD_RES (34)..(34): Xaa is C or S
  MOD_RES (12)..(13)..(14)..(15)..(16): Xaa is A or G
  MOD_RES (17)..(18)..(19)..(20): Xaa is A or G or absent
ARVVMNRHKRLXXXXXXXXXYYLVSTASLQTPAX

SEQ ID NO: 2506 - protein, 38 aa, Artificial Sequence
  Non-cyclic GFR-binding peptide
  MOD_RES (2)..(4)..(38): Xaa is C or S
  MOD_RES (16)..(17)..(18)..(19)..(20): Xaa is A or G
  MOD_RES (21)..(22)..(23)..(24): Xaa is A or G or absent
HXGXARVVMNYHYKLXXXXXXXXXKYLVSIPSLQTPAX

SEQ ID NO: 2507 - protein, 38 aa, Artificial Sequence
  Non-cyclic GFR-binding peptide
  MOD_RES (2)..(35)..(36): Xaa is C or S
  MOD_RES (13)..(14)..(15)..(16)..(17): Xaa is A or G
  MOD_RES (18)..(19)..(20)..(21): Xaa is A or G or absent
KXSKVIMYHYKLXXXXXXXXXKYLISIPSLDQSVXXPS

SEQ ID NO: 2508 - protein, 32 aa, Artificial Sequence
  Non-cyclic GFR-binding peptide
  MOD_RES (31)..(31): Xaa is C or S
RVVMNYHYKLIVNSSDDKYLVSIPSLKTPAXT

SEQ ID NO: 2509 - protein, 43 aa, Artificial Sequence
  Non-cyclic GFR-binding peptide
  MOD_RES (2)..(39): Xaa is C or S
  MOD_RES (15)..(16)..(17)..(18)..(19): Xaa is A or G
  MOD_RES (20)..(21)..(22)..(23): Xaa is A or G or absent
KXALHDELTYHYKLXXXXXXXXXKYLVSIPSLQVQTPRXQVNR

SEQ ID NO: 2510 - protein, 35 aa, Artificial Sequence
  Non-cyclic GFR-binding peptide
  MOD_RES (33)..(33): Xaa is C or S
  MOD_RES (11)..(12)..(13)..(14)..(15): Xaa is A or G
  MOD_RES (16)..(17)..(18)..(19): Xaa is A or G or absent
RVVMNYHYKLXXXXXXXXXKYLVSIPSLKTPAXTP

SEQ ID NO: 2511 - protein, 39 aa, Artificial Sequence
  Non-cyclic GFR-binding peptide
  MOD_RES (1)..(3): Xaa is C or S
  MOD_RES (16)..(17)..(18)..(19)..(20): Xaa is A or G
  MOD_RES (21)..(22)..(23)..(24): Xaa is A or G or absent
XKXALHDELTRYKKLXXXXXXXXXFYLVSIANLQVQTPR

SEQ ID NO: 2512 - protein, 36 aa, Artificial Sequence
  Non-cyclic GFR-binding peptide
  MOD_RES (2)..(36): Xaa is C or S
  MOD_RES (14)..(15)..(16)..(17)..(18): Xaa is A or G
  MOD_RES (19)..(20)..(21)..(22): Xaa is A or G or absent
GXAKVVMNQYNKLXXXXXXXXXLYLVSIASLKTPAX

SEQ ID NO: 2513 - protein, 38 aa, Artificial Sequence
  Non-cyclic GFR-binding peptide
  MOD_RES (2)..(35)..(36): Xaa is C or S
GXEAVSMGEQYNKLTPVGMDDLYLVSIASLKTPVXXAK

SEQ ID NO: 2514 - protein, 39 aa, Artificial Sequence
  Non-cyclic GFR-binding peptide
  MOD_RES (1)..(33)..(34): Xaa is C or S
XARVVMNYHYKLIVNSSDDKYLVSIPSLQTPAXXPKPVT

SEQ ID NO: 2515 - protein, 38 aa, Artificial Sequence
  Non-cyclic GFR-binding peptide
  MOD_RES (1)..(3)..(35)..(36): Xaa is C or S
XGXGEVVMEYHYKLVVKDYEDKYLMSIPSLETPVXXAK

SEQ ID NO: 2516 - protein, 39 aa, Artificial Sequence
  Non-cyclic GFR-binding peptide
  MOD_RES (35)..(36): Xaa is C or S
  MOD_RES (13)..(14)..(15)..(16)..(17): Xaa is A or G
  MOD_RES (18)..(19)..(20)..(21): Xaa is A or G or absent
EAVSMGERYKKLXXXXXXXXXFYLVSIANLKTPVXXAKG

SEQ ID NO: 2517 - protein, 33 aa, Artificial Sequence
  Non-cyclic GFR-binding peptide
  MOD_RES (32)..(32): Xaa is C or S
SRVVMNQYNKLIVNSSDDLYLVSIASLKTPAXT

SEQ ID NO: 2518 - protein, 42 aa, Artificial Sequence
  Non-cyclic GFR-binding peptide
  MOD_RES (1)..(3)..(37): Xaa is C or S
  MOD_RES (15)..(16)..(17)..(18)..(19): Xaa is A or G
  MOD_RES (20)..(21)..(22)..(23): Xaa is A or G or absent
XGXSRVVMNYHYKLXXXXXXXXXKYLVSIPSLKTPAXTPKTV

SEQ ID NO: 2519 - protein, 38 aa, Artificial Sequence
  Non-cyclic GFR-binding peptide
  MOD_RES (34)..(35): Xaa is C or S
  MOD_RES (12)..(13)..(14)..(15)..(16): Xaa is A or G
  MOD_RES (17)..(18)..(19)..(20): Xaa is A or G or absent
GEVVMERHKRLXXXXXXXXXYYLMSTASLETPVXXAKP

SEQ ID NO: 2520 - protein, 32 aa, Artificial Sequence
  Non-cyclic GFR-binding peptide
  MOD_RES (2)..(2): Xaa is C or S
KXSRVIMRHKRLVKPKRGVYYLISTASLAQPV

SEQ ID NO: 2521 - protein, 34 aa, Artificial Sequence
  Non-cyclic GFR-binding peptide
  MOD_RES (34)..(34): Xaa is C or S
  MOD_RES (12)..(13)..(14)..(15)..(16): Xaa is A or G
  MOD_RES (17)..(18)..(19)..(20): Xaa is A or G or absent
ARVVMNYHYKLXXXXXXXXXKYLVSIPSLQTPAX

SEQ ID NO: 2522 - protein, 34 aa, Artificial Sequence
  Non-cyclic GFR-binding peptide
  MOD_RES (34)..(34): Xaa is C or S
  MOD_RES (12)..(13)..(14)..(15)..(16): Xaa is A or G
  MOD_RES (17)..(18)..(19)..(20): Xaa is A or G or absent
AKVVMNQYNKLXXXXXXXXXLYLVSIASLKTPAX

SEQ ID NO: 2523 - protein, 36 aa, Artificial Sequence
  Non-cyclic GFR-binding peptide
  MOD_RES (2)..(36): Xaa is C or S
  MOD_RES (14)..(15)..(16)..(17)..(18): Xaa is A or G
  MOD_RES (19)..(20)..(21)..(22): Xaa is A or G or absent
GXGEVVMDRHKRLXXXXXXXXXYYLMSTASLETPVX

SEQ ID NO: 2524 - protein, 44 aa, Artificial Sequence
  Non-cyclic GFR-binding peptide
  MOD_RES (1)..(3)..(40): Xaa is C or S
  MOD_RES (16)..(17)..(18)..(19)..(20): Xaa is A or G
  MOD_RES (21)..(22)..(23)..(24): Xaa is A or G or absent
XKXALHDELTYHYKLXXXXXXXXXKYLVSIPSLQVQTPRXQVNR

SEQ ID NO: 2525 - protein, 39 aa, Artificial Sequence
  Non-cyclic GFR-binding peptide
  MOD_RES (1)..(3)..(34)..(35): Xaa is C or S
XKXSKVIMQYNKLIKPTKGILYLISIASLDQSVXXPSAS

SEQ ID NO: 2526 - protein, 37 aa, Artificial Sequence
  Non-cyclic GFR-binding peptide
  MOD_RES (2)..(36): Xaa is C or S
  MOD_RES (14)..(15)..(16)..(17)..(18): Xaa is A or G
  MOD_RES (19)..(20)..(21)..(22): Xaa is A or G or absent
GXSRVVMNQYNKLXXXXXXXXXLYLVSIASLKTPAXT

SEQ ID NO: 2527 - protein, 33 aa, Artificial Sequence
  Non-cyclic GFR-binding peptide
HDELTRYKKLFIPKKRVIEFYLVSIANLQVQTP

SEQ ID NO: 2528 - protein, 35 aa, Artificial Sequence
  Non-cyclic GFR-binding peptide
  MOD_RES (2)..(34): Xaa is C or S
GXSRVVMNRHKRLIVNSSDDYYLVSTASLKTPAXT

SEQ ID NO: 2529 - protein, 36 aa, Artificial Sequence
  Non-cyclic GFR-binding peptide
  MOD_RES (1)..(33)..(34): Xaa is C or S
XARVVMNYHYKLIVNSSDDKYLVSIPSLQTPAXXPK

SEQ ID NO: 2530 - protein, 39 aa, Artificial Sequence
  Non-cyclic GFR-binding peptide
  MOD_RES (1)..(38): Xaa is C or S
  MOD_RES (14)..(15)..(16)..(17)..(18): Xaa is A or G
  MOD_RES (19)..(20)..(21)..(22): Xaa is A or G or absent
XALHDELTRYKKLXXXXXXXXXFYLVSIANLQVQTPRXQ

SEQ ID NO: 2531 - protein, 39 aa, Artificial Sequence
  Non-cyclic GFR-binding peptide
  MOD_RES (2)..(4)..(38): Xaa is C or S
  MOD_RES (16)..(17)..(18)..(19)..(20): Xaa is A or G
  MOD_RES (21)..(22)..(23)..(24): Xaa is A or G or absent
HXGXSRVVMNQYNKLXXXXXXXXXLYLVSIASLKTPAXT

SEQ ID NO: 2532 - protein, 36 aa, Artificial Sequence
  Non-cyclic GFR-binding peptide
  MOD_RES (34)..(35): Xaa is C or S
  MOD_RES (12)..(13)..(14)..(15)..(16): Xaa is A or G
  MOD_RES (17)..(18)..(19)..(20): Xaa is A or G or absent
SRVVMNYHYKLXXXXXXXXXKYLVSIPSLKTPAXXP

SEQ ID NO: 2533 - protein, 34 aa, Artificial Sequence
  Non-cyclic GFR-binding peptide
  MOD_RES (32)..(33): Xaa is C or S
GEVVMERHKRLVVKDYEDYYLMSTASLETPVXXA

SEQ ID NO: 2534 - protein, 38 aa, Artificial Sequence
  Non-cyclic GFR-binding peptide
  MOD_RES (2)..(2): Xaa is C or S
  MOD_RES (15)..(16)..(17)..(18)..(19): Xaa is A or G
  MOD_RES (20)..(21)..(22)..(23): Xaa is A or G or absent
KXALHDELTQYNKLXXXXXXXXXLYLVSIASLQVQTPR

SEQ ID NO: 2535 - protein, 38 aa, Artificial Sequence
  Non-cyclic GFR-binding peptide
  MOD_RES (1)..(34)..(35): Xaa is C or S
  MOD_RES (12)..(13)..(14)..(15)..(16): Xaa is A or G
  MOD_RES (17)..(18)..(19)..(20): Xaa is A or G or absent
XSKVIMQYNKLXXXXXXXXXLYLISIASLDQSVXXPSA

SEQ ID NO: 2536 - protein, 39 aa, Artificial Sequence
  Non-cyclic GFR-binding peptide
  MOD_RES (35)..(35): Xaa is C or S
HDELTYHYKLFIPKKRVIEKYLVSIPSLQVQTPRXQVNR

SEQ ID NO: 2537 - protein, 33 aa, Artificial Sequence
  Non-cyclic GFR-binding peptide
  MOD_RES (2)..(2): Xaa is C or S
GXAKVVMNRYKKLIVNNSSDFYLVSIANLKTPA

SEQ ID NO: 2538 - protein, 36 aa, Artificial Sequence
  Non-cyclic GFR-binding peptide
  MOD_RES (1)..(3)..(35)..(36): Xaa is C or S
XGXAKVVMNRYKKLIVNNSSDFYLVSIANLKTPAXX

SEQ ID NO: 2539 - protein, 37 aa, Artificial Sequence
  Non-cyclic GFR-binding peptide
  MOD_RES (2)..(33)..(34): Xaa is C or S
KXSKVIMRYKKLIKPTKGIFYLISIANLDQSVXXPSA

SEQ ID NO: 2540 - protein, 43 aa, Artificial Sequence
  Non-cyclic GFR-binding peptide
  MOD_RES (1)..(3)..(37)..(38): Xaa is C or S
  MOD_RES (15)..(16)..(17)..(18)..(19): Xaa is A or G
  MOD_RES (20)..(21)..(22)..(23): Xaa is A or G or absent
XGXAKVVMNQYNKLXXXXXXXXXLYLVSIASLKTPAXXAKPVA

SEQ ID NO: 2541 - protein, 41 aa, Artificial Sequence
  Non-cyclic GFR-binding peptide
  MOD_RES (1)..(3)..(37)..(38): Xaa is C or S
  MOD_RES (15)..(16)..(17)..(18)..(19): Xaa is A or G
  MOD_RES (20)..(21)..(22)..(23): Xaa is A or G or absent
XGXAKVVMNRYKKLXXXXXXXXXFYLVSIANLKTPAXXAKP

SEQ ID NO: 2542 - protein, 41 aa, Artificial Sequence
  Non-cyclic GFR-binding peptide
  MOD_RES (2)..(4)..(36)..(37): Xaa is C or S
RXGXGEVVMDRYKKLVVKENEDFYLMSIANLETPVXXAKPI

SEQ ID NO: 2543 - protein, 41 aa, Artificial Sequence
  Non-cyclic GFR-binding peptide
  MOD_RES (2)..(4)..(38)..(39): Xaa is C or S
  MOD_RES (16)..(17)..(18)..(19)..(20): Xaa is A or G
  MOD_RES (21)..(22)..(23)..(24): Xaa is A or G or absent
HXGXAKVVMNQYNKLXXXXXXXXXLYLVSIASLKTPAXXAK

SEQ ID NO: 2544 - protein, 35 aa, Artificial Sequence
  Non-cyclic GFR-binding peptide
  MOD_RES (2)..(34)..(35): Xaa is C or S
GXGEVVMDRHKRLVVKENEDYYLMSTASLETPVXX

SEQ ID NO: 2545 - protein, 35 aa, Artificial Sequence
  Non-cyclic GFR-binding peptide
  MOD_RES (32)..(33): Xaa is C or S
ARVVMNRHKRLIVNSSDDYYLVSTASLQTPAXXPK

SEQ ID NO: 2546 - protein, 38 aa, Artificial Sequence
  Non-cyclic GFR-binding peptide
  MOD_RES (2)..(35)..(36): Xaa is C or S
  MOD_RES (13)..(14)..(15)..(16)..(17): Xaa is A or G
  MOD_RES (18)..(19)..(20)..(21): Xaa is A or G or absent
KXSKVVMQYNKLXXXXXXXXXLYLISIASLDQPVXXPS

SEQ ID NO: 2547 - protein, 34 aa, Artificial Sequence
  Non-cyclic GFR-binding peptide
  MOD_RES (1)..(33): Xaa is C or S
XSRVVMNQYNKLIVNSSDDLYLVSIASLKTPAXT

SEQ ID NO: 2548 - protein, 41 aa, Artificial Sequence
  Non-cyclic GFR-binding peptide
  MOD_RES (2)..(4)..(38)..(39): Xaa is C or S
  MOD_RES (16)..(17)..(18)..(19)..(20): Xaa is A or G
  MOD_RES (21)..(22)..(23)..(24): Xaa is A or G or absent
RXGXGEVVMERYKKLXXXXXXXXXFYLMSIANLETPVXXAK

SEQ ID NO: 2549 - protein, 35 aa, Artificial Sequence
  Non-cyclic GFR-binding peptide
  MOD_RES (2)..(34)..(35): Xaa is C or S
GXSRVVMNYHYKLIVNSSDDKYLVSIPSLKTPAXX

SEQ ID NO: 2550 - protein, 36 aa, Artificial Sequence
  Non-cyclic GFR-binding peptide
  MOD_RES (32)..(33): Xaa is C or S
GEVVMERYKKLVVKDYEDFYLMSIANLETPVXXAKP

SEQ ID NO: 2551 - protein, 33 aa, Artificial Sequence
  Non-cyclic GFR-binding peptide
  MOD_RES (31)..(32): Xaa is C or S
RVVMNYHYKLIVNSSDDKYLVSIPSLQTPAXXP

SEQ ID NO: 2552 - protein, 35 aa, Artificial Sequence
  Non-cyclic GFR-binding peptide
  MOD_RES (1)..(3): Xaa is C or S
  MOD_RES (14)..(15)..(16)..(17)..(18): Xaa is A or G
  MOD_RES (19)..(20)..(21)..(22): Xaa is A or G or absent
XKXSRVIMYHYKLXXXXXXXXXKYLISIPSLAQPV

SEQ ID NO: 2553 - protein, 37 aa, Artificial Sequence
  Non-cyclic GFR-binding peptide
  MOD_RES (2)..(4): Xaa is C or S
  MOD_RES (16)..(17)..(18)..(19)..(20): Xaa is A or G
  MOD_RES (21)..(22)..(23)..(24): Xaa is A or G or absent
HXGXSRVVMNQYNKLXXXXXXXXXLYLVSIASLKTPA

SEQ ID NO: 2554 - protein, 34 aa, Artificial Sequence
  Non-cyclic GFR-binding peptide
  MOD_RES (2)..(4): Xaa is C or S
SXKXSRVIMRYKKLVKPKRGVFYLISIANLAQPV

SEQ ID NO: 2555 - protein, 38 aa, Artificial Sequence
  Non-cyclic GFR-binding peptide
  MOD_RES (33)..(34): Xaa is C or S
EAVSMGEQYNKLTPVGMDDLYLVSIASLKTPVXXAKGV

SEQ ID NO: 2556 - protein, 36 aa, Artificial Sequence
  Non-cyclic GFR-binding peptide
  MOD_RES (1)..(3)..(36): Xaa is C or S
  MOD_RES (14)..(15)..(16)..(17)..(18): Xaa is A or G
  MOD_RES (19)..(20)..(21)..(22): Xaa is A or G or absent
XKXSKVIMRHKRLXXXXXXXXXYYLISTASLDQSVX

SEQ ID NO: 2557 - protein, 38 aa, Artificial Sequence
  Non-cyclic GFR-binding peptide
  MOD_RES (1)..(3)..(35)..(36): Xaa is C or S
XGXAKVVMNYHYKLIVNNSSDKYLVSIPSLKTPAXXAK

SEQ ID NO: 2558 - protein, 36 aa, Artificial Sequence
  Non-cyclic GFR-binding peptide
  MOD_RES (2)..(4)..(36): Xaa is C or S
RXGXGEVVMERHKRLVVKDYEDYYLMSTASLETPVX

SEQ ID NO: 2559 - protein, 40 aa, Artificial Sequence
  Non-cyclic GFR-binding peptide
  MOD_RES (1)..(3)..(35)..(36): Xaa is C or S
XGXGEVVMDYHYKLVVKENEDKYLMSIPSLETPVXXAKPI

SEQ ID NO: 2560 - protein, 36 aa, Artificial Sequence
  Non-cyclic GFR-binding peptide
  MOD_RES (1)..(3)..(36): Xaa is C or S
  MOD_RES (14)..(15)..(16)..(17)..(18): Xaa is A or G
  MOD_RES (19)..(20)..(21)..(22): Xaa is A or G or absent
XKXSRVIMYHYKLXXXXXXXXXKYLISIPSLAQPVX

SEQ ID NO: 2561 - protein, 34 aa, Artificial Sequence
  Non-cyclic GFR-binding peptide
  MOD_RES (32)..(33): Xaa is C or S
ARVVMNYHYKLIVNSSDDKYLVSIPSLQTPAXXP

SEQ ID NO: 2562 - protein, 39 aa, Artificial Sequence
  Non-cyclic GFR-binding peptide
  MOD_RES (2)..(35)..(36): Xaa is C or S
GXEAVSMGERHKRLTPVGMDDYYLVSTASLKTPVXXAKG

SEQ ID NO: 2563 - protein, 35 aa, Artificial Sequence
  Non-cyclic GFR-binding peptide
  MOD_RES (1)..(33)..(34): Xaa is C or S
XGEVVMERYKKLVVKDYEDFYLMSIANLETPVXXA

SEQ ID NO: 2564 - protein, 34 aa, Artificial Sequence
  Non-cyclic GFR-binding peptide
  MOD_RES (2)..(2): Xaa is C or S
  MOD_RES (13)..(14)..(15)..(16)..(17): Xaa is A or G
  MOD_RES (18)..(19)..(20)..(21): Xaa is A or G or absent
KXSKVVMRHKRLXXXXXXXXXYYLISTASLDQPV

SEQ ID NO: 2565 - protein, 39 aa, Artificial Sequence
  Non-cyclic GFR-binding peptide
  MOD_RES (33)..(34): Xaa is C or S
  MOD_RES (11)..(12)..(13)..(14)..(15): Xaa is A or G
  MOD_RES (16)..(17)..(18)..(19): Xaa is A or G or absent
RVVMNRHKRLXXXXXXXXXYYLVSTASLQTPAXXPKPVT

SEQ ID NO: 2566 - protein, 39 aa, Artificial Sequence
  Non-cyclic GFR-binding peptide
  MOD_RES (1)..(3)..(34)..(35): Xaa is C or S
XKXSKVVMQYNKLVKPTRGVLYLISIASLDQPVXXPSAS

SEQ ID NO: 2567 - protein, 35 aa, Artificial Sequence
  Non-cyclic GFR-binding peptide
  MOD_RES (1)..(3): Xaa is C or S
  MOD_RES (14)..(15)..(16)..(17)..(18): Xaa is A or G
  MOD_RES (19)..(20)..(21)..(22): Xaa is A or G or absent
XKXSKVIMRHKRLXXXXXXXXXYYLISTASLDQSV

SEQ ID NO: 2568 - protein, 39 aa, Artificial Sequence
  Non-cyclic GFR-binding peptide
  MOD_RES (1)..(35)..(36): Xaa is C or S
  MOD_RES (13)..(14)..(15)..(16)..(17): Xaa is A or G
  MOD_RES (18)..(19)..(20)..(21): Xaa is A or G or absent
XAKVVMNYHYKLXXXXXXXXXKYLVSIPSLKTPAXXAKP

SEQ ID NO: 2569 - protein, 36 aa, Artificial Sequence
  Non-cyclic GFR-binding peptide
  MOD_RES (2)..(4): Xaa is C or S
  MOD_RES (15)..(16)..(17)..(18)..(19): Xaa is A or G
  MOD_RES (20)..(21)..(22)..(23): Xaa is A or G or absent
SXKXSRVIMRHKRLXXXXXXXXXYYLISTASLAQPV

SEQ ID NO: 2570 - protein, 42 aa, Artificial Sequence
  Non-cyclic GFR-binding peptide
  MOD_RES (2)..(4)..(38)..(39): Xaa is C or S
  MOD_RES (16)..(17)..(18)..(19)..(20): Xaa is A or G
  MOD_RES (21)..(22)..(23)..(24): Xaa is A or G or absent
HXGXSRVVMNYHYKLXXXXXXXXXKYLVSIPSLKTPAXXPKP

SEQ ID NO: 2571 - protein, 38 aa, Artificial Sequence
  Non-cyclic GFR-binding peptide
  MOD_RES (1)..(3)..(36)..(37): Xaa is C or S
  MOD_RES (14)..(15)..(16)..(17)..(18): Xaa is A or G
  MOD_RES (19)..(20)..(21)..(22): Xaa is A or G or absent
XKXSRVIMRYKKLXXXXXXXXXFYLISIANLAQPVXXP

SEQ ID NO: 2572 - protein, 34 aa, Artificial Sequence
  Non-cyclic GFR-binding peptide
LHDELTRYKKLFIPKKRVIEFYLVSIANLQVQTP

SEQ ID NO: 2573 - protein, 42 aa, Artificial Sequence
  Non-cyclic GFR-binding peptide
  MOD_RES (1)..(3)..(37)..(38): Xaa is C or S
  MOD_RES (15)..(16)..(17)..(18)..(19): Xaa is A or G
  MOD_RES (20)..(21)..(22)..(23): Xaa is A or G or absent
XGXGEVVMDYHYKLXXXXXXXXXKYLMSIPSLETPVXXAKPI

SEQ ID NO: 2574 - protein, 36 aa, Artificial Sequence
  Non-cyclic GFR-binding peptide
  MOD_RES (1)..(3): Xaa is C or S
  MOD_RES (15)..(16)..(17)..(18)..(19): Xaa is A or G
  MOD_RES (20)..(21)..(22)..(23): Xaa is A or G or absent
XGXAKVVMNRYKKLXXXXXXXXXFYLVSIANLKTPA

SEQ ID NO: 2575 - protein, 37 aa, Artificial Sequence
  Non-cyclic GFR-binding peptide
  MOD_RES (35)..(35): Xaa is C or S
  MOD_RES (11)..(12)..(13)..(14)..(15): Xaa is A or G
  MOD_RES (16)..(17)..(18)..(19): Xaa is A or G or absent
HDELTQYNKLXXXXXXXXXLYLVSIASLQVQTPRXQV

SEQ ID NO: 2576 - protein, 37 aa, Artificial Sequence
  Non-cyclic GFR-binding peptide
  MOD_RES (1)..(3): Xaa is C or S
  MOD_RES (16)..(17)..(18)..(19)..(20): Xaa is A or G
  MOD_RES (21)..(22)..(23)..(24): Xaa is A or G or absent
XKXALHDELTQYNKLXXXXXXXXXLYLVSIASLQVQT

SEQ ID NO: 2577 - protein, 36 aa, Artificial Sequence
  Non-cyclic GFR-binding peptide
  MOD_RES (1)..(32)..(33): Xaa is C or S
XSKVIMQYNKLIKPTKGILYLISIASLDQSVXXPSA

SEQ ID NO: 2578 - protein, 38 aa, Artificial Sequence
  Non-cyclic GFR-binding peptide
  MOD_RES (1)..(34)..(35): Xaa is C or S
  MOD_RES (12)..(13)..(14)..(15)..(16): Xaa is A or G
  MOD_RES (17)..(18)..(19)..(20): Xaa is A or G or absent
XSKVIMRHKRLXXXXXXXXXYYLISTASLDQSVXXPSA

SEQ ID NO: 2579 - protein, 38 aa, Artificial Sequence
  Non-cyclic GFR-binding peptide
  MOD_RES (2)..(4)..(35)..(36): Xaa is C or S
SXKXSKVIMYHYKLIKPTKGIKYLISIPSLDQSVXXPS

SEQ ID NO: 2580 - protein, 43 aa, Artificial Sequence
  Non-cyclic GFR-binding peptide
  MOD_RES (2)..(39): Xaa is C or S
KXALHDELTRYKKLFIPKKRVIEFYLVSIANLQVQTPRXQVNR

SEQ ID NO: 2581 - protein, 37 aa, Artificial Sequence
  Non-cyclic GFR-binding peptide
  MOD_RES (1)..(3)..(36)..(37): Xaa is C or S
  MOD_RES (14)..(15)..(16)..(17)..(18): Xaa is A or G
  MOD_RES (19)..(20)..(21)..(22): Xaa is A or G or absent
XKXSKVIMQYNKLXXXXXXXXXLYLISIASLDQSVXX

SEQ ID NO: 2582 - protein, 33 aa, Artificial Sequence
  Non-cyclic GFR-binding peptide
  MOD_RES (31)..(32): Xaa is C or S
RVVMNQYNKLIVNSSDDLYLVSIASLQTPAXXP

SEQ ID NO: 2583 - protein, 42 aa, Artificial Sequence
  Non-cyclic GFR-binding peptide
  MOD_RES (2)..(4)..(36): Xaa is C or S
HXGXSRVVMNQYNKLIVNSSDDLYLVSIASLKTPAXTPKTVH

SEQ ID NO: 2584 - protein, 41 aa, Artificial Sequence
  Non-cyclic GFR-binding peptide
  MOD_RES (2)..(36): Xaa is C or S
  MOD_RES (14)..(15)..(16)..(17)..(18): Xaa is A or G
  MOD_RES (19)..(20)..(21)..(22): Xaa is A or G or absent
GXSRVVMNQYNKLXXXXXXXXXLYLVSIASLKTPAXTPKTV

SEQ ID NO: 2585 - protein, 36 aa, Artificial Sequence
  Non-cyclic GFR-binding peptide
  MOD_RES (36)..(36): Xaa is C or S
LHDELTRHKRLFIPKKRVIEYYLVSTASLQVQTPRX

SEQ ID NO: 2586 - protein, 39 aa, Artificial Sequence
  Non-cyclic GFR-binding peptide
  MOD_RES (1)..(38): Xaa is C or S
XALHDELTRYKKLFIPKKRVIEFYLVSIANLQVQTPRXQ

SEQ ID NO: 2587 - protein, 34 aa, Artificial Sequence
  Non-cyclic GFR-binding peptide
  MOD_RES (2)..(4): Xaa is C or S
SXKXSKVVMRHKRLVKPTRGVYYLISTASLDQPV

SEQ ID NO: 2588 - protein, 34 aa, Artificial Sequence
  Non-cyclic GFR-binding peptide
  MOD_RES (1)..(33)..(34): Xaa is C or S
XARVVMNQYNKLIVNSSDDLYLVSIASLQTPAXX

SEQ ID NO: 2589 - protein, 36 aa, Artificial Sequence
  Non-cyclic GFR-binding peptide
  MOD_RES (32)..(33): Xaa is C or S
SRVVMNRHKRLIVNSSDDYYLVSTASLKTPAXXPKP

SEQ ID NO: 2590 - protein, 36 aa, Artificial Sequence
  Non-cyclic GFR-binding peptide
  MOD_RES (1)..(34)..(35): Xaa is C or S
  MOD_RES (12)..(13)..(14)..(15)..(16): Xaa is A or G
  MOD_RES (17)..(18)..(19)..(20): Xaa is A or G or absent
XSKVVMRHKRLXXXXXXXXXYYLISTASLDQPVXXP

SEQ ID NO: 2591 - protein, 43 aa, Artificial Sequence
  Non-cyclic GFR-binding peptide
  MOD_RES (1)..(3)..(37)..(38): Xaa is C or S
  MOD_RES (15)..(16)..(17)..(18)..(19): Xaa is A or G
  MOD_RES (20)..(21)..(22)..(23): Xaa is A or G or absent
XGXAKVVMNYHYKLXXXXXXXXXKYLVSIPSLKTPAXXAKPVA

SEQ ID NO: 2592 - protein, 35 aa, Artificial Sequence
  Non-cyclic GFR-binding peptide
  MOD_RES (2)..(4)..(35): Xaa is C or S
SXKXSKVVMRHKRLVKPTRGVYYLISTASLDQPVX

SEQ ID NO: 2593 - protein, 36 aa, Artificial Sequence
  Non-cyclic GFR-binding peptide
  MOD_RES (2)..(34): Xaa is C or S
GXSRVVMNYHYKLIVNSSDDKYLVSIPSLKTPAXTP

SEQ ID NO: 2594 - protein, 32 aa, Artificial Sequence
  Non-cyclic GFR-binding peptide
  MOD_RES (11)..(12)..(13)..(14)..(15): Xaa is A or G
  MOD_RES (16)..(17)..(18)..(19): Xaa is A or G or absent
KVVMNRYKKLXXXXXXXXXFYLVSIANLKTPA

SEQ ID NO: 2595 - protein, 39 aa, Artificial Sequence
  Non-cyclic GFR-binding peptide
  MOD_RES (1)..(3)..(38)..(39): Xaa is C or S
  MOD_RES (16)..(17)..(18)..(19)..(20): Xaa is A or G
  MOD_RES (21)..(22)..(23)..(24): Xaa is A or G or absent
XGXEAVSMGERHKRLXXXXXXXXXYYLVSTASLKTPVXX

SEQ ID NO: 2596 - protein, 33 aa, Artificial Sequence
  Non-cyclic GFR-binding peptide
  MOD_RES (1)..(1): Xaa is C or S
  MOD_RES (12)..(13)..(14)..(15)..(16): Xaa is A or G
  MOD_RES (17)..(18)..(19)..(20): Xaa is A or G or absent
XSKVIMRYKKLXXXXXXXXXFYLISIANLDQSV

SEQ ID NO: 2597 - protein, 43 aa, Artificial Sequence
  Non-cyclic GFR-binding peptide
  MOD_RES (2)..(4)..(38)..(39): Xaa is C or S
  MOD_RES (16)..(17)..(18)..(19)..(20): Xaa is A or G
  MOD_RES (21)..(22)..(23)..(24): Xaa is A or G or absent
HXGXSRVVMNRHKRLXXXXXXXXXYYLVSTASLKTPAXXPKPV

SEQ ID NO: 2598 - protein, 35 aa, Artificial Sequence
  Non-cyclic GFR-binding peptide
  MOD_RES (33)..(34): Xaa is C or S
  MOD_RES (11)..(12)..(13)..(14)..(15): Xaa is A or G
  MOD_RES (16)..(17)..(18)..(19): Xaa is A or G or absent
SRVIMRYKKLXXXXXXXXXFYLISIANLAQPVXXP

SEQ ID NO: 2599 - protein, 38 aa, Artificial Sequence
  Non-cyclic GFR-binding peptide
  MOD_RES (2)..(2): Xaa is C or S
KXALHDELTRYKKLFIPKKRVIEFYLVSIANLQVQTPR

SEQ ID NO: 2600 - protein, 38 aa, Artificial Sequence
  Non-cyclic GFR-binding peptide
  MOD_RES (35)..(35): Xaa is C or S
HDELTYHYKLFIPKKRVIEKYLVSIPSLQVQTPRXQVN

SEQ ID NO: 2601 - protein, 37 aa, Artificial Sequence
  Non-cyclic GFR-binding peptide
  MOD_RES (1)..(1): Xaa is C or S
XALHDELTYHYKLFIPKKRVIEKYLVSIPSLQVQTPR

SEQ ID NO: 2602 - protein, 40 aa, Artificial Sequence
  Non-cyclic GFR-binding peptide
  MOD_RES (2)..(4)..(35)..(36): Xaa is C or S
SXKXSKVVMQYNKLVKPTRGVLYLISIASLDQPVXXPSAS

SEQ ID NO: 2603 - protein, 39 aa, Artificial Sequence
  Non-cyclic GFR-binding peptide
  MOD_RES (1)..(3)..(35)..(36): Xaa is C or S
XGXGEVVMERHKRLVVKDYEDYYLMSTASLETPVXXAKP

SEQ ID NO: 2604 - protein, 36 aa, Artificial Sequence
  Non-cyclic GFR-binding peptide
  MOD_RES (1)..(34)..(35): Xaa is C or S
  MOD_RES (12)..(13)..(14)..(15)..(16): Xaa is A or G
  MOD_RES (17)..(18)..(19)..(20): Xaa is A or G or absent
XSKVVMQYNKLXXXXXXXXXLYLISIASLDQPVXXP

SEQ ID NO: 2605 - protein, 41 aa, Artificial Sequence
  Non-cyclic GFR-binding peptide
  MOD_RES (1)..(3)..(35)..(36): Xaa is C or S
XGXARVVMNQYNKLIVNSSDDLYLVSIASLQTPAXXPKPVT

SEQ ID NO: 2606 - protein, 33 aa, Artificial Sequence
  Non-cyclic GFR-binding peptide
  MOD_RES (1)..(33): Xaa is C or S
XARVVMNQYNKLIVNSSDDLYLVSIASLQTPAX

SEQ ID NO: 2607 - protein, 42 aa, Artificial Sequence
  Non-cyclic GFR-binding peptide
  MOD_RES (2)..(4)..(37)..(38): Xaa is C or S
  MOD_RES (15)..(16)..(17)..(18)..(19): Xaa is A or G
  MOD_RES (20)..(21)..(22)..(23): Xaa is A or G or absent
SXKXSRVIMRHKRLXXXXXXXXXYYLISTASLAQPVXXPAAS

SEQ ID NO: 2608 - protein, 33 aa, Artificial Sequence
  Non-cyclic GFR-binding peptide
  MOD_RES (31)..(32): Xaa is C or S
SKVVMRHKRLVKPTRGVYYLISTASLDQPVXXP

SEQ ID NO: 2609 - protein, 35 aa, Artificial Sequence
  Non-cyclic GFR-binding peptide
  MOD_RES (34)..(35): Xaa is C or S
  MOD_RES (12)..(13)..(14)..(15)..(16): Xaa is A or G
  MOD_RES (17)..(18)..(19)..(20): Xaa is A or G or absent
GEVVMDYHYKLXXXXXXXXXKYLMSIPSLETPVXX

SEQ ID NO: 2610 - protein, 41 aa, Artificial Sequence
  Non-cyclic GFR-binding peptide
  MOD_RES (2)..(4)..(35)..(36): Xaa is C or S
SXKXSKVIMYHYKLIKPTKGIKYLISIPSLDQSVXXPSASA

SEQ ID NO: 2611 - protein, 31 aa, Artificial Sequence
  Non-cyclic GFR-binding peptide
  MOD_RES (31)..(31): Xaa is C or S
EVVMERYKKLVVKDYEDFYLMSIANLETPVX

SEQ ID NO: 2612 - protein, 37 aa, Artificial Sequence
  Non-cyclic GFR-binding peptide
  MOD_RES (32)..(32): Xaa is C or S
SRVVMNQYNKLIVNSSDDLYLVSIASLKTPAXTPKTV

SEQ ID NO: 2613 - protein, 35 aa, Artificial Sequence
  Non-cyclic GFR-binding peptide
  MOD_RES (34)..(34): Xaa is C or S
  MOD_RES (12)..(13)..(14)..(15)..(16): Xaa is A or G
  MOD_RES (17)..(18)..(19)..(20): Xaa is A or G or absent
SRVVMNQYNKLXXXXXXXXXLYLVSIASLKTPAXT

SEQ ID NO: 2614 - protein, 36 aa, Artificial Sequence
  Non-cyclic GFR-binding peptide
  MOD_RES (33)..(34): Xaa is C or S
  MOD_RES (11)..(12)..(13)..(14)..(15): Xaa is A or G
  MOD_RES (16)..(17)..(18)..(19): Xaa is A or G or absent
EVVMERHKRLXXXXXXXXXYYLMSTASLETPVXXAK

SEQ ID NO: 2615 - protein, 35 aa, Artificial Sequence
  Non-cyclic GFR-binding peptide
ALHDELTQYNKLFIPKKRVIELYLVSIASLQVQTP

SEQ ID NO: 2616 - protein, 41 aa, Artificial Sequence
  Non-cyclic GFR-binding peptide
  MOD_RES (2)..(35)..(36): Xaa is C or S
  MOD_RES (13)..(14)..(15)..(16)..(17): Xaa is A or G
  MOD_RES (18)..(19)..(20)..(21): Xaa is A or G or absent
KXSRVIMQYNKLXXXXXXXXXLYLISIASLAQPVXXPAASA

SEQ ID NO: 2617 - protein, 37 aa, Artificial Sequence
  Non-cyclic GFR-binding peptide
  MOD_RES (2)..(2): Xaa is C or S
KXALHDELTQYNKLFIPKKRVIELYLVSIASLQVQTP

SEQ ID NO: 2618 - protein, 39 aa, Artificial Sequence
  Non-cyclic GFR-binding peptide
  MOD_RES (2)..(4)..(37)..(38): Xaa is C or S
  MOD_RES (15)..(16)..(17)..(18)..(19): Xaa is A or G
  MOD_RES (20)..(21)..(22)..(23): Xaa is A or G or absent
SXKXSKVVMRYKKLXXXXXXXXXFYLISIANLDQPVXXP

SEQ ID NO: 2619 - protein, 37 aa, Artificial Sequence
  Non-cyclic GFR-binding peptide
  MOD_RES (1)..(33)..(34): Xaa is C or S
XSRVVMNQYNKLIVNSSDDLYLVSIASLKTPAXXPKP

SEQ ID NO: 2620 - protein, 38 aa, Artificial Sequence
  Non-cyclic GFR-binding peptide
  MOD_RES (34)..(34): Xaa is C or S
  MOD_RES (12)..(13)..(14)..(15)..(16): Xaa is A or G
  MOD_RES (17)..(18)..(19)..(20): Xaa is A or G or absent
SRVVMNQYNKLXXXXXXXXXLYLVSIASLKTPAXTPKT

SEQ ID NO: 2621 - protein, 39 aa, Artificial Sequence
  Non-cyclic GFR-binding peptide
  MOD_RES (2)..(36): Xaa is C or S
  MOD_RES (14)..(15)..(16)..(17)..(18): Xaa is A or G
  MOD_RES (19)..(20)..(21)..(22): Xaa is A or G or absent
GXSRVVMNRHKRLXXXXXXXXXYYLVSTASLKTPAXTPK

SEQ ID NO: 2622 - protein, 37 aa, Artificial Sequence
  Non-cyclic GFR-binding peptide
  MOD_RES (32)..(33): Xaa is C or S
GEVVMDYHYKLVVKENEDKYLMSIPSLETPVXXAKPI

SEQ ID NO: 2623 - protein, 37 aa, Artificial Sequence
  Non-cyclic GFR-binding peptide
  MOD_RES (31)..(32): Xaa is C or S
EVVMDRYKKLVVKENEDFYLMSIANLETPVXXAKPIK

SEQ ID NO: 2624 - protein, 43 aa, Artificial Sequence
  Non-cyclic GFR-binding peptide
  MOD_RES (2)..(4)..(37)..(38): Xaa is C or S
  MOD_RES (15)..(16)..(17)..(18)..(19): Xaa is A or G
  MOD_RES (20)..(21)..(22)..(23): Xaa is A or G or absent
SXKXSKVIMYHYKLXXXXXXXXXKYLISIPSLDQSVXXPSASA

SEQ ID NO: 2625 - protein, 35 aa, Artificial Sequence
  Non-cyclic GFR-binding peptide
ALHDELTRHKRLFIPKKRVIEYYLVSTASLQVQTP

SEQ ID NO: 2626 - protein, 37 aa, Artificial Sequence
  Non-cyclic GFR-binding peptide
  MOD_RES (1)..(33): Xaa is C or S
XSRVVMNQYNKLIVNSSDDLYLVSIASLKTPAXTPKT

SEQ ID NO: 2627 - protein, 32 aa, Artificial Sequence
  Non-cyclic GFR-binding peptide
  MOD_RES (1)..(1): Xaa is C or S
XSRVVMNQYNKLIVNSSDDLYLVSIASLKTPA

SEQ ID NO: 2628 - protein, 42 aa, Artificial Sequence
  Non-cyclic GFR-binding peptide
  MOD_RES (1)..(38): Xaa is C or S
  MOD_RES (14)..(15)..(16)..(17)..(18): Xaa is A or G
  MOD_RES (19)..(20)..(21)..(22): Xaa is A or G or absent
XALHDELTQYNKLXXXXXXXXXLYLVSIASLQVQTPRXQVNR

SEQ ID NO: 2629 - protein, 39 aa, Artificial Sequence
  Non-cyclic GFR-binding peptide
  MOD_RES (2)..(34)..(35): Xaa is C or S
GXARVVMNYHYKLIVNSSDDKYLVSIPSLQTPAXXPKPV

SEQ ID NO: 2630 - protein, 39 aa, Artificial Sequence
  Non-cyclic GFR-binding peptide
  MOD_RES (2)..(4)..(38)..(39): Xaa is C or S
  MOD_RES (16)..(17)..(18)..(19)..(20): Xaa is A or G
  MOD_RES (21)..(22)..(23)..(24): Xaa is A or G or absent
HXGXSRVVMNYHYKLXXXXXXXXXKYLVSIPSLKTPAXX

SEQ ID NO: 2631 - protein, 39 aa, Artificial Sequence
  Non-cyclic GFR-binding peptide
  MOD_RES (2)..(4)..(35)..(36): Xaa is C or S
SXKXSRVIMQYNKLVKPKRGVLYLISIASLAQPVXXPAA

SEQ ID NO: 2632 - protein, 39 aa, Artificial Sequence
  Non-cyclic GFR-binding peptide
  MOD_RES (34)..(34): Xaa is C or S
  MOD_RES (12)..(13)..(14)..(15)..(16): Xaa is A or G
  MOD_RES (17)..(18)..(19)..(20): Xaa is A or G or absent
SRVVMNYHYKLXXXXXXXXXKYLVSIPSLKTPAXTPKTV

SEQ ID NO: 2633 - protein, 39 aa, Artificial Sequence
  Non-cyclic GFR-binding peptide
  MOD_RES (2)..(35)..(36): Xaa is C or S
  MOD_RES (13)..(14)..(15)..(16)..(17): Xaa is A or G
  MOD_RES (18)..(19)..(20)..(21): Xaa is A or G or absent
KXSKVIMRHKRLXXXXXXXXXYYLISTASLDQSVXXPSA

SEQ ID NO: 2634 - protein, 42 aa, Artificial Sequence
  Non-cyclic GFR-binding peptide
  MOD_RES (1)..(38): Xaa is C or S
  MOD_RES (14)..(15)..(16)..(17)..(18): Xaa is A or G
  MOD_RES (19)..(20)..(21)..(22): Xaa is A or G or absent
XALHDELTYHYKLXXXXXXXXXKYLVSIPSLQVQTPRXQVNR

SEQ ID NO: 2635 - protein, 37 aa, Artificial Sequence
  Non-cyclic GFR-binding peptide
  MOD_RES (1)..(3)..(36)..(37): Xaa is C or S
  MOD_RES (14)..(15)..(16)..(17)..(18): Xaa is A or G
  MOD_RES (19)..(20)..(21)..(22): Xaa is A or G or absent
XKXSKVIMRHKRLXXXXXXXXXYYLISTASLDQSVXX

SEQ ID NO: 2636 - protein, 36 aa, Artificial Sequence
  Non-cyclic GFR-binding peptide
  MOD_RES (1)..(3): Xaa is C or S
  MOD_RES (15)..(16)..(17)..(18)..(19): Xaa is A or G
  MOD_RES (20)..(21)..(22)..(23): Xaa is A or G or absent
XGXSRVVMNQYNKLXXXXXXXXXLYLVSIASLKTPA

SEQ ID NO: 2637 - protein, 35 aa, Artificial Sequence
  Non-cyclic GFR-binding peptide
  MOD_RES (2)..(4)..(35): Xaa is C or S
SXKXSRVIMRYKKLVKPKRGVFYLISIANLAQPVX

SEQ ID NO: 2638 - protein, 37 aa, Artificial Sequence
  Non-cyclic GFR-binding peptide
  MOD_RES (2)..(33)..(34): Xaa is C or S
KXSKVIMQYNKLIKPTKGILYLISIASLDQSVXXPSA

SEQ ID NO: 2639 - protein, 35 aa, Artificial Sequence
  Non-cyclic GFR-binding peptide
  MOD_RES (1)..(3)..(34)..(35): Xaa is C or S
XKXSRVIMQYNKLVKPKRGVLYLISIASLAQPVXX

SEQ ID NO: 2640 - protein, 38 aa, Artificial Sequence
  Non-cyclic GFR-binding peptide
  MOD_RES (1)..(3)..(37)..(38): Xaa is C or S
  MOD_RES (15)..(16)..(17)..(18)..(19): Xaa is A or G
  MOD_RES (20)..(21)..(22)..(23): Xaa is A or G or absent
XGXAKVVMNRYKKLXXXXXXXXXFYLVSIANLKTPAXX

SEQ ID NO: 2641 - protein, 37 aa, Artificial Sequence
  Non-cyclic GFR-binding peptide
  MOD_RES (33)..(34): Xaa is C or S
  MOD_RES (11)..(12)..(13)..(14)..(15): Xaa is A or G
  MOD_RES (16)..(17)..(18)..(19): Xaa is A or G or absent
EVVMDRYKKLXXXXXXXXXFYLMSIANLETPVXXAKP

SEQ ID NO: 2642 - protein, 36 aa, Artificial Sequence
  Non-cyclic GFR-binding peptide
  MOD_RES (2)..(36): Xaa is C or S
  MOD_RES (14)..(15)..(16)..(17)..(18): Xaa is A or G
  MOD_RES (19)..(20)..(21)..(22): Xaa is A or G or absent
GXGEVVMDRYKKLXXXXXXXXXFYLMSIANLETPVX

SEQ ID NO: 2643 - protein, 38 aa, Artificial Sequence
  Non-cyclic GFR-binding peptide
  MOD_RES (1)..(38): Xaa is C or S
XALHDELTRYKKLFIPKKRVIEFYLVSIANLQVQTPRX

SEQ ID NO: 2644 - protein, 38 aa, Artificial Sequence
  Non-cyclic GFR-binding peptide
  MOD_RES (1)..(35)..(36): Xaa is C or S
  MOD_RES (13)..(14)..(15)..(16)..(17): Xaa is A or G
  MOD_RES (18)..(19)..(20)..(21): Xaa is A or G or absent
XARVVMNRHKRLXXXXXXXXXYYLVSTASLQTPAXXPK

SEQ ID NO: 2645 - protein, 33 aa, Artificial Sequence
  Non-cyclic GFR-binding peptide
  MOD_RES (1)..(1): Xaa is C or S
  MOD_RES (12)..(13)..(14)..(15)..(16): Xaa is A or G
  MOD_RES (17)..(18)..(19)..(20): Xaa is A or G or absent
XSKVVMQYNKLXXXXXXXXXLYLISIASLDQPV

SEQ ID NO: 2646 - protein, 34 aa, Artificial Sequence
  Non-cyclic GFR-binding peptide
  MOD_RES (31)..(31): Xaa is C or S
RVVMNQYNKLIVNSSDDLYLVSIASLKTPAXTPK

SEQ ID NO: 2647 - protein, 40 aa, Artificial Sequence
  Non-cyclic GFR-binding peptide
  MOD_RES (2)..(4)..(38)..(39): Xaa is C or S
  MOD_RES (16)..(17)..(18)..(19)..(20): Xaa is A or G
  MOD_RES (21)..(22)..(23)..(24): Xaa is A or G or absent
RXGXGEVVMDRHKRLXXXXXXXXXYYLMSTASLETPVXXA

SEQ ID NO: 2648 - protein, 31 aa, Artificial Sequence
  Non-cyclic GFR-binding peptide
  MOD_RES (31)..(31): Xaa is C or S
KVVMNYHYKLIVNNSSDKYLVSIPSLKTPAX

SEQ ID NO: 2649 - protein, 38 aa, Artificial Sequence
  Non-cyclic GFR-binding peptide
  MOD_RES (2)..(36)..(37): Xaa is C or S
  MOD_RES (14)..(15)..(16)..(17)..(18): Xaa is A or G
  MOD_RES (19)..(20)..(21)..(22): Xaa is A or G or absent
GXGEVVMDYHYKLXXXXXXXXXKYLMSIPSLETPVXXA

SEQ ID NO: 2650 - protein, 38 aa, Artificial Sequence
  Non-cyclic GFR-binding peptide
  MOD_RES (2)..(4)..(38): Xaa is C or S
  MOD_RES (16)..(17)..(18)..(19)..(20): Xaa is A or G
  MOD_RES (21)..(22)..(23)..(24): Xaa is A or G or absent
HXGXAKVVMNRYKKLXXXXXXXXXFYLVSIANLKTPAX

SEQ ID NO: 2651 - protein, 37 aa, Artificial Sequence
  Non-cyclic GFR-binding peptide
  MOD_RES (31)..(32): Xaa is C or S
RVVMNRHKRLIVNSSDDYYLVSTASLQTPAXXPKPVT

SEQ ID NO: 2652 - protein, 36 aa, Artificial Sequence
  Non-cyclic GFR-binding peptide
  MOD_RES (1)..(3)..(36): Xaa is C or S
  MOD_RES (14)..(15)..(16)..(17)..(18): Xaa is A or G
  MOD_RES (19)..(20)..(21)..(22): Xaa is A or G or absent
XKXSKVIMQYNKLXXXXXXXXXLYLISIASLDQSVX

SEQ ID NO: 2653 - protein, 38 aa, Artificial Sequence
  Non-cyclic GFR-binding peptide
  MOD_RES (34)..(35): Xaa is C or S
  MOD_RES (12)..(13)..(14)..(15)..(16): Xaa is A or G
  MOD_RES (17)..(18)..(19)..(20): Xaa is A or G or absent
ARVVMNRHKRLXXXXXXXXXYYLVSTASLQTPAXXPKP

SEQ ID NO: 2654 - protein, 35 aa, Artificial Sequence
  Non-cyclic GFR-binding peptide
  MOD_RES (1)..(1): Xaa is C or S
  MOD_RES (14)..(15)..(16)..(17)..(18): Xaa is A or G
  MOD_RES (19)..(20)..(21)..(22): Xaa is A or G or absent
XEAVSMGERHKRLXXXXXXXXXYYLVSTASLKTPV

SEQ ID NO: 2655 - protein, 35 aa, Artificial Sequence
  Non-cyclic GFR-binding peptide
  MOD_RES (1)..(33)..(34): Xaa is C or S
XGEVVMDRHKRLVVKENEDYYLMSTASLETPVXXA

SEQ ID NO: 2656 - protein, 35 aa, Artificial Sequence
  Non-cyclic GFR-binding peptide
  MOD_RES (32)..(32): Xaa is C or S
SRVVMNQYNKLIVNSSDDLYLVSIASLKTPAXTPK

SEQ ID NO: 2657 - protein, 42 aa, Artificial Sequence
  Non-cyclic GFR-binding peptide
  MOD_RES (2)..(36): Xaa is C or S
  MOD_RES (14)..(15)..(16)..(17)..(18): Xaa is A or G
  MOD_RES (19)..(20)..(21)..(22): Xaa is A or G or absent
GXSRVVMNRHKRLXXXXXXXXXYYLVSTASLKTPAXTPKTVH

SEQ ID NO: 2658 - protein, 36 aa, Artificial Sequence
  Non-cyclic GFR-binding peptide
  MOD_RES (1)..(3)..(35): Xaa is C or S
XGXSRVVMNYHYKLIVNSSDDKYLVSIPSLKTPAXT

SEQ ID NO: 2659 - protein, 36 aa, Artificial Sequence
  Non-cyclic GFR-binding peptide
  MOD_RES (1)..(1): Xaa is C or S
XALHDELTYHYKLFIPKKRVIEKYLVSIPSLQVQTP

SEQ ID NO: 2660 - protein, 38 aa, Artificial Sequence
  Non-cyclic GFR-binding peptide
  MOD_RES (34)..(35): Xaa is C or S
  MOD_RES (12)..(13)..(14)..(15)..(16): Xaa is A or G
  MOD_RES (17)..(18)..(19)..(20): Xaa is A or G or absent
AKVVMNYHYKLXXXXXXXXXKYLVSIPSLKTPAXXAKP

SEQ ID NO: 2661 - protein, 38 aa, Artificial Sequence
  Non-cyclic GFR-binding peptide
  MOD_RES (1)..(33)..(34): Xaa is C or S
XSRVVMNYHYKLIVNSSDDKYLVSIPSLKTPAXXPKPV

SEQ ID NO: 2662 - protein, 38 aa, Artificial Sequence
  Non-cyclic GFR-binding peptide
  MOD_RES (2)..(4)..(37)..(38): Xaa is C or S
  MOD_RES (15)..(16)..(17)..(18)..(19): Xaa is A or G
  MOD_RES (20)..(21)..(22)..(23): Xaa is A or G or absent
SXKXSRVIMYHYKLXXXXXXXXXKYLISIPSLAQPVXX

SEQ ID NO: 2663 - protein, 36 aa, Artificial Sequence
  Non-cyclic GFR-binding peptide
  MOD_RES (2)..(4): Xaa is C or S
  MOD_RES (15)..(16)..(17)..(18)..(19): Xaa is A or G
  MOD_RES (20)..(21)..(22)..(23): Xaa is A or G or absent
SXKXSKVVMRHKRLXXXXXXXXXYYLISTASLDQPV

SEQ ID NO: 2664 - protein, 32 aa, Artificial Sequence
  Non-cyclic GFR-binding peptide
  MOD_RES (31)..(32): Xaa is C or S
EVVMDYHYKLVVKENEDKYLMSIPSLETPVXX

SEQ ID NO: 2665 - protein, 36 aa, Artificial Sequence
  Non-cyclic GFR-binding peptide
  MOD_RES (32)..(33): Xaa is C or S
AKVVMNRYKKLIVNNSSDFYLVSIANLKTPAXXAKP

SEQ ID NO: 2666 - protein, 43 aa, Artificial Sequence
  Non-cyclic GFR-binding peptide
  MOD_RES (1)..(3)..(38)..(39): Xaa is C or S
  MOD_RES (16)..(17)..(18)..(19)..(20): Xaa is A or G
  MOD_RES (21)..(22)..(23)..(24): Xaa is A or G or absent
XGXEAVSMGERYKKLXXXXXXXXXFYLVSIANLKTPVXXAKGV

SEQ ID NO: 2667 - protein, 34 aa, Artificial Sequence
  Non-cyclic GFR-binding peptide
  MOD_RES (2)..(4): Xaa is C or S
SXKXSKVVMQYNKLVKPTRGVLYLISIASLDQPV

SEQ ID NO: 2668 - protein, 36 aa, Artificial Sequence
  Non-cyclic GFR-binding peptide
  MOD_RES (2)..(35)..(36): Xaa is C or S
  MOD_RES (13)..(14)..(15)..(16)..(17): Xaa is A or G
  MOD_RES (18)..(19)..(20)..(21): Xaa is A or G or absent
KXSKVVMRHKRLXXXXXXXXXYYLISTASLDQPVXX

SEQ ID NO: 2669 - protein, 35 aa, Artificial Sequence
  Non-cyclic GFR-binding peptide
  MOD_RES (33)..(34): Xaa is C or S
  MOD_RES (11)..(12)..(13)..(14)..(15): Xaa is A or G
  MOD_RES (16)..(17)..(18)..(19): Xaa is A or G or absent
EVVMEYHYKLXXXXXXXXXKYLMSIPSLETPVXXA

SEQ ID NO: 2670 - protein, 39 aa, Artificial Sequence
  Non-cyclic GFR-binding peptide
  MOD_RES (1)..(38): Xaa is C or S
  MOD_RES (14)..(15)..(16)..(17)..(18): Xaa is A or G
  MOD_RES (19)..(20)..(21)..(22): Xaa is A or G or absent
XALHDELTRHKRLXXXXXXXXXYYLVSTASLQVQTPRXQ

SEQ ID NO: 2671 - protein, 34 aa, Artificial Sequence
  Non-cyclic GFR-binding peptide
  MOD_RES (2)..(33)..(34): Xaa is C or S
KXSKVIMYHYKLIKPTKGIKYLISIPSLDQSVXX

SEQ ID NO: 2672 - protein, 30 aa, Artificial Sequence
  Non-cyclic GFR-binding peptide
SKVVMRYKKLVKPTRGVFYLISIANLDQPV

SEQ ID NO: 2673 - protein, 35 aa, Artificial Sequence
  Non-cyclic GFR-binding peptide
  MOD_RES (33)..(33): Xaa is C or S
  MOD_RES (11)..(12)..(13)..(14)..(15): Xaa is A or G
  MOD_RES (16)..(17)..(18)..(19): Xaa is A or G or absent
RVVMNRHKRLXXXXXXXXXYYLVSTASLKTPAXTP

SEQ ID NO: 2674 - protein, 37 aa, Artificial Sequence
  Non-cyclic GFR-binding peptide
  MOD_RES (34)..(35): Xaa is C or S
  MOD_RES (12)..(13)..(14)..(15)..(16): Xaa is A or G
  MOD_RES (17)..(18)..(19)..(20): Xaa is A or G or absent
GEVVMDRHKRLXXXXXXXXXYYLMSTASLETPVXXAK

SEQ ID NO: 2675 - protein, 37 aa, Artificial Sequence
  Non-cyclic GFR-binding peptide
  MOD_RES (33)..(34): Xaa is C or S
  MOD_RES (11)..(12)..(13)..(14)..(15): Xaa is A or G
  MOD_RES (16)..(17)..(18)..(19): Xaa is A or G or absent
RVVMNRHKRLXXXXXXXXXYYLVSTASLQTPAXXPKP

SEQ ID NO: 2676 - protein, 37 aa, Artificial Sequence
  Non-cyclic GFR-binding peptide
  MOD_RES (1)..(3)..(36)..(37): Xaa is C or S
  MOD_RES (14)..(15)..(16)..(17)..(18): Xaa is A or G
  MOD_RES (19)..(20)..(21)..(22): Xaa is A or G or absent
XKXSRVIMYHYKLXXXXXXXXXKYLISIPSLAQPVXX

SEQ ID NO: 2677 - protein, 30 aa, Artificial Sequence; identical to SEQ ID NO: 1903
  Non-cyclic GFR-binding peptide

SEQ ID NO: 2678 - protein, 33 aa, Artificial Sequence
  Non-cyclic GFR-binding peptide
  MOD_RES (33)..(33): Xaa is C or S
  MOD_RES (11)..(12)..(13)..(14)..(15): Xaa is A or G
  MOD_RES (16)..(17)..(18)..(19): Xaa is A or G or absent
SRVIMRHKRLXXXXXXXXXYYLISTASLAQPVX

SEQ ID NO: 2679 - protein, 32 aa, Artificial Sequence
  Non-cyclic GFR-binding peptide
  MOD_RES (11)..(12)..(13)..(14)..(15): Xaa is A or G
  MOD_RES (16)..(17)..(18)..(19): Xaa is A or G or absent
HDELTRYKKLXXXXXXXXXFYLVSIANLQVQT

SEQ ID NO: 2680 - protein, 32 aa, Artificial Sequence
  Non-cyclic GFR-binding peptide
  MOD_RES (11)..(12)..(13)..(14)..(15): Xaa is A or G
  MOD_RES (16)..(17)..(18)..(19): Xaa is A or G or absent
RVVMNRHKRLXXXXXXXXXYYLVSTASLQTPA

SEQ ID NO: 2681 - protein, 34 aa, Artificial Sequence
  Non-cyclic GFR-binding peptide
  MOD_RES (1)..(34): Xaa is C or S
XEAVSMGEQYNKLTPVGMDDLYLVSIASLKTPVX

SEQ ID NO: 2682 - protein, 37 aa, Artificial Sequence
  Non-cyclic GFR-binding peptide
  MOD_RES (33)..(34): Xaa is C or S
  MOD_RES (11)..(12)..(13)..(14)..(15): Xaa is A or G
  MOD_RES (16)..(17)..(18)..(19): Xaa is A or G or absent
KVVMNYHYKLXXXXXXXXXKYLVSIPSLKTPAXXAKP

SEQ ID NO: 2683 - protein, 34 aa, Artificial Sequence
  Non-cyclic GFR-binding peptide
  MOD_RES (31)..(31): Xaa is C or S
RVVMNYHYKLIVNSSDDKYLVSIPSLKTPAXTPK

SEQ ID NO: 2684 - protein, 39 aa, Artificial Sequence
  Non-cyclic GFR-binding peptide
  MOD_RES (1)..(3)..(37)..(38): Xaa is C or S
  MOD_RES (15)..(16)..(17)..(18)..(19): Xaa is A or G
  MOD_RES (20)..(21)..(22)..(23): Xaa is A or G or absent
XGXAKVVMNQYNKLXXXXXXXXXLYLVSIASLKTPAXXA

SEQ ID NO: 2685 - protein, 40 aa, Artificial Sequence
  Non-cyclic GFR-binding peptide
  MOD_RES (2)..(4)..(38)..(39): Xaa is C or S
  MOD_RES (16)..(17)..(18)..(19)..(20): Xaa is A or G
  MOD_RES (21)..(22)..(23)..(24): Xaa is A or G or absent
HXGXSRVVMNRHKRLXXXXXXXXXYYLVSTASLKTPAXXP

SEQ ID NO: 2686 - protein, 35 aa, Artificial Sequence
  Non-cyclic GFR-binding peptide
  MOD_RES (2)..(35): Xaa is C or S
  MOD_RES (13)..(14)..(15)..(16)..(17): Xaa is A or G
  MOD_RES (18)..(19)..(20)..(21): Xaa is A or G or absent
KXSKVIMRHKRLXXXXXXXXXYYLISTASLDQSVX

SEQ ID NO: 2687 - protein, 37 aa, Artificial Sequence
  Non-cyclic GFR-binding peptide
  MOD_RES (1)..(35)..(36): Xaa is C or S
  MOD_RES (13)..(14)..(15)..(16)..(17): Xaa is A or G
  MOD_RES (18)..(19)..(20)..(21): Xaa is A or G or absent
XGEVVMDRHKRLXXXXXXXXXYYLMSTASLETPVXXA

SEQ ID NO: 2688 - protein, 44 aa, Artificial Sequence
  Non-cyclic GFR-binding peptide
  MOD_RES (1)..(3)..(40): Xaa is C or S
XKXALHDELTRYKKLFIPKKRVIEFYLVSIANLQVQTPRXQVNR

SEQ ID NO: 2689 - protein, 39 aa, Artificial Sequence
  Non-cyclic GFR-binding peptide
  MOD_RES (2)..(4)..(37)..(38): Xaa is C or S
  MOD_RES (15)..(16)..(17)..(18)..(19): Xaa is A or G
  MOD_RES (20)..(21)..(22)..(23): Xaa is A or G or absent
SXKXSKVIMYHYKLXXXXXXXXXKYLISIPSLDQSVXXP

SEQ ID NO: 2690 - protein, 42 aa, Artificial Sequence
  Non-cyclic GFR-binding peptide
  MOD_RES (2)..(4)..(38)..(39): Xaa is C or S
  MOD_RES (16)..(17)..(18)..(19)..(20): Xaa is A or G
  MOD_RES (21)..(22)..(23)..(24): Xaa is A or G or absent
HXGXSRVVMNRHKRLXXXXXXXXXYYLVSTASLKTPAXXPKP

SEQ ID NO: 2691 - protein, 39 aa, Artificial Sequence
  Non-cyclic GFR-binding peptide
  MOD_RES (1)..(3)..(35): Xaa is C or S
XGXSRVVMNRHKRLIVNSSDDYYLVSTASLKTPAXTPKT

SEQ ID NO: 2692 - protein, 36 aa, Artificial Sequence
  Non-cyclic GFR-binding peptide
  MOD_RES (2)..(35)..(36): Xaa is C or S
  MOD_RES (13)..(14)..(15)..(16)..(17): Xaa is A or G
  MOD_RES (18)..(19)..(20)..(21): Xaa is A or G or absent
KXSKVIMQYNKLXXXXXXXXXLYLISIASLDQSVXX

SEQ ID NO: 2693 - protein, 41 aa, Artificial Sequence
  Non-cyclic GFR-binding peptide
  MOD_RES (1)..(38): Xaa is C or S
XALHDELTRHKRLFIPKKRVIEYYLVSTASLQVQTPRXQVN

SEQ ID NO: 2694 - protein, 34 aa, Artificial Sequence
  Non-cyclic GFR-binding peptide
  MOD_RES (34)..(34): Xaa is C or S
  MOD_RES (12)..(13)..(14)..(15)..(16): Xaa is A or G
  MOD_RES (17)..(18)..(19)..(20): Xaa is A or G or absent
SRVVMNRHKRLXXXXXXXXXYYLVSTASLKTPAX

SEQ ID NO: 2695 - protein, 36 aa, Artificial Sequence
  Non-cyclic GFR-binding peptide
  MOD_RES (1)..(3)..(35)..(36): Xaa is C or S
XGXARVVMNYHYKLIVNSSDDKYLVSIPSLQTPAXX

SEQ ID NO: 2696 - protein, 38 aa, Artificial Sequence
  Non-cyclic GFR-binding peptide
  MOD_RES (2)..(2): Xaa is C or S
  MOD_RES (15)..(16)..(17)..(18)..(19): Xaa is A or G
  MOD_RES (20)..(21)..(22)..(23): Xaa is A or G or absent
KXALHDELTRHKRLXXXXXXXXXYYLVSTASLQVQTPR

SEQ ID NO: 2697 - protein, 36 aa, Artificial Sequence
  Non-cyclic GFR-binding peptide
  MOD_RES (2)..(34)..(35): Xaa is C or S
GXSRVVMNQYNKLIVNSSDDLYLVSIASLKTPAXXP

SEQ ID NO: 2698 - protein, 39 aa, Artificial Sequence
  Non-cyclic GFR-binding peptide
  MOD_RES (2)..(4)..(35)..(36): Xaa is C or S
SXKXSRVIMRHKRLVKPKRGVYYLISTASLAQPVXXPAA

SEQ ID NO: 2699 - protein, 30 aa, Artificial Sequence
  Non-cyclic GFR-binding peptide
RVVMNQYNKLIVNSSDDLYLVSIASLKTPA

SEQ ID NO: 2700 - protein, 33 aa, Artificial Sequence
  Non-cyclic GFR-binding peptide
  MOD_RES (32)..(33): Xaa is C or S
ARVVMNQYNKLIVNSSDDLYLVSIASLQTPAXX

SEQ ID NO: 2701 - protein, 38 aa, Artificial Sequence
  Non-cyclic GFR-binding peptide
  MOD_RES (1)..(33)..(34): Xaa is C or S
XGEVVMERHKRLVVKDYEDYYLMSTASLETPVXXAKPI

SEQ ID NO: 2702 - protein, 31 aa, Artificial Sequence
  Non-cyclic GFR-binding peptide
  MOD_RES (31)..(31): Xaa is C or S
KVVMNQYNKLIVNNSSDLYLVSIASLKTPAX

SEQ ID NO: 2703 - protein, 41 aa, Artificial Sequence
  Non-cyclic GFR-binding peptide
  MOD_RES (1)..(3)..(36)..(37): Xaa is C or S
XGXEAVSMGERHKRLTPVGMDDYYLVSTASLKTPVXXAKGV

SEQ ID NO: 2704 - protein, 35 aa, Artificial Sequence
  Non-cyclic GFR-binding peptide
  MOD_RES (1)..(33)..(34): Xaa is C or S
XAKVVMNRYKKLIVNNSSDFYLVSIANLKTPAXXA

SEQ ID NO: 2705 - protein, 31 aa, Artificial Sequence
  Non-cyclic GFR-binding peptide
  MOD_RES (1)..(1): Xaa is C or S
XSKVVMRYKKLVKPTRGVFYLISIANLDQPV

SEQ ID NO: 2706 - protein, 39 aa, Artificial Sequence
  Non-cyclic GFR-binding peptide
  MOD_RES (1)..(34)..(35): Xaa is C or S
  MOD_RES (12)..(13)..(14)..(15)..(16): Xaa is A or G
  MOD_RES (17)..(18)..(19)..(20): Xaa is A or G or absent
XSRVIMQYNKLXXXXXXXXXLYLISIASLAQPVXXPAAS

SEQ ID NO: 2707 - protein, 36 aa, Artificial Sequence
  Non-cyclic GFR-binding peptide
  MOD_RES (1)..(3)..(34)..(35): Xaa is C or S
XKXSRVIMRHKRLVKPKRGVYYLISTASLAQPVXXP

SEQ ID NO: 2708 - protein, 33 aa, Artificial Sequence
  Non-cyclic GFR-binding peptide
  MOD_RES (33)..(33): Xaa is C or S
  MOD_RES (11)..(12)..(13)..(14)..(15): Xaa is A or G
  MOD_RES (16)..(17)..(18)..(19): Xaa is A or G or absent
EVVMERHKRLXXXXXXXXXYYLMSTASLETPVX

SEQ ID NO: 2709 - protein, 39 aa, Artificial Sequence
  Non-cyclic GFR-binding peptide
  MOD_RES (33)..(34): Xaa is C or S
EAVSMGERHKRLTPVGMDDYYLVSTASLKTPVXXAKGVK

SEQ ID NO: 2710 - protein, 41 aa, Artificial Sequence
  Non-cyclic GFR-binding peptide
  MOD_RES (2)..(4)..(37)..(38): Xaa is C or S
  MOD_RES (15)..(16)..(17)..(18)..(19): Xaa is A or G
  MOD_RES (20)..(21)..(22)..(23): Xaa is A or G or absent
SXKXSKVIMRYKKLXXXXXXXXXFYLISIANLDQSVXXPSA

SEQ ID NO: 2711 - protein, 39 aa, Artificial Sequence
  Non-cyclic GFR-binding peptide
  MOD_RES (2)..(4)..(35)..(36): Xaa is C or S
SXKXSRVIMYHYKLVKPKRGVKYLISIPSLAQPVXXPAA

SEQ ID NO: 2712 - protein, 39 aa, Artificial Sequence
  Non-cyclic GFR-binding peptide
  MOD_RES (33)..(34): Xaa is C or S
  MOD_RES (11)..(12)..(13)..(14)..(15): Xaa is A or G
  MOD_RES (16)..(17)..(18)..(19): Xaa is A or G or absent
RVVMNQYNKLXXXXXXXXXLYLVSIASLKTPAXXPKPVY

SEQ ID NO: 2713 - protein, 37 aa, Artificial Sequence
  Non-cyclic GFR-binding peptide
  MOD_RES (2)..(35)..(36): Xaa is C or S
GXEAVSMGERYKKLTPVGMDDFYLVSIANLKTPVXXA

SEQ ID NO: 2714 - protein, 40 aa, Artificial Sequence
  Non-cyclic GFR-binding peptide
  MOD_RES (1)..(3)..(37)..(38): Xaa is C or S
  MOD_RES (15)..(16)..(17)..(18)..(19): Xaa is A or G
  MOD_RES (20)..(21)..(22)..(23): Xaa is A or G or absent
XGXAKVVMNYHYKLXXXXXXXXXKYLVSIPSLKTPAXXAK

SEQ ID NO: 2715 - protein, 43 aa, Artificial Sequence
  Non-cyclic GFR-binding peptide
  MOD_RES (1)..(3)..(40): Xaa is C or S
  MOD_RES (16)..(17)..(18)..(19)..(20): Xaa is A or G
  MOD_RES (21)..(22)..(23)..(24): Xaa is A or G or absent
XKXALHDELTYHYKLXXXXXXXXXKYLVSIPSLQVQTPRXQVN

SEQ ID NO: 2716 - protein, 37 aa, Artificial Sequence
  Non-cyclic GFR-binding peptide
  MOD_RES (1)..(35)..(36): Xaa is C or S
  MOD_RES (13)..(14)..(15)..(16)..(17): Xaa is A or G
  MOD_RES (18)..(19)..(20)..(21): Xaa is A or G or absent
XGEVVMEYHYKLXXXXXXXXXKYLMSIPSLETPVXXA

SEQ ID NO: 2717 - protein, 36 aa, Artificial Sequence
  Non-cyclic GFR-binding peptide
  MOD_RES (2)..(2): Xaa is C or S
  MOD_RES (15)..(16)..(17)..(18)..(19): Xaa is A or G
  MOD_RES (20)..(21)..(22)..(23): Xaa is A or G or absent
KXALHDELTYHYKLXXXXXXXXXKYLVSIPSLQVQT

SEQ ID NO: 2718 - protein, 40 aa, Artificial Sequence
  Non-cyclic GFR-binding peptide
  MOD_RES (1)..(3)..(37): Xaa is C or S
  MOD_RES (15)..(16)..(17)..(18)..(19): Xaa is A or G
  MOD_RES (20)..(21)..(22)..(23): Xaa is A or G or absent
XGXSRVVMNYHYKLXXXXXXXXXKYLVSIPSLKTPAXTPK

SEQ ID NO: 2719 - protein, 37 aa, Artificial Sequence
  Non-cyclic GFR-binding peptide
  MOD_RES (2)..(2): Xaa is C or S
  MOD_RES (15)..(16)..(17)..(18)..(19): Xaa is A or G
  MOD_RES (20)..(21)..(22)..(23): Xaa is A or G or absent
KXALHDELTRYKKLXXXXXXXXXFYLVSIANLQVQTP

SEQ ID NO: 2720 - protein, 37 aa, Artificial Sequence
  Non-cyclic GFR-binding peptide
  MOD_RES (2)..(4): Xaa is C or S
  MOD_RES (16)..(17)..(18)..(19)..(20): Xaa is A or G
  MOD_RES (21)..(22)..(23)..(24): Xaa is A or G or absent
HXGXSRVVMNRHKRLXXXXXXXXXYYLVSTASLKTPA

SEQ ID NO: 2721 - protein, 41 aa, Artificial Sequence
  Non-cyclic GFR-binding peptide
  MOD_RES (1)..(3)..(35)..(36): Xaa is C or S
XGXAKVVMNYHYKLIVNNSSDKYLVSIPSLKTPAXXAKPVA

SEQ ID NO: 2722 - protein, 40 aa, Artificial Sequence
  Non-cyclic GFR-binding peptide
  MOD_RES (1)..(34)..(35): Xaa is C or S
  MOD_RES (12)..(13)..(14)..(15)..(16): Xaa is A or G
  MOD_RES (17)..(18)..(19)..(20): Xaa is A or G or absent
XSKVVMRYKKLXXXXXXXXXFYLISIANLDQPVXXPSASA

SEQ ID NO: 2723 - protein, 36 aa, Artificial Sequence
  Non-cyclic GFR-binding peptide
  MOD_RES (1)..(1): Xaa is C or S
XALHDELTQYNKLFIPKKRVIELYLVSIASLQVQTP

SEQ ID NO: 2724 - protein, 32 aa, Artificial Sequence
  Non-cyclic GFR-binding peptide
  MOD_RES (11)..(12)..(13)..(14)..(15): Xaa is A or G
  MOD_RES (16)..(17)..(18)..(19): Xaa is A or G or absent
RVVMNQYNKLXXXXXXXXXLYLVSIASLKTPA

SEQ ID NO: 2725 - protein, 37 aa, Artificial Sequence
  Non-cyclic GFR-binding peptide
  MOD_RES (1)..(33)..(34): Xaa is C or S
XGEVVMDRHKRLVVKENEDYYLMSTASLETPVXXAKP

SEQ ID NO: 2726 - protein, 44 aa, Artificial Sequence
  Non-cyclic GFR-binding peptide
  MOD_RES (2)..(4)..(38)..(39): Xaa is C or S
  MOD_RES (16)..(17)..(18)..(19)..(20): Xaa is A or G
  MOD_RES (21)..(22)..(23)..(24): Xaa is A or G or absent
RXGXGEVVMEYHYKLXXXXXXXXXKYLMSIPSLETPVXXAKPIS

SEQ ID NO: 2727 - protein, 33 aa, Artificial Sequence
  Non-cyclic GFR-binding peptide
  MOD_RES (1)..(3): Xaa is C or S
XKXSKVIMRHKRLIKPTKGIYYLISTASLDQSV

SEQ ID NO: 2728 - protein, 40 aa, Artificial Sequence
  Non-cyclic GFR-binding peptide
  MOD_RES (2)..(4)..(35)..(36): Xaa is C or S
SXKXSKVVMRHKRLVKPTRGVYYLISTASLDQPVXXPSAS

SEQ ID NO: 2729 - protein, 35 aa, Artificial Sequence
  Non-cyclic GFR-binding peptide
  MOD_RES (2)..(35): Xaa is C or S
  MOD_RES (13)..(14)..(15)..(16)..(17): Xaa is A or G
  MOD_RES (18)..(19)..(20)..(21): Xaa is A or G or absent
KXSRVIMYHYKLXXXXXXXXXKYLISIPSLAQPVX

SEQ ID NO: 2730 - protein, 44 aa, Artificial Sequence
  Non-cyclic GFR-binding peptide
  MOD_RES (2)..(4)..(41): Xaa is C or S
  MOD_RES (17)..(18)..(19)..(20)..(21): Xaa is A or G
  MOD_RES (22)..(23)..(24)..(25): Xaa is A or G or absent
EXKXALHDELTQYNKLXXXXXXXXXLYLVSIASLQVQTPRXQVN

SEQ ID NO: 2731 - protein, 37 aa, Artificial Sequence
  Non-cyclic GFR-binding peptide
  MOD_RES (1)..(34)..(35): Xaa is C or S
  MOD_RES (12)..(13)..(14)..(15)..(16): Xaa is A or G
  MOD_RES (17)..(18)..(19)..(20): Xaa is A or G or absent
XSRVIMRYKKLXXXXXXXXXFYLISIANLAQPVXXPA

SEQ ID NO: 2732 - protein, 34 aa, Artificial Sequence
  Non-cyclic GFR-binding peptide
  MOD_RES (2)..(33)..(34): Xaa is C or S
KXSKVVMYHYKLVKPTRGVKYLISIPSLDQPVXX

SEQ ID NO: 2733 - protein, 39 aa, Artificial Sequence
  Non-cyclic GFR-binding peptide
  MOD_RES (1)..(38): Xaa is C or S
XALHDELTRHKRLFIPKKRVIEYYLVSTASLQVQTPRXQ

SEQ ID NO: 2734 - protein, 42 aa, Artificial Sequence
  Non-cyclic GFR-binding peptide
  MOD_RES (2)..(37)..(38): Xaa is C or S
  MOD_RES (15)..(16)..(17)..(18)..(19): Xaa is A or G
  MOD_RES (20)..(21)..(22)..(23): Xaa is A or G or absent
GXEAVSMGERHKRLXXXXXXXXXYYLVSTASLKTPVXXAKGV

SEQ ID NO: 2735 - protein, 33 aa, Artificial Sequence
  Non-cyclic GFR-binding peptide
  MOD_RES (32)..(33): Xaa is C or S
SRVVMNRHKRLIVNSSDDYYLVSTASLKTPAXX

SEQ ID NO: 2736 - protein, 41 aa, Artificial Sequence
  Non-cyclic GFR-binding peptide
  MOD_RES (37)..(37): Xaa is C or S
ALHDELTYHYKLFIPKKRVIEKYLVSIPSLQVQTPRXQVNR

SEQ ID NO: 2737 - protein, 35 aa, Artificial Sequence
  Non-cyclic GFR-binding peptide
  MOD_RES (33)..(34): Xaa is C or S
  MOD_RES (11)..(12)..(13)..(14)..(15): Xaa is A or G
  MOD_RES (16)..(17)..(18)..(19): Xaa is A or G or absent
SKVVMRYKKLXXXXXXXXXFYLISIANLDQPVXXP

SEQ ID NO: 2738 - protein, 35 aa, Artificial Sequence
  Non-cyclic GFR-binding peptide
  MOD_RES (2)..(4)..(35): Xaa is C or S
SXKXSKVIMYHYKLIKPTKGIKYLISIPSLDQSVX

SEQ ID NO: 2739 - protein, 37 aa, Artificial Sequence
  Non-cyclic GFR-binding peptide
  MOD_RES (1)..(3)..(34)..(35): Xaa is C or S
XKXSRVIMQYNKLVKPKRGVLYLISIASLAQPVXXPA

SEQ ID NO: 2740 - protein, 36 aa, Artificial Sequence
  Non-cyclic GFR-binding peptide
  MOD_RES (32)..(33): Xaa is C or S
GEVVMDRYKKLVVKENEDFYLMSIANLETPVXXAKP

SEQ ID NO: 2741 - protein, 39 aa, Artificial Sequence
  Non-cyclic GFR-binding peptide
  MOD_RES (37)..(37): Xaa is C or S
  MOD_RES (13)..(14)..(15)..(16)..(17): Xaa is A or G
  MOD_RES (18)..(19)..(20)..(21): Xaa is A or G or absent
ALHDELTRYKKLXXXXXXXXXFYLVSIANLQVQTPRXQV

SEQ ID NO: 2742 - protein, 32 aa, Artificial Sequence
  Non-cyclic GFR-binding peptide
  MOD_RES (31)..(32): Xaa is C or S
SKVVMQYNKLVKPTRGVLYLISIASLDQPVXX

SEQ ID NO: 2743 - protein, 43 aa, Artificial Sequence
  Non-cyclic GFR-binding peptide
  MOD_RES (2)..(4)..(38)..(39): Xaa is C or S
  MOD_RES (16)..(17)..(18)..(19)..(20): Xaa is A or G
  MOD_RES (21)..(22)..(23)..(24): Xaa is A or G or absent
HXGXAKVVMNRYKKLXXXXXXXXXFYLVSIANLKTPAXXAKPV

SEQ ID NO: 2744 - protein, 34 aa, Artificial Sequence
  Non-cyclic GFR-binding peptide
  MOD_RES (31)..(32): Xaa is C or S
RVVMNRHKRLIVNSSDDYYLVSTASLKTPAXXPK

SEQ ID NO: 2745 - protein, 33 aa, Artificial Sequence
  Non-cyclic GFR-binding peptide
  MOD_RES (1)..(33): Xaa is C or S
XSRVVMNRHKRLIVNSSDDYYLVSTASLKTPAX

SEQ ID NO: 2746 - protein, 39 aa, Artificial Sequence
  Non-cyclic GFR-binding peptide
  MOD_RES (1)..(33)..(34): Xaa is C or S
XAKVVMNYHYKLIVNNSSDKYLVSIPSLKTPAXXAKPVA

SEQ ID NO: 2747 - protein, 42 aa, Artificial Sequence
  Non-cyclic GFR-binding peptide
  MOD_RES (1)..(3)..(37)..(38): Xaa is C or S
  MOD_RES (15)..(16)..(17)..(18)..(19): Xaa is A or G
  MOD_RES (20)..(21)..(22)..(23): Xaa is A or G or absent
XGXAKVVMNYHYKLXXXXXXXXXKYLVSIPSLKTPAXXAKPV

SEQ ID NO: 2748 - protein, 40 aa, Artificial Sequence
  Non-cyclic GFR-binding peptide
  MOD_RES (2)..(4)..(37)..(38): Xaa is C or S
  MOD_RES (15)..(16)..(17)..(18)..(19): Xaa is A or G
  MOD_RES (20)..(21)..(22)..(23): Xaa is A or G or absent
SXKXSRVIMYHYKLXXXXXXXXXKYLISIPSLAQPVXXPA

SEQ ID NO: 2749 - protein, 37 aa, Artificial Sequence
  Non-cyclic GFR-binding peptide
  MOD_RES (33)..(34): Xaa is C or S
EAVSMGERYKKLTPVGMDDFYLVSIANLKTPVXXAKG

SEQ ID NO: 2750 - protein, 34 aa, Artificial Sequence
  Non-cyclic GFR-binding peptide
  MOD_RES (1)..(33)..(34): Xaa is C or S
XAKVVMNYHYKLIVNNSSDKYLVSIPSLKTPAXX

SEQ ID NO: 2751 - protein, 36 aa, Artificial Sequence
  Non-cyclic GFR-binding peptide
  MOD_RES (2)..(33)..(34): Xaa is C or S
KXSKVIMYHYKLIKPTKGIKYLISIPSLDQSVXXPS

SEQ ID NO: 2752 - protein, 41 aa, Artificial Sequence
  Non-cyclic GFR-binding peptide
  MOD_RES (1)..(3)..(37): Xaa is C or S
  MOD_RES (15)..(16)..(17)..(18)..(19): Xaa is A or G
  MOD_RES (20)..(21)..(22)..(23): Xaa is A or G or absent
XGXSRVVMNYHYKLXXXXXXXXXKYLVSIPSLKTPAXTPKT

SEQ ID NO: 2753 - protein, 36 aa, Artificial Sequence
  Non-cyclic GFR-binding peptide
  MOD_RES (1)..(33): Xaa is C or S
XSRVVMNYHYKLIVNSSDDKYLVSIPSLKTPAXTPK

SEQ ID NO: 2754 - protein, 40 aa, Artificial Sequence
  Non-cyclic GFR-binding peptide
  MOD_RES (1)..(35)..(36): Xaa is C or S
  MOD_RES (13)..(14)..(15)..(16)..(17): Xaa is A or G
  MOD_RES (18)..(19)..(20)..(21): Xaa is A or G or absent
XGEVVMERYKKLXXXXXXXXXFYLMSIANLETPVXXAKPI

SEQ ID NO: 2755 - protein, 35 aa, Artificial Sequence
  Non-cyclic GFR-binding peptide
  MOD_RES (32)..(33): Xaa is C or S
GEVVMDRYKKLVVKENEDFYLMSIANLETPVXXAK

SEQ ID NO: 2756 - protein, 36 aa, Artificial Sequence
  Non-cyclic GFR-binding peptide
  MOD_RES (2)..(36): Xaa is C or S
  MOD_RES (14)..(15)..(16)..(17)..(18): Xaa is A or G
  MOD_RES (19)..(20)..(21)..(22): Xaa is A or G or absent
GXGEVVMERYKKLXXXXXXXXXFYLMSIANLETPVX

SEQ ID NO: 2757 - protein, 33 aa, Artificial Sequence
  Non-cyclic GFR-binding peptide
  MOD_RES (1)..(1): Xaa is C or S
  MOD_RES (12)..(13)..(14)..(15)..(16): Xaa is A or G
  MOD_RES (17)..(18)..(19)..(20): Xaa is A or G or absent
XSRVIMRYKKLXXXXXXXXXFYLISIANLAQPV

SEQ ID NO: 2758 - protein, 34 aa, Artificial Sequence
  Non-cyclic GFR-binding peptide
  MOD_RES (33)..(34): Xaa is C or S
  MOD_RES (11)..(12)..(13)..(14)..(15): Xaa is A or G
  MOD_RES (16)..(17)..(18)..(19): Xaa is A or G or absent
RVVMNRHKRLXXXXXXXXXYYLVSTASLQTPAXX

SEQ ID NO: 2759 - protein, 34 aa, Artificial Sequence
  Non-cyclic GFR-binding peptide
  MOD_RES (34)..(34): Xaa is C or S
  MOD_RES (12)..(13)..(14)..(15)..(16): Xaa is A or G
  MOD_RES (17)..(18)..(19)..(20): Xaa is A or G or absent
ARVVMNQYNKLXXXXXXXXXLYLVSIASLQTPAX

SEQ ID NO: 2760 - protein, 39 aa, Artificial Sequence
  Non-cyclic GFR-binding peptide
  MOD_RES (2)..(4)..(38): Xaa is C or S
  MOD_RES (16)..(17)..(18)..(19)..(20): Xaa is A or G
  MOD_RES (21)..(22)..(23)..(24): Xaa is A or G or absent
HXGXSRVVMNRHKRLXXXXXXXXXYYLVSTASLKTPAXT

SEQ ID NO: 2761 - protein, 34 aa, Artificial Sequence
  Non-cyclic GFR-binding peptide
  MOD_RES (1)..(3)..(34): Xaa is C or S
XKXSKVVMRHKRLVKPTRGVYYLISTASLDQPVX

SEQ ID NO: 2762 - protein, 38 aa, Artificial Sequence
  Non-cyclic GFR-binding peptide
  MOD_RES (2)..(36)..(37): Xaa is C or S
  MOD_RES (14)..(15)..(16)..(17)..(18): Xaa is A or G
  MOD_RES (19)..(20)..(21)..(22): Xaa is A or G or absent
GXSRVVMNQYNKLXXXXXXXXXLYLVSIASLKTPAXXP

SEQ ID NO: 2763 - protein, 36 aa, Artificial Sequence
  Non-cyclic GFR-binding peptide
  MOD_RES (2)..(4)..(36): Xaa is C or S
HXGXSRVVMNRHKRLIVNSSDDYYLVSTASLKTPAX

SEQ ID NO: 2764 - protein, 33 aa, Artificial Sequence
  Non-cyclic GFR-binding peptide
  MOD_RES (32)..(33): Xaa is C or S
GEVVMDRYKKLVVKENEDFYLMSIANLETPVXX

SEQ ID NO: 2765 - protein, 32 aa, Artificial Sequence
  Non-cyclic GFR-binding peptide
  MOD_RES (11)..(12)..(13)..(14)..(15): Xaa is A or G
  MOD_RES (16)..(17)..(18)..(19): Xaa is A or G or absent
RVVMNRHKRLXXXXXXXXXYYLVSTASLKTPA

SEQ ID NO: 2766 - protein, 36 aa, Artificial Sequence
  Non-cyclic GFR-binding peptide
  MOD_RES (1)..(3)..(34)..(35): Xaa is C or S
XKXSKVIMYHYKLIKPTKGIKYLISIPSLDQSVXXP

SEQ ID NO: 2767 - protein, 39 aa, Artificial Sequence
  Non-cyclic GFR-binding peptide
  MOD_RES (33)..(34): Xaa is C or S
  MOD_RES (11)..(12)..(13)..(14)..(15): Xaa is A or G
  MOD_RES (16)..(17)..(18)..(19): Xaa is A or G or absent
EVVMDYHYKLXXXXXXXXXKYLMSIPSLETPVXXAKPIK

SEQ ID NO: 2768 - protein, 33 aa, Artificial Sequence
  Non-cyclic GFR-binding peptide
  MOD_RES (31)..(32): Xaa is C or S
SKVVMYHYKLVKPTRGVKYLISIPSLDQPVXXP

SEQ ID NO: 2769 - protein, 40 aa, Artificial Sequence
  Non-cyclic GFR-binding peptide
  MOD_RES (1)..(35)..(36): Xaa is C or S
  MOD_RES (13)..(14)..(15)..(16)..(17): Xaa is A or G
  MOD_RES (18)..(19)..(20)..(21): Xaa is A or G or absent
XGEVVMDYHYKLXXXXXXXXXKYLMSIPSLETPVXXAKPI

SEQ ID NO: 2770 - protein, 32 aa, Artificial Sequence
  Non-cyclic GFR-binding peptide
  MOD_RES (1)..(32): Xaa is C or S
XSKVIMRHKRLIKPTKGIYYLISTASLDQSVX

SEQ ID NO: 2771 - protein, 32 aa, Artificial Sequence
  Non-cyclic GFR-binding peptide
  MOD_RES (31)..(32): Xaa is C or S
SKVVMYHYKLVKPTRGVKYLISIPSLDQPVXX

SEQ ID NO: 2772 - protein, 39 aa, Artificial Sequence
  Non-cyclic GFR-binding peptide
  MOD_RES (2)..(4)..(37)..(38): Xaa is C or S
  MOD_RES (15)..(16)..(17)..(18)..(19): Xaa is A or G
  MOD_RES (20)..(21)..(22)..(23): Xaa is A or G or absent
SXKXSRVIMQYNKLXXXXXXXXXLYLISIASLAQPVXXP

SEQ ID NO: 2773 - protein, 40 aa, Artificial Sequence
  Non-cyclic GFR-binding peptide
  MOD_RES (1)..(3)..(37)..(38): Xaa is C or S
  MOD_RES (15)..(16)..(17)..(18)..(19): Xaa is A or G
  MOD_RES (20)..(21)..(22)..(23): Xaa is A or G or absent
XGXAKVVMNQYNKLXXXXXXXXXLYLVSIASLKTPAXXAK

SEQ ID NO: 2774 - protein, 39 aa, Artificial Sequence
  Non-cyclic GFR-binding peptide
  MOD_RES (1)..(3)..(34)..(35): Xaa is C or S
XKXSRVIMRHKRLVKPKRGVYYLISTASLAQPVXXPAAS

SEQ ID NO: 2775 - protein, 38 aa, Artificial Sequence
  Non-cyclic GFR-binding peptide
  MOD_RES (1)..(35)..(36): Xaa is C or S
  MOD_RES (13)..(14)..(15)..(16)..(17): Xaa is A or G
  MOD_RES (18)..(19)..(20)..(21): Xaa is A or G or absent
XGEVVMDYHYKLXXXXXXXXXKYLMSIPSLETPVXXAK

SEQ ID NO: 2776 - protein, 37 aa, Artificial Sequence
  Non-cyclic GFR-binding peptide
  MOD_RES (1)..(36)..(37): Xaa is C or S
  MOD_RES (14)..(15)..(16)..(17)..(18): Xaa is A or G
  MOD_RES (19)..(20)..(21)..(22): Xaa is A or G or absent
XEAVSMGEQYNKLXXXXXXXXXLYLVSIASLKTPVXX

SEQ ID NO: 2777 - protein, 39 aa, Artificial Sequence
  Non-cyclic GFR-binding peptide
  MOD_RES (2)..(4)..(36)..(37): Xaa is C or S
HXGXSRVVMNYHYKLIVNSSDDKYLVSIPSLKTPAXXPK

SEQ ID NO: 2778 - protein, 33 aa, Artificial Sequence
  Non-cyclic GFR-binding peptide
LHDELTRHKRLFIPKKRVIEYYLVSTASLQVQT

SEQ ID NO: 2779 - protein, 42 aa, Artificial Sequence
  Non-cyclic GFR-binding peptide
  MOD_RES (1)..(3)..(37)..(38): Xaa is C or S
  MOD_RES (15)..(16)..(17)..(18)..(19): Xaa is A or G
  MOD_RES (20)..(21)..(22)..(23): Xaa is A or G or absent
XGXGEVVMDRHKRLXXXXXXXXXYYLMSTASLETPVXXAKPI

SEQ ID NO: 2780 - protein, 36 aa, Artificial Sequence
  Non-cyclic GFR-binding peptide
  MOD_RES (33)..(34): Xaa is C or S
  MOD_RES (11)..(12)..(13)..(14)..(15): Xaa is A or G
  MOD_RES (16)..(17)..(18)..(19): Xaa is A or G or absent
SKVIMRHKRLXXXXXXXXXYYLISTASLDQSVXXPS

SEQ ID NO: 2781 - protein, 39 aa, Artificial Sequence
  Non-cyclic GFR-binding peptide
  MOD_RES (2)..(4)..(39): Xaa is C or S
  MOD_RES (17)..(18)..(19)..(20)..(21): Xaa is A or G
  MOD_RES (22)..(23)..(24)..(25): Xaa is A or G or absent
RXGXEAVSMGERHKRLXXXXXXXXXYYLVSTASLKTPVX

SEQ ID NO: 2782 - protein, 39 aa, Artificial Sequence
  Non-cyclic GFR-binding peptide
  MOD_RES (1)..(3)..(34)..(35): Xaa is C or S
XKXSRVIMYHYKLVKPKRGVKYLISIPSLAQPVXXPAAS

SEQ ID NO: 2783 - protein, 35 aa, Artificial Sequence
  Non-cyclic GFR-binding peptide
  MOD_RES (34)..(35): Xaa is C or S
  MOD_RES (12)..(13)..(14)..(15)..(16): Xaa is A or G
  MOD_RES (17)..(18)..(19)..(20): Xaa is A or G or absent
GEVVMDRHKRLXXXXXXXXXYYLMSTASLETPVXX

SEQ ID NO: 2784 - protein, 34 aa, Artificial Sequence
  Non-cyclic GFR-binding peptide
  MOD_RES (33)..(34): Xaa is C or S
  MOD_RES (11)..(12)..(13)..(14)..(15): Xaa is A or G
  MOD_RES (16)..(17)..(18)..(19): Xaa is A or G or absent
SKVVMYHYKLXXXXXXXXXKYLISIPSLDQPVXX

SEQ ID NO: 2785 - protein, 34 aa, Artificial Sequence
  Non-cyclic GFR-binding peptide
  MOD_RES (34)..(34): Xaa is C or S
  MOD_RES (12)..(13)..(14)..(15)..(16): Xaa is A or G
  MOD_RES (17)..(18)..(19)..(20): Xaa is A or G or absent
AKVVMNYHYKLXXXXXXXXXKYLVSIPSLKTPAX

SEQ ID NO: 2786 - protein, 38 aa, Artificial Sequence
  Non-cyclic GFR-binding peptide
  MOD_RES (2)..(4)..(36): Xaa is C or S
HXGXSRVVMNYHYKLIVNSSDDKYLVSIPSLKTPAXTP

SEQ ID NO: 2787 - protein, 37 aa, Artificial Sequence
  Non-cyclic GFR-binding peptide
  MOD_RES (1)..(32)..(33): Xaa is C or S
XSKVVMRHKRLVKPTRGVYYLISTASLDQPVXXPSAS

SEQ ID NO: 2788 - protein, 33 aa, Artificial Sequence
  Non-cyclic GFR-binding peptide
  MOD_RES (1)..(3): Xaa is C or S
XKXSRVIMQYNKLVKPKRGVLYLISIASLAQPV

SEQ ID NO: 2789 - protein, 34 aa, Artificial Sequence
  Non-cyclic GFR-binding peptide
  MOD_RES (1)..(1): Xaa is C or S
  MOD_RES (13)..(14)..(15)..(16)..(17): Xaa is A or G
  MOD_RES (18)..(19)..(20)..(21): Xaa is A or G or absent
XGEVVMEYHYKLXXXXXXXXXKYLMSIPSLETPV

SEQ ID NO: 2790 - protein, 39 aa, Artificial Sequence
  Non-cyclic GFR-binding peptide
  MOD_RES (1)..(35)..(36): Xaa is C or S
  MOD_RES (13)..(14)..(15)..(16)..(17): Xaa is A or G
  MOD_RES (18)..(19)..(20)..(21): Xaa is A or G or absent
XSRVVMNRHKRLXXXXXXXXXYYLVSTASLKTPAXXPKP

SEQ ID NO: 2791 - protein, 38 aa, Artificial Sequence
  Non-cyclic GFR-binding peptide
  MOD_RES (32)..(33): Xaa is C or S
GEVVMERHKRLVVKDYEDYYLMSTASLETPVXXAKPIS

SEQ ID NO: 2792 - protein, 43 aa, Artificial Sequence
  Non-cyclic GFR-binding peptide
  MOD_RES (1)..(3)..(37)..(38): Xaa is C or S
  MOD_RES (15)..(16)..(17)..(18)..(19): Xaa is A or G
  MOD_RES (20)..(21)..(22)..(23): Xaa is A or G or absent
XGXGEVVMERYKKLXXXXXXXXXFYLMSIANLETPVXXAKPIS

SEQ ID NO: 2793 - protein, 37 aa, Artificial Sequence
  Non-cyclic GFR-binding peptide
  MOD_RES (1)..(3): Xaa is C or S
XKXALHDELTRYKKLFIPKKRVIEFYLVSIANLQVQT

SEQ ID NO: 2794 - protein, 38 aa, Artificial Sequence
  Non-cyclic GFR-binding peptide
  MOD_RES (2)..(4)..(36)..(37): Xaa is C or S
RXGXGEVVMERYKKLVVKDYEDFYLMSIANLETPVXXA

SEQ ID NO: 2795 - protein, 35 aa, Artificial Sequence
  Non-cyclic GFR-binding peptide
  MOD_RES (1)..(3)..(35): Xaa is C or S
XGXGEVVMDRHKRLVVKENEDYYLMSTASLETPVX

SEQ ID NO: 2796 - protein, 40 aa, Artificial Sequence
  Non-cyclic GFR-binding peptide
  MOD_RES (2)..(35)..(36): Xaa is C or S
  MOD_RES (13)..(14)..(15)..(16)..(17): Xaa is A or G
  MOD_RES (18)..(19)..(20)..(21): Xaa is A or G or absent
KXSRVIMRHKRLXXXXXXXXXYYLISTASLAQPVXXPAAS

SEQ ID NO: 2797 - protein, 36 aa, Artificial Sequence
  Non-cyclic GFR-binding peptide
  MOD_RES (1)..(1): Xaa is C or S
  MOD_RES (14)..(15)..(16)..(17)..(18): Xaa is A or G
  MOD_RES (19)..(20)..(21)..(22): Xaa is A or G or absent
XALHDELTQYNKLXXXXXXXXXLYLVSIASLQVQTP

SEQ ID NO: 2798 - protein, 35 aa, Artificial Sequence
  Non-cyclic GFR-binding peptide
  MOD_RES (13)..(14)..(15)..(16)..(17): Xaa is A or G
  MOD_RES (18)..(19)..(20)..(21): Xaa is A or G or absent
ALHDELTYHYKLXXXXXXXXXKYLVSIPSLQVQTP

SEQ ID NO: 2799 - protein, 35 aa, Artificial Sequence
  Non-cyclic GFR-binding peptide
  MOD_RES (2)..(4)..(35): Xaa is C or S
SXKXSKVVMQYNKLVKPTRGVLYLISIASLDQPVX

SEQ ID NO: 2800 - protein, 36 aa, Artificial Sequence
  Non-cyclic GFR-binding peptide
  MOD_RES (2)..(35)..(36): Xaa is C or S
  MOD_RES (13)..(14)..(15)..(16)..(17): Xaa is A or G
  MOD_RES (18)..(19)..(20)..(21): Xaa is A or G or absent
KXSRVIMYHYKLXXXXXXXXXKYLISIPSLAQPVXX

SEQ ID NO: 2801 - protein, 37 aa, Artificial Sequence
  Non-cyclic GFR-binding peptide
  MOD_RES (1)..(3): Xaa is C or S
  MOD_RES (16)..(17)..(18)..(19)..(20): Xaa is A or G
  MOD_RES (21)..(22)..(23)..(24): Xaa is A or G or absent
XGXEAVSMGEQYNKLXXXXXXXXXLYLVSIASLKTPV

SEQ ID NO: 2802 - protein, 42 aa, Artificial Sequence
  Non-cyclic GFR-binding peptide
  MOD_RES (1)..(36)..(37): Xaa is C or S
  MOD_RES (14)..(15)..(16)..(17)..(18): Xaa is A or G
  MOD_RES (19)..(20)..(21)..(22): Xaa is A or G or absent
XEAVSMGERHKRLXXXXXXXXXYYLVSTASLKTPVXXAKGVK

SEQ ID NO: 2803 - protein, 39 aa, Artificial Sequence
  Non-cyclic GFR-binding peptide
  MOD_RES (33)..(34): Xaa is C or S
  MOD_RES (11)..(12)..(13)..(14)..(15): Xaa is A or G
  MOD_RES (16)..(17)..(18)..(19): Xaa is A or G or absent
SRVIMRHKRLXXXXXXXXXYYLISTASLAQPVXXPAASA

SEQ ID NO: 2804 - protein, 38 aa, Artificial Sequence
  Non-cyclic GFR-binding peptide
  MOD_RES (1)..(36)..(37): Xaa is C or S
  MOD_RES (14)..(15)..(16)..(17)..(18): Xaa is A or G
  MOD_RES (19)..(20)..(21)..(22): Xaa is A or G or absent
XEAVSMGERHKRLXXXXXXXXXYYLVSTASLKTPVXXA

SEQ ID NO: 2805 - protein, 39 aa, Artificial Sequence
  Non-cyclic GFR-binding peptide
  MOD_RES (1)..(34)..(35): Xaa is C or S
  MOD_RES (12)..(13)..(14)..(15)..(16): Xaa is A or G
  MOD_RES (17)..(18)..(19)..(20): Xaa is A or G or absent
XSKVIMRYKKLXXXXXXXXXFYLISIANLDQSVXXPSAS

SEQ ID NO: 2806 - protein, 35 aa, Artificial Sequence
  Non-cyclic GFR-binding peptide
  MOD_RES (1)..(34)..(35): Xaa is C or S
  MOD_RES (12)..(13)..(14)..(15)..(16): Xaa is A or G
  MOD_RES (17)..(18)..(19)..(20): Xaa is A or G or absent
XSKVVMRYKKLXXXXXXXXXFYLISIANLDQPVXX

SEQ ID NO: 2807 - protein, 33 aa, Artificial Sequence
  Non-cyclic GFR-binding peptide
  MOD_RES (33)..(33): Xaa is C or S
  MOD_RES (11)..(12)..(13)..(14)..(15): Xaa is A or G
  MOD_RES (16)..(17)..(18)..(19): Xaa is A or G or absent
EVVMEYHYKLXXXXXXXXXKYLMSIPSLETPVX

SEQ ID NO: 2808 - protein, 39 aa, Artificial Sequence
  Non-cyclic GFR-binding peptide
  MOD_RES (2)..(4): Xaa is C or S
  MOD_RES (17)..(18)..(19)..(20)..(21): Xaa is A or G
  MOD_RES (22)..(23)..(24)..(25): Xaa is A or G or absent
EXKXALHDELTRYKKLXXXXXXXXXFYLVSIANLQVQTP

SEQ ID NO: 2809 - protein, 39 aa, Artificial Sequence
  Non-cyclic GFR-binding peptide
  MOD_RES (1)..(34)..(35): Xaa is C or S
  MOD_RES (12)..(13)..(14)..(15)..(16): Xaa is A or G
  MOD_RES (17)..(18)..(19)..(20): Xaa is A or G or absent
XSKVVMRHKRLXXXXXXXXXYYLISTASLDQPVXXPSAS

SEQ ID NO: 2810 - protein, 34 aa, Artificial Sequence
  Non-cyclic GFR-binding peptide
  MOD_RES (1)..(32)..(33): Xaa is C or S
XSKVVMYHYKLVKPTRGVKYLISIPSLDQPVXXP

SEQ ID NO: 2811 - protein, 34 aa, Artificial Sequence
  Non-cyclic GFR-binding peptide
  MOD_RES (32)..(33): Xaa is C or S
AKVVMNRYKKLIVNNSSDFYLVSIANLKTPAXXA

SEQ ID NO: 2812 - protein, 33 aa, Artificial Sequence
  Non-cyclic GFR-binding peptide
  MOD_RES (32)..(33): Xaa is C or S
SRVVMNQYNKLIVNSSDDLYLVSIASLKTPAXX

SEQ ID NO: 2813 - protein, 33 aa, Artificial Sequence
  Non-cyclic GFR-binding peptide
  MOD_RES (2)..(2): Xaa is C or S
GXSRVVMNRHKRLIVNSSDDYYLVSTASLKTPA

SEQ ID NO: 2814 - protein, 33 aa, Artificial Sequence
  Non-cyclic GFR-binding peptide
  MOD_RES (1)..(33): Xaa is C or S
XSRVVMNQYNKLIVNSSDDLYLVSIASLKTPAX

SEQ ID NO: 2815 - protein, 31 aa, Artificial Sequence
  Non-cyclic GFR-binding peptide
GEVVMERHKRLVVKDYEDYYLMSTASLETPV

SEQ ID NO: 2816 - protein, 37 aa, Artificial Sequence
  Non-cyclic GFR-binding peptide
  MOD_RES (2)..(33)..(34): Xaa is C or S
KXSRVIMYHYKLVKPKRGVKYLISIPSLAQPVXXPAA

SEQ ID NO: 2817 - protein, 43 aa, Artificial Sequence
  Non-cyclic GFR-binding peptide
  MOD_RES (2)..(4)..(37)..(38): Xaa is C or S
  MOD_RES (15)..(16)..(17)..(18)..(19): Xaa is A or G
  MOD_RES (20)..(21)..(22)..(23): Xaa is A or G or absent
SXKXSKVIMRHKRLXXXXXXXXXYYLISTASLDQSVXXPSASA

SEQ ID NO: 2818 - protein, 41 aa, Artificial Sequence
  Non-cyclic GFR-binding peptide
  MOD_RES (37)..(37): Xaa is C or S
  MOD_RES (13)..(14)..(15)..(16)..(17): Xaa is A or G
  MOD_RES (18)..(19)..(20)..(21): Xaa is A or G or absent
ALHDELTQYNKLXXXXXXXXXLYLVSIASLQVQTPRXQVNR

SEQ ID NO: 2819 - protein, 40 aa, Artificial Sequence
  Non-cyclic GFR-binding peptide
  MOD_RES (2)..(4)..(38)..(39): Xaa is C or S
  MOD_RES (16)..(17)..(18)..(19)..(20): Xaa is A or G
  MOD_RES (21)..(22)..(23)..(24): Xaa is A or G or absent
RXGXGEVVMDYHYKLXXXXXXXXXKYLMSIPSLETPVXXA

SEQ ID NO: 2820 - protein, 34 aa, Artificial Sequence
  Non-cyclic GFR-binding peptide
  MOD_RES (1)..(3): Xaa is C or S
XGXGEVVMDYHYKLVVKENEDKYLMSIPSLETPV

SEQ ID NO: 2821 - protein, 41 aa, Artificial Sequence
  Non-cyclic GFR-binding peptide
  MOD_RES (2)..(4)..(38)..(39): Xaa is C or S
  MOD_RES (16)..(17)..(18)..(19)..(20): Xaa is A or G
  MOD_RES (21)..(22)..(23)..(24): Xaa is A or G or absent
HXGXAKVVMNYHYKLXXXXXXXXXKYLVSIPSLKTPAXXAK

SEQ ID NO: 2822 - protein, 32 aa, Artificial Sequence
  Non-cyclic GFR-binding peptide
  MOD_RES (11)..(12)..(13)..(14)..(15): Xaa is A or G
  MOD_RES (16)..(17)..(18)..(19): Xaa is A or G or absent
KVVMNQYNKLXXXXXXXXXLYLVSIASLKTPA

SEQ ID NO: 2823 - protein, 39 aa, Artificial Sequence
  Non-cyclic GFR-binding peptide
  MOD_RES (1)..(34)..(35): Xaa is C or S
  MOD_RES (12)..(13)..(14)..(15)..(16): Xaa is A or G
  MOD_RES (17)..(18)..(19)..(20): Xaa is A or G or absent
XSKVVMQYNKLXXXXXXXXXLYLISIASLDQPVXXPSAS

SEQ ID NO: 2824 - protein, 39 aa, Artificial Sequence
  Non-cyclic GFR-binding peptide
  MOD_RES (2)..(35)..(36): Xaa is C or S
  MOD_RES (13)..(14)..(15)..(16)..(17): Xaa is A or G
  MOD_RES (18)..(19)..(20)..(21): Xaa is A or G or absent
KXSKVVMYHYKLXXXXXXXXXKYLISIPSLDQPVXXPSA

SEQ ID NO: 2825 - protein, 37 aa, Artificial Sequence
  Non-cyclic GFR-binding peptide
  MOD_RES (2)..(35)..(36): Xaa is C or S
  MOD_RES (13)..(14)..(15)..(16)..(17): Xaa is A or G
  MOD_RES (18)..(19)..(20)..(21): Xaa is A or G or absent
KXSRVIMRYKKLXXXXXXXXXFYLISIANLAQPVXXP

SEQ ID NO: 2826 - protein, 37 aa, Artificial Sequence
  Non-cyclic GFR-binding peptide
  MOD_RES (2)..(4)..(35)..(36): Xaa is C or S
SXKXSKVVMRYKKLVKPTRGVFYLISIANLDQPVXXP

SEQ ID NO: 2827 - protein, 36 aa, Artificial Sequence
  Non-cyclic GFR-binding peptide
  MOD_RES (1)..(35)..(36): Xaa is C or S
  MOD_RES (13)..(14)..(15)..(16)..(17): Xaa is A or G
  MOD_RES (18)..(19)..(20)..(21): Xaa is A or G or absent
XAKVVMNRYKKLXXXXXXXXXFYLVSIANLKTPAXX

SEQ ID NO: 2828 - protein, 34 aa, Artificial Sequence
  Non-cyclic GFR-binding peptide
  MOD_RES (1)..(1): Xaa is C or S
  MOD_RES (13)..(14)..(15)..(16)..(17): Xaa is A or G
  MOD_RES (18)..(19)..(20)..(21): Xaa is A or G or absent
XGEVVMDRHKRLXXXXXXXXXYYLMSTASLETPV

SEQ ID NO: 2829 - protein, 35 aa, Artificial Sequence
  Non-cyclic GFR-binding peptide
  MOD_RES (1)..(35): Xaa is C or S
  MOD_RES (13)..(14)..(15)..(16)..(17): Xaa is A or G
  MOD_RES (18)..(19)..(20)..(21): Xaa is A or G or absent
XARVVMNYHYKLXXXXXXXXXKYLVSIPSLQTPAX

SEQ ID NO: 2830 - protein, 30 aa, Artificial Sequence; identical to SEQ ID NO: 1905
  Non-cyclic GFR-binding peptide

SEQ ID NO: 2831 - protein, 41 aa, Artificial Sequence
  Non-cyclic GFR-binding peptide
  MOD_RES (37)..(37): Xaa is C or S
  MOD_RES (13)..(14)..(15)..(16)..(17): Xaa is A or G
  MOD_RES (18)..(19)..(20)..(21): Xaa is A or G or absent
ALHDELTRHKRLXXXXXXXXXYYLVSTASLQVQTPRXQVNR

SEQ ID NO: 2832 - protein, 32 aa, Artificial Sequence
  Non-cyclic GFR-binding peptide
  MOD_RES (32)..(32): Xaa is C or S
ARVVMNQYNKLIVNSSDDLYLVSIASLQTPAX

SEQ ID NO: 2833 - protein, 44 aa, Artificial Sequence
  Non-cyclic GFR-binding peptide
  MOD_RES (2)..(4)..(38)..(39): Xaa is C or S
  MOD_RES (16)..(17)..(18)..(19)..(20): Xaa is A or G
  MOD_RES (21)..(22)..(23)..(24): Xaa is A or G or absent
RXGXGEVVMERHKRLXXXXXXXXXYYLMSTASLETPVXXAKPIS

SEQ ID NO: 2834 - protein, 31 aa, Artificial Sequence
  Non-cyclic GFR-binding peptide
  MOD_RES (31)..(31): Xaa is C or S
RVVMNYHYKLIVNSSDDKYLVSIPSLKTPAX

SEQ ID NO: 2835 - protein, 38 aa, Artificial Sequence
  Non-cyclic GFR-binding peptide
  MOD_RES (2)..(4)..(36)..(37): Xaa is C or S
HXGXSRVVMNYHYKLIVNSSDDKYLVSIPSLKTPAXXP

SEQ ID NO: 2836 - protein, 38 aa, Artificial Sequence
  Non-cyclic GFR-binding peptide
  MOD_RES (2)..(4)..(37)..(38): Xaa is C or S
  MOD_RES (15)..(16)..(17)..(18)..(19): Xaa is A or G
  MOD_RES (20)..(21)..(22)..(23): Xaa is A or G or absent
SXKXSRVIMRHKRLXXXXXXXXXYYLISTASLAQPVXX

SEQ ID NO: 2837 - protein, 36 aa, Artificial Sequence
  Non-cyclic GFR-binding peptide
  MOD_RES (2)..(4): Xaa is C or S
  MOD_RES (15)..(16)..(17)..(18)..(19): Xaa is A or G
  MOD_RES (20)..(21)..(22)..(23): Xaa is A or G or absent
SXKXSKVVMYHYKLXXXXXXXXXKYLISIPSLDQPV

SEQ ID NO: 2838 - protein, 35 aa, Artificial Sequence
  Non-cyclic GFR-binding peptide
  MOD_RES (31)..(32): Xaa is C or S
RVVMNQYNKLIVNSSDDLYLVSIASLKTPAXXPKP

SEQ ID NO: 2839 - protein, 42 aa, Artificial Sequence
  Non-cyclic GFR-binding peptide
  MOD_RES (2)..(4)..(37)..(38): Xaa is C or S
  MOD_RES (15)..(16)..(17)..(18)..(19): Xaa is A or G
  MOD_RES (20)..(21)..(22)..(23): Xaa is A or G or absent
SXKXSKVVMRYKKLXXXXXXXXXFYLISIANLDQPVXXPSAS

SEQ ID NO: 2840 - protein, 38 aa, Artificial Sequence
  Non-cyclic GFR-binding peptide
  MOD_RES (37)..(37): Xaa is C or S
  MOD_RES (13)..(14)..(15)..(16)..(17): Xaa is A or G
  MOD_RES (18)..(19)..(20)..(21): Xaa is A or G or absent
ALHDELTRYKKLXXXXXXXXXFYLVSIANLQVQTPRXQ

SEQ ID NO: 2841 - protein, 40 aa, Artificial Sequence
  Non-cyclic GFR-binding peptide
  MOD_RES (1)..(3)..(36)..(37): Xaa is C or S
XGXEAVSMGEQYNKLTPVGMDDLYLVSIASLKTPVXXAKG

SEQ ID NO: 2842 - protein, 33 aa, Artificial Sequence
  Non-cyclic GFR-binding peptide
  MOD_RES (33)..(33): Xaa is C or S
EAVSMGERYKKLTPVGMDDFYLVSIANLKTPVX

SEQ ID NO: 2843 - protein, 35 aa, Artificial Sequence
  Non-cyclic GFR-binding peptide
  MOD_RES (33)..(34): Xaa is C or S
  MOD_RES (11)..(12)..(13)..(14)..(15): Xaa is A or G
  MOD_RES (16)..(17)..(18)..(19): Xaa is A or G or absent
EVVMERYKKLXXXXXXXXXFYLMSIANLETPVXXA

SEQ ID NO: 2844 - protein, 41 aa, Artificial Sequence
  Non-cyclic GFR-binding peptide
  MOD_RES (2)..(35)..(36): Xaa is C or S
GXEAVSMGEQYNKLTPVGMDDLYLVSIASLKTPVXXAKGVK

SEQ ID NO: 2845 - protein, 39 aa, Artificial Sequence
  Non-cyclic GFR-binding peptide
  MOD_RES (2)..(4)..(38)..(39): Xaa is C or S
  MOD_RES (16)..(17)..(18)..(19)..(20): Xaa is A or G
  MOD_RES (21)..(22)..(23)..(24): Xaa is A or G or absent
HXGXAKVVMNRYKKLXXXXXXXXXFYLVSIANLKTPAXX

SEQ ID NO: 2846 - protein, 41 aa, Artificial Sequence
  Non-cyclic GFR-binding peptide
  MOD_RES (2)..(4)..(39)..(40): Xaa is C or S
  MOD_RES (17)..(18)..(19)..(20)..(21): Xaa is A or G
  MOD_RES (22)..(23)..(24)..(25): Xaa is A or G or absent
RXGXEAVSMGEQYNKLXXXXXXXXXLYLVSIASLKTPVXXA

SEQ ID NO: 2847 - protein, 40 aa, Artificial Sequence
  Non-cyclic GFR-binding peptide
  MOD_RES (2)..(4)..(37)..(38): Xaa is C or S
  MOD_RES (15)..(16)..(17)..(18)..(19): Xaa is A or G
  MOD_RES (20)..(21)..(22)..(23): Xaa is A or G or absent
SXKXSKVIMRYKKLXXXXXXXXXFYLISIANLDQSVXXPS

SEQ ID NO: 2848 - protein, 37 aa, Artificial Sequence
  Non-cyclic GFR-binding peptide
  MOD_RES (1)..(3): Xaa is C or S
  MOD_RES (16)..(17)..(18)..(19)..(20): Xaa is A or G
  MOD_RES (21)..(22)..(23)..(24): Xaa is A or G or absent
XGXEAVSMGERHKRLXXXXXXXXXYYLVSTASLKTPV

SEQ ID NO: 2849 - protein, 39 aa, Artificial Sequence
  Non-cyclic GFR-binding peptide
  MOD_RES (2)..(36)..(37): Xaa is C or S
  MOD_RES (14)..(15)..(16)..(17)..(18): Xaa is A or G
  MOD_RES (19)..(20)..(21)..(22): Xaa is A or G or absent
GXGEVVMEYHYKLXXXXXXXXXKYLMSIPSLETPVXXAK

SEQ ID NO: 2850 - protein, 42 aa, Artificial Sequence
  Non-cyclic GFR-binding peptide
  MOD_RES (2)..(37)..(38): Xaa is C or S
  MOD_RES (15)..(16)..(17)..(18)..(19): Xaa is A or G
  MOD_RES (20)..(21)..(22)..(23): Xaa is A or G or absent
GXEAVSMGEQYNKLXXXXXXXXXLYLVSIASLKTPVXXAKGV

SEQ ID NO: 2851 - protein, 40 aa, Artificial Sequence
  Non-cyclic GFR-binding peptide
  MOD_RES (2)..(4)..(35)..(36): Xaa is C or S
SXKXSKVIMYHYKLIKPTKGIKYLISIPSLDQSVXXPSAS

SEQ ID NO: 2852 - protein, 40 aa, Artificial Sequence
  Non-cyclic GFR-binding peptide
  MOD_RES (1)..(3)..(34)..(35): Xaa is C or S
XKXSKVVMQYNKLVKPTRGVLYLISIASLDQPVXXPSASA

SEQ ID NO: 2853 - protein, 40 aa, Artificial Sequence
  Non-cyclic GFR-binding peptide
  MOD_RES (1)..(3)..(38)..(39): Xaa is C or S
  MOD_RES (16)..(17)..(18)..(19)..(20): Xaa is A or G
  MOD_RES (21)..(22)..(23)..(24): Xaa is A or G or absent
XGXEAVSMGEQYNKLXXXXXXXXXLYLVSIASLKTPVXXA

SEQ ID NO: 2854 - protein, 35 aa, Artificial Sequence
  Non-cyclic GFR-binding peptide
  MOD_RES (1)..(34)..(35): Xaa is C or S
XEAVSMGEQYNKLTPVGMDDLYLVSIASLKTPVXX

SEQ ID NO: 2855 - protein, 36 aa, Artificial Sequence
  Non-cyclic GFR-binding peptide
  MOD_RES (2)..(2): Xaa is C or S
KXALHDELTRYKKLFIPKKRVIEFYLVSIANLQVQT

SEQ ID NO: 2856 - protein, 38 aa, Artificial Sequence
  Non-cyclic GFR-binding peptide
  MOD_RES (2)..(34)..(35): Xaa is C or S
GXSRVVMNRHKRLIVNSSDDYYLVSTASLKTPAXXPKP

SEQ ID NO: 2857 - protein, 37 aa, Artificial Sequence
  Non-cyclic GFR-binding peptide
  MOD_RES (2)..(4)..(37): Xaa is C or S
  MOD_RES (15)..(16)..(17)..(18)..(19): Xaa is A or G
  MOD_RES (20)..(21)..(22)..(23): Xaa is A or G or absent
SXKXSKVIMQYNKLXXXXXXXXXLYLISIASLDQSVX

SEQ ID NO: 2858 - protein, 36 aa, Artificial Sequence
  Non-cyclic GFR-binding peptide
  MOD_RES (34)..(35): Xaa is C or S
  MOD_RES (12)..(13)..(14)..(15)..(16): Xaa is A or G
  MOD_RES (17)..(18)..(19)..(20): Xaa is A or G or absent
AKVVMNRYKKLXXXXXXXXXFYLVSIANLKTPAXXA

SEQ ID NO: 2859 - protein, 41 aa, Artificial Sequence
  Non-cyclic GFR-binding peptide
  MOD_RES (1)..(3)..(35)..(36): Xaa is C or S
XGXGEVVMERHKRLVVKDYEDYYLMSTASLETPVXXAKPIS

SEQ ID NO: 2860 - protein, 37 aa, Artificial Sequence
  Non-cyclic GFR-binding peptide
  MOD_RES (1)..(33)..(34): Xaa is C or S
XAKVVMNRYKKLIVNNSSDFYLVSIANLKTPAXXAKP

SEQ ID NO: 2861 - protein, 35 aa, Artificial Sequence
  Non-cyclic GFR-binding peptide
  MOD_RES (1)..(3)..(34)..(35): Xaa is C or S
XKXSKVVMRHKRLVKPTRGVYYLISTASLDQPVXX

SEQ ID NO: 2862 - protein, 38 aa, Artificial Sequence
  Non-cyclic GFR-binding peptide
  MOD_RES (2)..(34)..(35): Xaa is C or S
GXAKVVMNYHYKLIVNNSSDKYLVSIPSLKTPAXXAKP

SEQ ID NO: 2863 - protein, 38 aa, Artificial Sequence
  Non-cyclic GFR-binding peptide
  MOD_RES (34)..(35): Xaa is C or S
  MOD_RES (12)..(13)..(14)..(15)..(16): Xaa is A or G
  MOD_RES (17)..(18)..(19)..(20): Xaa is A or G or absent
SRVVMNYHYKLXXXXXXXXXKYLVSIPSLKTPAXXPKP

SEQ ID NO: 2864 - protein, 40 aa, Artificial Sequence
  Non-cyclic GFR-binding peptide
  MOD_RES (2)..(4)..(38)..(39): Xaa is C or S
  MOD_RES (16)..(17)..(18)..(19)..(20): Xaa is A or G
  MOD_RES (21)..(22)..(23)..(24): Xaa is A or G or absent
HXGXSRVVMNYHYKLXXXXXXXXXKYLVSIPSLKTPAXXP

SEQ ID NO: 2865 - protein, 35 aa, Artificial Sequence
  Non-cyclic GFR-binding peptide
  MOD_RES (32)..(33): Xaa is C or S
SRVVMNQYNKLIVNSSDDLYLVSIASLKTPAXXPK

SEQ ID NO: 2866 - protein, 38 aa, Artificial Sequence
  Non-cyclic GFR-binding peptide
  MOD_RES (34)..(35): Xaa is C or S
  MOD_RES (12)..(13)..(14)..(15)..(16): Xaa is A or G
  MOD_RES (17)..(18)..(19)..(20): Xaa is A or G or absent
SRVVMNRHKRLXXXXXXXXXYYLVSTASLKTPAXXPKP

SEQ ID NO: 2867 - protein, 34 aa, Artificial Sequence
  Non-cyclic GFR-binding peptide
  MOD_RES (2)..(4): Xaa is C or S
SXKXSKVVMYHYKLVKPTRGVKYLISIPSLDQPV

SEQ ID NO: 2868 - protein, 38 aa, Artificial Sequence
  Non-cyclic GFR-binding peptide
  MOD_RES (2)..(4)..(35)..(36): Xaa is C or S
SXKXSKVVMRHKRLVKPTRGVYYLISTASLDQPVXXPS

SEQ ID NO: 2869 - protein, 38 aa, Artificial Sequence
  Non-cyclic GFR-binding peptide
  MOD_RES (1)..(34)..(35): Xaa is C or S
  MOD_RES (12)..(13)..(14)..(15)..(16): Xaa is A or G
  MOD_RES (17)..(18)..(19)..(20): Xaa is A or G or absent
XSRVIMRYKKLXXXXXXXXXFYLISIANLAQPVXXPAA

SEQ ID NO: 2870 - protein, 32 aa, Artificial Sequence
  Non-cyclic GFR-binding peptide
  MOD_RES (11)..(12)..(13)..(14)..(15): Xaa is A or G
  MOD_RES (16)..(17)..(18)..(19): Xaa is A or G or absent
KVVMNYHYKLXXXXXXXXXKYLVSIPSLKTPA

SEQ ID NO: 2871 - protein, 41 aa, Artificial Sequence
  Non-cyclic GFR-binding peptide
  MOD_RES (1)..(3)..(35): Xaa is C or S
XGXSRVVMNRHKRLIVNSSDDYYLVSTASLKTPAXTPKTVH

SEQ ID NO: 2872 - protein, 40 aa, Artificial Sequence
  Non-cyclic GFR-binding peptide
  MOD_RES (1)..(34)..(35): Xaa is C or S
  MOD_RES (12)..(13)..(14)..(15)..(16): Xaa is A or G
  MOD_RES (17)..(18)..(19)..(20): Xaa is A or G or absent
XSKVIMYHYKLXXXXXXXXXKYLISIPSLDQSVXXPSASA

SEQ ID NO: 2873 - protein, 31 aa, Artificial Sequence
  Non-cyclic GFR-binding peptide
  MOD_RES (31)..(31): Xaa is C or S
SRVIMQYNKLVKPKRGVLYLISIASLAQPVX

SEQ ID NO: 2874 - protein, 41 aa, Artificial Sequence
  Non-cyclic GFR-binding peptide
  MOD_RES (1)..(3)..(35)..(36): Xaa is C or S
XGXARVVMNRHKRLIVNSSDDYYLVSTASLQTPAXXPKPVT

SEQ ID NO: 2875 - protein, 39 aa, Artificial Sequence
  Non-cyclic GFR-binding peptide
  MOD_RES (2)..(34): Xaa is C or S
GXSRVVMNRHKRLIVNSSDDYYLVSTASLKTPAXTPKTV

SEQ ID NO: 2876 - protein, 31 aa, Artificial Sequence
  Non-cyclic GFR-binding peptide
  MOD_RES (31)..(31): Xaa is C or S
RVVMNQYNKLIVNSSDDLYLVSIASLKTPAX

SEQ ID NO: 2877 - protein, 41 aa, Artificial Sequence
  Non-cyclic GFR-binding peptide
  MOD_RES (2)..(4)..(36): Xaa is C or S
HXGXSRVVMNRHKRLIVNSSDDYYLVSTASLKTPAXTPKTV

SEQ ID NO: 2878 - protein, 35 aa, Artificial Sequence
  Non-cyclic GFR-binding peptide
  MOD_RES (31)..(32): Xaa is C or S
RVVMNYHYKLIVNSSDDKYLVSIPSLKTPAXXPKP

SEQ ID NO: 2879 - protein, 39 aa, Artificial Sequence
  Non-cyclic GFR-binding peptide
  MOD_RES (1)..(3)..(36)..(37): Xaa is C or S
  MOD_RES (14)..(15)..(16)..(17)..(18): Xaa is A or G
  MOD_RES (19)..(20)..(21)..(22): Xaa is A or G or absent
XKXSRVIMRHKRLXXXXXXXXXYYLISTASLAQPVXXPA

SEQ ID NO: 2880 - protein, 37 aa, Artificial Sequence
  Non-cyclic GFR-binding peptide
  MOD_RES (1)..(35): Xaa is C or S
  MOD_RES (13)..(14)..(15)..(16)..(17): Xaa is A or G
  MOD_RES (18)..(19)..(20)..(21): Xaa is A or G or absent
XSRVVMNYHYKLXXXXXXXXXKYLVSIPSLKTPAXTP

SEQ ID NO: 2881 - protein, 35 aa, Artificial Sequence
  Non-cyclic GFR-binding peptide
  MOD_RES (2)..(4): Xaa is C or S
HXGXSRVVMNRHKRLIVNSSDDYYLVSTASLKTPA

SEQ ID NO: 2882 - protein, 34 aa, Artificial Sequence
  Non-cyclic GFR-binding peptide
  MOD_RES (32)..(33): Xaa is C or S
AKVVMNQYNKLIVNNSSDLYLVSIASLKTPAXXA

SEQ ID NO: 2883 - protein, 36 aa, Artificial Sequence
  Non-cyclic GFR-binding peptide
  MOD_RES (33)..(34): Xaa is C or S
  MOD_RES (11)..(12)..(13)..(14)..(15): Xaa is A or G
  MOD_RES (16)..(17)..(18)..(19): Xaa is A or G or absent
SKVVMQYNKLXXXXXXXXXLYLISIASLDQPVXXPS

SEQ ID NO: 2884 - protein, 41 aa, Artificial Sequence
  Non-cyclic GFR-binding peptide
  MOD_RES (2)..(4)..(36)..(37): Xaa is C or S
HXGXARVVMNQYNKLIVNSSDDLYLVSIASLQTPAXXPKPV

SEQ ID NO: 2885 - protein, 32 aa, Artificial Sequence
  Non-cyclic GFR-binding peptide
  MOD_RES (11)..(12)..(13)..(14)..(15): Xaa is A or G
  MOD_RES (16)..(17)..(18)..(19): Xaa is A or G or absent
RVVMNYHYKLXXXXXXXXXKYLVSIPSLKTPA

SEQ ID NO: 2886 - protein, 37 aa, Artificial Sequence
  Non-cyclic GFR-binding peptide
  MOD_RES (2)..(36)..(37): Xaa is C or S
  MOD_RES (14)..(15)..(16)..(17)..(18): Xaa is A or G
  MOD_RES (19)..(20)..(21)..(22): Xaa is A or G or absent
GXARVVMNRHKRLXXXXXXXXXYYLVSTASLQTPAXX

SEQ ID NO: 2887 - protein, 37 aa, Artificial Sequence
  Non-cyclic GFR-binding peptide
  MOD_RES (1)..(34)..(35): Xaa is C or S
XEAVSMGERHKRLTPVGMDDYYLVSTASLKTPVXXAK

SEQ ID NO: 2888 - protein, 37 aa, Artificial Sequence
  Non-cyclic GFR-binding peptide
  MOD_RES (35)..(35): Xaa is C or S
  MOD_RES (11)..(12)..(13)..(14)..(15): Xaa is A or G
  MOD_RES (16)..(17)..(18)..(19): Xaa is A or G or absent
HDELTRYKKLXXXXXXXXXFYLVSIANLQVQTPRXQV

SEQ ID NO: 2889 - protein, 32 aa, Artificial Sequence
  Non-cyclic GFR-binding peptide
  MOD_RES (31)..(32): Xaa is C or S
EVVMEYHYKLVVKDYEDKYLMSIPSLETPVXX

SEQ ID NO: 2890 - protein, 40 aa, Artificial Sequence
  Non-cyclic GFR-binding peptide
  MOD_RES (2)..(34)..(35): Xaa is C or S
GXARVVMNYHYKLIVNSSDDKYLVSIPSLQTPAXXPKPVT

SEQ ID NO: 2891 - protein, 33 aa, Artificial Sequence
  Non-cyclic GFR-binding peptide
  MOD_RES (33)..(33): Xaa is C or S
  MOD_RES (11)..(12)..(13)..(14)..(15): Xaa is A or G
  MOD_RES (16)..(17)..(18)..(19): Xaa is A or G or absent
SRVIMYHYKLXXXXXXXXXKYLISIPSLAQPVX

SEQ ID NO: 2892 - protein, 38 aa, Artificial Sequence
  Non-cyclic GFR-binding peptide
  MOD_RES (2)..(4)..(37)..(38): Xaa is C or S
  MOD_RES (15)..(16)..(17)..(18)..(19): Xaa is A or G
  MOD_RES (20)..(21)..(22)..(23): Xaa is A or G or absent
SXKXSRVIMQYNKLXXXXXXXXXLYLISIASLAQPVXX

SEQ ID NO: 2893 - protein, 36 aa, Artificial Sequence
  Non-cyclic GFR-binding peptide
  MOD_RES (33)..(34): Xaa is C or S
  MOD_RES (11)..(12)..(13)..(14)..(15): Xaa is A or G
  MOD_RES (16)..(17)..(18)..(19): Xaa is A or G or absent
SKVIMYHYKLXXXXXXXXXKYLISIPSLDQSVXXPS

SEQ ID NO: 2894 - protein, 38 aa, Artificial Sequence
  Non-cyclic GFR-binding peptide
  MOD_RES (36)..(36): Xaa is C or S
  MOD_RES (12)..(13)..(14)..(15)..(16): Xaa is A or G
  MOD_RES (17)..(18)..(19)..(20): Xaa is A or G or absent
LHDELTRHKRLXXXXXXXXXYYLVSTASLQVQTPRXQV

SEQ ID NO: 2895 - protein, 40 aa, Artificial Sequence
  Non-cyclic GFR-binding peptide
  MOD_RES (34)..(35): Xaa is C or S
  MOD_RES (12)..(13)..(14)..(15)..(16): Xaa is A or G
  MOD_RES (17)..(18)..(19)..(20): Xaa is A or G or absent
GEVVMEYHYKLXXXXXXXXXKYLMSIPSLETPVXXAKPIS

SEQ ID NO: 2896 - protein, 38 aa, Artificial Sequence
  Non-cyclic GFR-binding peptide
  MOD_RES (36)..(36): Xaa is C or S
  MOD_RES (12)..(13)..(14)..(15)..(16): Xaa is A or G
  MOD_RES (17)..(18)..(19)..(20): Xaa is A or G or absent
LHDELTYHYKLXXXXXXXXXKYLVSIPSLQVQTPRXQV

SEQ ID NO: 2897 - protein, 39 aa, Artificial Sequence
  Non-cyclic GFR-binding peptide
  MOD_RES (1)..(3)..(36)..(37): Xaa is C or S
  MOD_RES (14)..(15)..(16)..(17)..(18): Xaa is A or G
  MOD_RES (19)..(20)..(21)..(22): Xaa is A or G or absent
XKXSKVIMRHKRLXXXXXXXXXYYLISTASLDQSVXXPS

SEQ ID NO: 2898 - protein, 40 aa, Artificial Sequence
  Non-cyclic GFR-binding peptide
  MOD_RES (1)..(3)..(34)..(35): Xaa is C or S
XKXSRVIMRYKKLVKPKRGVFYLISIANLAQPVXXPAASA

SEQ ID NO: 2899 - protein, 39 aa, Artificial Sequence
  Non-cyclic GFR-binding peptide
  MOD_RES (34)..(34): Xaa is C or S
  MOD_RES (12)..(13)..(14)..(15)..(16): Xaa is A or G
  MOD_RES (17)..(18)..(19)..(20): Xaa is A or G or absent
SRVVMNQYNKLXXXXXXXXXLYLVSIASLKTPAXTPKTV

SEQ ID NO: 2900 - protein, 36 aa, Artificial Sequence
  Non-cyclic GFR-binding peptide
  MOD_RES (1)..(32)..(33): Xaa is C or S
XSRVIMYHYKLVKPKRGVKYLISIPSLAQPVXXPAA

SEQ ID NO: 2901 - protein, 37 aa, Artificial Sequence
  Non-cyclic GFR-binding peptide
  MOD_RES (2)..(4): Xaa is C or S
  MOD_RES (16)..(17)..(18)..(19)..(20): Xaa is A or G
  MOD_RES (21)..(22)..(23)..(24): Xaa is A or G or absent
HXGXSRVVMNYHYKLXXXXXXXXXKYLVSIPSLKTPA

SEQ ID NO: 2902 - protein, 41 aa, Artificial Sequence
  Non-cyclic GFR-binding peptide
  MOD_RES (1)..(3)..(40): Xaa is C or S
XKXALHDELTQYNKLFIPKKRVIELYLVSIASLQVQTPRXQ

SEQ ID NO: 2903 - protein, 32 aa, Artificial Sequence
  Non-cyclic GFR-binding peptide
  MOD_RES (32)..(32): Xaa is C or S
ARVVMNRHKRLIVNSSDDYYLVSTASLQTPAX

SEQ ID NO: 2904 - protein, 33 aa, Artificial Sequence
  Non-cyclic GFR-binding peptide
  MOD_RES (1)..(32)..(33): Xaa is C or S
XSKVVMRYKKLVKPTRGVFYLISIANLDQPVXX

SEQ ID NO: 2905 - protein, 38 aa, Artificial Sequence
  Non-cyclic GFR-binding peptide
  MOD_RES (33)..(34): Xaa is C or S
  MOD_RES (11)..(12)..(13)..(14)..(15): Xaa is A or G
  MOD_RES (16)..(17)..(18)..(19): Xaa is A or G or absent
RVVMNYHYKLXXXXXXXXXKYLVSIPSLKTPAXXPKPV

SEQ ID NO: 2906 - protein, 37 aa, Artificial Sequence
  Non-cyclic GFR-binding peptide
  MOD_RES (36)..(36): Xaa is C or S
LHDELTRHKRLFIPKKRVIEYYLVSTASLQVQTPRXQ

SEQ ID NO: 2907 - protein, 30 aa, Artificial Sequence
  Non-cyclic GFR-binding peptide
KVVMNQYNKLIVNNSSDLYLVSIASLKTPA

SEQ ID NO: 2908 - protein, 38 aa, Artificial Sequence
  Non-cyclic GFR-binding peptide
  MOD_RES (2)..(4)..(38): Xaa is C or S
  MOD_RES (16)..(17)..(18)..(19)..(20): Xaa is A or G
  MOD_RES (21)..(22)..(23)..(24): Xaa is A or G or absent
HXGXARVVMNQYNKLXXXXXXXXXLYLVSIASLQTPAX

SEQ ID NO: 2909 - protein, 38 aa, Artificial Sequence
  Non-cyclic GFR-binding peptide
  MOD_RES (1)..(35)..(36): Xaa is C or S
  MOD_RES (13)..(14)..(15)..(16)..(17): Xaa is A or G
  MOD_RES (18)..(19)..(20)..(21): Xaa is A or G or absent
XARVVMNQYNKLXXXXXXXXXLYLVSIASLQTPAXXPK

SEQ ID NO: 2910 - protein, 37 aa, Artificial Sequence
  Non-cyclic GFR-binding peptide
  MOD_RES (2)..(4)..(35)..(36): Xaa is C or S
SXKXSRVIMRHKRLVKPKRGVYYLISTASLAQPVXXP

SEQ ID NO: 2911 - protein, 37 aa, Artificial Sequence
  Non-cyclic GFR-binding peptide
  MOD_RES (2)..(34)..(35): Xaa is C or S
GXGEVVMEYHYKLVVKDYEDKYLMSIPSLETPVXXAK

SEQ ID NO: 2912 - protein, 39 aa, Artificial Sequence
  Non-cyclic GFR-binding peptide
  MOD_RES (2)..(34)..(35): Xaa is C or S
GXGEVVMEYHYKLVVKDYEDKYLMSIPSLETPVXXAKPI

SEQ ID NO: 2913 - protein, 35 aa, Artificial Sequence
  Non-cyclic GFR-binding peptide
  MOD_RES (1)..(34)..(35): Xaa is C or S
  MOD_RES (12)..(13)..(14)..(15)..(16): Xaa is A or G
  MOD_RES (17)..(18)..(19)..(20): Xaa is A or G or absent
XSRVIMRYKKLXXXXXXXXXFYLISIANLAQPVXX

SEQ ID NO: 2914 - protein, 36 aa, Artificial Sequence
  Non-cyclic GFR-binding peptide
  MOD_RES (33)..(33): Xaa is C or S
  MOD_RES (11)..(12)..(13)..(14)..(15): Xaa is A or G
  MOD_RES (16)..(17)..(18)..(19): Xaa is A or G or absent
RVVMNQYNKLXXXXXXXXXLYLVSIASLKTPAXTPK

SEQ ID NO: 2915 - protein, 36 aa, Artificial Sequence
  Non-cyclic GFR-binding peptide
  MOD_RES (2)..(4)..(36): Xaa is C or S
RXGXGEVVMDYHYKLVVKENEDKYLMSIPSLETPVX

SEQ ID NO: 2916 - protein, 39 aa, Artificial Sequence
  Non-cyclic GFR-binding peptide
  MOD_RES (1)..(3)..(35)..(36): Xaa is C or S
XGXARVVMNRHKRLIVNSSDDYYLVSTASLQTPAXXPKP

SEQ ID NO: 2917 - protein, 41 aa, Artificial Sequence
  Non-cyclic GFR-binding peptide
  MOD_RES (1)..(3)..(37)..(38): Xaa is C or S
  MOD_RES (15)..(16)..(17)..(18)..(19): Xaa is A or G
  MOD_RES (20)..(21)..(22)..(23): Xaa is A or G or absent
XGXGEVVMDRHKRLXXXXXXXXXYYLMSTASLETPVXXAKP

SEQ ID NO: 2918 - protein, 34 aa, Artificial Sequence
  Non-cyclic GFR-binding peptide
  MOD_RES (2)..(2): Xaa is C or S
GXEAVSMGERHKRLTPVGMDDYYLVSTASLKTPV

SEQ ID NO: 2919 - protein, 39 aa, Artificial Sequence
  Non-cyclic GFR-binding peptide
  MOD_RES (2)..(36)..(37): Xaa is C or S
  MOD_RES (14)..(15)..(16)..(17)..(18): Xaa is A or G
  MOD_RES (19)..(20)..(21)..(22): Xaa is A or G or absent
GXGEVVMDYHYKLXXXXXXXXXKYLMSIPSLETPVXXAK

SEQ ID NO: 2920 - protein, 33 aa, Artificial Sequence
  Non-cyclic GFR-binding peptide
  MOD_RES (2)..(2): Xaa is C or S
GXGEVVMERYKKLVVKDYEDFYLMSIANLETPV

SEQ ID NO: 2921 - protein, 36 aa, Artificial Sequence
  Non-cyclic GFR-binding peptide
ALHDELTRYKKLFIPKKRVIEFYLVSIANLQVQTPR

SEQ ID NO: 2922 - protein, 35 aa, Artificial Sequence
  Non-cyclic GFR-binding peptide
  MOD_RES (1)..(32)..(33): Xaa is C or S
XSRVIMYHYKLVKPKRGVKYLISIPSLAQPVXXPA

SEQ ID NO: 2923 - protein, 34 aa, Artificial Sequence
  Non-cyclic GFR-binding peptide
  MOD_RES (32)..(33): Xaa is C or S
SRVVMNRHKRLIVNSSDDYYLVSTASLKTPAXXP

SEQ ID NO: 2924 - protein, 38 aa, Artificial Sequence
  Non-cyclic GFR-binding peptide
  MOD_RES (34)..(35): Xaa is C or S
  MOD_RES (12)..(13)..(14)..(15)..(16): Xaa is A or G
  MOD_RES (17)..(18)..(19)..(20): Xaa is A or G or absent
ARVVMNQYNKLXXXXXXXXXLYLVSIASLQTPAXXPKP

SEQ ID NO: 2925 - protein, 37 aa, Artificial Sequence
  Non-cyclic GFR-binding peptide
  MOD_RES (33)..(34): Xaa is C or S
  MOD_RES (11)..(12)..(13)..(14)..(15): Xaa is A or G
  MOD_RES (16)..(17)..(18)..(19): Xaa is A or G or absent
RVVMNYHYKLXXXXXXXXXKYLVSIPSLQTPAXXPKP

SEQ ID NO: 2926 - protein, 43 aa, Artificial Sequence
  Non-cyclic GFR-binding peptide
  MOD_RES (2)..(4)..(37)..(38): Xaa is C or S
  MOD_RES (15)..(16)..(17)..(18)..(19): Xaa is A or G
  MOD_RES (20)..(21)..(22)..(23): Xaa is A or G or absent
SXKXSKVIMQYNKLXXXXXXXXXLYLISIASLDQSVXXPSASA

SEQ ID NO: 2927 - protein, 35 aa, Artificial Sequence
  Non-cyclic GFR-binding peptide
  MOD_RES (1)..(34)..(35): Xaa is C or S
  MOD_RES (12)..(13)..(14)..(15)..(16): Xaa is A or G
  MOD_RES (17)..(18)..(19)..(20): Xaa is A or G or absent
XSKVIMRHKRLXXXXXXXXXYYLISTASLDQSVXX

SEQ ID NO: 2928 - protein, 38 aa, Artificial Sequence
  Non-cyclic GFR-binding peptide
  MOD_RES (2)..(34): Xaa is C or S
GXSRVVMNRHKRLIVNSSDDYYLVSTASLKTPAXTPKT

SEQ ID NO: 2929 - protein, 33 aa, Artificial Sequence
  Non-cyclic GFR-binding peptide
  MOD_RES (31)..(32): Xaa is C or S
SKVIMRHKRLIKPTKGIYYLISTASLDQSVXXP

SEQ ID NO: 2930 - protein, 37 aa, Artificial Sequence
  Non-cyclic GFR-binding peptide
  MOD_RES (32)..(32): Xaa is C or S
SRVVMNRHKRLIVNSSDDYYLVSTASLKTPAXTPKTV

SEQ ID NO: 2931 - protein, 40 aa, Artificial Sequence
  Non-cyclic GFR-binding peptide
  MOD_RES (2)..(4)..(37)..(38): Xaa is C or S
  MOD_RES (15)..(16)..(17)..(18)..(19): Xaa is A or G
  MOD_RES (20)..(21)..(22)..(23): Xaa is A or G or absent
SXKXSKVVMRYKKLXXXXXXXXXFYLISIANLDQPVXXPS

SEQ ID NO: 2932 - protein, 35 aa, Artificial Sequence
  Non-cyclic GFR-binding peptide
  MOD_RES (1)..(3)..(35): Xaa is C or S
XGXSRVVMNQYNKLIVNSSDDLYLVSIASLKTPAX

SEQ ID NO: 2933 - protein, 35 aa, Artificial Sequence
  Non-cyclic GFR-binding peptide
  MOD_RES (34)..(35): Xaa is C or S
  MOD_RES (12)..(13)..(14)..(15)..(16): Xaa is A or G
  MOD_RES (17)..(18)..(19)..(20): Xaa is A or G or absent
ARVVMNRHKRLXXXXXXXXXYYLVSTASLQTPAXX

SEQ ID NO: 2934 - protein, 35 aa, Artificial Sequence
  Non-cyclic GFR-binding peptide
  MOD_RES (32)..(33): Xaa is C or S
ARVVMNQYNKLIVNSSDDLYLVSIASLQTPAXXPK

SEQ ID NO: 2935 - protein, 38 aa, Artificial Sequence
  Non-cyclic GFR-binding peptide
  MOD_RES (35)..(36): Xaa is C or S
  MOD_RES (13)..(14)..(15)..(16)..(17): Xaa is A or G
  MOD_RES (18)..(19)..(20)..(21): Xaa is A or G or absent
EAVSMGEQYNKLXXXXXXXXXLYLVSIASLKTPVXXAK

SEQ ID NO: 2936 - protein, 39 aa, Artificial Sequence
  Non-cyclic GFR-binding peptide
  MOD_RES (36)..(36): Xaa is C or S
LHDELTYHYKLFIPKKRVIEKYLVSIPSLQVQTPRXQVN

SEQ ID NO: 2937 - protein, 35 aa, Artificial Sequence
  Non-cyclic GFR-binding peptide
  MOD_RES (1)..(34)..(35): Xaa is C or S
  MOD_RES (12)..(13)..(14)..(15)..(16): Xaa is A or G
  MOD_RES (17)..(18)..(19)..(20): Xaa is A or G or absent
XSKVIMQYNKLXXXXXXXXXLYLISIASLDQSVXX

SEQ ID NO: 2938 - protein, 40 aa, Artificial Sequence
  Non-cyclic GFR-binding peptide
  MOD_RES (2)..(4)..(35)..(36): Xaa is C or S
SXKXSRVIMRHKRLVKPKRGVYYLISTASLAQPVXXPAAS

SEQ ID NO: 2939 - protein, 35 aa, Artificial Sequence
  Non-cyclic GFR-binding peptide
  MOD_RES (2)..(33)..(34): Xaa is C or S
KXSKVIMQYNKLIKPTKGILYLISIASLDQSVXXP

SEQ ID NO: 2940 - protein, 38 aa, Artificial Sequence
  Non-cyclic GFR-binding peptide
  MOD_RES (35)..(36): Xaa is C or S
  MOD_RES (13)..(14)..(15)..(16)..(17): Xaa is A or G
  MOD_RES (18)..(19)..(20)..(21): Xaa is A or G or absent
EAVSMGERHKRLXXXXXXXXXYYLVSTASLKTPVXXAK

SEQ ID NO: 2941 - protein, 45 aa, Artificial Sequence
  Non-cyclic GFR-binding peptide
  MOD_RES (2)..(4)..(41): Xaa is C or S
EXKXALHDELTRHKRLFIPKKRVIEYYLVSTASLQVQTPRXQVNR

SEQ ID NO: 2942 - protein, 41 aa, Artificial Sequence
  Non-cyclic GFR-binding peptide
  MOD_RES (2)..(4)..(36)..(37): Xaa is C or S
RXGXGEVVMEYHYKLVVKDYEDKYLMSIPSLETPVXXAKPI

SEQ ID NO: 2943 - protein, 42 aa, Artificial Sequence
  Non-cyclic GFR-binding peptide
  MOD_RES (2)..(4)..(36)..(37): Xaa is C or S
RXGXGEVVMDRHKRLVVKENEDYYLMSTASLETPVXXAKPIK

SEQ ID NO: 2944 - protein, 36 aa, Artificial Sequence
  Non-cyclic GFR-binding peptide
  MOD_RES (1)..(34)..(35): Xaa is C or S
  MOD_RES (12)..(13)..(14)..(15)..(16): Xaa is A or G
  MOD_RES (17)..(18)..(19)..(20): Xaa is A or G or absent
XSKVVMYHYKLXXXXXXXXXKYLISIPSLDQPVXXP

SEQ ID NO: 2945 - protein, 39 aa, Artificial Sequence
  Non-cyclic GFR-binding peptide
  MOD_RES (2)..(35)..(36): Xaa is C or S
  MOD_RES (13)..(14)..(15)..(16)..(17): Xaa is A or G
  MOD_RES (18)..(19)..(20)..(21): Xaa is A or G or absent
KXSKVVMQYNKLXXXXXXXXXLYLISIASLDQPVXXPSA

SEQ ID NO: 2946 - protein, 40 aa, Artificial Sequence
  Non-cyclic GFR-binding peptide
  MOD_RES (2)..(39): Xaa is C or S
KXALHDELTYHYKLFIPKKRVIEKYLVSIPSLQVQTPRXQ

SEQ ID NO: 2947 - protein, 38 aa, Artificial Sequence
  Non-cyclic GFR-binding peptide
  MOD_RES (1)..(3)..(35): Xaa is C or S
XGXSRVVMNQYNKLIVNSSDDLYLVSIASLKTPAXTPK

SEQ ID NO: 2948 - protein, 35 aa, Artificial Sequence
  Non-cyclic GFR-binding peptide
  MOD_RES (32)..(33): Xaa is C or S
GEVVMERYKKLVVKDYEDFYLMSIANLETPVXXAK

SEQ ID NO: 2949 - protein, 37 aa, Artificial Sequence
  Non-cyclic GFR-binding peptide
  MOD_RES (2)..(2): Xaa is C or S
KXALHDELTYHYKLFIPKKRVIEKYLVSIPSLQVQTP

SEQ ID NO: 2950 - protein, 37 aa, Artificial Sequence
  Non-cyclic GFR-binding peptide
  MOD_RES (2)..(33)..(34): Xaa is C or S
KXSKVVMRHKRLVKPTRGVYYLISTASLDQPVXXPSA

SEQ ID NO: 2951 - protein, 37 aa, Artificial Sequence
  Non-cyclic GFR-binding peptide
  MOD_RES (1)..(1): Xaa is C or S
  MOD_RES (14)..(15)..(16)..(17)..(18): Xaa is A or G
  MOD_RES (19)..(20)..(21)..(22): Xaa is A or G or absent
XALHDELTYHYKLXXXXXXXXXKYLVSIPSLQVQTPR

SEQ ID NO: 2952 - protein, 37 aa, Artificial Sequence
  Non-cyclic GFR-binding peptide
  MOD_RES (2)..(33)..(34): Xaa is C or S
KXSKVVMQYNKLVKPTRGVLYLISIASLDQPVXXPSA

SEQ ID NO: 2953 - protein, 35 aa, Artificial Sequence
  Non-cyclic GFR-binding peptide
  MOD_RES (34)..(35): Xaa is C or S
  MOD_RES (12)..(13)..(14)..(15)..(16): Xaa is A or G
  MOD_RES (17)..(18)..(19)..(20): Xaa is A or G or absent
SRVVMNYHYKLXXXXXXXXXKYLVSIPSLKTPAXX

SEQ ID NO: 2954 - protein, 41 aa, Artificial Sequence
  Non-cyclic GFR-binding peptide
  MOD_RES (2)..(4)..(35)..(36): Xaa is C or S
SXKXSKVVMQYNKLVKPTRGVLYLISIASLDQPVXXPSASA

SEQ ID NO: 2955 - protein, 41 aa, Artificial Sequence
  Non-cyclic GFR-binding peptide
  MOD_RES (37)..(37): Xaa is C or S
  MOD_RES (13)..(14)..(15)..(16)..(17): Xaa is A or G
  MOD_RES (18)..(19)..(20)..(21): Xaa is A or G or absent
ALHDELTYHYKLXXXXXXXXXKYLVSIPSLQVQTPRXQVNR

SEQ ID NO: 2956 - protein, 44 aa, Artificial Sequence
  Non-cyclic GFR-binding peptide
  MOD_RES (2)..(4)..(38)..(39): Xaa is C or S
  MOD_RES (16)..(17)..(18)..(19)..(20): Xaa is A or G
  MOD_RES (21)..(22)..(23)..(24): Xaa is A or G or absent
HXGXAKVVMNQYNKLXXXXXXXXXLYLVSIASLKTPAXXAKPVA

SEQ ID NO: 2957 - protein, 39 aa, Artificial Sequence
  Non-cyclic GFR-binding peptide
  MOD_RES (1)..(35)..(36): Xaa is C or S
  MOD_RES (13)..(14)..(15)..(16)..(17): Xaa is A or G
  MOD_RES (18)..(19)..(20)..(21): Xaa is A or G or absent
XSRVVMNQYNKLXXXXXXXXXLYLVSIASLKTPAXXPKP

SEQ ID NO: 2958 - protein, 38 aa, Artificial Sequence
  Non-cyclic GFR-binding peptide
  MOD_RES (1)..(3)..(36)..(37): Xaa is C or S
  MOD_RES (14)..(15)..(16)..(17)..(18): Xaa is A or G
  MOD_RES (19)..(20)..(21)..(22): Xaa is A or G or absent
XKXSKVVMRYKKLXXXXXXXXXFYLISIANLDQPVXXP

SEQ ID NO: 2959 - protein, 33 aa, Artificial Sequence
  Non-cyclic GFR-binding peptide
  MOD_RES (32)..(33): Xaa is C or S
AKVVMNYHYKLIVNNSSDKYLVSIPSLKTPAXX

SEQ ID NO: 2960 - protein, 38 aa, Artificial Sequence
  Non-cyclic GFR-binding peptide
  MOD_RES (1)..(3)..(37)..(38): Xaa is C or S
  MOD_RES (15)..(16)..(17)..(18)..(19): Xaa is A or G
  MOD_RES (20)..(21)..(22)..(23): Xaa is A or G or absent
XGXGEVVMEYHYKLXXXXXXXXXKYLMSIPSLETPVXX

SEQ ID NO: 2961 - protein, 40 aa, Artificial Sequence
  Non-cyclic GFR-binding peptide
  MOD_RES (2)..(4)..(38)..(39): Xaa is C or S
  MOD_RES (16)..(17)..(18)..(19)..(20): Xaa is A or G
  MOD_RES (21)..(22)..(23)..(24): Xaa is A or G or absent
HXGXAKVVMNRYKKLXXXXXXXXXFYLVSIANLKTPAXXA

SEQ ID NO: 2962 - protein, 40 aa, Artificial Sequence
  Non-cyclic GFR-binding peptide
  MOD_RES (1)..(3)..(37): Xaa is C or S
  MOD_RES (15)..(16)..(17)..(18)..(19): Xaa is A or G
  MOD_RES (20)..(21)..(22)..(23): Xaa is A or G or absent
XGXSRVVMNQYNKLXXXXXXXXXLYLVSIASLKTPAXTPK

SEQ ID NO: 2963 - protein, 36 aa, Artificial Sequence
  Non-cyclic GFR-binding peptide
  MOD_RES (2)..(34): Xaa is C or S
GXSRVVMNRHKRLIVNSSDDYYLVSTASLKTPAXTP

SEQ ID NO: 2964 - protein, 32 aa, Artificial Sequence
  Non-cyclic GFR-binding peptide
  MOD_RES (11)..(12)..(13)..(14)..(15): Xaa is A or G
  MOD_RES (16)..(17)..(18)..(19): Xaa is A or G or absent
EVVMDRYKKLXXXXXXXXXFYLMSIANLETPV

SEQ ID NO: 2965 - protein, 37 aa, Artificial Sequence
  Non-cyclic GFR-binding peptide
  MOD_RES (33)..(34): Xaa is C or S
  MOD_RES (11)..(12)..(13)..(14)..(15): Xaa is A or G
  MOD_RES (16)..(17)..(18)..(19): Xaa is A or G or absent
SKVIMYHYKLXXXXXXXXXKYLISIPSLDQSVXXPSA

SEQ ID NO: 2966 - protein, 41 aa, Artificial Sequence
  Non-cyclic GFR-binding peptide
  MOD_RES (1)..(38): Xaa is C or S
  MOD_RES (14)..(15)..(16)..(17)..(18): Xaa is A or G
  MOD_RES (19)..(20)..(21)..(22): Xaa is A or G or absent
XALHDELTRHKRLXXXXXXXXXYYLVSTASLQVQTPRXQVN

SEQ ID NO: 2967 - protein, 40 aa, Artificial Sequence
  Non-cyclic GFR-binding peptide
  MOD_RES (2)..(34)..(35): Xaa is C or S
GXSRVVMNYHYKLIVNSSDDKYLVSIPSLKTPAXXPKPVY

SEQ ID NO: 2968 - protein, 39 aa, Artificial Sequence
  Non-cyclic GFR-binding peptide
  MOD_RES (2)..(33)..(34): Xaa is C or S
KXSKVVMYHYKLVKPTRGVKYLISIPSLDQPVXXPSASA

SEQ ID NO: 2969 - protein, 42 aa, Artificial Sequence
  Non-cyclic GFR-binding peptide
  MOD_RES (2)..(4)..(41): Xaa is C or S
  MOD_RES (17)..(18)..(19)..(20)..(21): Xaa is A or G
  MOD_RES (22)..(23)..(24)..(25): Xaa is A or G or absent
EXKXALHDELTQYNKLXXXXXXXXXLYLVSIASLQVQTPRXQ

SEQ ID NO: 2970 - protein, 45 aa, Artificial Sequence
  Non-cyclic GFR-binding peptide
  MOD_RES (2)..(4)..(41): Xaa is C or S
  MOD_RES (17)..(18)..(19)..(20)..(21): Xaa is A or G
  MOD_RES (22)..(23)..(24)..(25): Xaa is A or G or absent
EXKXALHDELTQYNKLXXXXXXXXXLYLVSIASLQVQTPRXQVNR

SEQ ID NO: 2971 - protein, 36 aa, Artificial Sequence
  Non-cyclic GFR-binding peptide
  MOD_RES (1)..(3): Xaa is C or S
  MOD_RES (15)..(16)..(17)..(18)..(19): Xaa is A or G
  MOD_RES (20)..(21)..(22)..(23): Xaa is A or G or absent
XGXSRVVMNRHKRLXXXXXXXXXYYLVSTASLKTPA

SEQ ID NO: 2972 - protein, 38 aa, Artificial Sequence
  Non-cyclic GFR-binding peptide
  MOD_RES (34)..(34): Xaa is C or S
  MOD_RES (12)..(13)..(14)..(15)..(16): Xaa is A or G
  MOD_RES (17)..(18)..(19)..(20): Xaa is A or G or absent
SRVVMNRHKRLXXXXXXXXXYYLVSTASLKTPAXTPKT

SEQ ID NO: 2973 - protein, 39 aa, Artificial Sequence
  Non-cyclic GFR-binding peptide
  MOD_RES (1)..(33)..(34): Xaa is C or S
XSRVVMNYHYKLIVNSSDDKYLVSIPSLKTPAXXPKPVY

SEQ ID NO: 2974 - protein, 35 aa, Artificial Sequence
  Non-cyclic GFR-binding peptide
  MOD_RES (2)..(2): Xaa is C or S
  MOD_RES (14)..(15)..(16)..(17)..(18): Xaa is A or G
  MOD_RES (19)..(20)..(21)..(22): Xaa is A or G or absent
GXAKVVMNYHYKLXXXXXXXXXKYLVSIPSLKTPA

SEQ ID NO: 2975 - protein, 31 aa, Artificial Sequence
  Non-cyclic GFR-binding peptide
  MOD_RES (31)..(31): Xaa is C or S
SKVIMRYKKLIKPTKGIFYLISIANLDQSVX

SEQ ID NO: 2976 - protein, 41 aa, Artificial Sequence
  Non-cyclic GFR-binding peptide
  MOD_RES (2)..(37)..(38): Xaa is C or S
  MOD_RES (15)..(16)..(17)..(18)..(19): Xaa is A or G
  MOD_RES (20)..(21)..(22)..(23): Xaa is A or G or absent
GXEAVSMGERYKKLXXXXXXXXXFYLVSIANLKTPVXXAKG

SEQ ID NO: 2977 - protein, 40 aa, Artificial Sequence
  Non-cyclic GFR-binding peptide
  MOD_RES (1)..(3)..(36)..(37): Xaa is C or S
  MOD_RES (14)..(15)..(16)..(17)..(18): Xaa is A or G
  MOD_RES (19)..(20)..(21)..(22): Xaa is A or G or absent
XKXSKVIMRHKRLXXXXXXXXXYYLISTASLDQSVXXPSA

SEQ ID NO: 2978 - protein, 32 aa, Artificial Sequence
  Non-cyclic GFR-binding peptide
  MOD_RES (31)..(32): Xaa is C or S
SKVIMRHKRLIKPTKGIYYLISTASLDQSVXX

SEQ ID NO: 2979 - protein, 34 aa, Artificial Sequence
  Non-cyclic GFR-binding peptide
  MOD_RES (33)..(34): Xaa is C or S
  MOD_RES (11)..(12)..(13)..(14)..(15): Xaa is A or G
  MOD_RES (16)..(17)..(18)..(19): Xaa is A or G or absent
SKVIMRYKKLXXXXXXXXXFYLISIANLDQSVXX

SEQ ID NO: 2980 - protein, 41 aa, Artificial Sequence
  Non-cyclic GFR-binding peptide
  MOD_RES (2)..(36)..(37): Xaa is C or S
  MOD_RES (14)..(15)..(16)..(17)..(18): Xaa is A or G
  MOD_RES (19)..(20)..(21)..(22): Xaa is A or G or absent
GXARVVMNRHKRLXXXXXXXXXYYLVSTASLQTPAXXPKPV

SEQ ID NO: 2981 - protein, 38 aa, Artificial Sequence
  Non-cyclic GFR-binding peptide
  MOD_RES (2)..(4): Xaa is C or S
  MOD_RES (17)..(18)..(19)..(20)..(21): Xaa is A or G
  MOD_RES (22)..(23)..(24)..(25): Xaa is A or G or absent
EXKXALHDELTRYKKLXXXXXXXXXFYLVSIANLQVQT

SEQ ID NO: 2982 - protein, 41 aa, Artificial Sequence
  Non-cyclic GFR-binding peptide
  MOD_RES (1)..(3)..(40): Xaa is C or S
XKXALHDELTRHKRLFIPKKRVIEYYLVSTASLQVQTPRXQ

SEQ ID NO: 2983 - protein, 35 aa, Artificial Sequence
  Non-cyclic GFR-binding peptide
  MOD_RES (1)..(33)..(34): Xaa is C or S
XARVVMNQYNKLIVNSSDDLYLVSIASLQTPAXXP

SEQ ID NO: 2984 - protein, 40 aa, Artificial Sequence
  Non-cyclic GFR-binding peptide
  MOD_RES (2)..(4)..(38)..(39): Xaa is C or S
  MOD_RES (16)..(17)..(18)..(19)..(20): Xaa is A or G
  MOD_RES (21)..(22)..(23)..(24): Xaa is A or G or absent
RXGXGEVVMERHKRLXXXXXXXXXYYLMSTASLETPVXXA

SEQ ID NO: 2985 - protein, 35 aa, Artificial Sequence
  Non-cyclic GFR-binding peptide
  MOD_RES (1)..(1): Xaa is C or S
  MOD_RES (14)..(15)..(16)..(17)..(18): Xaa is A or G
  MOD_RES (19)..(20)..(21)..(22): Xaa is A or G or absent
XALHDELTRYKKLXXXXXXXXXFYLVSIANLQVQT

SEQ ID NO: 2986 - protein, 35 aa, Artificial Sequence
  Non-cyclic GFR-binding peptide
  MOD_RES (31)..(32): Xaa is C or S
EVVMDYHYKLVVKENEDKYLMSIPSLETPVXXAKP

SEQ ID NO: 2987 - protein, 34 aa, Artificial Sequence
  Non-cyclic GFR-binding peptide
  MOD_RES (1)..(3): Xaa is C or S
XGXARVVMNRHKRLIVNSSDDYYLVSTASLQTPA

SEQ ID NO: 2988 - protein, 34 aa, Artificial Sequence
  Non-cyclic GFR-binding peptide
  MOD_RES (1)..(32)..(33): Xaa is C or S
XSRVIMRYKKLVKPKRGVFYLISIANLAQPVXXP

SEQ ID NO: 2989 - protein, 38 aa, Artificial Sequence
  Non-cyclic GFR-binding peptide
  MOD_RES (1)..(32)..(33): Xaa is C or S
XSRVIMRYKKLVKPKRGVFYLISIANLAQPVXXPAASA

SEQ ID NO: 2990 - protein, 38 aa, Artificial Sequence
  Non-cyclic GFR-binding peptide
  MOD_RES (35)..(35): Xaa is C or S
  MOD_RES (11)..(12)..(13)..(14)..(15): Xaa is A or G
  MOD_RES (16)..(17)..(18)..(19): Xaa is A or G or absent
HDELTQYNKLXXXXXXXXXLYLVSIASLQVQTPRXQVN

SEQ ID NO: 2991 - protein, 38 aa, Artificial Sequence
  Non-cyclic GFR-binding peptide
  MOD_RES (2)..(4)..(38): Xaa is C or S
  MOD_RES (16)..(17)..(18)..(19)..(20): Xaa is A or G
  MOD_RES (21)..(22)..(23)..(24): Xaa is A or G or absent
HXGXARVVMNRHKRLXXXXXXXXXYYLVSTASLQTPAX

SEQ ID NO: 2992 - protein, 40 aa, Artificial Sequence
  Non-cyclic GFR-binding peptide
  MOD_RES (1)..(3)..(36)..(37): Xaa is C or S
  MOD_RES (14)..(15)..(16)..(17)..(18): Xaa is A or G
  MOD_RES (19)..(20)..(21)..(22): Xaa is A or G or absent
XKXSRVIMRHKRLXXXXXXXXXYYLISTASLAQPVXXPAA

SEQ ID NO: 2993 - protein, 33 aa, Artificial Sequence
  Non-cyclic GFR-binding peptide
  MOD_RES (12)..(13)..(14)..(15)..(16): Xaa is A or G
  MOD_RES (17)..(18)..(19)..(20): Xaa is A or G or absent
ARVVMNQYNKLXXXXXXXXXLYLVSIASLQTPA

SEQ ID NO: 2994 - protein, 39 aa, Artificial Sequence
  Non-cyclic GFR-binding peptide
  MOD_RES (2)..(4)..(38)..(39): Xaa is C or S
  MOD_RES (16)..(17)..(18)..(19)..(20): Xaa is A or G
  MOD_RES (21)..(22)..(23)..(24): Xaa is A or G or absent
HXGXSRVVMNQYNKLXXXXXXXXXLYLVSIASLKTPAXX

SEQ ID NO: 2995 - protein, 38 aa, Artificial Sequence
  Non-cyclic GFR-binding peptide
  MOD_RES (1)..(38): Xaa is C or S
  MOD_RES (14)..(15)..(16)..(17)..(18): Xaa is A or G
  MOD_RES (19)..(20)..(21)..(22): Xaa is A or G or absent
XALHDELTRYKKLXXXXXXXXXFYLVSIANLQVQTPRX

SEQ ID NO: 2996 - protein, 40 aa, Artificial Sequence
  Non-cyclic GFR-binding peptide
  MOD_RES (2)..(36)..(37): Xaa is C or S
  MOD_RES (14)..(15)..(16)..(17)..(18): Xaa is A or G
  MOD_RES (19)..(20)..(21)..(22): Xaa is A or G or absent
GXGEVVMDYHYKLXXXXXXXXXKYLMSIPSLETPVXXAKP

SEQ ID NO: 2997 - protein, 32 aa, Artificial Sequence
  Non-cyclic GFR-binding peptide
  MOD_RES (11)..(12)..(13)..(14)..(15): Xaa is A or G
  MOD_RES (16)..(17)..(18)..(19): Xaa is A or G or absent
RVVMNYHYKLXXXXXXXXXKYLVSIPSLQTPA

SEQ ID NO: 2998 - protein, 39 aa, Artificial Sequence
  Non-cyclic GFR-binding peptide
  MOD_RES (2)..(35)..(36): Xaa is C or S
  MOD_RES (13)..(14)..(15)..(16)..(17): Xaa is A or G
  MOD_RES (18)..(19)..(20)..(21): Xaa is A or G or absent
KXSRVIMYHYKLXXXXXXXXXKYLISIPSLAQPVXXPAA

SEQ ID NO: 2999 - protein, 41 aa, Artificial Sequence
  Non-cyclic GFR-binding peptide
  MOD_RES (2)..(39): Xaa is C or S
KXALHDELTRHKRLFIPKKRVIEYYLVSTASLQVQTPRXQV

SEQ ID NO: 3000 - protein, 37 aa, Artificial Sequence
  Non-cyclic GFR-binding peptide
  MOD_RES (1)..(3)..(35)..(36): Xaa is C or S
XGXGEVVMDRYKKLVVKENEDFYLMSIANLETPVXXA

SEQ ID NO: 3001 - protein, 40 aa, Artificial Sequence
  Non-cyclic GFR-binding peptide
  MOD_RES (34)..(35): Xaa is C or S
  MOD_RES (12)..(13)..(14)..(15)..(16): Xaa is A or G
  MOD_RES (17)..(18)..(19)..(20): Xaa is A or G or absent
SRVVMNQYNKLXXXXXXXXXLYLVSIASLKTPAXXPKPVY

SEQ ID NO: 3002 - protein, 40 aa, Artificial Sequence
  Non-cyclic GFR-binding peptide
  MOD_RES (1)..(38): Xaa is C or S
  MOD_RES (14)..(15)..(16)..(17)..(18): Xaa is A or G
  MOD_RES (19)..(20)..(21)..(22): Xaa is A or G or absent
XALHDELTRYKKLXXXXXXXXXFYLVSIANLQVQTPRXQV

SEQ ID NO: 3003 - protein, 37 aa, Artificial Sequence
  Non-cyclic GFR-binding peptide
  MOD_RES (33)..(34): Xaa is C or S
  MOD_RES (11)..(12)..(13)..(14)..(15): Xaa is A or G
  MOD_RES (16)..(17)..(18)..(19): Xaa is A or G or absent
SKVIMRHKRLXXXXXXXXXYYLISTASLDQSVXXPSA

SEQ ID NO: 3004 - protein, 36 aa, Artificial Sequence
  Non-cyclic GFR-binding peptide
  MOD_RES (1)..(3)..(35)..(36): Xaa is C or S
XGXGEVVMDRHKRLVVKENEDYYLMSTASLETPVXX

SEQ ID NO: 3005 - protein, 40 aa, Artificial Sequence
  Non-cyclic GFR-binding peptide
  MOD_RES (1)..(3)..(34)..(35): Xaa is C or S
XKXSKVIMQYNKLIKPTKGILYLISIASLDQSVXXPSASA

SEQ ID NO: 3006 - protein, 40 aa, Artificial Sequence
  Non-cyclic GFR-binding peptide
  MOD_RES (1)..(34)..(35): Xaa is C or S
  MOD_RES (12)..(13)..(14)..(15)..(16): Xaa is A or G
  MOD_RES (17)..(18)..(19)..(20): Xaa is A or G or absent
XSKVIMRHKRLXXXXXXXXXYYLISTASLDQSVXXPSASA

SEQ ID NO: 3007 - protein, 36 aa, Artificial Sequence
  Non-cyclic GFR-binding peptide
  MOD_RES (32)..(33): Xaa is C or S
ARVVMNYHYKLIVNSSDDKYLVSIPSLQTPAXXPKP

SEQ ID NO: 3008 - protein, 35 aa, Artificial Sequence
  Non-cyclic GFR-binding peptide
  MOD_RES (1)..(3): Xaa is C or S
  MOD_RES (14)..(15)..(16)..(17)..(18): Xaa is A or G
  MOD_RES (19)..(20)..(21)..(22): Xaa is A or G or absent
XKXSKVVMYHYKLXXXXXXXXXKYLISIPSLDQPV

SEQ ID NO: 3009 - protein, 38 aa, Artificial Sequence
  Non-cyclic GFR-binding peptide
  MOD_RES (2)..(36): Xaa is C or S
  MOD_RES (14)..(15)..(16)..(17)..(18): Xaa is A or G
  MOD_RES (19)..(20)..(21)..(22): Xaa is A or G or absent
GXSRVVMNRHKRLXXXXXXXXXYYLVSTASLKTPAXTP

SEQ ID NO: 3010 - protein, 35 aa, Artificial Sequence
  Non-cyclic GFR-binding peptide
  MOD_RES (33)..(34): Xaa is C or S
EAVSMGERHKRLTPVGMDDYYLVSTASLKTPVXXA

SEQ ID NO: 3011 - protein, 40 aa, Artificial Sequence
  Non-cyclic GFR-binding peptide
  MOD_RES (2)..(36)..(37): Xaa is C or S
  MOD_RES (14)..(15)..(16)..(17)..(18): Xaa is A or G
  MOD_RES (19)..(20)..(21)..(22): Xaa is A or G or absent
GXSRVVMNQYNKLXXXXXXXXXLYLVSIASLKTPAXXPKP

SEQ ID NO: 3012 - protein, 37 aa, Artificial Sequence
  Non-cyclic GFR-binding peptide
  MOD_RES (33)..(34): Xaa is C or S
  MOD_RES (11)..(12)..(13)..(14)..(15): Xaa is A or G
  MOD_RES (16)..(17)..(18)..(19): Xaa is A or G or absent
SKVVMQYNKLXXXXXXXXXLYLISIASLDQPVXXPSA

SEQ ID NO: 3013 - protein, 34 aa, Artificial Sequence
  Non-cyclic GFR-binding peptide
  MOD_RES (31)..(32): Xaa is C or S
RVVMNYHYKLIVNSSDDKYLVSIPSLKTPAXXPK

SEQ ID NO: 3014 - protein, 37 aa, Artificial Sequence
  Non-cyclic GFR-binding peptide
  MOD_RES (33)..(34): Xaa is C or S
  MOD_RES (11)..(12)..(13)..(14)..(15): Xaa is A or G
  MOD_RES (16)..(17)..(18)..(19): Xaa is A or G or absent
RVVMNYHYKLXXXXXXXXXKYLVSIPSLKTPAXXPKP

SEQ ID NO: 3015 - protein, 39 aa, Artificial Sequence
  Non-cyclic GFR-binding peptide
  MOD_RES (2)..(35)..(36): Xaa is C or S
  MOD_RES (13)..(14)..(15)..(16)..(17): Xaa is A or G
  MOD_RES (18)..(19)..(20)..(21): Xaa is A or G or absent
KXSRVIMQYNKLXXXXXXXXXLYLISIASLAQPVXXPAA

SEQ ID NO: 3016 - protein, 34 aa, Artificial Sequence
  Non-cyclic GFR-binding peptide
  MOD_RES (32)..(32): Xaa is C or S
SRVVMNYHYKLIVNSSDDKYLVSIPSLKTPAXTP

SEQ ID NO: 3017 - protein, 33 aa, Artificial Sequence
  Non-cyclic GFR-binding peptide
  MOD_RES (2)..(2): Xaa is C or S
GXAKVVMNQYNKLIVNNSSDLYLVSIASLKTPA

SEQ ID NO: 3018 - protein, 37 aa, Artificial Sequence
  Non-cyclic GFR-binding peptide
  MOD_RES (2)..(4)..(37): Xaa is C or S
  MOD_RES (15)..(16)..(17)..(18)..(19): Xaa is A or G
  MOD_RES (20)..(21)..(22)..(23): Xaa is A or G or absent
SXKXSKVVMRYKKLXXXXXXXXXFYLISIANLDQPVX

SEQ ID NO: 3019 - protein, 40 aa, Artificial Sequence
  Non-cyclic GFR-binding peptide
  MOD_RES (1)..(34)..(35): Xaa is C or S
  MOD_RES (12)..(13)..(14)..(15)..(16): Xaa is A or G
  MOD_RES (17)..(18)..(19)..(20): Xaa is A or G or absent
XSKVIMQYNKLXXXXXXXXXLYLISIASLDQSVXXPSASA

SEQ ID NO: 3020 - protein, 38 aa, Artificial Sequence
  Non-cyclic GFR-binding peptide
  MOD_RES (1)..(34)..(35): Xaa is C or S
  MOD_RES (12)..(13)..(14)..(15)..(16): Xaa is A or G
  MOD_RES (17)..(18)..(19)..(20): Xaa is A or G or absent
XSKVIMYHYKLXXXXXXXXXKYLISIPSLDQSVXXPSA

SEQ ID NO: 3021 - protein, 41 aa, Artificial Sequence
  Non-cyclic GFR-binding peptide
  MOD_RES (2)..(36): Xaa is C or S
  MOD_RES (14)..(15)..(16)..(17)..(18): Xaa is A or G
  MOD_RES (19)..(20)..(21)..(22): Xaa is A or G or absent
GXSRVVMNYHYKLXXXXXXXXXKYLVSIPSLKTPAXTPKTV

SEQ ID NO: 3022 - protein, 37 aa, Artificial Sequence
  Non-cyclic GFR-binding peptide
  MOD_RES (2)..(36)..(37): Xaa is C or S
  MOD_RES (14)..(15)..(16)..(17)..(18): Xaa is A or G
  MOD_RES (19)..(20)..(21)..(22): Xaa is A or G or absent
GXSRVVMNQYNKLXXXXXXXXXLYLVSIASLKTPAXX

SEQ ID NO: 3023 - protein, 35 aa, Artificial Sequence
  Non-cyclic GFR-binding peptide
  MOD_RES (33)..(34): Xaa is C or S
  MOD_RES (11)..(12)..(13)..(14)..(15): Xaa is A or G
  MOD_RES (16)..(17)..(18)..(19): Xaa is A or G or absent
EVVMERHKRLXXXXXXXXXYYLMSTASLETPVXXA

SEQ ID NO: 3024 - protein, 40 aa, Artificial Sequence
  Non-cyclic GFR-binding peptide
  MOD_RES (1)..(3)..(36)..(37): Xaa is C or S
  MOD_RES (14)..(15)..(16)..(17)..(18): Xaa is A or G
  MOD_RES (19)..(20)..(21)..(22): Xaa is A or G or absent
XKXSKVVMYHYKLXXXXXXXXXKYLISIPSLDQPVXXPSA

SEQ ID NO: 3025 - protein, 37 aa, Artificial Sequence
  Non-cyclic GFR-binding peptide
  MOD_RES (2)..(34)..(35): Xaa is C or S
GXAKVVMNYHYKLIVNNSSDKYLVSIPSLKTPAXXAK

SEQ ID NO: 3026 - protein, 35 aa, Artificial Sequence
  Non-cyclic GFR-binding peptide
  MOD_RES (34)..(35): Xaa is C or S
  MOD_RES (12)..(13)..(14)..(15)..(16): Xaa is A or G
  MOD_RES (17)..(18)..(19)..(20): Xaa is A or G or absent
ARVVMNQYNKLXXXXXXXXXLYLVSIASLQTPAXX

SEQ ID NO: 3027 - protein, 39 aa, Artificial Sequence
  Non-cyclic GFR-binding peptide
  MOD_RES (2)..(39): Xaa is C or S
  MOD_RES (15)..(16)..(17)..(18)..(19): Xaa is A or G
  MOD_RES (20)..(21)..(22)..(23): Xaa is A or G or absent
KXALHDELTQYNKLXXXXXXXXXLYLVSIASLQVQTPRX

SEQ ID NO: 3028 - protein, 32 aa, Artificial Sequence
  Non-cyclic GFR-binding peptide
  MOD_RES (31)..(32): Xaa is C or S
EVVMDRHKRLVVKENEDYYLMSTASLETPVXX

SEQ ID NO: 3029 - protein, 36 aa, Artificial Sequence
  Non-cyclic GFR-binding peptide
  MOD_RES (1)..(3): Xaa is C or S
  MOD_RES (15)..(16)..(17)..(18)..(19): Xaa is A or G
  MOD_RES (20)..(21)..(22)..(23): Xaa is A or G or absent
XGXAKVVMNQYNKLXXXXXXXXXLYLVSIASLKTPA

SEQ ID NO: 3030 - protein, 37 aa, Artificial Sequence
  Non-cyclic GFR-binding peptide
  MOD_RES (1)..(3)..(35)..(36): Xaa is C or S
XGXARVVMNQYNKLIVNSSDDLYLVSIASLQTPAXXP

SEQ ID NO: 3031 - protein, 38 aa, Artificial Sequence
  Non-cyclic GFR-binding peptide
  MOD_RES (34)..(35): Xaa is C or S
  MOD_RES (12)..(13)..(14)..(15)..(16): Xaa is A or G
  MOD_RES (17)..(18)..(19)..(20): Xaa is A or G or absent
GEVVMDRYKKLXXXXXXXXXFYLMSIANLETPVXXAKP

SEQ ID NO: 3032 - protein, 32 aa, Artificial Sequence
  Non-cyclic GFR-binding peptide
  MOD_RES (11)..(12)..(13)..(14)..(15): Xaa is A or G
  MOD_RES (16)..(17)..(18)..(19): Xaa is A or G or absent
SKVIMQYNKLXXXXXXXXXLYLISIASLDQSV

SEQ ID NO: 3033 - protein, 38 aa, Artificial Sequence
  Non-cyclic GFR-binding peptide
  MOD_RES (2)..(33)..(34): Xaa is C or S
KXSKVVMYHYKLVKPTRGVKYLISIPSLDQPVXXPSAS

SEQ ID NO: 3034 - protein, 37 aa, Artificial Sequence
  Non-cyclic GFR-binding peptide
  MOD_RES (36)..(36): Xaa is C or S
  MOD_RES (12)..(13)..(14)..(15)..(16): Xaa is A or G
  MOD_RES (17)..(18)..(19)..(20): Xaa is A or G or absent
LHDELTRYKKLXXXXXXXXXFYLVSIANLQVQTPRXQ

SEQ ID NO: 3035 - protein, 41 aa, Artificial Sequence
  Non-cyclic GFR-binding peptide
  MOD_RES (2)..(39): Xaa is C or S
KXALHDELTQYNKLFIPKKRVIELYLVSIASLQVQTPRXQV

SEQ ID NO: 3036 - protein, 35 aa, Artificial Sequence
  Non-cyclic GFR-binding peptide
  MOD_RES (35)..(35): Xaa is C or S
  MOD_RES (11)..(12)..(13)..(14)..(15): Xaa is A or G
  MOD_RES (16)..(17)..(18)..(19): Xaa is A or G or absent
HDELTRYKKLXXXXXXXXXFYLVSIANLQVQTPRX

SEQ ID NO: 3037 - protein, 33 aa, Artificial Sequence
  Non-cyclic GFR-binding peptide
  MOD_RES (33)..(33): Xaa is C or S
  MOD_RES (11)..(12)..(13)..(14)..(15): Xaa is A or G
  MOD_RES (16)..(17)..(18)..(19): Xaa is A or G or absent
SRVIMQYNKLXXXXXXXXXLYLISIASLAQPVX

SEQ ID NO: 3038 - protein, 32 aa, Artificial Sequence
  Non-cyclic GFR-binding peptide
  MOD_RES (1)..(32): Xaa is C or S
XSRVIMRHKRLVKPKRGVYYLISTASLAQPVX

SEQ ID NO: 3039 - protein, 32 aa, Artificial Sequence
  Non-cyclic GFR-binding peptide
  MOD_RES (31)..(32): Xaa is C or S
SRVIMRHKRLVKPKRGVYYLISTASLAQPVXX

SEQ ID NO: 3040 - protein, 34 aa, Artificial Sequence
  Non-cyclic GFR-binding peptide
  MOD_RES (31)..(32): Xaa is C or S
RVVMNQYNKLIVNSSDDLYLVSIASLKTPAXXPK

SEQ ID NO: 3041 - protein, 33 aa, Artificial Sequence
  Non-cyclic GFR-binding peptide
  MOD_RES (1)..(3): Xaa is C or S
XKXSKVVMRHKRLVKPTRGVYYLISTASLDQPV

SEQ ID NO: 3042 - protein, 31 aa, Artificial Sequence
  Non-cyclic GFR-binding peptide
  MOD_RES (31)..(31): Xaa is C or S
SRVIMRYKKLVKPKRGVFYLISIANLAQPVX

SEQ ID NO: 3043 - protein, 36 aa, Artificial Sequence
  Non-cyclic GFR-binding peptide
  MOD_RES (2)..(4)..(35)..(36): Xaa is C or S
SXKXSRVIMRHKRLVKPKRGVYYLISTASLAQPVXX

SEQ ID NO: 3044 - protein, 38 aa, Artificial Sequence
  Non-cyclic GFR-binding peptide
  MOD_RES (2)..(4)..(38): Xaa is C or S
  MOD_RES (16)..(17)..(18)..(19)..(20): Xaa is A or G
  MOD_RES (21)..(22)..(23)..(24): Xaa is A or G or absent
HXGXAKVVMNYHYKLXXXXXXXXXKYLVSIPSLKTPAX

SEQ ID NO: 3045 - protein, 38 aa, Artificial Sequence
  Non-cyclic GFR-binding peptide
  MOD_RES (2)..(34)..(35): Xaa is C or S
GXGEVVMEYHYKLVVKDYEDKYLMSIPSLETPVXXAKP

SEQ ID NO: 3046 - protein, 38 aa, Artificial Sequence
  Non-cyclic GFR-binding peptide
  MOD_RES (1)..(3)..(37)..(38): Xaa is C or S
  MOD_RES (15)..(16)..(17)..(18)..(19): Xaa is A or G
  MOD_RES (20)..(21)..(22)..(23): Xaa is A or G or absent
XGXSRVVMNYHYKLXXXXXXXXXKYLVSIPSLKTPAXX

SEQ ID NO: 3047 - protein, 34 aa, Artificial Sequence
  Non-cyclic GFR-binding peptide
  MOD_RES (31)..(32): Xaa is C or S
EVVMDRHKRLVVKENEDYYLMSTASLETPVXXAK

SEQ ID NO: 3048 - protein, 38 aa, Artificial Sequence
  Non-cyclic GFR-binding peptide
  MOD_RES (1)..(32)..(33): Xaa is C or S
XSKVIMYHYKLIKPTKGIKYLISIPSLDQSVXXPSASA

SEQ ID NO: 3049 - protein, 38 aa, Artificial Sequence
  Non-cyclic GFR-binding peptide
  MOD_RES (32)..(33): Xaa is C or S
ARVVMNQYNKLIVNSSDDLYLVSIASLQTPAXXPKPVT

SEQ ID NO: 3050 - protein, 38 aa, Artificial Sequence
  Non-cyclic GFR-binding peptide
  MOD_RES (2)..(35)..(36): Xaa is C or S
  MOD_RES (13)..(14)..(15)..(16)..(17): Xaa is A or G
  MOD_RES (18)..(19)..(20)..(21): Xaa is A or G or absent
KXSKVVMYHYKLXXXXXXXXXKYLISIPSLDQPVXXPS

SEQ ID NO: 3051 - protein, 38 aa, Artificial Sequence
  Non-cyclic GFR-binding peptide
  MOD_RES (2)..(4): Xaa is C or S
EXKXALHDELTQYNKLFIPKKRVIELYLVSIASLQVQT

SEQ ID NO: 3052 - protein, 36 aa, Artificial Sequence
  Non-cyclic GFR-binding peptide
  MOD_RES (1)..(3): Xaa is C or S
  MOD_RES (15)..(16)..(17)..(18)..(19): Xaa is A or G
  MOD_RES (20)..(21)..(22)..(23): Xaa is A or G or absent
XGXARVVMNYHYKLXXXXXXXXXKYLVSIPSLQTPA

SEQ ID NO: 3053 - protein, 44 aa, Artificial Sequence
  Non-cyclic GFR-binding peptide
  MOD_RES (2)..(4)..(41): Xaa is C or S
EXKXALHDELTQYNKLFIPKKRVIELYLVSIASLQVQTPRXQVN

SEQ ID NO: 3054 - protein, 37 aa, Artificial Sequence
  Non-cyclic GFR-binding peptide
  MOD_RES (33)..(34): Xaa is C or S
  MOD_RES (11)..(12)..(13)..(14)..(15): Xaa is A or G
  MOD_RES (16)..(17)..(18)..(19): Xaa is A or G or absent
EVVMDYHYKLXXXXXXXXXKYLMSIPSLETPVXXAKP

SEQ ID NO: 3055 - protein, 38 aa, Artificial Sequence
  Non-cyclic GFR-binding peptide
  MOD_RES (2)..(4)..(36)..(37): Xaa is C or S
RXGXGEVVMERHKRLVVKDYEDYYLMSTASLETPVXXA

SEQ ID NO: 3056 - protein, 34 aa, Artificial Sequence
  Non-cyclic GFR-binding peptide
  MOD_RES (1)..(3)..(34): Xaa is C or S
XKXSKVIMRHKRLIKPTKGIYYLISTASLDQSVX

SEQ ID NO: 3057 - protein, 40 aa, Artificial Sequence
  Non-cyclic GFR-binding peptide
  MOD_RES (2)..(36)..(37): Xaa is C or S
  MOD_RES (14)..(15)..(16)..(17)..(18): Xaa is A or G
  MOD_RES (19)..(20)..(21)..(22): Xaa is A or G or absent
GXGEVVMERHKRLXXXXXXXXXYYLMSTASLETPVXXAKP

SEQ ID NO: 3058 - protein, 37 aa, Artificial Sequence
  Non-cyclic GFR-binding peptide
  MOD_RES (2)..(34)..(35): Xaa is C or S
GXSRVVMNRHKRLIVNSSDDYYLVSTASLKTPAXXPK

SEQ ID NO: 3059 - protein, 38 aa, Artificial Sequence
  Non-cyclic GFR-binding peptide
  MOD_RES (33)..(34): Xaa is C or S
  MOD_RES (11)..(12)..(13)..(14)..(15): Xaa is A or G
  MOD_RES (16)..(17)..(18)..(19): Xaa is A or G or absent
RVVMNRHKRLXXXXXXXXXYYLVSTASLKTPAXXPKPV

SEQ ID NO: 3060 - protein, 37 aa, Artificial Sequence
  Non-cyclic GFR-binding peptide
  MOD_RES (2)..(4)..(36): Xaa is C or S
HXGXSRVVMNYHYKLIVNSSDDKYLVSIPSLKTPAXT

SEQ ID NO: 3061 - protein, 35 aa, Artificial Sequence
  Non-cyclic GFR-binding peptide
  MOD_RES (1)..(3): Xaa is C or S
  MOD_RES (14)..(15)..(16)..(17)..(18): Xaa is A or G
  MOD_RES (19)..(20)..(21)..(22): Xaa is A or G or absent
XKXSKVVMRYKKLXXXXXXXXXFYLISIANLDQPV

SEQ ID NO: 3062 - protein, 36 aa, Artificial Sequence
  Non-cyclic GFR-binding peptide
  MOD_RES (2)..(4)..(35)..(36): Xaa is C or S
SXKXSKVVMRYKKLVKPTRGVFYLISIANLDQPVXX

SEQ ID NO: 3063 - protein, 40 aa, Artificial Sequence
  Non-cyclic GFR-binding peptide
  MOD_RES (2)..(4)..(37)..(38): Xaa is C or S
RXGXEAVSMGERYKKLTPVGMDDFYLVSIANLKTPVXXAK

SEQ ID NO: 3064 - protein, 33 aa, Artificial Sequence
  Non-cyclic GFR-binding peptide
  MOD_RES (2)..(33): Xaa is C or S
KXSKVVMYHYKLVKPTRGVKYLISIPSLDQPVX

SEQ ID NO: 3065 - protein, 34 aa, Artificial Sequence
  Non-cyclic GFR-binding peptide
  MOD_RES (1)..(32)..(33): Xaa is C or S
XSRVIMQYNKLVKPKRGVLYLISIASLAQPVXXP

SEQ ID NO: 3066 - protein, 38 aa, Artificial Sequence
  Non-cyclic GFR-binding peptide
  MOD_RES (2)..(4)..(35)..(36): Xaa is C or S
SXKXSRVIMRHKRLVKPKRGVYYLISTASLAQPVXXPA

SEQ ID NO: 3067 - protein, 34 aa, Artificial Sequence
  Non-cyclic GFR-binding peptide
  MOD_RES (2)..(34): Xaa is C or S
GXGEVVMDRHKRLVVKENEDYYLMSTASLETPVX

SEQ ID NO: 3068 - protein, 34 aa, Artificial Sequence
  Non-cyclic GFR-binding peptide
  MOD_RES (1)..(34): Xaa is C or S
  MOD_RES (12)..(13)..(14)..(15)..(16): Xaa is A or G
  MOD_RES (17)..(18)..(19)..(20): Xaa is A or G or absent
XSRVIMRHKRLXXXXXXXXXYYLISTASLAQPVX

SEQ ID NO: 3069 - protein, 39 aa, Artificial Sequence
  Non-cyclic GFR-binding peptide
  MOD_RES (1)..(3)..(36)..(37): Xaa is C or S
  MOD_RES (14)..(15)..(16)..(17)..(18): Xaa is A or G
  MOD_RES (19)..(20)..(21)..(22): Xaa is A or G or absent
XKXSKVIMQYNKLXXXXXXXXXLYLISIASLDQSVXXPS

SEQ ID NO: 3070 - protein, 34 aa, Artificial Sequence
  Non-cyclic GFR-binding peptide
  MOD_RES (2)..(34): Xaa is C or S
GXSRVVMNYHYKLIVNSSDDKYLVSIPSLKTPAX

SEQ ID NO: 3071 - protein, 37 aa, Artificial Sequence
  Non-cyclic GFR-binding peptide
  MOD_RES (2)..(4)..(36)..(37): Xaa is C or S
HXGXAKVVMNRYKKLIVNNSSDFYLVSIANLKTPAXX

SEQ ID NO: 3072 - protein, 36 aa, Artificial Sequence
  Non-cyclic GFR-binding peptide
  MOD_RES (1)..(34)..(35): Xaa is C or S
XEAVSMGERYKKLTPVGMDDFYLVSIANLKTPVXXA

SEQ ID NO: 3073 - protein, 42 aa, Artificial Sequence
  Non-cyclic GFR-binding peptide
  MOD_RES (1)..(3)..(40): Xaa is C or S
  MOD_RES (16)..(17)..(18)..(19)..(20): Xaa is A or G
  MOD_RES (21)..(22)..(23)..(24): Xaa is A or G or absent
XKXALHDELTQYNKLXXXXXXXXXLYLVSIASLQVQTPRXQV

SEQ ID NO: 3074 - protein, 34 aa, Artificial Sequence
  Non-cyclic GFR-binding peptide
  MOD_RES (1)..(1): Xaa is C or S
  MOD_RES (13)..(14)..(15)..(16)..(17): Xaa is A or G
  MOD_RES (18)..(19)..(20)..(21): Xaa is A or G or absent
XAKVVMNRYKKLXXXXXXXXXFYLVSIANLKTPA

SEQ ID NO: 3075 - protein, 41 aa, Artificial Sequence
  Non-cyclic GFR-binding peptide
  MOD_RES (2)..(4)..(38): Xaa is C or S
  MOD_RES (16)..(17)..(18)..(19)..(20): Xaa is A or G
  MOD_RES (21)..(22)..(23)..(24): Xaa is A or G or absent
HXGXSRVVMNQYNKLXXXXXXXXXLYLVSIASLKTPAXTPK

SEQ ID NO: 3076 - protein, 36 aa, Artificial Sequence
  Non-cyclic GFR-binding peptide
  MOD_RES (1)..(3): Xaa is C or S
  MOD_RES (15)..(16)..(17)..(18)..(19): Xaa is A or G
  MOD_RES (20)..(21)..(22)..(23): Xaa is A or G or absent
XGXGEVVMEYHYKLXXXXXXXXXKYLMSIPSLETPV

SEQ ID NO: 3077 - protein, 36 aa, Artificial Sequence
  Non-cyclic GFR-binding peptide
  MOD_RES (34)..(35): Xaa is C or S
  MOD_RES (12)..(13)..(14)..(15)..(16): Xaa is A or G
  MOD_RES (17)..(18)..(19)..(20): Xaa is A or G or absent
GEVVMEYHYKLXXXXXXXXXKYLMSIPSLETPVXXA

SEQ ID NO: 3078 - protein, 36 aa, Artificial Sequence
  Non-cyclic GFR-binding peptide
  MOD_RES (1)..(3)..(35)..(36): Xaa is C or S
XGXGEVVMERYKKLVVKDYEDFYLMSIANLETPVXX

SEQ ID NO: 3079 - protein, 42 aa, Artificial Sequence
  Non-cyclic GFR-binding peptide
  MOD_RES (2)..(4)..(38)..(39): Xaa is C or S
  MOD_RES (16)..(17)..(18)..(19)..(20): Xaa is A or G
  MOD_RES (21)..(22)..(23)..(24): Xaa is A or G or absent
HXGXAKVVMNRYKKLXXXXXXXXXFYLVSIANLKTPAXXAKP

SEQ ID NO: 3080 - protein, 39 aa, Artificial Sequence
  Non-cyclic GFR-binding peptide
  MOD_RES (34)..(34): Xaa is C or S
  MOD_RES (12)..(13)..(14)..(15)..(16): Xaa is A or G
  MOD_RES (17)..(18)..(19)..(20): Xaa is A or G or absent
SRVVMNRHKRLXXXXXXXXXYYLVSTASLKTPAXTPKTV

SEQ ID NO: 3081 - protein, 34 aa, Artificial Sequence
  Non-cyclic GFR-binding peptide
  MOD_RES (1)..(34): Xaa is C or S
  MOD_RES (12)..(13)..(14)..(15)..(16): Xaa is A or G
  MOD_RES (17)..(18)..(19)..(20): Xaa is A or G or absent
XSRVIMQYNKLXXXXXXXXXLYLISIASLAQPVX

SEQ ID NO: 3082 - protein, 35 aa, Artificial Sequence
  Non-cyclic GFR-binding peptide
ALHDELTYHYKLFIPKKRVIEKYLVSIPSLQVQTP

SEQ ID NO: 3083 - protein, 41 aa, Artificial Sequence
  Non-cyclic GFR-binding peptide
  MOD_RES (1)..(3)..(36)..(37): Xaa is C or S
  MOD_RES (14)..(15)..(16)..(17)..(18): Xaa is A or G
  MOD_RES (19)..(20)..(21)..(22): Xaa is A or G or absent
XKXSKVVMRYKKLXXXXXXXXXFYLISIANLDQPVXXPSAS

SEQ ID NO: 3084 - protein, 38 aa, Artificial Sequence
  Non-cyclic GFR-binding peptide
  MOD_RES (1)..(3): Xaa is C or S
  MOD_RES (16)..(17)..(18)..(19)..(20): Xaa is A or G
  MOD_RES (21)..(22)..(23)..(24): Xaa is A or G or absent
XKXALHDELTRYKKLXXXXXXXXXFYLVSIANLQVQTP

SEQ ID NO: 3085 - protein, 39 aa, Artificial Sequence
  Non-cyclic GFR-binding peptide
  MOD_RES (2)..(4): Xaa is C or S
  MOD_RES (17)..(18)..(19)..(20)..(21): Xaa is A or G
  MOD_RES (22)..(23)..(24)..(25): Xaa is A or G or absent
EXKXALHDELTYHYKLXXXXXXXXXKYLVSIPSLQVQTP

SEQ ID NO: 3086 - protein, 37 aa, Artificial Sequence
  Non-cyclic GFR-binding peptide
  MOD_RES (1)..(3)..(35)..(36): Xaa is C or S
XGXGEVVMERHKRLVVKDYEDYYLMSTASLETPVXXA

SEQ ID NO: 3087 - protein, 34 aa, Artificial Sequence
  Non-cyclic GFR-binding peptide
  MOD_RES (2)..(2): Xaa is C or S
  MOD_RES (13)..(14)..(15)..(16)..(17): Xaa is A or G
  MOD_RES (18)..(19)..(20)..(21): Xaa is A or G or absent
KXSRVIMYHYKLXXXXXXXXXKYLISIPSLAQPV

SEQ ID NO: 3088 - protein, 42 aa, Artificial Sequence
  Non-cyclic GFR-binding peptide
  MOD_RES (1)..(3)..(37): Xaa is C or S
  MOD_RES (15)..(16)..(17)..(18)..(19): Xaa is A or G
  MOD_RES (20)..(21)..(22)..(23): Xaa is A or G or absent
XGXSRVVMNQYNKLXXXXXXXXXLYLVSIASLKTPAXTPKTV

SEQ ID NO: 3089 - protein, 36 aa, Artificial Sequence
  Non-cyclic GFR-binding peptide
  MOD_RES (2)..(33)..(34): Xaa is C or S
KXSKVVMYHYKLVKPTRGVKYLISIPSLDQPVXXPS

SEQ ID NO: 3090 - protein, 38 aa, Artificial Sequence
  Non-cyclic GFR-binding peptide
  MOD_RES (33)..(34): Xaa is C or S
EAVSMGERYKKLTPVGMDDFYLVSIANLKTPVXXAKGV

SEQ ID NO: 3091 - protein, 33 aa, Artificial Sequence
  Non-cyclic GFR-binding peptide
LHDELTYHYKLFIPKKRVIEKYLVSIPSLQVQT

SEQ ID NO: 3092 - protein, 40 aa, Artificial Sequence
  Non-cyclic GFR-binding peptide
  MOD_RES (2)..(4)..(36)..(37): Xaa is C or S
HXGXAKVVMNYHYKLIVNNSSDKYLVSIPSLKTPAXXAKP

SEQ ID NO: 3093 - protein, 33 aa, Artificial Sequence
  Non-cyclic GFR-binding peptide
  MOD_RES (2)..(33): Xaa is C or S
KXSRVIMRHKRLVKPKRGVYYLISTASLAQPVX

SEQ ID NO: 3094 - protein, 40 aa, Artificial Sequence
  Non-cyclic GFR-binding peptide
  MOD_RES (2)..(4)..(36)..(37): Xaa is C or S
HXGXSRVVMNQYNKLIVNSSDDLYLVSIASLKTPAXXPKP

SEQ ID NO: 3095 - protein, 37 aa, Artificial Sequence
  Non-cyclic GFR-binding peptide
  MOD_RES (1)..(35): Xaa is C or S
  MOD_RES (13)..(14)..(15)..(16)..(17): Xaa is A or G
  MOD_RES (18)..(19)..(20)..(21): Xaa is A or G or absent
XSRVVMNQYNKLXXXXXXXXXLYLVSIASLKTPAXTP

SEQ ID NO: 3096 - protein, 40 aa, Artificial Sequence
  Non-cyclic GFR-binding peptide
  MOD_RES (2)..(39): Xaa is C or S
  MOD_RES (15)..(16)..(17)..(18)..(19): Xaa is A or G
  MOD_RES (20)..(21)..(22)..(23): Xaa is A or G or absent
KXALHDELTRYKKLXXXXXXXXXFYLVSIANLQVQTPRXQ

SEQ ID NO: 3097 - protein, 43 aa, Artificial Sequence
  Non-cyclic GFR-binding peptide
  MOD_RES (2)..(4)..(37)..(38): Xaa is C or S
  MOD_RES (15)..(16)..(17)..(18)..(19): Xaa is A or G
  MOD_RES (20)..(21)..(22)..(23): Xaa is A or G or absent
SXKXSRVIMYHYKLXXXXXXXXXKYLISIPSLAQPVXXPAASA

SEQ ID NO: 3098 - protein, 34 aa, Artificial Sequence
  Non-cyclic GFR-binding peptide
  MOD_RES (34)..(34): Xaa is C or S
  MOD_RES (12)..(13)..(14)..(15)..(16): Xaa is A or G
  MOD_RES (17)..(18)..(19)..(20): Xaa is A or G or absent
SRVVMNYHYKLXXXXXXXXXKYLVSIPSLKTPAX

SEQ ID NO: 3099 - protein, 41 aa, Artificial Sequence
  Non-cyclic GFR-binding peptide
  MOD_RES (2)..(35)..(36): Xaa is C or S
  MOD_RES (13)..(14)..(15)..(16)..(17): Xaa is A or G
  MOD_RES (18)..(19)..(20)..(21): Xaa is A or G or absent
KXSKVIMRHKRLXXXXXXXXXYYLISTASLDQSVXXPSASA

SEQ ID NO: 3100 - protein, 35 aa, Artificial Sequence
  Non-cyclic GFR-binding peptide
  MOD_RES (1)..(34)..(35): Xaa is C or S
XEAVSMGERYKKLTPVGMDDFYLVSIANLKTPVXX

SEQ ID NO: 3101 - protein, 40 aa, Artificial Sequence
  Non-cyclic GFR-binding peptide
  MOD_RES (1)..(3)..(35)..(36): Xaa is C or S
XGXAKVVMNRYKKLIVNNSSDFYLVSIANLKTPAXXAKPV

SEQ ID NO: 3102 - protein, 39 aa, Artificial Sequence
  Non-cyclic GFR-binding peptide
  MOD_RES (35)..(35): Xaa is C or S
  MOD_RES (11)..(12)..(13)..(14)..(15): Xaa is A or G
  MOD_RES (16)..(17)..(18)..(19): Xaa is A or G or absent
HDELTQYNKLXXXXXXXXXLYLVSIASLQVQTPRXQVNR

SEQ ID NO: 3103 - protein, 35 aa, Artificial Sequence
  Non-cyclic GFR-binding peptide
LHDELTYHYKLFIPKKRVIEKYLVSIPSLQVQTPR

SEQ ID NO: 3104 - protein, 39 aa, Artificial Sequence
  Non-cyclic GFR-binding peptide
  MOD_RES (2)..(35)..(36): Xaa is C or S
  MOD_RES (13)..(14)..(15)..(16)..(17): Xaa is A or G
  MOD_RES (18)..(19)..(20)..(21): Xaa is A or G or absent
KXSKVIMYHYKLXXXXXXXXXKYLISIPSLDQSVXXPSA

SEQ ID NO: 3105 - protein, 35 aa, Artificial Sequence
  Non-cyclic GFR-binding peptide
  MOD_RES (2)..(2): Xaa is C or S
  MOD_RES (14)..(15)..(16)..(17)..(18): Xaa is A or G
  MOD_RES (19)..(20)..(21)..(22): Xaa is A or G or absent
GXSRVVMNRHKRLXXXXXXXXXYYLVSTASLKTPA

SEQ ID NO: 3106 - protein, 41 aa, Artificial Sequence
  Non-cyclic GFR-binding peptide
  MOD_RES (2)..(4)..(35)..(36): Xaa is C or S
SXKXSKVVMYHYKLVKPTRGVKYLISIPSLDQPVXXPSASA

SEQ ID NO: 3107 - protein, 36 aa, Artificial Sequence
  Non-cyclic GFR-binding peptide
  MOD_RES (2)..(35)..(36): Xaa is C or S
GXEAVSMGERHKRLTPVGMDDYYLVSTASLKTPVXX

SEQ ID NO: 3108 - protein, 43 aa, Artificial Sequence
  Non-cyclic GFR-binding peptide
  MOD_RES (2)..(4)..(37)..(38): Xaa is C or S
  MOD_RES (15)..(16)..(17)..(18)..(19): Xaa is A or G
  MOD_RES (20)..(21)..(22)..(23): Xaa is A or G or absent
SXKXSKVVMQYNKLXXXXXXXXXLYLISIASLDQPVXXPSASA

SEQ ID NO: 3109 - protein, 36 aa, Artificial Sequence
  Non-cyclic GFR-binding peptide
  MOD_RES (31)..(32): Xaa is C or S
EVVMERHKRLVVKDYEDYYLMSTASLETPVXXAKPI

SEQ ID NO: 3110 - protein, 42 aa, Artificial Sequence
  Non-cyclic GFR-binding peptide
  MOD_RES (2)..(4)..(36)..(37): Xaa is C or S
RXGXGEVVMDRYKKLVVKENEDFYLMSIANLETPVXXAKPIK

SEQ ID NO: 3111 - protein, 39 aa, Artificial Sequence
  Non-cyclic GFR-binding peptide
  MOD_RES (1)..(33)..(34): Xaa is C or S
XGEVVMDYHYKLVVKENEDKYLMSIPSLETPVXXAKPIK

SEQ ID NO: 3112 - protein, 34 aa, Artificial Sequence
  Non-cyclic GFR-binding peptide
  MOD_RES (33)..(34): Xaa is C or S
  MOD_RES (11)..(12)..(13)..(14)..(15): Xaa is A or G
  MOD_RES (16)..(17)..(18)..(19): Xaa is A or G or absent
SKVVMRHKRLXXXXXXXXXYYLISTASLDQPVXX

SEQ ID NO: 3113 - protein, 39 aa, Artificial Sequence
  Non-cyclic GFR-binding peptide
  MOD_RES (1)..(3)..(36)..(37): Xaa is C or S
  MOD_RES (14)..(15)..(16)..(17)..(18): Xaa is A or G
  MOD_RES (19)..(20)..(21)..(22): Xaa is A or G or absent
XKXSKVVMYHYKLXXXXXXXXXKYLISIPSLDQPVXXPS

SEQ ID NO: 3114 - protein, 39 aa, Artificial Sequence
  Non-cyclic GFR-binding peptide
  MOD_RES (2)..(4)..(38): Xaa is C or S
  MOD_RES (16)..(17)..(18)..(19)..(20): Xaa is A or G
  MOD_RES (21)..(22)..(23)..(24): Xaa is A or G or absent
HXGXSRVVMNYHYKLXXXXXXXXXKYLVSIPSLKTPAXT

SEQ ID NO: 3115 - protein, 33 aa, Artificial Sequence
  Non-cyclic GFR-binding peptide
  MOD_RES (32)..(33): Xaa is C or S
ARVVMNRHKRLIVNSSDDYYLVSTASLQTPAXX

SEQ ID NO: 3116 - protein, 42 aa, Artificial Sequence
  Non-cyclic GFR-binding peptide
  MOD_RES (2)..(4)..(38)..(39): Xaa is C or S
  MOD_RES (16)..(17)..(18)..(19)..(20): Xaa is A or G
  MOD_RES (21)..(22)..(23)..(24): Xaa is A or G or absent
HXGXARVVMNQYNKLXXXXXXXXXLYLVSIASLQTPAXXPKP

SEQ ID NO: 3117 - protein, 42 aa, Artificial Sequence
  Non-cyclic GFR-binding peptide
  MOD_RES (2)..(39): Xaa is C or S
  MOD_RES (15)..(16)..(17)..(18)..(19): Xaa is A or G
  MOD_RES (20)..(21)..(22)..(23): Xaa is A or G or absent
KXALHDELTRHKRLXXXXXXXXXYYLVSTASLQVQTPRXQVN

SEQ ID NO: 3118 - protein, 35 aa, Artificial Sequence
  Non-cyclic GFR-binding peptide
  MOD_RES (34)..(35): Xaa is C or S
  MOD_RES (12)..(13)..(14)..(15)..(16): Xaa is A or G
  MOD_RES (17)..(18)..(19)..(20): Xaa is A or G or absent
AKVVMNYHYKLXXXXXXXXXKYLVSIPSLKTPAXX

SEQ ID NO: 3119 - protein, 33 aa, Artificial Sequence
  Non-cyclic GFR-binding peptide
  MOD_RES (1)..(32)..(33): Xaa is C or S
XSKVVMQYNKLVKPTRGVLYLISIASLDQPVXX

SEQ ID NO: 3120 - protein, 31 aa, Artificial Sequence
  Non-cyclic GFR-binding peptide
  MOD_RES (1)..(1): Xaa is C or S
XSRVIMYHYKLVKPKRGVKYLISIPSLAQPV

SEQ ID NO: 3121 - protein, 38 aa, Artificial Sequence
  Non-cyclic GFR-binding peptide
  MOD_RES (1)..(32)..(33): Xaa is C or S
XSKVIMRHKRLIKPTKGIYYLISTASLDQSVXXPSASA

SEQ ID NO: 3122 - protein, 33 aa, Artificial Sequence
  Non-cyclic GFR-binding peptide
  MOD_RES (33)..(33): Xaa is C or S
EAVSMGEQYNKLTPVGMDDLYLVSIASLKTPVX

SEQ ID NO: 3123 - protein, 36 aa, Artificial Sequence
  Non-cyclic GFR-binding peptide
  MOD_RES (1)..(3)..(34)..(35): Xaa is C or S
XKXSKVIMRHKRLIKPTKGIYYLISTASLDQSVXXP

SEQ ID NO: 3124 - protein, 41 aa, Artificial Sequence
  Non-cyclic GFR-binding peptide
  MOD_RES (2)..(35)..(36): Xaa is C or S
  MOD_RES (13)..(14)..(15)..(16)..(17): Xaa is A or G
  MOD_RES (18)..(19)..(20)..(21): Xaa is A or G or absent
KXSRVIMRHKRLXXXXXXXXXYYLISTASLAQPVXXPAASA

SEQ ID NO: 3125 - protein, 40 aa, Artificial Sequence
  Non-cyclic GFR-binding peptide
  MOD_RES (2)..(4)..(38)..(39): Xaa is C or S
  MOD_RES (16)..(17)..(18)..(19)..(20): Xaa is A or G
  MOD_RES (21)..(22)..(23)..(24): Xaa is A or G or absent
RXGXGEVVMEYHYKLXXXXXXXXXKYLMSIPSLETPVXXA

SEQ ID NO: 3126 - protein, 33 aa, Artificial Sequence
  Non-cyclic GFR-binding peptide
  MOD_RES (31)..(32): Xaa is C or S
SKVVMQYNKLVKPTRGVLYLISIASLDQPVXXP

SEQ ID NO: 3127 - protein, 34 aa, Artificial Sequence
  Non-cyclic GFR-binding peptide
  MOD_RES (2)..(33)..(34): Xaa is C or S
KXSRVIMRHKRLVKPKRGVYYLISTASLAQPVXX

SEQ ID NO: 3128 - protein, 33 aa, Artificial Sequence
  Non-cyclic GFR-binding peptide
  MOD_RES (31)..(32): Xaa is C or S
SRVIMRYKKLVKPKRGVFYLISIANLAQPVXXP

SEQ ID NO: 3129 - protein, 36 aa, Artificial Sequence
  Non-cyclic GFR-binding peptide
  MOD_RES (34)..(35): Xaa is C or S
  MOD_RES (12)..(13)..(14)..(15)..(16): Xaa is A or G
  MOD_RES (17)..(18)..(19)..(20): Xaa is A or G or absent
SRVVMNRHKRLXXXXXXXXXYYLVSTASLKTPAXXP

SEQ ID NO: 3130 - protein, 43 aa, Artificial Sequence
  Non-cyclic GFR-binding peptide
  MOD_RES (2)..(4)..(41): Xaa is C or S
  MOD_RES (17)..(18)..(19)..(20)..(21): Xaa is A or G
  MOD_RES (22)..(23)..(24)..(25): Xaa is A or G or absent
EXKXALHDELTQYNKLXXXXXXXXXLYLVSIASLQVQTPRXQV

SEQ ID NO: 3131 - protein, 32 aa, Artificial Sequence
  Non-cyclic GFR-binding peptide
  MOD_RES (1)..(1): Xaa is C or S
XAKVVMNYHYKLIVNNSSDKYLVSIPSLKTPA

SEQ ID NO: 3132 - protein, 41 aa, Artificial Sequence
  Non-cyclic GFR-binding peptide
  MOD_RES (1)..(3)..(37)..(38): Xaa is C or S
  MOD_RES (15)..(16)..(17)..(18)..(19): Xaa is A or G
  MOD_RES (20)..(21)..(22)..(23): Xaa is A or G or absent
XGXGEVVMDYHYKLXXXXXXXXXKYLMSIPSLETPVXXAKP

SEQ ID NO: 3133 - protein, 32 aa, Artificial Sequence
  Non-cyclic GFR-binding peptide
  MOD_RES (2)..(2): Xaa is C or S
KXSRVIMQYNKLVKPKRGVLYLISIASLAQPV

SEQ ID NO: 3134 - protein, 35 aa, Artificial Sequence
  Non-cyclic GFR-binding peptide
  MOD_RES (1)..(35): Xaa is C or S
  MOD_RES (13)..(14)..(15)..(16)..(17): Xaa is A or G
  MOD_RES (18)..(19)..(20)..(21): Xaa is A or G or absent
XAKVVMNRYKKLXXXXXXXXXFYLVSIANLKTPAX

SEQ ID NO: 3135 - protein, 37 aa, Artificial Sequence
  Non-cyclic GFR-binding peptide
  MOD_RES (2)..(4)..(37): Xaa is C or S
  MOD_RES (15)..(16)..(17)..(18)..(19): Xaa is A or G
  MOD_RES (20)..(21)..(22)..(23): Xaa is A or G or absent
SXKXSRVIMYHYKLXXXXXXXXXKYLISIPSLAQPVX

SEQ ID NO: 3136 - protein, 39 aa, Artificial Sequence
  Non-cyclic GFR-binding peptide
  MOD_RES (1)..(3)..(36)..(37): Xaa is C or S
  MOD_RES (14)..(15)..(16)..(17)..(18): Xaa is A or G
  MOD_RES (19)..(20)..(21)..(22): Xaa is A or G or absent
XKXSRVIMQYNKLXXXXXXXXXLYLISIASLAQPVXXPA

SEQ ID NO: 3137 - protein, 36 aa, Artificial Sequence
  Non-cyclic GFR-binding peptide
  MOD_RES (2)..(4)..(36): Xaa is C or S
HXGXARVVMNQYNKLIVNSSDDLYLVSIASLQTPAX

SEQ ID NO: 3138 - protein, 32 aa, Artificial Sequence
  Non-cyclic GFR-binding peptide
  MOD_RES (2)..(2): Xaa is C or S
KXSKVIMRHKRLIKPTKGIYYLISTASLDQSV

SEQ ID NO: 3139 - protein, 36 aa, Artificial Sequence
  Non-cyclic GFR-binding peptide
  MOD_RES (1)..(33)..(34): Xaa is C or S
XAKVVMNYHYKLIVNNSSDKYLVSIPSLKTPAXXAK

SEQ ID NO: 3140 - protein, 32 aa, Artificial Sequence
  Non-cyclic GFR-binding peptide
  MOD_RES (11)..(12)..(13)..(14)..(15): Xaa is A or G
  MOD_RES (16)..(17)..(18)..(19): Xaa is A or G or absent
RVVMNQYNKLXXXXXXXXXLYLVSIASLQTPA

SEQ ID NO: 3141 - protein, 37 aa, Artificial Sequence
  Non-cyclic GFR-binding peptide
  MOD_RES (35)..(35): Xaa is C or S
  MOD_RES (11)..(12)..(13)..(14)..(15): Xaa is A or G
  MOD_RES (16)..(17)..(18)..(19): Xaa is A or G or absent
HDELTRHKRLXXXXXXXXXYYLVSTASLQVQTPRXQV

SEQ ID NO: 3142 - protein, 30 aa, Artificial Sequence
  Non-cyclic GFR-binding peptide
EVVMERHKRLVVKDYEDYYLMSTASLETPV

SEQ ID NO: 3143 - protein, 42 aa, Artificial Sequence
  Non-cyclic GFR-binding peptide
  MOD_RES (2)..(4)..(36)..(37): Xaa is C or S
HXGXSRVVMNQYNKLIVNSSDDLYLVSIASLKTPAXXPKPVY

SEQ ID NO: 3144 - protein, 35 aa, Artificial Sequence
  Non-cyclic GFR-binding peptide
  MOD_RES (2)..(4): Xaa is C or S
RXGXGEVVMDYHYKLVVKENEDKYLMSIPSLETPV

SEQ ID NO: 3145 - protein, 42 aa, Artificial Sequence
  Non-cyclic GFR-binding peptide
  MOD_RES (2)..(4)..(36)..(37): Xaa is C or S
RXGXGEVVMERYKKLVVKDYEDFYLMSIANLETPVXXAKPIS

SEQ ID NO: 3146 - protein, 37 aa, Artificial Sequence
  Non-cyclic GFR-binding peptide
  MOD_RES (33)..(33): Xaa is C or S
  MOD_RES (11)..(12)..(13)..(14)..(15): Xaa is A or G
  MOD_RES (16)..(17)..(18)..(19): Xaa is A or G or absent
RVVMNYHYKLXXXXXXXXXKYLVSIPSLKTPAXTPKT

SEQ ID NO: 3147 - protein, 35 aa, Artificial Sequence
  Non-cyclic GFR-binding peptide
  MOD_RES (33)..(34): Xaa is C or S
  MOD_RES (11)..(12)..(13)..(14)..(15): Xaa is A or G
  MOD_RES (16)..(17)..(18)..(19): Xaa is A or G or absent
RVVMNQYNKLXXXXXXXXXLYLVSIASLQTPAXXP

SEQ ID NO: 3148 - protein, 39 aa, Artificial Sequence
  Non-cyclic GFR-binding peptide
  MOD_RES (1)..(33)..(34): Xaa is C or S
XGEVVMEYHYKLVVKDYEDKYLMSIPSLETPVXXAKPIS

SEQ ID NO: 3149 - protein, 41 aa, Artificial Sequence
  Non-cyclic GFR-binding peptide
  MOD_RES (2)..(35)..(36): Xaa is C or S
GXEAVSMGERYKKLTPVGMDDFYLVSIANLKTPVXXAKGVK

SEQ ID NO: 3150 - protein, 40 aa, Artificial Sequence
  Non-cyclic GFR-binding peptide
  MOD_RES (2)..(36)..(37): Xaa is C or S
  MOD_RES (14)..(15)..(16)..(17)..(18): Xaa is A or G
  MOD_RES (19)..(20)..(21)..(22): Xaa is A or G or absent
GXARVVMNRHKRLXXXXXXXXXYYLVSTASLQTPAXXPKP

SEQ ID NO: 3151 - protein, 33 aa, Artificial Sequence
  Non-cyclic GFR-binding peptide
  MOD_RES (2)..(33): Xaa is C or S
KXSRVIMRYKKLVKPKRGVFYLISIANLAQPVX

SEQ ID NO: 3152 - protein, 41 aa, Artificial Sequence
  Non-cyclic GFR-binding peptide
  MOD_RES (2)..(35)..(36): Xaa is C or S
  MOD_RES (13)..(14)..(15)..(16)..(17): Xaa is A or G
  MOD_RES (18)..(19)..(20)..(21): Xaa is A or G or absent
KXSKVVMRHKRLXXXXXXXXXYYLISTASLDQPVXXPSASA

SEQ ID NO: 3153 - protein, 34 aa, Artificial Sequence
  Non-cyclic GFR-binding peptide
  MOD_RES (31)..(32): Xaa is C or S
SKVVMRHKRLVKPTRGVYYLISTASLDQPVXXPS

SEQ ID NO: 3154 - protein, 37 aa, Artificial Sequence
  Non-cyclic GFR-binding peptide
  MOD_RES (1)..(3)..(36)..(37): Xaa is C or S
  MOD_RES (14)..(15)..(16)..(17)..(18): Xaa is A or G
  MOD_RES (19)..(20)..(21)..(22): Xaa is A or G or absent
XKXSRVIMRHKRLXXXXXXXXXYYLISTASLAQPVXX

SEQ ID NO: 3155 - protein, 35 aa, Artificial Sequence
  Non-cyclic GFR-binding peptide
  MOD_RES (1)..(3)..(34)..(35): Xaa is C or S
XKXSRVIMYHYKLVKPKRGVKYLISIPSLAQPVXX

SEQ ID NO: 3156 - protein, 36 aa, Artificial Sequence
  Non-cyclic GFR-binding peptide
  MOD_RES (2)..(4)..(36): Xaa is C or S
HXGXSRVVMNQYNKLIVNSSDDLYLVSIASLKTPAX

SEQ ID NO: 3157 - protein, 37 aa, Artificial Sequence
  Non-cyclic GFR-binding peptide
  MOD_RES (1)..(33)..(34): Xaa is C or S
XARVVMNRHKRLIVNSSDDYYLVSTASLQTPAXXPKP

SEQ ID NO: 3158 - protein, 42 aa, Artificial Sequence
  Non-cyclic GFR-binding peptide
  MOD_RES (2)..(36)..(37): Xaa is C or S
  MOD_RES (14)..(15)..(16)..(17)..(18): Xaa is A or G
  MOD_RES (19)..(20)..(21)..(22): Xaa is A or G or absent
GXARVVMNRHKRLXXXXXXXXXYYLVSTASLQTPAXXPKPVT

SEQ ID NO: 3159 - protein, 32 aa, Artificial Sequence
  Non-cyclic GFR-binding peptide
  MOD_RES (1)..(1): Xaa is C or S
XSRVVMNYHYKLIVNSSDDKYLVSIPSLKTPA

SEQ ID NO: 3160 - protein, 41 aa, Artificial Sequence
  Non-cyclic GFR-binding peptide
  MOD_RES (1)..(3)..(36)..(37): Xaa is C or S
  MOD_RES (14)..(15)..(16)..(17)..(18): Xaa is A or G
  MOD_RES (19)..(20)..(21)..(22): Xaa is A or G or absent
XKXSKVIMRYKKLXXXXXXXXXFYLISIANLDQSVXXPSAS

SEQ ID NO: 3161 - protein, 42 aa, Artificial Sequence
  Non-cyclic GFR-binding peptide
  MOD_RES (2)..(4)..(38)..(39): Xaa is C or S
  MOD_RES (16)..(17)..(18)..(19)..(20): Xaa is A or G
  MOD_RES (21)..(22)..(23)..(24): Xaa is A or G or absent
RXGXGEVVMDRHKRLXXXXXXXXXYYLMSTASLETPVXXAKP

SEQ ID NO: 3162 - protein, 33 aa, Artificial Sequence
  Non-cyclic GFR-binding peptide
  MOD_RES (2)..(33): Xaa is C or S
KXSRVIMYHYKLVKPKRGVKYLISIPSLAQPVX

SEQ ID NO: 3163 - protein, 35 aa, Artificial Sequence
  Non-cyclic GFR-binding peptide
  MOD_RES (1)..(1): Xaa is C or S
XALHDELTQYNKLFIPKKRVIELYLVSIASLQVQT

SEQ ID NO: 3164 - protein, 36 aa, Artificial Sequence
  Non-cyclic GFR-binding peptide
  MOD_RES (1)..(35)..(36): Xaa is C or S
  MOD_RES (13)..(14)..(15)..(16)..(17): Xaa is A or G
  MOD_RES (18)..(19)..(20)..(21): Xaa is A or G or absent
XAKVVMNYHYKLXXXXXXXXXKYLVSIPSLKTPAXX

SEQ ID NO: 3165 - protein, 39 aa, Artificial Sequence
  Non-cyclic GFR-binding peptide
  MOD_RES (1)..(36)..(37): Xaa is C or S
  MOD_RES (14)..(15)..(16)..(17)..(18): Xaa is A or G
  MOD_RES (19)..(20)..(21)..(22): Xaa is A or G or absent
XEAVSMGEQYNKLXXXXXXXXXLYLVSIASLKTPVXXAK

SEQ ID NO: 3166 - protein, 41 aa, Artificial Sequence
  Non-cyclic GFR-binding peptide
  MOD_RES (1)..(3)..(37)..(38): Xaa is C or S
  MOD_RES (15)..(16)..(17)..(18)..(19): Xaa is A or G
  MOD_RES (20)..(21)..(22)..(23): Xaa is A or G or absent
XGXSRVVMNRHKRLXXXXXXXXXYYLVSTASLKTPAXXPKP

SEQ ID NO: 3167 - protein, 36 aa, Artificial Sequence
  Non-cyclic GFR-binding peptide
  MOD_RES (2)..(34)..(35): Xaa is C or S
GXARVVMNQYNKLIVNSSDDLYLVSIASLQTPAXXP

SEQ ID NO: 3168 - protein, 37 aa, Artificial Sequence
  Non-cyclic GFR-binding peptide
  MOD_RES (31)..(31): Xaa is C or S
RVVMNQYNKLIVNSSDDLYLVSIASLKTPAXTPKTVH

SEQ ID NO: 3169 - protein, 43 aa, Artificial Sequence
  Non-cyclic GFR-binding peptide
  MOD_RES (2)..(39): Xaa is C or S
KXALHDELTQYNKLFIPKKRVIELYLVSIASLQVQTPRXQVNR

SEQ ID NO: 3170 - protein, 32 aa, Artificial Sequence
  Non-cyclic GFR-binding peptide
  MOD_RES (11)..(12)..(13)..(14)..(15): Xaa is A or G
  MOD_RES (16)..(17)..(18)..(19): Xaa is A or G or absent
EVVMDRHKRLXXXXXXXXXYYLMSTASLETPV

SEQ ID NO: 3171 - protein, 31 aa, Artificial Sequence
  Non-cyclic GFR-binding peptide
  MOD_RES (31)..(31): Xaa is C or S
EVVMEYHYKLVVKDYEDKYLMSIPSLETPVX

SEQ ID NO: 3172 - protein, 36 aa, Artificial Sequence
  Non-cyclic GFR-binding peptide
  MOD_RES (1)..(3)..(34)..(35): Xaa is C or S
XKXSKVVMRHKRLVKPTRGVYYLISTASLDQPVXXP

SEQ ID NO: 3173 - protein, 41 aa, Artificial Sequence
  Non-cyclic GFR-binding peptide
  MOD_RES (35)..(36): Xaa is C or S
  MOD_RES (13)..(14)..(15)..(16)..(17): Xaa is A or G
  MOD_RES (18)..(19)..(20)..(21): Xaa is A or G or absent
EAVSMGEQYNKLXXXXXXXXXLYLVSIASLKTPVXXAKGVK

SEQ ID NO: 3174 - protein, 41 aa, Artificial Sequence
  Non-cyclic GFR-binding peptide
  MOD_RES (2)..(4)..(38)..(39): Xaa is C or S
  MOD_RES (16)..(17)..(18)..(19)..(20): Xaa is A or G
  MOD_RES (21)..(22)..(23)..(24): Xaa is A or G or absent
HXGXARVVMNYHYKLXXXXXXXXXKYLVSIPSLQTPAXXPK

SEQ ID NO: 3175 - protein, 34 aa, Artificial Sequence
  Non-cyclic GFR-binding peptide
  MOD_RES (1)..(34): Xaa is C or S
XEAVSMGERHKRLTPVGMDDYYLVSTASLKTPVX

SEQ ID NO: 3176 - protein, 38 aa, Artificial Sequence
  Non-cyclic GFR-binding peptide
  MOD_RES (1)..(3): Xaa is C or S
XKXALHDELTRHKRLFIPKKRVIEYYLVSTASLQVQTP

SEQ ID NO: 3177 - protein, 37 aa, Artificial Sequence
  Non-cyclic GFR-binding peptide
  MOD_RES (31)..(32): Xaa is C or S
RVVMNRHKRLIVNSSDDYYLVSTASLKTPAXXPKPVY

SEQ ID NO: 3178 - protein, 40 aa, Artificial Sequence
  Non-cyclic GFR-binding peptide
  MOD_RES (1)..(35)..(36): Xaa is C or S
  MOD_RES (13)..(14)..(15)..(16)..(17): Xaa is A or G
  MOD_RES (18)..(19)..(20)..(21): Xaa is A or G or absent
XSRVVMNYHYKLXXXXXXXXXKYLVSIPSLKTPAXXPKPV

SEQ ID NO: 3179 - protein, 38 aa, Artificial Sequence
  Non-cyclic GFR-binding peptide
  MOD_RES (2)..(4): Xaa is C or S
EXKXALHDELTRYKKLFIPKKRVIEFYLVSIANLQVQT

SEQ ID NO: 3180 - protein, 43 aa, Artificial Sequence
  Non-cyclic GFR-binding peptide
  MOD_RES (1)..(3)..(37)..(38): Xaa is C or S
  MOD_RES (15)..(16)..(17)..(18)..(19): Xaa is A or G
  MOD_RES (20)..(21)..(22)..(23): Xaa is A or G or absent
XGXARVVMNRHKRLXXXXXXXXXYYLVSTASLQTPAXXPKPVT

SEQ ID NO: 3181 - protein, 37 aa, Artificial Sequence
  Non-cyclic GFR-binding peptide
  MOD_RES (32)..(33): Xaa is C or S
AKVVMNYHYKLIVNNSSDKYLVSIPSLKTPAXXAKPV

SEQ ID NO: 3182 - protein, 34 aa, Artificial Sequence
  Non-cyclic GFR-binding peptide
  MOD_RES (2)..(2): Xaa is C or S
GXEAVSMGERYKKLTPVGMDDFYLVSIANLKTPV

SEQ ID NO: 3183 - protein, 42 aa, Artificial Sequence
  Non-cyclic GFR-binding peptide
  MOD_RES (2)..(4)..(36): Xaa is C or S
HXGXSRVVMNYHYKLIVNSSDDKYLVSIPSLKTPAXTPKTVH

SEQ ID NO: 3184 - protein, 43 aa, Artificial Sequence
  Non-cyclic GFR-binding peptide
  MOD_RES (1)..(3)..(40): Xaa is C or S
  MOD_RES (16)..(17)..(18)..(19)..(20): Xaa is A or G
  MOD_RES (21)..(22)..(23)..(24): Xaa is A or G or absent
XKXALHDELTRYKKLXXXXXXXXXFYLVSIANLQVQTPRXQVN

SEQ ID NO: 3185 - protein, 33 aa, Artificial Sequence
  Non-cyclic GFR-binding peptide
  MOD_RES (1)..(1): Xaa is C or S
XEAVSMGERHKRLTPVGMDDYYLVSTASLKTPV

SEQ ID NO: 3186 - protein, 30 aa, Artificial Sequence
  Non-cyclic GFR-binding peptide
SKVIMRHKRLIKPTKGIYYLISTASLDQSV

SEQ ID NO: 3187 - protein, 40 aa, Artificial Sequence
  Non-cyclic GFR-binding peptide
  MOD_RES (1)..(3)..(37)..(38): Xaa is C or S
  MOD_RES (15)..(16)..(17)..(18)..(19): Xaa is A or G
  MOD_RES (20)..(21)..(22)..(23): Xaa is A or G or absent
XGXGEVVMDRYKKLXXXXXXXXXFYLMSIANLETPVXXAK

SEQ ID NO: 3188 - protein, 37 aa, Artificial Sequence
  Non-cyclic GFR-binding peptide
  MOD_RES (1)..(3)..(37): Xaa is C or S
  MOD_RES (15)..(16)..(17)..(18)..(19): Xaa is A or G
  MOD_RES (20)..(21)..(22)..(23): Xaa is A or G or absent
XGXSRVVMNQYNKLXXXXXXXXXLYLVSIASLKTPAX

SEQ ID NO: 3189 - protein, 36 aa, Artificial Sequence
  Non-cyclic GFR-binding peptide
  MOD_RES (2)..(4)..(36): Xaa is C or S
HXGXAKVVMNQYNKLIVNNSSDLYLVSIASLKTPAX

SEQ ID NO: 3190 - protein, 38 aa, Artificial Sequence
  Non-cyclic GFR-binding peptide
  MOD_RES (2)..(36)..(37): Xaa is C or S
  MOD_RES (14)..(15)..(16)..(17)..(18): Xaa is A or G
  MOD_RES (19)..(20)..(21)..(22): Xaa is A or G or absent
GXGEVVMEYHYKLXXXXXXXXXKYLMSIPSLETPVXXA

SEQ ID NO: 3191 - protein, 40 aa, Artificial Sequence
  Non-cyclic GFR-binding peptide
  MOD_RES (1)..(38): Xaa is C or S
XALHDELTQYNKLFIPKKRVIELYLVSIASLQVQTPRXQV

SEQ ID NO: 3192 - protein, 39 aa, Artificial Sequence
  Non-cyclic GFR-binding peptide
  MOD_RES (33)..(34): Xaa is C or S
EAVSMGEQYNKLTPVGMDDLYLVSIASLKTPVXXAKGVK

SEQ ID NO: 3193 - protein, 40 aa, Artificial Sequence
  Non-cyclic GFR-binding peptide
  MOD_RES (1)..(3)..(36)..(37): Xaa is C or S
  MOD_RES (14)..(15)..(16)..(17)..(18): Xaa is A or G
  MOD_RES (19)..(20)..(21)..(22): Xaa is A or G or absent
XKXSRVIMYHYKLXXXXXXXXXKYLISIPSLAQPVXXPAA

SEQ ID NO: 3194 - protein, 38 aa, Artificial Sequence
  Non-cyclic GFR-binding peptide
  MOD_RES (34)..(34): Xaa is C or S
  MOD_RES (12)..(13)..(14)..(15)..(16): Xaa is A or G
  MOD_RES (17)..(18)..(19)..(20): Xaa is A or G or absent
SRVVMNYHYKLXXXXXXXXXKYLVSIPSLKTPAXTPKT

SEQ ID NO: 3195 - protein, 35 aa, Artificial Sequence
  Non-cyclic GFR-binding peptide
  MOD_RES (2)..(4): Xaa is C or S
RXGXGEVVMEYHYKLVVKDYEDKYLMSIPSLETPV

SEQ ID NO: 3196 - protein, 39 aa, Artificial Sequence
  Non-cyclic GFR-binding peptide
  MOD_RES (1)..(33)..(34): Xaa is C or S
XGEVVMERYKKLVVKDYEDFYLMSIANLETPVXXAKPIS

SEQ ID NO: 3197 - protein, 40 aa, Artificial Sequence
  Non-cyclic GFR-binding peptide
  MOD_RES (2)..(4)..(37)..(38): Xaa is C or S
  MOD_RES (15)..(16)..(17)..(18)..(19): Xaa is A or G
  MOD_RES (20)..(21)..(22)..(23): Xaa is A or G or absent
SXKXSKVIMYHYKLXXXXXXXXXKYLISIPSLDQSVXXPS

SEQ ID NO: 3198 - protein, 38 aa, Artificial Sequence
  Non-cyclic GFR-binding peptide
  MOD_RES (1)..(3)..(36)..(37): Xaa is C or S
  MOD_RES (14)..(15)..(16)..(17)..(18): Xaa is A or G
  MOD_RES (19)..(20)..(21)..(22): Xaa is A or G or absent
XKXSKVVMQYNKLXXXXXXXXXLYLISIASLDQPVXXP

SEQ ID NO: 3199 - protein, 41 aa, Artificial Sequence
  Non-cyclic GFR-binding peptide
  MOD_RES (2)..(4)..(35)..(36): Xaa is C or S
SXKXSKVIMRHKRLIKPTKGIYYLISTASLDQSVXXPSASA

SEQ ID NO: 3200 - protein, 39 aa, Artificial Sequence
  Non-cyclic GFR-binding peptide
  MOD_RES (2)..(33)..(34): Xaa is C or S
KXSRVIMRHKRLVKPKRGVYYLISTASLAQPVXXPAASA

SEQ ID NO: 3201 - protein, 43 aa, Artificial Sequence
  Non-cyclic GFR-binding peptide
  MOD_RES (2)..(4)..(41): Xaa is C or S
  MOD_RES (17)..(18)..(19)..(20)..(21): Xaa is A or G
  MOD_RES (22)..(23)..(24)..(25): Xaa is A or G or absent
EXKXALHDELTYHYKLXXXXXXXXXKYLVSIPSLQVQTPRXQV

SEQ ID NO: 3202 - protein, 41 aa, Artificial Sequence
  Non-cyclic GFR-binding peptide
  MOD_RES (35)..(36): Xaa is C or S
  MOD_RES (13)..(14)..(15)..(16)..(17): Xaa is A or G
  MOD_RES (18)..(19)..(20)..(21): Xaa is A or G or absent
EAVSMGERHKRLXXXXXXXXXYYLVSTASLKTPVXXAKGVK

SEQ ID NO: 3203 - protein, 36 aa, Artificial Sequence
  Non-cyclic GFR-binding peptide
  MOD_RES (2)..(36): Xaa is C or S
  MOD_RES (14)..(15)..(16)..(17)..(18): Xaa is A or G
  MOD_RES (19)..(20)..(21)..(22): Xaa is A or G or absent
GXARVVMNRHKRLXXXXXXXXXYYLVSTASLQTPAX

SEQ ID NO: 3204 - protein, 41 aa, Artificial Sequence
  Non-cyclic GFR-binding peptide
  MOD_RES (2)..(4)..(38): Xaa is C or S
  MOD_RES (16)..(17)..(18)..(19)..(20): Xaa is A or G
  MOD_RES (21)..(22)..(23)..(24): Xaa is A or G or absent
HXGXSRVVMNRHKRLXXXXXXXXXYYLVSTASLKTPAXTPK

SEQ ID NO: 3205 - protein, 37 aa, Artificial Sequence
  Non-cyclic GFR-binding peptide
  MOD_RES (1)..(32)..(33): Xaa is C or S
XSKVIMQYNKLIKPTKGILYLISIASLDQSVXXPSAS

SEQ ID NO: 3206 - protein, 37 aa, Artificial Sequence
  Non-cyclic GFR-binding peptide
  MOD_RES (2)..(4)..(37): Xaa is C or S
  MOD_RES (15)..(16)..(17)..(18)..(19): Xaa is A or G
  MOD_RES (20)..(21)..(22)..(23): Xaa is A or G or absent
SXKXSKVVMYHYKLXXXXXXXXXKYLISIPSLDQPVX

SEQ ID NO: 3207 - protein, 37 aa, Artificial Sequence
  Non-cyclic GFR-binding peptide
  MOD_RES (2)..(35)..(36): Xaa is C or S
  MOD_RES (13)..(14)..(15)..(16)..(17): Xaa is A or G
  MOD_RES (18)..(19)..(20)..(21): Xaa is A or G or absent
KXSKVVMRYKKLXXXXXXXXXFYLISIANLDQPVXXP

SEQ ID NO: 3208 - protein, 37 aa, Artificial Sequence
  Non-cyclic GFR-binding peptide
  MOD_RES (1)..(32)..(33): Xaa is C or S
XSKVIMRYKKLIKPTKGIFYLISIANLDQSVXXPSAS

SEQ ID NO: 3209 - protein, 40 aa, Artificial Sequence
  Non-cyclic GFR-binding peptide
  MOD_RES (2)..(4)..(36)..(37): Xaa is C or S
RXGXGEVVMDRHKRLVVKENEDYYLMSTASLETPVXXAKP

SEQ ID NO: 3210 - protein, 41 aa, Artificial Sequence
  Non-cyclic GFR-binding peptide
  MOD_RES (1)..(35)..(36): Xaa is C or S
  MOD_RES (13)..(14)..(15)..(16)..(17): Xaa is A or G
  MOD_RES (18)..(19)..(20)..(21): Xaa is A or G or absent
XSRVVMNQYNKLXXXXXXXXXLYLVSIASLKTPAXXPKPVY

SEQ ID NO: 3211 - protein, 40 aa, Artificial Sequence
  Non-cyclic GFR-binding peptide
  MOD_RES (37)..(37): Xaa is C or S
  MOD_RES (13)..(14)..(15)..(16)..(17): Xaa is A or G
  MOD_RES (18)..(19)..(20)..(21): Xaa is A or G or absent
ALHDELTRHKRLXXXXXXXXXYYLVSTASLQVQTPRXQVN

SEQ ID NO: 3212 - protein, 40 aa, Artificial Sequence
  Non-cyclic GFR-binding peptide
  MOD_RES (1)..(38): Xaa is C or S
XALHDELTRHKRLFIPKKRVIEYYLVSTASLQVQTPRXQV

SEQ ID NO: 3213 - protein, 36 aa, Artificial Sequence
  Non-cyclic GFR-binding peptide
  MOD_RES (2)..(4): Xaa is C or S
  MOD_RES (15)..(16)..(17)..(18)..(19): Xaa is A or G
  MOD_RES (20)..(21)..(22)..(23): Xaa is A or G or absent
SXKXSRVIMQYNKLXXXXXXXXXLYLISIASLAQPV

SEQ ID NO: 3214 - protein, 35 aa, Artificial Sequence
  Non-cyclic GFR-binding peptide
  MOD_RES (1)..(3)..(34)..(35): Xaa is C or S
XKXSKVIMRHKRLIKPTKGIYYLISTASLDQSVXX

SEQ ID NO: 3215 - protein, 37 aa, Artificial Sequence
  Non-cyclic GFR-binding peptide
  MOD_RES (2)..(35)..(36): Xaa is C or S
  MOD_RES (13)..(14)..(15)..(16)..(17): Xaa is A or G
  MOD_RES (18)..(19)..(20)..(21): Xaa is A or G or absent
KXSKVVMQYNKLXXXXXXXXXLYLISIASLDQPVXXP

SEQ ID NO: 3216 - protein, 40 aa, Artificial Sequence
  Non-cyclic GFR-binding peptide
  MOD_RES (34)..(35): Xaa is C or S
  MOD_RES (12)..(13)..(14)..(15)..(16): Xaa is A or G
  MOD_RES (17)..(18)..(19)..(20): Xaa is A or G or absent
SRVVMNRHKRLXXXXXXXXXYYLVSTASLKTPAXXPKPVY

SEQ ID NO: 3217 - protein, 33 aa, Artificial Sequence
  Non-cyclic GFR-binding peptide
  MOD_RES (33)..(33): Xaa is C or S
  MOD_RES (11)..(12)..(13)..(14)..(15): Xaa is A or G
  MOD_RES (16)..(17)..(18)..(19): Xaa is A or G or absent
SKVIMRHKRLXXXXXXXXXYYLISTASLDQSVX

SEQ ID NO: 3218 - protein, 36 aa, Artificial Sequence
  Non-cyclic GFR-binding peptide
  MOD_RES (2)..(34)..(35): Xaa is C or S
GXARVVMNYHYKLIVNSSDDKYLVSIPSLQTPAXXP

SEQ ID NO: 3219 - protein, 35 aa, Artificial Sequence
  Non-cyclic GFR-binding peptide
  MOD_RES (2)..(4): Xaa is C or S
HXGXAKVVMNQYNKLIVNNSSDLYLVSIASLKTPA

SEQ ID NO: 3220 - protein, 38 aa, Artificial Sequence
  Non-cyclic GFR-binding peptide
  MOD_RES (2)..(4)..(37)..(38): Xaa is C or S
  MOD_RES (15)..(16)..(17)..(18)..(19): Xaa is A or G
  MOD_RES (20)..(21)..(22)..(23): Xaa is A or G or absent
SXKXSKVIMYHYKLXXXXXXXXXKYLISIPSLDQSVXX

SEQ ID NO: 3221 - protein, 43 aa, Artificial Sequence
  Non-cyclic GFR-binding peptide
  MOD_RES (1)..(3)..(37)..(38): Xaa is C or S
  MOD_RES (15)..(16)..(17)..(18)..(19): Xaa is A or G
  MOD_RES (20)..(21)..(22)..(23): Xaa is A or G or absent
XGXGEVVMDRYKKLXXXXXXXXXFYLMSIANLETPVXXAKPIK

SEQ ID NO: 3222 - protein, 31 aa, Artificial Sequence
  Non-cyclic GFR-binding peptide
  MOD_RES (31)..(31): Xaa is C or S
SRVIMRHKRLVKPKRGVYYLISTASLAQPVX

SEQ ID NO: 3223 - protein, 36 aa, Artificial Sequence
  Non-cyclic GFR-binding peptide
  MOD_RES (1)..(35)..(36): Xaa is C or S
  MOD_RES (13)..(14)..(15)..(16)..(17): Xaa is A or G
  MOD_RES (18)..(19)..(20)..(21): Xaa is A or G or absent
XARVVMNQYNKLXXXXXXXXXLYLVSIASLQTPAXX

SEQ ID NO: 3224 - protein, 34 aa, Artificial Sequence
  Non-cyclic GFR-binding peptide
  MOD_RES (1)..(32)..(33): Xaa is C or S
XSRVIMYHYKLVKPKRGVKYLISIPSLAQPVXXP

SEQ ID NO: 3225 - protein, 40 aa, Artificial Sequence
  Non-cyclic GFR-binding peptide
  MOD_RES (37)..(37): Xaa is C or S
  MOD_RES (13)..(14)..(15)..(16)..(17): Xaa is A or G
  MOD_RES (18)..(19)..(20)..(21): Xaa is A or G or absent
ALHDELTQYNKLXXXXXXXXXLYLVSIASLQVQTPRXQVN

SEQ ID NO: 3226 - protein, 42 aa, Artificial Sequence
  Non-cyclic GFR-binding peptide
  MOD_RES (2)..(4)..(37)..(38): Xaa is C or S
  MOD_RES (15)..(16)..(17)..(18)..(19): Xaa is A or G
  MOD_RES (20)..(21)..(22)..(23): Xaa is A or G or absent
SXKXSKVVMYHYKLXXXXXXXXXKYLISIPSLDQPVXXPSAS

SEQ ID NO: 3227 - protein, 31 aa, Artificial Sequence
  Non-cyclic GFR-binding peptide
AKVVMNYHYKLIVNNSSDKYLVSIPSLKTPA

SEQ ID NO: 3228 - protein, 33 aa, Artificial Sequence
  Non-cyclic GFR-binding peptide
  MOD_RES (31)..(32): Xaa is C or S
KVVMNRYKKLIVNNSSDFYLVSIANLKTPAXXA

SEQ ID NO: 3229 - protein, 33 aa, Artificial Sequence
  Non-cyclic GFR-binding peptide
HDELTQYNKLFIPKKRVIELYLVSIASLQVQTP

SEQ ID NO: 3230 - protein, 37 aa, Artificial Sequence
  Non-cyclic GFR-binding peptide
  MOD_RES (2)..(4)..(36)..(37): Xaa is C or S
RXGXGEVVMERYKKLVVKDYEDFYLMSIANLETPVXX

SEQ ID NO: 3231 - protein, 37 aa, Artificial Sequence
  Non-cyclic GFR-binding peptide
  MOD_RES (2)..(4)..(36)..(37): Xaa is C or S
HXGXARVVMNYHYKLIVNSSDDKYLVSIPSLQTPAXX

SEQ ID NO: 3232 - protein, 37 aa, Artificial Sequence
  Non-cyclic GFR-binding peptide
  MOD_RES (1)..(3)..(34)..(35): Xaa is C or S
XKXSRVIMRYKKLVKPKRGVFYLISIANLAQPVXXPA

SEQ ID NO: 3233 - protein, 37 aa, Artificial Sequence
  Non-cyclic GFR-binding peptide
  MOD_RES (1)..(3)..(37): Xaa is C or S
  MOD_RES (15)..(16)..(17)..(18)..(19): Xaa is A or G
  MOD_RES (20)..(21)..(22)..(23): Xaa is A or G or absent
XGXARVVMNRHKRLXXXXXXXXXYYLVSTASLQTPAX

SEQ ID NO: 3234 - protein, 34 aa, Artificial Sequence
  Non-cyclic GFR-binding peptide
  MOD_RES (13)..(14)..(15)..(16)..(17): Xaa is A or G
  MOD_RES (18)..(19)..(20)..(21): Xaa is A or G or absent
ALHDELTRHKRLXXXXXXXXXYYLVSTASLQVQT

SEQ ID NO: 3235 - protein, 36 aa, Artificial Sequence
  Non-cyclic GFR-binding peptide
  MOD_RES (2)..(33)..(34): Xaa is C or S
KXSKVVMQYNKLVKPTRGVLYLISIASLDQPVXXPS

SEQ ID NO: 3236 - protein, 40 aa, Artificial Sequence
  Non-cyclic GFR-binding peptide
  MOD_RES (2)..(34)..(35): Xaa is C or S
GXGEVVMEYHYKLVVKDYEDKYLMSIPSLETPVXXAKPIS

SEQ ID NO: 3237 - protein, 37 aa, Artificial Sequence
  Non-cyclic GFR-binding peptide
  MOD_RES (1)..(33)..(34): Xaa is C or S
XGEVVMERHKRLVVKDYEDYYLMSTASLETPVXXAKP

SEQ ID NO: 3238 - protein, 36 aa, Artificial Sequence
  Non-cyclic GFR-binding peptide
  MOD_RES (1)..(3)..(34)..(35): Xaa is C or S
XKXSKVVMQYNKLVKPTRGVLYLISIASLDQPVXXP

SEQ ID NO: 3239 - protein, 36 aa, Artificial Sequence
  Non-cyclic GFR-binding peptide
  MOD_RES (1)..(35)..(36): Xaa is C or S
  MOD_RES (13)..(14)..(15)..(16)..(17): Xaa is A or G
  MOD_RES (18)..(19)..(20)..(21): Xaa is A or G or absent
XGEVVMEYHYKLXXXXXXXXXKYLMSIPSLETPVXX

SEQ ID NO: 3240 - protein, 38 aa, Artificial Sequence
  Non-cyclic GFR-binding peptide
  MOD_RES (2)..(4)..(38): Xaa is C or S
  MOD_RES (16)..(17)..(18)..(19)..(20): Xaa is A or G
  MOD_RES (21)..(22)..(23)..(24): Xaa is A or G or absent
HXGXAKVVMNQYNKLXXXXXXXXXLYLVSIASLKTPAX

SEQ ID NO: 3241 - protein, 34 aa, Artificial Sequence
  Non-cyclic GFR-binding peptide
  MOD_RES (13)..(14)..(15)..(16)..(17): Xaa is A or G
  MOD_RES (18)..(19)..(20)..(21): Xaa is A or G or absent
ALHDELTQYNKLXXXXXXXXXLYLVSIASLQVQT

SEQ ID NO: 3242 - protein, 40 aa, Artificial Sequence
  Non-cyclic GFR-binding peptide
  MOD_RES (1)..(3)..(40): Xaa is C or S
XKXALHDELTRHKRLFIPKKRVIEYYLVSTASLQVQTPRX

SEQ ID NO: 3243 - protein, 37 aa, Artificial Sequence
  Non-cyclic GFR-binding peptide
  MOD_RES (31)..(32): Xaa is C or S
SRVIMRHKRLVKPKRGVYYLISTASLAQPVXXPAASA

SEQ ID NO: 3244 - protein, 36 aa, Artificial Sequence
  Non-cyclic GFR-binding peptide
  MOD_RES (2)..(4)..(36): Xaa is C or S
RXGXGEVVMDRYKKLVVKENEDFYLMSIANLETPVX

SEQ ID NO: 3245 - protein, 32 aa, Artificial Sequence
  Non-cyclic GFR-binding peptide
  MOD_RES (11)..(12)..(13)..(14)..(15): Xaa is A or G
  MOD_RES (16)..(17)..(18)..(19): Xaa is A or G or absent
SRVIMQYNKLXXXXXXXXXLYLISIASLAQPV

SEQ ID NO: 3246 - protein, 36 aa, Artificial Sequence
  Non-cyclic GFR-binding peptide
  MOD_RES (31)..(32): Xaa is C or S
SKVVMRHKRLVKPTRGVYYLISTASLDQPVXXPSAS

SEQ ID NO: 3247 - protein, 35 aa, Artificial Sequence
  Non-cyclic GFR-binding peptide
LHDELTQYNKLFIPKKRVIELYLVSIASLQVQTPR

SEQ ID NO: 3248 - protein, 36 aa, Artificial Sequence
  Non-cyclic GFR-binding peptide
  MOD_RES (33)..(34): Xaa is C or S
EAVSMGEQYNKLTPVGMDDLYLVSIASLKTPVXXAK

SEQ ID NO: 3249 - protein, 41 aa, Artificial Sequence
  Non-cyclic GFR-binding peptide
  MOD_RES (2)..(4)..(37)..(38): Xaa is C or S
  MOD_RES (15)..(16)..(17)..(18)..(19): Xaa is A or G
  MOD_RES (20)..(21)..(22)..(23): Xaa is A or G or absent
SXKXSKVVMRHKRLXXXXXXXXXYYLISTASLDQPVXXPSA

SEQ ID NO: 3250 - protein, 41 aa, Artificial Sequence
  Non-cyclic GFR-binding peptide
  MOD_RES (2)..(4)..(38)..(39): Xaa is C or S
  MOD_RES (16)..(17)..(18)..(19)..(20): Xaa is A or G
  MOD_RES (21)..(22)..(23)..(24): Xaa is A or G or absent
RXGXGEVVMEYHYKLXXXXXXXXXKYLMSIPSLETPVXXAK

SEQ ID NO: 3251 - protein, 34 aa, Artificial Sequence
  Non-cyclic GFR-binding peptide
  MOD_RES (1)..(33)..(34): Xaa is C or S
XSRVVMNRHKRLIVNSSDDYYLVSTASLKTPAXX

SEQ ID NO: 3252 - protein, 40 aa, Artificial Sequence
  Non-cyclic GFR-binding peptide
  MOD_RES (2)..(36)..(37): Xaa is C or S
  MOD_RES (14)..(15)..(16)..(17)..(18): Xaa is A or G
  MOD_RES (19)..(20)..(21)..(22): Xaa is A or G or absent
GXGEVVMDRHKRLXXXXXXXXXYYLMSTASLETPVXXAKP

SEQ ID NO: 3253 - protein, 34 aa, Artificial Sequence
  Non-cyclic GFR-binding peptide
  MOD_RES (1)..(33)..(34): Xaa is C or S
XAKVVMNQYNKLIVNNSSDLYLVSIASLKTPAXX

SEQ ID NO: 3254 - protein, 37 aa, Artificial Sequence
  Non-cyclic GFR-binding peptide
  MOD_RES (1)..(34)..(35): Xaa is C or S
  MOD_RES (12)..(13)..(14)..(15)..(16): Xaa is A or G
  MOD_RES (17)..(18)..(19)..(20): Xaa is A or G or absent
XSKVIMYHYKLXXXXXXXXXKYLISIPSLDQSVXXPS

SEQ ID NO: 3255 - protein, 36 aa, Artificial Sequence
  Non-cyclic GFR-binding peptide
  MOD_RES (1)..(36): Xaa is C or S
  MOD_RES (14)..(15)..(16)..(17)..(18): Xaa is A or G
  MOD_RES (19)..(20)..(21)..(22): Xaa is A or G or absent
XEAVSMGEQYNKLXXXXXXXXXLYLVSIASLKTPVX

SEQ ID NO: 3256 - protein, 40 aa, Artificial Sequence
  Non-cyclic GFR-binding peptide
  MOD_RES (2)..(35)..(36): Xaa is C or S
  MOD_RES (13)..(14)..(15)..(16)..(17): Xaa is A or G
  MOD_RES (18)..(19)..(20)..(21): Xaa is A or G or absent
KXSKVIMRHKRLXXXXXXXXXYYLISTASLDQSVXXPSAS

SEQ ID NO: 3257 - protein, 40 aa, Artificial Sequence
  Non-cyclic GFR-binding peptide
  MOD_RES (37)..(37): Xaa is C or S
ALHDELTRYKKLFIPKKRVIEFYLVSIANLQVQTPRXQVN

SEQ ID NO: 3258 - protein, 35 aa, Artificial Sequence
  Non-cyclic GFR-binding peptide
  MOD_RES (1)..(1): Xaa is C or S
  MOD_RES (14)..(15)..(16)..(17)..(18): Xaa is A or G
  MOD_RES (19)..(20)..(21)..(22): Xaa is A or G or absent
XALHDELTRHKRLXXXXXXXXXYYLVSTASLQVQT

SEQ ID NO: 3259 - protein, 39 aa, Artificial Sequence
  Non-cyclic GFR-binding peptide
  MOD_RES (2)..(34)..(35): Xaa is C or S
GXAKVVMNYHYKLIVNNSSDKYLVSIPSLKTPAXXAKPV

SEQ ID NO: 3260 - protein, 41 aa, Artificial Sequence
  Non-cyclic GFR-binding peptide
  MOD_RES (2)..(4)..(36)..(37): Xaa is C or S
HXGXSRVVMNRHKRLIVNSSDDYYLVSTASLKTPAXXPKPV

SEQ ID NO: 3261 - protein, 37 aa, Artificial Sequence
  Non-cyclic GFR-binding peptide
  MOD_RES (31)..(32): Xaa is C or S
EVVMEYHYKLVVKDYEDKYLMSIPSLETPVXXAKPIS

SEQ ID NO: 3262 - protein, 34 aa, Artificial Sequence
  Non-cyclic GFR-binding peptide
  MOD_RES (1)..(33): Xaa is C or S
XSRVVMNYHYKLIVNSSDDKYLVSIPSLKTPAXT

SEQ ID NO: 3263 - protein, 35 aa, Artificial Sequence
  Non-cyclic GFR-binding peptide
  MOD_RES (2)..(2): Xaa is C or S
  MOD_RES (14)..(15)..(16)..(17)..(18): Xaa is A or G
  MOD_RES (19)..(20)..(21)..(22): Xaa is A or G or absent
GXSRVVMNYHYKLXXXXXXXXXKYLVSIPSLKTPA

SEQ ID NO: 3264 - protein, 40 aa, Artificial Sequence
  Non-cyclic GFR-binding peptide
  MOD_RES (1)..(34)..(35): Xaa is C or S
  MOD_RES (12)..(13)..(14)..(15)..(16): Xaa is A or G
  MOD_RES (17)..(18)..(19)..(20): Xaa is A or G or absent
XSRVIMRYKKLXXXXXXXXXFYLISIANLAQPVXXPAASA

SEQ ID NO: 3265 - protein, 42 aa, Artificial Sequence
  Non-cyclic GFR-binding peptide
  MOD_RES (2)..(36)..(37): Xaa is C or S
  MOD_RES (14)..(15)..(16)..(17)..(18): Xaa is A or G
  MOD_RES (19)..(20)..(21)..(22): Xaa is A or G or absent
GXSRVVMNRHKRLXXXXXXXXXYYLVSTASLKTPAXXPKPVY

SEQ ID NO: 3266 - protein, 36 aa, Artificial Sequence
  Non-cyclic GFR-binding peptide
  MOD_RES (2)..(33)..(34): Xaa is C or S
KXSKVIMQYNKLIKPTKGILYLISIASLDQSVXXPS

SEQ ID NO: 3267 - protein, 31 aa, Artificial Sequence
  Non-cyclic GFR-binding peptide
GEVVMDRHKRLVVKENEDYYLMSTASLETPV

SEQ ID NO: 3268 - protein, 36 aa, Artificial Sequence
  Non-cyclic GFR-binding peptide
  MOD_RES (33)..(34): Xaa is C or S
  MOD_RES (11)..(12)..(13)..(14)..(15): Xaa is A or G
  MOD_RES (16)..(17)..(18)..(19): Xaa is A or G or absent
SKVIMRYKKLXXXXXXXXXFYLISIANLDQSVXXPS

SEQ ID NO: 3269 - protein, 39 aa, Artificial Sequence
  Non-cyclic GFR-binding peptide
  MOD_RES (1)..(35)..(36): Xaa is C or S
  MOD_RES (13)..(14)..(15)..(16)..(17): Xaa is A or G
  MOD_RES (18)..(19)..(20)..(21): Xaa is A or G or absent
XGEVVMERHKRLXXXXXXXXXYYLMSTASLETPVXXAKP

SEQ ID NO: 3270 - protein, 35 aa, Artificial Sequence
  Non-cyclic GFR-binding peptide
  MOD_RES (32)..(33): Xaa is C or S
GEVVMEYHYKLVVKDYEDKYLMSIPSLETPVXXAK

SEQ ID NO: 3271 - protein, 31 aa, Artificial Sequence
  Non-cyclic GFR-binding peptide
GEVVMEYHYKLVVKDYEDKYLMSIPSLETPV

SEQ ID NO: 3272 - protein, 35 aa, Artificial Sequence
  Non-cyclic GFR-binding peptide
  MOD_RES (35)..(35): Xaa is C or S
  MOD_RES (11)..(12)..(13)..(14)..(15): Xaa is A or G
  MOD_RES (16)..(17)..(18)..(19): Xaa is A or G or absent
HDELTYHYKLXXXXXXXXXKYLVSIPSLQVQTPRX

SEQ ID NO: 3273 - protein, 36 aa, Artificial Sequence
  Non-cyclic GFR-binding peptide
  MOD_RES (1)..(34)..(35): Xaa is C or S
  MOD_RES (12)..(13)..(14)..(15)..(16): Xaa is A or G
  MOD_RES (17)..(18)..(19)..(20): Xaa is A or G or absent
XSRVIMYHYKLXXXXXXXXXKYLISIPSLAQPVXXP

SEQ ID NO: 3274 - protein, 33 aa, Artificial Sequence
  Non-cyclic GFR-binding peptide
  MOD_RES (12)..(13)..(14)..(15)..(16): Xaa is A or G
  MOD_RES (17)..(18)..(19)..(20): Xaa is A or G or absent
SRVVMNYHYKLXXXXXXXXXKYLVSIPSLKTPA

SEQ ID NO: 3275 - protein, 34 aa, Artificial Sequence
  Non-cyclic GFR-binding peptide
ALHDELTRYKKLFIPKKRVIEFYLVSIANLQVQT

SEQ ID NO: 3276 - protein, 40 aa, Artificial Sequence
  Non-cyclic GFR-binding peptide
  MOD_RES (2)..(4)..(36): Xaa is C or S
HXGXSRVVMNYHYKLIVNSSDDKYLVSIPSLKTPAXTPKT

SEQ ID NO: 3277 - protein, 43 aa, Artificial Sequence
  Non-cyclic GFR-binding peptide
  MOD_RES (2)..(4)..(38)..(39): Xaa is C or S
  MOD_RES (16)..(17)..(18)..(19)..(20): Xaa is A or G
  MOD_RES (21)..(22)..(23)..(24): Xaa is A or G or absent
RXGXGEVVMERYKKLXXXXXXXXXFYLMSIANLETPVXXAKPI

SEQ ID NO: 3278 - protein, 34 aa, Artificial Sequence
  Non-cyclic GFR-binding peptide
  MOD_RES (34)..(34): Xaa is C or S
  MOD_RES (12)..(13)..(14)..(15)..(16): Xaa is A or G
  MOD_RES (17)..(18)..(19)..(20): Xaa is A or G or absent
GEVVMDRHKRLXXXXXXXXXYYLMSTASLETPVX

SEQ ID NO: 3279 - protein, 37 aa, Artificial Sequence
  Non-cyclic GFR-binding peptide
  MOD_RES (1)..(33): Xaa is C or S
XSRVVMNYHYKLIVNSSDDKYLVSIPSLKTPAXTPKT

SEQ ID NO: 3280 - protein, 38 aa, Artificial Sequence
  Non-cyclic GFR-binding peptide
  MOD_RES (2)..(35)..(36): Xaa is C or S
  MOD_RES (13)..(14)..(15)..(16)..(17): Xaa is A or G
  MOD_RES (18)..(19)..(20)..(21): Xaa is A or G or absent
KXSKVIMRHKRLXXXXXXXXXYYLISTASLDQSVXXPS

SEQ ID NO: 3281 - protein, 35 aa, Artificial Sequence
  Non-cyclic GFR-binding peptide
  MOD_RES (1)..(33)..(34): Xaa is C or S
XAKVVMNQYNKLIVNNSSDLYLVSIASLKTPAXXA

SEQ ID NO: 3282 - protein, 38 aa, Artificial Sequence
  Non-cyclic GFR-binding peptide
  MOD_RES (1)..(3)..(37)..(38): Xaa is C or S
  MOD_RES (15)..(16)..(17)..(18)..(19): Xaa is A or G
  MOD_RES (20)..(21)..(22)..(23): Xaa is A or G or absent
XGXSRVVMNRHKRLXXXXXXXXXYYLVSTASLKTPAXX

SEQ ID NO: 3283 - protein, 40 aa, Artificial Sequence
  Non-cyclic GFR-binding peptide
  MOD_RES (2)..(4)..(35)..(36): Xaa is C or S
SXKXSKVVMRYKKLVKPTRGVFYLISIANLDQPVXXPSAS

SEQ ID NO: 3284 - protein, 30 aa, Artificial Sequence
  Non-cyclic GFR-binding peptide
SKVVMQYNKLVKPTRGVLYLISIASLDQPV

SEQ ID NO: 3285 - protein, 42 aa, Artificial Sequence
  Non-cyclic GFR-binding peptide
  MOD_RES (1)..(3)..(38)..(39): Xaa is C or S
  MOD_RES (16)..(17)..(18)..(19)..(20): Xaa is A or G
  MOD_RES (21)..(22)..(23)..(24): Xaa is A or G or absent
XGXEAVSMGERHKRLXXXXXXXXXYYLVSTASLKTPVXXAKG

SEQ ID NO: 3286 - protein, 32 aa, Artificial Sequence
  Non-cyclic GFR-binding peptide
  MOD_RES (11)..(12)..(13)..(14)..(15): Xaa is A or G
  MOD_RES (16)..(17)..(18)..(19): Xaa is A or G or absent
EVVMDYHYKLXXXXXXXXXKYLMSIPSLETPV

SEQ ID NO: 3287 - protein, 42 aa, Artificial Sequence
  Non-cyclic GFR-binding peptide
  MOD_RES (1)..(3)..(38)..(39): Xaa is C or S
  MOD_RES (16)..(17)..(18)..(19)..(20): Xaa is A or G
  MOD_RES (21)..(22)..(23)..(24): Xaa is A or G or absent
XGXEAVSMGEQYNKLXXXXXXXXXLYLVSIASLKTPVXXAKG

SEQ ID NO: 3288 - protein, 40 aa, Artificial Sequence
  Non-cyclic GFR-binding peptide
  MOD_RES (2)..(4)..(37)..(38): Xaa is C or S
RXGXEAVSMGEQYNKLTPVGMDDLYLVSIASLKTPVXXAK

SEQ ID NO: 3289 - protein, 40 aa, Artificial Sequence
  Non-cyclic GFR-binding peptide
  MOD_RES (1)..(3)..(36)..(37): Xaa is C or S
XGXEAVSMGERHKRLTPVGMDDYYLVSTASLKTPVXXAKG

SEQ ID NO: 3290 - protein, 33 aa, Artificial Sequence
  Non-cyclic GFR-binding peptide
  MOD_RES (32)..(33): Xaa is C or S
GEVVMDYHYKLVVKENEDKYLMSIPSLETPVXX

SEQ ID NO: 3291 - protein, 38 aa, Artificial Sequence
  Non-cyclic GFR-binding peptide
  MOD_RES (1)..(3)..(36)..(37): Xaa is C or S
  MOD_RES (14)..(15)..(16)..(17)..(18): Xaa is A or G
  MOD_RES (19)..(20)..(21)..(22): Xaa is A or G or absent
XKXSKVIMRHKRLXXXXXXXXXYYLISTASLDQSVXXP

SEQ ID NO: 3292 - protein, 45 aa, Artificial Sequence
  Non-cyclic GFR-binding peptide
  MOD_RES (2)..(4)..(41): Xaa is C or S
  MOD_RES (17)..(18)..(19)..(20)..(21): Xaa is A or G
  MOD_RES (22)..(23)..(24)..(25): Xaa is A or G or absent
EXKXALHDELTRYKKLXXXXXXXXXFYLVSIANLQVQTPRXQVNR

SEQ ID NO: 3293 - protein, 37 aa, Artificial Sequence
  Non-cyclic GFR-binding peptide
  MOD_RES (36)..(36): Xaa is C or S
LHDELTRYKKLFIPKKRVIEFYLVSIANLQVQTPRXQ

SEQ ID NO: 3294 - protein, 33 aa, Artificial Sequence
  Non-cyclic GFR-binding peptide
  MOD_RES (12)..(13)..(14)..(15)..(16): Xaa is A or G
  MOD_RES (17)..(18)..(19)..(20): Xaa is A or G or absent
SRVVMNRHKRLXXXXXXXXXYYLVSTASLKTPA

SEQ ID NO: 3295 - protein, 36 aa, Artificial Sequence
  Non-cyclic GFR-binding peptide
  MOD_RES (33)..(34): Xaa is C or S
  MOD_RES (11)..(12)..(13)..(14)..(15): Xaa is A or G
  MOD_RES (16)..(17)..(18)..(19): Xaa is A or G or absent
KVVMNQYNKLXXXXXXXXXLYLVSIASLKTPAXXAK

SEQ ID NO: 3296 - protein, 40 aa, Artificial Sequence
  Non-cyclic GFR-binding peptide
  MOD_RES (1)..(3)..(37): Xaa is C or S
  MOD_RES (15)..(16)..(17)..(18)..(19): Xaa is A or G
  MOD_RES (20)..(21)..(22)..(23): Xaa is A or G or absent
XGXSRVVMNRHKRLXXXXXXXXXYYLVSTASLKTPAXTPK

SEQ ID NO: 3297 - protein, 38 aa, Artificial Sequence
  Non-cyclic GFR-binding peptide
  MOD_RES (1)..(32)..(33): Xaa is C or S
XSKVVMQYNKLVKPTRGVLYLISIASLDQPVXXPSASA

SEQ ID NO: 3298 - protein, 38 aa, Artificial Sequence
  Non-cyclic GFR-binding peptide
  MOD_RES (2)..(35)..(36): Xaa is C or S
  MOD_RES (13)..(14)..(15)..(16)..(17): Xaa is A or G
  MOD_RES (18)..(19)..(20)..(21): Xaa is A or G or absent
KXSRVIMYHYKLXXXXXXXXXKYLISIPSLAQPVXXPA

SEQ ID NO: 3299 - protein, 38 aa, Artificial Sequence
  Non-cyclic GFR-binding peptide
  MOD_RES (1)..(3): Xaa is C or S
XKXALHDELTQYNKLFIPKKRVIELYLVSIASLQVQTP

SEQ ID NO: 3300 - protein, 41 aa, Artificial Sequence
  Non-cyclic GFR-binding peptide
  MOD_RES (2)..(4)..(37)..(38): Xaa is C or S
  MOD_RES (15)..(16)..(17)..(18)..(19): Xaa is A or G
  MOD_RES (20)..(21)..(22)..(23): Xaa is A or G or absent
SXKXSKVIMYHYKLXXXXXXXXXKYLISIPSLDQSVXXPSA

SEQ ID NO: 3301 - protein, 34 aa, Artificial Sequence
  Non-cyclic GFR-binding peptide
  MOD_RES (31)..(32): Xaa is C or S
EVVMERYKKLVVKDYEDFYLMSIANLETPVXXAK

SEQ ID NO: 3302 - protein, 36 aa, Artificial Sequence
  Non-cyclic GFR-binding peptide
  MOD_RES (2)..(4)..(36): Xaa is C or S
HXGXARVVMNYHYKLIVNSSDDKYLVSIPSLQTPAX

SEQ ID NO: 3303 - protein, 39 aa, Artificial Sequence
  Non-cyclic GFR-binding peptide
  MOD_RES (2)..(34)..(35): Xaa is C or S
GXGEVVMERYKKLVVKDYEDFYLMSIANLETPVXXAKPI

SEQ ID NO: 3304 - protein, 36 aa, Artificial Sequence
  Non-cyclic GFR-binding peptide
  MOD_RES (1)..(34)..(35): Xaa is C or S
XEAVSMGEQYNKLTPVGMDDLYLVSIASLKTPVXXA

SEQ ID NO: 3305 - protein, 33 aa, Artificial Sequence
  Non-cyclic GFR-binding peptide
  MOD_RES (2)..(2): Xaa is C or S
GXGEVVMEYHYKLVVKDYEDKYLMSIPSLETPV

SEQ ID NO: 3306 - protein, 38 aa, Artificial Sequence
  Non-cyclic GFR-binding peptide
  MOD_RES (1)..(3)..(35)..(36): Xaa is C or S
XGXGEVVMERHKRLVVKDYEDYYLMSTASLETPVXXAK

SEQ ID NO: 3307 - protein, 34 aa, Artificial Sequence
  Non-cyclic GFR-binding peptide
  MOD_RES (2)..(33)..(34): Xaa is C or S
KXSKVVMRHKRLVKPTRGVYYLISTASLDQPVXX

SEQ ID NO: 3308 - protein, 37 aa, Artificial Sequence
  Non-cyclic GFR-binding peptide
  MOD_RES (34)..(35): Xaa is C or S
  MOD_RES (12)..(13)..(14)..(15)..(16): Xaa is A or G
  MOD_RES (17)..(18)..(19)..(20): Xaa is A or G or absent
GEVVMERYKKLXXXXXXXXXFYLMSIANLETPVXXAK

SEQ ID NO: 3309 - protein, 42 aa, Artificial Sequence
  Non-cyclic GFR-binding peptide
  MOD_RES (1)..(3)..(37)..(38): Xaa is C or S
  MOD_RES (15)..(16)..(17)..(18)..(19): Xaa is A or G
  MOD_RES (20)..(21)..(22)..(23): Xaa is A or G or absent
XGXAKVVMNRYKKLXXXXXXXXXFYLVSIANLKTPAXXAKPV

SEQ ID NO: 3310 - protein, 34 aa, Artificial Sequence
  Non-cyclic GFR-binding peptide
  MOD_RES (2)..(4): Xaa is C or S
SXKXSKVIMRYKKLIKPTKGIFYLISIANLDQSV

SEQ ID NO: 3311 - protein, 39 aa, Artificial Sequence
  Non-cyclic GFR-binding peptide
  MOD_RES (1)..(3)..(35)..(36): Xaa is C or S
XGXAKVVMNYHYKLIVNNSSDKYLVSIPSLKTPAXXAKP

SEQ ID NO: 3312 - protein, 37 aa, Artificial Sequence
  Non-cyclic GFR-binding peptide
  MOD_RES (31)..(32): Xaa is C or S
EVVMERHKRLVVKDYEDYYLMSTASLETPVXXAKPIS

SEQ ID NO: 3313 - protein, 35 aa, Artificial Sequence
  Non-cyclic GFR-binding peptide
  MOD_RES (33)..(34): Xaa is C or S
  MOD_RES (11)..(12)..(13)..(14)..(15): Xaa is A or G
  MOD_RES (16)..(17)..(18)..(19): Xaa is A or G or absent
SKVVMYHYKLXXXXXXXXXKYLISIPSLDQPVXXP

SEQ ID NO: 3314 - protein, 35 aa, Artificial Sequence
  Non-cyclic GFR-binding peptide
  MOD_RES (31)..(32): Xaa is C or S
EVVMDRYKKLVVKENEDFYLMSIANLETPVXXAKP

SEQ ID NO: 3315 - protein, 35 aa, Artificial Sequence
  Non-cyclic GFR-binding peptide
  MOD_RES (1)..(3): Xaa is C or S
XGXEAVSMGEQYNKLTPVGMDDLYLVSIASLKTPV

SEQ ID NO: 3316 - protein, 41 aa, Artificial Sequence
  Non-cyclic GFR-binding peptide
  MOD_RES (2)..(4)..(41): Xaa is C or S
EXKXALHDELTYHYKLFIPKKRVIEKYLVSIPSLQVQTPRX

SEQ ID NO: 3317 - protein, 35 aa, Artificial Sequence
  Non-cyclic GFR-binding peptide
  MOD_RES (2)..(34): Xaa is C or S
GXSRVVMNYHYKLIVNSSDDKYLVSIPSLKTPAXT

SEQ ID NO: 3318 - protein, 35 aa, Artificial Sequence
  Non-cyclic GFR-binding peptide
  MOD_RES (34)..(35): Xaa is C or S
  MOD_RES (12)..(13)..(14)..(15)..(16): Xaa is A or G
  MOD_RES (17)..(18)..(19)..(20): Xaa is A or G or absent
GEVVMDRYKKLXXXXXXXXXFYLMSIANLETPVXX

SEQ ID NO: 3319 - protein, 40 aa, Artificial Sequence
  Non-cyclic GFR-binding peptide
  MOD_RES (1)..(3)..(36)..(37): Xaa is C or S
  MOD_RES (14)..(15)..(16)..(17)..(18): Xaa is A or G
  MOD_RES (19)..(20)..(21)..(22): Xaa is A or G or absent
XKXSKVIMYHYKLXXXXXXXXXKYLISIPSLDQSVXXPSA

SEQ ID NO: 3320 - protein, 40 aa, Artificial Sequence
  Non-cyclic GFR-binding peptide
  MOD_RES (1)..(35)..(36): Xaa is C or S
  MOD_RES (13)..(14)..(15)..(16)..(17): Xaa is A or G
  MOD_RES (18)..(19)..(20)..(21): Xaa is A or G or absent
XGEVVMDRHKRLXXXXXXXXXYYLMSTASLETPVXXAKPI

SEQ ID NO: 3321 - protein, 38 aa, Artificial Sequence
  Non-cyclic GFR-binding peptide
  MOD_RES (2)..(4)..(37)..(38): Xaa is C or S
  MOD_RES (15)..(16)..(17)..(18)..(19): Xaa is A or G
  MOD_RES (20)..(21)..(22)..(23): Xaa is A or G or absent
SXKXSKVVMRHKRLXXXXXXXXXYYLISTASLDQPVXX

SEQ ID NO: 3322 - protein, 38 aa, Artificial Sequence
  Non-cyclic GFR-binding peptide
  MOD_RES (1)..(3)..(36)..(37): Xaa is C or S
  MOD_RES (14)..(15)..(16)..(17)..(18): Xaa is A or G
  MOD_RES (19)..(20)..(21)..(22): Xaa is A or G or absent
XKXSKVVMRHKRLXXXXXXXXXYYLISTASLDQPVXXP

SEQ ID NO: 3323 - protein, 41 aa, Artificial Sequence
  Non-cyclic GFR-binding peptide
  MOD_RES (1)..(3)..(36)..(37): Xaa is C or S
  MOD_RES (14)..(15)..(16)..(17)..(18): Xaa is A or G
  MOD_RES (19)..(20)..(21)..(22): Xaa is A or G or absent
XKXSRVIMRYKKLXXXXXXXXXFYLISIANLAQPVXXPAAS

SEQ ID NO: 3324 - protein, 37 aa, Artificial Sequence
  Non-cyclic GFR-binding peptide
  MOD_RES (33)..(34): Xaa is C or S
  MOD_RES (11)..(12)..(13)..(14)..(15): Xaa is A or G
  MOD_RES (16)..(17)..(18)..(19): Xaa is A or G or absent
RVVMNQYNKLXXXXXXXXXLYLVSIASLKTPAXXPKP

SEQ ID NO: 3325 - protein, 30 aa, Artificial Sequence
  Non-cyclic GFR-binding peptide
SKVVMYHYKLVKPTRGVKYLISIPSLDQPV

SEQ ID NO: 3326 - protein, 34 aa, Artificial Sequence
  Non-cyclic GFR-binding peptide
  MOD_RES (33)..(34): Xaa is C or S
  MOD_RES (11)..(12)..(13)..(14)..(15): Xaa is A or G
  MOD_RES (16)..(17)..(18)..(19): Xaa is A or G or absent
SKVVMRYKKLXXXXXXXXXFYLISIANLDQPVXX

SEQ ID NO: 3327 - protein, 32 aa, Artificial Sequence
  Non-cyclic GFR-binding peptide
  MOD_RES (11)..(12)..(13)..(14)..(15): Xaa is A or G
  MOD_RES (16)..(17)..(18)..(19): Xaa is A or G or absent
SKVIMYHYKLXXXXXXXXXKYLISIPSLDQSV

SEQ ID NO: 3328 - protein, 33 aa, Artificial Sequence
  Non-cyclic GFR-binding peptide
  MOD_RES (33)..(33): Xaa is C or S
  MOD_RES (11)..(12)..(13)..(14)..(15): Xaa is A or G
  MOD_RES (16)..(17)..(18)..(19): Xaa is A or G or absent
SKVIMYHYKLXXXXXXXXXKYLISIPSLDQSVX

SEQ ID NO: 3329 - protein, 39 aa, Artificial Sequence
  Non-cyclic GFR-binding peptide
  MOD_RES (2)..(36)..(37): Xaa is C or S
  MOD_RES (14)..(15)..(16)..(17)..(18): Xaa is A or G
  MOD_RES (19)..(20)..(21)..(22): Xaa is A or G or absent
GXSRVVMNQYNKLXXXXXXXXXLYLVSIASLKTPAXXPK

SEQ ID NO: 3330 - protein, 36 aa, Artificial Sequence
  Non-cyclic GFR-binding peptide
  MOD_RES (34)..(35): Xaa is C or S
  MOD_RES (12)..(13)..(14)..(15)..(16): Xaa is A or G
  MOD_RES (17)..(18)..(19)..(20): Xaa is A or G or absent
AKVVMNYHYKLXXXXXXXXXKYLVSIPSLKTPAXXA

SEQ ID NO: 3331 - protein, 37 aa, Artificial Sequence
  Non-cyclic GFR-binding peptide
  MOD_RES (1)..(3)..(34)..(35): Xaa is C or S
XKXSKVVMYHYKLVKPTRGVKYLISIPSLDQPVXXPS

SEQ ID NO: 3332 - protein, 40 aa, Artificial Sequence
  Non-cyclic GFR-binding peptide
  MOD_RES (2)..(4)..(35)..(36): Xaa is C or S
SXKXSKVIMRHKRLIKPTKGIYYLISTASLDQSVXXPSAS

SEQ ID NO: 3333 - protein, 38 aa, Artificial Sequence
  Non-cyclic GFR-binding peptide
  MOD_RES (1)..(3)..(34)..(35): Xaa is C or S
XKXSRVIMYHYKLVKPKRGVKYLISIPSLAQPVXXPAA

SEQ ID NO: 3334 - protein, 40 aa, Artificial Sequence
  Non-cyclic GFR-binding peptide
  MOD_RES (2)..(4)..(36)..(37): Xaa is C or S
HXGXSRVVMNYHYKLIVNSSDDKYLVSIPSLKTPAXXPKP

SEQ ID NO: 3335 - protein, 42 aa, Artificial Sequence
  Non-cyclic GFR-binding peptide
  MOD_RES (2)..(4)..(38)..(39): Xaa is C or S
  MOD_RES (16)..(17)..(18)..(19)..(20): Xaa is A or G
  MOD_RES (21)..(22)..(23)..(24): Xaa is A or G or absent
HXGXAKVVMNYHYKLXXXXXXXXXKYLVSIPSLKTPAXXAKP

SEQ ID NO: 3336 - protein, 35 aa, Artificial Sequence
  Non-cyclic GFR-binding peptide
  MOD_RES (2)..(2): Xaa is C or S
  MOD_RES (14)..(15)..(16)..(17)..(18): Xaa is A or G
  MOD_RES (19)..(20)..(21)..(22): Xaa is A or G or absent
GXGEVVMDYHYKLXXXXXXXXXKYLMSIPSLETPV

SEQ ID NO: 3337 - protein, 39 aa, Artificial Sequence
  Non-cyclic GFR-binding peptide
  MOD_RES (1)..(35): Xaa is C or S
  MOD_RES (13)..(14)..(15)..(16)..(17): Xaa is A or G
  MOD_RES (18)..(19)..(20)..(21): Xaa is A or G or absent
XSRVVMNYHYKLXXXXXXXXXKYLVSIPSLKTPAXTPKT

SEQ ID NO: 3338 - protein, 34 aa, Artificial Sequence
  Non-cyclic GFR-binding peptide
  MOD_RES (32)..(32): Xaa is C or S
SRVVMNQYNKLIVNSSDDLYLVSIASLKTPAXTP

SEQ ID NO: 3339 - protein, 40 aa, Artificial Sequence
  Non-cyclic GFR-binding peptide
  MOD_RES (1)..(3)..(40): Xaa is C or S
XKXALHDELTQYNKLFIPKKRVIELYLVSIASLQVQTPRX

SEQ ID NO: 3340 - protein, 34 aa, Artificial Sequence
  Non-cyclic GFR-binding peptide
  MOD_RES (34)..(34): Xaa is C or S
  MOD_RES (12)..(13)..(14)..(15)..(16): Xaa is A or G
  MOD_RES (17)..(18)..(19)..(20): Xaa is A or G or absent
GEVVMDRYKKLXXXXXXXXXFYLMSIANLETPVX

SEQ ID NO: 3341 - protein, 37 aa, Artificial Sequence
  Non-cyclic GFR-binding peptide
  MOD_RES (2)..(4)..(35)..(36): Xaa is C or S
SXKXSKVIMRYKKLIKPTKGIFYLISIANLDQSVXXP

SEQ ID NO: 3342 - protein, 37 aa, Artificial Sequence
  Non-cyclic GFR-binding peptide
  MOD_RES (1)..(3)..(36)..(37): Xaa is C or S
  MOD_RES (14)..(15)..(16)..(17)..(18): Xaa is A or G
  MOD_RES (19)..(20)..(21)..(22): Xaa is A or G or absent
XKXSRVIMQYNKLXXXXXXXXXLYLISIASLAQPVXX

SEQ ID NO: 3343 - protein, 34 aa, Artificial Sequence
  Non-cyclic GFR-binding peptide
  MOD_RES (2)..(34): Xaa is C or S
GXARVVMNQYNKLIVNSSDDLYLVSIASLQTPAX

SEQ ID NO: 3344 - protein, 38 aa, Artificial Sequence
  Non-cyclic GFR-binding peptide
  MOD_RES (35)..(35): Xaa is C or S
HDELTRYKKLFIPKKRVIEFYLVSIANLQVQTPRXQVN

SEQ ID NO: 3345 - protein, 41 aa, Artificial Sequence
  Non-cyclic GFR-binding peptide
  MOD_RES (2)..(4)..(37)..(38): Xaa is C or S
  MOD_RES (15)..(16)..(17)..(18)..(19): Xaa is A or G
  MOD_RES (20)..(21)..(22)..(23): Xaa is A or G or absent
SXKXSKVVMRYKKLXXXXXXXXXFYLISIANLDQPVXXPSA

SEQ ID NO: 3346 - protein, 40 aa, Artificial Sequence
  Non-cyclic GFR-binding peptide
  MOD_RES (2)..(34)..(35): Xaa is C or S
GXAKVVMNRYKKLIVNNSSDFYLVSIANLKTPAXXAKPVA

SEQ ID NO: 3347 - protein, 34 aa, Artificial Sequence
  Non-cyclic GFR-binding peptide
  MOD_RES (1)..(32)..(33): Xaa is C or S
XSKVIMQYNKLIKPTKGILYLISIASLDQSVXXP

SEQ ID NO: 3348 - protein, 35 aa, Artificial Sequence
  Non-cyclic GFR-binding peptide
  MOD_RES (1)..(1): Xaa is C or S
XALHDELTRYKKLFIPKKRVIEFYLVSIANLQVQT

SEQ ID NO: 3349 - protein, 32 aa, Artificial Sequence
  Non-cyclic GFR-binding peptide
  MOD_RES (1)..(1): Xaa is C or S
XARVVMNYHYKLIVNSSDDKYLVSIPSLQTPA

SEQ ID NO: 3350 - protein, 36 aa, Artificial Sequence
  Non-cyclic GFR-binding peptide
  MOD_RES (1)..(3)..(34)..(35): Xaa is C or S
XKXSKVIMRYKKLIKPTKGIFYLISIANLDQSVXXP

SEQ ID NO: 3351 - protein, 38 aa, Artificial Sequence
  Non-cyclic GFR-binding peptide
  MOD_RES (2)..(4)..(35)..(36): Xaa is C or S
SXKXSKVIMQYNKLIKPTKGILYLISIASLDQSVXXPS

SEQ ID NO: 3352 - protein, 38 aa, Artificial Sequence
  Non-cyclic GFR-binding peptide
  MOD_RES (34)..(35): Xaa is C or S
  MOD_RES (12)..(13)..(14)..(15)..(16): Xaa is A or G
  MOD_RES (17)..(18)..(19)..(20): Xaa is A or G or absent
AKVVMNQYNKLXXXXXXXXXLYLVSIASLKTPAXXAKP

SEQ ID NO: 3353 - protein, 36 aa, Artificial Sequence
  Non-cyclic GFR-binding peptide
  MOD_RES (32)..(33): Xaa is C or S
AKVVMNQYNKLIVNNSSDLYLVSIASLKTPAXXAKP

SEQ ID NO: 3354 - protein, 43 aa, Artificial Sequence
  Non-cyclic GFR-binding peptide
  MOD_RES (2)..(4)..(37)..(38): Xaa is C or S
RXGXEAVSMGERYKKLTPVGMDDFYLVSIANLKTPVXXAKGVK

SEQ ID NO: 3355 - protein, 38 aa, Artificial Sequence
  Non-cyclic GFR-binding peptide
  MOD_RES (34)..(35): Xaa is C or S
  MOD_RES (12)..(13)..(14)..(15)..(16): Xaa is A or G
  MOD_RES (17)..(18)..(19)..(20): Xaa is A or G or absent
AKVVMNRYKKLXXXXXXXXXFYLVSIANLKTPAXXAKP

SEQ ID NO: 3356 - protein, 39 aa, Artificial Sequence
  Non-cyclic GFR-binding peptide
  MOD_RES (37)..(37): Xaa is C or S
ALHDELTRYKKLFIPKKRVIEFYLVSIANLQVQTPRXQV

SEQ ID NO: 3357 - protein, 35 aa, Artificial Sequence
  Non-cyclic GFR-binding peptide
  MOD_RES (1)..(34)..(35): Xaa is C or S
  MOD_RES (12)..(13)..(14)..(15)..(16): Xaa is A or G
  MOD_RES (17)..(18)..(19)..(20): Xaa is A or G or absent
XSKVVMYHYKLXXXXXXXXXKYLISIPSLDQPVXX

SEQ ID NO: 3358 - protein, 36 aa, Artificial Sequence
  Non-cyclic GFR-binding peptide
  MOD_RES (1)..(3)..(36): Xaa is C or S
  MOD_RES (14)..(15)..(16)..(17)..(18): Xaa is A or G
  MOD_RES (19)..(20)..(21)..(22): Xaa is A or G or absent
XKXSKVVMYHYKLXXXXXXXXXKYLISIPSLDQPVX

SEQ ID NO: 3359 - protein, 34 aa, Artificial Sequence
  Non-cyclic GFR-binding peptide
  MOD_RES (1)..(34): Xaa is C or S
  MOD_RES (12)..(13)..(14)..(15)..(16): Xaa is A or G
  MOD_RES (17)..(18)..(19)..(20): Xaa is A or G or absent
XSRVIMYHYKLXXXXXXXXXKYLISIPSLAQPVX

SEQ ID NO: 3360 - protein, 36 aa, Artificial Sequence
  Non-cyclic GFR-binding peptide
  MOD_RES (32)..(33): Xaa is C or S
ARVVMNQYNKLIVNSSDDLYLVSIASLQTPAXXPKP

SEQ ID NO: 3361 - protein, 35 aa, Artificial Sequence
  Non-cyclic GFR-binding peptide
  MOD_RES (2)..(33)..(34): Xaa is C or S
KXSRVIMRHKRLVKPKRGVYYLISTASLAQPVXXP

SEQ ID NO: 3362 - protein, 37 aa, Artificial Sequence
  Non-cyclic GFR-binding peptide
  MOD_RES (2)..(35)..(36): Xaa is C or S
GXEAVSMGEQYNKLTPVGMDDLYLVSIASLKTPVXXA

SEQ ID NO: 3363 - protein, 41 aa, Artificial Sequence
  Non-cyclic GFR-binding peptide
  MOD_RES (1)..(3)..(37): Xaa is C or S
  MOD_RES (15)..(16)..(17)..(18)..(19): Xaa is A or G
  MOD_RES (20)..(21)..(22)..(23): Xaa is A or G or absent
XGXSRVVMNRHKRLXXXXXXXXXYYLVSTASLKTPAXTPKT

SEQ ID NO: 3364 - protein, 39 aa, Artificial Sequence
  Non-cyclic GFR-binding peptide
  MOD_RES (2)..(4): Xaa is C or S
EXKXALHDELTRYKKLFIPKKRVIEFYLVSIANLQVQTP

SEQ ID NO: 3365 - protein, 38 aa, Artificial Sequence
  Non-cyclic GFR-binding peptide
  MOD_RES (1)..(3)..(35)..(36): Xaa is C or S
XGXAKVVMNRYKKLIVNNSSDFYLVSIANLKTPAXXAK

SEQ ID NO: 3366 - protein, 37 aa, Artificial Sequence
  Non-cyclic GFR-binding peptide
  MOD_RES (2)..(36)..(37): Xaa is C or S
  MOD_RES (14)..(15)..(16)..(17)..(18): Xaa is A or G
  MOD_RES (19)..(20)..(21)..(22): Xaa is A or G or absent
GXSRVVMNRHKRLXXXXXXXXXYYLVSTASLKTPAXX

SEQ ID NO: 3367 - protein, 35 aa, Artificial Sequence
  Non-cyclic GFR-binding peptide
  MOD_RES (1)..(35): Xaa is C or S
  MOD_RES (13)..(14)..(15)..(16)..(17): Xaa is A or G
  MOD_RES (18)..(19)..(20)..(21): Xaa is A or G or absent
XGEVVMDRHKRLXXXXXXXXXYYLMSTASLETPVX

SEQ ID NO: 3368 - protein, 34 aa, Artificial Sequence
  Non-cyclic GFR-binding peptide
  MOD_RES (2)..(33)..(34): Xaa is C or S
KXSRVIMQYNKLVKPKRGVLYLISIASLAQPVXX

SEQ ID NO: 3369 - protein, 34 aa, Artificial Sequence
  Non-cyclic GFR-binding peptide
  MOD_RES (2)..(2): Xaa is C or S
  MOD_RES (13)..(14)..(15)..(16)..(17): Xaa is A or G
  MOD_RES (18)..(19)..(20)..(21): Xaa is A or G or absent
KXSRVIMRYKKLXXXXXXXXXFYLISIANLAQPV

SEQ ID NO: 3370 - protein, 40 aa, Artificial Sequence
  Non-cyclic GFR-binding peptide
  MOD_RES (2)..(4)..(38)..(39): Xaa is C or S
  MOD_RES (16)..(17)..(18)..(19)..(20): Xaa is A or G
  MOD_RES (21)..(22)..(23)..(24): Xaa is A or G or absent
RXGXGEVVMDRYKKLXXXXXXXXXFYLMSIANLETPVXXA

SEQ ID NO: 3371 - protein, 34 aa, Artificial Sequence
  Non-cyclic GFR-binding peptide
  MOD_RES (32)..(33): Xaa is C or S
SRVVMNQYNKLIVNSSDDLYLVSIASLKTPAXXP

SEQ ID NO: 3372 - protein, 37 aa, Artificial Sequence
  Non-cyclic GFR-binding peptide
  MOD_RES (2)..(4)..(37): Xaa is C or S
RXGXEAVSMGERYKKLTPVGMDDFYLVSIANLKTPVX

SEQ ID NO: 3373 - protein, 33 aa, Artificial Sequence
  Non-cyclic GFR-binding peptide
  MOD_RES (2)..(2): Xaa is C or S
GXAKVVMNYHYKLIVNNSSDKYLVSIPSLKTPA

SEQ ID NO: 3374 - protein, 39 aa, Artificial Sequence
  Non-cyclic GFR-binding peptide
  MOD_RES (1)..(33)..(34): Xaa is C or S
XGEVVMERHKRLVVKDYEDYYLMSTASLETPVXXAKPIS

SEQ ID NO: 3375 - protein, 41 aa, Artificial Sequence
  Non-cyclic GFR-binding peptide
  MOD_RES (1)..(3)..(36)..(37): Xaa is C or S
XGXEAVSMGEQYNKLTPVGMDDLYLVSIASLKTPVXXAKGV

SEQ ID NO: 3376 - protein, 39 aa, Artificial Sequence
  Non-cyclic GFR-binding peptide
  MOD_RES (2)..(33)..(34): Xaa is C or S
KXSRVIMRYKKLVKPKRGVFYLISIANLAQPVXXPAASA

SEQ ID NO: 3377 - protein, 35 aa, Artificial Sequence
  Non-cyclic GFR-binding peptide
  MOD_RES (32)..(33): Xaa is C or S
ARVVMNYHYKLIVNSSDDKYLVSIPSLQTPAXXPK

SEQ ID NO: 3378 - protein, 33 aa, Artificial Sequence
  Non-cyclic GFR-binding peptide
  MOD_RES (12)..(13)..(14)..(15)..(16): Xaa is A or G
  MOD_RES (17)..(18)..(19)..(20): Xaa is A or G or absent
AKVVMNYHYKLXXXXXXXXXKYLVSIPSLKTPA

SEQ ID NO: 3379 - protein, 39 aa, Artificial Sequence
  Non-cyclic GFR-binding peptide
  MOD_RES (2)..(4)..(36)..(37): Xaa is C or S
RXGXGEVVMERHKRLVVKDYEDYYLMSTASLETPVXXAK

SEQ ID NO: 3380 - protein, 33 aa, Artificial Sequence
  Non-cyclic GFR-binding peptide
  MOD_RES (1)..(33): Xaa is C or S
XGEVVMDYHYKLVVKENEDKYLMSIPSLETPVX

SEQ ID NO: 3381 - protein, 35 aa, Artificial Sequence
  Non-cyclic GFR-binding peptide
  MOD_RES (2)..(4): Xaa is C or S
RXGXGEVVMERYKKLVVKDYEDFYLMSIANLETPV

SEQ ID NO: 3382 - protein, 36 aa, Artificial Sequence
  Non-cyclic GFR-binding peptide
  MOD_RES (31)..(32): Xaa is C or S
SKVIMRYKKLIKPTKGIFYLISIANLDQSVXXPSAS

SEQ ID NO: 3383 - protein, 32 aa, Artificial Sequence
  Non-cyclic GFR-binding peptide
  MOD_RES (11)..(12)..(13)..(14)..(15): Xaa is A or G
  MOD_RES (16)..(17)..(18)..(19): Xaa is A or G or absent
SKVIMRHKRLXXXXXXXXXYYLISTASLDQSV

SEQ ID NO: 3384 - protein, 35 aa, Artificial Sequence
  Non-cyclic GFR-binding peptide
  MOD_RES (1)..(33): Xaa is C or S
XSRVVMNRHKRLIVNSSDDYYLVSTASLKTPAXTP

SEQ ID NO: 3385 - protein, 37 aa, Artificial Sequence
  Non-cyclic GFR-binding peptide
  MOD_RES (33)..(34): Xaa is C or S
  MOD_RES (11)..(12)..(13)..(14)..(15): Xaa is A or G
  MOD_RES (16)..(17)..(18)..(19): Xaa is A or G or absent
KVVMNQYNKLXXXXXXXXXLYLVSIASLKTPAXXAKP

SEQ ID NO: 3386 - protein, 34 aa, Artificial Sequence
  Non-cyclic GFR-binding peptide
  MOD_RES (33)..(33): Xaa is C or S
  MOD_RES (11)..(12)..(13)..(14)..(15): Xaa is A or G
  MOD_RES (16)..(17)..(18)..(19): Xaa is A or G or absent
RVVMNRHKRLXXXXXXXXXYYLVSTASLKTPAXT

SEQ ID NO: 3387 - protein, 35 aa, Artificial Sequence
  Non-cyclic GFR-binding peptide
  MOD_RES (2)..(34)..(35): Xaa is C or S
GXSRVVMNRHKRLIVNSSDDYYLVSTASLKTPAXX

SEQ ID NO: 3388 - protein, 30 aa, Artificial Sequence
  Non-cyclic GFR-binding peptide
SKVIMRYKKLIKPTKGIFYLISIANLDQSV

SEQ ID NO: 3389 - protein, 38 aa, Artificial Sequence
  Non-cyclic GFR-binding peptide
  MOD_RES (2)..(4)..(38): Xaa is C or S
  MOD_RES (16)..(17)..(18)..(19)..(20): Xaa is A or G
  MOD_RES (21)..(22)..(23)..(24): Xaa is A or G or absent
HXGXSRVVMNYHYKLXXXXXXXXXKYLVSIPSLKTPAX

SEQ ID NO: 3390 - protein, 38 aa, Artificial Sequence
  Non-cyclic GFR-binding peptide
  MOD_RES (2)..(4)..(35)..(36): Xaa is C or S
SXKXSKVIMRYKKLIKPTKGIFYLISIANLDQSVXXPS

SEQ ID NO: 3391 - protein, 43 aa, Artificial Sequence
  Non-cyclic GFR-binding peptide
  MOD_RES (2)..(39): Xaa is C or S
  MOD_RES (15)..(16)..(17)..(18)..(19): Xaa is A or G
  MOD_RES (20)..(21)..(22)..(23): Xaa is A or G or absent
KXALHDELTQYNKLXXXXXXXXXLYLVSIASLQVQTPRXQVNR

SEQ ID NO: 3392 - protein, 36 aa, Artificial Sequence
  Non-cyclic GFR-binding peptide
  MOD_RES (2)..(35)..(36): Xaa is C or S
  MOD_RES (13)..(14)..(15)..(16)..(17): Xaa is A or G
  MOD_RES (18)..(19)..(20)..(21): Xaa is A or G or absent
KXSRVIMQYNKLXXXXXXXXXLYLISIASLAQPVXX

SEQ ID NO: 3393 - protein, 40 aa, Artificial Sequence
  Non-cyclic GFR-binding peptide
  MOD_RES (2)..(36)..(37): Xaa is C or S
  MOD_RES (14)..(15)..(16)..(17)..(18): Xaa is A or G
  MOD_RES (19)..(20)..(21)..(22): Xaa is A or G or absent
GXGEVVMDRYKKLXXXXXXXXXFYLMSIANLETPVXXAKP

SEQ ID NO: 3394 - protein, 32 aa, Artificial Sequence
  Non-cyclic GFR-binding peptide
  MOD_RES (1)..(1): Xaa is C or S
XSRVVMNRHKRLIVNSSDDYYLVSTASLKTPA

SEQ ID NO: 3395 - protein, 44 aa, Artificial Sequence
  Non-cyclic GFR-binding peptide
  MOD_RES (1)..(3)..(40): Xaa is C or S
XKXALHDELTRHKRLFIPKKRVIEYYLVSTASLQVQTPRXQVNR

SEQ ID NO: 3396 - protein, 37 aa, Artificial Sequence
  Non-cyclic GFR-binding peptide
  MOD_RES (2)..(36)..(37): Xaa is C or S
  MOD_RES (14)..(15)..(16)..(17)..(18): Xaa is A or G
  MOD_RES (19)..(20)..(21)..(22): Xaa is A or G or absent
GXGEVVMDYHYKLXXXXXXXXXKYLMSIPSLETPVXX

SEQ ID NO: 3397 - protein, 37 aa, Artificial Sequence
  Non-cyclic GFR-binding peptide
  MOD_RES (34)..(35): Xaa is C or S
  MOD_RES (12)..(13)..(14)..(15)..(16): Xaa is A or G
  MOD_RES (17)..(18)..(19)..(20): Xaa is A or G or absent
AKVVMNRYKKLXXXXXXXXXFYLVSIANLKTPAXXAK

SEQ ID NO: 3398 - protein, 38 aa, Artificial Sequence
  Non-cyclic GFR-binding peptide
  MOD_RES (32)..(33): Xaa is C or S
ARVVMNRHKRLIVNSSDDYYLVSTASLQTPAXXPKPVT

SEQ ID NO: 3399 - protein, 36 aa, Artificial Sequence
  Non-cyclic GFR-binding peptide
  MOD_RES (35)..(35): Xaa is C or S
  MOD_RES (11)..(12)..(13)..(14)..(15): Xaa is A or G
  MOD_RES (16)..(17)..(18)..(19): Xaa is A or G or absent
HDELTQYNKLXXXXXXXXXLYLVSIASLQVQTPRXQ

SEQ ID NO: 3400 - protein, 34 aa, Artificial Sequence
  Non-cyclic GFR-binding peptide
  MOD_RES (1)..(33)..(34): Xaa is C or S
XARVVMNYHYKLIVNSSDDKYLVSIPSLQTPAXX

SEQ ID NO: 3401 - protein, 39 aa, Artificial Sequence
  Non-cyclic GFR-binding peptide
  MOD_RES (2)..(4)..(36)..(37): Xaa is C or S
HXGXARVVMNRHKRLIVNSSDDYYLVSTASLQTPAXXPK

SEQ ID NO: 3402 - protein, 38 aa, Artificial Sequence
  Non-cyclic GFR-binding peptide
  MOD_RES (1)..(3)..(37)..(38): Xaa is C or S
  MOD_RES (15)..(16)..(17)..(18)..(19): Xaa is A or G
  MOD_RES (20)..(21)..(22)..(23): Xaa is A or G or absent
XGXGEVVMDRHKRLXXXXXXXXXYYLMSTASLETPVXX

SEQ ID NO: 3403 - protein, 42 aa, Artificial Sequence
  Non-cyclic GFR-binding peptide
  MOD_RES (1)..(3)..(40): Xaa is C or S
  MOD_RES (16)..(17)..(18)..(19)..(20): Xaa is A or G
  MOD_RES (21)..(22)..(23)..(24): Xaa is A or G or absent
XKXALHDELTYHYKLXXXXXXXXXKYLVSIPSLQVQTPRXQV

SEQ ID NO: 3404 - protein, 36 aa, Artificial Sequence
  Non-cyclic GFR-binding peptide
  MOD_RES (1)..(3)..(36): Xaa is C or S
  MOD_RES (14)..(15)..(16)..(17)..(18): Xaa is A or G
  MOD_RES (19)..(20)..(21)..(22): Xaa is A or G or absent
XKXSKVIMRYKKLXXXXXXXXXFYLISIANLDQSVX

SEQ ID NO: 3405 - protein, 39 aa, Artificial Sequence
  Non-cyclic GFR-binding peptide
  MOD_RES (2)..(34)..(35): Xaa is C or S
GXAKVVMNQYNKLIVNNSSDLYLVSIASLKTPAXXAKPV

SEQ ID NO: 3406 - protein, 40 aa, Artificial Sequence
  Non-cyclic GFR-binding peptide
  MOD_RES (1)..(3)..(37)..(38): Xaa is C or S
  MOD_RES (15)..(16)..(17)..(18)..(19): Xaa is A or G
  MOD_RES (20)..(21)..(22)..(23): Xaa is A or G or absent
XGXGEVVMEYHYKLXXXXXXXXXKYLMSIPSLETPVXXAK

SEQ ID NO: 3407 - protein, 40 aa, Artificial Sequence
  Non-cyclic GFR-binding peptide
  MOD_RES (1)..(3)..(34)..(35): Xaa is C or S
XKXSKVIMYHYKLIKPTKGIKYLISIPSLDQSVXXPSASA

SEQ ID NO: 3408 - protein, 41 aa, Artificial Sequence
  Non-cyclic GFR-binding peptide
  MOD_RES (1)..(3)..(36)..(37): Xaa is C or S
XGXEAVSMGERYKKLTPVGMDDFYLVSIANLKTPVXXAKGV

SEQ ID NO: 3409 - protein, 40 aa, Artificial Sequence
  Non-cyclic GFR-binding peptide
  MOD_RES (37)..(37): Xaa is C or S
  MOD_RES (13)..(14)..(15)..(16)..(17): Xaa is A or G
  MOD_RES (18)..(19)..(20)..(21): Xaa is A or G or absent
ALHDELTRYKKLXXXXXXXXXFYLVSIANLQVQTPRXQVN

SEQ ID NO: 3410 - protein, 42 aa, Artificial Sequence
  Non-cyclic GFR-binding peptide
  MOD_RES (1)..(3)..(36)..(37): Xaa is C or S
  MOD_RES (14)..(15)..(16)..(17)..(18): Xaa is A or G
  MOD_RES (19)..(20)..(21)..(22): Xaa is A or G or absent
XKXSKVVMRHKRLXXXXXXXXXYYLISTASLDQPVXXPSASA

SEQ ID NO: 3411 - protein, 38 aa, Artificial Sequence
  Non-cyclic GFR-binding peptide
  MOD_RES (2)..(4)..(36): Xaa is C or S
HXGXSRVVMNQYNKLIVNSSDDLYLVSIASLKTPAXTP

SEQ ID NO: 3412 - protein, 36 aa, Artificial Sequence
  Non-cyclic GFR-binding peptide
  MOD_RES (1)..(3)..(35)..(36): Xaa is C or S
XGXAKVVMNYHYKLIVNNSSDKYLVSIPSLKTPAXX

SEQ ID NO: 3413 - protein, 34 aa, Artificial Sequence
  Non-cyclic GFR-binding peptide
LHDELTYHYKLFIPKKRVIEKYLVSIPSLQVQTP

SEQ ID NO: 3414 - protein, 38 aa, Artificial Sequence
  Non-cyclic GFR-binding peptide
  MOD_RES (1)..(3)..(36)..(37): Xaa is C or S
XGXEAVSMGERHKRLTPVGMDDYYLVSTASLKTPVXXA

SEQ ID NO: 3415 - protein, 42 aa, Artificial Sequence
  Non-cyclic GFR-binding peptide
  MOD_RES (1)..(3)..(36)..(37): Xaa is C or S
  MOD_RES (14)..(15)..(16)..(17)..(18): Xaa is A or G
  MOD_RES (19)..(20)..(21)..(22): Xaa is A or G or absent
XKXSKVVMQYNKLXXXXXXXXXLYLISIASLDQPVXXPSASA

SEQ ID NO: 3416 - protein, 43 aa, Artificial Sequence
  Non-cyclic GFR-binding peptide
  MOD_RES (2)..(39): Xaa is C or S
  MOD_RES (15)..(16)..(17)..(18)..(19): Xaa is A or G
  MOD_RES (20)..(21)..(22)..(23): Xaa is A or G or absent
KXALHDELTRHKRLXXXXXXXXXYYLVSTASLQVQTPRXQVNR

SEQ ID NO: 3417 - protein, 35 aa, Artificial Sequence
  Non-cyclic GFR-binding peptide
  MOD_RES (1)..(3): Xaa is C or S
  MOD_RES (14)..(15)..(16)..(17)..(18): Xaa is A or G
  MOD_RES (19)..(20)..(21)..(22): Xaa is A or G or absent
XKXSRVIMRHKRLXXXXXXXXXYYLISTASLAQPV

SEQ ID NO: 3418 - protein, 39 aa, Artificial Sequence
  Non-cyclic GFR-binding peptide
  MOD_RES (2)..(36)..(37): Xaa is C or S
  MOD_RES (14)..(15)..(16)..(17)..(18): Xaa is A or G
  MOD_RES (19)..(20)..(21)..(22): Xaa is A or G or absent
GXSRVVMNRHKRLXXXXXXXXXYYLVSTASLKTPAXXPK

SEQ ID NO: 3419 - protein, 39 aa, Artificial Sequence
  Non-cyclic GFR-binding peptide
  MOD_RES (2)..(4)..(38)..(39): Xaa is C or S
  MOD_RES (16)..(17)..(18)..(19)..(20): Xaa is A or G
  MOD_RES (21)..(22)..(23)..(24): Xaa is A or G or absent
RXGXGEVVMDRHKRLXXXXXXXXXYYLMSTASLETPVXX

SEQ ID NO: 3420 - protein, 37 aa, Artificial Sequence
  Non-cyclic GFR-binding peptide
  MOD_RES (1)..(3)..(37): Xaa is C or S
  MOD_RES (15)..(16)..(17)..(18)..(19): Xaa is A or G
  MOD_RES (20)..(21)..(22)..(23): Xaa is A or G or absent
XGXGEVVMEYHYKLXXXXXXXXXKYLMSIPSLETPVX

SEQ ID NO: 3421 - protein, 38 aa, Artificial Sequence
  Non-cyclic GFR-binding peptide
  MOD_RES (1)..(34)..(35): Xaa is C or S
XEAVSMGERYKKLTPVGMDDFYLVSIANLKTPVXXAKG

SEQ ID NO: 3422 - protein, 39 aa, Artificial Sequence
  Non-cyclic GFR-binding peptide
  MOD_RES (1)..(3)..(34)..(35): Xaa is C or S
XKXSRVIMRYKKLVKPKRGVFYLISIANLAQPVXXPAAS

SEQ ID NO: 3423 - protein, 36 aa, Artificial Sequence
  Non-cyclic GFR-binding peptide
  MOD_RES (31)..(32): Xaa is C or S
RVVMNYHYKLIVNSSDDKYLVSIPSLKTPAXXPKPV

SEQ ID NO: 3424 - protein, 35 aa, Artificial Sequence
  Non-cyclic GFR-binding peptide
  MOD_RES (31)..(32): Xaa is C or S
EVVMDRHKRLVVKENEDYYLMSTASLETPVXXAKP

SEQ ID NO: 3425 - protein, 40 aa, Artificial Sequence
  Non-cyclic GFR-binding peptide
  MOD_RES (2)..(4)..(38)..(39): Xaa is C or S
  MOD_RES (16)..(17)..(18)..(19)..(20): Xaa is A or G
  MOD_RES (21)..(22)..(23)..(24): Xaa is A or G or absent
HXGXARVVMNRHKRLXXXXXXXXXYYLVSTASLQTPAXXP

SEQ ID NO: 3426 - protein, 34 aa, Artificial Sequence
  Non-cyclic GFR-binding peptide
ALHDELTQYNKLFIPKKRVIELYLVSIASLQVQT

SEQ ID NO: 3427 - protein, 34 aa, Artificial Sequence
  Non-cyclic GFR-binding peptide
  MOD_RES (31)..(32): Xaa is C or S
SKVVMRYKKLVKPTRGVFYLISIANLDQPVXXPS

SEQ ID NO: 3428 - protein, 34 aa, Artificial Sequence
  Non-cyclic GFR-binding peptide
ALHDELTRHKRLFIPKKRVIEYYLVSTASLQVQT

SEQ ID NO: 3429 - protein, 42 aa, Artificial Sequence
  Non-cyclic GFR-binding peptide
  MOD_RES (2)..(4)..(36)..(37): Xaa is C or S
RXGXGEVVMEYHYKLVVKDYEDKYLMSIPSLETPVXXAKPIS

SEQ ID NO: 3430 - protein, 35 aa, Artificial Sequence
  Non-cyclic GFR-binding peptide
  MOD_RES (35)..(35): Xaa is C or S
  MOD_RES (11)..(12)..(13)..(14)..(15): Xaa is A or G
  MOD_RES (16)..(17)..(18)..(19): Xaa is A or G or absent
HDELTRHKRLXXXXXXXXXYYLVSTASLQVQTPRX

SEQ ID NO: 3431 - protein, 39 aa, Artificial Sequence
  Non-cyclic GFR-binding peptide
  MOD_RES (2)..(4)..(36)..(37): Xaa is C or S
RXGXGEVVMDYHYKLVVKENEDKYLMSIPSLETPVXXAK

SEQ ID NO: 3432 - protein, 40 aa, Artificial Sequence
  Non-cyclic GFR-binding peptide
  MOD_RES (2)..(4)..(37)..(38): Xaa is C or S
  MOD_RES (15)..(16)..(17)..(18)..(19): Xaa is A or G
  MOD_RES (20)..(21)..(22)..(23): Xaa is A or G or absent
SXKXSKVIMQYNKLXXXXXXXXXLYLISIASLDQSVXXPS

SEQ ID NO: 3433 - protein, 35 aa, Artificial Sequence
  Non-cyclic GFR-binding peptide
  MOD_RES (2)..(35): Xaa is C or S
GXEAVSMGERYKKLTPVGMDDFYLVSIANLKTPVX

SEQ ID NO: 3434 - protein, 43 aa, Artificial Sequence
  Non-cyclic GFR-binding peptide
  MOD_RES (2)..(39): Xaa is C or S
KXALHDELTRHKRLFIPKKRVIEYYLVSTASLQVQTPRXQVNR

SEQ ID NO: 3435 - protein, 33 aa, Artificial Sequence
  Non-cyclic GFR-binding peptide
  MOD_RES (12)..(13)..(14)..(15)..(16): Xaa is A or G
  MOD_RES (17)..(18)..(19)..(20): Xaa is A or G or absent
LHDELTYHYKLXXXXXXXXXKYLVSIPSLQVQT

SEQ ID NO: 3436 - protein, 33 aa, Artificial Sequence
  Non-cyclic GFR-binding peptide
  MOD_RES (1)..(33): Xaa is C or S
XGEVVMDRYKKLVVKENEDFYLMSIANLETPVX

SEQ ID NO: 3437 - protein, 37 aa, Artificial Sequence
  Non-cyclic GFR-binding peptide
  MOD_RES (1)..(3)..(36)..(37): Xaa is C or S
  MOD_RES (14)..(15)..(16)..(17)..(18): Xaa is A or G
  MOD_RES (19)..(20)..(21)..(22): Xaa is A or G or absent
XKXSKVIMYHYKLXXXXXXXXXKYLISIPSLDQSVXX

SEQ ID NO: 3438 - protein, 37 aa, Artificial Sequence
  Non-cyclic GFR-binding peptide
  MOD_RES (1)..(34)..(35): Xaa is C or S
  MOD_RES (12)..(13)..(14)..(15)..(16): Xaa is A or G
  MOD_RES (17)..(18)..(19)..(20): Xaa is A or G or absent
XSKVVMRHKRLXXXXXXXXXYYLISTASLDQPVXXPS

SEQ ID NO: 3439 - protein, 38 aa, Artificial Sequence
  Non-cyclic GFR-binding peptide
  MOD_RES (33)..(34): Xaa is C or S
  MOD_RES (11)..(12)..(13)..(14)..(15): Xaa is A or G
  MOD_RES (16)..(17)..(18)..(19): Xaa is A or G or absent
EVVMDRYKKLXXXXXXXXXFYLMSIANLETPVXXAKPI

SEQ ID NO: 3440 - protein, 34 aa, Artificial Sequence
  Non-cyclic GFR-binding peptide
  MOD_RES (1)..(33)..(34): Xaa is C or S
XGEVVMDRYKKLVVKENEDFYLMSIANLETPVXX

SEQ ID NO: 3441 - protein, 39 aa, Artificial Sequence
  Non-cyclic GFR-binding peptide
  MOD_RES (33)..(34): Xaa is C or S
EAVSMGERYKKLTPVGMDDFYLVSIANLKTPVXXAKGVK

SEQ ID NO: 3442 - protein, 35 aa, Artificial Sequence
  Non-cyclic GFR-binding peptide
  MOD_RES (2)..(34)..(35): Xaa is C or S
GXARVVMNRHKRLIVNSSDDYYLVSTASLQTPAXX

SEQ ID NO: 3443 - protein, 37 aa, Artificial Sequence
  Non-cyclic GFR-binding peptide
  MOD_RES (1)..(3)..(34)..(35): Xaa is C or S
XKXSRVIMYHYKLVKPKRGVKYLISIPSLAQPVXXPA

SEQ ID NO: 3444 - protein, 37 aa, Artificial Sequence
  Non-cyclic GFR-binding peptide
  MOD_RES (2)..(35)..(36): Xaa is C or S
  MOD_RES (13)..(14)..(15)..(16)..(17): Xaa is A or G
  MOD_RES (18)..(19)..(20)..(21): Xaa is A or G or absent
KXSKVVMRHKRLXXXXXXXXXYYLISTASLDQPVXXP

SEQ ID NO: 3445 - protein, 40 aa, Artificial Sequence
  Non-cyclic GFR-binding peptide
  MOD_RES (1)..(34)..(35): Xaa is C or S
  MOD_RES (12)..(13)..(14)..(15)..(16): Xaa is A or G
  MOD_RES (17)..(18)..(19)..(20): Xaa is A or G or absent
XSKVVMYHYKLXXXXXXXXXKYLISIPSLDQPVXXPSASA

SEQ ID NO: 3446 - protein, 35 aa, Artificial Sequence
  Non-cyclic GFR-binding peptide
  MOD_RES (2)..(35): Xaa is C or S
  MOD_RES (13)..(14)..(15)..(16)..(17): Xaa is A or G
  MOD_RES (18)..(19)..(20)..(21): Xaa is A or G or absent
KXSRVIMRYKKLXXXXXXXXXFYLISIANLAQPVX

SEQ ID NO: 3447 - protein, 34 aa, Artificial Sequence
  Non-cyclic GFR-binding peptide
  MOD_RES (1)..(33)..(34): Xaa is C or S
XGEVVMDYHYKLVVKENEDKYLMSIPSLETPVXX

SEQ ID NO: 3448 - protein, 36 aa, Artificial Sequence
  Non-cyclic GFR-binding peptide
  MOD_RES (2)..(4)..(35)..(36): Xaa is C or S
SXKXSKVIMRYKKLIKPTKGIFYLISIANLDQSVXX

SEQ ID NO: 3449 - protein, 36 aa, Artificial Sequence
  Non-cyclic GFR-binding peptide
  MOD_RES (1)..(35)..(36): Xaa is C or S
  MOD_RES (13)..(14)..(15)..(16)..(17): Xaa is A or G
  MOD_RES (18)..(19)..(20)..(21): Xaa is A or G or absent
XGEVVMDRYKKLXXXXXXXXXFYLMSIANLETPVXX

SEQ ID NO: 3450 - protein, 42 aa, Artificial Sequence
  Non-cyclic GFR-binding peptide
  MOD_RES (2)..(4)..(38)..(39): Xaa is C or S
  MOD_RES (16)..(17)..(18)..(19)..(20): Xaa is A or G
  MOD_RES (21)..(22)..(23)..(24): Xaa is A or G or absent
HXGXARVVMNRHKRLXXXXXXXXXYYLVSTASLQTPAXXPKP

SEQ ID NO: 3451 - protein, 32 aa, Artificial Sequence
  Non-cyclic GFR-binding peptide
  MOD_RES (1)..(1): Xaa is C or S
XARVVMNQYNKLIVNSSDDLYLVSIASLQTPA

SEQ ID NO: 3452 - protein, 38 aa, Artificial Sequence
  Non-cyclic GFR-binding peptide
  MOD_RES (1)..(33)..(34): Xaa is C or S
XGEVVMERYKKLVVKDYEDFYLMSIANLETPVXXAKPI

SEQ ID NO: 3453 - protein, 37 aa, Artificial Sequence
  Non-cyclic GFR-binding peptide
  MOD_RES (31)..(32): Xaa is C or S
RVVMNQYNKLIVNSSDDLYLVSIASLKTPAXXPKPVY

SEQ ID NO: 3454 - protein, 42 aa, Artificial Sequence
  Non-cyclic GFR-binding peptide
  MOD_RES (2)..(36)..(37): Xaa is C or S
  MOD_RES (14)..(15)..(16)..(17)..(18): Xaa is A or G
  MOD_RES (19)..(20)..(21)..(22): Xaa is A or G or absent
GXGEVVMERHKRLXXXXXXXXXYYLMSTASLETPVXXAKPIS

SEQ ID NO: 3455 - protein, 43 aa, Artificial Sequence
  Non-cyclic GFR-binding peptide
  MOD_RES (2)..(4)..(38)..(39): Xaa is C or S
  MOD_RES (16)..(17)..(18)..(19)..(20): Xaa is A or G
  MOD_RES (21)..(22)..(23)..(24): Xaa is A or G or absent
HXGXARVVMNYHYKLXXXXXXXXXKYLVSIPSLQTPAXXPKPV

SEQ ID NO: 3456 - protein, 38 aa, Artificial Sequence
  Non-cyclic GFR-binding peptide
  MOD_RES (2)..(36)..(37): Xaa is C or S
  MOD_RES (14)..(15)..(16)..(17)..(18): Xaa is A or G
  MOD_RES (19)..(20)..(21)..(22): Xaa is A or G or absent
GXGEVVMERYKKLXXXXXXXXXFYLMSIANLETPVXXA

SEQ ID NO: 3457 - protein, 37 aa, Artificial Sequence
  Non-cyclic GFR-binding peptide
  MOD_RES (1)..(34)..(35): Xaa is C or S
  MOD_RES (12)..(13)..(14)..(15)..(16): Xaa is A or G
  MOD_RES (17)..(18)..(19)..(20): Xaa is A or G or absent
XSKVVMQYNKLXXXXXXXXXLYLISIASLDQPVXXPS

SEQ ID NO: 3458 - protein, 39 aa, Artificial Sequence
  Non-cyclic GFR-binding peptide
  MOD_RES (1)..(3)..(35): Xaa is C or S
XGXSRVVMNYHYKLIVNSSDDKYLVSIPSLKTPAXTPKT

SEQ ID NO: 3459 - protein, 35 aa, Artificial Sequence
  Non-cyclic GFR-binding peptide
  MOD_RES (1)..(3): Xaa is C or S
  MOD_RES (14)..(15)..(16)..(17)..(18): Xaa is A or G
  MOD_RES (19)..(20)..(21)..(22): Xaa is A or G or absent
XKXSKVIMYHYKLXXXXXXXXXKYLISIPSLDQSV

SEQ ID NO: 3460 - protein, 35 aa, Artificial Sequence
  Non-cyclic GFR-binding peptide
  MOD_RES (32)..(33): Xaa is C or S
GEVVMDRHKRLVVKENEDYYLMSTASLETPVXXAK

SEQ ID NO: 3461 - protein, 40 aa, Artificial Sequence
  Non-cyclic GFR-binding peptide
  MOD_RES (1)..(3)..(34)..(35): Xaa is C or S
XKXSKVVMRHKRLVKPTRGVYYLISTASLDQPVXXPSASA

SEQ ID NO: 3462 - protein, 39 aa, Artificial Sequence
  Non-cyclic GFR-binding peptide
  MOD_RES (1)..(3)..(34)..(35): Xaa is C or S
XKXSKVVMYHYKLVKPTRGVKYLISIPSLDQPVXXPSAS

SEQ ID NO: 3463 - protein, 32 aa, Artificial Sequence
  Non-cyclic GFR-binding peptide
  MOD_RES (32)..(32): Xaa is C or S
GEVVMERHKRLVVKDYEDYYLMSTASLETPVX

SEQ ID NO: 3464 - protein, 36 aa, Artificial Sequence
  Non-cyclic GFR-binding peptide
  MOD_RES (1)..(3)..(35)..(36): Xaa is C or S
XGXARVVMNQYNKLIVNSSDDLYLVSIASLQTPAXX

SEQ ID NO: 3465 - protein, 34 aa, Artificial Sequence
  Non-cyclic GFR-binding peptide
  MOD_RES (33)..(34): Xaa is C or S
  MOD_RES (11)..(12)..(13)..(14)..(15): Xaa is A or G
  MOD_RES (16)..(17)..(18)..(19): Xaa is A or G or absent
KVVMNRYKKLXXXXXXXXXFYLVSIANLKTPAXX

SEQ ID NO: 3466 - protein, 37 aa, Artificial Sequence
  Non-cyclic GFR-binding peptide
  MOD_RES (2)..(4)..(37): Xaa is C or S
  MOD_RES (15)..(16)..(17)..(18)..(19): Xaa is A or G
  MOD_RES (20)..(21)..(22)..(23): Xaa is A or G or absent
SXKXSKVVMQYNKLXXXXXXXXXLYLISIASLDQPVX

SEQ ID NO: 3467 - protein, 37 aa, Artificial Sequence
  Non-cyclic GFR-binding peptide
  MOD_RES (37)..(37): Xaa is C or S
  MOD_RES (13)..(14)..(15)..(16)..(17): Xaa is A or G
  MOD_RES (18)..(19)..(20)..(21): Xaa is A or G or absent
ALHDELTRYKKLXXXXXXXXXFYLVSIANLQVQTPRX

SEQ ID NO: 3468 - protein, 35 aa, Artificial Sequence
  Non-cyclic GFR-binding peptide
  MOD_RES (1)..(34)..(35): Xaa is C or S
  MOD_RES (12)..(13)..(14)..(15)..(16): Xaa is A or G
  MOD_RES (17)..(18)..(19)..(20): Xaa is A or G or absent
XSKVIMYHYKLXXXXXXXXXKYLISIPSLDQSVXX

SEQ ID NO: 3469 - protein, 36 aa, Artificial Sequence
  Non-cyclic GFR-binding peptide
  MOD_RES (32)..(32): Xaa is C or S
SRVVMNYHYKLIVNSSDDKYLVSIPSLKTPAXTPKT

SEQ ID NO: 3470 - protein, 39 aa, Artificial Sequence
  Non-cyclic GFR-binding peptide
  MOD_RES (34)..(35): Xaa is C or S
  MOD_RES (12)..(13)..(14)..(15)..(16): Xaa is A or G
  MOD_RES (17)..(18)..(19)..(20): Xaa is A or G or absent
AKVVMNYHYKLXXXXXXXXXKYLVSIPSLKTPAXXAKPV

SEQ ID NO: 3471 - protein, 41 aa, Artificial Sequence
  Non-cyclic GFR-binding peptide
  MOD_RES (1)..(3)..(35)..(36): Xaa is C or S
XGXGEVVMDRYKKLVVKENEDFYLMSIANLETPVXXAKPIK

SEQ ID NO: 3472 - protein, 34 aa, Artificial Sequence
  Non-cyclic GFR-binding peptide
  MOD_RES (12)..(13)..(14)..(15)..(16): Xaa is A or G
  MOD_RES (17)..(18)..(19)..(20): Xaa is A or G or absent
LHDELTRHKRLXXXXXXXXXYYLVSTASLQVQTP

SEQ ID NO: 3473 - protein, 35 aa, Artificial Sequence
  Non-cyclic GFR-binding peptide
  MOD_RES (2)..(34)..(35): Xaa is C or S
GXAKVVMNQYNKLIVNNSSDLYLVSIASLKTPAXX

SEQ ID NO: 3474 - protein, 37 aa, Artificial Sequence
  Non-cyclic GFR-binding peptide
  MOD_RES (1)..(3)..(37): Xaa is C or S
  MOD_RES (15)..(16)..(17)..(18)..(19): Xaa is A or G
  MOD_RES (20)..(21)..(22)..(23): Xaa is A or G or absent
XGXGEVVMDYHYKLXXXXXXXXXKYLMSIPSLETPVX

SEQ ID NO: 3475 - protein, 39 aa, Artificial Sequence
  Non-cyclic GFR-binding peptide
  MOD_RES (1)..(35)..(36): Xaa is C or S
  MOD_RES (13)..(14)..(15)..(16)..(17): Xaa is A or G
  MOD_RES (18)..(19)..(20)..(21): Xaa is A or G or absent
XAKVVMNQYNKLXXXXXXXXXLYLVSIASLKTPAXXAKP

SEQ ID NO: 3476 - protein, 40 aa, Artificial Sequence
  Non-cyclic GFR-binding peptide
  MOD_RES (1)..(3)..(35)..(36): Xaa is C or S
XGXGEVVMERHKRLVVKDYEDYYLMSTASLETPVXXAKPI

SEQ ID NO: 3477 - protein, 39 aa, Artificial Sequence
  Non-cyclic GFR-binding peptide
  MOD_RES (1)..(3)..(37)..(38): Xaa is C or S
  MOD_RES (15)..(16)..(17)..(18)..(19): Xaa is A or G
  MOD_RES (20)..(21)..(22)..(23): Xaa is A or G or absent
XGXGEVVMDYHYKLXXXXXXXXXKYLMSIPSLETPVXXA

SEQ ID NO: 3478 - protein, 41 aa, Artificial Sequence
  Non-cyclic GFR-binding peptide
  MOD_RES (1)..(3)..(37)..(38): Xaa is C or S
  MOD_RES (15)..(16)..(17)..(18)..(19): Xaa is A or G
  MOD_RES (20)..(21)..(22)..(23): Xaa is A or G or absent
XGXARVVMNYHYKLXXXXXXXXXKYLVSIPSLQTPAXXPKP

SEQ ID NO: 3479 - protein, 41 aa, Artificial Sequence
  Non-cyclic GFR-binding peptide
  MOD_RES (2)..(4)..(41): Xaa is C or S
EXKXALHDELTQYNKLFIPKKRVIELYLVSIASLQVQTPRX

SEQ ID NO: 3480 - protein, 36 aa, Artificial Sequence
  Non-cyclic GFR-binding peptide
  MOD_RES (34)..(35): Xaa is C or S
  MOD_RES (12)..(13)..(14)..(15)..(16): Xaa is A or G
  MOD_RES (17)..(18)..(19)..(20): Xaa is A or G or absent
GEVVMERHKRLXXXXXXXXXYYLMSTASLETPVXXA

SEQ ID NO: 3481 - protein, 39 aa, Artificial Sequence
  Non-cyclic GFR-binding peptide
  MOD_RES (1)..(35)..(36): Xaa is C or S
  MOD_RES (13)..(14)..(15)..(16)..(17): Xaa is A or G
  MOD_RES (18)..(19)..(20)..(21): Xaa is A or G or absent
XSRVVMNYHYKLXXXXXXXXXKYLVSIPSLKTPAXXPKP

SEQ ID NO: 3482 - protein, 34 aa, Artificial Sequence
  Non-cyclic GFR-binding peptide
  MOD_RES (1)..(32)..(33): Xaa is C or S
XSKVIMRYKKLIKPTKGIFYLISIANLDQSVXXP

SEQ ID NO: 3483 - protein, 35 aa, Artificial Sequence
  Non-cyclic GFR-binding peptide
  MOD_RES (33)..(34): Xaa is C or S
  MOD_RES (11)..(12)..(13)..(14)..(15): Xaa is A or G
  MOD_RES (16)..(17)..(18)..(19): Xaa is A or G or absent
SKVVMRHKRLXXXXXXXXXYYLISTASLDQPVXXP

SEQ ID NO: 3484 - protein, 38 aa, Artificial Sequence
  Non-cyclic GFR-binding peptide
  MOD_RES (2)..(33)..(34): Xaa is C or S
KXSKVIMRHKRLIKPTKGIYYLISTASLDQSVXXPSAS

SEQ ID NO: 3485 - protein, 37 aa, Artificial Sequence
  Non-cyclic GFR-binding peptide
  MOD_RES (33)..(34): Xaa is C or S
  MOD_RES (11)..(12)..(13)..(14)..(15): Xaa is A or G
  MOD_RES (16)..(17)..(18)..(19): Xaa is A or G or absent
SRVIMYHYKLXXXXXXXXXKYLISIPSLAQPVXXPAA

SEQ ID NO: 3486 - protein, 38 aa, Artificial Sequence
  Non-cyclic GFR-binding peptide
  MOD_RES (1)..(3)..(37)..(38): Xaa is C or S
  MOD_RES (15)..(16)..(17)..(18)..(19): Xaa is A or G
  MOD_RES (20)..(21)..(22)..(23): Xaa is A or G or absent
XGXGEVVMERYKKLXXXXXXXXXFYLMSIANLETPVXX

SEQ ID NO: 3487 - protein, 38 aa, Artificial Sequence
  Non-cyclic GFR-binding peptide
  MOD_RES (2)..(35)..(36): Xaa is C or S
  MOD_RES (13)..(14)..(15)..(16)..(17): Xaa is A or G
  MOD_RES (18)..(19)..(20)..(21): Xaa is A or G or absent
KXSRVIMQYNKLXXXXXXXXXLYLISIASLAQPVXXPA

SEQ ID NO: 3488 - protein, 41 aa, Artificial Sequence
  Non-cyclic GFR-binding peptide
  MOD_RES (2)..(4)..(35)..(36): Xaa is C or S
SXKXSKVIMQYNKLIKPTKGILYLISIASLDQSVXXPSASA

SEQ ID NO: 3489 - protein, 41 aa, Artificial Sequence
  Non-cyclic GFR-binding peptide
  MOD_RES (1)..(35)..(36): Xaa is C or S
  MOD_RES (13)..(14)..(15)..(16)..(17): Xaa is A or G
  MOD_RES (18)..(19)..(20)..(21): Xaa is A or G or absent
XSRVVMNYHYKLXXXXXXXXXKYLVSIPSLKTPAXXPKPVY

SEQ ID NO: 3490 - protein, 40 aa, Artificial Sequence
  Non-cyclic GFR-binding peptide
  MOD_RES (1)..(3)..(34)..(35): Xaa is C or S
XKXSRVIMQYNKLVKPKRGVLYLISIASLAQPVXXPAASA

SEQ ID NO: 3491 - protein, 34 aa, Artificial Sequence
  Non-cyclic GFR-binding peptide
  MOD_RES (2)..(34): Xaa is C or S
GXGEVVMERYKKLVVKDYEDFYLMSIANLETPVX

SEQ ID NO: 3492 - protein, 38 aa, Artificial Sequence
  Non-cyclic GFR-binding peptide
  MOD_RES (1)..(3)..(37)..(38): Xaa is C or S
  MOD_RES (15)..(16)..(17)..(18)..(19): Xaa is A or G
  MOD_RES (20)..(21)..(22)..(23): Xaa is A or G or absent
XGXGEVVMERHKRLXXXXXXXXXYYLMSTASLETPVXX

SEQ ID NO: 3493 - protein, 33 aa, Artificial Sequence
  Non-cyclic GFR-binding peptide
  MOD_RES (12)..(13)..(14)..(15)..(16): Xaa is A or G
  MOD_RES (17)..(18)..(19)..(20): Xaa is A or G or absent
ARVVMNRHKRLXXXXXXXXXYYLVSTASLQTPA

SEQ ID NO: 3494 - protein, 41 aa, Artificial Sequence
  Non-cyclic GFR-binding peptide
  MOD_RES (2)..(35)..(36): Xaa is C or S
  MOD_RES (13)..(14)..(15)..(16)..(17): Xaa is A or G
  MOD_RES (18)..(19)..(20)..(21): Xaa is A or G or absent
KXSKVVMQYNKLXXXXXXXXXLYLISIASLDQPVXXPSASA

SEQ ID NO: 3495 - protein, 37 aa, Artificial Sequence
  Non-cyclic GFR-binding peptide
  MOD_RES (31)..(32): Xaa is C or S
SRVIMRYKKLVKPKRGVFYLISIANLAQPVXXPAASA

SEQ ID NO: 3496 - protein, 36 aa, Artificial Sequence
  Non-cyclic GFR-binding peptide
  MOD_RES (1)..(36): Xaa is C or S
  MOD_RES (14)..(15)..(16)..(17)..(18): Xaa is A or G
  MOD_RES (19)..(20)..(21)..(22): Xaa is A or G or absent
XEAVSMGERYKKLXXXXXXXXXFYLVSIANLKTPVX

SEQ ID NO: 3497 - protein, 41 aa, Artificial Sequence
  Non-cyclic GFR-binding peptide
  MOD_RES (2)..(4)..(37)..(38): Xaa is C or S
RXGXEAVSMGERYKKLTPVGMDDFYLVSIANLKTPVXXAKG

SEQ ID NO: 3498 - protein, 42 aa, Artificial Sequence
  Non-cyclic GFR-binding peptide
  MOD_RES (2)..(36)..(37): Xaa is C or S
  MOD_RES (14)..(15)..(16)..(17)..(18): Xaa is A or G
  MOD_RES (19)..(20)..(21)..(22): Xaa is A or G or absent
GXARVVMNQYNKLXXXXXXXXXLYLVSIASLQTPAXXPKPVT

SEQ ID NO: 3499 - protein, 40 aa, Artificial Sequence
  Non-cyclic GFR-binding peptide
  MOD_RES (1)..(38): Xaa is C or S
  MOD_RES (14)..(15)..(16)..(17)..(18): Xaa is A or G
  MOD_RES (19)..(20)..(21)..(22): Xaa is A or G or absent
XALHDELTQYNKLXXXXXXXXXLYLVSIASLQVQTPRXQV

SEQ ID NO: 3500 - protein, 36 aa, Artificial Sequence
  Non-cyclic GFR-binding peptide
  MOD_RES (2)..(4)..(35)..(36): Xaa is C or S
SXKXSKVIMQYNKLIKPTKGILYLISIASLDQSVXX

SEQ ID NO: 3501 - protein, 31 aa, Artificial Sequence
  Non-cyclic GFR-binding peptide
ARVVMNYHYKLIVNSSDDKYLVSIPSLQTPA

SEQ ID NO: 3502 - protein, 36 aa, Artificial Sequence
  Non-cyclic GFR-binding peptide
  MOD_RES (31)..(32): Xaa is C or S
RVVMNQYNKLIVNSSDDLYLVSIASLKTPAXXPKPV

SEQ ID NO: 3503 - protein, 33 aa, Artificial Sequence
  Non-cyclic GFR-binding peptide
  MOD_RES (32)..(33): Xaa is C or S
GEVVMERYKKLVVKDYEDFYLMSIANLETPVXX

SEQ ID NO: 3504 - protein, 36 aa, Artificial Sequence
  Non-cyclic GFR-binding peptide
  MOD_RES (33)..(34): Xaa is C or S
  MOD_RES (11)..(12)..(13)..(14)..(15): Xaa is A or G
  MOD_RES (16)..(17)..(18)..(19): Xaa is A or G or absent
RVVMNQYNKLXXXXXXXXXLYLVSIASLQTPAXXPK

SEQ ID NO: 3505 - protein, 33 aa, Artificial Sequence
  Non-cyclic GFR-binding peptide
  MOD_RES (33)..(33): Xaa is C or S
  MOD_RES (11)..(12)..(13)..(14)..(15): Xaa is A or G
  MOD_RES (16)..(17)..(18)..(19): Xaa is A or G or absent
EVVMDRHKRLXXXXXXXXXYYLMSTASLETPVX

SEQ ID NO: 3506 - protein, 37 aa, Artificial Sequence
  Non-cyclic GFR-binding peptide
  MOD_RES (2)..(4)..(36)..(37): Xaa is C or S
RXGXGEVVMDRYKKLVVKENEDFYLMSIANLETPVXX

SEQ ID NO: 3507 - protein, 38 aa, Artificial Sequence
  Non-cyclic GFR-binding peptide
  MOD_RES (1)..(3)..(36)..(37): Xaa is C or S
  MOD_RES (14)..(15)..(16)..(17)..(18): Xaa is A or G
  MOD_RES (19)..(20)..(21)..(22): Xaa is A or G or absent
XKXSKVIMQYNKLXXXXXXXXXLYLISIASLDQSVXXP

SEQ ID NO: 3508 - protein, 38 aa, Artificial Sequence
  Non-cyclic GFR-binding peptide
  MOD_RES (2)..(4)..(36)..(37): Xaa is C or S
HXGXSRVVMNRHKRLIVNSSDDYYLVSTASLKTPAXXP

SEQ ID NO: 3509 - protein, 37 aa, Artificial Sequence
  Non-cyclic GFR-binding peptide
  MOD_RES (1)..(3): Xaa is C or S
XKXALHDELTRHKRLFIPKKRVIEYYLVSTASLQVQT

SEQ ID NO: 3510 - protein, 36 aa, Artificial Sequence
  Non-cyclic GFR-binding peptide
  MOD_RES (31)..(32): Xaa is C or S
SKVVMRYKKLVKPTRGVFYLISIANLDQPVXXPSAS

SEQ ID NO: 3511 - protein, 35 aa, Artificial Sequence
  Non-cyclic GFR-binding peptide
  MOD_RES (2)..(4)..(35): Xaa is C or S
SXKXSRVIMRHKRLVKPKRGVYYLISTASLAQPVX

SEQ ID NO: 3512 - protein, 35 aa, Artificial Sequence
  Non-cyclic GFR-binding peptide
  MOD_RES (1)..(3)..(35): Xaa is C or S
XGXGEVVMERHKRLVVKDYEDYYLMSTASLETPVX

SEQ ID NO: 3513 - protein, 35 aa, Artificial Sequence
  Non-cyclic GFR-binding peptide
  MOD_RES (2)..(4)..(35): Xaa is C or S
SXKXSRVIMYHYKLVKPKRGVKYLISIPSLAQPVX

SEQ ID NO: 3514 - protein, 39 aa, Artificial Sequence
  Non-cyclic GFR-binding peptide
  MOD_RES (2)..(4)..(38)..(39): Xaa is C or S
  MOD_RES (16)..(17)..(18)..(19)..(20): Xaa is A or G
  MOD_RES (21)..(22)..(23)..(24): Xaa is A or G or absent
HXGXARVVMNYHYKLXXXXXXXXXKYLVSIPSLQTPAXX

SEQ ID NO: 3515 - protein, 39 aa, Artificial Sequence
  Non-cyclic GFR-binding peptide
  MOD_RES (1)..(3)..(34)..(35): Xaa is C or S
XKXSKVIMYHYKLIKPTKGIKYLISIPSLDQSVXXPSAS

SEQ ID NO: 3516 - protein, 39 aa, Artificial Sequence
  Non-cyclic GFR-binding peptide
  MOD_RES (2)..(34)..(35): Xaa is C or S
GXGEVVMDYHYKLVVKENEDKYLMSIPSLETPVXXAKPI

SEQ ID NO: 3517 - protein, 38 aa, Artificial Sequence
  Non-cyclic GFR-binding peptide
  MOD_RES (2)..(35)..(36): Xaa is C or S
  MOD_RES (13)..(14)..(15)..(16)..(17): Xaa is A or G
  MOD_RES (18)..(19)..(20)..(21): Xaa is A or G or absent
KXSKVIMQYNKLXXXXXXXXXLYLISIASLDQSVXXPS

SEQ ID NO: 3518 - protein, 39 aa, Artificial Sequence
  Non-cyclic GFR-binding peptide
  MOD_RES (2)..(33)..(34): Xaa is C or S
KXSRVIMYHYKLVKPKRGVKYLISIPSLAQPVXXPAASA

SEQ ID NO: 3519 - protein, 39 aa, Artificial Sequence
  Non-cyclic GFR-binding peptide
  MOD_RES (2)..(35)..(36): Xaa is C or S
  MOD_RES (13)..(14)..(15)..(16)..(17): Xaa is A or G
  MOD_RES (18)..(19)..(20)..(21): Xaa is A or G or absent
KXSRVIMRHKRLXXXXXXXXXYYLISTASLAQPVXXPAA

SEQ ID NO: 3520 - protein, 34 aa, Artificial Sequence
  Non-cyclic GFR-binding peptide
  MOD_RES (2)..(2): Xaa is C or S
  MOD_RES (13)..(14)..(15)..(16)..(17): Xaa is A or G
  MOD_RES (18)..(19)..(20)..(21): Xaa is A or G or absent
KXSKVIMRHKRLXXXXXXXXXYYLISTASLDQSV

SEQ ID NO: 3521 - protein, 40 aa, Artificial Sequence
  Non-cyclic GFR-binding peptide
  MOD_RES (1)..(3)..(35): Xaa is C or S
XGXSRVVMNYHYKLIVNSSDDKYLVSIPSLKTPAXTPKTV

SEQ ID NO: 3522 - protein, 40 aa, Artificial Sequence
  Non-cyclic GFR-binding peptide
  MOD_RES (2)..(4)..(36)..(37): Xaa is C or S
RXGXGEVVMERHKRLVVKDYEDYYLMSTASLETPVXXAKP

SEQ ID NO: 3523 - protein, 39 aa, Artificial Sequence
  Non-cyclic GFR-binding peptide
  MOD_RES (33)..(34): Xaa is C or S
  MOD_RES (11)..(12)..(13)..(14)..(15): Xaa is A or G
  MOD_RES (16)..(17)..(18)..(19): Xaa is A or G or absent
EVVMERYKKLXXXXXXXXXFYLMSIANLETPVXXAKPIS

SEQ ID NO: 3524 - protein, 37 aa, Artificial Sequence
  Non-cyclic GFR-binding peptide
  MOD_RES (2)..(36)..(37): Xaa is C or S
  MOD_RES (14)..(15)..(16)..(17)..(18): Xaa is A or G
  MOD_RES (19)..(20)..(21)..(22): Xaa is A or G or absent
GXAKVVMNYHYKLXXXXXXXXXKYLVSIPSLKTPAXX

SEQ ID NO: 3525 - protein, 40 aa, Artificial Sequence
  Non-cyclic GFR-binding peptide
  MOD_RES (2)..(36)..(37): Xaa is C or S
  MOD_RES (14)..(15)..(16)..(17)..(18): Xaa is A or G
  MOD_RES (19)..(20)..(21)..(22): Xaa is A or G or absent
GXAKVVMNRYKKLXXXXXXXXXFYLVSIANLKTPAXXAKP

SEQ ID NO: 3526 - protein, 37 aa, Artificial Sequence
  Non-cyclic GFR-binding peptide
  MOD_RES (31)..(31): Xaa is C or S
RVVMNYHYKLIVNSSDDKYLVSIPSLKTPAXTPKTVH

SEQ ID NO: 3527 - protein, 33 aa, Artificial Sequence
  Non-cyclic GFR-binding peptide
  MOD_RES (1)..(1): Xaa is C or S
XEAVSMGERYKKLTPVGMDDFYLVSIANLKTPV

SEQ ID NO: 3528 - protein, 39 aa, Artificial Sequence
  Non-cyclic GFR-binding peptide
  MOD_RES (34)..(35): Xaa is C or S
  MOD_RES (12)..(13)..(14)..(15)..(16): Xaa is A or G
  MOD_RES (17)..(18)..(19)..(20): Xaa is A or G or absent
GEVVMDRYKKLXXXXXXXXXFYLMSIANLETPVXXAKPI

SEQ ID NO: 3529 - protein, 40 aa, Artificial Sequence
  Non-cyclic GFR-binding peptide
  MOD_RES (1)..(34)..(35): Xaa is C or S
XEAVSMGEQYNKLTPVGMDDLYLVSIASLKTPVXXAKGVK

SEQ ID NO: 3530 - protein, 37 aa, Artificial Sequence
  Non-cyclic GFR-binding peptide
  MOD_RES (34)..(35): Xaa is C or S
  MOD_RES (12)..(13)..(14)..(15)..(16): Xaa is A or G
  MOD_RES (17)..(18)..(19)..(20): Xaa is A or G or absent
AKVVMNQYNKLXXXXXXXXXLYLVSIASLKTPAXXAK

SEQ ID NO: 3531 - protein, 45 aa, Artificial Sequence
  Non-cyclic GFR-binding peptide
  MOD_RES (2)..(4)..(41): Xaa is C or S
EXKXALHDELTQYNKLFIPKKRVIELYLVSIASLQVQTPRXQVNR

SEQ ID NO: 3532 - protein, 37 aa, Artificial Sequence
  Non-cyclic GFR-binding peptide
  MOD_RES (31)..(32): Xaa is C or S
RVVMNYHYKLIVNSSDDKYLVSIPSLKTPAXXPKPVY

SEQ ID NO: 3533 - protein, 32 aa, Artificial Sequence
  Non-cyclic GFR-binding peptide
  MOD_RES (2)..(2): Xaa is C or S
KXSKVVMRHKRLVKPTRGVYYLISTASLDQPV

SEQ ID NO: 3534 - protein, 38 aa, Artificial Sequence
  Non-cyclic GFR-binding peptide
  MOD_RES (32)..(33): Xaa is C or S
GEVVMEYHYKLVVKDYEDKYLMSIPSLETPVXXAKPIS

SEQ ID NO: 3535 - protein, 36 aa, Artificial Sequence
  Non-cyclic GFR-binding peptide
  MOD_RES (1)..(3): Xaa is C or S
  MOD_RES (15)..(16)..(17)..(18)..(19): Xaa is A or G
  MOD_RES (20)..(21)..(22)..(23): Xaa is A or G or absent
XGXARVVMNQYNKLXXXXXXXXXLYLVSIASLQTPA

SEQ ID NO: 3536 - protein, 38 aa, Artificial Sequence
  Non-cyclic GFR-binding peptide
  MOD_RES (35)..(36): Xaa is C or S
  MOD_RES (13)..(14)..(15)..(16)..(17): Xaa is A or G
  MOD_RES (18)..(19)..(20)..(21): Xaa is A or G or absent
EAVSMGERYKKLXXXXXXXXXFYLVSIANLKTPVXXAK

SEQ ID NO: 3537 - protein, 37 aa, Artificial Sequence
  Non-cyclic GFR-binding peptide
  MOD_RES (2)..(4)..(37): Xaa is C or S
  MOD_RES (15)..(16)..(17)..(18)..(19): Xaa is A or G
  MOD_RES (20)..(21)..(22)..(23): Xaa is A or G or absent
SXKXSRVIMRYKKLXXXXXXXXXFYLISIANLAQPVX

SEQ ID NO: 3538 - protein, 39 aa, Artificial Sequence
  Non-cyclic GFR-binding peptide
  MOD_RES (1)..(3)..(34)..(35): Xaa is C or S
XKXSKVIMRYKKLIKPTKGIFYLISIANLDQSVXXPSAS

SEQ ID NO: 3539 - protein, 36 aa, Artificial Sequence
  Non-cyclic GFR-binding peptide
ALHDELTQYNKLFIPKKRVIELYLVSIASLQVQTPR

SEQ ID NO: 3540 - protein, 37 aa, Artificial Sequence
  Non-cyclic GFR-binding peptide
  MOD_RES (1)..(35)..(36): Xaa is C or S
  MOD_RES (13)..(14)..(15)..(16)..(17): Xaa is A or G
  MOD_RES (18)..(19)..(20)..(21): Xaa is A or G or absent
XARVVMNQYNKLXXXXXXXXXLYLVSIASLQTPAXXP

SEQ ID NO: 3541 - protein, 34 aa, Artificial Sequence
  Non-cyclic GFR-binding peptide
  MOD_RES (1)..(3): Xaa is C or S
XGXARVVMNYHYKLIVNSSDDKYLVSIPSLQTPA

SEQ ID NO: 3542 - protein, 33 aa, Artificial Sequence
  Non-cyclic GFR-binding peptide
  MOD_RES (11)..(12)..(13)..(14)..(15): Xaa is A or G
  MOD_RES (16)..(17)..(18)..(19): Xaa is A or G or absent
HDELTYHYKLXXXXXXXXXKYLVSIPSLQVQTP

SEQ ID NO: 3543 - protein, 37 aa, Artificial Sequence
  Non-cyclic GFR-binding peptide
  MOD_RES (34)..(35): Xaa is C or S
  MOD_RES (12)..(13)..(14)..(15)..(16): Xaa is A or G
  MOD_RES (17)..(18)..(19)..(20): Xaa is A or G or absent
SRVVMNQYNKLXXXXXXXXXLYLVSIASLKTPAXXPK

SEQ ID NO: 3544 - protein, 40 aa, Artificial Sequence
  Non-cyclic GFR-binding peptide
  MOD_RES (1)..(3)..(37)..(38): Xaa is C or S
  MOD_RES (15)..(16)..(17)..(18)..(19): Xaa is A or G
  MOD_RES (20)..(21)..(22)..(23): Xaa is A or G or absent
XGXAKVVMNRYKKLXXXXXXXXXFYLVSIANLKTPAXXAK

SEQ ID NO: 3545 - protein, 38 aa, Artificial Sequence
  Non-cyclic GFR-binding peptide
  MOD_RES (2)..(4)..(38): Xaa is C or S
  MOD_RES (16)..(17)..(18)..(19)..(20): Xaa is A or G
  MOD_RES (21)..(22)..(23)..(24): Xaa is A or G or absent
RXGXGEVVMERYKKLXXXXXXXXXFYLMSIANLETPVX

SEQ ID NO: 3546 - protein, 41 aa, Artificial Sequence
  Non-cyclic GFR-binding peptide
  MOD_RES (2)..(4)..(41): Xaa is C or S
  MOD_RES (17)..(18)..(19)..(20)..(21): Xaa is A or G
  MOD_RES (22)..(23)..(24)..(25): Xaa is A or G or absent
EXKXALHDELTQYNKLXXXXXXXXXLYLVSIASLQVQTPRX

SEQ ID NO: 3547 - protein, 36 aa, Artificial Sequence
  Non-cyclic GFR-binding peptide
  MOD_RES (2)..(35)..(36): Xaa is C or S
  MOD_RES (13)..(14)..(15)..(16)..(17): Xaa is A or G
  MOD_RES (18)..(19)..(20)..(21): Xaa is A or G or absent
KXSKVVMQYNKLXXXXXXXXXLYLISIASLDQPVXX

SEQ ID NO: 3548 - protein, 37 aa, Artificial Sequence
  Non-cyclic GFR-binding peptide
  MOD_RES (31)..(32): Xaa is C or S
EVVMERYKKLVVKDYEDFYLMSIANLETPVXXAKPIS

SEQ ID NO: 3549 - protein, 35 aa, Artificial Sequence
  Non-cyclic GFR-binding peptide
  MOD_RES (2)..(4): Xaa is C or S
HXGXAKVVMNRYKKLIVNNSSDFYLVSIANLKTPA

SEQ ID NO: 3550 - protein, 38 aa, Artificial Sequence
  Non-cyclic GFR-binding peptide
  MOD_RES (35)..(35): Xaa is C or S
  MOD_RES (11)..(12)..(13)..(14)..(15): Xaa is A or G
  MOD_RES (16)..(17)..(18)..(19): Xaa is A or G or absent
HDELTRYKKLXXXXXXXXXFYLVSIANLQVQTPRXQVN

SEQ ID NO: 3551 - protein, 38 aa, Artificial Sequence
  Non-cyclic GFR-binding peptide
  MOD_RES (2)..(4): Xaa is C or S
  MOD_RES (17)..(18)..(19)..(20)..(21): Xaa is A or G
  MOD_RES (22)..(23)..(24)..(25): Xaa is A or G or absent
RXGXEAVSMGERHKRLXXXXXXXXXYYLVSTASLKTPV

SEQ ID NO: 3552 - protein, 35 aa, Artificial Sequence
  Non-cyclic GFR-binding peptide
  MOD_RES (2)..(35): Xaa is C or S
  MOD_RES (13)..(14)..(15)..(16)..(17): Xaa is A or G
  MOD_RES (18)..(19)..(20)..(21): Xaa is A or G or absent
KXSKVIMYHYKLXXXXXXXXXKYLISIPSLDQSVX

SEQ ID NO: 3553 - protein, 37 aa, Artificial Sequence
  Non-cyclic GFR-binding peptide
  MOD_RES (33)..(34): Xaa is C or S
  MOD_RES (11)..(12)..(13)..(14)..(15): Xaa is A or G
  MOD_RES (16)..(17)..(18)..(19): Xaa is A or G or absent
SKVVMRYKKLXXXXXXXXXFYLISIANLDQPVXXPSA

SEQ ID NO: 3554 - protein, 38 aa, Artificial Sequence
  Non-cyclic GFR-binding peptide
  MOD_RES (2)..(34)..(35): Xaa is C or S
GXSRVVMNQYNKLIVNSSDDLYLVSIASLKTPAXXPKP

SEQ ID NO: 3555 - protein, 34 aa, Artificial Sequence
  Non-cyclic GFR-binding peptide
  MOD_RES (33)..(34): Xaa is C or S
  MOD_RES (11)..(12)..(13)..(14)..(15): Xaa is A or G
  MOD_RES (16)..(17)..(18)..(19): Xaa is A or G or absent
RVVMNQYNKLXXXXXXXXXLYLVSIASLQTPAXX

SEQ ID NO: 3556 - protein, 38 aa, Artificial Sequence
  Non-cyclic GFR-binding peptide
  MOD_RES (2)..(35)..(36): Xaa is C or S
  MOD_RES (13)..(14)..(15)..(16)..(17): Xaa is A or G
  MOD_RES (18)..(19)..(20)..(21): Xaa is A or G or absent
KXSRVIMRHKRLXXXXXXXXXYYLISTASLAQPVXXPA

SEQ ID NO: 3557 - protein, 38 aa, Artificial Sequence
  Non-cyclic GFR-binding peptide
  MOD_RES (2)..(34)..(35): Xaa is C or S
GXSRVVMNYHYKLIVNSSDDKYLVSIPSLKTPAXXPKP

SEQ ID NO: 3558 - protein, 36 aa, Artificial Sequence
  Non-cyclic GFR-binding peptide
ALHDELTRHKRLFIPKKRVIEYYLVSTASLQVQTPR

SEQ ID NO: 3559 - protein, 40 aa, Artificial Sequence
  Non-cyclic GFR-binding peptide
  MOD_RES (1)..(3)..(35)..(36): Xaa is C or S
XGXGEVVMDRHKRLVVKENEDYYLMSTASLETPVXXAKPI

SEQ ID NO: 3560 - protein, 31 aa, Artificial Sequence
  Non-cyclic GFR-binding peptide
  MOD_RES (1)..(1): Xaa is C or S
XSRVIMQYNKLVKPKRGVLYLISIASLAQPV

SEQ ID NO: 3561 - protein, 44 aa, Artificial Sequence
  Non-cyclic GFR-binding peptide
  MOD_RES (2)..(4)..(41): Xaa is C or S
EXKXALHDELTRYKKLFIPKKRVIEFYLVSIANLQVQTPRXQVN

SEQ ID NO: 3562 - protein, 39 aa, Artificial Sequence
  Non-cyclic GFR-binding peptide
  MOD_RES (1)..(3)..(36)..(37): Xaa is C or S
  MOD_RES (14)..(15)..(16)..(17)..(18): Xaa is A or G
  MOD_RES (19)..(20)..(21)..(22): Xaa is A or G or absent
XKXSKVVMQYNKLXXXXXXXXXLYLISIASLDQPVXXPS

SEQ ID NO: 3563 - protein, 42 aa, Artificial Sequence
  Non-cyclic GFR-binding peptide
  MOD_RES (2)..(36)..(37): Xaa is C or S
  MOD_RES (14)..(15)..(16)..(17)..(18): Xaa is A or G
  MOD_RES (19)..(20)..(21)..(22): Xaa is A or G or absent
GXAKVVMNYHYKLXXXXXXXXXKYLVSIPSLKTPAXXAKPVA

SEQ ID NO: 3564 - protein, 34 aa, Artificial Sequence
  Non-cyclic GFR-binding peptide
  MOD_RES (1)..(34): Xaa is C or S
XEAVSMGERYKKLTPVGMDDFYLVSIANLKTPVX

SEQ ID NO: 3565 - protein, 41 aa, Artificial Sequence
  Non-cyclic GFR-binding peptide
  MOD_RES (2)..(4)..(36)..(37): Xaa is C or S
RXGXGEVVMDYHYKLVVKENEDKYLMSIPSLETPVXXAKPI

SEQ ID NO: 3566 - protein, 35 aa, Artificial Sequence
  Non-cyclic GFR-binding peptide
  MOD_RES (1)..(3)..(35): Xaa is C or S
XGXARVVMNRHKRLIVNSSDDYYLVSTASLQTPAX

SEQ ID NO: 3567 - protein, 36 aa, Artificial Sequence
  Non-cyclic GFR-binding peptide
  MOD_RES (1)..(3): Xaa is C or S
  MOD_RES (15)..(16)..(17)..(18)..(19): Xaa is A or G
  MOD_RES (20)..(21)..(22)..(23): Xaa is A or G or absent
XGXGEVVMERYKKLXXXXXXXXXFYLMSIANLETPV

SEQ ID NO: 3568 - protein, 35 aa, Artificial Sequence
  Non-cyclic GFR-binding peptide
  MOD_RES (1)..(3)..(35): Xaa is C or S
XGXSRVVMNRHKRLIVNSSDDYYLVSTASLKTPAX

SEQ ID NO: 3569 - protein, 37 aa, Artificial Sequence
  Non-cyclic GFR-binding peptide
  MOD_RES (1)..(3)..(35)..(36): Xaa is C or S
XGXAKVVMNYHYKLIVNNSSDKYLVSIPSLKTPAXXA

SEQ ID NO: 3570 - protein, 33 aa, Artificial Sequence
  Non-cyclic GFR-binding peptide
  MOD_RES (1)..(33): Xaa is C or S
XAKVVMNQYNKLIVNNSSDLYLVSIASLKTPAX

SEQ ID NO: 3571 - protein, 38 aa, Artificial Sequence
  Non-cyclic GFR-binding peptide
  MOD_RES (33)..(34): Xaa is C or S
  MOD_RES (11)..(12)..(13)..(14)..(15): Xaa is A or G
  MOD_RES (16)..(17)..(18)..(19): Xaa is A or G or absent
KVVMNRYKKLXXXXXXXXXFYLVSIANLKTPAXXAKPV

SEQ ID NO: 3572 - protein, 31 aa, Artificial Sequence
  Non-cyclic GFR-binding peptide
AKVVMNQYNKLIVNNSSDLYLVSIASLKTPA

SEQ ID NO: 3573 - protein, 40 aa, Artificial Sequence
  Non-cyclic GFR-binding peptide
  MOD_RES (2)..(36)..(37): Xaa is C or S
  MOD_RES (14)..(15)..(16)..(17)..(18): Xaa is A or G
  MOD_RES (19)..(20)..(21)..(22): Xaa is A or G or absent
GXGEVVMERYKKLXXXXXXXXXFYLMSIANLETPVXXAKP

SEQ ID NO: 3574 - protein, 43 aa, Artificial Sequence
  Non-cyclic GFR-binding peptide
  MOD_RES (1)..(3)..(37)..(38): Xaa is C or S
  MOD_RES (15)..(16)..(17)..(18)..(19): Xaa is A or G
  MOD_RES (20)..(21)..(22)..(23): Xaa is A or G or absent
XGXGEVVMDYHYKLXXXXXXXXXKYLMSIPSLETPVXXAKPIK

SEQ ID NO: 3575 - protein, 40 aa, Artificial Sequence
  Non-cyclic GFR-binding peptide
  MOD_RES (2)..(4)..(35)..(36): Xaa is C or S
SXKXSRVIMYHYKLVKPKRGVKYLISIPSLAQPVXXPAAS

SEQ ID NO: 3576 - protein, 33 aa, Artificial Sequence
  Non-cyclic GFR-binding peptide
  MOD_RES (33)..(33): Xaa is C or S
  MOD_RES (11)..(12)..(13)..(14)..(15): Xaa is A or G
  MOD_RES (16)..(17)..(18)..(19): Xaa is A or G or absent
EVVMDYHYKLXXXXXXXXXKYLMSIPSLETPVX

SEQ ID NO: 3577 - protein, 34 aa, Artificial Sequence
  Non-cyclic GFR-binding peptide
  MOD_RES (33)..(33): Xaa is C or S
  MOD_RES (11)..(12)..(13)..(14)..(15): Xaa is A or G
  MOD_RES (16)..(17)..(18)..(19): Xaa is A or G or absent
RVVMNYHYKLXXXXXXXXXKYLVSIPSLKTPAXT

SEQ ID NO: 3578 - protein, 35 aa, Artificial Sequence
  Non-cyclic GFR-binding peptide
  MOD_RES (2)..(4): Xaa is C or S
HXGXARVVMNRHKRLIVNSSDDYYLVSTASLQTPA

SEQ ID NO: 3579 - protein, 42 aa, Artificial Sequence
  Non-cyclic GFR-binding peptide
  MOD_RES (2)..(4)..(41): Xaa is C or S
EXKXALHDELTYHYKLFIPKKRVIEKYLVSIPSLQVQTPRXQ

SEQ ID NO: 3580 - protein, 39 aa, Artificial Sequence
  Non-cyclic GFR-binding peptide
  MOD_RES (2)..(4)..(37)..(38): Xaa is C or S
  MOD_RES (15)..(16)..(17)..(18)..(19): Xaa is A or G
  MOD_RES (20)..(21)..(22)..(23): Xaa is A or G or absent
SXKXSKVIMQYNKLXXXXXXXXXLYLISIASLDQSVXXP

SEQ ID NO: 3581 - protein, 38 aa, Artificial Sequence
  Non-cyclic GFR-binding peptide
  MOD_RES (1)..(3): Xaa is C or S
  MOD_RES (16)..(17)..(18)..(19)..(20): Xaa is A or G
  MOD_RES (21)..(22)..(23)..(24): Xaa is A or G or absent
XKXALHDELTRHKRLXXXXXXXXXYYLVSTASLQVQTP

SEQ ID NO: 3582 - protein, 35 aa, Artificial Sequence
  Non-cyclic GFR-binding peptide
  MOD_RES (1)..(32)..(33): Xaa is C or S
XSKVVMRHKRLVKPTRGVYYLISTASLDQPVXXPS

SEQ ID NO: 3583 - protein, 36 aa, Artificial Sequence
  Non-cyclic GFR-binding peptide
  MOD_RES (1)..(3)..(34)..(35): Xaa is C or S
XKXSRVIMYHYKLVKPKRGVKYLISIPSLAQPVXXP

SEQ ID NO: 3584 - protein, 35 aa, Artificial Sequence
  Non-cyclic GFR-binding peptide
  MOD_RES (1)..(34)..(35): Xaa is C or S
  MOD_RES (12)..(13)..(14)..(15)..(16): Xaa is A or G
  MOD_RES (17)..(18)..(19)..(20): Xaa is A or G or absent
XSKVIMRYKKLXXXXXXXXXFYLISIANLDQSVXX

SEQ ID NO: 3585 - protein, 33 aa, Artificial Sequence
  Non-cyclic GFR-binding peptide
  MOD_RES (2)..(2): Xaa is C or S
GXGEVVMDRHKRLVVKENEDYYLMSTASLETPV

SEQ ID NO: 3586 - protein, 42 aa, Artificial Sequence
  Non-cyclic GFR-binding peptide
  MOD_RES (1)..(3)..(40): Xaa is C or S
  MOD_RES (16)..(17)..(18)..(19)..(20): Xaa is A or G
  MOD_RES (21)..(22)..(23)..(24): Xaa is A or G or absent
XKXALHDELTRYKKLXXXXXXXXXFYLVSIANLQVQTPRXQV

SEQ ID NO: 3587 - protein, 39 aa, Artificial Sequence
  Non-cyclic GFR-binding peptide
  MOD_RES (1)..(35): Xaa is C or S
  MOD_RES (13)..(14)..(15)..(16)..(17): Xaa is A or G
  MOD_RES (18)..(19)..(20)..(21): Xaa is A or G or absent
XSRVVMNRHKRLXXXXXXXXXYYLVSTASLKTPAXTPKT

SEQ ID NO: 3588 - protein, 38 aa, Artificial Sequence
  Non-cyclic GFR-binding peptide
  MOD_RES (2)..(33)..(34): Xaa is C or S
KXSKVVMRHKRLVKPTRGVYYLISTASLDQPVXXPSAS

SEQ ID NO: 3589 - protein, 40 aa, Artificial Sequence
  Non-cyclic GFR-binding peptide
  MOD_RES (1)..(3)..(35)..(36): Xaa is C or S
XGXAKVVMNYHYKLIVNNSSDKYLVSIPSLKTPAXXAKPV

SEQ ID NO: 3590 - protein, 37 aa, Artificial Sequence
  Non-cyclic GFR-binding peptide
  MOD_RES (34)..(35): Xaa is C or S
  MOD_RES (12)..(13)..(14)..(15)..(16): Xaa is A or G
  MOD_RES (17)..(18)..(19)..(20): Xaa is A or G or absent
GEVVMDYHYKLXXXXXXXXXKYLMSIPSLETPVXXAK

SEQ ID NO: 3591 - protein, 38 aa, Artificial Sequence
  Non-cyclic GFR-binding peptide
  MOD_RES (2)..(4)..(36)..(37): Xaa is C or S
HXGXAKVVMNQYNKLIVNNSSDLYLVSIASLKTPAXXA

SEQ ID NO: 3592 - protein, 38 aa, Artificial Sequence
  Non-cyclic GFR-binding peptide
  MOD_RES (1)..(3)..(36)..(37): Xaa is C or S
  MOD_RES (14)..(15)..(16)..(17)..(18): Xaa is A or G
  MOD_RES (19)..(20)..(21)..(22): Xaa is A or G or absent
XKXSRVIMQYNKLXXXXXXXXXLYLISIASLAQPVXXP

SEQ ID NO: 3593 - protein, 39 aa, Artificial Sequence
  Non-cyclic GFR-binding peptide
  MOD_RES (1)..(33)..(34): Xaa is C or S
XSRVVMNQYNKLIVNSSDDLYLVSIASLKTPAXXPKPVY

SEQ ID NO: 3594 - protein, 40 aa, Artificial Sequence
  Non-cyclic GFR-binding peptide
  MOD_RES (36)..(36): Xaa is C or S
  MOD_RES (12)..(13)..(14)..(15)..(16): Xaa is A or G
  MOD_RES (17)..(18)..(19)..(20): Xaa is A or G or absent
LHDELTQYNKLXXXXXXXXXLYLVSIASLQVQTPRXQVNR

SEQ ID NO: 3595 - protein, 35 aa, Artificial Sequence
  Non-cyclic GFR-binding peptide
  MOD_RES (2)..(33)..(34): Xaa is C or S
KXSRVIMRYKKLVKPKRGVFYLISIANLAQPVXXP

SEQ ID NO: 3596 - protein, 31 aa, Artificial Sequence
  Non-cyclic GFR-binding peptide
AKVVMNRYKKLIVNNSSDFYLVSIANLKTPA

SEQ ID NO: 3597 - protein, 38 aa, Artificial Sequence
  Non-cyclic GFR-binding peptide
  MOD_RES (1)..(32)..(33): Xaa is C or S
XSRVIMYHYKLVKPKRGVKYLISIPSLAQPVXXPAASA

SEQ ID NO: 3598 - protein, 34 aa, Artificial Sequence
  Non-cyclic GFR-binding peptide
  MOD_RES (1)..(3): Xaa is C or S
XGXSRVVMNYHYKLIVNSSDDKYLVSIPSLKTPA

SEQ ID NO: 3599 - protein, 35 aa, Artificial Sequence
  Non-cyclic GFR-binding peptide
  MOD_RES (31)..(32): Xaa is C or S
EVVMERYKKLVVKDYEDFYLMSIANLETPVXXAKP

SEQ ID NO: 3600 - protein, 35 aa, Artificial Sequence
  Non-cyclic GFR-binding peptide
  MOD_RES (2)..(33)..(34): Xaa is C or S
KXSRVIMYHYKLVKPKRGVKYLISIPSLAQPVXXP

SEQ ID NO: 3601 - protein, 40 aa, Artificial Sequence
  Non-cyclic GFR-binding peptide
  MOD_RES (1)..(38): Xaa is C or S
  MOD_RES (14)..(15)..(16)..(17)..(18): Xaa is A or G
  MOD_RES (19)..(20)..(21)..(22): Xaa is A or G or absent
XALHDELTYHYKLXXXXXXXXXKYLVSIPSLQVQTPRXQV

SEQ ID NO: 3602 - protein, 37 aa, Artificial Sequence
  Non-cyclic GFR-binding peptide
  MOD_RES (33)..(34): Xaa is C or S
  MOD_RES (11)..(12)..(13)..(14)..(15): Xaa is A or G
  MOD_RES (16)..(17)..(18)..(19): Xaa is A or G or absent
EVVMEYHYKLXXXXXXXXXKYLMSIPSLETPVXXAKP

SEQ ID NO: 3603 - protein, 32 aa, Artificial Sequence
  Non-cyclic GFR-binding peptide
  MOD_RES (1)..(1): Xaa is C or S
XGEVVMDRYKKLVVKENEDFYLMSIANLETPV

SEQ ID NO: 3604 - protein, 35 aa, Artificial Sequence
  Non-cyclic GFR-binding peptide
  MOD_RES (34)..(35): Xaa is C or S
  MOD_RES (12)..(13)..(14)..(15)..(16): Xaa is A or G
  MOD_RES (17)..(18)..(19)..(20): Xaa is A or G or absent
SRVVMNRHKRLXXXXXXXXXYYLVSTASLKTPAXX

SEQ ID NO: 3605 - protein, 35 aa, Artificial Sequence
  Non-cyclic GFR-binding peptide
  MOD_RES (2)..(34)..(35): Xaa is C or S
GXAKVVMNYHYKLIVNNSSDKYLVSIPSLKTPAXX

SEQ ID NO: 3606 - protein, 36 aa, Artificial Sequence
  Non-cyclic GFR-binding peptide
  MOD_RES (1)..(35)..(36): Xaa is C or S
  MOD_RES (13)..(14)..(15)..(16)..(17): Xaa is A or G
  MOD_RES (18)..(19)..(20)..(21): Xaa is A or G or absent
XARVVMNYHYKLXXXXXXXXXKYLVSIPSLQTPAXX

SEQ ID NO: 3607 - protein, 39 aa, Artificial Sequence
  Non-cyclic GFR-binding peptide
  MOD_RES (33)..(34): Xaa is C or S
  MOD_RES (11)..(12)..(13)..(14)..(15): Xaa is A or G
  MOD_RES (16)..(17)..(18)..(19): Xaa is A or G or absent
EVVMDRHKRLXXXXXXXXXYYLMSTASLETPVXXAKPIK

SEQ ID NO: 3608 - protein, 41 aa, Artificial Sequence
  Non-cyclic GFR-binding peptide
  MOD_RES (2)..(39): Xaa is C or S
  MOD_RES (15)..(16)..(17)..(18)..(19): Xaa is A or G
  MOD_RES (20)..(21)..(22)..(23): Xaa is A or G or absent
KXALHDELTRYKKLXXXXXXXXXFYLVSIANLQVQTPRXQV

SEQ ID NO: 3609 - protein, 36 aa, Artificial Sequence
  Non-cyclic GFR-binding peptide
  MOD_RES (32)..(33): Xaa is C or S
GEVVMDRHKRLVVKENEDYYLMSTASLETPVXXAKP

SEQ ID NO: 3610 - protein, 38 aa, Artificial Sequence
  Non-cyclic GFR-binding peptide
  MOD_RES (1)..(33)..(34): Xaa is C or S
XGEVVMEYHYKLVVKDYEDKYLMSIPSLETPVXXAKPI

SEQ ID NO: 3611 - protein, 39 aa, Artificial Sequence
  Non-cyclic GFR-binding peptide
  MOD_RES (2)..(34): Xaa is C or S
GXSRVVMNQYNKLIVNSSDDLYLVSIASLKTPAXTPKTV

SEQ ID NO: 3612 - protein, 39 aa, Artificial Sequence
  Non-cyclic GFR-binding peptide
  MOD_RES (35)..(35): Xaa is C or S
HDELTRHKRLFIPKKRVIEYYLVSTASLQVQTPRXQVNR

SEQ ID NO: 3613 - protein, 39 aa, Artificial Sequence
  Non-cyclic GFR-binding peptide
  MOD_RES (37)..(37): Xaa is C or S
ALHDELTYHYKLFIPKKRVIEKYLVSIPSLQVQTPRXQV

SEQ ID NO: 3614 - protein, 42 aa, Artificial Sequence
  Non-cyclic GFR-binding peptide
  MOD_RES (1)..(3)..(36)..(37): Xaa is C or S
  MOD_RES (14)..(15)..(16)..(17)..(18): Xaa is A or G
  MOD_RES (19)..(20)..(21)..(22): Xaa is A or G or absent
XKXSKVIMYHYKLXXXXXXXXXKYLISIPSLDQSVXXPSASA

SEQ ID NO: 3615 - protein, 35 aa, Artificial Sequence
  Non-cyclic GFR-binding peptide
  MOD_RES (1)..(33): Xaa is C or S
XSRVVMNYHYKLIVNSSDDKYLVSIPSLKTPAXTP

SEQ ID NO: 3616 - protein, 40 aa, Artificial Sequence
  Non-cyclic GFR-binding peptide
  MOD_RES (2)..(34)..(35): Xaa is C or S
GXARVVMNQYNKLIVNSSDDLYLVSIASLQTPAXXPKPVT

SEQ ID NO: 3617 - protein, 34 aa, Artificial Sequence
  Non-cyclic GFR-binding peptide
  MOD_RES (2)..(33)..(34): Xaa is C or S
KXSRVIMRYKKLVKPKRGVFYLISIANLAQPVXX

SEQ ID NO: 3618 - protein, 39 aa, Artificial Sequence
  Non-cyclic GFR-binding peptide
  MOD_RES (1)..(3)..(36)..(37): Xaa is C or S
  MOD_RES (14)..(15)..(16)..(17)..(18): Xaa is A or G
  MOD_RES (19)..(20)..(21)..(22): Xaa is A or G or absent
XKXSKVIMYHYKLXXXXXXXXXKYLISIPSLDQSVXXPS

SEQ ID NO: 3619 - protein, 42 aa, Artificial Sequence
  Non-cyclic GFR-binding peptide
  MOD_RES (1)..(3)..(37)..(38): Xaa is C or S
  MOD_RES (15)..(16)..(17)..(18)..(19): Xaa is A or G
  MOD_RES (20)..(21)..(22)..(23): Xaa is A or G or absent
XGXARVVMNYHYKLXXXXXXXXXKYLVSIPSLQTPAXXPKPV

SEQ ID NO: 3620 - protein, 36 aa, Artificial Sequence
  Non-cyclic GFR-binding peptide
  MOD_RES (33)..(34): Xaa is C or S
  MOD_RES (11)..(12)..(13)..(14)..(15): Xaa is A or G
  MOD_RES (16)..(17)..(18)..(19): Xaa is A or G or absent
EVVMERYKKLXXXXXXXXXFYLMSIANLETPVXXAK

SEQ ID NO: 3621 - protein, 41 aa, Artificial Sequence
  Non-cyclic GFR-binding peptide
  MOD_RES (2)..(36)..(37): Xaa is C or S
  MOD_RES (14)..(15)..(16)..(17)..(18): Xaa is A or G
  MOD_RES (19)..(20)..(21)..(22): Xaa is A or G or absent
GXSRVVMNRHKRLXXXXXXXXXYYLVSTASLKTPAXXPKPV

SEQ ID NO: 3622 - protein, 40 aa, Artificial Sequence
  Non-cyclic GFR-binding peptide
  MOD_RES (36)..(36): Xaa is C or S
LHDELTRHKRLFIPKKRVIEYYLVSTASLQVQTPRXQVNR

SEQ ID NO: 3623 - protein, 37 aa, Artificial Sequence
  Non-cyclic GFR-binding peptide
  MOD_RES (37)..(37): Xaa is C or S
ALHDELTYHYKLFIPKKRVIEKYLVSIPSLQVQTPRX

SEQ ID NO: 3624 - protein, 31 aa, Artificial Sequence
  Non-cyclic GFR-binding peptide
  MOD_RES (31)..(31): Xaa is C or S
EVVMERHKRLVVKDYEDYYLMSTASLETPVX

SEQ ID NO: 3625 - protein, 37 aa, Artificial Sequence
  Non-cyclic GFR-binding peptide
  MOD_RES (1)..(35)..(36): Xaa is C or S
  MOD_RES (13)..(14)..(15)..(16)..(17): Xaa is A or G
  MOD_RES (18)..(19)..(20)..(21): Xaa is A or G or absent
XAKVVMNRYKKLXXXXXXXXXFYLVSIANLKTPAXXA

SEQ ID NO: 3626 - protein, 36 aa, Artificial Sequence
  Non-cyclic GFR-binding peptide
  MOD_RES (1)..(3)..(34)..(35): Xaa is C or S
XKXSKVVMRYKKLVKPTRGVFYLISIANLDQPVXXP

SEQ ID NO: 3627 - protein, 37 aa, Artificial Sequence
  Non-cyclic GFR-binding peptide
  MOD_RES (2)..(34)..(35): Xaa is C or S
GXARVVMNYHYKLIVNSSDDKYLVSIPSLQTPAXXPK

SEQ ID NO: 3628 - protein, 38 aa, Artificial Sequence
  Non-cyclic GFR-binding peptide
  MOD_RES (2)..(36)..(37): Xaa is C or S
  MOD_RES (14)..(15)..(16)..(17)..(18): Xaa is A or G
  MOD_RES (19)..(20)..(21)..(22): Xaa is A or G or absent
GXARVVMNYHYKLXXXXXXXXXKYLVSIPSLQTPAXXP

SEQ ID NO: 3629 - protein, 39 aa, Artificial Sequence
  Non-cyclic GFR-binding peptide
  MOD_RES (2)..(39): Xaa is C or S
KXALHDELTRYKKLFIPKKRVIEFYLVSIANLQVQTPRX

SEQ ID NO: 3630 - protein, 38 aa, Artificial Sequence
  Non-cyclic GFR-binding peptide
  MOD_RES (34)..(35): Xaa is C or S
  MOD_RES (12)..(13)..(14)..(15)..(16): Xaa is A or G
  MOD_RES (17)..(18)..(19)..(20): Xaa is A or G or absent
GEVVMERYKKLXXXXXXXXXFYLMSIANLETPVXXAKP

SEQ ID NO: 3631 - protein, 41 aa, Artificial Sequence
  Non-cyclic GFR-binding peptide
  MOD_RES (2)..(4)..(38)..(39): Xaa is C or S
  MOD_RES (16)..(17)..(18)..(19)..(20): Xaa is A or G
  MOD_RES (21)..(22)..(23)..(24): Xaa is A or G or absent
HXGXAKVVMNRYKKLXXXXXXXXXFYLVSIANLKTPAXXAK

SEQ ID NO: 3632 - protein, 40 aa, Artificial Sequence
  Non-cyclic GFR-binding peptide
  MOD_RES (34)..(35): Xaa is C or S
  MOD_RES (12)..(13)..(14)..(15)..(16): Xaa is A or G
  MOD_RES (17)..(18)..(19)..(20): Xaa is A or G or absent
GEVVMDRYKKLXXXXXXXXXFYLMSIANLETPVXXAKPIK

SEQ ID NO: 3633 - protein, 34 aa, Artificial Sequence
  Non-cyclic GFR-binding peptide
  MOD_RES (31)..(32): Xaa is C or S
EVVMERHKRLVVKDYEDYYLMSTASLETPVXXAK

SEQ ID NO: 3634 - protein, 42 aa, Artificial Sequence
  Non-cyclic GFR-binding peptide
  MOD_RES (2)..(36)..(37): Xaa is C or S
  MOD_RES (14)..(15)..(16)..(17)..(18): Xaa is A or G
  MOD_RES (19)..(20)..(21)..(22): Xaa is A or G or absent
GXAKVVMNRYKKLXXXXXXXXXFYLVSIANLKTPAXXAKPVA

SEQ ID NO: 3635 - protein, 38 aa, Artificial Sequence
  Non-cyclic GFR-binding peptide
  MOD_RES (33)..(34): Xaa is C or S
  MOD_RES (11)..(12)..(13)..(14)..(15): Xaa is A or G
  MOD_RES (16)..(17)..(18)..(19): Xaa is A or G or absent
SKVVMRHKRLXXXXXXXXXYYLISTASLDQPVXXPSAS

SEQ ID NO: 3636 - protein, 42 aa, Artificial Sequence
  Non-cyclic GFR-binding peptide
  MOD_RES (2)..(4)..(37)..(38): Xaa is C or S
  MOD_RES (15)..(16)..(17)..(18)..(19): Xaa is A or G
  MOD_RES (20)..(21)..(22)..(23): Xaa is A or G or absent
SXKXSRVIMYHYKLXXXXXXXXXKYLISIPSLAQPVXXPAAS

SEQ ID NO: 3637 - protein, 37 aa, Artificial Sequence
  Non-cyclic GFR-binding peptide
  MOD_RES (1)..(1): Xaa is C or S
  MOD_RES (14)..(15)..(16)..(17)..(18): Xaa is A or G
  MOD_RES (19)..(20)..(21)..(22): Xaa is A or G or absent
XALHDELTQYNKLXXXXXXXXXLYLVSIASLQVQTPR

SEQ ID NO: 3638 - protein, 38 aa, Artificial Sequence
  Non-cyclic GFR-binding peptide
  MOD_RES (1)..(3)..(35)..(36): Xaa is C or S
XGXARVVMNQYNKLIVNSSDDLYLVSIASLQTPAXXPK

SEQ ID NO: 3639 - protein, 33 aa, Artificial Sequence
  Non-cyclic GFR-binding peptide
  MOD_RES (2)..(33): Xaa is C or S
KXSKVVMRHKRLVKPTRGVYYLISTASLDQPVX

SEQ ID NO: 3640 - protein, 39 aa, Artificial Sequence
  Non-cyclic GFR-binding peptide
  MOD_RES (1)..(3)..(35)..(36): Xaa is C or S
XGXGEVVMDRHKRLVVKENEDYYLMSTASLETPVXXAKP

SEQ ID NO: 3641 - protein, 37 aa, Artificial Sequence
  Non-cyclic GFR-binding peptide
  MOD_RES (1)..(1): Xaa is C or S
XALHDELTRHKRLFIPKKRVIEYYLVSTASLQVQTPR

SEQ ID NO: 3642 - protein, 41 aa, Artificial Sequence
  Non-cyclic GFR-binding peptide
  MOD_RES (2)..(36)..(37): Xaa is C or S
  MOD_RES (14)..(15)..(16)..(17)..(18): Xaa is A or G
  MOD_RES (19)..(20)..(21)..(22): Xaa is A or G or absent
GXAKVVMNRYKKLXXXXXXXXXFYLVSIANLKTPAXXAKPV

SEQ ID NO: 3643 - protein, 35 aa, Artificial Sequence
  Non-cyclic GFR-binding peptide
  MOD_RES (1)..(1): Xaa is C or S
XALHDELTYHYKLFIPKKRVIEKYLVSIPSLQVQT

SEQ ID NO: 3644 - protein, 37 aa, Artificial Sequence
  Non-cyclic GFR-binding peptide
  MOD_RES (1)..(3)..(36)..(37): Xaa is C or S
  MOD_RES (14)..(15)..(16)..(17)..(18): Xaa is A or G
  MOD_RES (19)..(20)..(21)..(22): Xaa is A or G or absent
XKXSKVVMYHYKLXXXXXXXXXKYLISIPSLDQPVXX

SEQ ID NO: 3645 - protein, 42 aa, Artificial Sequence
  Non-cyclic GFR-binding peptide
  MOD_RES (2)..(4)..(37)..(38): Xaa is C or S
  MOD_RES (15)..(16)..(17)..(18)..(19): Xaa is A or G
  MOD_RES (20)..(21)..(22)..(23): Xaa is A or G or absent
SXKXSKVVMQYNKLXXXXXXXXXLYLISIASLDQPVXXPSAS

SEQ ID NO: 3646 - protein, 39 aa, Artificial Sequence
  Non-cyclic GFR-binding peptide
  MOD_RES (36)..(36): Xaa is C or S
LHDELTRYKKLFIPKKRVIEFYLVSIANLQVQTPRXQVN

SEQ ID NO: 3647 - protein, 37 aa, Artificial Sequence
  Non-cyclic GFR-binding peptide
  MOD_RES (1)..(34)..(35): Xaa is C or S
XEAVSMGEQYNKLTPVGMDDLYLVSIASLKTPVXXAK

SEQ ID NO: 3648 - protein, 36 aa, Artificial Sequence
  Non-cyclic GFR-binding peptide
  MOD_RES (35)..(35): Xaa is C or S
HDELTRYKKLFIPKKRVIEFYLVSIANLQVQTPRXQ

SEQ ID NO: 3649 - protein, 36 aa, Artificial Sequence
  Non-cyclic GFR-binding peptide
  MOD_RES (31)..(32): Xaa is C or S
KVVMNRYKKLIVNNSSDFYLVSIANLKTPAXXAKPV

SEQ ID NO: 3650 - protein, 39 aa, Artificial Sequence
  Non-cyclic GFR-binding peptide
  MOD_RES (1)..(3)..(35)..(36): Xaa is C or S
XGXARVVMNQYNKLIVNSSDDLYLVSIASLQTPAXXPKP

SEQ ID NO: 3651 - protein, 40 aa, Artificial Sequence
  Non-cyclic GFR-binding peptide
  MOD_RES (1)..(3)..(37)..(38): Xaa is C or S
  MOD_RES (15)..(16)..(17)..(18)..(19): Xaa is A or G
  MOD_RES (20)..(21)..(22)..(23): Xaa is A or G or absent
XGXGEVVMDYHYKLXXXXXXXXXKYLMSIPSLETPVXXAK

SEQ ID NO: 3652 - protein, 38 aa, Artificial Sequence
  Non-cyclic GFR-binding peptide
  MOD_RES (1)..(3)..(35)..(36): Xaa is C or S
XGXGEVVMDRHKRLVVKENEDYYLMSTASLETPVXXAK

SEQ ID NO: 3653 - protein, 40 aa, Artificial Sequence
  Non-cyclic GFR-binding peptide
  MOD_RES (35)..(36): Xaa is C or S
  MOD_RES (13)..(14)..(15)..(16)..(17): Xaa is A or G
  MOD_RES (18)..(19)..(20)..(21): Xaa is A or G or absent
EAVSMGERYKKLXXXXXXXXXFYLVSIANLKTPVXXAKGV

SEQ ID NO: 3654 - protein, 38 aa, Artificial Sequence
  Non-cyclic GFR-binding peptide
  MOD_RES (1)..(3)..(34)..(35): Xaa is C or S
XKXSRVIMRYKKLVKPKRGVFYLISIANLAQPVXXPAA

SEQ ID NO: 3655 - protein, 34 aa, Artificial Sequence
  Non-cyclic GFR-binding peptide
  MOD_RES (1)..(1): Xaa is C or S
  MOD_RES (13)..(14)..(15)..(16)..(17): Xaa is A or G
  MOD_RES (18)..(19)..(20)..(21): Xaa is A or G or absent
XSRVVMNRHKRLXXXXXXXXXYYLVSTASLKTPA

SEQ ID NO: 3656 - protein, 38 aa, Artificial Sequence
  Non-cyclic GFR-binding peptide
  MOD_RES (1)..(35): Xaa is C or S
  MOD_RES (13)..(14)..(15)..(16)..(17): Xaa is A or G
  MOD_RES (18)..(19)..(20)..(21): Xaa is A or G or absent
XSRVVMNRHKRLXXXXXXXXXYYLVSTASLKTPAXTPK

SEQ ID NO: 3657 - protein, 37 aa, Artificial Sequence
  Non-cyclic GFR-binding peptide
  MOD_RES (2)..(4)..(35)..(36): Xaa is C or S
SXKXSKVVMYHYKLVKPTRGVKYLISIPSLDQPVXXP

SEQ ID NO: 3658 - protein, 41 aa, Artificial Sequence
  Non-cyclic GFR-binding peptide
  MOD_RES (37)..(37): Xaa is C or S
  MOD_RES (13)..(14)..(15)..(16)..(17): Xaa is A or G
  MOD_RES (18)..(19)..(20)..(21): Xaa is A or G or absent
ALHDELTRYKKLXXXXXXXXXFYLVSIANLQVQTPRXQVNR

SEQ ID NO: 3659 - protein, 42 aa, Artificial Sequence
  Non-cyclic GFR-binding peptide
  MOD_RES (2)..(4)..(39)..(40): Xaa is C or S
  MOD_RES (17)..(18)..(19)..(20)..(21): Xaa is A or G
  MOD_RES (22)..(23)..(24)..(25): Xaa is A or G or absent
RXGXEAVSMGERHKRLXXXXXXXXXYYLVSTASLKTPVXXAK

SEQ ID NO: 3660 - protein, 34 aa, Artificial Sequence
  Non-cyclic GFR-binding peptide
  MOD_RES (33)..(34): Xaa is C or S
  MOD_RES (11)..(12)..(13)..(14)..(15): Xaa is A or G
  MOD_RES (16)..(17)..(18)..(19): Xaa is A or G or absent
RVVMNYHYKLXXXXXXXXXKYLVSIPSLQTPAXX

SEQ ID NO: 3661 - protein, 40 aa, Artificial Sequence
  Non-cyclic GFR-binding peptide
  MOD_RES (1)..(3)..(35)..(36): Xaa is C or S
XGXSRVVMNQYNKLIVNSSDDLYLVSIASLKTPAXXPKPV

SEQ ID NO: 3662 - protein, 42 aa, Artificial Sequence
  Non-cyclic GFR-binding peptide
  MOD_RES (2)..(4)..(36)..(37): Xaa is C or S
HXGXAKVVMNYHYKLIVNNSSDKYLVSIPSLKTPAXXAKPVA

SEQ ID NO: 3663 - protein, 34 aa, Artificial Sequence
  Non-cyclic GFR-binding peptide
  MOD_RES (1)..(3): Xaa is C or S
XGXGEVVMDRYKKLVVKENEDFYLMSIANLETPV

SEQ ID NO: 3664 - protein, 37 aa, Artificial Sequence
  Non-cyclic GFR-binding peptide
  MOD_RES (32)..(33): Xaa is C or S
GEVVMERHKRLVVKDYEDYYLMSTASLETPVXXAKPI

SEQ ID NO: 3665 - protein, 36 aa, Artificial Sequence
  Non-cyclic GFR-binding peptide
  MOD_RES (2)..(34)..(35): Xaa is C or S
GXGEVVMERYKKLVVKDYEDFYLMSIANLETPVXXA

SEQ ID NO: 3666 - protein, 35 aa, Artificial Sequence
  Non-cyclic GFR-binding peptide
  MOD_RES (35)..(35): Xaa is C or S
  MOD_RES (11)..(12)..(13)..(14)..(15): Xaa is A or G
  MOD_RES (16)..(17)..(18)..(19): Xaa is A or G or absent
HDELTQYNKLXXXXXXXXXLYLVSIASLQVQTPRX

SEQ ID NO: 3667 - protein, 37 aa, Artificial Sequence
  Non-cyclic GFR-binding peptide
  MOD_RES (2)..(4)..(35)..(36): Xaa is C or S
SXKXSRVIMQYNKLVKPKRGVLYLISIASLAQPVXXP

SEQ ID NO: 3668 - protein, 36 aa, Artificial Sequence
  Non-cyclic GFR-binding peptide
  MOD_RES (31)..(32): Xaa is C or S
RVVMNYHYKLIVNSSDDKYLVSIPSLQTPAXXPKPV

SEQ ID NO: 3669 - protein, 34 aa, Artificial Sequence
  Non-cyclic GFR-binding peptide
  MOD_RES (1)..(33)..(34): Xaa is C or S
XSRVVMNYHYKLIVNSSDDKYLVSIPSLKTPAXX

SEQ ID NO: 3670 - protein, 32 aa, Artificial Sequence
  Non-cyclic GFR-binding peptide
  MOD_RES (1)..(1): Xaa is C or S
XGEVVMDYHYKLVVKENEDKYLMSIPSLETPV

SEQ ID NO: 3671 - protein, 39 aa, Artificial Sequence
  Non-cyclic GFR-binding peptide
  MOD_RES (1)..(3)..(36)..(37): Xaa is C or S
  MOD_RES (14)..(15)..(16)..(17)..(18): Xaa is A or G
  MOD_RES (19)..(20)..(21)..(22): Xaa is A or G or absent
XKXSRVIMYHYKLXXXXXXXXXKYLISIPSLAQPVXXPA

SEQ ID NO: 3672 - protein, 37 aa, Artificial Sequence
  Non-cyclic GFR-binding peptide
  MOD_RES (1)..(3)..(37): Xaa is C or S
  MOD_RES (15)..(16)..(17)..(18)..(19): Xaa is A or G
  MOD_RES (20)..(21)..(22)..(23): Xaa is A or G or absent
XGXGEVVMDRYKKLXXXXXXXXXFYLMSIANLETPVX

SEQ ID NO: 3673 - protein, 37 aa, Artificial Sequence
  Non-cyclic GFR-binding peptide
  MOD_RES (2)..(35)..(36): Xaa is C or S
  MOD_RES (13)..(14)..(15)..(16)..(17): Xaa is A or G
  MOD_RES (18)..(19)..(20)..(21): Xaa is A or G or absent
KXSRVIMRHKRLXXXXXXXXXYYLISTASLAQPVXXP

SEQ ID NO: 3674 - protein, 35 aa, Artificial Sequence
  Non-cyclic GFR-binding peptide
  MOD_RES (31)..(32): Xaa is C or S
SRVIMRYKKLVKPKRGVFYLISIANLAQPVXXPAA

SEQ ID NO: 3675 - protein, 41 aa, Artificial Sequence
  Non-cyclic GFR-binding peptide
  MOD_RES (2)..(35)..(36): Xaa is C or S
  MOD_RES (13)..(14)..(15)..(16)..(17): Xaa is A or G
  MOD_RES (18)..(19)..(20)..(21): Xaa is A or G or absent
KXSKVVMRYKKLXXXXXXXXXFYLISIANLDQPVXXPSASA

SEQ ID NO: 3676 - protein, 41 aa, Artificial Sequence
  Non-cyclic GFR-binding peptide
  MOD_RES (2)..(35)..(36): Xaa is C or S
  MOD_RES (13)..(14)..(15)..(16)..(17): Xaa is A or G
  MOD_RES (18)..(19)..(20)..(21): Xaa is A or G or absent
KXSKVVMYHYKLXXXXXXXXXKYLISIPSLDQPVXXPSASA

SEQ ID NO: 3677 - protein, 33 aa, Artificial Sequence
  Non-cyclic GFR-binding peptide
  MOD_RES (31)..(32): Xaa is C or S
KVVMNYHYKLIVNNSSDKYLVSIPSLKTPAXXA

SEQ ID NO: 3678 - protein, 40 aa, Artificial Sequence
  Non-cyclic GFR-binding peptide
  MOD_RES (2)..(35)..(36): Xaa is C or S
GXEAVSMGERYKKLTPVGMDDFYLVSIANLKTPVXXAKGV

SEQ ID NO: 3679 - protein, 40 aa, Artificial Sequence
  Non-cyclic GFR-binding peptide
  MOD_RES (36)..(36): Xaa is C or S
  MOD_RES (12)..(13)..(14)..(15)..(16): Xaa is A or G
  MOD_RES (17)..(18)..(19)..(20): Xaa is A or G or absent
LHDELTRYKKLXXXXXXXXXFYLVSIANLQVQTPRXQVNR

SEQ ID NO: 3680 - protein, 35 aa, Artificial Sequence
  Non-cyclic GFR-binding peptide
  MOD_RES (1)..(34)..(35): Xaa is C or S
XEAVSMGERHKRLTPVGMDDYYLVSTASLKTPVXX

SEQ ID NO: 3681 - protein, 37 aa, Artificial Sequence
  Non-cyclic GFR-binding peptide
  MOD_RES (33)..(34): Xaa is C or S
  MOD_RES (11)..(12)..(13)..(14)..(15): Xaa is A or G
  MOD_RES (16)..(17)..(18)..(19): Xaa is A or G or absent
SRVIMRHKRLXXXXXXXXXYYLISTASLAQPVXXPAA

SEQ ID NO: 3682 - protein, 39 aa, Artificial Sequence
  Non-cyclic GFR-binding peptide
  MOD_RES (33)..(34): Xaa is C or S
  MOD_RES (11)..(12)..(13)..(14)..(15): Xaa is A or G
  MOD_RES (16)..(17)..(18)..(19): Xaa is A or G or absent
SKVIMRYKKLXXXXXXXXXFYLISIANLDQSVXXPSASA

SEQ ID NO: 3683 - protein, 34 aa, Artificial Sequence
  Non-cyclic GFR-binding peptide
  MOD_RES (2)..(33)..(34): Xaa is C or S
KXSRVIMYHYKLVKPKRGVKYLISIPSLAQPVXX

SEQ ID NO: 3684 - protein, 41 aa, Artificial Sequence
  Non-cyclic GFR-binding peptide
  MOD_RES (1)..(36)..(37): Xaa is C or S
  MOD_RES (14)..(15)..(16)..(17)..(18): Xaa is A or G
  MOD_RES (19)..(20)..(21)..(22): Xaa is A or G or absent
XEAVSMGERHKRLXXXXXXXXXYYLVSTASLKTPVXXAKGV

SEQ ID NO: 3685 - protein, 37 aa, Artificial Sequence
  Non-cyclic GFR-binding peptide
  MOD_RES (2)..(4)..(36): Xaa is C or S
HXGXSRVVMNQYNKLIVNSSDDLYLVSIASLKTPAXT

SEQ ID NO: 3686 - protein, 36 aa, Artificial Sequence
  Non-cyclic GFR-binding peptide
  MOD_RES (31)..(32): Xaa is C or S
RVVMNRHKRLIVNSSDDYYLVSTASLKTPAXXPKPV

SEQ ID NO: 3687 - protein, 40 aa, Artificial Sequence
  Non-cyclic GFR-binding peptide
  MOD_RES (2)..(4)..(38)..(39): Xaa is C or S
  MOD_RES (16)..(17)..(18)..(19)..(20): Xaa is A or G
  MOD_RES (21)..(22)..(23)..(24): Xaa is A or G or absent
HXGXAKVVMNYHYKLXXXXXXXXXKYLVSIPSLKTPAXXA

SEQ ID NO: 3688 - protein, 42 aa, Artificial Sequence
  Non-cyclic GFR-binding peptide
  MOD_RES (2)..(4)..(38): Xaa is C or S
  MOD_RES (16)..(17)..(18)..(19)..(20): Xaa is A or G
  MOD_RES (21)..(22)..(23)..(24): Xaa is A or G or absent
HXGXSRVVMNYHYKLXXXXXXXXXKYLVSIPSLKTPAXTPKT

SEQ ID NO: 3689 - protein, 35 aa, Artificial Sequence
  Non-cyclic GFR-binding peptide
  MOD_RES (1)..(33)..(34): Xaa is C or S
XGEVVMDRYKKLVVKENEDFYLMSIANLETPVXXA

SEQ ID NO: 3690 - protein, 35 aa, Artificial Sequence
  Non-cyclic GFR-binding peptide
  MOD_RES (33)..(34): Xaa is C or S
  MOD_RES (11)..(12)..(13)..(14)..(15): Xaa is A or G
  MOD_RES (16)..(17)..(18)..(19): Xaa is A or G or absent
EVVMDRYKKLXXXXXXXXXFYLMSIANLETPVXXA

SEQ ID NO: 3691 - protein, 35 aa, Artificial Sequence
  Non-cyclic GFR-binding peptide
  MOD_RES (1)..(33)..(34): Xaa is C or S
XGEVVMDYHYKLVVKENEDKYLMSIPSLETPVXXA

SEQ ID NO: 3692 - protein, 35 aa, Artificial Sequence
  Non-cyclic GFR-binding peptide
  MOD_RES (1)..(3)..(34)..(35): Xaa is C or S
XKXSKVIMRYKKLIKPTKGIFYLISIANLDQSVXX

SEQ ID NO: 3693 - protein, 34 aa, Artificial Sequence
  Non-cyclic GFR-binding peptide
  MOD_RES (1)..(1): Xaa is C or S
  MOD_RES (13)..(14)..(15)..(16)..(17): Xaa is A or G
  MOD_RES (18)..(19)..(20)..(21): Xaa is A or G or absent
XSRVVMNYHYKLXXXXXXXXXKYLVSIPSLKTPA

SEQ ID NO: 3694 - protein, 44 aa, Artificial Sequence
  Non-cyclic GFR-binding peptide
  MOD_RES (2)..(4)..(38): Xaa is C or S
  MOD_RES (16)..(17)..(18)..(19)..(20): Xaa is A or G
  MOD_RES (21)..(22)..(23)..(24): Xaa is A or G or absent
HXGXSRVVMNRHKRLXXXXXXXXXYYLVSTASLKTPAXTPKTVH

SEQ ID NO: 3695 - protein, 32 aa, Artificial Sequence
  Non-cyclic GFR-binding peptide
  MOD_RES (31)..(32): Xaa is C or S
EVVMERHKRLVVKDYEDYYLMSTASLETPVXX

SEQ ID NO: 3696 - protein, 39 aa, Artificial Sequence
  Non-cyclic GFR-binding peptide
  MOD_RES (2)..(39): Xaa is C or S
  MOD_RES (15)..(16)..(17)..(18)..(19): Xaa is A or G
  MOD_RES (20)..(21)..(22)..(23): Xaa is A or G or absent
KXALHDELTRYKKLXXXXXXXXXFYLVSIANLQVQTPRX

SEQ ID NO: 3697 - protein, 34 aa, Artificial Sequence
  Non-cyclic GFR-binding peptide
  MOD_RES (33)..(34): Xaa is C or S
  MOD_RES (11)..(12)..(13)..(14)..(15): Xaa is A or G
  MOD_RES (16)..(17)..(18)..(19): Xaa is A or G or absent
EVVMDRHKRLXXXXXXXXXYYLMSTASLETPVXX

SEQ ID NO: 3698 - protein, 43 aa, Artificial Sequence
  Non-cyclic GFR-binding peptide
  MOD_RES (1)..(3)..(40): Xaa is C or S
XKXALHDELTRYKKLFIPKKRVIEFYLVSIANLQVQTPRXQVN

SEQ ID NO: 3699 - protein, 33 aa, Artificial Sequence
  Non-cyclic GFR-binding peptide
  MOD_RES (1)..(32)..(33): Xaa is C or S
XSRVIMYHYKLVKPKRGVKYLISIPSLAQPVXX

SEQ ID NO: 3700 - protein, 38 aa, Artificial Sequence
  Non-cyclic GFR-binding peptide
  MOD_RES (1)..(33): Xaa is C or S
XSRVVMNQYNKLIVNSSDDLYLVSIASLKTPAXTPKTV

SEQ ID NO: 3701 - protein, 38 aa, Artificial Sequence
  Non-cyclic GFR-binding peptide
  MOD_RES (2)..(4)..(37)..(38): Xaa is C or S
  MOD_RES (15)..(16)..(17)..(18)..(19): Xaa is A or G
  MOD_RES (20)..(21)..(22)..(23): Xaa is A or G or absent
SXKXSKVIMQYNKLXXXXXXXXXLYLISIASLDQSVXX

SEQ ID NO: 3702 - protein, 35 aa, Artificial Sequence
  Non-cyclic GFR-binding peptide
  MOD_RES (1)..(3)..(34)..(35): Xaa is C or S
XKXSRVIMRYKKLVKPKRGVFYLISIANLAQPVXX

SEQ ID NO: 3703 - protein, 40 aa, Artificial Sequence
  Non-cyclic GFR-binding peptide
  MOD_RES (1)..(35)..(36): Xaa is C or S
  MOD_RES (13)..(14)..(15)..(16)..(17): Xaa is A or G
  MOD_RES (18)..(19)..(20)..(21): Xaa is A or G or absent
XSRVVMNRHKRLXXXXXXXXXYYLVSTASLKTPAXXPKPV

SEQ ID NO: 3704 - protein, 44 aa, Artificial Sequence
  Non-cyclic GFR-binding peptide
  MOD_RES (1)..(3)..(40): Xaa is C or S
XKXALHDELTQYNKLFIPKKRVIELYLVSIASLQVQTPRXQVNR

SEQ ID NO: 3705 - protein, 40 aa, Artificial Sequence
  Non-cyclic GFR-binding peptide
  MOD_RES (1)..(3)..(36)..(37): Xaa is C or S
  MOD_RES (14)..(15)..(16)..(17)..(18): Xaa is A or G
  MOD_RES (19)..(20)..(21)..(22): Xaa is A or G or absent
XKXSKVVMRHKRLXXXXXXXXXYYLISTASLDQPVXXPSA

SEQ ID NO: 3706 - protein, 41 aa, Artificial Sequence
  Non-cyclic GFR-binding peptide
  MOD_RES (1)..(3)..(35): Xaa is C or S
XGXSRVVMNQYNKLIVNSSDDLYLVSIASLKTPAXTPKTVH

SEQ ID NO: 3707 - protein, 39 aa, Artificial Sequence
  Non-cyclic GFR-binding peptide
  MOD_RES (2)..(36)..(37): Xaa is C or S
  MOD_RES (14)..(15)..(16)..(17)..(18): Xaa is A or G
  MOD_RES (19)..(20)..(21)..(22): Xaa is A or G or absent
GXGEVVMERYKKLXXXXXXXXXFYLMSIANLETPVXXAK

SEQ ID NO: 3708 - protein, 34 aa, Artificial Sequence
  Non-cyclic GFR-binding peptide
  MOD_RES (1)..(3): Xaa is C or S
XGXGEVVMERYKKLVVKDYEDFYLMSIANLETPV

SEQ ID NO: 3709 - protein, 36 aa, Artificial Sequence
  Non-cyclic GFR-binding peptide
  MOD_RES (34)..(35): Xaa is C or S
  MOD_RES (12)..(13)..(14)..(15)..(16): Xaa is A or G
  MOD_RES (17)..(18)..(19)..(20): Xaa is A or G or absent
ARVVMNRHKRLXXXXXXXXXYYLVSTASLQTPAXXP

SEQ ID NO: 3710 - protein, 34 aa, Artificial Sequence
  Non-cyclic GFR-binding peptide
  MOD_RES (31)..(32): Xaa is C or S
SKVIMRHKRLIKPTKGIYYLISTASLDQSVXXPS

SEQ ID NO: 3711 - protein, 38 aa, Artificial Sequence
  Non-cyclic GFR-binding peptide
  MOD_RES (2)..(2): Xaa is C or S
KXALHDELTQYNKLFIPKKRVIELYLVSIASLQVQTPR

SEQ ID NO: 3712 - protein, 39 aa, Artificial Sequence
  Non-cyclic GFR-binding peptide
  MOD_RES (2)..(4)..(36)..(37): Xaa is C or S
RXGXGEVVMDRYKKLVVKENEDFYLMSIANLETPVXXAK

SEQ ID NO: 3713 - protein, 43 aa, Artificial Sequence
  Non-cyclic GFR-binding peptide
  MOD_RES (2)..(4)..(37)..(38): Xaa is C or S
  MOD_RES (15)..(16)..(17)..(18)..(19): Xaa is A or G
  MOD_RES (20)..(21)..(22)..(23): Xaa is A or G or absent
SXKXSRVIMQYNKLXXXXXXXXXLYLISIASLAQPVXXPAASA

SEQ ID NO: 3714 - protein, 37 aa, Artificial Sequence
  Non-cyclic GFR-binding peptide
  MOD_RES (2)..(4): Xaa is C or S
  MOD_RES (16)..(17)..(18)..(19)..(20): Xaa is A or G
  MOD_RES (21)..(22)..(23)..(24): Xaa is A or G or absent
HXGXAKVVMNYHYKLXXXXXXXXXKYLVSIPSLKTPA

SEQ ID NO: 3715 - protein, 41 aa, Artificial Sequence
  Non-cyclic GFR-binding peptide
  MOD_RES (1)..(3)..(35)..(36): Xaa is C or S
XGXGEVVMEYHYKLVVKDYEDKYLMSIPSLETPVXXAKPIS

SEQ ID NO: 3716 - protein, 38 aa, Artificial Sequence
  Non-cyclic GFR-binding peptide
  MOD_RES (33)..(34): Xaa is C or S
  MOD_RES (11)..(12)..(13)..(14)..(15): Xaa is A or G
  MOD_RES (16)..(17)..(18)..(19): Xaa is A or G or absent
SKVVMQYNKLXXXXXXXXXLYLISIASLDQPVXXPSAS

SEQ ID NO: 3717 - protein, 37 aa, Artificial Sequence
  Non-cyclic GFR-binding peptide
  MOD_RES (37)..(37): Xaa is C or S
ALHDELTRYKKLFIPKKRVIEFYLVSIANLQVQTPRX

SEQ ID NO: 3718 - protein, 36 aa, Artificial Sequence
  Non-cyclic GFR-binding peptide
  MOD_RES (1)..(3): Xaa is C or S
  MOD_RES (15)..(16)..(17)..(18)..(19): Xaa is A or G
  MOD_RES (20)..(21)..(22)..(23): Xaa is A or G or absent
XGXGEVVMDRHKRLXXXXXXXXXYYLMSTASLETPV

SEQ ID NO: 3719 - protein, 37 aa, Artificial Sequence
  Non-cyclic GFR-binding peptide
  MOD_RES (2)..(34)..(35): Xaa is C or S
GXSRVVMNYHYKLIVNSSDDKYLVSIPSLKTPAXXPK

SEQ ID NO: 3720 - protein, 39 aa, Artificial Sequence
  Non-cyclic GFR-binding peptide
  MOD_RES (36)..(36): Xaa is C or S
LHDELTQYNKLFIPKKRVIELYLVSIASLQVQTPRXQVN

SEQ ID NO: 3721 - protein, 34 aa, Artificial Sequence
  Non-cyclic GFR-binding peptide
  MOD_RES (1)..(34): Xaa is C or S
  MOD_RES (12)..(13)..(14)..(15)..(16): Xaa is A or G
  MOD_RES (17)..(18)..(19)..(20): Xaa is A or G or absent
XSKVIMRHKRLXXXXXXXXXYYLISTASLDQSVX

SEQ ID NO: 3722 - protein, 35 aa, Artificial Sequence
  Non-cyclic GFR-binding peptide
  MOD_RES (1)..(35): Xaa is C or S
  MOD_RES (13)..(14)..(15)..(16)..(17): Xaa is A or G
  MOD_RES (18)..(19)..(20)..(21): Xaa is A or G or absent
XSRVVMNYHYKLXXXXXXXXXKYLVSIPSLKTPAX

SEQ ID NO: 3723 - protein, 34 aa, Artificial Sequence
  Non-cyclic GFR-binding peptide
  MOD_RES (1)..(34): Xaa is C or S
  MOD_RES (12)..(13)..(14)..(15)..(16): Xaa is A or G
  MOD_RES (17)..(18)..(19)..(20): Xaa is A or G or absent
XSKVIMQYNKLXXXXXXXXXLYLISIASLDQSVX

SEQ ID NO: 3724 - protein, 39 aa, Artificial Sequence
  Non-cyclic GFR-binding peptide
  MOD_RES (1)..(3)..(37)..(38): Xaa is C or S
  MOD_RES (15)..(16)..(17)..(18)..(19): Xaa is A or G
  MOD_RES (20)..(21)..(22)..(23): Xaa is A or G or absent
XGXAKVVMNYHYKLXXXXXXXXXKYLVSIPSLKTPAXXA

SEQ ID NO: 3725 - protein, 41 aa, Artificial Sequence
  Non-cyclic GFR-binding peptide
  MOD_RES (2)..(4)..(37)..(38): Xaa is C or S
  MOD_RES (15)..(16)..(17)..(18)..(19): Xaa is A or G
  MOD_RES (20)..(21)..(22)..(23): Xaa is A or G or absent
SXKXSRVIMRHKRLXXXXXXXXXYYLISTASLAQPVXXPAA

SEQ ID NO: 3726 - protein, 39 aa, Artificial Sequence
  Non-cyclic GFR-binding peptide
  MOD_RES (33)..(34): Xaa is C or S
  MOD_RES (11)..(12)..(13)..(14)..(15): Xaa is A or G
  MOD_RES (16)..(17)..(18)..(19): Xaa is A or G or absent
SKVVMQYNKLXXXXXXXXXLYLISIASLDQPVXXPSASA

SEQ ID NO: 3727 - protein, 36 aa, Artificial Sequence
  Non-cyclic GFR-binding peptide
  MOD_RES (13)..(14)..(15)..(16)..(17): Xaa is A or G
  MOD_RES (18)..(19)..(20)..(21): Xaa is A or G or absent
ALHDELTRHKRLXXXXXXXXXYYLVSTASLQVQTPR

SEQ ID NO: 3728 - protein, 37 aa, Artificial Sequence
  Non-cyclic GFR-binding peptide
  MOD_RES (2)..(4)..(37): Xaa is C or S
  MOD_RES (15)..(16)..(17)..(18)..(19): Xaa is A or G
  MOD_RES (20)..(21)..(22)..(23): Xaa is A or G or absent
SXKXSKVIMRHKRLXXXXXXXXXYYLISTASLDQSVX

SEQ ID NO: 3729 - protein, 34 aa, Artificial Sequence
  Non-cyclic GFR-binding peptide
  MOD_RES (31)..(32): Xaa is C or S
SKVIMRYKKLIKPTKGIFYLISIANLDQSVXXPS

SEQ ID NO: 3730 - protein, 42 aa, Artificial Sequence
  Non-cyclic GFR-binding peptide
  MOD_RES (1)..(3)..(40): Xaa is C or S
XKXALHDELTYHYKLFIPKKRVIEKYLVSIPSLQVQTPRXQV

SEQ ID NO: 3731 - protein, 36 aa, Artificial Sequence
  Non-cyclic GFR-binding peptide
  MOD_RES (1)..(3)..(34)..(35): Xaa is C or S
XKXSRVIMRYKKLVKPKRGVFYLISIANLAQPVXXP

SEQ ID NO: 3732 - protein, 34 aa, Artificial Sequence
  Non-cyclic GFR-binding peptide
  MOD_RES (1)..(3): Xaa is C or S
XGXAKVVMNQYNKLIVNNSSDLYLVSIASLKTPA

SEQ ID NO: 3733 - protein, 36 aa, Artificial Sequence
  Non-cyclic GFR-binding peptide
  MOD_RES (13)..(14)..(15)..(16)..(17): Xaa is A or G
  MOD_RES (18)..(19)..(20)..(21): Xaa is A or G or absent
ALHDELTQYNKLXXXXXXXXXLYLVSIASLQVQTPR

SEQ ID NO: 3734 - protein, 41 aa, Artificial Sequence
  Non-cyclic GFR-binding peptide
  MOD_RES (1)..(3)..(37)..(38): Xaa is C or S
  MOD_RES (15)..(16)..(17)..(18)..(19): Xaa is A or G
  MOD_RES (20)..(21)..(22)..(23): Xaa is A or G or absent
XGXGEVVMDRYKKLXXXXXXXXXFYLMSIANLETPVXXAKP

SEQ ID NO: 3735 - protein, 39 aa, Artificial Sequence
  Non-cyclic GFR-binding peptide
  MOD_RES (2)..(35)..(36): Xaa is C or S
  MOD_RES (13)..(14)..(15)..(16)..(17): Xaa is A or G
  MOD_RES (18)..(19)..(20)..(21): Xaa is A or G or absent
KXSKVVMRYKKLXXXXXXXXXFYLISIANLDQPVXXPSA

SEQ ID NO: 3736 - protein, 38 aa, Artificial Sequence
  Non-cyclic GFR-binding peptide
  MOD_RES (1)..(35): Xaa is C or S
  MOD_RES (13)..(14)..(15)..(16)..(17): Xaa is A or G
  MOD_RES (18)..(19)..(20)..(21): Xaa is A or G or absent
XSRVVMNQYNKLXXXXXXXXXLYLVSIASLKTPAXTPK

SEQ ID NO: 3737 - protein, 38 aa, Artificial Sequence
  Non-cyclic GFR-binding peptide
  MOD_RES (33)..(34): Xaa is C or S
  MOD_RES (11)..(12)..(13)..(14)..(15): Xaa is A or G
  MOD_RES (16)..(17)..(18)..(19): Xaa is A or G or absent
SKVVMYHYKLXXXXXXXXXKYLISIPSLDQPVXXPSAS

SEQ ID NO: 3738 - protein, 36 aa, Artificial Sequence
  Non-cyclic GFR-binding peptide
  MOD_RES (1)..(34)..(35): Xaa is C or S
  MOD_RES (12)..(13)..(14)..(15)..(16): Xaa is A or G
  MOD_RES (17)..(18)..(19)..(20): Xaa is A or G or absent
XSRVIMRYKKLXXXXXXXXXFYLISIANLAQPVXXP

SEQ ID NO: 3739 - protein, 32 aa, Artificial Sequence
  Non-cyclic GFR-binding peptide
  MOD_RES (32)..(32): Xaa is C or S
GEVVMDYHYKLVVKENEDKYLMSIPSLETPVX

SEQ ID NO: 3740 - protein, 40 aa, Artificial Sequence
  Non-cyclic GFR-binding peptide
  MOD_RES (1)..(3)..(37)..(38): Xaa is C or S
  MOD_RES (15)..(16)..(17)..(18)..(19): Xaa is A or G
  MOD_RES (20)..(21)..(22)..(23): Xaa is A or G or absent
XGXSRVVMNRHKRLXXXXXXXXXYYLVSTASLKTPAXXPK

SEQ ID NO: 3741 - protein, 33 aa, Artificial Sequence
  Non-cyclic GFR-binding peptide
  MOD_RES (31)..(32): Xaa is C or S
KVVMNQYNKLIVNNSSDLYLVSIASLKTPAXXA

SEQ ID NO: 3742 - protein, 39 aa, Artificial Sequence
  Non-cyclic GFR-binding peptide
  MOD_RES (1)..(35): Xaa is C or S
  MOD_RES (13)..(14)..(15)..(16)..(17): Xaa is A or G
  MOD_RES (18)..(19)..(20)..(21): Xaa is A or G or absent
XSRVVMNQYNKLXXXXXXXXXLYLVSIASLKTPAXTPKT

SEQ ID NO: 3743 - protein, 38 aa, Artificial Sequence
  Non-cyclic GFR-binding peptide
  MOD_RES (2)..(4)..(35)..(36): Xaa is C or S
SXKXSKVVMYHYKLVKPTRGVKYLISIPSLDQPVXXPS

SEQ ID NO: 3744 - protein, 36 aa, Artificial Sequence
  Non-cyclic GFR-binding peptide
  MOD_RES (1)..(1): Xaa is C or S
XALHDELTRYKKLFIPKKRVIEFYLVSIANLQVQTP

SEQ ID NO: 3745 - protein, 39 aa, Artificial Sequence
  Non-cyclic GFR-binding peptide
  MOD_RES (2)..(4)..(37)..(38): Xaa is C or S
RXGXEAVSMGERHKRLTPVGMDDYYLVSTASLKTPVXXA

SEQ ID NO: 3746 - protein, 32 aa, Artificial Sequence
  Non-cyclic GFR-binding peptide
  MOD_RES (32)..(32): Xaa is C or S
SRVVMNYHYKLIVNSSDDKYLVSIPSLKTPAX

SEQ ID NO: 3747 - protein, 35 aa, Artificial Sequence
  Non-cyclic GFR-binding peptide
  MOD_RES (34)..(34): Xaa is C or S
  MOD_RES (12)..(13)..(14)..(15)..(16): Xaa is A or G
  MOD_RES (17)..(18)..(19)..(20): Xaa is A or G or absent
SRVVMNRHKRLXXXXXXXXXYYLVSTASLKTPAXT

SEQ ID NO: 3748 - protein, 36 aa, Artificial Sequence
  Non-cyclic GFR-binding peptide
  MOD_RES (34)..(35): Xaa is C or S
  MOD_RES (12)..(13)..(14)..(15)..(16): Xaa is A or G
  MOD_RES (17)..(18)..(19)..(20): Xaa is A or G or absent
GEVVMDRHKRLXXXXXXXXXYYLMSTASLETPVXXA

SEQ ID NO: 3749 - protein, 38 aa, Artificial Sequence
  Non-cyclic GFR-binding peptide
  MOD_RES (1)..(3)..(34)..(35): Xaa is C or S
XKXSKVIMYHYKLIKPTKGIKYLISIPSLDQSVXXPSA

SEQ ID NO: 3750 - protein, 41 aa, Artificial Sequence
  Non-cyclic GFR-binding peptide
  MOD_RES (2)..(4)..(35)..(36): Xaa is C or S
SXKXSRVIMRHKRLVKPKRGVYYLISTASLAQPVXXPAASA

SEQ ID NO: 3751 - protein, 37 aa, Artificial Sequence
  Non-cyclic GFR-binding peptide
  MOD_RES (2)..(4): Xaa is C or S
  MOD_RES (16)..(17)..(18)..(19)..(20): Xaa is A or G
  MOD_RES (21)..(22)..(23)..(24): Xaa is A or G or absent
RXGXGEVVMDRHKRLXXXXXXXXXYYLMSTASLETPV

SEQ ID NO: 3752 - protein, 39 aa, Artificial Sequence
  Non-cyclic GFR-binding peptide
  MOD_RES (1)..(3)..(35)..(36): Xaa is C or S
XGXSRVVMNQYNKLIVNSSDDLYLVSIASLKTPAXXPKP

SEQ ID NO: 3753 - protein, 37 aa, Artificial Sequence
  Non-cyclic GFR-binding peptide
  MOD_RES (33)..(34): Xaa is C or S
  MOD_RES (11)..(12)..(13)..(14)..(15): Xaa is A or G
  MOD_RES (16)..(17)..(18)..(19): Xaa is A or G or absent
EVVMERHKRLXXXXXXXXXYYLMSTASLETPVXXAKP

SEQ ID NO: 3754 - protein, 37 aa, Artificial Sequence
  Non-cyclic GFR-binding peptide
  MOD_RES (1)..(3)..(34)..(35): Xaa is C or S
XKXSKVIMYHYKLIKPTKGIKYLISIPSLDQSVXXPS

SEQ ID NO: 3755 - protein, 36 aa, Artificial Sequence
  Non-cyclic GFR-binding peptide
  MOD_RES (1)..(32)..(33): Xaa is C or S
XSRVIMRYKKLVKPKRGVFYLISIANLAQPVXXPAA

SEQ ID NO: 3756 - protein, 42 aa, Artificial Sequence
  Non-cyclic GFR-binding peptide
  MOD_RES (1)..(3)..(36)..(37): Xaa is C or S
XGXEAVSMGERHKRLTPVGMDDYYLVSTASLKTPVXXAKGVK

SEQ ID NO: 3757 - protein, 36 aa, Artificial Sequence
  Non-cyclic GFR-binding peptide
  MOD_RES (1)..(35)..(36): Xaa is C or S
  MOD_RES (13)..(14)..(15)..(16)..(17): Xaa is A or G
  MOD_RES (18)..(19)..(20)..(21): Xaa is A or G or absent
XARVVMNRHKRLXXXXXXXXXYYLVSTASLQTPAXX

SEQ ID NO: 3758 - protein, 41 aa, Artificial Sequence
  Non-cyclic GFR-binding peptide
  MOD_RES (2)..(4)..(39)..(40): Xaa is C or S
  MOD_RES (17)..(18)..(19)..(20)..(21): Xaa is A or G
  MOD_RES (22)..(23)..(24)..(25): Xaa is A or G or absent
RXGXEAVSMGERYKKLXXXXXXXXXFYLVSIANLKTPVXXA

SEQ ID NO: 3759 - protein, 36 aa, Artificial Sequence
  Non-cyclic GFR-binding peptide
  MOD_RES (2)..(34)..(35): Xaa is C or S
GXAKVVMNRYKKLIVNNSSDFYLVSIANLKTPAXXA

SEQ ID NO: 3760 - protein, 38 aa, Artificial Sequence
  Non-cyclic GFR-binding peptide
  MOD_RES (2)..(33)..(34): Xaa is C or S
KXSRVIMYHYKLVKPKRGVKYLISIPSLAQPVXXPAAS

SEQ ID NO: 3761 - protein, 34 aa, Artificial Sequence
  Non-cyclic GFR-binding peptide
  MOD_RES (2)..(2): Xaa is C or S
  MOD_RES (13)..(14)..(15)..(16)..(17): Xaa is A or G
  MOD_RES (18)..(19)..(20)..(21): Xaa is A or G or absent
KXSKVIMQYNKLXXXXXXXXXLYLISIASLDQSV

SEQ ID NO: 3762 - protein, 38 aa, Artificial Sequence
  Non-cyclic GFR-binding peptide
  MOD_RES (1)..(3)..(35)..(36): Xaa is C or S
XGXSRVVMNQYNKLIVNSSDDLYLVSIASLKTPAXXPK

SEQ ID NO: 3763 - protein, 39 aa, Artificial Sequence
  Non-cyclic GFR-binding peptide
  MOD_RES (33)..(34): Xaa is C or S
  MOD_RES (11)..(12)..(13)..(14)..(15): Xaa is A or G
  MOD_RES (16)..(17)..(18)..(19): Xaa is A or G or absent
SKVVMRHKRLXXXXXXXXXYYLISTASLDQPVXXPSASA

SEQ ID NO: 3764 - protein, 37 aa, Artificial Sequence
  Non-cyclic GFR-binding peptide
  MOD_RES (1)..(32)..(33): Xaa is C or S
XSKVVMQYNKLVKPTRGVLYLISIASLDQPVXXPSAS

SEQ ID NO: 3765 - protein, 42 aa, Artificial Sequence
  Non-cyclic GFR-binding peptide
  MOD_RES (2)..(4)..(37)..(38): Xaa is C or S
  MOD_RES (15)..(16)..(17)..(18)..(19): Xaa is A or G
  MOD_RES (20)..(21)..(22)..(23): Xaa is A or G or absent
SXKXSKVIMRHKRLXXXXXXXXXYYLISTASLDQSVXXPSAS

SEQ ID NO: 3766 - protein, 38 aa, Artificial Sequence
  Non-cyclic GFR-binding peptide
  MOD_RES (1)..(38): Xaa is C or S
XALHDELTYHYKLFIPKKRVIEKYLVSIPSLQVQTPRX

SEQ ID NO: 3767 - protein, 34 aa, Artificial Sequence
  Non-cyclic GFR-binding peptide
  MOD_RES (33)..(33): Xaa is C or S
  MOD_RES (11)..(12)..(13)..(14)..(15): Xaa is A or G
  MOD_RES (16)..(17)..(18)..(19): Xaa is A or G or absent
RVVMNQYNKLXXXXXXXXXLYLVSIASLKTPAXT

SEQ ID NO: 3768 - protein, 37 aa, Artificial Sequence
  Non-cyclic GFR-binding peptide
  MOD_RES (1)..(3)..(34)..(35): Xaa is C or S
XKXSKVIMRHKRLIKPTKGIYYLISTASLDQSVXXPS

SEQ ID NO: 3769 - protein, 36 aa, Artificial Sequence
  Non-cyclic GFR-binding peptide
  MOD_RES (1)..(35)..(36): Xaa is C or S
  MOD_RES (13)..(14)..(15)..(16)..(17): Xaa is A or G
  MOD_RES (18)..(19)..(20)..(21): Xaa is A or G or absent
XGEVVMERHKRLXXXXXXXXXYYLMSTASLETPVXX

SEQ ID NO: 3770 - protein, 40 aa, Artificial Sequence
  Non-cyclic GFR-binding peptide
  MOD_RES (37)..(37): Xaa is C or S
ALHDELTRHKRLFIPKKRVIEYYLVSTASLQVQTPRXQVN

SEQ ID NO: 3771 - protein, 33 aa, Artificial Sequence
  Non-cyclic GFR-binding peptide
  MOD_RES (11)..(12)..(13)..(14)..(15): Xaa is A or G
  MOD_RES (16)..(17)..(18)..(19): Xaa is A or G or absent
HDELTQYNKLXXXXXXXXXLYLVSIASLQVQTP

SEQ ID NO: 3772 - protein, 32 aa, Artificial Sequence
  Non-cyclic GFR-binding peptide
  MOD_RES (1)..(1): Xaa is C or S
XAKVVMNQYNKLIVNNSSDLYLVSIASLKTPA

SEQ ID NO: 3773 - protein, 34 aa, Artificial Sequence
  Non-cyclic GFR-binding peptide
  MOD_RES (2)..(34): Xaa is C or S
GXGEVVMERHKRLVVKDYEDYYLMSTASLETPVX

SEQ ID NO: 3774 - protein, 33 aa, Artificial Sequence
  Non-cyclic GFR-binding peptide
  MOD_RES (1)..(1): Xaa is C or S
  MOD_RES (12)..(13)..(14)..(15)..(16): Xaa is A or G
  MOD_RES (17)..(18)..(19)..(20): Xaa is A or G or absent
XSRVIMYHYKLXXXXXXXXXKYLISIPSLAQPV

SEQ ID NO: 3775 - protein, 35 aa, Artificial Sequence
  Non-cyclic GFR-binding peptide
  MOD_RES (33)..(34): Xaa is C or S
  MOD_RES (11)..(12)..(13)..(14)..(15): Xaa is A or G
  MOD_RES (16)..(17)..(18)..(19): Xaa is A or G or absent
RVVMNYHYKLXXXXXXXXXKYLVSIPSLQTPAXXP

SEQ ID NO: 3776 - protein, 37 aa, Artificial Sequence
  Non-cyclic GFR-binding peptide
  MOD_RES (2)..(35)..(36): Xaa is C or S
  MOD_RES (13)..(14)..(15)..(16)..(17): Xaa is A or G
  MOD_RES (18)..(19)..(20)..(21): Xaa is A or G or absent
KXSKVVMYHYKLXXXXXXXXXKYLISIPSLDQPVXXP

SEQ ID NO: 3777 - protein, 44 aa, Artificial Sequence
  Non-cyclic GFR-binding peptide
  MOD_RES (2)..(4)..(38)..(39): Xaa is C or S
  MOD_RES (16)..(17)..(18)..(19)..(20): Xaa is A or G
  MOD_RES (21)..(22)..(23)..(24): Xaa is A or G or absent
RXGXGEVVMDRHKRLXXXXXXXXXYYLMSTASLETPVXXAKPIK

SEQ ID NO: 3778 - protein, 39 aa, Artificial Sequence
  Non-cyclic GFR-binding peptide
  MOD_RES (1)..(34)..(35): Xaa is C or S
XEAVSMGEQYNKLTPVGMDDLYLVSIASLKTPVXXAKGV

SEQ ID NO: 3779 - protein, 43 aa, Artificial Sequence
  Non-cyclic GFR-binding peptide
  MOD_RES (1)..(3)..(37)..(38): Xaa is C or S
  MOD_RES (15)..(16)..(17)..(18)..(19): Xaa is A or G
  MOD_RES (20)..(21)..(22)..(23): Xaa is A or G or absent
XGXSRVVMNRHKRLXXXXXXXXXYYLVSTASLKTPAXXPKPVY

SEQ ID NO: 3780 - protein, 38 aa, Artificial Sequence
  Non-cyclic GFR-binding peptide
  MOD_RES (1)..(34)..(35): Xaa is C or S
  MOD_RES (12)..(13)..(14)..(15)..(16): Xaa is A or G
  MOD_RES (17)..(18)..(19)..(20): Xaa is A or G or absent
XSRVIMYHYKLXXXXXXXXXKYLISIPSLAQPVXXPAA

SEQ ID NO: 3781 - protein, 36 aa, Artificial Sequence
  Non-cyclic GFR-binding peptide
  MOD_RES (36)..(36): Xaa is C or S
LHDELTQYNKLFIPKKRVIELYLVSIASLQVQTPRX

SEQ ID NO: 3782 - protein, 33 aa, Artificial Sequence
  Non-cyclic GFR-binding peptide
  MOD_RES (1)..(32)..(33): Xaa is C or S
XSRVIMRHKRLVKPKRGVYYLISTASLAQPVXX

SEQ ID NO: 3783 - protein, 37 aa, Artificial Sequence
  Non-cyclic GFR-binding peptide
  MOD_RES (1)..(3)..(36)..(37): Xaa is C or S
XGXEAVSMGERHKRLTPVGMDDYYLVSTASLKTPVXX

SEQ ID NO: 3784 - protein, 37 aa, Artificial Sequence
  Non-cyclic GFR-binding peptide
  MOD_RES (37)..(37): Xaa is C or S
  MOD_RES (13)..(14)..(15)..(16)..(17): Xaa is A or G
  MOD_RES (18)..(19)..(20)..(21): Xaa is A or G or absent
ALHDELTYHYKLXXXXXXXXXKYLVSIPSLQVQTPRX

SEQ ID NO: 3785 - protein, 40 aa, Artificial Sequence
  Non-cyclic GFR-binding peptide
  MOD_RES (1)..(35)..(36): Xaa is C or S
  MOD_RES (13)..(14)..(15)..(16)..(17): Xaa is A or G
  MOD_RES (18)..(19)..(20)..(21): Xaa is A or G or absent
XSRVVMNQYNKLXXXXXXXXXLYLVSIASLKTPAXXPKPV

SEQ ID NO: 3786 - protein, 40 aa, Artificial Sequence
  Non-cyclic GFR-binding peptide
  MOD_RES (2)..(35)..(36): Xaa is C or S
  MOD_RES (13)..(14)..(15)..(16)..(17): Xaa is A or G
  MOD_RES (18)..(19)..(20)..(21): Xaa is A or G or absent
KXSKVVMRYKKLXXXXXXXXXFYLISIANLDQPVXXPSAS

SEQ ID NO: 3787 - protein, 41 aa, Artificial Sequence
  Non-cyclic GFR-binding peptide
  MOD_RES (2)..(39): Xaa is C or S
KXALHDELTRYKKLFIPKKRVIEFYLVSIANLQVQTPRXQV

SEQ ID NO: 3788 - protein, 35 aa, Artificial Sequence
  Non-cyclic GFR-binding peptide
  MOD_RES (34)..(35): Xaa is C or S
  MOD_RES (12)..(13)..(14)..(15)..(16): Xaa is A or G
  MOD_RES (17)..(18)..(19)..(20): Xaa is A or G or absent
GEVVMERHKRLXXXXXXXXXYYLMSTASLETPVXX

SEQ ID NO: 3789 - protein, 36 aa, Artificial Sequence
  Non-cyclic GFR-binding peptide
  MOD_RES (2)..(36): Xaa is C or S
  MOD_RES (14)..(15)..(16)..(17)..(18): Xaa is A or G
  MOD_RES (19)..(20)..(21)..(22): Xaa is A or G or absent
GXGEVVMERHKRLXXXXXXXXXYYLMSTASLETPVX

SEQ ID NO: 3790 - protein, 39 aa, Artificial Sequence
  Non-cyclic GFR-binding peptide
  MOD_RES (33)..(34): Xaa is C or S
  MOD_RES (11)..(12)..(13)..(14)..(15): Xaa is A or G
  MOD_RES (16)..(17)..(18)..(19): Xaa is A or G or absent
KVVMNRYKKLXXXXXXXXXFYLVSIANLKTPAXXAKPVA

SEQ ID NO: 3791 - protein, 42 aa, Artificial Sequence
  Non-cyclic GFR-binding peptide
  MOD_RES (1)..(36)..(37): Xaa is C or S
  MOD_RES (14)..(15)..(16)..(17)..(18): Xaa is A or G
  MOD_RES (19)..(20)..(21)..(22): Xaa is A or G or absent
XEAVSMGERYKKLXXXXXXXXXFYLVSIANLKTPVXXAKGVK

SEQ ID NO: 3792 - protein, 40 aa, Artificial Sequence
  Non-cyclic GFR-binding peptide
  MOD_RES (1)..(34)..(35): Xaa is C or S
  MOD_RES (12)..(13)..(14)..(15)..(16): Xaa is A or G
  MOD_RES (17)..(18)..(19)..(20): Xaa is A or G or absent
XSRVIMRHKRLXXXXXXXXXYYLISTASLAQPVXXPAASA

SEQ ID NO: 3793 - protein, 35 aa, Artificial Sequence
  Non-cyclic GFR-binding peptide
  MOD_RES (1)..(3): Xaa is C or S
  MOD_RES (14)..(15)..(16)..(17)..(18): Xaa is A or G
  MOD_RES (19)..(20)..(21)..(22): Xaa is A or G or absent
XKXSRVIMQYNKLXXXXXXXXXLYLISIASLAQPV

SEQ ID NO: 3794 - protein, 38 aa, Artificial Sequence
  Non-cyclic GFR-binding peptide
  MOD_RES (2)..(4)..(36)..(37): Xaa is C or S
RXGXGEVVMDRYKKLVVKENEDFYLMSIANLETPVXXA

SEQ ID NO: 3795 - protein, 36 aa, Artificial Sequence
  Non-cyclic GFR-binding peptide
  MOD_RES (2)..(4): Xaa is C or S
  MOD_RES (15)..(16)..(17)..(18)..(19): Xaa is A or G
  MOD_RES (20)..(21)..(22)..(23): Xaa is A or G or absent
SXKXSKVIMQYNKLXXXXXXXXXLYLISIASLDQSV

SEQ ID NO: 3796 - protein, 35 aa, Artificial Sequence
  Non-cyclic GFR-binding peptide
  MOD_RES (2)..(34): Xaa is C or S
GXSRVVMNQYNKLIVNSSDDLYLVSIASLKTPAXT

SEQ ID NO: 3797 - protein, 34 aa, Artificial Sequence
  Non-cyclic GFR-binding peptide
  MOD_RES (31)..(31): Xaa is C or S
RVVMNRHKRLIVNSSDDYYLVSTASLKTPAXTPK

SEQ ID NO: 3798 - protein, 40 aa, Artificial Sequence
  Non-cyclic GFR-binding peptide
  MOD_RES (1)..(3)..(37)..(38): Xaa is C or S
  MOD_RES (15)..(16)..(17)..(18)..(19): Xaa is A or G
  MOD_RES (20)..(21)..(22)..(23): Xaa is A or G or absent
XGXARVVMNYHYKLXXXXXXXXXKYLVSIPSLQTPAXXPK

SEQ ID NO: 3799 - protein, 37 aa, Artificial Sequence
  Non-cyclic GFR-binding peptide
  MOD_RES (1)..(34)..(35): Xaa is C or S
  MOD_RES (12)..(13)..(14)..(15)..(16): Xaa is A or G
  MOD_RES (17)..(18)..(19)..(20): Xaa is A or G or absent
XSRVIMYHYKLXXXXXXXXXKYLISIPSLAQPVXXPA

SEQ ID NO: 3800 - protein, 32 aa, Artificial Sequence
  Non-cyclic GFR-binding peptide
  MOD_RES (2)..(2): Xaa is C or S
KXSRVIMRYKKLVKPKRGVFYLISIANLAQPV

SEQ ID NO: 3801 - protein, 45 aa, Artificial Sequence
  Non-cyclic GFR-binding peptide
  MOD_RES (2)..(4)..(41): Xaa is C or S
EXKXALHDELTRYKKLFIPKKRVIEFYLVSIANLQVQTPRXQVNR

SEQ ID NO: 3802 - protein, 35 aa, Artificial Sequence
  Non-cyclic GFR-binding peptide
  MOD_RES (1)..(32)..(33): Xaa is C or S
XSKVIMYHYKLIKPTKGIKYLISIPSLDQSVXXPS

SEQ ID NO: 3803 - protein, 35 aa, Artificial Sequence
  Non-cyclic GFR-binding peptide
  MOD_RES (32)..(33): Xaa is C or S
AKVVMNQYNKLIVNNSSDLYLVSIASLKTPAXXAK

SEQ ID NO: 3804 - protein, 34 aa, Artificial Sequence
  Non-cyclic GFR-binding peptide
  MOD_RES (34)..(34): Xaa is C or S
  MOD_RES (12)..(13)..(14)..(15)..(16): Xaa is A or G
  MOD_RES (17)..(18)..(19)..(20): Xaa is A or G or absent
GEVVMERHKRLXXXXXXXXXYYLMSTASLETPVX

SEQ ID NO: 3805 - protein, 35 aa, Artificial Sequence
  Non-cyclic GFR-binding peptide
  MOD_RES (33)..(34): Xaa is C or S
  MOD_RES (11)..(12)..(13)..(14)..(15): Xaa is A or G
  MOD_RES (16)..(17)..(18)..(19): Xaa is A or G or absent
KVVMNYHYKLXXXXXXXXXKYLVSIPSLKTPAXXA

SEQ ID NO: 3806 - protein, 40 aa, Artificial Sequence
  Non-cyclic GFR-binding peptide
  MOD_RES (2)..(4)..(38)..(39): Xaa is C or S
  MOD_RES (16)..(17)..(18)..(19)..(20): Xaa is A or G
  MOD_RES (21)..(22)..(23)..(24): Xaa is A or G or absent
HXGXSRVVMNQYNKLXXXXXXXXXLYLVSIASLKTPAXXP

SEQ ID NO: 3807 - protein, 35 aa, Artificial Sequence
  Non-cyclic GFR-binding peptide
  MOD_RES (32)..(33): Xaa is C or S
SRVVMNRHKRLIVNSSDDYYLVSTASLKTPAXXPK

SEQ ID NO: 3808 - protein, 33 aa, Artificial Sequence
  Non-cyclic GFR-binding peptide
LHDELTRYKKLFIPKKRVIEFYLVSIANLQVQT

SEQ ID NO: 3809 - protein, 39 aa, Artificial Sequence
  Non-cyclic GFR-binding peptide
  MOD_RES (1)..(35)..(36): Xaa is C or S
  MOD_RES (13)..(14)..(15)..(16)..(17): Xaa is A or G
  MOD_RES (18)..(19)..(20)..(21): Xaa is A or G or absent
XGEVVMDRYKKLXXXXXXXXXFYLMSIANLETPVXXAKP

SEQ ID NO: 3810 - protein, 38 aa, Artificial Sequence
  Non-cyclic GFR-binding peptide
  MOD_RES (2)..(4): Xaa is C or S
  MOD_RES (17)..(18)..(19)..(20)..(21): Xaa is A or G
  MOD_RES (22)..(23)..(24)..(25): Xaa is A or G or absent
RXGXEAVSMGEQYNKLXXXXXXXXXLYLVSIASLKTPV

SEQ ID NO: 3811 - protein, 43 aa, Artificial Sequence
  Non-cyclic GFR-binding peptide
  MOD_RES (2)..(4)..(41): Xaa is C or S
EXKXALHDELTYHYKLFIPKKRVIEKYLVSIPSLQVQTPRXQV

SEQ ID NO: 3812 - protein, 37 aa, Artificial Sequence
  Non-cyclic GFR-binding peptide
  MOD_RES (1)..(32)..(33): Xaa is C or S
XSRVIMYHYKLVKPKRGVKYLISIPSLAQPVXXPAAS

SEQ ID NO: 3813 - protein, 39 aa, Artificial Sequence
  Non-cyclic GFR-binding peptide
  MOD_RES (1)..(3)..(36)..(37): Xaa is C or S
  MOD_RES (14)..(15)..(16)..(17)..(18): Xaa is A or G
  MOD_RES (19)..(20)..(21)..(22): Xaa is A or G or absent
XKXSKVVMRHKRLXXXXXXXXXYYLISTASLDQPVXXPS

SEQ ID NO: 3814 - protein, 39 aa, Artificial Sequence
  Non-cyclic GFR-binding peptide
  MOD_RES (2)..(4)..(38)..(39): Xaa is C or S
  MOD_RES (16)..(17)..(18)..(19)..(20): Xaa is A or G
  MOD_RES (21)..(22)..(23)..(24): Xaa is A or G or absent
HXGXAKVVMNYHYKLXXXXXXXXXKYLVSIPSLKTPAXX

SEQ ID NO: 3815 - protein, 41 aa, Artificial Sequence
  Non-cyclic GFR-binding peptide
  MOD_RES (35)..(36): Xaa is C or S
  MOD_RES (13)..(14)..(15)..(16)..(17): Xaa is A or G
  MOD_RES (18)..(19)..(20)..(21): Xaa is A or G or absent
EAVSMGERYKKLXXXXXXXXXFYLVSIANLKTPVXXAKGVK

SEQ ID NO: 3816 - protein, 35 aa, Artificial Sequence
  Non-cyclic GFR-binding peptide
  MOD_RES (33)..(34): Xaa is C or S
  MOD_RES (11)..(12)..(13)..(14)..(15): Xaa is A or G
  MOD_RES (16)..(17)..(18)..(19): Xaa is A or G or absent
SKVVMQYNKLXXXXXXXXXLYLISIASLDQPVXXP

SEQ ID NO: 3817 - protein, 38 aa, Artificial Sequence
  Non-cyclic GFR-binding peptide
  MOD_RES (1)..(3)..(34)..(35): Xaa is C or S
XKXSKVIMRHKRLIKPTKGIYYLISTASLDQSVXXPSA

SEQ ID NO: 3818 - protein, 37 aa, Artificial Sequence
  Non-cyclic GFR-binding peptide
  MOD_RES (2)..(4): Xaa is C or S
  MOD_RES (16)..(17)..(18)..(19)..(20): Xaa is A or G
  MOD_RES (21)..(22)..(23)..(24): Xaa is A or G or absent
HXGXARVVMNYHYKLXXXXXXXXXKYLVSIPSLQTPA

SEQ ID NO: 3819 - protein, 33 aa, Artificial Sequence
  Non-cyclic GFR-binding peptide
  MOD_RES (12)..(13)..(14)..(15)..(16): Xaa is A or G
  MOD_RES (17)..(18)..(19)..(20): Xaa is A or G or absent
GEVVMERHKRLXXXXXXXXXYYLMSTASLETPV

SEQ ID NO: 3820 - protein, 30 aa, Artificial Sequence
  Non-cyclic GFR-binding peptide
SKVIMQYNKLIKPTKGILYLISIASLDQSV

SEQ ID NO: 3821 - protein, 38 aa, Artificial Sequence
  Non-cyclic GFR-binding peptide
  MOD_RES (1)..(3)..(37)..(38): Xaa is C or S
  MOD_RES (15)..(16)..(17)..(18)..(19): Xaa is A or G
  MOD_RES (20)..(21)..(22)..(23): Xaa is A or G or absent
XGXARVVMNQYNKLXXXXXXXXXLYLVSIASLQTPAXX

SEQ ID NO: 3822 - protein, 36 aa, Artificial Sequence
  Non-cyclic GFR-binding peptide
  MOD_RES (33)..(34): Xaa is C or S
  MOD_RES (11)..(12)..(13)..(14)..(15): Xaa is A or G
  MOD_RES (16)..(17)..(18)..(19): Xaa is A or G or absent
SRVIMRYKKLXXXXXXXXXFYLISIANLAQPVXXPA

SEQ ID NO: 3823 - protein, 39 aa, Artificial Sequence
  Non-cyclic GFR-binding peptide
  MOD_RES (2)..(34): Xaa is C or S
GXSRVVMNYHYKLIVNSSDDKYLVSIPSLKTPAXTPKTV

SEQ ID NO: 3824 - protein, 35 aa, Artificial Sequence
  Non-cyclic GFR-binding peptide
  MOD_RES (32)..(32): Xaa is C or S
SRVVMNRHKRLIVNSSDDYYLVSTASLKTPAXTPK

SEQ ID NO: 3825 - protein, 38 aa, Artificial Sequence
  Non-cyclic GFR-binding peptide
  MOD_RES (2)..(4)..(36)..(37): Xaa is C or S
HXGXARVVMNRHKRLIVNSSDDYYLVSTASLQTPAXXP

SEQ ID NO: 3826 - protein, 41 aa, Artificial Sequence
  Non-cyclic GFR-binding peptide
  MOD_RES (1)..(38): Xaa is C or S
XALHDELTQYNKLFIPKKRVIELYLVSIASLQVQTPRXQVN

SEQ ID NO: 3827 - protein, 40 aa, Artificial Sequence
  Non-cyclic GFR-binding peptide
  MOD_RES (1)..(36)..(37): Xaa is C or S
  MOD_RES (14)..(15)..(16)..(17)..(18): Xaa is A or G
  MOD_RES (19)..(20)..(21)..(22): Xaa is A or G or absent
XEAVSMGERHKRLXXXXXXXXXYYLVSTASLKTPVXXAKG

SEQ ID NO: 3828 - protein, 42 aa, Artificial Sequence
  Non-cyclic GFR-binding peptide
  MOD_RES (2)..(4)..(41): Xaa is C or S
  MOD_RES (17)..(18)..(19)..(20)..(21): Xaa is A or G
  MOD_RES (22)..(23)..(24)..(25): Xaa is A or G or absent
EXKXALHDELTYHYKLXXXXXXXXXKYLVSIPSLQVQTPRXQ

SEQ ID NO: 3829 - protein, 40 aa, Artificial Sequence
  Non-cyclic GFR-binding peptide
  MOD_RES (1)..(3)..(34)..(35): Xaa is C or S
XKXSKVIMRYKKLIKPTKGIFYLISIANLDQSVXXPSASA

SEQ ID NO: 3830 - protein, 38 aa, Artificial Sequence
  Non-cyclic GFR-binding peptide
  MOD_RES (1)..(33)..(34): Xaa is C or S
XAKVVMNQYNKLIVNNSSDLYLVSIASLKTPAXXAKPV

SEQ ID NO: 3831 - protein, 34 aa, Artificial Sequence
  Non-cyclic GFR-binding peptide
  MOD_RES (1)..(34): Xaa is C or S
  MOD_RES (12)..(13)..(14)..(15)..(16): Xaa is A or G
  MOD_RES (17)..(18)..(19)..(20): Xaa is A or G or absent
XSRVIMRYKKLXXXXXXXXXFYLISIANLAQPVX

SEQ ID NO: 3832 - protein, 38 aa, Artificial Sequence
  Non-cyclic GFR-binding peptide
  MOD_RES (1)..(32)..(33): Xaa is C or S
XSKVIMRYKKLIKPTKGIFYLISIANLDQSVXXPSASA

SEQ ID NO: 3833 - protein, 37 aa, Artificial Sequence
  Non-cyclic GFR-binding peptide
  MOD_RES (2)..(37): Xaa is C or S
  MOD_RES (15)..(16)..(17)..(18)..(19): Xaa is A or G
  MOD_RES (20)..(21)..(22)..(23): Xaa is A or G or absent
GXEAVSMGERYKKLXXXXXXXXXFYLVSIANLKTPVX

SEQ ID NO: 3834 - protein, 36 aa, Artificial Sequence
  Non-cyclic GFR-binding peptide
  MOD_RES (1)..(35)..(36): Xaa is C or S
  MOD_RES (13)..(14)..(15)..(16)..(17): Xaa is A or G
  MOD_RES (18)..(19)..(20)..(21): Xaa is A or G or absent
XAKVVMNQYNKLXXXXXXXXXLYLVSIASLKTPAXX

SEQ ID NO: 3835 - protein, 39 aa, Artificial Sequence
  Non-cyclic GFR-binding peptide
  MOD_RES (1)..(3)..(34)..(35): Xaa is C or S
XKXSKVVMRYKKLVKPTRGVFYLISIANLDQPVXXPSAS

SEQ ID NO: 3836 - protein, 38 aa, Artificial Sequence
  Non-cyclic GFR-binding peptide
  MOD_RES (2)..(35)..(36): Xaa is C or S
GXEAVSMGERYKKLTPVGMDDFYLVSIANLKTPVXXAK

SEQ ID NO: 3837 - protein, 37 aa, Artificial Sequence
  Non-cyclic GFR-binding peptide
  MOD_RES (36)..(36): Xaa is C or S
  MOD_RES (12)..(13)..(14)..(15)..(16): Xaa is A or G
  MOD_RES (17)..(18)..(19)..(20): Xaa is A or G or absent
LHDELTYHYKLXXXXXXXXXKYLVSIPSLQVQTPRXQ

SEQ ID NO: 3838 - protein, 34 aa, Artificial Sequence
  Non-cyclic GFR-binding peptide
  MOD_RES (31)..(32): Xaa is C or S
SKVVMQYNKLVKPTRGVLYLISIASLDQPVXXPS

SEQ ID NO: 3839 - protein, 38 aa, Artificial Sequence
  Non-cyclic GFR-binding peptide
  MOD_RES (37)..(37): Xaa is C or S
  MOD_RES (13)..(14)..(15)..(16)..(17): Xaa is A or G
  MOD_RES (18)..(19)..(20)..(21): Xaa is A or G or absent
ALHDELTQYNKLXXXXXXXXXLYLVSIASLQVQTPRXQ

SEQ ID NO: 3840 - protein, 41 aa, Artificial Sequence
  Non-cyclic GFR-binding peptide
  MOD_RES (2)..(36)..(37): Xaa is C or S
  MOD_RES (14)..(15)..(16)..(17)..(18): Xaa is A or G
  MOD_RES (19)..(20)..(21)..(22): Xaa is A or G or absent
GXGEVVMERYKKLXXXXXXXXXFYLMSIANLETPVXXAKPI

SEQ ID NO: 3841 - protein, 38 aa, Artificial Sequence
  Non-cyclic GFR-binding peptide
  MOD_RES (1)..(3)..(34)..(35): Xaa is C or S
XKXSKVVMYHYKLVKPTRGVKYLISIPSLDQPVXXPSA

SEQ ID NO: 3842 - protein, 35 aa, Artificial Sequence
  Non-cyclic GFR-binding peptide
  MOD_RES (33)..(34): Xaa is C or S
  MOD_RES (11)..(12)..(13)..(14)..(15): Xaa is A or G
  MOD_RES (16)..(17)..(18)..(19): Xaa is A or G or absent
KVVMNQYNKLXXXXXXXXXLYLVSIASLKTPAXXA

SEQ ID NO: 3843 - protein, 44 aa, Artificial Sequence
  Non-cyclic GFR-binding peptide
  MOD_RES (1)..(3)..(40): Xaa is C or S
  MOD_RES (16)..(17)..(18)..(19)..(20): Xaa is A or G
  MOD_RES (21)..(22)..(23)..(24): Xaa is A or G or absent
XKXALHDELTRHKRLXXXXXXXXXYYLVSTASLQVQTPRXQVNR

SEQ ID NO: 3844 - protein, 37 aa, Artificial Sequence
  Non-cyclic GFR-binding peptide
  MOD_RES (1)..(33)..(34): Xaa is C or S
XGEVVMEYHYKLVVKDYEDKYLMSIPSLETPVXXAKP

SEQ ID NO: 3845 - protein, 38 aa, Artificial Sequence
  Non-cyclic GFR-binding peptide
  MOD_RES (37)..(37): Xaa is C or S
  MOD_RES (13)..(14)..(15)..(16)..(17): Xaa is A or G
  MOD_RES (18)..(19)..(20)..(21): Xaa is A or G or absent
ALHDELTRHKRLXXXXXXXXXYYLVSTASLQVQTPRXQ

SEQ ID NO: 3846 - protein, 37 aa, Artificial Sequence
  Non-cyclic GFR-binding peptide
  MOD_RES (33)..(33): Xaa is C or S
  MOD_RES (11)..(12)..(13)..(14)..(15): Xaa is A or G
  MOD_RES (16)..(17)..(18)..(19): Xaa is A or G or absent
RVVMNRHKRLXXXXXXXXXYYLVSTASLKTPAXTPKT

SEQ ID NO: 3847 - protein, 37 aa, Artificial Sequence
  Non-cyclic GFR-binding peptide
  MOD_RES (1)..(33): Xaa is C or S
XSRVVMNRHKRLIVNSSDDYYLVSTASLKTPAXTPKT

SEQ ID NO: 3848 - protein, 36 aa, Artificial Sequence
  Non-cyclic GFR-binding peptide
  MOD_RES (2)..(4)..(35)..(36): Xaa is C or S
SXKXSRVIMQYNKLVKPKRGVLYLISIASLAQPVXX

SEQ ID NO: 3849 - protein, 36 aa, Artificial Sequence
  Non-cyclic GFR-binding peptide
  MOD_RES (1)..(33)..(34): Xaa is C or S
XGEVVMERYKKLVVKDYEDFYLMSIANLETPVXXAK

SEQ ID NO: 3850 - protein, 37 aa, Artificial Sequence
  Non-cyclic GFR-binding peptide
  MOD_RES (1)..(3): Xaa is C or S
XKXALHDELTQYNKLFIPKKRVIELYLVSIASLQVQT

SEQ ID NO: 3851 - protein, 36 aa, Artificial Sequence
  Non-cyclic GFR-binding peptide
  MOD_RES (31)..(32): Xaa is C or S
RVVMNQYNKLIVNSSDDLYLVSIASLQTPAXXPKPV

SEQ ID NO: 3852 - protein, 40 aa, Artificial Sequence
  Non-cyclic GFR-binding peptide
  MOD_RES (2)..(4)..(39)..(40): Xaa is C or S
  MOD_RES (17)..(18)..(19)..(20)..(21): Xaa is A or G
  MOD_RES (22)..(23)..(24)..(25): Xaa is A or G or absent
RXGXEAVSMGEQYNKLXXXXXXXXXLYLVSIASLKTPVXX

SEQ ID NO: 3853 - protein, 37 aa, Artificial Sequence
  Non-cyclic GFR-binding peptide
  MOD_RES (2)..(4)..(36)..(37): Xaa is C or S
RXGXGEVVMDYHYKLVVKENEDKYLMSIPSLETPVXX

SEQ ID NO: 3854 - protein, 35 aa, Artificial Sequence
  Non-cyclic GFR-binding peptide
  MOD_RES (1)..(32)..(33): Xaa is C or S
XSKVVMYHYKLVKPTRGVKYLISIPSLDQPVXXPS

SEQ ID NO: 3855 - protein, 35 aa, Artificial Sequence
  Non-cyclic GFR-binding peptide
  MOD_RES (31)..(32): Xaa is C or S
SRVIMQYNKLVKPKRGVLYLISIASLAQPVXXPAA

SEQ ID NO: 3856 - protein, 35 aa, Artificial Sequence
  Non-cyclic GFR-binding peptide
LHDELTRYKKLFIPKKRVIEFYLVSIANLQVQTPR

SEQ ID NO: 3857 - protein, 38 aa, Artificial Sequence
  Non-cyclic GFR-binding peptide
  MOD_RES (34)..(35): Xaa is C or S
  MOD_RES (12)..(13)..(14)..(15)..(16): Xaa is A or G
  MOD_RES (17)..(18)..(19)..(20): Xaa is A or G or absent
ARVVMNYHYKLXXXXXXXXXKYLVSIPSLQTPAXXPKP

SEQ ID NO: 3858 - protein, 37 aa, Artificial Sequence
  Non-cyclic GFR-binding peptide
  MOD_RES (1)..(32)..(33): Xaa is C or S
XSKVVMRYKKLVKPTRGVFYLISIANLDQPVXXPSAS

SEQ ID NO: 3859 - protein, 34 aa, Artificial Sequence
  Non-cyclic GFR-binding peptide
  MOD_RES (13)..(14)..(15)..(16)..(17): Xaa is A or G
  MOD_RES (18)..(19)..(20)..(21): Xaa is A or G or absent
ALHDELTRYKKLXXXXXXXXXFYLVSIANLQVQT

SEQ ID NO: 3860 - protein, 39 aa, Artificial Sequence
  Non-cyclic GFR-binding peptide
  MOD_RES (2)..(4)..(37)..(38): Xaa is C or S
RXGXEAVSMGEQYNKLTPVGMDDLYLVSIASLKTPVXXA

SEQ ID NO: 3861 - protein, 40 aa, Artificial Sequence
  Non-cyclic GFR-binding peptide
  MOD_RES (2)..(4)..(37)..(38): Xaa is C or S
  MOD_RES (15)..(16)..(17)..(18)..(19): Xaa is A or G
  MOD_RES (20)..(21)..(22)..(23): Xaa is A or G or absent
SXKXSKVVMRHKRLXXXXXXXXXYYLISTASLDQPVXXPS

SEQ ID NO: 3862 - protein, 37 aa, Artificial Sequence
  Non-cyclic GFR-binding peptide
  MOD_RES (1)..(33)..(34): Xaa is C or S
XGEVVMERYKKLVVKDYEDFYLMSIANLETPVXXAKP

SEQ ID NO: 3863 - protein, 41 aa, Artificial Sequence
  Non-cyclic GFR-binding peptide
  MOD_RES (2)..(4)..(37)..(38): Xaa is C or S
  MOD_RES (15)..(16)..(17)..(18)..(19): Xaa is A or G
  MOD_RES (20)..(21)..(22)..(23): Xaa is A or G or absent
SXKXSKVIMQYNKLXXXXXXXXXLYLISIASLDQSVXXPSA

SEQ ID NO: 3864 - protein, 37 aa, Artificial Sequence
  Non-cyclic GFR-binding peptide
  MOD_RES (2)..(36)..(37): Xaa is C or S
  MOD_RES (14)..(15)..(16)..(17)..(18): Xaa is A or G
  MOD_RES (19)..(20)..(21)..(22): Xaa is A or G or absent
GXAKVVMNRYKKLXXXXXXXXXFYLVSIANLKTPAXX

SEQ ID NO: 3865 - protein, 42 aa, Artificial Sequence
  Non-cyclic GFR-binding peptide
  MOD_RES (2)..(4)..(36)..(37): Xaa is C or S
HXGXARVVMNYHYKLIVNSSDDKYLVSIPSLQTPAXXPKPVT

SEQ ID NO: 3866 - protein, 38 aa, Artificial Sequence
  Non-cyclic GFR-binding peptide
  MOD_RES (2)..(34)..(35): Xaa is C or S
GXARVVMNYHYKLIVNSSDDKYLVSIPSLQTPAXXPKP

SEQ ID NO: 3867 - protein, 39 aa, Artificial Sequence
  Non-cyclic GFR-binding peptide
  MOD_RES (2)..(34)..(35): Xaa is C or S
GXARVVMNRHKRLIVNSSDDYYLVSTASLQTPAXXPKPV

SEQ ID NO: 3868 - protein, 40 aa, Artificial Sequence
  Non-cyclic GFR-binding peptide
  MOD_RES (2)..(37)..(38): Xaa is C or S
  MOD_RES (15)..(16)..(17)..(18)..(19): Xaa is A or G
  MOD_RES (20)..(21)..(22)..(23): Xaa is A or G or absent
GXEAVSMGERYKKLXXXXXXXXXFYLVSIANLKTPVXXAK

SEQ ID NO: 3869 - protein, 38 aa, Artificial Sequence
  Non-cyclic GFR-binding peptide
  MOD_RES (1)..(3)..(34)..(35): Xaa is C or S
XKXSKVVMRHKRLVKPTRGVYYLISTASLDQPVXXPSA

SEQ ID NO: 3870 - protein, 36 aa, Artificial Sequence
  Non-cyclic GFR-binding peptide
  MOD_RES (2)..(35)..(36): Xaa is C or S
  MOD_RES (13)..(14)..(15)..(16)..(17): Xaa is A or G
  MOD_RES (18)..(19)..(20)..(21): Xaa is A or G or absent
KXSRVIMRHKRLXXXXXXXXXYYLISTASLAQPVXX

SEQ ID NO: 3871 - protein, 40 aa, Artificial Sequence
  Non-cyclic GFR-binding peptide
  MOD_RES (1)..(34)..(35): Xaa is C or S
  MOD_RES (12)..(13)..(14)..(15)..(16): Xaa is A or G
  MOD_RES (17)..(18)..(19)..(20): Xaa is A or G or absent
XSRVIMQYNKLXXXXXXXXXLYLISIASLAQPVXXPAASA

SEQ ID NO: 3872 - protein, 35 aa, Artificial Sequence
  Non-cyclic GFR-binding peptide
  MOD_RES (1)..(32)..(33): Xaa is C or S
XSKVIMRHKRLIKPTKGIYYLISTASLDQSVXXPS

SEQ ID NO: 3873 - protein, 38 aa, Artificial Sequence
  Non-cyclic GFR-binding peptide
  MOD_RES (34)..(35): Xaa is C or S
  MOD_RES (12)..(13)..(14)..(15)..(16): Xaa is A or G
  MOD_RES (17)..(18)..(19)..(20): Xaa is A or G or absent
GEVVMDYHYKLXXXXXXXXXKYLMSIPSLETPVXXAKP

SEQ ID NO: 3874 - protein, 34 aa, Artificial Sequence
  Non-cyclic GFR-binding peptide
  MOD_RES (1)..(1): Xaa is C or S
  MOD_RES (13)..(14)..(15)..(16)..(17): Xaa is A or G
  MOD_RES (18)..(19)..(20)..(21): Xaa is A or G or absent
XSRVVMNQYNKLXXXXXXXXXLYLVSIASLKTPA

SEQ ID NO: 3875 - protein, 43 aa, Artificial Sequence
  Non-cyclic GFR-binding peptide
  MOD_RES (1)..(3)..(40): Xaa is C or S
  MOD_RES (16)..(17)..(18)..(19)..(20): Xaa is A or G
  MOD_RES (21)..(22)..(23)..(24): Xaa is A or G or absent
XKXALHDELTQYNKLXXXXXXXXXLYLVSIASLQVQTPRXQVN

SEQ ID NO: 3876 - protein, 37 aa, Artificial Sequence
  Non-cyclic GFR-binding peptide
  MOD_RES (2)..(4)..(36)..(37): Xaa is C or S
HXGXAKVVMNQYNKLIVNNSSDLYLVSIASLKTPAXX

SEQ ID NO: 3877 - protein, 40 aa, Artificial Sequence
  Non-cyclic GFR-binding peptide
  MOD_RES (1)..(34)..(35): Xaa is C or S
  MOD_RES (12)..(13)..(14)..(15)..(16): Xaa is A or G
  MOD_RES (17)..(18)..(19)..(20): Xaa is A or G or absent
XSKVIMRYKKLXXXXXXXXXFYLISIANLDQSVXXPSASA

SEQ ID NO: 3878 - protein, 35 aa, Artificial Sequence
  Non-cyclic GFR-binding peptide
  MOD_RES (1)..(3)..(35): Xaa is C or S
XGXAKVVMNRYKKLIVNNSSDFYLVSIANLKTPAX

SEQ ID NO: 3879 - protein, 34 aa, Artificial Sequence
  Non-cyclic GFR-binding peptide
  MOD_RES (2)..(2): Xaa is C or S
  MOD_RES (13)..(14)..(15)..(16)..(17): Xaa is A or G
  MOD_RES (18)..(19)..(20)..(21): Xaa is A or G or absent
KXSKVIMYHYKLXXXXXXXXXKYLISIPSLDQSV

SEQ ID NO: 3880 - protein, 32 aa, Artificial Sequence
  Non-cyclic GFR-binding peptide
  MOD_RES (2)..(2): Xaa is C or S
KXSRVIMYHYKLVKPKRGVKYLISIPSLAQPV

SEQ ID NO: 3881 - protein, 36 aa, Artificial Sequence
  Non-cyclic GFR-binding peptide
  MOD_RES (1)..(1): Xaa is C or S
  MOD_RES (14)..(15)..(16)..(17)..(18): Xaa is A or G
  MOD_RES (19)..(20)..(21)..(22): Xaa is A or G or absent
XALHDELTRHKRLXXXXXXXXXYYLVSTASLQVQTP

SEQ ID NO: 3882 - protein, 36 aa, Artificial Sequence
  Non-cyclic GFR-binding peptide
  MOD_RES (31)..(32): Xaa is C or S
KVVMNQYNKLIVNNSSDLYLVSIASLKTPAXXAKPV

SEQ ID NO: 3883 - protein, 35 aa, Artificial Sequence
  Non-cyclic GFR-binding peptide
  MOD_RES (1)..(33)..(34): Xaa is C or S
XSRVVMNRHKRLIVNSSDDYYLVSTASLKTPAXXP

SEQ ID NO: 3884 - protein, 39 aa, Artificial Sequence
  Non-cyclic GFR-binding peptide
  MOD_RES (2)..(4)..(36): Xaa is C or S
HXGXSRVVMNQYNKLIVNSSDDLYLVSIASLKTPAXTPK

SEQ ID NO: 3885 - protein, 38 aa, Artificial Sequence
  Non-cyclic GFR-binding peptide
  MOD_RES (2)..(36)..(37): Xaa is C or S
  MOD_RES (14)..(15)..(16)..(17)..(18): Xaa is A or G
  MOD_RES (19)..(20)..(21)..(22): Xaa is A or G or absent
GXAKVVMNRYKKLXXXXXXXXXFYLVSIANLKTPAXXA

SEQ ID NO: 3886 - protein, 42 aa, Artificial Sequence
  Non-cyclic GFR-binding peptide
  MOD_RES (2)..(4)..(36)..(37): Xaa is C or S
HXGXAKVVMNRYKKLIVNNSSDFYLVSIANLKTPAXXAKPVA

SEQ ID NO: 3887 - protein, 40 aa, Artificial Sequence
  Non-cyclic GFR-binding peptide
  MOD_RES (2)..(34)..(35): Xaa is C or S
GXGEVVMDYHYKLVVKENEDKYLMSIPSLETPVXXAKPIK

SEQ ID NO: 3888 - protein, 37 aa, Artificial Sequence
  Non-cyclic GFR-binding peptide
  MOD_RES (2)..(4)..(36)..(37): Xaa is C or S
HXGXSRVVMNYHYKLIVNSSDDKYLVSIPSLKTPAXX

SEQ ID NO: 3889 - protein, 35 aa, Artificial Sequence
  Non-cyclic GFR-binding peptide
  MOD_RES (31)..(32): Xaa is C or S
SRVIMYHYKLVKPKRGVKYLISIPSLAQPVXXPAA

SEQ ID NO: 3890 - protein, 40 aa, Artificial Sequence
  Non-cyclic GFR-binding peptide
  MOD_RES (2)..(36): Xaa is C or S
  MOD_RES (14)..(15)..(16)..(17)..(18): Xaa is A or G
  MOD_RES (19)..(20)..(21)..(22): Xaa is A or G or absent
GXSRVVMNYHYKLXXXXXXXXXKYLVSIPSLKTPAXTPKT

SEQ ID NO: 3891 - protein, 42 aa, Artificial Sequence
  Non-cyclic GFR-binding peptide
  MOD_RES (2)..(39): Xaa is C or S
KXALHDELTRYKKLFIPKKRVIEFYLVSIANLQVQTPRXQVN

SEQ ID NO: 3892 - protein, 37 aa, Artificial Sequence
  Non-cyclic GFR-binding peptide
  MOD_RES (1)..(32)..(33): Xaa is C or S
XSRVIMRHKRLVKPKRGVYYLISTASLAQPVXXPAAS

SEQ ID NO: 3893 - protein, 40 aa, Artificial Sequence
  Non-cyclic GFR-binding peptide
  MOD_RES (37)..(37): Xaa is C or S
ALHDELTQYNKLFIPKKRVIELYLVSIASLQVQTPRXQVN

SEQ ID NO: 3894 - protein, 35 aa, Artificial Sequence
  Non-cyclic GFR-binding peptide
  MOD_RES (2)..(2): Xaa is C or S
  MOD_RES (14)..(15)..(16)..(17)..(18): Xaa is A or G
  MOD_RES (19)..(20)..(21)..(22): Xaa is A or G or absent
GXARVVMNQYNKLXXXXXXXXXLYLVSIASLQTPA

SEQ ID NO: 3895 - protein, 34 aa, Artificial Sequence
  Non-cyclic GFR-binding peptide
  MOD_RES (33)..(34): Xaa is C or S
EAVSMGERYKKLTPVGMDDFYLVSIANLKTPVXX

SEQ ID NO: 3896 - protein, 35 aa, Artificial Sequence
  Non-cyclic GFR-binding peptide
  MOD_RES (32)..(33): Xaa is C or S
AKVVMNRYKKLIVNNSSDFYLVSIANLKTPAXXAK

SEQ ID NO: 3897 - protein, 35 aa, Artificial Sequence
  Non-cyclic GFR-binding peptide
  MOD_RES (1)..(35): Xaa is C or S
  MOD_RES (13)..(14)..(15)..(16)..(17): Xaa is A or G
  MOD_RES (18)..(19)..(20)..(21): Xaa is A or G or absent
XSRVVMNQYNKLXXXXXXXXXLYLVSIASLKTPAX

SEQ ID NO: 3898 - protein, 37 aa, Artificial Sequence
  Non-cyclic GFR-binding peptide
  MOD_RES (1)..(35)..(36): Xaa is C or S
  MOD_RES (13)..(14)..(15)..(16)..(17): Xaa is A or G
  MOD_RES (18)..(19)..(20)..(21): Xaa is A or G or absent
XARVVMNRHKRLXXXXXXXXXYYLVSTASLQTPAXXP

SEQ ID NO: 3899 - protein, 38 aa, Artificial Sequence
  Non-cyclic GFR-binding peptide
  MOD_RES (1)..(3)..(37): Xaa is C or S
  MOD_RES (15)..(16)..(17)..(18)..(19): Xaa is A or G
  MOD_RES (20)..(21)..(22)..(23): Xaa is A or G or absent
XGXSRVVMNQYNKLXXXXXXXXXLYLVSIASLKTPAXT

SEQ ID NO: 3900 - protein, 43 aa, Artificial Sequence
  Non-cyclic GFR-binding peptide
  MOD_RES (2)..(4)..(38)..(39): Xaa is C or S
  MOD_RES (16)..(17)..(18)..(19)..(20): Xaa is A or G
  MOD_RES (21)..(22)..(23)..(24): Xaa is A or G or absent
RXGXGEVVMEYHYKLXXXXXXXXXKYLMSIPSLETPVXXAKPI

SEQ ID NO: 3901 - protein, 39 aa, Artificial Sequence
  Non-cyclic GFR-binding peptide
  MOD_RES (1)..(34)..(35): Xaa is C or S
  MOD_RES (12)..(13)..(14)..(15)..(16): Xaa is A or G
  MOD_RES (17)..(18)..(19)..(20): Xaa is A or G or absent
XSRVIMYHYKLXXXXXXXXXKYLISIPSLAQPVXXPAAS

SEQ ID NO: 3902 - protein, 38 aa, Artificial Sequence
  Non-cyclic GFR-binding peptide
  MOD_RES (2)..(4)..(35)..(36): Xaa is C or S
SXKXSRVIMQYNKLVKPKRGVLYLISIASLAQPVXXPA

SEQ ID NO: 3903 - protein, 38 aa, Artificial Sequence
  Non-cyclic GFR-binding peptide
  MOD_RES (1)..(35)..(36): Xaa is C or S
  MOD_RES (13)..(14)..(15)..(16)..(17): Xaa is A or G
  MOD_RES (18)..(19)..(20)..(21): Xaa is A or G or absent
XSRVVMNRHKRLXXXXXXXXXYYLVSTASLKTPAXXPK

SEQ ID NO: 3904 - protein, 38 aa, Artificial Sequence
  Non-cyclic GFR-binding peptide
  MOD_RES (1)..(32)..(33): Xaa is C or S
XSKVVMRYKKLVKPTRGVFYLISIANLDQPVXXPSASA

SEQ ID NO: 3905 - protein, 39 aa, Artificial Sequence
  Non-cyclic GFR-binding peptide
  MOD_RES (1)..(3): Xaa is C or S
  MOD_RES (16)..(17)..(18)..(19)..(20): Xaa is A or G
  MOD_RES (21)..(22)..(23)..(24): Xaa is A or G or absent
XKXALHDELTYHYKLXXXXXXXXXKYLVSIPSLQVQTPR

SEQ ID NO: 3906 - protein, 34 aa, Artificial Sequence
  Non-cyclic GFR-binding peptide
  MOD_RES (32)..(33): Xaa is C or S
GEVVMDRYKKLVVKENEDFYLMSIANLETPVXXA

SEQ ID NO: 3907 - protein, 42 aa, Artificial Sequence
  Non-cyclic GFR-binding peptide
  MOD_RES (2)..(39): Xaa is C or S
  MOD_RES (15)..(16)..(17)..(18)..(19): Xaa is A or G
  MOD_RES (20)..(21)..(22)..(23): Xaa is A or G or absent
KXALHDELTRYKKLXXXXXXXXXFYLVSIANLQVQTPRXQVN

SEQ ID NO: 3908 - protein, 36 aa, Artificial Sequence
  Non-cyclic GFR-binding peptide
  MOD_RES (31)..(32): Xaa is C or S
KVVMNYHYKLIVNNSSDKYLVSIPSLKTPAXXAKPV

SEQ ID NO: 3909 - protein, 40 aa, Artificial Sequence
  Non-cyclic GFR-binding peptide
  MOD_RES (34)..(35): Xaa is C or S
  MOD_RES (12)..(13)..(14)..(15)..(16): Xaa is A or G
  MOD_RES (17)..(18)..(19)..(20): Xaa is A or G or absent
ARVVMNRHKRLXXXXXXXXXYYLVSTASLQTPAXXPKPVT

SEQ ID NO: 3910 - protein, 41 aa, Artificial Sequence
  Non-cyclic GFR-binding peptide
  MOD_RES (1)..(3)..(37)..(38): Xaa is C or S
  MOD_RES (15)..(16)..(17)..(18)..(19): Xaa is A or G
  MOD_RES (20)..(21)..(22)..(23): Xaa is A or G or absent
XGXGEVVMEYHYKLXXXXXXXXXKYLMSIPSLETPVXXAKP

SEQ ID NO: 3911 - protein, 37 aa, Artificial Sequence
  Non-cyclic GFR-binding peptide
  MOD_RES (2)..(34)..(35): Xaa is C or S
GXGEVVMDYHYKLVVKENEDKYLMSIPSLETPVXXAK

SEQ ID NO: 3912 - protein, 42 aa, Artificial Sequence
  Non-cyclic GFR-binding peptide
  MOD_RES (1)..(3)..(36)..(37): Xaa is C or S
  MOD_RES (14)..(15)..(16)..(17)..(18): Xaa is A or G
  MOD_RES (19)..(20)..(21)..(22): Xaa is A or G or absent
XKXSRVIMYHYKLXXXXXXXXXKYLISIPSLAQPVXXPAASA

SEQ ID NO: 3913 - protein, 38 aa, Artificial Sequence
  Non-cyclic GFR-binding peptide
  MOD_RES (1)..(3)..(35): Xaa is C or S
XGXSRVVMNRHKRLIVNSSDDYYLVSTASLKTPAXTPK

SEQ ID NO: 3914 - protein, 36 aa, Artificial Sequence
  Non-cyclic GFR-binding peptide
  MOD_RES (35)..(36): Xaa is C or S
  MOD_RES (13)..(14)..(15)..(16)..(17): Xaa is A or G
  MOD_RES (18)..(19)..(20)..(21): Xaa is A or G or absent
EAVSMGEQYNKLXXXXXXXXXLYLVSIASLKTPVXX

SEQ ID NO: 3915 - protein, 35 aa, Artificial Sequence
  Non-cyclic GFR-binding peptide
  MOD_RES (1)..(33)..(34): Xaa is C or S
XARVVMNYHYKLIVNSSDDKYLVSIPSLQTPAXXP

SEQ ID NO: 3916 - protein, 33 aa, Artificial Sequence
  Non-cyclic GFR-binding peptide
  MOD_RES (31)..(32): Xaa is C or S
RVVMNRHKRLIVNSSDDYYLVSTASLQTPAXXP

SEQ ID NO: 3917 - protein, 41 aa, Artificial Sequence
  Non-cyclic GFR-binding peptide
  MOD_RES (2)..(4)..(35)..(36): Xaa is C or S
SXKXSKVVMRYKKLVKPTRGVFYLISIANLDQPVXXPSASA

SEQ ID NO: 3918 - protein, 32 aa, Artificial Sequence
  Non-cyclic GFR-binding peptide
  MOD_RES (11)..(12)..(13)..(14)..(15): Xaa is A or G
  MOD_RES (16)..(17)..(18)..(19): Xaa is A or G or absent
SKVVMRYKKLXXXXXXXXXFYLISIANLDQPV

SEQ ID NO: 3919 - protein, 38 aa, Artificial Sequence
  Non-cyclic GFR-binding peptide
  MOD_RES (33)..(34): Xaa is C or S
EAVSMGERHKRLTPVGMDDYYLVSTASLKTPVXXAKGV

SEQ ID NO: 3920 - protein, 34 aa, Artificial Sequence
  Non-cyclic GFR-binding peptide
  MOD_RES (31)..(32): Xaa is C or S
SKVVMYHYKLVKPTRGVKYLISIPSLDQPVXXPS

SEQ ID NO: 3921 - protein, 37 aa, Artificial Sequence
  Non-cyclic GFR-binding peptide
  MOD_RES (1)..(3)..(37): Xaa is C or S
  MOD_RES (15)..(16)..(17)..(18)..(19): Xaa is A or G
  MOD_RES (20)..(21)..(22)..(23): Xaa is A or G or absent
XGXAKVVMNRYKKLXXXXXXXXXFYLVSIANLKTPAX

SEQ ID NO: 3922 - protein, 35 aa, Artificial Sequence
  Non-cyclic GFR-binding peptide
  MOD_RES (1)..(3): Xaa is C or S
  MOD_RES (14)..(15)..(16)..(17)..(18): Xaa is A or G
  MOD_RES (19)..(20)..(21)..(22): Xaa is A or G or absent
XKXSKVVMRHKRLXXXXXXXXXYYLISTASLDQPV

SEQ ID NO: 3923 - protein, 38 aa, Artificial Sequence
  Non-cyclic GFR-binding peptide
  MOD_RES (2)..(36)..(37): Xaa is C or S
  MOD_RES (14)..(15)..(16)..(17)..(18): Xaa is A or G
  MOD_RES (19)..(20)..(21)..(22): Xaa is A or G or absent
GXGEVVMDRYKKLXXXXXXXXXFYLMSIANLETPVXXA

SEQ ID NO: 3924 - protein, 36 aa, Artificial Sequence
  Non-cyclic GFR-binding peptide
  MOD_RES (35)..(36): Xaa is C or S
  MOD_RES (13)..(14)..(15)..(16)..(17): Xaa is A or G
  MOD_RES (18)..(19)..(20)..(21): Xaa is A or G or absent
EAVSMGERHKRLXXXXXXXXXYYLVSTASLKTPVXX

SEQ ID NO: 3925 - protein, 41 aa, Artificial Sequence
  Non-cyclic GFR-binding peptide
  MOD_RES (2)..(4)..(41): Xaa is C or S
EXKXALHDELTRHKRLFIPKKRVIEYYLVSTASLQVQTPRX

SEQ ID NO: 3926 - protein, 38 aa, Artificial Sequence
  Non-cyclic GFR-binding peptide
  MOD_RES (1)..(35)..(36): Xaa is C or S
  MOD_RES (13)..(14)..(15)..(16)..(17): Xaa is A or G
  MOD_RES (18)..(19)..(20)..(21): Xaa is A or G or absent
XGEVVMDRHKRLXXXXXXXXXYYLMSTASLETPVXXAK

SEQ ID NO: 3927 - protein, 33 aa, Artificial Sequence
  Non-cyclic GFR-binding peptide
  MOD_RES (33)..(33): Xaa is C or S
  MOD_RES (11)..(12)..(13)..(14)..(15): Xaa is A or G
  MOD_RES (16)..(17)..(18)..(19): Xaa is A or G or absent
SKVVMRYKKLXXXXXXXXXFYLISIANLDQPVX

SEQ ID NO: 3928 - protein, 38 aa, Artificial Sequence
  Non-cyclic GFR-binding peptide
  MOD_RES (2)..(36)..(37): Xaa is C or S
  MOD_RES (14)..(15)..(16)..(17)..(18): Xaa is A or G
  MOD_RES (19)..(20)..(21)..(22): Xaa is A or G or absent
GXSRVVMNRHKRLXXXXXXXXXYYLVSTASLKTPAXXP

SEQ ID NO: 3929 - protein, 36 aa, Artificial Sequence
  Non-cyclic GFR-binding peptide
  MOD_RES (2)..(35)..(36): Xaa is C or S
  MOD_RES (13)..(14)..(15)..(16)..(17): Xaa is A or G
  MOD_RES (18)..(19)..(20)..(21): Xaa is A or G or absent
KXSKVVMYHYKLXXXXXXXXXKYLISIPSLDQPVXX

SEQ ID NO: 3930 - protein, 35 aa, Artificial Sequence
  Non-cyclic GFR-binding peptide
  MOD_RES (2)..(2): Xaa is C or S
  MOD_RES (14)..(15)..(16)..(17)..(18): Xaa is A or G
  MOD_RES (19)..(20)..(21)..(22): Xaa is A or G or absent
GXAKVVMNQYNKLXXXXXXXXXLYLVSIASLKTPA

SEQ ID NO: 3931 - protein, 37 aa, Artificial Sequence
  Non-cyclic GFR-binding peptide
  MOD_RES (1)..(35)..(36): Xaa is C or S
  MOD_RES (13)..(14)..(15)..(16)..(17): Xaa is A or G
  MOD_RES (18)..(19)..(20)..(21): Xaa is A or G or absent
XGEVVMERYKKLXXXXXXXXXFYLMSIANLETPVXXA

SEQ ID NO: 3932 - protein, 38 aa, Artificial Sequence
  Non-cyclic GFR-binding peptide
  MOD_RES (1)..(32)..(33): Xaa is C or S
XSRVIMRHKRLVKPKRGVYYLISTASLAQPVXXPAASA

SEQ ID NO: 3933 - protein, 30 aa, Artificial Sequence
  Non-cyclic GFR-binding peptide
SKVIMYHYKLIKPTKGIKYLISIPSLDQSV

SEQ ID NO: 3934 - protein, 36 aa, Artificial Sequence
  Non-cyclic GFR-binding peptide
  MOD_RES (36)..(36): Xaa is C or S
LHDELTRYKKLFIPKKRVIEFYLVSIANLQVQTPRX

SEQ ID NO: 3935 - protein, 32 aa, Artificial Sequence
  Non-cyclic GFR-binding peptide
  MOD_RES (1)..(32): Xaa is C or S
XSRVIMRYKKLVKPKRGVFYLISIANLAQPVX

SEQ ID NO: 3936 - protein, 31 aa, Artificial Sequence
  Non-cyclic GFR-binding peptide
  MOD_RES (1)..(1): Xaa is C or S
XSRVIMRYKKLVKPKRGVFYLISIANLAQPV

SEQ ID NO: 3937 - protein, 41 aa, Artificial Sequence
  Non-cyclic GFR-binding peptide
  MOD_RES (1)..(38): Xaa is C or S
  MOD_RES (14)..(15)..(16)..(17)..(18): Xaa is A or G
  MOD_RES (19)..(20)..(21)..(22): Xaa is A or G or absent
XALHDELTRYKKLXXXXXXXXXFYLVSIANLQVQTPRXQVN

SEQ ID NO: 3938 - protein, 37 aa, Artificial Sequence
  Non-cyclic GFR-binding peptide
  MOD_RES (2)..(36)..(37): Xaa is C or S
  MOD_RES (14)..(15)..(16)..(17)..(18): Xaa is A or G
  MOD_RES (19)..(20)..(21)..(22): Xaa is A or G or absent
GXGEVVMDRYKKLXXXXXXXXXFYLMSIANLETPVXX

SEQ ID NO: 3939 - protein, 36 aa, Artificial Sequence
  Non-cyclic GFR-binding peptide
  MOD_RES (2)..(4)..(35)..(36): Xaa is C or S
SXKXSKVVMYHYKLVKPTRGVKYLISIPSLDQPVXX

SEQ ID NO: 3940 - protein, 35 aa, Artificial Sequence
  Non-cyclic GFR-binding peptide
  MOD_RES (2)..(4)..(35): Xaa is C or S
SXKXSKVIMRHKRLIKPTKGIYYLISTASLDQSVX

SEQ ID NO: 3941 - protein, 40 aa, Artificial Sequence
  Non-cyclic GFR-binding peptide
  MOD_RES (1)..(3)..(34)..(35): Xaa is C or S
XKXSKVVMRYKKLVKPTRGVFYLISIANLDQPVXXPSASA

SEQ ID NO: 3942 - protein, 38 aa, Artificial Sequence
  Non-cyclic GFR-binding peptide
  MOD_RES (1)..(34)..(35): Xaa is C or S
  MOD_RES (12)..(13)..(14)..(15)..(16): Xaa is A or G
  MOD_RES (17)..(18)..(19)..(20): Xaa is A or G or absent
XSKVIMRYKKLXXXXXXXXXFYLISIANLDQSVXXPSA

SEQ ID NO: 3943 - protein, 37 aa, Artificial Sequence
  Non-cyclic GFR-binding peptide
  MOD_RES (2)..(4)..(35)..(36): Xaa is C or S
SXKXSRVIMRYKKLVKPKRGVFYLISIANLAQPVXXP

SEQ ID NO: 3944 - protein, 42 aa, Artificial Sequence
  Non-cyclic GFR-binding peptide
  MOD_RES (1)..(38): Xaa is C or S
  MOD_RES (14)..(15)..(16)..(17)..(18): Xaa is A or G
  MOD_RES (19)..(20)..(21)..(22): Xaa is A or G or absent
XALHDELTRYKKLXXXXXXXXXFYLVSIANLQVQTPRXQVNR

SEQ ID NO: 3945 - protein, 35 aa, Artificial Sequence
  Non-cyclic GFR-binding peptide
  MOD_RES (1)..(3)..(34)..(35): Xaa is C or S
XKXSKVIMYHYKLIKPTKGIKYLISIPSLDQSVXX

SEQ ID NO: 3946 - protein, 42 aa, Artificial Sequence
  Non-cyclic GFR-binding peptide
  MOD_RES (2)..(4)..(37)..(38): Xaa is C or S
  MOD_RES (15)..(16)..(17)..(18)..(19): Xaa is A or G
  MOD_RES (20)..(21)..(22)..(23): Xaa is A or G or absent
SXKXSRVIMRYKKLXXXXXXXXXFYLISIANLAQPVXXPAAS

SEQ ID NO: 3947 - protein, 36 aa, Artificial Sequence
  Non-cyclic GFR-binding peptide
  MOD_RES (2)..(4)..(36): Xaa is C or S
RXGXGEVVMDRHKRLVVKENEDYYLMSTASLETPVX

SEQ ID NO: 3948 - protein, 38 aa, Artificial Sequence
  Non-cyclic GFR-binding peptide
  MOD_RES (1)..(33)..(34): Xaa is C or S
XAKVVMNRYKKLIVNNSSDFYLVSIANLKTPAXXAKPV

SEQ ID NO: 3949 - protein, 39 aa, Artificial Sequence
  Non-cyclic GFR-binding peptide
  MOD_RES (1)..(3)..(37): Xaa is C or S
  MOD_RES (15)..(16)..(17)..(18)..(19): Xaa is A or G
  MOD_RES (20)..(21)..(22)..(23): Xaa is A or G or absent
XGXSRVVMNRHKRLXXXXXXXXXYYLVSTASLKTPAXTP

SEQ ID NO: 3950 - protein, 43 aa, Artificial Sequence
  Non-cyclic GFR-binding peptide
  MOD_RES (1)..(3)..(37): Xaa is C or S
  MOD_RES (15)..(16)..(17)..(18)..(19): Xaa is A or G
  MOD_RES (20)..(21)..(22)..(23): Xaa is A or G or absent
XGXSRVVMNQYNKLXXXXXXXXXLYLVSIASLKTPAXTPKTVH

SEQ ID NO: 3951 - protein, 30 aa, Artificial Sequence; identical to SEQ ID NO: 1840
  Non-cyclic GFR-binding peptide

SEQ ID NO: 3952 - protein, 33 aa, Artificial Sequence
  Non-cyclic GFR-binding peptide
  MOD_RES (11)..(12)..(13)..(14)..(15): Xaa is A or G
  MOD_RES (16)..(17)..(18)..(19): Xaa is A or G or absent
HDELTRYKKLXXXXXXXXXFYLVSIANLQVQTP

SEQ ID NO: 3953 - protein, 37 aa, Artificial Sequence
  Non-cyclic GFR-binding peptide
  MOD_RES (1)..(3)..(35)..(36): Xaa is C or S
XGXGEVVMDRHKRLVVKENEDYYLMSTASLETPVXXA

SEQ ID NO: 3954 - protein, 37 aa, Artificial Sequence
  Non-cyclic GFR-binding peptide
  MOD_RES (2)..(2): Xaa is C or S
  MOD_RES (15)..(16)..(17)..(18)..(19): Xaa is A or G
  MOD_RES (20)..(21)..(22)..(23): Xaa is A or G or absent
KXALHDELTRHKRLXXXXXXXXXYYLVSTASLQVQTP

SEQ ID NO: 3955 - protein, 36 aa, Artificial Sequence
  Non-cyclic GFR-binding peptide
  MOD_RES (36)..(36): Xaa is C or S
  MOD_RES (12)..(13)..(14)..(15)..(16): Xaa is A or G
  MOD_RES (17)..(18)..(19)..(20): Xaa is A or G or absent
LHDELTRHKRLXXXXXXXXXYYLVSTASLQVQTPRX

SEQ ID NO: 3956 - protein, 44 aa, Artificial Sequence
  Non-cyclic GFR-binding peptide
  MOD_RES (2)..(4)..(38)..(39): Xaa is C or S
  MOD_RES (16)..(17)..(18)..(19)..(20): Xaa is A or G
  MOD_RES (21)..(22)..(23)..(24): Xaa is A or G or absent
HXGXARVVMNQYNKLXXXXXXXXXLYLVSIASLQTPAXXPKPVT

SEQ ID NO: 3957 - protein, 41 aa, Artificial Sequence
  Non-cyclic GFR-binding peptide
  MOD_RES (1)..(3)..(38)..(39): Xaa is C or S
  MOD_RES (16)..(17)..(18)..(19)..(20): Xaa is A or G
  MOD_RES (21)..(22)..(23)..(24): Xaa is A or G or absent
XGXEAVSMGERHKRLXXXXXXXXXYYLVSTASLKTPVXXAK

SEQ ID NO: 3958 - protein, 38 aa, Artificial Sequence
  Non-cyclic GFR-binding peptide
  MOD_RES (2)..(35)..(36): Xaa is C or S
GXEAVSMGERHKRLTPVGMDDYYLVSTASLKTPVXXAK

SEQ ID NO: 3959 - protein, 37 aa, Artificial Sequence
  Non-cyclic GFR-binding peptide
  MOD_RES (2)..(35)..(36): Xaa is C or S
  MOD_RES (13)..(14)..(15)..(16)..(17): Xaa is A or G
  MOD_RES (18)..(19)..(20)..(21): Xaa is A or G or absent
KXSRVIMYHYKLXXXXXXXXXKYLISIPSLAQPVXXP

SEQ ID NO: 3960 - protein, 39 aa, Artificial Sequence
  Non-cyclic GFR-binding peptide
  MOD_RES (2)..(36)..(37): Xaa is C or S
  MOD_RES (14)..(15)..(16)..(17)..(18): Xaa is A or G
  MOD_RES (19)..(20)..(21)..(22): Xaa is A or G or absent
GXGEVVMDRHKRLXXXXXXXXXYYLMSTASLETPVXXAK

SEQ ID NO: 3961 - protein, 31 aa, Artificial Sequence
  Non-cyclic GFR-binding peptide
  MOD_RES (31)..(31): Xaa is C or S
SKVIMRHKRLIKPTKGIYYLISTASLDQSVX

SEQ ID NO: 3962 - protein, 38 aa, Artificial Sequence
  Non-cyclic GFR-binding peptide
  MOD_RES (1)..(33): Xaa is C or S
XSRVVMNYHYKLIVNSSDDKYLVSIPSLKTPAXTPKTV

SEQ ID NO: 3963 - protein, 35 aa, Artificial Sequence
  Non-cyclic GFR-binding peptide
  MOD_RES (2)..(4)..(35): Xaa is C or S
SXKXSKVVMRYKKLVKPTRGVFYLISIANLDQPVX

SEQ ID NO: 3964 - protein, 35 aa, Artificial Sequence
  Non-cyclic GFR-binding peptide
  MOD_RES (1)..(3)..(35): Xaa is C or S
XGXGEVVMEYHYKLVVKDYEDKYLMSIPSLETPVX

SEQ ID NO: 3965 - protein, 35 aa, Artificial Sequence
  Non-cyclic GFR-binding peptide
  MOD_RES (2)..(35): Xaa is C or S
GXEAVSMGEQYNKLTPVGMDDLYLVSIASLKTPVX

SEQ ID NO: 3966 - protein, 37 aa, Artificial Sequence
  Non-cyclic GFR-binding peptide
  MOD_RES (31)..(32): Xaa is C or S
EVVMDRHKRLVVKENEDYYLMSTASLETPVXXAKPIK

SEQ ID NO: 3967 - protein, 41 aa, Artificial Sequence
  Non-cyclic GFR-binding peptide
  MOD_RES (1)..(38): Xaa is C or S
XALHDELTYHYKLFIPKKRVIEKYLVSIPSLQVQTPRXQVN

SEQ ID NO: 3968 - protein, 41 aa, Artificial Sequence
  Non-cyclic GFR-binding peptide
  MOD_RES (2)..(4)..(36)..(37): Xaa is C or S
RXGXGEVVMERYKKLVVKDYEDFYLMSIANLETPVXXAKPI

SEQ ID NO: 3969 - protein, 39 aa, Artificial Sequence
  Non-cyclic GFR-binding peptide
  MOD_RES (34)..(35): Xaa is C or S
  MOD_RES (12)..(13)..(14)..(15)..(16): Xaa is A or G
  MOD_RES (17)..(18)..(19)..(20): Xaa is A or G or absent
SRVVMNYHYKLXXXXXXXXXKYLVSIPSLKTPAXXPKPV

SEQ ID NO: 3970 - protein, 37 aa, Artificial Sequence
  Non-cyclic GFR-binding peptide
  MOD_RES (2)..(4)..(35)..(36): Xaa is C or S
SXKXSKVVMRHKRLVKPTRGVYYLISTASLDQPVXXP

SEQ ID NO: 3971 - protein, 44 aa, Artificial Sequence
  Non-cyclic GFR-binding peptide
  MOD_RES (2)..(4)..(41): Xaa is C or S
EXKXALHDELTRHKRLFIPKKRVIEYYLVSTASLQVQTPRXQVN

SEQ ID NO: 3972 - protein, 41 aa, Artificial Sequence
  Non-cyclic GFR-binding peptide
  MOD_RES (1)..(38): Xaa is C or S
  MOD_RES (14)..(15)..(16)..(17)..(18): Xaa is A or G
  MOD_RES (19)..(20)..(21)..(22): Xaa is A or G or absent
XALHDELTYHYKLXXXXXXXXXKYLVSIPSLQVQTPRXQVN

SEQ ID NO: 3973 - protein, 39 aa, Artificial Sequence
  Non-cyclic GFR-binding peptide
  MOD_RES (33)..(33): Xaa is C or S
  MOD_RES (11)..(12)..(13)..(14)..(15): Xaa is A or G
  MOD_RES (16)..(17)..(18)..(19): Xaa is A or G or absent
RVVMNYHYKLXXXXXXXXXKYLVSIPSLKTPAXTPKTVH

SEQ ID NO: 3974 - protein, 37 aa, Artificial Sequence
  Non-cyclic GFR-binding peptide
  MOD_RES (34)..(34): Xaa is C or S
  MOD_RES (12)..(13)..(14)..(15)..(16): Xaa is A or G
  MOD_RES (17)..(18)..(19)..(20): Xaa is A or G or absent
SRVVMNQYNKLXXXXXXXXXLYLVSIASLKTPAXTPK

SEQ ID NO: 3975 - protein, 34 aa, Artificial Sequence
  Non-cyclic GFR-binding peptide
  MOD_RES (1)..(3)..(34): Xaa is C or S
XKXSKVIMYHYKLIKPTKGIKYLISIPSLDQSVX

SEQ ID NO: 3976 - protein, 36 aa, Artificial Sequence
  Non-cyclic GFR-binding peptide
  MOD_RES (2)..(33)..(34): Xaa is C or S
KXSRVIMQYNKLVKPKRGVLYLISIASLAQPVXXPA

SEQ ID NO: 3977 - protein, 36 aa, Artificial Sequence
  Non-cyclic GFR-binding peptide
  MOD_RES (2)..(35)..(36): Xaa is C or S
GXEAVSMGEQYNKLTPVGMDDLYLVSIASLKTPVXX

SEQ ID NO: 3978 - protein, 38 aa, Artificial Sequence
  Non-cyclic GFR-binding peptide
  MOD_RES (35)..(35): Xaa is C or S
  MOD_RES (11)..(12)..(13)..(14)..(15): Xaa is A or G
  MOD_RES (16)..(17)..(18)..(19): Xaa is A or G or absent
HDELTYHYKLXXXXXXXXXKYLVSIPSLQVQTPRXQVN

SEQ ID NO: 3979 - protein, 39 aa, Artificial Sequence
  Non-cyclic GFR-binding peptide
  MOD_RES (35)..(35): Xaa is C or S
  MOD_RES (11)..(12)..(13)..(14)..(15): Xaa is A or G
  MOD_RES (16)..(17)..(18)..(19): Xaa is A or G or absent
HDELTYHYKLXXXXXXXXXKYLVSIPSLQVQTPRXQVNR

SEQ ID NO: 3980 - protein, 35 aa, Artificial Sequence
  Non-cyclic GFR-binding peptide
ALHDELTRYKKLFIPKKRVIEFYLVSIANLQVQTP

SEQ ID NO: 3981 - protein, 42 aa, Artificial Sequence
  Non-cyclic GFR-binding peptide
  MOD_RES (1)..(38): Xaa is C or S
XALHDELTRYKKLFIPKKRVIEFYLVSIANLQVQTPRXQVNR

SEQ ID NO: 3982 - protein, 42 aa, Artificial Sequence
  Non-cyclic GFR-binding peptide
  MOD_RES (1)..(3)..(37)..(38): Xaa is C or S
  MOD_RES (15)..(16)..(17)..(18)..(19): Xaa is A or G
  MOD_RES (20)..(21)..(22)..(23): Xaa is A or G or absent
XGXARVVMNQYNKLXXXXXXXXXLYLVSIASLQTPAXXPKPV

SEQ ID NO: 3983 - protein, 34 aa, Artificial Sequence
  Non-cyclic GFR-binding peptide
  MOD_RES (1)..(32)..(33): Xaa is C or S
XSKVVMQYNKLVKPTRGVLYLISIASLDQPVXXP

SEQ ID NO: 3984 - protein, 40 aa, Artificial Sequence
  Non-cyclic GFR-binding peptide
  MOD_RES (36)..(36): Xaa is C or S
  MOD_RES (12)..(13)..(14)..(15)..(16): Xaa is A or G
  MOD_RES (17)..(18)..(19)..(20): Xaa is A or G or absent
LHDELTRHKRLXXXXXXXXXYYLVSTASLQVQTPRXQVNR

SEQ ID NO: 3985 - protein, 42 aa, Artificial Sequence
  Non-cyclic GFR-binding peptide
  MOD_RES (2)..(4)..(37)..(38): Xaa is C or S
RXGXEAVSMGERYKKLTPVGMDDFYLVSIANLKTPVXXAKGV

SEQ ID NO: 3986 - protein, 39 aa, Artificial Sequence
  Non-cyclic GFR-binding peptide
  MOD_RES (2)..(36)..(37): Xaa is C or S
  MOD_RES (14)..(15)..(16)..(17)..(18): Xaa is A or G
  MOD_RES (19)..(20)..(21)..(22): Xaa is A or G or absent
GXARVVMNQYNKLXXXXXXXXXLYLVSIASLQTPAXXPK

SEQ ID NO: 3987 - protein, 36 aa, Artificial Sequence
  Non-cyclic GFR-binding peptide
  MOD_RES (1)..(35): Xaa is C or S
  MOD_RES (13)..(14)..(15)..(16)..(17): Xaa is A or G
  MOD_RES (18)..(19)..(20)..(21): Xaa is A or G or absent
XSRVVMNYHYKLXXXXXXXXXKYLVSIPSLKTPAXT

SEQ ID NO: 3988 - protein, 34 aa, Artificial Sequence
  Non-cyclic GFR-binding peptide
  MOD_RES (1)..(1): Xaa is C or S
  MOD_RES (13)..(14)..(15)..(16)..(17): Xaa is A or G
  MOD_RES (18)..(19)..(20)..(21): Xaa is A or G or absent
XGEVVMERYKKLXXXXXXXXXFYLMSIANLETPV

SEQ ID NO: 3989 - protein, 39 aa, Artificial Sequence
  Non-cyclic GFR-binding peptide
  MOD_RES (1)..(33): Xaa is C or S
XSRVVMNQYNKLIVNSSDDLYLVSIASLKTPAXTPKTVH

SEQ ID NO: 3990 - protein, 37 aa, Artificial Sequence
  Non-cyclic GFR-binding peptide
  MOD_RES (2)..(4)..(36): Xaa is C or S
HXGXSRVVMNRHKRLIVNSSDDYYLVSTASLKTPAXT

SEQ ID NO: 3991 - protein, 40 aa, Artificial Sequence
  Non-cyclic GFR-binding peptide
  MOD_RES (34)..(34): Xaa is C or S
  MOD_RES (12)..(13)..(14)..(15)..(16): Xaa is A or G
  MOD_RES (17)..(18)..(19)..(20): Xaa is A or G or absent
SRVVMNQYNKLXXXXXXXXXLYLVSIASLKTPAXTPKTVH

SEQ ID NO: 3992 - protein, 33 aa, Artificial Sequence
  Non-cyclic GFR-binding peptide
  MOD_RES (31)..(31): Xaa is C or S
RVVMNYHYKLIVNSSDDKYLVSIPSLKTPAXTP

SEQ ID NO: 3993 - protein, 44 aa, Artificial Sequence
  Non-cyclic GFR-binding peptide
  MOD_RES (2)..(4)..(38)..(39): Xaa is C or S
  MOD_RES (16)..(17)..(18)..(19)..(20): Xaa is A or G
  MOD_RES (21)..(22)..(23)..(24): Xaa is A or G or absent
HXGXSRVVMNYHYKLXXXXXXXXXKYLVSIPSLKTPAXXPKPVY

SEQ ID NO: 3994 - protein, 39 aa, Artificial Sequence
  Non-cyclic GFR-binding peptide
  MOD_RES (2)..(33)..(34): Xaa is C or S
KXSRVIMQYNKLVKPKRGVLYLISIASLAQPVXXPAASA

SEQ ID NO: 3995 - protein, 35 aa, Artificial Sequence
  Non-cyclic GFR-binding peptide
  MOD_RES (1)..(3)..(34)..(35): Xaa is C or S
XKXSRVIMRHKRLVKPKRGVYYLISTASLAQPVXX

SEQ ID NO: 3996 - protein, 44 aa, Artificial Sequence
  Non-cyclic GFR-binding peptide
  MOD_RES (2)..(4)..(38)..(39): Xaa is C or S
  MOD_RES (16)..(17)..(18)..(19)..(20): Xaa is A or G
  MOD_RES (21)..(22)..(23)..(24): Xaa is A or G or absent
HXGXSRVVMNRHKRLXXXXXXXXXYYLVSTASLKTPAXXPKPVY

SEQ ID NO: 3997 - protein, 37 aa, Artificial Sequence
  Non-cyclic GFR-binding peptide
  MOD_RES (1)..(3)..(37): Xaa is C or S
  MOD_RES (15)..(16)..(17)..(18)..(19): Xaa is A or G
  MOD_RES (20)..(21)..(22)..(23): Xaa is A or G or absent
XGXARVVMNQYNKLXXXXXXXXXLYLVSIASLQTPAX

SEQ ID NO: 3998 - protein, 38 aa, Artificial Sequence
  Non-cyclic GFR-binding peptide
  MOD_RES (36)..(36): Xaa is C or S
  MOD_RES (12)..(13)..(14)..(15)..(16): Xaa is A or G
  MOD_RES (17)..(18)..(19)..(20): Xaa is A or G or absent
LHDELTRYKKLXXXXXXXXXFYLVSIANLQVQTPRXQV

SEQ ID NO: 3999 - protein, 43 aa, Artificial Sequence
  Non-cyclic GFR-binding peptide
  MOD_RES (1)..(3)..(37)..(38): Xaa is C or S
  MOD_RES (15)..(16)..(17)..(18)..(19): Xaa is A or G
  MOD_RES (20)..(21)..(22)..(23): Xaa is A or G or absent
XGXGEVVMEYHYKLXXXXXXXXXKYLMSIPSLETPVXXAKPIS

SEQ ID NO: 4000 - protein, 40 aa, Artificial Sequence
  Non-cyclic GFR-binding peptide
  MOD_RES (2)..(39): Xaa is C or S
  MOD_RES (15)..(16)..(17)..(18)..(19): Xaa is A or G
  MOD_RES (20)..(21)..(22)..(23): Xaa is A or G or absent
KXALHDELTYHYKLXXXXXXXXXKYLVSIPSLQVQTPRXQ

SEQ ID NO: 4001 - protein, 40 aa, Artificial Sequence
  Non-cyclic GFR-binding peptide
  MOD_RES (2)..(35)..(36): Xaa is C or S
  MOD_RES (13)..(14)..(15)..(16)..(17): Xaa is A or G
  MOD_RES (18)..(19)..(20)..(21): Xaa is A or G or absent
KXSKVVMYHYKLXXXXXXXXXKYLISIPSLDQPVXXPSAS

SEQ ID NO: 4002 - protein, 40 aa, Artificial Sequence
  Non-cyclic GFR-binding peptide
  MOD_RES (2)..(4)..(36)..(37): Xaa is C or S
HXGXAKVVMNQYNKLIVNNSSDLYLVSIASLKTPAXXAKP

SEQ ID NO: 4003 - protein, 37 aa, Artificial Sequence
  Non-cyclic GFR-binding peptide
  MOD_RES (34)..(35): Xaa is C or S
  MOD_RES (12)..(13)..(14)..(15)..(16): Xaa is A or G
  MOD_RES (17)..(18)..(19)..(20): Xaa is A or G or absent
ARVVMNYHYKLXXXXXXXXXKYLVSIPSLQTPAXXPK

SEQ ID NO: 4004 - protein, 38 aa, Artificial Sequence
  Non-cyclic GFR-binding peptide
  MOD_RES (33)..(34): Xaa is C or S
  MOD_RES (11)..(12)..(13)..(14)..(15): Xaa is A or G
  MOD_RES (16)..(17)..(18)..(19): Xaa is A or G or absent
EVVMERYKKLXXXXXXXXXFYLMSIANLETPVXXAKPI

SEQ ID NO: 4005 - protein, 33 aa, Artificial Sequence
  Non-cyclic GFR-binding peptide
  MOD_RES (2)..(33): Xaa is C or S
KXSKVVMRYKKLVKPTRGVFYLISIANLDQPVX

SEQ ID NO: 4006 - protein, 39 aa, Artificial Sequence
  Non-cyclic GFR-binding peptide
  MOD_RES (2)..(4)..(38)..(39): Xaa is C or S
  MOD_RES (16)..(17)..(18)..(19)..(20): Xaa is A or G
  MOD_RES (21)..(22)..(23)..(24): Xaa is A or G or absent
RXGXGEVVMERYKKLXXXXXXXXXFYLMSIANLETPVXX

SEQ ID NO: 4007 - protein, 33 aa, Artificial Sequence
  Non-cyclic GFR-binding peptide
  MOD_RES (2)..(33): Xaa is C or S
KXSKVIMRYKKLIKPTKGIFYLISIANLDQSVX

SEQ ID NO: 4008 - protein, 37 aa, Artificial Sequence
  Non-cyclic GFR-binding peptide
  MOD_RES (2)..(36)..(37): Xaa is C or S
  MOD_RES (14)..(15)..(16)..(17)..(18): Xaa is A or G
  MOD_RES (19)..(20)..(21)..(22): Xaa is A or G or absent
GXGEVVMERYKKLXXXXXXXXXFYLMSIANLETPVXX

SEQ ID NO: 4009 - protein, 36 aa, Artificial Sequence
  Non-cyclic GFR-binding peptide
  MOD_RES (2)..(33)..(34): Xaa is C or S
KXSKVVMRHKRLVKPTRGVYYLISTASLDQPVXXPS

SEQ ID NO: 4010 - protein, 40 aa, Artificial Sequence
  Non-cyclic GFR-binding peptide
  MOD_RES (2)..(34): Xaa is C or S
GXSRVVMNYHYKLIVNSSDDKYLVSIPSLKTPAXTPKTVH

SEQ ID NO: 4011 - protein, 36 aa, Artificial Sequence
  Non-cyclic GFR-binding peptide
  MOD_RES (34)..(35): Xaa is C or S
  MOD_RES (12)..(13)..(14)..(15)..(16): Xaa is A or G
  MOD_RES (17)..(18)..(19)..(20): Xaa is A or G or absent
GEVVMDYHYKLXXXXXXXXXKYLMSIPSLETPVXXA

SEQ ID NO: 4012 - protein, 38 aa, Artificial Sequence
  Non-cyclic GFR-binding peptide
  MOD_RES (1)..(35)..(36): Xaa is C or S
  MOD_RES (13)..(14)..(15)..(16)..(17): Xaa is A or G
  MOD_RES (18)..(19)..(20)..(21): Xaa is A or G or absent
XSRVVMNQYNKLXXXXXXXXXLYLVSIASLKTPAXXPK

SEQ ID NO: 4013 - protein, 36 aa, Artificial Sequence
  Non-cyclic GFR-binding peptide
  MOD_RES (2)..(4)..(35)..(36): Xaa is C or S
SXKXSKVVMQYNKLVKPTRGVLYLISIASLDQPVXX

SEQ ID NO: 4014 - protein, 40 aa, Artificial Sequence
  Non-cyclic GFR-binding peptide
  MOD_RES (2)..(4)..(36)..(37): Xaa is C or S
RXGXGEVVMERYKKLVVKDYEDFYLMSIANLETPVXXAKP

SEQ ID NO: 4015 - protein, 40 aa, Artificial Sequence
  Non-cyclic GFR-binding peptide
  MOD_RES (2)..(35)..(36): Xaa is C or S
GXEAVSMGERHKRLTPVGMDDYYLVSTASLKTPVXXAKGV

SEQ ID NO: 4016 - protein, 32 aa, Artificial Sequence
  Non-cyclic GFR-binding peptide
  MOD_RES (31)..(32): Xaa is C or S
EVVMERYKKLVVKDYEDFYLMSIANLETPVXX

SEQ ID NO: 4017 - protein, 36 aa, Artificial Sequence
  Non-cyclic GFR-binding peptide
  MOD_RES (35)..(35): Xaa is C or S
  MOD_RES (11)..(12)..(13)..(14)..(15): Xaa is A or G
  MOD_RES (16)..(17)..(18)..(19): Xaa is A or G or absent
HDELTRYKKLXXXXXXXXXFYLVSIANLQVQTPRXQ

SEQ ID NO: 4018 - protein, 33 aa, Artificial Sequence
  Non-cyclic GFR-binding peptide
  MOD_RES (33)..(33): Xaa is C or S
  MOD_RES (11)..(12)..(13)..(14)..(15): Xaa is A or G
  MOD_RES (16)..(17)..(18)..(19): Xaa is A or G or absent
SKVIMQYNKLXXXXXXXXXLYLISIASLDQSVX

SEQ ID NO: 4019 - protein, 41 aa, Artificial Sequence
  Non-cyclic GFR-binding peptide
  MOD_RES (1)..(35)..(36): Xaa is C or S
  MOD_RES (13)..(14)..(15)..(16)..(17): Xaa is A or G
  MOD_RES (18)..(19)..(20)..(21): Xaa is A or G or absent
XARVVMNYHYKLXXXXXXXXXKYLVSIPSLQTPAXXPKPVT

SEQ ID NO: 4020 - protein, 36 aa, Artificial Sequence
  Non-cyclic GFR-binding peptide
  MOD_RES (1)..(34)..(35): Xaa is C or S
XEAVSMGERHKRLTPVGMDDYYLVSTASLKTPVXXA

SEQ ID NO: 4021 - protein, 32 aa, Artificial Sequence
  Non-cyclic GFR-binding peptide
  MOD_RES (1)..(1): Xaa is C or S
XGEVVMERYKKLVVKDYEDFYLMSIANLETPV

SEQ ID NO: 4022 - protein, 30 aa, Artificial Sequence; identical to SEQ ID NO: 1904
  Non-cyclic GFR-binding peptide

SEQ ID NO: 4023 - protein, 39 aa, Artificial Sequence
  Non-cyclic GFR-binding peptide
  MOD_RES (2)..(33)..(34): Xaa is C or S
KXSKVVMRHKRLVKPTRGVYYLISTASLDQPVXXPSASA

SEQ ID NO: 4024 - protein, 38 aa, Artificial Sequence
  Non-cyclic GFR-binding peptide
  MOD_RES (1)..(3)..(35)..(36): Xaa is C or S
XGXGEVVMDYHYKLVVKENEDKYLMSIPSLETPVXXAK

SEQ ID NO: 4025 - protein, 41 aa, Artificial Sequence
  Non-cyclic GFR-binding peptide
  MOD_RES (1)..(35): Xaa is C or S
  MOD_RES (13)..(14)..(15)..(16)..(17): Xaa is A or G
  MOD_RES (18)..(19)..(20)..(21): Xaa is A or G or absent
XSRVVMNYHYKLXXXXXXXXXKYLVSIPSLKTPAXTPKTVH

SEQ ID NO: 4026 - protein, 36 aa, Artificial Sequence
  Non-cyclic GFR-binding peptide
  MOD_RES (1)..(3)..(35)..(36): Xaa is C or S
XGXSRVVMNRHKRLIVNSSDDYYLVSTASLKTPAXX

SEQ ID NO: 4027 - protein, 36 aa, Artificial Sequence
  Non-cyclic GFR-binding peptide
  MOD_RES (2)..(36): Xaa is C or S
  MOD_RES (14)..(15)..(16)..(17)..(18): Xaa is A or G
  MOD_RES (19)..(20)..(21)..(22): Xaa is A or G or absent
GXAKVVMNRYKKLXXXXXXXXXFYLVSIANLKTPAX

SEQ ID NO: 4028 - protein, 38 aa, Artificial Sequence
  Non-cyclic GFR-binding peptide
  MOD_RES (1)..(35): Xaa is C or S
  MOD_RES (13)..(14)..(15)..(16)..(17): Xaa is A or G
  MOD_RES (18)..(19)..(20)..(21): Xaa is A or G or absent
XSRVVMNYHYKLXXXXXXXXXKYLVSIPSLKTPAXTPK

SEQ ID NO: 4029 - protein, 38 aa, Artificial Sequence
  Non-cyclic GFR-binding peptide
  MOD_RES (33)..(34): Xaa is C or S
  MOD_RES (11)..(12)..(13)..(14)..(15): Xaa is A or G
  MOD_RES (16)..(17)..(18)..(19): Xaa is A or G or absent
RVVMNQYNKLXXXXXXXXXLYLVSIASLKTPAXXPKPV

SEQ ID NO: 4030 - protein, 34 aa, Artificial Sequence
  Non-cyclic GFR-binding peptide
  MOD_RES (2)..(34): Xaa is C or S
GXARVVMNRHKRLIVNSSDDYYLVSTASLQTPAX

SEQ ID NO: 4031 - protein, 38 aa, Artificial Sequence
  Non-cyclic GFR-binding peptide
  MOD_RES (2)..(34)..(35): Xaa is C or S
GXAKVVMNRYKKLIVNNSSDFYLVSIANLKTPAXXAKP

SEQ ID NO: 4032 - protein, 37 aa, Artificial Sequence
  Non-cyclic GFR-binding peptide
  MOD_RES (31)..(32): Xaa is C or S
KVVMNYHYKLIVNNSSDKYLVSIPSLKTPAXXAKPVA

SEQ ID NO: 4033 - protein, 33 aa, Artificial Sequence
  Non-cyclic GFR-binding peptide
  MOD_RES (31)..(32): Xaa is C or S
SRVIMYHYKLVKPKRGVKYLISIPSLAQPVXXP

SEQ ID NO: 4034 - protein, 35 aa, Artificial Sequence
  Non-cyclic GFR-binding peptide
  MOD_RES (31)..(32): Xaa is C or S
SRVIMRHKRLVKPKRGVYYLISTASLAQPVXXPAA

SEQ ID NO: 4035 - protein, 38 aa, Artificial Sequence
  Non-cyclic GFR-binding peptide
  MOD_RES (1)..(3)..(36)..(37): Xaa is C or S
  MOD_RES (14)..(15)..(16)..(17)..(18): Xaa is A or G
  MOD_RES (19)..(20)..(21)..(22): Xaa is A or G or absent
XKXSKVVMYHYKLXXXXXXXXXKYLISIPSLDQPVXXP

SEQ ID NO: 4036 - protein, 37 aa, Artificial Sequence
  Non-cyclic GFR-binding peptide
  MOD_RES (2)..(4)..(35)..(36): Xaa is C or S
SXKXSKVIMYHYKLIKPTKGIKYLISIPSLDQSVXXP

SEQ ID NO: 4037 - protein, 36 aa, Artificial Sequence
  Non-cyclic GFR-binding peptide
  MOD_RES (2)..(36): Xaa is C or S
  MOD_RES (14)..(15)..(16)..(17)..(18): Xaa is A or G
  MOD_RES (19)..(20)..(21)..(22): Xaa is A or G or absent
GXSRVVMNQYNKLXXXXXXXXXLYLVSIASLKTPAX

SEQ ID NO: 4038 - protein, 35 aa, Artificial Sequence
  Non-cyclic GFR-binding peptide
  MOD_RES (12)..(13)..(14)..(15)..(16): Xaa is A or G
  MOD_RES (17)..(18)..(19)..(20): Xaa is A or G or absent
LHDELTYHYKLXXXXXXXXXKYLVSIPSLQVQTPR

SEQ ID NO: 4039 - protein, 39 aa, Artificial Sequence
  Non-cyclic GFR-binding peptide
  MOD_RES (1)..(38): Xaa is C or S
  MOD_RES (14)..(15)..(16)..(17)..(18): Xaa is A or G
  MOD_RES (19)..(20)..(21)..(22): Xaa is A or G or absent
XALHDELTYHYKLXXXXXXXXXKYLVSIPSLQVQTPRXQ

SEQ ID NO: 4040 - protein, 33 aa, Artificial Sequence
  Non-cyclic GFR-binding peptide
  MOD_RES (1)..(1): Xaa is C or S
  MOD_RES (12)..(13)..(14)..(15)..(16): Xaa is A or G
  MOD_RES (17)..(18)..(19)..(20): Xaa is A or G or absent
XSKVVMRYKKLXXXXXXXXXFYLISIANLDQPV

SEQ ID NO: 4041 - protein, 39 aa, Artificial Sequence
  Non-cyclic GFR-binding peptide
  MOD_RES (2)..(39): Xaa is C or S
KXALHDELTRHKRLFIPKKRVIEYYLVSTASLQVQTPRX

SEQ ID NO: 4042 - protein, 34 aa, Artificial Sequence
  Non-cyclic GFR-binding peptide
  MOD_RES (1)..(34): Xaa is C or S
  MOD_RES (12)..(13)..(14)..(15)..(16): Xaa is A or G
  MOD_RES (17)..(18)..(19)..(20): Xaa is A or G or absent
XSKVIMRYKKLXXXXXXXXXFYLISIANLDQSVX

SEQ ID NO: 4043 - protein, 36 aa, Artificial Sequence
  Non-cyclic GFR-binding peptide
  MOD_RES (32)..(33): Xaa is C or S
GEVVMEYHYKLVVKDYEDKYLMSIPSLETPVXXAKP

SEQ ID NO: 4044 - protein, 39 aa, Artificial Sequence
  Non-cyclic GFR-binding peptide
  MOD_RES (2)..(33)..(34): Xaa is C or S
KXSKVIMRHKRLIKPTKGIYYLISTASLDQSVXXPSASA

SEQ ID NO: 4045 - protein, 37 aa, Artificial Sequence
  Non-cyclic GFR-binding peptide
  MOD_RES (37)..(37): Xaa is C or S
ALHDELTRHKRLFIPKKRVIEYYLVSTASLQVQTPRX

SEQ ID NO: 4046 - protein, 36 aa, Artificial Sequence
  Non-cyclic GFR-binding peptide
  MOD_RES (2)..(34)..(35): Xaa is C or S
GXGEVVMEYHYKLVVKDYEDKYLMSIPSLETPVXXA

SEQ ID NO: 4047 - protein, 42 aa, Artificial Sequence
  Non-cyclic GFR-binding peptide
  MOD_RES (2)..(4)..(41): Xaa is C or S
  MOD_RES (17)..(18)..(19)..(20)..(21): Xaa is A or G
  MOD_RES (22)..(23)..(24)..(25): Xaa is A or G or absent
EXKXALHDELTRYKKLXXXXXXXXXFYLVSIANLQVQTPRXQ

SEQ ID NO: 4048 - protein, 36 aa, Artificial Sequence
  Non-cyclic GFR-binding peptide
  MOD_RES (1)..(32)..(33): Xaa is C or S
XSKVIMYHYKLIKPTKGIKYLISIPSLDQSVXXPSA

SEQ ID NO: 4049 - protein, 37 aa, Artificial Sequence
  Non-cyclic GFR-binding peptide
  MOD_RES (1)..(3)..(37): Xaa is C or S
  MOD_RES (15)..(16)..(17)..(18)..(19): Xaa is A or G
  MOD_RES (20)..(21)..(22)..(23): Xaa is A or G or absent
XGXGEVVMERHKRLXXXXXXXXXYYLMSTASLETPVX

SEQ ID NO: 4050 - protein, 32 aa, Artificial Sequence
  Non-cyclic GFR-binding peptide
  MOD_RES (11)..(12)..(13)..(14)..(15): Xaa is A or G
  MOD_RES (16)..(17)..(18)..(19): Xaa is A or G or absent
SKVVMQYNKLXXXXXXXXXLYLISIASLDQPV

SEQ ID NO: 4051 - protein, 40 aa, Artificial Sequence
  Non-cyclic GFR-binding peptide
  MOD_RES (2)..(4)..(37)..(38): Xaa is C or S
  MOD_RES (15)..(16)..(17)..(18)..(19): Xaa is A or G
  MOD_RES (20)..(21)..(22)..(23): Xaa is A or G or absent
SXKXSKVVMYHYKLXXXXXXXXXKYLISIPSLDQPVXXPS

SEQ ID NO: 4052 - protein, 35 aa, Artificial Sequence
  Non-cyclic GFR-binding peptide
  MOD_RES (35)..(35): Xaa is C or S
HDELTRYKKLFIPKKRVIEFYLVSIANLQVQTPRX

SEQ ID NO: 4053 - protein, 39 aa, Artificial Sequence
  Non-cyclic GFR-binding peptide
  MOD_RES (1)..(3)..(37)..(38): Xaa is C or S
  MOD_RES (15)..(16)..(17)..(18)..(19): Xaa is A or G
  MOD_RES (20)..(21)..(22)..(23): Xaa is A or G or absent
XGXARVVMNQYNKLXXXXXXXXXLYLVSIASLQTPAXXP

SEQ ID NO: 4054 - protein, 34 aa, Artificial Sequence
  Non-cyclic GFR-binding peptide
  MOD_RES (1)..(32)..(33): Xaa is C or S
XSKVVMRYKKLVKPTRGVFYLISIANLDQPVXXP

SEQ ID NO: 4055 - protein, 38 aa, Artificial Sequence
  Non-cyclic GFR-binding peptide
  MOD_RES (37)..(37): Xaa is C or S
ALHDELTQYNKLFIPKKRVIELYLVSIASLQVQTPRXQ

SEQ ID NO: 4056 - protein, 37 aa, Artificial Sequence
  Non-cyclic GFR-binding peptide
  MOD_RES (2)..(4)..(36)..(37): Xaa is C or S
HXGXAKVVMNYHYKLIVNNSSDKYLVSIPSLKTPAXX

SEQ ID NO: 4057 - protein, 33 aa, Artificial Sequence
  Non-cyclic GFR-binding peptide
  MOD_RES (1)..(1): Xaa is C or S
XEAVSMGEQYNKLTPVGMDDLYLVSIASLKTPV

SEQ ID NO: 4058 - protein, 37 aa, Artificial Sequence
  Non-cyclic GFR-binding peptide
  MOD_RES (2)..(4)..(36)..(37): Xaa is C or S
RXGXGEVVMDRHKRLVVKENEDYYLMSTASLETPVXX

SEQ ID NO: 4059 - protein, 37 aa, Artificial Sequence
  Non-cyclic GFR-binding peptide
  MOD_RES (2)..(4): Xaa is C or S
  MOD_RES (16)..(17)..(18)..(19)..(20): Xaa is A or G
  MOD_RES (21)..(22)..(23)..(24): Xaa is A or G or absent
RXGXGEVVMDRYKKLXXXXXXXXXFYLMSIANLETPV

SEQ ID NO: 4060 - protein, 42 aa, Artificial Sequence
  Non-cyclic GFR-binding peptide
  MOD_RES (2)..(4)..(38)..(39): Xaa is C or S
  MOD_RES (16)..(17)..(18)..(19)..(20): Xaa is A or G
  MOD_RES (21)..(22)..(23)..(24): Xaa is A or G or absent
RXGXGEVVMDRYKKLXXXXXXXXXFYLMSIANLETPVXXAKP

SEQ ID NO: 4061 - protein, 42 aa, Artificial Sequence
  Non-cyclic GFR-binding peptide
  MOD_RES (2)..(36)..(37): Xaa is C or S
  MOD_RES (14)..(15)..(16)..(17)..(18): Xaa is A or G
  MOD_RES (19)..(20)..(21)..(22): Xaa is A or G or absent
GXGEVVMDRYKKLXXXXXXXXXFYLMSIANLETPVXXAKPIK

SEQ ID NO: 4062 - protein, 35 aa, Artificial Sequence
  Non-cyclic GFR-binding peptide
  MOD_RES (31)..(32): Xaa is C or S
SKVVMYHYKLVKPTRGVKYLISIPSLDQPVXXPSA

SEQ ID NO: 4063 - protein, 32 aa, Artificial Sequence
  Non-cyclic GFR-binding peptide
  MOD_RES (32)..(32): Xaa is C or S
ARVVMNYHYKLIVNSSDDKYLVSIPSLQTPAX

SEQ ID NO: 4064 - protein, 40 aa, Artificial Sequence
  Non-cyclic GFR-binding peptide
  MOD_RES (1)..(3)..(35)..(36): Xaa is C or S
XGXSRVVMNYHYKLIVNSSDDKYLVSIPSLKTPAXXPKPV

SEQ ID NO: 4065 - protein, 38 aa, Artificial Sequence
  Non-cyclic GFR-binding peptide
  MOD_RES (37)..(37): Xaa is C or S
ALHDELTRHKRLFIPKKRVIEYYLVSTASLQVQTPRXQ

SEQ ID NO: 4066 - protein, 36 aa, Artificial Sequence
  Non-cyclic GFR-binding peptide
  MOD_RES (13)..(14)..(15)..(16)..(17): Xaa is A or G
  MOD_RES (18)..(19)..(20)..(21): Xaa is A or G or absent
ALHDELTYHYKLXXXXXXXXXKYLVSIPSLQVQTPR

SEQ ID NO: 4067 - protein, 39 aa, Artificial Sequence
  Non-cyclic GFR-binding peptide
  MOD_RES (2)..(35)..(36): Xaa is C or S
GXEAVSMGEQYNKLTPVGMDDLYLVSIASLKTPVXXAKG

SEQ ID NO: 4068 - protein, 39 aa, Artificial Sequence
  Non-cyclic GFR-binding peptide
  MOD_RES (2)..(36): Xaa is C or S
  MOD_RES (14)..(15)..(16)..(17)..(18): Xaa is A or G
  MOD_RES (19)..(20)..(21)..(22): Xaa is A or G or absent
GXSRVVMNQYNKLXXXXXXXXXLYLVSIASLKTPAXTPK

SEQ ID NO: 4069 - protein, 35 aa, Artificial Sequence
  Non-cyclic GFR-binding peptide
  MOD_RES (35)..(35): Xaa is C or S
  MOD_RES (13)..(14)..(15)..(16)..(17): Xaa is A or G
  MOD_RES (18)..(19)..(20)..(21): Xaa is A or G or absent
EAVSMGERYKKLXXXXXXXXXFYLVSIANLKTPVX

SEQ ID NO: 4070 - protein, 36 aa, Artificial Sequence
  Non-cyclic GFR-binding peptide
  MOD_RES (2)..(34): Xaa is C or S
GXSRVVMNQYNKLIVNSSDDLYLVSIASLKTPAXTP

SEQ ID NO: 4071 - protein, 37 aa, Artificial Sequence
  Non-cyclic GFR-binding peptide
  MOD_RES (37)..(37): Xaa is C or S
ALHDELTQYNKLFIPKKRVIELYLVSIASLQVQTPRX

SEQ ID NO: 4072 - protein, 39 aa, Artificial Sequence
  Non-cyclic GFR-binding peptide
  MOD_RES (1)..(33)..(34): Xaa is C or S
XAKVVMNQYNKLIVNNSSDLYLVSIASLKTPAXXAKPVA

SEQ ID NO: 4073 - protein, 39 aa, Artificial Sequence
  Non-cyclic GFR-binding peptide
  MOD_RES (1)..(3)..(36)..(37): Xaa is C or S
XGXEAVSMGERHKRLTPVGMDDYYLVSTASLKTPVXXAK

SEQ ID NO: 4074 - protein, 39 aa, Artificial Sequence
  Non-cyclic GFR-binding peptide
  MOD_RES (2)..(4)..(35)..(36): Xaa is C or S
SXKXSKVIMRHKRLIKPTKGIYYLISTASLDQSVXXPSA

SEQ ID NO: 4075 - protein, 35 aa, Artificial Sequence
  Non-cyclic GFR-binding peptide
  MOD_RES (1)..(3): Xaa is C or S
  MOD_RES (14)..(15)..(16)..(17)..(18): Xaa is A or G
  MOD_RES (19)..(20)..(21)..(22): Xaa is A or G or absent
XKXSKVVMQYNKLXXXXXXXXXLYLISIASLDQPV

SEQ ID NO: 4076 - protein, 37 aa, Artificial Sequence
  Non-cyclic GFR-binding peptide
  MOD_RES (1)..(3)..(37): Xaa is C or S
  MOD_RES (15)..(16)..(17)..(18)..(19): Xaa is A or G
  MOD_RES (20)..(21)..(22)..(23): Xaa is A or G or absent
XGXGEVVMDRHKRLXXXXXXXXXYYLMSTASLETPVX

SEQ ID NO: 4077 - protein, 40 aa, Artificial Sequence
  Non-cyclic GFR-binding peptide
  MOD_RES (2)..(4)..(37)..(38): Xaa is C or S
  MOD_RES (15)..(16)..(17)..(18)..(19): Xaa is A or G
  MOD_RES (20)..(21)..(22)..(23): Xaa is A or G or absent
SXKXSKVIMRHKRLXXXXXXXXXYYLISTASLDQSVXXPS

SEQ ID NO: 4078 - protein, 40 aa, Artificial Sequence
  Non-cyclic GFR-binding peptide
  MOD_RES (2)..(4)..(38)..(39): Xaa is C or S
  MOD_RES (16)..(17)..(18)..(19)..(20): Xaa is A or G
  MOD_RES (21)..(22)..(23)..(24): Xaa is A or G or absent
HXGXAKVVMNQYNKLXXXXXXXXXLYLVSIASLKTPAXXA

SEQ ID NO: 4079 - protein, 36 aa, Artificial Sequence
  Non-cyclic GFR-binding peptide
  MOD_RES (2)..(4): Xaa is C or S
  MOD_RES (15)..(16)..(17)..(18)..(19): Xaa is A or G
  MOD_RES (20)..(21)..(22)..(23): Xaa is A or G or absent
SXKXSRVIMRYKKLXXXXXXXXXFYLISIANLAQPV

SEQ ID NO: 4080 - protein, 42 aa, Artificial Sequence
  Non-cyclic GFR-binding peptide
  MOD_RES (2)..(4)..(38): Xaa is C or S
  MOD_RES (16)..(17)..(18)..(19)..(20): Xaa is A or G
  MOD_RES (21)..(22)..(23)..(24): Xaa is A or G or absent
HXGXSRVVMNQYNKLXXXXXXXXXLYLVSIASLKTPAXTPKT

SEQ ID NO: 4081 - protein, 42 aa, Artificial Sequence
  Non-cyclic GFR-binding peptide
  MOD_RES (2)..(4)..(38)..(39): Xaa is C or S
  MOD_RES (16)..(17)..(18)..(19)..(20): Xaa is A or G
  MOD_RES (21)..(22)..(23)..(24): Xaa is A or G or absent
RXGXGEVVMERYKKLXXXXXXXXXFYLMSIANLETPVXXAKP

SEQ ID NO: 4082 - protein, 33 aa, Artificial Sequence
  Non-cyclic GFR-binding peptide
  MOD_RES (32)..(33): Xaa is C or S
AKVVMNQYNKLIVNNSSDLYLVSIASLKTPAXX

SEQ ID NO: 4083 - protein, 33 aa, Artificial Sequence
  Non-cyclic GFR-binding peptide
  MOD_RES (1)..(3): Xaa is C or S
XKXSKVVMQYNKLVKPTRGVLYLISIASLDQPV

SEQ ID NO: 4084 - protein, 34 aa, Artificial Sequence
  Non-cyclic GFR-binding peptide
LHDELTQYNKLFIPKKRVIELYLVSIASLQVQTP

SEQ ID NO: 4085 - protein, 37 aa, Artificial Sequence
  Non-cyclic GFR-binding peptide
  MOD_RES (35)..(35): Xaa is C or S
HDELTRYKKLFIPKKRVIEFYLVSIANLQVQTPRXQV

SEQ ID NO: 4086 - protein, 33 aa, Artificial Sequence
  Non-cyclic GFR-binding peptide
  MOD_RES (32)..(33): Xaa is C or S
SRVVMNYHYKLIVNSSDDKYLVSIPSLKTPAXX

SEQ ID NO: 4087 - protein, 38 aa, Artificial Sequence
  Non-cyclic GFR-binding peptide
  MOD_RES (33)..(34): Xaa is C or S
  MOD_RES (11)..(12)..(13)..(14)..(15): Xaa is A or G
  MOD_RES (16)..(17)..(18)..(19): Xaa is A or G or absent
SRVIMQYNKLXXXXXXXXXLYLISIASLAQPVXXPAAS

SEQ ID NO: 4088 - protein, 35 aa, Artificial Sequence
  Non-cyclic GFR-binding peptide
  MOD_RES (2)..(33)..(34): Xaa is C or S
KXSKVVMRHKRLVKPTRGVYYLISTASLDQPVXXP

SEQ ID NO: 4089 - protein, 40 aa, Artificial Sequence
  Non-cyclic GFR-binding peptide
  MOD_RES (34)..(35): Xaa is C or S
  MOD_RES (12)..(13)..(14)..(15)..(16): Xaa is A or G
  MOD_RES (17)..(18)..(19)..(20): Xaa is A or G or absent
AKVVMNYHYKLXXXXXXXXXKYLVSIPSLKTPAXXAKPVA

SEQ ID NO: 4090 - protein, 41 aa, Artificial Sequence
  Non-cyclic GFR-binding peptide
  MOD_RES (2)..(4)..(36)..(37): Xaa is C or S
HXGXARVVMNRHKRLIVNSSDDYYLVSTASLQTPAXXPKPV

SEQ ID NO: 4091 - protein, 33 aa, Artificial Sequence
  Non-cyclic GFR-binding peptide
  MOD_RES (1)..(33): Xaa is C or S
XSRVVMNYHYKLIVNSSDDKYLVSIPSLKTPAX

SEQ ID NO: 4092 - protein, 38 aa, Artificial Sequence
  Non-cyclic GFR-binding peptide
  MOD_RES (1)..(38): Xaa is C or S
  MOD_RES (14)..(15)..(16)..(17)..(18): Xaa is A or G
  MOD_RES (19)..(20)..(21)..(22): Xaa is A or G or absent
XALHDELTQYNKLXXXXXXXXXLYLVSIASLQVQTPRX

SEQ ID NO: 4093 - protein, 38 aa, Artificial Sequence
  Non-cyclic GFR-binding peptide
  MOD_RES (1)..(3)..(34)..(35): Xaa is C or S
XKXSRVIMRHKRLVKPKRGVYYLISTASLAQPVXXPAA

SEQ ID NO: 4094 - protein, 34 aa, Artificial Sequence
  Non-cyclic GFR-binding peptide
  MOD_RES (1)..(3): Xaa is C or S
XGXAKVVMNRYKKLIVNNSSDFYLVSIANLKTPA

SEQ ID NO: 4095 - protein, 34 aa, Artificial Sequence
  Non-cyclic GFR-binding peptide
  MOD_RES (31)..(32): Xaa is C or S
RVVMNRHKRLIVNSSDDYYLVSTASLQTPAXXPK

SEQ ID NO: 4096 - protein, 43 aa, Artificial Sequence
  Non-cyclic GFR-binding peptide
  MOD_RES (2)..(37)..(38): Xaa is C or S
  MOD_RES (15)..(16)..(17)..(18)..(19): Xaa is A or G
  MOD_RES (20)..(21)..(22)..(23): Xaa is A or G or absent
GXEAVSMGERYKKLXXXXXXXXXFYLVSIANLKTPVXXAKGVK

SEQ ID NO: 4097 - protein, 43 aa, Artificial Sequence
  Non-cyclic GFR-binding peptide
  MOD_RES (2)..(39): Xaa is C or S
KXALHDELTYHYKLFIPKKRVIEKYLVSIPSLQVQTPRXQVNR

SEQ ID NO: 4098 - protein, 34 aa, Artificial Sequence
  Non-cyclic GFR-binding peptide
  MOD_RES (2)..(34): Xaa is C or S
GXGEVVMDRYKKLVVKENEDFYLMSIANLETPVX

SEQ ID NO: 4099 - protein, 38 aa, Artificial Sequence
  Non-cyclic GFR-binding peptide
  MOD_RES (33)..(34): Xaa is C or S
  MOD_RES (11)..(12)..(13)..(14)..(15): Xaa is A or G
  MOD_RES (16)..(17)..(18)..(19): Xaa is A or G or absent
KVVMNQYNKLXXXXXXXXXLYLVSIASLKTPAXXAKPV

SEQ ID NO: 4100 - protein, 42 aa, Artificial Sequence
  Non-cyclic GFR-binding peptide
  MOD_RES (1)..(38): Xaa is C or S
  MOD_RES (14)..(15)..(16)..(17)..(18): Xaa is A or G
  MOD_RES (19)..(20)..(21)..(22): Xaa is A or G or absent
XALHDELTRHKRLXXXXXXXXXYYLVSTASLQVQTPRXQVNR

SEQ ID NO: 4101 - protein, 42 aa, Artificial Sequence
  Non-cyclic GFR-binding peptide
  MOD_RES (2)..(4)..(36)..(37): Xaa is C or S
HXGXSRVVMNYHYKLIVNSSDDKYLVSIPSLKTPAXXPKPVY

SEQ ID NO: 4102 - protein, 35 aa, Artificial Sequence
  Non-cyclic GFR-binding peptide
  MOD_RES (2)..(33)..(34): Xaa is C or S
KXSRVIMQYNKLVKPKRGVLYLISIASLAQPVXXP

SEQ ID NO: 4103 - protein, 33 aa, Artificial Sequence
  Non-cyclic GFR-binding peptide
  MOD_RES (1)..(32)..(33): Xaa is C or S
XSKVVMYHYKLVKPTRGVKYLISIPSLDQPVXX

SEQ ID NO: 4104 - protein, 35 aa, Artificial Sequence
  Non-cyclic GFR-binding peptide
  MOD_RES (1)..(3)..(34)..(35): Xaa is C or S
XKXSKVVMRYKKLVKPTRGVFYLISIANLDQPVXX

SEQ ID NO: 4105 - protein, 35 aa, Artificial Sequence
  Non-cyclic GFR-binding peptide
  MOD_RES (31)..(32): Xaa is C or S
KVVMNRYKKLIVNNSSDFYLVSIANLKTPAXXAKP

SEQ ID NO: 4106 - protein, 32 aa, Artificial Sequence; identical to SEQ ID NO: 1917
  Non-cyclic GFR-binding peptide

SEQ ID NO: 4107 - protein, 40 aa, Artificial Sequence
  Non-cyclic GFR-binding peptide
  MOD_RES (35)..(36): Xaa is C or S
  MOD_RES (13)..(14)..(15)..(16)..(17): Xaa is A or G
  MOD_RES (18)..(19)..(20)..(21): Xaa is A or G or absent
EAVSMGERHKRLXXXXXXXXXYYLVSTASLKTPVXXAKGV

SEQ ID NO: 4108 - protein, 33 aa, Artificial Sequence
  Non-cyclic GFR-binding peptide
  MOD_RES (31)..(32): Xaa is C or S
SKVVMRYKKLVKPTRGVFYLISIANLDQPVXXP

SEQ ID NO: 4109 - protein, 36 aa, Artificial Sequence
  Non-cyclic GFR-binding peptide
  MOD_RES (2)..(35)..(36): Xaa is C or S
  MOD_RES (13)..(14)..(15)..(16)..(17): Xaa is A or G
  MOD_RES (18)..(19)..(20)..(21): Xaa is A or G or absent
KXSKVIMRYKKLXXXXXXXXXFYLISIANLDQSVXX

SEQ ID NO: 4110 - protein, 33 aa, Artificial Sequence
  Non-cyclic GFR-binding peptide
  MOD_RES (31)..(32): Xaa is C or S
SRVIMQYNKLVKPKRGVLYLISIASLAQPVXXP

SEQ ID NO: 4111 - protein, 40 aa, Artificial Sequence
  Non-cyclic GFR-binding peptide
  MOD_RES (35)..(36): Xaa is C or S
  MOD_RES (13)..(14)..(15)..(16)..(17): Xaa is A or G
  MOD_RES (18)..(19)..(20)..(21): Xaa is A or G or absent
EAVSMGEQYNKLXXXXXXXXXLYLVSIASLKTPVXXAKGV

SEQ ID NO: 4112 - protein, 34 aa, Artificial Sequence
  Non-cyclic GFR-binding peptide
  MOD_RES (2)..(4): Xaa is C or S
SXKXSRVIMRHKRLVKPKRGVYYLISTASLAQPV

SEQ ID NO: 4113 - protein, 40 aa, Artificial Sequence
  Non-cyclic GFR-binding peptide
  MOD_RES (2)..(36): Xaa is C or S
  MOD_RES (14)..(15)..(16)..(17)..(18): Xaa is A or G
  MOD_RES (19)..(20)..(21)..(22): Xaa is A or G or absent
GXSRVVMNQYNKLXXXXXXXXXLYLVSIASLKTPAXTPKT

SEQ ID NO: 4114 - protein, 34 aa, Artificial Sequence
  Non-cyclic GFR-binding peptide
  MOD_RES (1)..(34): Xaa is C or S
  MOD_RES (12)..(13)..(14)..(15)..(16): Xaa is A or G
  MOD_RES (17)..(18)..(19)..(20): Xaa is A or G or absent
XSKVVMYHYKLXXXXXXXXXKYLISIPSLDQPVX

SEQ ID NO: 4115 - protein, 41 aa, Artificial Sequence
  Non-cyclic GFR-binding peptide
  MOD_RES (1)..(3)..(37)..(38): Xaa is C or S
  MOD_RES (15)..(16)..(17)..(18)..(19): Xaa is A or G
  MOD_RES (20)..(21)..(22)..(23): Xaa is A or G or absent
XGXSRVVMNYHYKLXXXXXXXXXKYLVSIPSLKTPAXXPKP

SEQ ID NO: 4116 - protein, 33 aa, Artificial Sequence
  Non-cyclic GFR-binding peptide
  MOD_RES (31)..(32): Xaa is C or S
RVVMNQYNKLIVNSSDDLYLVSIASLKTPAXXP

SEQ ID NO: 4117 - protein, 38 aa, Artificial Sequence
  Non-cyclic GFR-binding peptide
  MOD_RES (2)..(33)..(34): Xaa is C or S
KXSRVIMRYKKLVKPKRGVFYLISIANLAQPVXXPAAS

SEQ ID NO: 4118 - protein, 36 aa, Artificial Sequence
  Non-cyclic GFR-binding peptide
  MOD_RES (1)..(34)..(35): Xaa is C or S
  MOD_RES (12)..(13)..(14)..(15)..(16): Xaa is A or G
  MOD_RES (17)..(18)..(19)..(20): Xaa is A or G or absent
XSKVVMRYKKLXXXXXXXXXFYLISIANLDQPVXXP

SEQ ID NO: 4119 - protein, 35 aa, Artificial Sequence
  Non-cyclic GFR-binding peptide
  MOD_RES (2)..(4): Xaa is C or S
RXGXGEVVMDRHKRLVVKENEDYYLMSTASLETPV

SEQ ID NO: 4120 - protein, 34 aa, Artificial Sequence
  Non-cyclic GFR-binding peptide
  MOD_RES (2)..(2): Xaa is C or S
  MOD_RES (13)..(14)..(15)..(16)..(17): Xaa is A or G
  MOD_RES (18)..(19)..(20)..(21): Xaa is A or G or absent
KXSKVVMRYKKLXXXXXXXXXFYLISIANLDQPV

SEQ ID NO: 4121 - protein, 34 aa, Artificial Sequence
  Non-cyclic GFR-binding peptide
  MOD_RES (1)..(33)..(34): Xaa is C or S
XGEVVMERHKRLVVKDYEDYYLMSTASLETPVXX

SEQ ID NO: 4122 - protein, 35 aa, Artificial Sequence
  Non-cyclic GFR-binding peptide
  MOD_RES (2)..(34)..(35): Xaa is C or S
GXGEVVMEYHYKLVVKDYEDKYLMSIPSLETPVXX

SEQ ID NO: 4123 - protein, 33 aa, Artificial Sequence
  Non-cyclic GFR-binding peptide
  MOD_RES (1)..(32)..(33): Xaa is C or S
XSRVIMRYKKLVKPKRGVFYLISIANLAQPVXX

SEQ ID NO: 4124 - protein, 36 aa, Artificial Sequence
  Non-cyclic GFR-binding peptide
  MOD_RES (1)..(1): Xaa is C or S
  MOD_RES (14)..(15)..(16)..(17)..(18): Xaa is A or G
  MOD_RES (19)..(20)..(21)..(22): Xaa is A or G or absent
XALHDELTRYKKLXXXXXXXXXFYLVSIANLQVQTP

SEQ ID NO: 4125 - protein, 38 aa, Artificial Sequence
  Non-cyclic GFR-binding peptide
  MOD_RES (1)..(3)..(36)..(37): Xaa is C or S
XGXEAVSMGERYKKLTPVGMDDFYLVSIANLKTPVXXA

SEQ ID NO: 4126 - protein, 41 aa, Artificial Sequence
  Non-cyclic GFR-binding peptide
  MOD_RES (2)..(36)..(37): Xaa is C or S
  MOD_RES (14)..(15)..(16)..(17)..(18): Xaa is A or G
  MOD_RES (19)..(20)..(21)..(22): Xaa is A or G or absent
GXAKVVMNQYNKLXXXXXXXXXLYLVSIASLKTPAXXAKPV

SEQ ID NO: 4127 - protein, 36 aa, Artificial Sequence
  Non-cyclic GFR-binding peptide
  MOD_RES (32)..(33): Xaa is C or S
GEVVMDYHYKLVVKENEDKYLMSIPSLETPVXXAKP

SEQ ID NO: 4128 - protein, 39 aa, Artificial Sequence
  Non-cyclic GFR-binding peptide
  MOD_RES (2)..(34)..(35): Xaa is C or S
GXGEVVMDRHKRLVVKENEDYYLMSTASLETPVXXAKPI

SEQ ID NO: 4129 - protein, 35 aa, Artificial Sequence
  Non-cyclic GFR-binding peptide
  MOD_RES (33)..(34): Xaa is C or S
  MOD_RES (11)..(12)..(13)..(14)..(15): Xaa is A or G
  MOD_RES (16)..(17)..(18)..(19): Xaa is A or G or absent
RVVMNRHKRLXXXXXXXXXYYLVSTASLQTPAXXP

SEQ ID NO: 4130 - protein, 32 aa, Artificial Sequence
  Non-cyclic GFR-binding peptide
  MOD_RES (2)..(2): Xaa is C or S
KXSKVIMQYNKLIKPTKGILYLISIASLDQSV

SEQ ID NO: 4131 - protein, 34 aa, Artificial Sequence
  Non-cyclic GFR-binding peptide
  MOD_RES (33)..(34): Xaa is C or S
EAVSMGEQYNKLTPVGMDDLYLVSIASLKTPVXX

SEQ ID NO: 4132 - protein, 39 aa, Artificial Sequence
  Non-cyclic GFR-binding peptide
  MOD_RES (33)..(33): Xaa is C or S
  MOD_RES (11)..(12)..(13)..(14)..(15): Xaa is A or G
  MOD_RES (16)..(17)..(18)..(19): Xaa is A or G or absent
RVVMNRHKRLXXXXXXXXXYYLVSTASLKTPAXTPKTVH

SEQ ID NO: 4133 - protein, 36 aa, Artificial Sequence
  Non-cyclic GFR-binding peptide
  MOD_RES (31)..(32): Xaa is C or S
RVVMNRHKRLIVNSSDDYYLVSTASLQTPAXXPKPV

SEQ ID NO: 4134 - protein, 38 aa, Artificial Sequence
  Non-cyclic GFR-binding peptide
  MOD_RES (2)..(34)..(35): Xaa is C or S
GXARVVMNQYNKLIVNSSDDLYLVSIASLQTPAXXPKP

SEQ ID NO: 4135 - protein, 39 aa, Artificial Sequence
  Non-cyclic GFR-binding peptide
  MOD_RES (2)..(4)..(35)..(36): Xaa is C or S
SXKXSKVIMQYNKLIKPTKGILYLISIASLDQSVXXPSA

SEQ ID NO: 4136 - protein, 35 aa, Artificial Sequence
  Non-cyclic GFR-binding peptide
  MOD_RES (33)..(34): Xaa is C or S
  MOD_RES (11)..(12)..(13)..(14)..(15): Xaa is A or G
  MOD_RES (16)..(17)..(18)..(19): Xaa is A or G or absent
KVVMNRYKKLXXXXXXXXXFYLVSIANLKTPAXXA

SEQ ID NO: 4137 - protein, 33 aa, Artificial Sequence
  Non-cyclic GFR-binding peptide
  MOD_RES (31)..(32): Xaa is C or S
EVVMDRHKRLVVKENEDYYLMSTASLETPVXXA

SEQ ID NO: 4138 - protein, 32 aa, Artificial Sequence
  Non-cyclic GFR-binding peptide
  MOD_RES (11)..(12)..(13)..(14)..(15): Xaa is A or G
  MOD_RES (16)..(17)..(18)..(19): Xaa is A or G or absent
EVVMERYKKLXXXXXXXXXFYLMSIANLETPV

SEQ ID NO: 4139 - protein, 43 aa, Artificial Sequence
  Non-cyclic GFR-binding peptide
  MOD_RES (2)..(4)..(37)..(38): Xaa is C or S
  MOD_RES (15)..(16)..(17)..(18)..(19): Xaa is A or G
  MOD_RES (20)..(21)..(22)..(23): Xaa is A or G or absent
SXKXSKVIMRYKKLXXXXXXXXXFYLISIANLDQSVXXPSASA

SEQ ID NO: 4140 - protein, 39 aa, Artificial Sequence
  Non-cyclic GFR-binding peptide
  MOD_RES (1)..(3): Xaa is C or S
XKXALHDELTYHYKLFIPKKRVIEKYLVSIPSLQVQTPR

SEQ ID NO: 4141 - protein, 38 aa, Artificial Sequence
  Non-cyclic GFR-binding peptide
  MOD_RES (1)..(34)..(35): Xaa is C or S
XEAVSMGEQYNKLTPVGMDDLYLVSIASLKTPVXXAKG

SEQ ID NO: 4142 - protein, 39 aa, Artificial Sequence
  Non-cyclic GFR-binding peptide
  MOD_RES (2)..(34)..(35): Xaa is C or S
GXARVVMNQYNKLIVNSSDDLYLVSIASLQTPAXXPKPV

SEQ ID NO: 4143 - protein, 41 aa, Artificial Sequence
  Non-cyclic GFR-binding peptide
  MOD_RES (2)..(36)..(37): Xaa is C or S
  MOD_RES (14)..(15)..(16)..(17)..(18): Xaa is A or G
  MOD_RES (19)..(20)..(21)..(22): Xaa is A or G or absent
GXARVVMNQYNKLXXXXXXXXXLYLVSIASLQTPAXXPKPV

SEQ ID NO: 4144 - protein, 36 aa, Artificial Sequence
  Non-cyclic GFR-binding peptide
  MOD_RES (2)..(4): Xaa is C or S
  MOD_RES (15)..(16)..(17)..(18)..(19): Xaa is A or G
  MOD_RES (20)..(21)..(22)..(23): Xaa is A or G or absent
SXKXSKVVMRYKKLXXXXXXXXXFYLISIANLDQPV

SEQ ID NO: 4145 - protein, 36 aa, Artificial Sequence
  Non-cyclic GFR-binding peptide
  MOD_RES (1)..(34)..(35): Xaa is C or S
  MOD_RES (12)..(13)..(14)..(15)..(16): Xaa is A or G
  MOD_RES (17)..(18)..(19)..(20): Xaa is A or G or absent
XSKVIMRHKRLXXXXXXXXXYYLISTASLDQSVXXP

SEQ ID NO: 4146 - protein, 34 aa, Artificial Sequence
  Non-cyclic GFR-binding peptide
  MOD_RES (1)..(3)..(34): Xaa is C or S
XKXSKVIMRYKKLIKPTKGIFYLISIANLDQSVX

SEQ ID NO: 4147 - protein, 34 aa, Artificial Sequence
  Non-cyclic GFR-binding peptide
  MOD_RES (13)..(14)..(15)..(16)..(17): Xaa is A or G
  MOD_RES (18)..(19)..(20)..(21): Xaa is A or G or absent
EAVSMGEQYNKLXXXXXXXXXLYLVSIASLKTPV

SEQ ID NO: 4148 - protein, 40 aa, Artificial Sequence
  Non-cyclic GFR-binding peptide
  MOD_RES (2)..(4)..(37)..(38): Xaa is C or S
  MOD_RES (15)..(16)..(17)..(18)..(19): Xaa is A or G
  MOD_RES (20)..(21)..(22)..(23): Xaa is A or G or absent
SXKXSKVVMQYNKLXXXXXXXXXLYLISIASLDQPVXXPS

SEQ ID NO: 4149 - protein, 35 aa, Artificial Sequence
  Non-cyclic GFR-binding peptide
  MOD_RES (1)..(33)..(34): Xaa is C or S
XGEVVMEYHYKLVVKDYEDKYLMSIPSLETPVXXA

SEQ ID NO: 4150 - protein, 44 aa, Artificial Sequence
  Non-cyclic GFR-binding peptide
  MOD_RES (2)..(4)..(38)..(39): Xaa is C or S
  MOD_RES (16)..(17)..(18)..(19)..(20): Xaa is A or G
  MOD_RES (21)..(22)..(23)..(24): Xaa is A or G or absent
HXGXSRVVMNQYNKLXXXXXXXXXLYLVSIASLKTPAXXPKPVY

SEQ ID NO: 4151 - protein, 34 aa, Artificial Sequence
  Non-cyclic GFR-binding peptide
  MOD_RES (13)..(14)..(15)..(16)..(17): Xaa is A or G
  MOD_RES (18)..(19)..(20)..(21): Xaa is A or G or absent
EAVSMGERHKRLXXXXXXXXXYYLVSTASLKTPV

SEQ ID NO: 4152 - protein, 38 aa, Artificial Sequence
  Non-cyclic GFR-binding peptide
  MOD_RES (2)..(35)..(36): Xaa is C or S
  MOD_RES (13)..(14)..(15)..(16)..(17): Xaa is A or G
  MOD_RES (18)..(19)..(20)..(21): Xaa is A or G or absent
KXSKVVMRYKKLXXXXXXXXXFYLISIANLDQPVXXPS

SEQ ID NO: 4153 - protein, 39 aa, Artificial Sequence
  Non-cyclic GFR-binding peptide
  MOD_RES (34)..(35): Xaa is C or S
  MOD_RES (12)..(13)..(14)..(15)..(16): Xaa is A or G
  MOD_RES (17)..(18)..(19)..(20): Xaa is A or G or absent
SRVVMNRHKRLXXXXXXXXXYYLVSTASLKTPAXXPKPV

SEQ ID NO: 4154 - protein, 37 aa, Artificial Sequence
  Non-cyclic GFR-binding peptide
  MOD_RES (2)..(34)..(35): Xaa is C or S
GXSRVVMNQYNKLIVNSSDDLYLVSIASLKTPAXXPK

SEQ ID NO: 4155 - protein, 33 aa, Artificial Sequence
  Non-cyclic GFR-binding peptide
  MOD_RES (2)..(2): Xaa is C or S
GXGEVVMERHKRLVVKDYEDYYLMSTASLETPV

SEQ ID NO: 4156 - protein, 40 aa, Artificial Sequence
  Non-cyclic GFR-binding peptide
  MOD_RES (2)..(4)..(39)..(40): Xaa is C or S
  MOD_RES (17)..(18)..(19)..(20)..(21): Xaa is A or G
  MOD_RES (22)..(23)..(24)..(25): Xaa is A or G or absent
RXGXEAVSMGERYKKLXXXXXXXXXFYLVSIANLKTPVXX

SEQ ID NO: 4157 - protein, 39 aa, Artificial Sequence
  Non-cyclic GFR-binding peptide
  MOD_RES (1)..(34)..(35): Xaa is C or S
  MOD_RES (12)..(13)..(14)..(15)..(16): Xaa is A or G
  MOD_RES (17)..(18)..(19)..(20): Xaa is A or G or absent
XSKVIMYHYKLXXXXXXXXXKYLISIPSLDQSVXXPSAS

SEQ ID NO: 4158 - protein, 36 aa, Artificial Sequence
  Non-cyclic GFR-binding peptide
  MOD_RES (33)..(34): Xaa is C or S
  MOD_RES (11)..(12)..(13)..(14)..(15): Xaa is A or G
  MOD_RES (16)..(17)..(18)..(19): Xaa is A or G or absent
RVVMNYHYKLXXXXXXXXXKYLVSIPSLQTPAXXPK

SEQ ID NO: 4159 - protein, 38 aa, Artificial Sequence
  Non-cyclic GFR-binding peptide
  MOD_RES (2)..(4)..(38): Xaa is C or S
  MOD_RES (16)..(17)..(18)..(19)..(20): Xaa is A or G
  MOD_RES (21)..(22)..(23)..(24): Xaa is A or G or absent
RXGXGEVVMEYHYKLXXXXXXXXXKYLMSIPSLETPVX

SEQ ID NO: 4160 - protein, 38 aa, Artificial Sequence
  Non-cyclic GFR-binding peptide
  MOD_RES (2)..(2): Xaa is C or S
KXALHDELTRHKRLFIPKKRVIEYYLVSTASLQVQTPR

SEQ ID NO: 4161 - protein, 34 aa, Artificial Sequence
  Non-cyclic GFR-binding peptide
  MOD_RES (33)..(34): Xaa is C or S
  MOD_RES (11)..(12)..(13)..(14)..(15): Xaa is A or G
  MOD_RES (16)..(17)..(18)..(19): Xaa is A or G or absent
SKVVMQYNKLXXXXXXXXXLYLISIASLDQPVXX

SEQ ID NO: 4162 - protein, 35 aa, Artificial Sequence
  Non-cyclic GFR-binding peptide
  MOD_RES (31)..(32): Xaa is C or S
SKVVMRHKRLVKPTRGVYYLISTASLDQPVXXPSA

SEQ ID NO: 4163 - protein, 40 aa, Artificial Sequence
  Non-cyclic GFR-binding peptide
  MOD_RES (2)..(35)..(36): Xaa is C or S
  MOD_RES (13)..(14)..(15)..(16)..(17): Xaa is A or G
  MOD_RES (18)..(19)..(20)..(21): Xaa is A or G or absent
KXSKVIMYHYKLXXXXXXXXXKYLISIPSLDQSVXXPSAS

SEQ ID NO: 4164 - protein, 39 aa, Artificial Sequence
  Non-cyclic GFR-binding peptide
  MOD_RES (1)..(34)..(35): Xaa is C or S
  MOD_RES (12)..(13)..(14)..(15)..(16): Xaa is A or G
  MOD_RES (17)..(18)..(19)..(20): Xaa is A or G or absent
XSRVIMRYKKLXXXXXXXXXFYLISIANLAQPVXXPAAS

SEQ ID NO: 4165 - protein, 39 aa, Artificial Sequence
  Non-cyclic GFR-binding peptide
  MOD_RES (33)..(34): Xaa is C or S
  MOD_RES (11)..(12)..(13)..(14)..(15): Xaa is A or G
  MOD_RES (16)..(17)..(18)..(19): Xaa is A or G or absent
SKVIMYHYKLXXXXXXXXXKYLISIPSLDQSVXXPSASA

SEQ ID NO: 4166 - protein, 37 aa, Artificial Sequence
  Non-cyclic GFR-binding peptide
  MOD_RES (2)..(33)..(34): Xaa is C or S
KXSKVIMYHYKLIKPTKGIKYLISIPSLDQSVXXPSA

SEQ ID NO: 4167 - protein, 34 aa, Artificial Sequence
  Non-cyclic GFR-binding peptide
  MOD_RES (2)..(33)..(34): Xaa is C or S
KXSKVIMQYNKLIKPTKGILYLISIASLDQSVXX

SEQ ID NO: 4168 - protein, 36 aa, Artificial Sequence
  Non-cyclic GFR-binding peptide
  MOD_RES (33)..(34): Xaa is C or S
  MOD_RES (11)..(12)..(13)..(14)..(15): Xaa is A or G
  MOD_RES (16)..(17)..(18)..(19): Xaa is A or G or absent
SRVIMRHKRLXXXXXXXXXYYLISTASLAQPVXXPA

SEQ ID NO: 4169 - protein, 41 aa, Artificial Sequence
  Non-cyclic GFR-binding peptide
  MOD_RES (1)..(3)..(35)..(36): Xaa is C or S
XGXSRVVMNQYNKLIVNSSDDLYLVSIASLKTPAXXPKPVY

SEQ ID NO: 4170 - protein, 38 aa, Artificial Sequence
  Non-cyclic GFR-binding peptide
  MOD_RES (1)..(32)..(33): Xaa is C or S
XSKVIMQYNKLIKPTKGILYLISIASLDQSVXXPSASA

SEQ ID NO: 4171 - protein, 35 aa, Artificial Sequence
  Non-cyclic GFR-binding peptide
  MOD_RES (1)..(33)..(34): Xaa is C or S
XAKVVMNYHYKLIVNNSSDKYLVSIPSLKTPAXXA

SEQ ID NO: 4172 - protein, 32 aa, Artificial Sequence; identical to SEQ ID NO: 1873
  Non-cyclic GFR-binding peptide

SEQ ID NO: 4173 - protein, 38 aa, Artificial Sequence
  Non-cyclic GFR-binding peptide
  MOD_RES (1)..(3)..(34)..(35): Xaa is C or S
XKXSKVVMQYNKLVKPTRGVLYLISIASLDQPVXXPSA

SEQ ID NO: 4174 - protein, 41 aa, Artificial Sequence
  Non-cyclic GFR-binding peptide
  MOD_RES (1)..(3)..(35)..(36): Xaa is C or S
XGXSRVVMNYHYKLIVNSSDDKYLVSIPSLKTPAXXPKPVY

SEQ ID NO: 4175 - protein, 38 aa, Artificial Sequence
  Non-cyclic GFR-binding peptide
  MOD_RES (1)..(3): Xaa is C or S
  MOD_RES (16)..(17)..(18)..(19)..(20): Xaa is A or G
  MOD_RES (21)..(22)..(23)..(24): Xaa is A or G or absent
XKXALHDELTQYNKLXXXXXXXXXLYLVSIASLQVQTP

SEQ ID NO: 4176 - protein, 36 aa, Artificial Sequence
  Non-cyclic GFR-binding peptide
  MOD_RES (1)..(34)..(35): Xaa is C or S
  MOD_RES (12)..(13)..(14)..(15)..(16): Xaa is A or G
  MOD_RES (17)..(18)..(19)..(20): Xaa is A or G or absent
XSKVIMQYNKLXXXXXXXXXLYLISIASLDQSVXXP

SEQ ID NO: 4177 - protein, 42 aa, Artificial Sequence
  Non-cyclic GFR-binding peptide
  MOD_RES (1)..(3)..(36)..(37): Xaa is C or S
  MOD_RES (14)..(15)..(16)..(17)..(18): Xaa is A or G
  MOD_RES (19)..(20)..(21)..(22): Xaa is A or G or absent
XKXSKVVMYHYKLXXXXXXXXXKYLISIPSLDQPVXXPSASA

SEQ ID NO: 4178 - protein, 40 aa, Artificial Sequence
  Non-cyclic GFR-binding peptide
  MOD_RES (2)..(36)..(37): Xaa is C or S
  MOD_RES (14)..(15)..(16)..(17)..(18): Xaa is A or G
  MOD_RES (19)..(20)..(21)..(22): Xaa is A or G or absent
GXSRVVMNRHKRLXXXXXXXXXYYLVSTASLKTPAXXPKP

SEQ ID NO: 4179 - protein, 40 aa, Artificial Sequence
  Non-cyclic GFR-binding peptide
  MOD_RES (2)..(35)..(36): Xaa is C or S
  MOD_RES (13)..(14)..(15)..(16)..(17): Xaa is A or G
  MOD_RES (18)..(19)..(20)..(21): Xaa is A or G or absent
KXSKVVMQYNKLXXXXXXXXXLYLISIASLDQPVXXPSAS

SEQ ID NO: 4180 - protein, 37 aa, Artificial Sequence
  Non-cyclic GFR-binding peptide
  MOD_RES (2)..(34)..(35): Xaa is C or S
GXGEVVMERYKKLVVKDYEDFYLMSIANLETPVXXAK

SEQ ID NO: 4181 - protein, 39 aa, Artificial Sequence
  Non-cyclic GFR-binding peptide
  MOD_RES (34)..(35): Xaa is C or S
  MOD_RES (12)..(13)..(14)..(15)..(16): Xaa is A or G
  MOD_RES (17)..(18)..(19)..(20): Xaa is A or G or absent
GEVVMDYHYKLXXXXXXXXXKYLMSIPSLETPVXXAKPI

SEQ ID NO: 4182 - protein, 34 aa, Artificial Sequence
  Non-cyclic GFR-binding peptide
  MOD_RES (2)..(2): Xaa is C or S
  MOD_RES (13)..(14)..(15)..(16)..(17): Xaa is A or G
  MOD_RES (18)..(19)..(20)..(21): Xaa is A or G or absent
KXSKVIMRYKKLXXXXXXXXXFYLISIANLDQSV

SEQ ID NO: 4183 - protein, 39 aa, Artificial Sequence
  Non-cyclic GFR-binding peptide
  MOD_RES (1)..(33)..(34): Xaa is C or S
XARVVMNRHKRLIVNSSDDYYLVSTASLQTPAXXPKPVT

SEQ ID NO: 4184 - protein, 37 aa, Artificial Sequence
  Non-cyclic GFR-binding peptide
  MOD_RES (2)..(4)..(35)..(36): Xaa is C or S
SXKXSKVVMQYNKLVKPTRGVLYLISIASLDQPVXXP

SEQ ID NO: 4185 - protein, 43 aa, Artificial Sequence
  Non-cyclic GFR-binding peptide
  MOD_RES (2)..(4)..(39)..(40): Xaa is C or S
  MOD_RES (17)..(18)..(19)..(20)..(21): Xaa is A or G
  MOD_RES (22)..(23)..(24)..(25): Xaa is A or G or absent
RXGXEAVSMGEQYNKLXXXXXXXXXLYLVSIASLKTPVXXAKG

SEQ ID NO: 4186 - protein, 41 aa, Artificial Sequence
  Non-cyclic GFR-binding peptide
  MOD_RES (1)..(3)..(35)..(36): Xaa is C or S
XGXGEVVMDRHKRLVVKENEDYYLMSTASLETPVXXAKPIK

SEQ ID NO: 4187 - protein, 42 aa, Artificial Sequence
  Non-cyclic GFR-binding peptide
  MOD_RES (1)..(3)..(37)..(38): Xaa is C or S
  MOD_RES (15)..(16)..(17)..(18)..(19): Xaa is A or G
  MOD_RES (20)..(21)..(22)..(23): Xaa is A or G or absent
XGXSRVVMNRHKRLXXXXXXXXXYYLVSTASLKTPAXXPKPV

SEQ ID NO: 4188 - protein, 41 aa, Artificial Sequence
  Non-cyclic GFR-binding peptide
  MOD_RES (1)..(38): Xaa is C or S
  MOD_RES (14)..(15)..(16)..(17)..(18): Xaa is A or G
  MOD_RES (19)..(20)..(21)..(22): Xaa is A or G or absent
XALHDELTQYNKLXXXXXXXXXLYLVSIASLQVQTPRXQVN

SEQ ID NO: 4189 - protein, 37 aa, Artificial Sequence
  Non-cyclic GFR-binding peptide
  MOD_RES (2)..(35)..(36): Xaa is C or S
  MOD_RES (13)..(14)..(15)..(16)..(17): Xaa is A or G
  MOD_RES (18)..(19)..(20)..(21): Xaa is A or G or absent
KXSKVIMRHKRLXXXXXXXXXYYLISTASLDQSVXXP

SEQ ID NO: 4190 - protein, 34 aa, Artificial Sequence
  Non-cyclic GFR-binding peptide
  MOD_RES (1)..(1): Xaa is C or S
  MOD_RES (13)..(14)..(15)..(16)..(17): Xaa is A or G
  MOD_RES (18)..(19)..(20)..(21): Xaa is A or G or absent
XAKVVMNQYNKLXXXXXXXXXLYLVSIASLKTPA

SEQ ID NO: 4191 - protein, 35 aa, Artificial Sequence
  Non-cyclic GFR-binding peptide
  MOD_RES (34)..(35): Xaa is C or S
  MOD_RES (12)..(13)..(14)..(15)..(16): Xaa is A or G
  MOD_RES (17)..(18)..(19)..(20): Xaa is A or G or absent
GEVVMERYKKLXXXXXXXXXFYLMSIANLETPVXX

SEQ ID NO: 4192 - protein, 39 aa, Artificial Sequence
  Non-cyclic GFR-binding peptide
  MOD_RES (2)..(36)..(37): Xaa is C or S
  MOD_RES (14)..(15)..(16)..(17)..(18): Xaa is A or G
  MOD_RES (19)..(20)..(21)..(22): Xaa is A or G or absent
GXGEVVMDRYKKLXXXXXXXXXFYLMSIANLETPVXXAK

SEQ ID NO: 4193 - protein, 37 aa, Artificial Sequence
  Non-cyclic GFR-binding peptide
  MOD_RES (2)..(34): Xaa is C or S
GXSRVVMNRHKRLIVNSSDDYYLVSTASLKTPAXTPK

SEQ ID NO: 4194 - protein, 37 aa, Artificial Sequence
  Non-cyclic GFR-binding peptide
  MOD_RES (33)..(34): Xaa is C or S
  MOD_RES (11)..(12)..(13)..(14)..(15): Xaa is A or G
  MOD_RES (16)..(17)..(18)..(19): Xaa is A or G or absent
SKVVMRHKRLXXXXXXXXXYYLISTASLDQPVXXPSA

SEQ ID NO: 4195 - protein, 43 aa, Artificial Sequence
  Non-cyclic GFR-binding peptide
  MOD_RES (2)..(4)..(38): Xaa is C or S
  MOD_RES (16)..(17)..(18)..(19)..(20): Xaa is A or G
  MOD_RES (21)..(22)..(23)..(24): Xaa is A or G or absent
HXGXSRVVMNRHKRLXXXXXXXXXYYLVSTASLKTPAXTPKTV

SEQ ID NO: 4196 - protein, 37 aa, Artificial Sequence
  Non-cyclic GFR-binding peptide
  MOD_RES (1)..(3)..(35)..(36): Xaa is C or S
XGXSRVVMNRHKRLIVNSSDDYYLVSTASLKTPAXXP

SEQ ID NO: 4197 - protein, 33 aa, Artificial Sequence
  Non-cyclic GFR-binding peptide
  MOD_RES (31)..(32): Xaa is C or S
RVVMNRHKRLIVNSSDDYYLVSTASLKTPAXXP

SEQ ID NO: 4198 - protein, 37 aa, Artificial Sequence
  Non-cyclic GFR-binding peptide
  MOD_RES (34)..(35): Xaa is C or S
  MOD_RES (12)..(13)..(14)..(15)..(16): Xaa is A or G
  MOD_RES (17)..(18)..(19)..(20): Xaa is A or G or absent
ARVVMNRHKRLXXXXXXXXXYYLVSTASLQTPAXXPK

SEQ ID NO: 4199 - protein, 36 aa, Artificial Sequence
  Non-cyclic GFR-binding peptide
  MOD_RES (1)..(33): Xaa is C or S
XSRVVMNQYNKLIVNSSDDLYLVSIASLKTPAXTPK

SEQ ID NO: 4200 - protein, 35 aa, Artificial Sequence
  Non-cyclic GFR-binding peptide
  MOD_RES (33)..(34): Xaa is C or S
  MOD_RES (11)..(12)..(13)..(14)..(15): Xaa is A or G
  MOD_RES (16)..(17)..(18)..(19): Xaa is A or G or absent
SKVIMRYKKLXXXXXXXXXFYLISIANLDQSVXXP

SEQ ID NO: 4201 - protein, 36 aa, Artificial Sequence
  Non-cyclic GFR-binding peptide
  MOD_RES (1)..(3): Xaa is C or S
  MOD_RES (15)..(16)..(17)..(18)..(19): Xaa is A or G
  MOD_RES (20)..(21)..(22)..(23): Xaa is A or G or absent
XGXARVVMNRHKRLXXXXXXXXXYYLVSTASLQTPA

SEQ ID NO: 4202 - protein, 42 aa, Artificial Sequence
  Non-cyclic GFR-binding peptide
  MOD_RES (2)..(4)..(36): Xaa is C or S
HXGXSRVVMNRHKRLIVNSSDDYYLVSTASLKTPAXTPKTVH

SEQ ID NO: 4203 - protein, 34 aa, Artificial Sequence
  Non-cyclic GFR-binding peptide
  MOD_RES (11)..(12)..(13)..(14)..(15): Xaa is A or G
  MOD_RES (16)..(17)..(18)..(19): Xaa is A or G or absent
HDELTRYKKLXXXXXXXXXFYLVSIANLQVQTPR

SEQ ID NO: 4204 - protein, 35 aa, Artificial Sequence
  Non-cyclic GFR-binding peptide
  MOD_RES (32)..(33): Xaa is C or S
GEVVMERHKRLVVKDYEDYYLMSTASLETPVXXAK

SEQ ID NO: 4205 - protein, 37 aa, Artificial Sequence
  Non-cyclic GFR-binding peptide
  MOD_RES (1)..(3)..(37): Xaa is C or S
  MOD_RES (15)..(16)..(17)..(18)..(19): Xaa is A or G
  MOD_RES (20)..(21)..(22)..(23): Xaa is A or G or absent
XGXARVVMNYHYKLXXXXXXXXXKYLVSIPSLQTPAX

SEQ ID NO: 4206 - protein, 38 aa, Artificial Sequence
  Non-cyclic GFR-binding peptide
  MOD_RES (2)..(4)..(36)..(37): Xaa is C or S
HXGXAKVVMNYHYKLIVNNSSDKYLVSIPSLKTPAXXA

SEQ ID NO: 4207 - protein, 34 aa, Artificial Sequence
  Non-cyclic GFR-binding peptide
  MOD_RES (2)..(4): Xaa is C or S
SXKXSRVIMQYNKLVKPKRGVLYLISIASLAQPV

SEQ ID NO: 4208 - protein, 37 aa, Artificial Sequence
  Non-cyclic GFR-binding peptide
  MOD_RES (33)..(33): Xaa is C or S
  MOD_RES (11)..(12)..(13)..(14)..(15): Xaa is A or G
  MOD_RES (16)..(17)..(18)..(19): Xaa is A or G or absent
RVVMNQYNKLXXXXXXXXXLYLVSIASLKTPAXTPKT

SEQ ID NO: 4209 - protein, 41 aa, Artificial Sequence
  Non-cyclic GFR-binding peptide
  MOD_RES (2)..(4)..(39)..(40): Xaa is C or S
  MOD_RES (17)..(18)..(19)..(20)..(21): Xaa is A or G
  MOD_RES (22)..(23)..(24)..(25): Xaa is A or G or absent
RXGXEAVSMGERHKRLXXXXXXXXXYYLVSTASLKTPVXXA

SEQ ID NO: 4210 - protein, 39 aa, Artificial Sequence
  Non-cyclic GFR-binding peptide
  MOD_RES (1)..(35)..(36): Xaa is C or S
  MOD_RES (13)..(14)..(15)..(16)..(17): Xaa is A or G
  MOD_RES (18)..(19)..(20)..(21): Xaa is A or G or absent
XGEVVMDYHYKLXXXXXXXXXKYLMSIPSLETPVXXAKP

SEQ ID NO: 4211 - protein, 38 aa, Artificial Sequence
  Non-cyclic GFR-binding peptide
  MOD_RES (2)..(4)..(36): Xaa is C or S
HXGXSRVVMNRHKRLIVNSSDDYYLVSTASLKTPAXTP

SEQ ID NO: 4212 - protein, 43 aa, Artificial Sequence
  Non-cyclic GFR-binding peptide
  MOD_RES (2)..(4)..(41): Xaa is C or S
  MOD_RES (17)..(18)..(19)..(20)..(21): Xaa is A or G
  MOD_RES (22)..(23)..(24)..(25): Xaa is A or G or absent
EXKXALHDELTRHKRLXXXXXXXXXYYLVSTASLQVQTPRXQV

SEQ ID NO: 4213 - protein, 35 aa, Artificial Sequence
  Non-cyclic GFR-binding peptide
  MOD_RES (2)..(4): Xaa is C or S
HXGXAKVVMNYHYKLIVNNSSDKYLVSIPSLKTPA

SEQ ID NO: 4214 - protein, 34 aa, Artificial Sequence
  Non-cyclic GFR-binding peptide
  MOD_RES (2)..(33)..(34): Xaa is C or S
KXSKVIMRYKKLIKPTKGIFYLISIANLDQSVXX

SEQ ID NO: 4215 - protein, 34 aa, Artificial Sequence
  Non-cyclic GFR-binding peptide
  MOD_RES (32)..(33): Xaa is C or S
AKVVMNYHYKLIVNNSSDKYLVSIPSLKTPAXXA

SEQ ID NO: 4216 - protein, 34 aa, Artificial Sequence
  Non-cyclic GFR-binding peptide
  MOD_RES (2)..(34): Xaa is C or S
GXAKVVMNRYKKLIVNNSSDFYLVSIANLKTPAX

SEQ ID NO: 4217 - protein, 37 aa, Artificial Sequence
  Non-cyclic GFR-binding peptide
  MOD_RES (34)..(34): Xaa is C or S
  MOD_RES (12)..(13)..(14)..(15)..(16): Xaa is A or G
  MOD_RES (17)..(18)..(19)..(20): Xaa is A or G or absent
SRVVMNRHKRLXXXXXXXXXYYLVSTASLKTPAXTPK

SEQ ID NO: 4218 - protein, 38 aa, Artificial Sequence
  Non-cyclic GFR-binding peptide
  MOD_RES (2)..(34): Xaa is C or S
GXSRVVMNQYNKLIVNSSDDLYLVSIASLKTPAXTPKT

SEQ ID NO: 4219 - protein, 40 aa, Artificial Sequence
  Non-cyclic GFR-binding peptide
  MOD_RES (1)..(3)..(34)..(35): Xaa is C or S
XKXSKVIMRHKRLIKPTKGIYYLISTASLDQSVXXPSASA

SEQ ID NO: 4220 - protein, 39 aa, Artificial Sequence
  Non-cyclic GFR-binding peptide
  MOD_RES (2)..(4)..(36)..(37): Xaa is C or S
HXGXARVVMNQYNKLIVNSSDDLYLVSIASLQTPAXXPK

SEQ ID NO: 4221 - protein, 41 aa, Artificial Sequence
  Non-cyclic GFR-binding peptide
  MOD_RES (2)..(4)..(38)..(39): Xaa is C or S
  MOD_RES (16)..(17)..(18)..(19)..(20): Xaa is A or G
  MOD_RES (21)..(22)..(23)..(24): Xaa is A or G or absent
HXGXSRVVMNRHKRLXXXXXXXXXYYLVSTASLKTPAXXPK

SEQ ID NO: 4222 - protein, 39 aa, Artificial Sequence
  Non-cyclic GFR-binding peptide
  MOD_RES (37)..(37): Xaa is C or S
  MOD_RES (13)..(14)..(15)..(16)..(17): Xaa is A or G
  MOD_RES (18)..(19)..(20)..(21): Xaa is A or G or absent
ALHDELTYHYKLXXXXXXXXXKYLVSIPSLQVQTPRXQV

SEQ ID NO: 4223 - protein, 41 aa, Artificial Sequence
  Non-cyclic GFR-binding peptide
  MOD_RES (1)..(35): Xaa is C or S
  MOD_RES (13)..(14)..(15)..(16)..(17): Xaa is A or G
  MOD_RES (18)..(19)..(20)..(21): Xaa is A or G or absent
XSRVVMNQYNKLXXXXXXXXXLYLVSIASLKTPAXTPKTVH

SEQ ID NO: 4224 - protein, 38 aa, Artificial Sequence
  Non-cyclic GFR-binding peptide
  MOD_RES (1)..(35)..(36): Xaa is C or S
  MOD_RES (13)..(14)..(15)..(16)..(17): Xaa is A or G
  MOD_RES (18)..(19)..(20)..(21): Xaa is A or G or absent
XGEVVMERHKRLXXXXXXXXXYYLMSTASLETPVXXAK

SEQ ID NO: 4225 - protein, 40 aa, Artificial Sequence
  Non-cyclic GFR-binding peptide
  MOD_RES (1)..(35)..(36): Xaa is C or S
  MOD_RES (13)..(14)..(15)..(16)..(17): Xaa is A or G
  MOD_RES (18)..(19)..(20)..(21): Xaa is A or G or absent
XGEVVMERHKRLXXXXXXXXXYYLMSTASLETPVXXAKPI

SEQ ID NO: 4226 - protein, 34 aa, Artificial Sequence
  Non-cyclic GFR-binding peptide
  MOD_RES (31)..(32): Xaa is C or S
EVVMEYHYKLVVKDYEDKYLMSIPSLETPVXXAK

SEQ ID NO: 4227 - protein, 40 aa, Artificial Sequence
  Non-cyclic GFR-binding peptide
  MOD_RES (34)..(35): Xaa is C or S
  MOD_RES (12)..(13)..(14)..(15)..(16): Xaa is A or G
  MOD_RES (17)..(18)..(19)..(20): Xaa is A or G or absent
GEVVMERYKKLXXXXXXXXXFYLMSIANLETPVXXAKPIS

SEQ ID NO: 4228 - protein, 33 aa, Artificial Sequence
  Non-cyclic GFR-binding peptide
  MOD_RES (33)..(33): Xaa is C or S
  MOD_RES (11)..(12)..(13)..(14)..(15): Xaa is A or G
  MOD_RES (16)..(17)..(18)..(19): Xaa is A or G or absent
RVVMNQYNKLXXXXXXXXXLYLVSIASLKTPAX

SEQ ID NO: 4229 - protein, 33 aa, Artificial Sequence
  Non-cyclic GFR-binding peptide
  MOD_RES (33)..(33): Xaa is C or S
  MOD_RES (11)..(12)..(13)..(14)..(15): Xaa is A or G
  MOD_RES (16)..(17)..(18)..(19): Xaa is A or G or absent
KVVMNQYNKLXXXXXXXXXLYLVSIASLKTPAX

SEQ ID NO: 4230 - protein, 38 aa, Artificial Sequence
  Non-cyclic GFR-binding peptide
  MOD_RES (1)..(3)..(36)..(37): Xaa is C or S
  MOD_RES (14)..(15)..(16)..(17)..(18): Xaa is A or G
  MOD_RES (19)..(20)..(21)..(22): Xaa is A or G or absent
XKXSRVIMRHKRLXXXXXXXXXYYLISTASLAQPVXXP

SEQ ID NO: 4231 - protein, 39 aa, Artificial Sequence
  Non-cyclic GFR-binding peptide
  MOD_RES (2)..(4)..(37)..(38): Xaa is C or S
  MOD_RES (15)..(16)..(17)..(18)..(19): Xaa is A or G
  MOD_RES (20)..(21)..(22)..(23): Xaa is A or G or absent
SXKXSKVVMRHKRLXXXXXXXXXYYLISTASLDQPVXXP

SEQ ID NO: 4232 - protein, 38 aa, Artificial Sequence
  Non-cyclic GFR-binding peptide
  MOD_RES (1)..(33)..(34): Xaa is C or S
XSRVVMNRHKRLIVNSSDDYYLVSTASLKTPAXXPKPV

SEQ ID NO: 4233 - protein, 37 aa, Artificial Sequence
  Non-cyclic GFR-binding peptide
  MOD_RES (1)..(35)..(36): Xaa is C or S
  MOD_RES (13)..(14)..(15)..(16)..(17): Xaa is A or G
  MOD_RES (18)..(19)..(20)..(21): Xaa is A or G or absent
XAKVVMNYHYKLXXXXXXXXXKYLVSIPSLKTPAXXA

SEQ ID NO: 4234 - protein, 32 aa, Artificial Sequence; identical to SEQ ID NO: 1885
  Non-cyclic GFR-binding peptide

SEQ ID NO: 4235 - protein, 33 aa, Artificial Sequence
  Non-cyclic GFR-binding peptide
  MOD_RES (11)..(12)..(13)..(14)..(15): Xaa is A or G
  MOD_RES (16)..(17)..(18)..(19): Xaa is A or G or absent
HDELTRHKRLXXXXXXXXXYYLVSTASLQVQTP

SEQ ID NO: 4236 - protein, 39 aa, Artificial Sequence
  Non-cyclic GFR-binding peptide
  MOD_RES (1)..(3): Xaa is C or S
XKXALHDELTRHKRLFIPKKRVIEYYLVSTASLQVQTPR

SEQ ID NO: 4237 - protein, 36 aa, Artificial Sequence
  Non-cyclic GFR-binding peptide
  MOD_RES (34)..(34): Xaa is C or S
  MOD_RES (12)..(13)..(14)..(15)..(16): Xaa is A or G
  MOD_RES (17)..(18)..(19)..(20): Xaa is A or G or absent
SRVVMNRHKRLXXXXXXXXXYYLVSTASLKTPAXTP

SEQ ID NO: 4238 - protein, 38 aa, Artificial Sequence
  Non-cyclic GFR-binding peptide
  MOD_RES (1)..(3)..(36)..(37): Xaa is C or S
  MOD_RES (14)..(15)..(16)..(17)..(18): Xaa is A or G
  MOD_RES (19)..(20)..(21)..(22): Xaa is A or G or absent
XKXSKVIMRYKKLXXXXXXXXXFYLISIANLDQSVXXP

SEQ ID NO: 4239 - protein, 37 aa, Artificial Sequence
  Non-cyclic GFR-binding peptide
  MOD_RES (1)..(3)..(37): Xaa is C or S
  MOD_RES (15)..(16)..(17)..(18)..(19): Xaa is A or G
  MOD_RES (20)..(21)..(22)..(23): Xaa is A or G or absent
XGXSRVVMNRHKRLXXXXXXXXXYYLVSTASLKTPAX

SEQ ID NO: 4240 - protein, 36 aa, Artificial Sequence
  Non-cyclic GFR-binding peptide
  MOD_RES (2)..(33)..(34): Xaa is C or S
KXSKVIMRHKRLIKPTKGIYYLISTASLDQSVXXPS

SEQ ID NO: 4241 - protein, 37 aa, Artificial Sequence
  Non-cyclic GFR-binding peptide
  MOD_RES (2)..(2): Xaa is C or S
  MOD_RES (15)..(16)..(17)..(18)..(19): Xaa is A or G
  MOD_RES (20)..(21)..(22)..(23): Xaa is A or G or absent
KXALHDELTQYNKLXXXXXXXXXLYLVSIASLQVQTP

SEQ ID NO: 4242 - protein, 39 aa, Artificial Sequence
  Non-cyclic GFR-binding peptide
  MOD_RES (1)..(3)..(35)..(36): Xaa is C or S
XGXGEVVMERYKKLVVKDYEDFYLMSIANLETPVXXAKP

SEQ ID NO: 4243 - protein, 43 aa, Artificial Sequence
  Non-cyclic GFR-binding peptide
  MOD_RES (2)..(4)..(38)..(39): Xaa is C or S
  MOD_RES (16)..(17)..(18)..(19)..(20): Xaa is A or G
  MOD_RES (21)..(22)..(23)..(24): Xaa is A or G or absent
HXGXAKVVMNQYNKLXXXXXXXXXLYLVSIASLKTPAXXAKPV

SEQ ID NO: 4244 - protein, 37 aa, Artificial Sequence
  Non-cyclic GFR-binding peptide
  MOD_RES (2)..(4): Xaa is C or S
  MOD_RES (16)..(17)..(18)..(19)..(20): Xaa is A or G
  MOD_RES (21)..(22)..(23)..(24): Xaa is A or G or absent
RXGXGEVVMEYHYKLXXXXXXXXXKYLMSIPSLETPV

SEQ ID NO: 4245 - protein, 37 aa, Artificial Sequence
  Non-cyclic GFR-binding peptide
  MOD_RES (34)..(35): Xaa is C or S
  MOD_RES (12)..(13)..(14)..(15)..(16): Xaa is A or G
  MOD_RES (17)..(18)..(19)..(20): Xaa is A or G or absent
SRVVMNRHKRLXXXXXXXXXYYLVSTASLKTPAXXPK

SEQ ID NO: 4246 - protein, 41 aa, Artificial Sequence
  Non-cyclic GFR-binding peptide
  MOD_RES (1)..(3)..(40): Xaa is C or S
  MOD_RES (16)..(17)..(18)..(19)..(20): Xaa is A or G
  MOD_RES (21)..(22)..(23)..(24): Xaa is A or G or absent
XKXALHDELTRYKKLXXXXXXXXXFYLVSIANLQVQTPRXQ

SEQ ID NO: 4247 - protein, 41 aa, Artificial Sequence
  Non-cyclic GFR-binding peptide
  MOD_RES (1)..(3)..(35)..(36): Xaa is C or S
XGXGEVVMDYHYKLVVKENEDKYLMSIPSLETPVXXAKPIK

SEQ ID NO: 4248 - protein, 39 aa, Artificial Sequence
  Non-cyclic GFR-binding peptide
  MOD_RES (35)..(35): Xaa is C or S
  MOD_RES (11)..(12)..(13)..(14)..(15): Xaa is A or G
  MOD_RES (16)..(17)..(18)..(19): Xaa is A or G or absent
HDELTRHKRLXXXXXXXXXYYLVSTASLQVQTPRXQVNR

SEQ ID NO: 4249 - protein, 40 aa, Artificial Sequence
  Non-cyclic GFR-binding peptide
  MOD_RES (1)..(3)..(36)..(37): Xaa is C or S
  MOD_RES (14)..(15)..(16)..(17)..(18): Xaa is A or G
  MOD_RES (19)..(20)..(21)..(22): Xaa is A or G or absent
XKXSKVVMQYNKLXXXXXXXXXLYLISIASLDQPVXXPSA

SEQ ID NO: 4250 - protein, 38 aa, Artificial Sequence
  Non-cyclic GFR-binding peptide
  MOD_RES (32)..(33): Xaa is C or S
GEVVMDYHYKLVVKENEDKYLMSIPSLETPVXXAKPIK

SEQ ID NO: 4251 - protein, 32 aa, Artificial Sequence
  Non-cyclic GFR-binding peptide
  MOD_RES (11)..(12)..(13)..(14)..(15): Xaa is A or G
  MOD_RES (16)..(17)..(18)..(19): Xaa is A or G or absent
SRVIMRHKRLXXXXXXXXXYYLISTASLAQPV

SEQ ID NO: 4252 - protein, 37 aa, Artificial Sequence
  Non-cyclic GFR-binding peptide
  MOD_RES (36)..(36): Xaa is C or S
  MOD_RES (12)..(13)..(14)..(15)..(16): Xaa is A or G
  MOD_RES (17)..(18)..(19)..(20): Xaa is A or G or absent
LHDELTRHKRLXXXXXXXXXYYLVSTASLQVQTPRXQ

SEQ ID NO: 4253 - protein, 37 aa, Artificial Sequence
  Non-cyclic GFR-binding peptide
  MOD_RES (2)..(35)..(36): Xaa is C or S
  MOD_RES (13)..(14)..(15)..(16)..(17): Xaa is A or G
  MOD_RES (18)..(19)..(20)..(21): Xaa is A or G or absent
KXSRVIMQYNKLXXXXXXXXXLYLISIASLAQPVXXP

SEQ ID NO: 4254 - protein, 35 aa, Artificial Sequence
  Non-cyclic GFR-binding peptide
  MOD_RES (2)..(2): Xaa is C or S
  MOD_RES (14)..(15)..(16)..(17)..(18): Xaa is A or G
  MOD_RES (19)..(20)..(21)..(22): Xaa is A or G or absent
GXARVVMNRHKRLXXXXXXXXXYYLVSTASLQTPA

SEQ ID NO: 4255 - protein, 31 aa, Artificial Sequence
  Non-cyclic GFR-binding peptide
SRVVMNQYNKLIVNSSDDLYLVSIASLKTPA

SEQ ID NO: 4256 - protein, 41 aa, Artificial Sequence
  Non-cyclic GFR-binding peptide
  MOD_RES (37)..(37): Xaa is C or S
ALHDELTRYKKLFIPKKRVIEFYLVSIANLQVQTPRXQVNR

SEQ ID NO: 4257 - protein, 38 aa, Artificial Sequence
  Non-cyclic GFR-binding peptide
  MOD_RES (2)..(4)..(38): Xaa is C or S
  MOD_RES (16)..(17)..(18)..(19)..(20): Xaa is A or G
  MOD_RES (21)..(22)..(23)..(24): Xaa is A or G or absent
RXGXGEVVMERHKRLXXXXXXXXXYYLMSTASLETPVX

SEQ ID NO: 4258 - protein, 35 aa, Artificial Sequence
  Non-cyclic GFR-binding peptide
  MOD_RES (2)..(35): Xaa is C or S
  MOD_RES (13)..(14)..(15)..(16)..(17): Xaa is A or G
  MOD_RES (18)..(19)..(20)..(21): Xaa is A or G or absent
KXSKVIMRYKKLXXXXXXXXXFYLISIANLDQSVX

SEQ ID NO: 4259 - protein, 37 aa, Artificial Sequence
  Non-cyclic GFR-binding peptide
  MOD_RES (1)..(35)..(36): Xaa is C or S
  MOD_RES (13)..(14)..(15)..(16)..(17): Xaa is A or G
  MOD_RES (18)..(19)..(20)..(21): Xaa is A or G or absent
XGEVVMDRYKKLXXXXXXXXXFYLMSIANLETPVXXA

SEQ ID NO: 4260 - protein, 36 aa, Artificial Sequence
  Non-cyclic GFR-binding peptide
ALHDELTYHYKLFIPKKRVIEKYLVSIPSLQVQTPR

SEQ ID NO: 4261 - protein, 33 aa, Artificial Sequence
  Non-cyclic GFR-binding peptide
  MOD_RES (31)..(31): Xaa is C or S
RVVMNQYNKLIVNSSDDLYLVSIASLKTPAXTP

SEQ ID NO: 4262 - protein, 33 aa, Artificial Sequence
  Non-cyclic GFR-binding peptide
  MOD_RES (1)..(32)..(33): Xaa is C or S
XSRVIMQYNKLVKPKRGVLYLISIASLAQPVXX

SEQ ID NO: 4263 - protein, 37 aa, Artificial Sequence
  Non-cyclic GFR-binding peptide
  MOD_RES (2)..(36)..(37): Xaa is C or S
  MOD_RES (14)..(15)..(16)..(17)..(18): Xaa is A or G
  MOD_RES (19)..(20)..(21)..(22): Xaa is A or G or absent
GXGEVVMERHKRLXXXXXXXXXYYLMSTASLETPVXX

SEQ ID NO: 4264 - protein, 37 aa, Artificial Sequence
  Non-cyclic GFR-binding peptide
  MOD_RES (1)..(35)..(36): Xaa is C or S
  MOD_RES (13)..(14)..(15)..(16)..(17): Xaa is A or G
  MOD_RES (18)..(19)..(20)..(21): Xaa is A or G or absent
XARVVMNYHYKLXXXXXXXXXKYLVSIPSLQTPAXXP

SEQ ID NO: 4265 - protein, 41 aa, Artificial Sequence
  Non-cyclic GFR-binding peptide
  MOD_RES (1)..(35)..(36): Xaa is C or S
  MOD_RES (13)..(14)..(15)..(16)..(17): Xaa is A or G
  MOD_RES (18)..(19)..(20)..(21): Xaa is A or G or absent
XARVVMNQYNKLXXXXXXXXXLYLVSIASLQTPAXXPKPVT

SEQ ID NO: 4266 - protein, 36 aa, Artificial Sequence
  Non-cyclic GFR-binding peptide
  MOD_RES (1)..(33)..(34): Xaa is C or S
XARVVMNQYNKLIVNSSDDLYLVSIASLQTPAXXPK

SEQ ID NO: 4267 - protein, 36 aa, Artificial Sequence
  Non-cyclic GFR-binding peptide
  MOD_RES (33)..(34): Xaa is C or S
  MOD_RES (11)..(12)..(13)..(14)..(15): Xaa is A or G
  MOD_RES (16)..(17)..(18)..(19): Xaa is A or G or absent
KVVMNRYKKLXXXXXXXXXFYLVSIANLKTPAXXAK

SEQ ID NO: 4268 - protein, 40 aa, Artificial Sequence
  Non-cyclic GFR-binding peptide
  MOD_RES (1)..(3)..(35)..(36): Xaa is C or S
XGXARVVMNRHKRLIVNSSDDYYLVSTASLQTPAXXPKPV

SEQ ID NO: 4269 - protein, 34 aa, Artificial Sequence
  Non-cyclic GFR-binding peptide
  MOD_RES (1)..(3)..(34): Xaa is C or S
XKXSRVIMRHKRLVKPKRGVYYLISTASLAQPVX

SEQ ID NO: 4270 - protein, 34 aa, Artificial Sequence
  Non-cyclic GFR-binding peptide
  MOD_RES (1)..(3)..(34): Xaa is C or S
XKXSKVVMRYKKLVKPTRGVFYLISIANLDQPVX

SEQ ID NO: 4271 - protein, 38 aa, Artificial Sequence
  Non-cyclic GFR-binding peptide
  MOD_RES (1)..(35)..(36): Xaa is C or S
  MOD_RES (13)..(14)..(15)..(16)..(17): Xaa is A or G
  MOD_RES (18)..(19)..(20)..(21): Xaa is A or G or absent
XSRVVMNYHYKLXXXXXXXXXKYLVSIPSLKTPAXXPK

SEQ ID NO: 4272 - protein, 36 aa, Artificial Sequence
  Non-cyclic GFR-binding peptide
  MOD_RES (36)..(36): Xaa is C or S
  MOD_RES (12)..(13)..(14)..(15)..(16): Xaa is A or G
  MOD_RES (17)..(18)..(19)..(20): Xaa is A or G or absent
LHDELTQYNKLXXXXXXXXXLYLVSIASLQVQTPRX

SEQ ID NO: 4273 - protein, 37 aa, Artificial Sequence
  Non-cyclic GFR-binding peptide
  MOD_RES (37)..(37): Xaa is C or S
  MOD_RES (13)..(14)..(15)..(16)..(17): Xaa is A or G
  MOD_RES (18)..(19)..(20)..(21): Xaa is A or G or absent
ALHDELTQYNKLXXXXXXXXXLYLVSIASLQVQTPRX

SEQ ID NO: 4274 - protein, 42 aa, Artificial Sequence
  Non-cyclic GFR-binding peptide
  MOD_RES (2)..(4)..(38): Xaa is C or S
  MOD_RES (16)..(17)..(18)..(19)..(20): Xaa is A or G
  MOD_RES (21)..(22)..(23)..(24): Xaa is A or G or absent
HXGXSRVVMNRHKRLXXXXXXXXXYYLVSTASLKTPAXTPKT

SEQ ID NO: 4275 - protein, 36 aa, Artificial Sequence
  Non-cyclic GFR-binding peptide
  MOD_RES (2)..(4)..(35)..(36): Xaa is C or S
SXKXSKVIMYHYKLIKPTKGIKYLISIPSLDQSVXX

SEQ ID NO: 4276 - protein, 38 aa, Artificial Sequence
  Non-cyclic GFR-binding peptide
  MOD_RES (1)..(36)..(37): Xaa is C or S
  MOD_RES (14)..(15)..(16)..(17)..(18): Xaa is A or G
  MOD_RES (19)..(20)..(21)..(22): Xaa is A or G or absent
XEAVSMGEQYNKLXXXXXXXXXLYLVSIASLKTPVXXA

SEQ ID NO: 4277 - protein, 34 aa, Artificial Sequence
  Non-cyclic GFR-binding peptide
  MOD_RES (31)..(32): Xaa is C or S
KVVMNYHYKLIVNNSSDKYLVSIPSLKTPAXXAK

SEQ ID NO: 4278 - protein, 38 aa, Artificial Sequence
  Non-cyclic GFR-binding peptide
  MOD_RES (36)..(36): Xaa is C or S
LHDELTRHKRLFIPKKRVIEYYLVSTASLQVQTPRXQV

SEQ ID NO: 4279 - protein, 38 aa, Artificial Sequence
  Non-cyclic GFR-binding peptide
  MOD_RES (1)..(3): Xaa is C or S
XKXALHDELTRYKKLFIPKKRVIEFYLVSIANLQVQTP

SEQ ID NO: 4280 - protein, 40 aa, Artificial Sequence
  Non-cyclic GFR-binding peptide
  MOD_RES (1)..(3)..(35): Xaa is C or S
XGXSRVVMNRHKRLIVNSSDDYYLVSTASLKTPAXTPKTV

SEQ ID NO: 4281 - protein, 36 aa, Artificial Sequence
  Non-cyclic GFR-binding peptide
  MOD_RES (1)..(3)..(35)..(36): Xaa is C or S
XGXSRVVMNQYNKLIVNSSDDLYLVSIASLKTPAXX

SEQ ID NO: 4282 - protein, 43 aa, Artificial Sequence
  Non-cyclic GFR-binding peptide
  MOD_RES (1)..(3)..(37): Xaa is C or S
  MOD_RES (15)..(16)..(17)..(18)..(19): Xaa is A or G
  MOD_RES (20)..(21)..(22)..(23): Xaa is A or G or absent
XGXSRVVMNYHYKLXXXXXXXXXKYLVSIPSLKTPAXTPKTVH

SEQ ID NO: 4283 - protein, 37 aa, Artificial Sequence
  Non-cyclic GFR-binding peptide
  MOD_RES (2)..(34)..(35): Xaa is C or S
GXAKVVMNQYNKLIVNNSSDLYLVSIASLKTPAXXAK

SEQ ID NO: 4284 - protein, 33 aa, Artificial Sequence
  Non-cyclic GFR-binding peptide
  MOD_RES (1)..(33): Xaa is C or S
XARVVMNYHYKLIVNSSDDKYLVSIPSLQTPAX

SEQ ID NO: 4285 - protein, 38 aa, Artificial Sequence
  Non-cyclic GFR-binding peptide
  MOD_RES (1)..(3)..(36)..(37): Xaa is C or S
XGXEAVSMGEQYNKLTPVGMDDLYLVSIASLKTPVXXA

SEQ ID NO: 4286 - protein, 31 aa, Artificial Sequence
  Non-cyclic GFR-binding peptide
  MOD_RES (1)..(1): Xaa is C or S
XSKVIMRHKRLIKPTKGIYYLISTASLDQSV

SEQ ID NO: 4287 - protein, 43 aa, Artificial Sequence
  Non-cyclic GFR-binding peptide
  MOD_RES (2)..(39): Xaa is C or S
  MOD_RES (15)..(16)..(17)..(18)..(19): Xaa is A or G
  MOD_RES (20)..(21)..(22)..(23): Xaa is A or G or absent
KXALHDELTRYKKLXXXXXXXXXFYLVSIANLQVQTPRXQVNR

SEQ ID NO: 4288 - protein, 41 aa, Artificial Sequence
  Non-cyclic GFR-binding peptide
  MOD_RES (2)..(4)..(38)..(39): Xaa is C or S
  MOD_RES (16)..(17)..(18)..(19)..(20): Xaa is A or G
  MOD_RES (21)..(22)..(23)..(24): Xaa is A or G or absent
HXGXSRVVMNYHYKLXXXXXXXXXKYLVSIPSLKTPAXXPK

SEQ ID NO: 4289 - protein, 37 aa, Artificial Sequence
  Non-cyclic GFR-binding peptide
  MOD_RES (1)..(3)..(35): Xaa is C or S
XGXSRVVMNQYNKLIVNSSDDLYLVSIASLKTPAXTP

SEQ ID NO: 4290 - protein, 36 aa, Artificial Sequence
  Non-cyclic GFR-binding peptide
  MOD_RES (1)..(32)..(33): Xaa is C or S
XSRVIMQYNKLVKPKRGVLYLISIASLAQPVXXPAA

SEQ ID NO: 4291 - protein, 34 aa, Artificial Sequence
  Non-cyclic GFR-binding peptide
  MOD_RES (31)..(32): Xaa is C or S
KVVMNQYNKLIVNNSSDLYLVSIASLKTPAXXAK

SEQ ID NO: 4292 - protein, 33 aa, Artificial Sequence
  Non-cyclic GFR-binding peptide
  MOD_RES (1)..(3): Xaa is C or S
XKXSKVIMRYKKLIKPTKGIFYLISIANLDQSV

SEQ ID NO: 4293 - protein, 41 aa, Artificial Sequence
  Non-cyclic GFR-binding peptide
  MOD_RES (2)..(4)..(41): Xaa is C or S
  MOD_RES (17)..(18)..(19)..(20)..(21): Xaa is A or G
  MOD_RES (22)..(23)..(24)..(25): Xaa is A or G or absent
EXKXALHDELTRHKRLXXXXXXXXXYYLVSTASLQVQTPRX

SEQ ID NO: 4294 - protein, 37 aa, Artificial Sequence
  Non-cyclic GFR-binding peptide
  MOD_RES (2)..(34)..(35): Xaa is C or S
GXARVVMNQYNKLIVNSSDDLYLVSIASLQTPAXXPK

SEQ ID NO: 4295 - protein, 39 aa, Artificial Sequence
  Non-cyclic GFR-binding peptide
  MOD_RES (1)..(34)..(35): Xaa is C or S
  MOD_RES (12)..(13)..(14)..(15)..(16): Xaa is A or G
  MOD_RES (17)..(18)..(19)..(20): Xaa is A or G or absent
XSKVVMRYKKLXXXXXXXXXFYLISIANLDQPVXXPSAS

SEQ ID NO: 4296 - protein, 37 aa, Artificial Sequence
  Non-cyclic GFR-binding peptide
  MOD_RES (1)..(3)..(37): Xaa is C or S
  MOD_RES (15)..(16)..(17)..(18)..(19): Xaa is A or G
  MOD_RES (20)..(21)..(22)..(23): Xaa is A or G or absent
XGXAKVVMNQYNKLXXXXXXXXXLYLVSIASLKTPAX

SEQ ID NO: 4297 - protein, 42 aa, Artificial Sequence
  Non-cyclic GFR-binding peptide
  MOD_RES (1)..(3)..(37)..(38): Xaa is C or S
  MOD_RES (15)..(16)..(17)..(18)..(19): Xaa is A or G
  MOD_RES (20)..(21)..(22)..(23): Xaa is A or G or absent
XGXGEVVMDRYKKLXXXXXXXXXFYLMSIANLETPVXXAKPI

SEQ ID NO: 4298 - protein, 38 aa, Artificial Sequence
  Non-cyclic GFR-binding peptide
  MOD_RES (2)..(4)..(36)..(37): Xaa is C or S
HXGXSRVVMNQYNKLIVNSSDDLYLVSIASLKTPAXXP

SEQ ID NO: 4299 - protein, 35 aa, Artificial Sequence
  Non-cyclic GFR-binding peptide
  MOD_RES (32)..(33): Xaa is C or S
SRVVMNYHYKLIVNSSDDKYLVSIPSLKTPAXXPK

SEQ ID NO: 4300 - protein, 38 aa, Artificial Sequence
  Non-cyclic GFR-binding peptide
  MOD_RES (33)..(33): Xaa is C or S
  MOD_RES (11)..(12)..(13)..(14)..(15): Xaa is A or G
  MOD_RES (16)..(17)..(18)..(19): Xaa is A or G or absent
RVVMNYHYKLXXXXXXXXXKYLVSIPSLKTPAXTPKTV

SEQ ID NO: 4301 - protein, 34 aa, Artificial Sequence
  Non-cyclic GFR-binding peptide
  MOD_RES (2)..(2): Xaa is C or S
GXEAVSMGEQYNKLTPVGMDDLYLVSIASLKTPV

SEQ ID NO: 4302 - protein, 41 aa, Artificial Sequence
  Non-cyclic GFR-binding peptide
  MOD_RES (2)..(4)..(36)..(37): Xaa is C or S
HXGXAKVVMNRYKKLIVNNSSDFYLVSIANLKTPAXXAKPV

SEQ ID NO: 4303 - protein, 33 aa, Artificial Sequence
  Non-cyclic GFR-binding peptide
  MOD_RES (2)..(2): Xaa is C or S
GXGEVVMDYHYKLVVKENEDKYLMSIPSLETPV

SEQ ID NO: 4304 - protein, 38 aa, Artificial Sequence
  Non-cyclic GFR-binding peptide
  MOD_RES (1)..(3)..(34)..(35): Xaa is C or S
XKXSKVVMRYKKLVKPTRGVFYLISIANLDQPVXXPSA

SEQ ID NO: 4305 - protein, 39 aa, Artificial Sequence
  Non-cyclic GFR-binding peptide
  MOD_RES (34)..(35): Xaa is C or S
  MOD_RES (12)..(13)..(14)..(15)..(16): Xaa is A or G
  MOD_RES (17)..(18)..(19)..(20): Xaa is A or G or absent
ARVVMNRHKRLXXXXXXXXXYYLVSTASLQTPAXXPKPV

SEQ ID NO: 4306 - protein, 39 aa, Artificial Sequence
  Non-cyclic GFR-binding peptide
  MOD_RES (2)..(35)..(36): Xaa is C or S
  MOD_RES (13)..(14)..(15)..(16)..(17): Xaa is A or G
  MOD_RES (18)..(19)..(20)..(21): Xaa is A or G or absent
KXSKVIMRYKKLXXXXXXXXXFYLISIANLDQSVXXPSA

SEQ ID NO: 4307 - protein, 40 aa, Artificial Sequence
  Non-cyclic GFR-binding peptide
  MOD_RES (1)..(3)..(35)..(36): Xaa is C or S
XGXGEVVMEYHYKLVVKDYEDKYLMSIPSLETPVXXAKPI

SEQ ID NO: 4308 - protein, 38 aa, Artificial Sequence
  Non-cyclic GFR-binding peptide
  MOD_RES (1)..(34)..(35): Xaa is C or S
  MOD_RES (12)..(13)..(14)..(15)..(16): Xaa is A or G
  MOD_RES (17)..(18)..(19)..(20): Xaa is A or G or absent
XSKVVMQYNKLXXXXXXXXXLYLISIASLDQPVXXPSA

SEQ ID NO: 4309 - protein, 36 aa, Artificial Sequence
  Non-cyclic GFR-binding peptide
  MOD_RES (1)..(33)..(34): Xaa is C or S
XSRVVMNRHKRLIVNSSDDYYLVSTASLKTPAXXPK

SEQ ID NO: 4310 - protein, 43 aa, Artificial Sequence
  Non-cyclic GFR-binding peptide
  MOD_RES (1)..(3)..(40): Xaa is C or S
XKXALHDELTQYNKLFIPKKRVIELYLVSIASLQVQTPRXQVN

SEQ ID NO: 4311 - protein, 41 aa, Artificial Sequence
  Non-cyclic GFR-binding peptide
  MOD_RES (2)..(4)..(37)..(38): Xaa is C or S
  MOD_RES (15)..(16)..(17)..(18)..(19): Xaa is A or G
  MOD_RES (20)..(21)..(22)..(23): Xaa is A or G or absent
SXKXSKVIMRHKRLXXXXXXXXXYYLISTASLDQSVXXPSA

SEQ ID NO: 4312 - protein, 38 aa, Artificial Sequence
  Non-cyclic GFR-binding peptide
  MOD_RES (1)..(3)..(34)..(35): Xaa is C or S
XKXSKVIMRYKKLIKPTKGIFYLISIANLDQSVXXPSA

SEQ ID NO: 4313 - protein, 37 aa, Artificial Sequence
  Non-cyclic GFR-binding peptide
  MOD_RES (2)..(33)..(34): Xaa is C or S
KXSRVIMRHKRLVKPKRGVYYLISTASLAQPVXXPAA

SEQ ID NO: 4314 - protein, 37 aa, Artificial Sequence
  Non-cyclic GFR-binding peptide
  MOD_RES (32)..(32): Xaa is C or S
SRVVMNYHYKLIVNSSDDKYLVSIPSLKTPAXTPKTV

SEQ ID NO: 4315 - protein, 39 aa, Artificial Sequence
  Non-cyclic GFR-binding peptide
  MOD_RES (1)..(3)..(34)..(35): Xaa is C or S
XKXSKVVMRHKRLVKPTRGVYYLISTASLDQPVXXPSAS

SEQ ID NO: 4316 - protein, 37 aa, Artificial Sequence
  Non-cyclic GFR-binding peptide
  MOD_RES (1)..(3)..(35): Xaa is C or S
XGXSRVVMNYHYKLIVNSSDDKYLVSIPSLKTPAXTP

SEQ ID NO: 4317 - protein, 31 aa, Artificial Sequence
  Non-cyclic GFR-binding peptide
  MOD_RES (1)..(1): Xaa is C or S
XSKVVMYHYKLVKPTRGVKYLISIPSLDQPV

SEQ ID NO: 4318 - protein, 38 aa, Artificial Sequence
  Non-cyclic GFR-binding peptide
  MOD_RES (1)..(34)..(35): Xaa is C or S
  MOD_RES (12)..(13)..(14)..(15)..(16): Xaa is A or G
  MOD_RES (17)..(18)..(19)..(20): Xaa is A or G or absent
XSKVVMRHKRLXXXXXXXXXYYLISTASLDQPVXXPSA

SEQ ID NO: 4319 - protein, 32 aa, Artificial Sequence
  Non-cyclic GFR-binding peptide
  MOD_RES (32)..(32): Xaa is C or S
GEVVMDRHKRLVVKENEDYYLMSTASLETPVX

SEQ ID NO: 4320 - protein, 34 aa, Artificial Sequence
  Non-cyclic GFR-binding peptide
  MOD_RES (34)..(34): Xaa is C or S
  MOD_RES (12)..(13)..(14)..(15)..(16): Xaa is A or G
  MOD_RES (17)..(18)..(19)..(20): Xaa is A or G or absent
GEVVMERYKKLXXXXXXXXXFYLMSIANLETPVX

SEQ ID NO: 4321 - protein, 39 aa, Artificial Sequence
  Non-cyclic GFR-binding peptide
  MOD_RES (2)..(37)..(38): Xaa is C or S
  MOD_RES (15)..(16)..(17)..(18)..(19): Xaa is A or G
  MOD_RES (20)..(21)..(22)..(23): Xaa is A or G or absent
GXEAVSMGERYKKLXXXXXXXXXFYLVSIANLKTPVXXA

SEQ ID NO: 4322 - protein, 38 aa, Artificial Sequence
  Non-cyclic GFR-binding peptide
  MOD_RES (1)..(38): Xaa is C or S
  MOD_RES (14)..(15)..(16)..(17)..(18): Xaa is A or G
  MOD_RES (19)..(20)..(21)..(22): Xaa is A or G or absent
XALHDELTYHYKLXXXXXXXXXKYLVSIPSLQVQTPRX

SEQ ID NO: 4323 - protein, 43 aa, Artificial Sequence
  Non-cyclic GFR-binding peptide
  MOD_RES (2)..(4)..(38): Xaa is C or S
  MOD_RES (16)..(17)..(18)..(19)..(20): Xaa is A or G
  MOD_RES (21)..(22)..(23)..(24): Xaa is A or G or absent
HXGXSRVVMNYHYKLXXXXXXXXXKYLVSIPSLKTPAXTPKTV

SEQ ID NO: 4324 - protein, 31 aa, Artificial Sequence
  Non-cyclic GFR-binding peptide
GEVVMDRYKKLVVKENEDFYLMSIANLETPV

SEQ ID NO: 4325 - protein, 38 aa, Artificial Sequence
  Non-cyclic GFR-binding peptide
  MOD_RES (2)..(36)..(37): Xaa is C or S
  MOD_RES (14)..(15)..(16)..(17)..(18): Xaa is A or G
  MOD_RES (19)..(20)..(21)..(22): Xaa is A or G or absent
GXAKVVMNYHYKLXXXXXXXXXKYLVSIPSLKTPAXXA

SEQ ID NO: 4326 - protein, 40 aa, Artificial Sequence
  Non-cyclic GFR-binding peptide
  MOD_RES (34)..(35): Xaa is C or S
  MOD_RES (12)..(13)..(14)..(15)..(16): Xaa is A or G
  MOD_RES (17)..(18)..(19)..(20): Xaa is A or G or absent
ARVVMNYHYKLXXXXXXXXXKYLVSIPSLQTPAXXPKPVT

SEQ ID NO: 4327 - protein, 40 aa, Artificial Sequence
  Non-cyclic GFR-binding peptide
  MOD_RES (1)..(3)..(35)..(36): Xaa is C or S
XGXARVVMNQYNKLIVNSSDDLYLVSIASLQTPAXXPKPV

SEQ ID NO: 4328 - protein, 38 aa, Artificial Sequence
  Non-cyclic GFR-binding peptide
  MOD_RES (33)..(34): Xaa is C or S
  MOD_RES (11)..(12)..(13)..(14)..(15): Xaa is A or G
  MOD_RES (16)..(17)..(18)..(19): Xaa is A or G or absent
SKVVMRYKKLXXXXXXXXXFYLISIANLDQPVXXPSAS

SEQ ID NO: 4329 - protein, 39 aa, Artificial Sequence
  Non-cyclic GFR-binding peptide
  MOD_RES (1)..(3)..(34)..(35): Xaa is C or S
XKXSKVIMRHKRLIKPTKGIYYLISTASLDQSVXXPSAS

SEQ ID NO: 4330 - protein, 37 aa, Artificial Sequence
  Non-cyclic GFR-binding peptide
  MOD_RES (32)..(33): Xaa is C or S
ARVVMNRHKRLIVNSSDDYYLVSTASLQTPAXXPKPV

SEQ ID NO: 4331 - protein, 37 aa, Artificial Sequence
  Non-cyclic GFR-binding peptide
  MOD_RES (2)..(36)..(37): Xaa is C or S
  MOD_RES (14)..(15)..(16)..(17)..(18): Xaa is A or G
  MOD_RES (19)..(20)..(21)..(22): Xaa is A or G or absent
GXARVVMNYHYKLXXXXXXXXXKYLVSIPSLQTPAXX

SEQ ID NO: 4332 - protein, 32 aa, Artificial Sequence
  Non-cyclic GFR-binding peptide
  MOD_RES (11)..(12)..(13)..(14)..(15): Xaa is A or G
  MOD_RES (16)..(17)..(18)..(19): Xaa is A or G or absent
EVVMERHKRLXXXXXXXXXYYLMSTASLETPV

SEQ ID NO: 4333 - protein, 33 aa, Artificial Sequence
  Non-cyclic GFR-binding peptide
  MOD_RES (1)..(1): Xaa is C or S
  MOD_RES (12)..(13)..(14)..(15)..(16): Xaa is A or G
  MOD_RES (17)..(18)..(19)..(20): Xaa is A or G or absent
XSKVIMQYNKLXXXXXXXXXLYLISIASLDQSV

SEQ ID NO: 4334 - protein, 38 aa, Artificial Sequence
  Non-cyclic GFR-binding peptide
  MOD_RES (35)..(35): Xaa is C or S
  MOD_RES (11)..(12)..(13)..(14)..(15): Xaa is A or G
  MOD_RES (16)..(17)..(18)..(19): Xaa is A or G or absent
HDELTRHKRLXXXXXXXXXYYLVSTASLQVQTPRXQVN

SEQ ID NO: 4335 - protein, 37 aa, Artificial Sequence
  Non-cyclic GFR-binding peptide
  MOD_RES (37)..(37): Xaa is C or S
  MOD_RES (13)..(14)..(15)..(16)..(17): Xaa is A or G
  MOD_RES (18)..(19)..(20)..(21): Xaa is A or G or absent
ALHDELTRHKRLXXXXXXXXXYYLVSTASLQVQTPRX

SEQ ID NO: 4336 - protein, 40 aa, Artificial Sequence
  Non-cyclic GFR-binding peptide
  MOD_RES (2)..(34)..(35): Xaa is C or S
GXSRVVMNRHKRLIVNSSDDYYLVSTASLKTPAXXPKPVY

SEQ ID NO: 4337 - protein, 40 aa, Artificial Sequence
  Non-cyclic GFR-binding peptide
  MOD_RES (1)..(3)..(40): Xaa is C or S
XKXALHDELTRYKKLFIPKKRVIEFYLVSIANLQVQTPRX

SEQ ID NO: 4338 - protein, 37 aa, Artificial Sequence
  Non-cyclic GFR-binding peptide
  MOD_RES (1)..(3)..(34)..(35): Xaa is C or S
XKXSRVIMRHKRLVKPKRGVYYLISTASLAQPVXXPA

SEQ ID NO: 4339 - protein, 36 aa, Artificial Sequence
  Non-cyclic GFR-binding peptide
  MOD_RES (2)..(33)..(34): Xaa is C or S
KXSKVIMRYKKLIKPTKGIFYLISIANLDQSVXXPS

SEQ ID NO: 4340 - protein, 42 aa, Artificial Sequence
  Non-cyclic GFR-binding peptide
  MOD_RES (1)..(38): Xaa is C or S
XALHDELTRHKRLFIPKKRVIEYYLVSTASLQVQTPRXQVNR

SEQ ID NO: 4341 - protein, 36 aa, Artificial Sequence
  Non-cyclic GFR-binding peptide
  MOD_RES (2)..(2): Xaa is C or S
KXALHDELTYHYKLFIPKKRVIEKYLVSIPSLQVQT

SEQ ID NO: 4342 - protein, 32 aa, Artificial Sequence
  Non-cyclic GFR-binding peptide
  MOD_RES (1)..(32): Xaa is C or S
XSKVVMRYKKLVKPTRGVFYLISIANLDQPVX

SEQ ID NO: 4343 - protein, 36 aa, Artificial Sequence
  Non-cyclic GFR-binding peptide
  MOD_RES (2)..(35)..(36): Xaa is C or S
  MOD_RES (13)..(14)..(15)..(16)..(17): Xaa is A or G
  MOD_RES (18)..(19)..(20)..(21): Xaa is A or G or absent
KXSKVVMRYKKLXXXXXXXXXFYLISIANLDQPVXX

SEQ ID NO: 4344 - protein, 38 aa, Artificial Sequence
  Non-cyclic GFR-binding peptide
  MOD_RES (1)..(3)..(37)..(38): Xaa is C or S
  MOD_RES (15)..(16)..(17)..(18)..(19): Xaa is A or G
  MOD_RES (20)..(21)..(22)..(23): Xaa is A or G or absent
XGXARVVMNRHKRLXXXXXXXXXYYLVSTASLQTPAXX

SEQ ID NO: 4345 - protein, 36 aa, Artificial Sequence
  Non-cyclic GFR-binding peptide
  MOD_RES (2)..(36): Xaa is C or S
  MOD_RES (14)..(15)..(16)..(17)..(18): Xaa is A or G
  MOD_RES (19)..(20)..(21)..(22): Xaa is A or G or absent
GXSRVVMNYHYKLXXXXXXXXXKYLVSIPSLKTPAX

SEQ ID NO: 4346 - protein, 34 aa, Artificial Sequence
  Non-cyclic GFR-binding peptide
  MOD_RES (13)..(14)..(15)..(16)..(17): Xaa is A or G
  MOD_RES (18)..(19)..(20)..(21): Xaa is A or G or absent
ALHDELTYHYKLXXXXXXXXXKYLVSIPSLQVQT

SEQ ID NO: 4347 - protein, 41 aa, Artificial Sequence
  Non-cyclic GFR-binding peptide
  MOD_RES (2)..(36)..(37): Xaa is C or S
  MOD_RES (14)..(15)..(16)..(17)..(18): Xaa is A or G
  MOD_RES (19)..(20)..(21)..(22): Xaa is A or G or absent
GXAKVVMNYHYKLXXXXXXXXXKYLVSIPSLKTPAXXAKPV

SEQ ID NO: 4348 - protein, 34 aa, Artificial Sequence
  Non-cyclic GFR-binding peptide
  MOD_RES (33)..(34): Xaa is C or S
  MOD_RES (11)..(12)..(13)..(14)..(15): Xaa is A or G
  MOD_RES (16)..(17)..(18)..(19): Xaa is A or G or absent
SRVIMRHKRLXXXXXXXXXYYLISTASLAQPVXX

SEQ ID NO: 4349 - protein, 36 aa, Artificial Sequence
  Non-cyclic GFR-binding peptide
  MOD_RES (1)..(34)..(35): Xaa is C or S
  MOD_RES (12)..(13)..(14)..(15)..(16): Xaa is A or G
  MOD_RES (17)..(18)..(19)..(20): Xaa is A or G or absent
XSRVIMQYNKLXXXXXXXXXLYLISIASLAQPVXXP

SEQ ID NO: 4350 - protein, 39 aa, Artificial Sequence
  Non-cyclic GFR-binding peptide
  MOD_RES (1)..(33)..(34): Xaa is C or S
XAKVVMNRYKKLIVNNSSDFYLVSIANLKTPAXXAKPVA

SEQ ID NO: 4351 - protein, 34 aa, Artificial Sequence
  Non-cyclic GFR-binding peptide
  MOD_RES (2)..(33)..(34): Xaa is C or S
KXSKVVMRYKKLVKPTRGVFYLISIANLDQPVXX

SEQ ID NO: 4352 - protein, 37 aa, Artificial Sequence
  Non-cyclic GFR-binding peptide
  MOD_RES (2)..(36)..(37): Xaa is C or S
  MOD_RES (14)..(15)..(16)..(17)..(18): Xaa is A or G
  MOD_RES (19)..(20)..(21)..(22): Xaa is A or G or absent
GXARVVMNQYNKLXXXXXXXXXLYLVSIASLQTPAXX

SEQ ID NO: 4353 - protein, 38 aa, Artificial Sequence
  Non-cyclic GFR-binding peptide
  MOD_RES (1)..(33)..(34): Xaa is C or S
XARVVMNQYNKLIVNSSDDLYLVSIASLQTPAXXPKPV

SEQ ID NO: 4354 - protein, 36 aa, Artificial Sequence
  Non-cyclic GFR-binding peptide
  MOD_RES (1)..(34)..(35): Xaa is C or S
  MOD_RES (12)..(13)..(14)..(15)..(16): Xaa is A or G
  MOD_RES (17)..(18)..(19)..(20): Xaa is A or G or absent
XSRVIMRHKRLXXXXXXXXXYYLISTASLAQPVXXP

SEQ ID NO: 4355 - protein, 36 aa, Artificial Sequence
  Non-cyclic GFR-binding peptide
  MOD_RES (1)..(35)..(36): Xaa is C or S
  MOD_RES (13)..(14)..(15)..(16)..(17): Xaa is A or G
  MOD_RES (18)..(19)..(20)..(21): Xaa is A or G or absent
XGEVVMERYKKLXXXXXXXXXFYLMSIANLETPVXX

SEQ ID NO: 4356 - protein, 39 aa, Artificial Sequence
  Non-cyclic GFR-binding peptide
  MOD_RES (2)..(4)..(36)..(37): Xaa is C or S
HXGXAKVVMNQYNKLIVNNSSDLYLVSIASLKTPAXXAK

SEQ ID NO: 4357 - protein, 35 aa, Artificial Sequence
  Non-cyclic GFR-binding peptide
  MOD_RES (1)..(3)..(34)..(35): Xaa is C or S
XKXSKVVMQYNKLVKPTRGVLYLISIASLDQPVXX

SEQ ID NO: 4358 - protein, 38 aa, Artificial Sequence
  Non-cyclic GFR-binding peptide
  MOD_RES (2)..(4)..(35)..(36): Xaa is C or S
SXKXSRVIMRYKKLVKPKRGVFYLISIANLAQPVXXPA

SEQ ID NO: 4359 - protein, 34 aa, Artificial Sequence
  Non-cyclic GFR-binding peptide
  MOD_RES (1)..(33)..(34): Xaa is C or S
XAKVVMNRYKKLIVNNSSDFYLVSIANLKTPAXX

SEQ ID NO: 4360 - protein, 36 aa, Artificial Sequence
  Non-cyclic GFR-binding peptide
  MOD_RES (2)..(2): Xaa is C or S
  MOD_RES (15)..(16)..(17)..(18)..(19): Xaa is A or G
  MOD_RES (20)..(21)..(22)..(23): Xaa is A or G or absent
KXALHDELTRYKKLXXXXXXXXXFYLVSIANLQVQT

SEQ ID NO: 4361 - protein, 39 aa, Artificial Sequence
  Non-cyclic GFR-binding peptide
  MOD_RES (1)..(38): Xaa is C or S
  MOD_RES (14)..(15)..(16)..(17)..(18): Xaa is A or G
  MOD_RES (19)..(20)..(21)..(22): Xaa is A or G or absent
XALHDELTQYNKLXXXXXXXXXLYLVSIASLQVQTPRXQ

SEQ ID NO: 4362 - protein, 38 aa, Artificial Sequence
  Non-cyclic GFR-binding peptide
  MOD_RES (2)..(37)..(38): Xaa is C or S
  MOD_RES (15)..(16)..(17)..(18)..(19): Xaa is A or G
  MOD_RES (20)..(21)..(22)..(23): Xaa is A or G or absent
GXEAVSMGERYKKLXXXXXXXXXFYLVSIANLKTPVXX

SEQ ID NO: 4363 - protein, 44 aa, Artificial Sequence
  Non-cyclic GFR-binding peptide
  MOD_RES (2)..(4)..(38): Xaa is C or S
  MOD_RES (16)..(17)..(18)..(19)..(20): Xaa is A or G
  MOD_RES (21)..(22)..(23)..(24): Xaa is A or G or absent
HXGXSRVVMNQYNKLXXXXXXXXXLYLVSIASLKTPAXTPKTVH

SEQ ID NO: 4364 - protein, 38 aa, Artificial Sequence
  Non-cyclic GFR-binding peptide
  MOD_RES (37)..(37): Xaa is C or S
  MOD_RES (13)..(14)..(15)..(16)..(17): Xaa is A or G
  MOD_RES (18)..(19)..(20)..(21): Xaa is A or G or absent
ALHDELTYHYKLXXXXXXXXXKYLVSIPSLQVQTPRXQ

SEQ ID NO: 4365 - protein, 36 aa, Artificial Sequence
  Non-cyclic GFR-binding peptide
  MOD_RES (1)..(3)..(35)..(36): Xaa is C or S
XGXGEVVMDRYKKLVVKENEDFYLMSIANLETPVXX

SEQ ID NO: 4366 - protein, 41 aa, Artificial Sequence
  Non-cyclic GFR-binding peptide
  MOD_RES (1)..(3)..(37)..(38): Xaa is C or S
  MOD_RES (15)..(16)..(17)..(18)..(19): Xaa is A or G
  MOD_RES (20)..(21)..(22)..(23): Xaa is A or G or absent
XGXGEVVMERYKKLXXXXXXXXXFYLMSIANLETPVXXAKP

SEQ ID NO: 4367 - protein, 40 aa, Artificial Sequence
  Non-cyclic GFR-binding peptide
  MOD_RES (37)..(37): Xaa is C or S
  MOD_RES (13)..(14)..(15)..(16)..(17): Xaa is A or G
  MOD_RES (18)..(19)..(20)..(21): Xaa is A or G or absent
ALHDELTYHYKLXXXXXXXXXKYLVSIPSLQVQTPRXQVN

SEQ ID NO: 4368 - protein, 37 aa, Artificial Sequence
  Non-cyclic GFR-binding peptide
  MOD_RES (1)..(32)..(33): Xaa is C or S
XSRVIMRYKKLVKPKRGVFYLISIANLAQPVXXPAAS

SEQ ID NO: 4369 - protein, 33 aa, Artificial Sequence
  Non-cyclic GFR-binding peptide
  MOD_RES (33)..(33): Xaa is C or S
  MOD_RES (11)..(12)..(13)..(14)..(15): Xaa is A or G
  MOD_RES (16)..(17)..(18)..(19): Xaa is A or G or absent
KVVMNRYKKLXXXXXXXXXFYLVSIANLKTPAX

SEQ ID NO: 4370 - protein, 34 aa, Artificial Sequence
  Non-cyclic GFR-binding peptide
  MOD_RES (33)..(34): Xaa is C or S
  MOD_RES (11)..(12)..(13)..(14)..(15): Xaa is A or G
  MOD_RES (16)..(17)..(18)..(19): Xaa is A or G or absent
EVVMERHKRLXXXXXXXXXYYLMSTASLETPVXX

SEQ ID NO: 4371 - protein, 37 aa, Artificial Sequence
  Non-cyclic GFR-binding peptide
  MOD_RES (35)..(35): Xaa is C or S
HDELTQYNKLFIPKKRVIELYLVSIASLQVQTPRXQV

SEQ ID NO: 4372 - protein, 41 aa, Artificial Sequence
  Non-cyclic GFR-binding peptide
  MOD_RES (2)..(4)..(38)..(39): Xaa is C or S
  MOD_RES (16)..(17)..(18)..(19)..(20): Xaa is A or G
  MOD_RES (21)..(22)..(23)..(24): Xaa is A or G or absent
HXGXSRVVMNQYNKLXXXXXXXXXLYLVSIASLKTPAXXPK

SEQ ID NO: 4373 - protein, 43 aa, Artificial Sequence
  Non-cyclic GFR-binding peptide
  MOD_RES (2)..(4)..(37)..(38): Xaa is C or S
  MOD_RES (15)..(16)..(17)..(18)..(19): Xaa is A or G
  MOD_RES (20)..(21)..(22)..(23): Xaa is A or G or absent
SXKXSKVVMRHKRLXXXXXXXXXYYLISTASLDQPVXXPSASA

SEQ ID NO: 4374 - protein, 37 aa, Artificial Sequence
  Non-cyclic GFR-binding peptide
  MOD_RES (35)..(35): Xaa is C or S
HDELTRHKRLFIPKKRVIEYYLVSTASLQVQTPRXQV

SEQ ID NO: 4375 - protein, 39 aa, Artificial Sequence
  Non-cyclic GFR-binding peptide
  MOD_RES (1)..(3)..(35)..(36): Xaa is C or S
XGXSRVVMNRHKRLIVNSSDDYYLVSTASLKTPAXXPKP

SEQ ID NO: 4376 - protein, 37 aa, Artificial Sequence
  Non-cyclic GFR-binding peptide
  MOD_RES (32)..(33): Xaa is C or S
SRVVMNQYNKLIVNSSDDLYLVSIASLKTPAXXPKPV

SEQ ID NO: 4377 - protein, 33 aa, Artificial Sequence
  Non-cyclic GFR-binding peptide
  MOD_RES (1)..(1): Xaa is C or S
  MOD_RES (12)..(13)..(14)..(15)..(16): Xaa is A or G
  MOD_RES (17)..(18)..(19)..(20): Xaa is A or G or absent
XSKVIMRHKRLXXXXXXXXXYYLISTASLDQSV

SEQ ID NO: 4378 - protein, 38 aa, Artificial Sequence
  Non-cyclic GFR-binding peptide
  MOD_RES (2)..(4)..(37)..(38): Xaa is C or S
  MOD_RES (15)..(16)..(17)..(18)..(19): Xaa is A or G
  MOD_RES (20)..(21)..(22)..(23): Xaa is A or G or absent
SXKXSKVIMRYKKLXXXXXXXXXFYLISIANLDQSVXX

SEQ ID NO: 4379 - protein, 33 aa, Artificial Sequence
  Non-cyclic GFR-binding peptide
  MOD_RES (31)..(32): Xaa is C or S
EVVMDYHYKLVVKENEDKYLMSIPSLETPVXXA

SEQ ID NO: 4380 - protein, 32 aa, Artificial Sequence
  Non-cyclic GFR-binding peptide
  MOD_RES (31)..(32): Xaa is C or S
EVVMDRYKKLVVKENEDFYLMSIANLETPVXX

SEQ ID NO: 4381 - protein, 35 aa, Artificial Sequence
  Non-cyclic GFR-binding peptide
  MOD_RES (1)..(3): Xaa is C or S
XGXEAVSMGERHKRLTPVGMDDYYLVSTASLKTPV

SEQ ID NO: 4382 - protein, 41 aa, Artificial Sequence
  Non-cyclic GFR-binding peptide
  MOD_RES (2)..(36)..(37): Xaa is C or S
  MOD_RES (14)..(15)..(16)..(17)..(18): Xaa is A or G
  MOD_RES (19)..(20)..(21)..(22): Xaa is A or G or absent
GXGEVVMEYHYKLXXXXXXXXXKYLMSIPSLETPVXXAKPI

SEQ ID NO: 4383 - protein, 40 aa, Artificial Sequence
  Non-cyclic GFR-binding peptide
  MOD_RES (1)..(3)..(40): Xaa is C or S
  MOD_RES (16)..(17)..(18)..(19)..(20): Xaa is A or G
  MOD_RES (21)..(22)..(23)..(24): Xaa is A or G or absent
XKXALHDELTRHKRLXXXXXXXXXYYLVSTASLQVQTPRX

SEQ ID NO: 4384 - protein, 37 aa, Artificial Sequence
  Non-cyclic GFR-binding peptide
  MOD_RES (1)..(1): Xaa is C or S
XALHDELTRYKKLFIPKKRVIEFYLVSIANLQVQTPR

SEQ ID NO: 4385 - protein, 41 aa, Artificial Sequence
  Non-cyclic GFR-binding peptide
  MOD_RES (1)..(3)..(36)..(37): Xaa is C or S
  MOD_RES (14)..(15)..(16)..(17)..(18): Xaa is A or G
  MOD_RES (19)..(20)..(21)..(22): Xaa is A or G or absent
XKXSKVIMRHKRLXXXXXXXXXYYLISTASLDQSVXXPSAS

SEQ ID NO: 4386 - protein, 40 aa, Artificial Sequence
  Non-cyclic GFR-binding peptide
  MOD_RES (1)..(3)..(34)..(35): Xaa is C or S
XKXSKVVMYHYKLVKPTRGVKYLISIPSLDQPVXXPSASA

SEQ ID NO: 4387 - protein, 41 aa, Artificial Sequence
  Non-cyclic GFR-binding peptide
  MOD_RES (2)..(4)..(41): Xaa is C or S
EXKXALHDELTRYKKLFIPKKRVIEFYLVSIANLQVQTPRX

SEQ ID NO: 4388 - protein, 37 aa, Artificial Sequence
  Non-cyclic GFR-binding peptide
  MOD_RES (2)..(36)..(37): Xaa is C or S
  MOD_RES (14)..(15)..(16)..(17)..(18): Xaa is A or G
  MOD_RES (19)..(20)..(21)..(22): Xaa is A or G or absent
GXGEVVMDRHKRLXXXXXXXXXYYLMSTASLETPVXX

SEQ ID NO: 4389 - protein, 33 aa, Artificial Sequence
  Non-cyclic GFR-binding peptide
  MOD_RES (12)..(13)..(14)..(15)..(16): Xaa is A or G
  MOD_RES (17)..(18)..(19)..(20): Xaa is A or G or absent
LHDELTQYNKLXXXXXXXXXLYLVSIASLQVQT

SEQ ID NO: 4390 - protein, 39 aa, Artificial Sequence
  Non-cyclic GFR-binding peptide
  MOD_RES (1)..(35)..(36): Xaa is C or S
  MOD_RES (13)..(14)..(15)..(16)..(17): Xaa is A or G
  MOD_RES (18)..(19)..(20)..(21): Xaa is A or G or absent
XGEVVMDRHKRLXXXXXXXXXYYLMSTASLETPVXXAKP

SEQ ID NO: 4391 - protein, 34 aa, Artificial Sequence
  Non-cyclic GFR-binding peptide
  MOD_RES (33)..(34): Xaa is C or S
  MOD_RES (11)..(12)..(13)..(14)..(15): Xaa is A or G
  MOD_RES (16)..(17)..(18)..(19): Xaa is A or G or absent
EVVMDYHYKLXXXXXXXXXKYLMSIPSLETPVXX

SEQ ID NO: 4392 - protein, 39 aa, Artificial Sequence
  Non-cyclic GFR-binding peptide
  MOD_RES (1)..(3)..(37)..(38): Xaa is C or S
  MOD_RES (15)..(16)..(17)..(18)..(19): Xaa is A or G
  MOD_RES (20)..(21)..(22)..(23): Xaa is A or G or absent
XGXGEVVMDRYKKLXXXXXXXXXFYLMSIANLETPVXXA

SEQ ID NO: 4393 - protein, 37 aa, Artificial Sequence
  Non-cyclic GFR-binding peptide
  MOD_RES (31)..(32): Xaa is C or S
SKVVMRYKKLVKPTRGVFYLISIANLDQPVXXPSASA

SEQ ID NO: 4394 - protein, 33 aa, Artificial Sequence
  Non-cyclic GFR-binding peptide
  MOD_RES (33)..(33): Xaa is C or S
  MOD_RES (11)..(12)..(13)..(14)..(15): Xaa is A or G
  MOD_RES (16)..(17)..(18)..(19): Xaa is A or G or absent
RVVMNRHKRLXXXXXXXXXYYLVSTASLQTPAX

SEQ ID NO: 4395 - protein, 33 aa, Artificial Sequence
  Non-cyclic GFR-binding peptide
  MOD_RES (31)..(32): Xaa is C or S
SKVIMRYKKLIKPTKGIFYLISIANLDQSVXXP

SEQ ID NO: 4396 - protein, 36 aa, Artificial Sequence
  Non-cyclic GFR-binding peptide
  MOD_RES (2)..(4): Xaa is C or S
  MOD_RES (15)..(16)..(17)..(18)..(19): Xaa is A or G
  MOD_RES (20)..(21)..(22)..(23): Xaa is A or G or absent
SXKXSKVIMYHYKLXXXXXXXXXKYLISIPSLDQSV

SEQ ID NO: 4397 - protein, 37 aa, Artificial Sequence
  Non-cyclic GFR-binding peptide
  MOD_RES (1)..(3)..(35)..(36): Xaa is C or S
XGXGEVVMERYKKLVVKDYEDFYLMSIANLETPVXXA

SEQ ID NO: 4398 - protein, 38 aa, Artificial Sequence
  Non-cyclic GFR-binding peptide
  MOD_RES (2)..(2): Xaa is C or S
  MOD_RES (15)..(16)..(17)..(18)..(19): Xaa is A or G
  MOD_RES (20)..(21)..(22)..(23): Xaa is A or G or absent
KXALHDELTRYKKLXXXXXXXXXFYLVSIANLQVQTPR

SEQ ID NO: 4399 - protein, 34 aa, Artificial Sequence
  Non-cyclic GFR-binding peptide
  MOD_RES (31)..(32): Xaa is C or S
EVVMDRYKKLVVKENEDFYLMSIANLETPVXXAK

SEQ ID NO: 4400 - protein, 37 aa, Artificial Sequence
  Non-cyclic GFR-binding peptide
  MOD_RES (1)..(3)..(37): Xaa is C or S
  MOD_RES (15)..(16)..(17)..(18)..(19): Xaa is A or G
  MOD_RES (20)..(21)..(22)..(23): Xaa is A or G or absent
XGXSRVVMNYHYKLXXXXXXXXXKYLVSIPSLKTPAX

SEQ ID NO: 4401 - protein, 38 aa, Artificial Sequence
  Non-cyclic GFR-binding peptide
  MOD_RES (1)..(3)..(35)..(36): Xaa is C or S
XGXARVVMNRHKRLIVNSSDDYYLVSTASLQTPAXXPK

SEQ ID NO: 4402 - protein, 37 aa, Artificial Sequence
  Non-cyclic GFR-binding peptide
  MOD_RES (34)..(35): Xaa is C or S
  MOD_RES (12)..(13)..(14)..(15)..(16): Xaa is A or G
  MOD_RES (17)..(18)..(19)..(20): Xaa is A or G or absent
AKVVMNYHYKLXXXXXXXXXKYLVSIPSLKTPAXXAK

SEQ ID NO: 4403 - protein, 39 aa, Artificial Sequence
  Non-cyclic GFR-binding peptide
  MOD_RES (35)..(35): Xaa is C or S
HDELTQYNKLFIPKKRVIELYLVSIASLQVQTPRXQVNR

SEQ ID NO: 4404 - protein, 35 aa, Artificial Sequence
  Non-cyclic GFR-binding peptide
  MOD_RES (35)..(35): Xaa is C or S
HDELTRHKRLFIPKKRVIEYYLVSTASLQVQTPRX

SEQ ID NO: 4405 - protein, 38 aa, Artificial Sequence
  Non-cyclic GFR-binding peptide
  MOD_RES (32)..(33): Xaa is C or S
SRVVMNYHYKLIVNSSDDKYLVSIPSLKTPAXXPKPVY

SEQ ID NO: 4406 - protein, 39 aa, Artificial Sequence
  Non-cyclic GFR-binding peptide
  MOD_RES (2)..(36): Xaa is C or S
  MOD_RES (14)..(15)..(16)..(17)..(18): Xaa is A or G
  MOD_RES (19)..(20)..(21)..(22): Xaa is A or G or absent
GXSRVVMNYHYKLXXXXXXXXXKYLVSIPSLKTPAXTPK

SEQ ID NO: 4407 - protein, 39 aa, Artificial Sequence
  Non-cyclic GFR-binding peptide
  MOD_RES (34)..(35): Xaa is C or S
  MOD_RES (12)..(13)..(14)..(15)..(16): Xaa is A or G
  MOD_RES (17)..(18)..(19)..(20): Xaa is A or G or absent
GEVVMERHKRLXXXXXXXXXYYLMSTASLETPVXXAKPI

SEQ ID NO: 4408 - protein, 33 aa, Artificial Sequence
  Non-cyclic GFR-binding peptide
  MOD_RES (1)..(3): Xaa is C or S
XKXSKVIMQYNKLIKPTKGILYLISIASLDQSV

SEQ ID NO: 4409 - protein, 40 aa, Artificial Sequence
  Non-cyclic GFR-binding peptide
  MOD_RES (1)..(3)..(37)..(38): Xaa is C or S
  MOD_RES (15)..(16)..(17)..(18)..(19): Xaa is A or G
  MOD_RES (20)..(21)..(22)..(23): Xaa is A or G or absent
XGXARVVMNQYNKLXXXXXXXXXLYLVSIASLQTPAXXPK

SEQ ID NO: 4410 - protein, 37 aa, Artificial Sequence
  Non-cyclic GFR-binding peptide
  MOD_RES (34)..(35): Xaa is C or S
  MOD_RES (12)..(13)..(14)..(15)..(16): Xaa is A or G
  MOD_RES (17)..(18)..(19)..(20): Xaa is A or G or absent
GEVVMEYHYKLXXXXXXXXXKYLMSIPSLETPVXXAK

SEQ ID NO: 4411 - protein, 39 aa, Artificial Sequence
  Non-cyclic GFR-binding peptide
  MOD_RES (1)..(3)..(34)..(35): Xaa is C or S
XKXSRVIMQYNKLVKPKRGVLYLISIASLAQPVXXPAAS

SEQ ID NO: 4412 - protein, 37 aa, Artificial Sequence
  Non-cyclic GFR-binding peptide
  MOD_RES (1)..(1): Xaa is C or S
  MOD_RES (14)..(15)..(16)..(17)..(18): Xaa is A or G
  MOD_RES (19)..(20)..(21)..(22): Xaa is A or G or absent
XALHDELTRHKRLXXXXXXXXXYYLVSTASLQVQTPR

SEQ ID NO: 4413 - protein, 33 aa, Artificial Sequence
  Non-cyclic GFR-binding peptide
  MOD_RES (1)..(3): Xaa is C or S
XKXSKVIMYHYKLIKPTKGIKYLISIPSLDQSV

SEQ ID NO: 4414 - protein, 41 aa, Artificial Sequence
  Non-cyclic GFR-binding peptide
  MOD_RES (1)..(3)..(35)..(36): Xaa is C or S
XGXSRVVMNRHKRLIVNSSDDYYLVSTASLKTPAXXPKPVY

SEQ ID NO: 4415 - protein, 40 aa, Artificial Sequence
  Non-cyclic GFR-binding peptide
  MOD_RES (2)..(4)..(35)..(36): Xaa is C or S
SXKXSRVIMRYKKLVKPKRGVFYLISIANLAQPVXXPAAS

SEQ ID NO: 4416 - protein, 41 aa, Artificial Sequence
  Non-cyclic GFR-binding peptide
  MOD_RES (1)..(3)..(36)..(37): Xaa is C or S
  MOD_RES (14)..(15)..(16)..(17)..(18): Xaa is A or G
  MOD_RES (19)..(20)..(21)..(22): Xaa is A or G or absent
XKXSRVIMRHKRLXXXXXXXXXYYLISTASLAQPVXXPAAS

SEQ ID NO: 4417 - protein, 35 aa, Artificial Sequence
  Non-cyclic GFR-binding peptide
  MOD_RES (32)..(32): Xaa is C or S
SRVVMNYHYKLIVNSSDDKYLVSIPSLKTPAXTPK

SEQ ID NO: 4418 - protein, 36 aa, Artificial Sequence
  Non-cyclic GFR-binding peptide
  MOD_RES (2)..(4): Xaa is C or S
RXGXEAVSMGERHKRLTPVGMDDYYLVSTASLKTPV

SEQ ID NO: 4419 - protein, 41 aa, Artificial Sequence
  Non-cyclic GFR-binding peptide
  MOD_RES (2)..(4)..(38)..(39): Xaa is C or S
  MOD_RES (16)..(17)..(18)..(19)..(20): Xaa is A or G
  MOD_RES (21)..(22)..(23)..(24): Xaa is A or G or absent
RXGXGEVVMDRHKRLXXXXXXXXXYYLMSTASLETPVXXAK

SEQ ID NO: 4420 - protein, 38 aa, Artificial Sequence
  Non-cyclic GFR-binding peptide
  MOD_RES (1)..(33)..(34): Xaa is C or S
XARVVMNRHKRLIVNSSDDYYLVSTASLQTPAXXPKPV

SEQ ID NO: 4421 - protein, 37 aa, Artificial Sequence
  Non-cyclic GFR-binding peptide
  MOD_RES (1)..(36)..(37): Xaa is C or S
  MOD_RES (14)..(15)..(16)..(17)..(18): Xaa is A or G
  MOD_RES (19)..(20)..(21)..(22): Xaa is A or G or absent
XEAVSMGERHKRLXXXXXXXXXYYLVSTASLKTPVXX

SEQ ID NO: 4422 - protein, 30 aa, Artificial Sequence
  Non-cyclic GFR-binding peptide
SKVVMRHKRLVKPTRGVYYLISTASLDQPV

SEQ ID NO: 4423 - protein, 36 aa, Artificial Sequence
  Non-cyclic GFR-binding peptide
  MOD_RES (34)..(34): Xaa is C or S
  MOD_RES (12)..(13)..(14)..(15)..(16): Xaa is A or G
  MOD_RES (17)..(18)..(19)..(20): Xaa is A or G or absent
SRVVMNYHYKLXXXXXXXXXKYLVSIPSLKTPAXTP

SEQ ID NO: 4424 - protein, 35 aa, Artificial Sequence
  Non-cyclic GFR-binding peptide
  MOD_RES (1)..(35): Xaa is C or S
  MOD_RES (13)..(14)..(15)..(16)..(17): Xaa is A or G
  MOD_RES (18)..(19)..(20)..(21): Xaa is A or G or absent
XGEVVMERYKKLXXXXXXXXXFYLMSIANLETPVX

SEQ ID NO: 4425 - protein, 35 aa, Artificial Sequence
  Non-cyclic GFR-binding peptide
  MOD_RES (1)..(34)..(35): Xaa is C or S
  MOD_RES (12)..(13)..(14)..(15)..(16): Xaa is A or G
  MOD_RES (17)..(18)..(19)..(20): Xaa is A or G or absent
XSRVIMYHYKLXXXXXXXXXKYLISIPSLAQPVXX

SEQ ID NO: 4426 - protein, 36 aa, Artificial Sequence
  Non-cyclic GFR-binding peptide
  MOD_RES (31)..(32): Xaa is C or S
SKVIMRHKRLIKPTKGIYYLISTASLDQSVXXPSAS

SEQ ID NO: 4427 - protein, 42 aa, Artificial Sequence
  Non-cyclic GFR-binding peptide
  MOD_RES (2)..(4)..(36)..(37): Xaa is C or S
RXGXGEVVMDYHYKLVVKENEDKYLMSIPSLETPVXXAKPIK

SEQ ID NO: 4428 - protein, 39 aa, Artificial Sequence
  Non-cyclic GFR-binding peptide
  MOD_RES (36)..(36): Xaa is C or S
  MOD_RES (12)..(13)..(14)..(15)..(16): Xaa is A or G
  MOD_RES (17)..(18)..(19)..(20): Xaa is A or G or absent
LHDELTYHYKLXXXXXXXXXKYLVSIPSLQVQTPRXQVN

SEQ ID NO: 4429 - protein, 38 aa, Artificial Sequence
  Non-cyclic GFR-binding peptide
  MOD_RES (2)..(33)..(34): Xaa is C or S
KXSRVIMRHKRLVKPKRGVYYLISTASLAQPVXXPAAS

SEQ ID NO: 4430 - protein, 38 aa, Artificial Sequence
  Non-cyclic GFR-binding peptide
  MOD_RES (2)..(33)..(34): Xaa is C or S
KXSRVIMQYNKLVKPKRGVLYLISIASLAQPVXXPAAS

SEQ ID NO: 4431 - protein, 35 aa, Artificial Sequence
  Non-cyclic GFR-binding peptide
  MOD_RES (31)..(31): Xaa is C or S
RVVMNRHKRLIVNSSDDYYLVSTASLKTPAXTPKT

SEQ ID NO: 4432 - protein, 36 aa, Artificial Sequence
  Non-cyclic GFR-binding peptide
  MOD_RES (31)..(32): Xaa is C or S
SRVIMQYNKLVKPKRGVLYLISIASLAQPVXXPAAS

SEQ ID NO: 4433 - protein, 33 aa, Artificial Sequence
  Non-cyclic GFR-binding peptide
  MOD_RES (33)..(33): Xaa is C or S
  MOD_RES (11)..(12)..(13)..(14)..(15): Xaa is A or G
  MOD_RES (16)..(17)..(18)..(19): Xaa is A or G or absent
RVVMNYHYKLXXXXXXXXXKYLVSIPSLQTPAX

SEQ ID NO: 4434 - protein, 40 aa, Artificial Sequence
  Non-cyclic GFR-binding peptide
  MOD_RES (2)..(4): Xaa is C or S
  MOD_RES (17)..(18)..(19)..(20)..(21): Xaa is A or G
  MOD_RES (22)..(23)..(24)..(25): Xaa is A or G or absent
EXKXALHDELTYHYKLXXXXXXXXXKYLVSIPSLQVQTPR

SEQ ID NO: 4435 - protein, 33 aa, Artificial Sequence
  Non-cyclic GFR-binding peptide
  MOD_RES (1)..(3): Xaa is C or S
XKXSRVIMYHYKLVKPKRGVKYLISIPSLAQPV

SEQ ID NO: 4436 - protein, 37 aa, Artificial Sequence
  Non-cyclic GFR-binding peptide
  MOD_RES (1)..(3)..(36)..(37): Xaa is C or S
  MOD_RES (14)..(15)..(16)..(17)..(18): Xaa is A or G
  MOD_RES (19)..(20)..(21)..(22): Xaa is A or G or absent
XKXSKVVMRHKRLXXXXXXXXXYYLISTASLDQPVXX

SEQ ID NO: 4437 - protein, 34 aa, Artificial Sequence
  Non-cyclic GFR-binding peptide
  MOD_RES (31)..(32): Xaa is C or S
RVVMNQYNKLIVNSSDDLYLVSIASLQTPAXXPK

SEQ ID NO: 4438 - protein, 39 aa, Artificial Sequence
  Non-cyclic GFR-binding peptide
  MOD_RES (1)..(3)..(37)..(38): Xaa is C or S
  MOD_RES (15)..(16)..(17)..(18)..(19): Xaa is A or G
  MOD_RES (20)..(21)..(22)..(23): Xaa is A or G or absent
XGXSRVVMNYHYKLXXXXXXXXXKYLVSIPSLKTPAXXP

SEQ ID NO: 4439 - protein, 41 aa, Artificial Sequence
  Non-cyclic GFR-binding peptide
  MOD_RES (1)..(3)..(36)..(37): Xaa is C or S
  MOD_RES (14)..(15)..(16)..(17)..(18): Xaa is A or G
  MOD_RES (19)..(20)..(21)..(22): Xaa is A or G or absent
XKXSKVVMYHYKLXXXXXXXXXKYLISIPSLDQPVXXPSAS

SEQ ID NO: 4440 - protein, 35 aa, Artificial Sequence
  Non-cyclic GFR-binding peptide
  MOD_RES (35)..(35): Xaa is C or S
HDELTQYNKLFIPKKRVIELYLVSIASLQVQTPRX

SEQ ID NO: 4441 - protein, 41 aa, Artificial Sequence
  Non-cyclic GFR-binding peptide
  MOD_RES (2)..(36)..(37): Xaa is C or S
  MOD_RES (14)..(15)..(16)..(17)..(18): Xaa is A or G
  MOD_RES (19)..(20)..(21)..(22): Xaa is A or G or absent
GXARVVMNYHYKLXXXXXXXXXKYLVSIPSLQTPAXXPKPV

SEQ ID NO: 4442 - protein, 39 aa, Artificial Sequence
  Non-cyclic GFR-binding peptide
  MOD_RES (2)..(4)..(35)..(36): Xaa is C or S
SXKXSKVIMYHYKLIKPTKGIKYLISIPSLDQSVXXPSA

SEQ ID NO: 4443 - protein, 33 aa, Artificial Sequence
  Non-cyclic GFR-binding peptide
  MOD_RES (1)..(3): Xaa is C or S
XKXSRVIMRHKRLVKPKRGVYYLISTASLAQPV

SEQ ID NO: 4444 - protein, 37 aa, Artificial Sequence
  Non-cyclic GFR-binding peptide
  MOD_RES (1)..(3)..(35)..(36): Xaa is C or S
XGXAKVVMNRYKKLIVNNSSDFYLVSIANLKTPAXXA

SEQ ID NO: 4445 - protein, 32 aa, Artificial Sequence
  Non-cyclic GFR-binding peptide
  MOD_RES (1)..(1): Xaa is C or S
XARVVMNRHKRLIVNSSDDYYLVSTASLQTPA

SEQ ID NO: 4446 - protein, 40 aa, Artificial Sequence
  Non-cyclic GFR-binding peptide
  MOD_RES (2)..(37)..(38): Xaa is C or S
  MOD_RES (15)..(16)..(17)..(18)..(19): Xaa is A or G
  MOD_RES (20)..(21)..(22)..(23): Xaa is A or G or absent
GXEAVSMGERHKRLXXXXXXXXXYYLVSTASLKTPVXXAK

SEQ ID NO: 4447 - protein, 33 aa, Artificial Sequence
  Non-cyclic GFR-binding peptide
  MOD_RES (12)..(13)..(14)..(15)..(16): Xaa is A or G
  MOD_RES (17)..(18)..(19)..(20): Xaa is A or G or absent
GEVVMEYHYKLXXXXXXXXXKYLMSIPSLETPV

SEQ ID NO: 4448 - protein, 36 aa, Artificial Sequence
  Non-cyclic GFR-binding peptide
  MOD_RES (33)..(34): Xaa is C or S
  MOD_RES (11)..(12)..(13)..(14)..(15): Xaa is A or G
  MOD_RES (16)..(17)..(18)..(19): Xaa is A or G or absent
SKVIMQYNKLXXXXXXXXXLYLISIASLDQSVXXPS

SEQ ID NO: 4449 - protein, 37 aa, Artificial Sequence
  Non-cyclic GFR-binding peptide
  MOD_RES (33)..(34): Xaa is C or S
  MOD_RES (11)..(12)..(13)..(14)..(15): Xaa is A or G
  MOD_RES (16)..(17)..(18)..(19): Xaa is A or G or absent
RVVMNQYNKLXXXXXXXXXLYLVSIASLQTPAXXPKP

SEQ ID NO: 4450 - protein, 31 aa, Artificial Sequence
  Non-cyclic GFR-binding peptide
  MOD_RES (31)..(31): Xaa is C or S
SKVVMRHKRLVKPTRGVYYLISTASLDQPVX

SEQ ID NO: 4451 - protein, 40 aa, Artificial Sequence
  Non-cyclic GFR-binding peptide
  MOD_RES (2)..(4)..(38): Xaa is C or S
  MOD_RES (16)..(17)..(18)..(19)..(20): Xaa is A or G
  MOD_RES (21)..(22)..(23)..(24): Xaa is A or G or absent
HXGXSRVVMNYHYKLXXXXXXXXXKYLVSIPSLKTPAXTP

SEQ ID NO: 4452 - protein, 37 aa, Artificial Sequence
  Non-cyclic GFR-binding peptide
  MOD_RES (1)..(33)..(34): Xaa is C or S
XAKVVMNYHYKLIVNNSSDKYLVSIPSLKTPAXXAKP

SEQ ID NO: 4453 - protein, 36 aa, Artificial Sequence
  Non-cyclic GFR-binding peptide
  MOD_RES (33)..(34): Xaa is C or S
  MOD_RES (11)..(12)..(13)..(14)..(15): Xaa is A or G
  MOD_RES (16)..(17)..(18)..(19): Xaa is A or G or absent
RVVMNRHKRLXXXXXXXXXYYLVSTASLKTPAXXPK

SEQ ID NO: 4454 - protein, 40 aa, Artificial Sequence
  Non-cyclic GFR-binding peptide
  MOD_RES (1)..(36)..(37): Xaa is C or S
  MOD_RES (14)..(15)..(16)..(17)..(18): Xaa is A or G
  MOD_RES (19)..(20)..(21)..(22): Xaa is A or G or absent
XEAVSMGERYKKLXXXXXXXXXFYLVSIANLKTPVXXAKG

SEQ ID NO: 4455 - protein, 37 aa, Artificial Sequence
  Non-cyclic GFR-binding peptide
  MOD_RES (32)..(33): Xaa is C or S
GEVVMDRYKKLVVKENEDFYLMSIANLETPVXXAKPI

SEQ ID NO: 4456 - protein, 39 aa, Artificial Sequence
  Non-cyclic GFR-binding peptide
  MOD_RES (2)..(35)..(36): Xaa is C or S
GXEAVSMGERYKKLTPVGMDDFYLVSIANLKTPVXXAKG

SEQ ID NO: 4457 - protein, 33 aa, Artificial Sequence
  Non-cyclic GFR-binding peptide
  MOD_RES (1)..(32)..(33): Xaa is C or S
XSKVIMRYKKLIKPTKGIFYLISIANLDQSVXX

SEQ ID NO: 4458 - protein, 37 aa, Artificial Sequence
  Non-cyclic GFR-binding peptide
  MOD_RES (31)..(32): Xaa is C or S
EVVMDYHYKLVVKENEDKYLMSIPSLETPVXXAKPIK

SEQ ID NO: 4459 - protein, 39 aa, Artificial Sequence
  Non-cyclic GFR-binding peptide
  MOD_RES (35)..(36): Xaa is C or S
  MOD_RES (13)..(14)..(15)..(16)..(17): Xaa is A or G
  MOD_RES (18)..(19)..(20)..(21): Xaa is A or G or absent
EAVSMGERHKRLXXXXXXXXXYYLVSTASLKTPVXXAKG

SEQ ID NO: 4460 - protein, 33 aa, Artificial Sequence
  Non-cyclic GFR-binding peptide
  MOD_RES (2)..(33): Xaa is C or S
KXSRVIMQYNKLVKPKRGVLYLISIASLAQPVX

SEQ ID NO: 4461 - protein, 40 aa, Artificial Sequence
  Non-cyclic GFR-binding peptide
  MOD_RES (1)..(3)..(40): Xaa is C or S
  MOD_RES (16)..(17)..(18)..(19)..(20): Xaa is A or G
  MOD_RES (21)..(22)..(23)..(24): Xaa is A or G or absent
XKXALHDELTYHYKLXXXXXXXXXKYLVSIPSLQVQTPRX

SEQ ID NO: 4462 - protein, 39 aa, Artificial Sequence
  Non-cyclic GFR-binding peptide
  MOD_RES (2)..(4)..(37)..(38): Xaa is C or S
  MOD_RES (15)..(16)..(17)..(18)..(19): Xaa is A or G
  MOD_RES (20)..(21)..(22)..(23): Xaa is A or G or absent
SXKXSRVIMRHKRLXXXXXXXXXYYLISTASLAQPVXXP

SEQ ID NO: 4463 - protein, 35 aa, Artificial Sequence
  Non-cyclic GFR-binding peptide
  MOD_RES (1)..(3)..(34)..(35): Xaa is C or S
XKXSKVVMYHYKLVKPTRGVKYLISIPSLDQPVXX

SEQ ID NO: 4464 - protein, 41 aa, Artificial Sequence
  Non-cyclic GFR-binding peptide
  MOD_RES (2)..(4)..(36)..(37): Xaa is C or S
HXGXAKVVMNQYNKLIVNNSSDLYLVSIASLKTPAXXAKPV

SEQ ID NO: 4465 - protein, 38 aa, Artificial Sequence
  Non-cyclic GFR-binding peptide
  MOD_RES (2)..(4)..(37)..(38): Xaa is C or S
  MOD_RES (15)..(16)..(17)..(18)..(19): Xaa is A or G
  MOD_RES (20)..(21)..(22)..(23): Xaa is A or G or absent
SXKXSKVVMRYKKLXXXXXXXXXFYLISIANLDQPVXX

SEQ ID NO: 4466 - protein, 39 aa, Artificial Sequence
  Non-cyclic GFR-binding peptide
  MOD_RES (1)..(33)..(34): Xaa is C or S
XARVVMNQYNKLIVNSSDDLYLVSIASLQTPAXXPKPVT

SEQ ID NO: 4467 - protein, 36 aa, Artificial Sequence
  Non-cyclic GFR-binding peptide
  MOD_RES (31)..(32): Xaa is C or S
SKVVMQYNKLVKPTRGVLYLISIASLDQPVXXPSAS

SEQ ID NO: 4468 - protein, 36 aa, Artificial Sequence
  Non-cyclic GFR-binding peptide
  MOD_RES (35)..(35): Xaa is C or S
  MOD_RES (11)..(12)..(13)..(14)..(15): Xaa is A or G
  MOD_RES (16)..(17)..(18)..(19): Xaa is A or G or absent
HDELTYHYKLXXXXXXXXXKYLVSIPSLQVQTPRXQ

SEQ ID NO: 4469 - protein, 37 aa, Artificial Sequence
  Non-cyclic GFR-binding peptide
  MOD_RES (31)..(32): Xaa is C or S
SRVIMQYNKLVKPKRGVLYLISIASLAQPVXXPAASA

SEQ ID NO: 4470 - protein, 36 aa, Artificial Sequence
  Non-cyclic GFR-binding peptide
  MOD_RES (1)..(32)..(33): Xaa is C or S
XSRVIMRHKRLVKPKRGVYYLISTASLAQPVXXPAA

SEQ ID NO: 4471 - protein, 41 aa, Artificial Sequence
  Non-cyclic GFR-binding peptide
  MOD_RES (2)..(4)..(41): Xaa is C or S
  MOD_RES (17)..(18)..(19)..(20)..(21): Xaa is A or G
  MOD_RES (22)..(23)..(24)..(25): Xaa is A or G or absent
EXKXALHDELTRYKKLXXXXXXXXXFYLVSIANLQVQTPRX

SEQ ID NO: 4472 - protein, 37 aa, Artificial Sequence
  Non-cyclic GFR-binding peptide
  MOD_RES (33)..(34): Xaa is C or S
  MOD_RES (11)..(12)..(13)..(14)..(15): Xaa is A or G
  MOD_RES (16)..(17)..(18)..(19): Xaa is A or G or absent
SRVIMQYNKLXXXXXXXXXLYLISIASLAQPVXXPAA

SEQ ID NO: 4473 - protein, 43 aa, Artificial Sequence
  Non-cyclic GFR-binding peptide
  MOD_RES (2)..(4)..(41): Xaa is C or S
EXKXALHDELTRHKRLFIPKKRVIEYYLVSTASLQVQTPRXQV

SEQ ID NO: 4474 - protein, 38 aa, Artificial Sequence
  Non-cyclic GFR-binding peptide
  MOD_RES (2)..(4)..(36)..(37): Xaa is C or S
RXGXGEVVMEYHYKLVVKDYEDKYLMSIPSLETPVXXA

SEQ ID NO: 4475 - protein, 36 aa, Artificial Sequence
  Non-cyclic GFR-binding peptide
  MOD_RES (33)..(34): Xaa is C or S
  MOD_RES (11)..(12)..(13)..(14)..(15): Xaa is A or G
  MOD_RES (16)..(17)..(18)..(19): Xaa is A or G or absent
KVVMNYHYKLXXXXXXXXXKYLVSIPSLKTPAXXAK

SEQ ID NO: 4476 - protein, 37 aa, Artificial Sequence
  Non-cyclic GFR-binding peptide
  MOD_RES (1)..(35)..(36): Xaa is C or S
  MOD_RES (13)..(14)..(15)..(16)..(17): Xaa is A or G
  MOD_RES (18)..(19)..(20)..(21): Xaa is A or G or absent
XAKVVMNQYNKLXXXXXXXXXLYLVSIASLKTPAXXA

SEQ ID NO: 4477 - protein, 39 aa, Artificial Sequence
  Non-cyclic GFR-binding peptide
  MOD_RES (2)..(4)..(35)..(36): Xaa is C or S
SXKXSKVVMQYNKLVKPTRGVLYLISIASLDQPVXXPSA

SEQ ID NO: 4478 - protein, 41 aa, Artificial Sequence
  Non-cyclic GFR-binding peptide
  MOD_RES (2)..(4)..(41): Xaa is C or S
  MOD_RES (17)..(18)..(19)..(20)..(21): Xaa is A or G
  MOD_RES (22)..(23)..(24)..(25): Xaa is A or G or absent
EXKXALHDELTYHYKLXXXXXXXXXKYLVSIPSLQVQTPRX

SEQ ID NO: 4479 - protein, 44 aa, Artificial Sequence
  Non-cyclic GFR-binding peptide
  MOD_RES (2)..(4)..(41): Xaa is C or S
  MOD_RES (17)..(18)..(19)..(20)..(21): Xaa is A or G
  MOD_RES (22)..(23)..(24)..(25): Xaa is A or G or absent
EXKXALHDELTRYKKLXXXXXXXXXFYLVSIANLQVQTPRXQVN

SEQ ID NO: 4480 - protein, 32 aa, Artificial Sequence
  Non-cyclic GFR-binding peptide
  MOD_RES (32)..(32): Xaa is C or S
GEVVMDRYKKLVVKENEDFYLMSIANLETPVX

SEQ ID NO: 4481 - protein, 39 aa, Artificial Sequence
  Non-cyclic GFR-binding peptide
  MOD_RES (35)..(36): Xaa is C or S
  MOD_RES (13)..(14)..(15)..(16)..(17): Xaa is A or G
  MOD_RES (18)..(19)..(20)..(21): Xaa is A or G or absent
EAVSMGEQYNKLXXXXXXXXXLYLVSIASLKTPVXXAKG

SEQ ID NO: 4482 - protein, 37 aa, Artificial Sequence
  Non-cyclic GFR-binding peptide
  MOD_RES (1)..(3)..(35)..(36): Xaa is C or S
XGXSRVVMNQYNKLIVNSSDDLYLVSIASLKTPAXXP

SEQ ID NO: 4483 - protein, 36 aa, Artificial Sequence
  Non-cyclic GFR-binding peptide
  MOD_RES (33)..(33): Xaa is C or S
  MOD_RES (11)..(12)..(13)..(14)..(15): Xaa is A or G
  MOD_RES (16)..(17)..(18)..(19): Xaa is A or G or absent
RVVMNYHYKLXXXXXXXXXKYLVSIPSLKTPAXTPK

SEQ ID NO: 4484 - protein, 38 aa, Artificial Sequence
  Non-cyclic GFR-binding peptide
  MOD_RES (2)..(34)..(35): Xaa is C or S
GXAKVVMNQYNKLIVNNSSDLYLVSIASLKTPAXXAKP

SEQ ID NO: 4485 - protein, 37 aa, Artificial Sequence
  Non-cyclic GFR-binding peptide
  MOD_RES (33)..(34): Xaa is C or S
  MOD_RES (11)..(12)..(13)..(14)..(15): Xaa is A or G
  MOD_RES (16)..(17)..(18)..(19): Xaa is A or G or absent
SKVIMQYNKLXXXXXXXXXLYLISIASLDQSVXXPSA

SEQ ID NO: 4486 - protein, 36 aa, Artificial Sequence
  Non-cyclic GFR-binding peptide
  MOD_RES (33)..(34): Xaa is C or S
  MOD_RES (11)..(12)..(13)..(14)..(15): Xaa is A or G
  MOD_RES (16)..(17)..(18)..(19): Xaa is A or G or absent
SRVIMYHYKLXXXXXXXXXKYLISIPSLAQPVXXPA

SEQ ID NO: 4487 - protein, 41 aa, Artificial Sequence
  Non-cyclic GFR-binding peptide
  MOD_RES (1)..(35)..(36): Xaa is C or S
  MOD_RES (13)..(14)..(15)..(16)..(17): Xaa is A or G
  MOD_RES (18)..(19)..(20)..(21): Xaa is A or G or absent
XGEVVMERYKKLXXXXXXXXXFYLMSIANLETPVXXAKPIS

SEQ ID NO: 4488 - protein, 32 aa, Artificial Sequence
  Non-cyclic GFR-binding peptide
  MOD_RES (32)..(32): Xaa is C or S
GEVVMERYKKLVVKDYEDFYLMSIANLETPVX

SEQ ID NO: 4489 - protein, 38 aa, Artificial Sequence
  Non-cyclic GFR-binding peptide
  MOD_RES (2)..(36)..(37): Xaa is C or S
  MOD_RES (14)..(15)..(16)..(17)..(18): Xaa is A or G
  MOD_RES (19)..(20)..(21)..(22): Xaa is A or G or absent
GXGEVVMDRHKRLXXXXXXXXXYYLMSTASLETPVXXA

SEQ ID NO: 4490 - protein, 40 aa, Artificial Sequence
  Non-cyclic GFR-binding peptide
  MOD_RES (2)..(35)..(36): Xaa is C or S
  MOD_RES (13)..(14)..(15)..(16)..(17): Xaa is A or G
  MOD_RES (18)..(19)..(20)..(21): Xaa is A or G or absent
KXSKVIMQYNKLXXXXXXXXXLYLISIASLDQSVXXPSAS

SEQ ID NO: 4491 - protein, 36 aa, Artificial Sequence
  Non-cyclic GFR-binding peptide
  MOD_RES (1)..(3)..(34)..(35): Xaa is C or S
XKXSKVIMQYNKLIKPTKGILYLISIASLDQSVXXP

SEQ ID NO: 4492 - protein, 39 aa, Artificial Sequence
  Non-cyclic GFR-binding peptide
  MOD_RES (1)..(35)..(36): Xaa is C or S
  MOD_RES (13)..(14)..(15)..(16)..(17): Xaa is A or G
  MOD_RES (18)..(19)..(20)..(21): Xaa is A or G or absent
XGEVVMEYHYKLXXXXXXXXXKYLMSIPSLETPVXXAKP

SEQ ID NO: 4493 - protein, 37 aa, Artificial Sequence
  Non-cyclic GFR-binding peptide
  MOD_RES (2)..(4): Xaa is C or S
  MOD_RES (16)..(17)..(18)..(19)..(20): Xaa is A or G
  MOD_RES (21)..(22)..(23)..(24): Xaa is A or G or absent
RXGXGEVVMERYKKLXXXXXXXXXFYLMSIANLETPV

SEQ ID NO: 4494 - protein, 36 aa, Artificial Sequence
  Non-cyclic GFR-binding peptide
  MOD_RES (1)..(3)..(34)..(35): Xaa is C or S
XKXSRVIMQYNKLVKPKRGVLYLISIASLAQPVXXP

SEQ ID NO: 4495 - protein, 36 aa, Artificial Sequence
  Non-cyclic GFR-binding peptide
  MOD_RES (1)..(3)..(36): Xaa is C or S
XGXEAVSMGERYKKLTPVGMDDFYLVSIANLKTPVX

SEQ ID NO: 4496 - protein, 40 aa, Artificial Sequence
  Non-cyclic GFR-binding peptide
  MOD_RES (2)..(34)..(35): Xaa is C or S
GXGEVVMERYKKLVVKDYEDFYLMSIANLETPVXXAKPIS

SEQ ID NO: 4497 - protein, 37 aa, Artificial Sequence
  Non-cyclic GFR-binding peptide
  MOD_RES (2)..(36)..(37): Xaa is C or S
  MOD_RES (14)..(15)..(16)..(17)..(18): Xaa is A or G
  MOD_RES (19)..(20)..(21)..(22): Xaa is A or G or absent
GXAKVVMNQYNKLXXXXXXXXXLYLVSIASLKTPAXX

SEQ ID NO: 4498 - protein, 34 aa, Artificial Sequence
  Non-cyclic GFR-binding peptide
  MOD_RES (31)..(32): Xaa is C or S
RVVMNYHYKLIVNSSDDKYLVSIPSLQTPAXXPK

SEQ ID NO: 4499 - protein, 35 aa, Artificial Sequence
  Non-cyclic GFR-binding peptide
  MOD_RES (2)..(33)..(34): Xaa is C or S
KXSKVIMRHKRLIKPTKGIYYLISTASLDQSVXXP

SEQ ID NO: 4500 - protein, 35 aa, Artificial Sequence
  Non-cyclic GFR-binding peptide
  MOD_RES (1)..(3): Xaa is C or S
  MOD_RES (14)..(15)..(16)..(17)..(18): Xaa is A or G
  MOD_RES (19)..(20)..(21)..(22): Xaa is A or G or absent
XKXSRVIMRYKKLXXXXXXXXXFYLISIANLAQPV

SEQ ID NO: 4501 - protein, 30 aa, Artificial Sequence; identical to SEQ ID NO: 1872
  Non-cyclic GFR-binding peptide

SEQ ID NO: 4502 - protein, 41 aa, Artificial Sequence
  Non-cyclic GFR-binding peptide
  MOD_RES (1)..(3)..(35)..(36): Xaa is C or S
XGXGEVVMERYKKLVVKDYEDFYLMSIANLETPVXXAKPIS

SEQ ID NO: 4503 - protein, 36 aa, Artificial Sequence
  Non-cyclic GFR-binding peptide
  MOD_RES (31)..(32): Xaa is C or S
SKVVMYHYKLVKPTRGVKYLISIPSLDQPVXXPSAS

SEQ ID NO: 4504 - protein, 40 aa, Artificial Sequence
  Non-cyclic GFR-binding peptide
  MOD_RES (2)..(4)..(36)..(37): Xaa is C or S
HXGXAKVVMNRYKKLIVNNSSDFYLVSIANLKTPAXXAKP

SEQ ID NO: 4505 - protein, 37 aa, Artificial Sequence
  Non-cyclic GFR-binding peptide
  MOD_RES (1)..(32)..(33): Xaa is C or S
XSRVIMQYNKLVKPKRGVLYLISIASLAQPVXXPAAS

SEQ ID NO: 4506 - protein, 37 aa, Artificial Sequence
  Non-cyclic GFR-binding peptide
  MOD_RES (2)..(4)..(35)..(36): Xaa is C or S
SXKXSKVIMQYNKLIKPTKGILYLISIASLDQSVXXP

SEQ ID NO: 4507 - protein, 31 aa, Artificial Sequence
  Non-cyclic GFR-binding peptide
  MOD_RES (31)..(31): Xaa is C or S
SKVIMQYNKLIKPTKGILYLISIASLDQSVX

SEQ ID NO: 4508 - protein, 44 aa, Artificial Sequence
  Non-cyclic GFR-binding peptide
  MOD_RES (2)..(4)..(39)..(40): Xaa is C or S
  MOD_RES (17)..(18)..(19)..(20)..(21): Xaa is A or G
  MOD_RES (22)..(23)..(24)..(25): Xaa is A or G or absent
RXGXEAVSMGERHKRLXXXXXXXXXYYLVSTASLKTPVXXAKGV

SEQ ID NO: 4509 - protein, 40 aa, Artificial Sequence
  Non-cyclic GFR-binding peptide
  MOD_RES (2)..(4)..(39)..(40): Xaa is C or S
  MOD_RES (17)..(18)..(19)..(20)..(21): Xaa is A or G
  MOD_RES (22)..(23)..(24)..(25): Xaa is A or G or absent
RXGXEAVSMGERHKRLXXXXXXXXXYYLVSTASLKTPVXX

SEQ ID NO: 4510 - protein, 44 aa, Artificial Sequence
  Non-cyclic GFR-binding peptide
  MOD_RES (2)..(4)..(41): Xaa is C or S
  MOD_RES (17)..(18)..(19)..(20)..(21): Xaa is A or G
  MOD_RES (22)..(23)..(24)..(25): Xaa is A or G or absent
EXKXALHDELTYHYKLXXXXXXXXXKYLVSIPSLQVQTPRXQVN

SEQ ID NO: 4511 - protein, 39 aa, Artificial Sequence
  Non-cyclic GFR-binding peptide
  MOD_RES (2)..(4)..(36)..(37): Xaa is C or S
RXGXGEVVMERYKKLVVKDYEDFYLMSIANLETPVXXAK

SEQ ID NO: 4512 - protein, 34 aa, Artificial Sequence
  Non-cyclic GFR-binding peptide
  MOD_RES (2)..(34): Xaa is C or S
GXSRVVMNQYNKLIVNSSDDLYLVSIASLKTPAX

SEQ ID NO: 4513 - protein, 34 aa, Artificial Sequence
  Non-cyclic GFR-binding peptide
  MOD_RES (32)..(33): Xaa is C or S
GEVVMEYHYKLVVKDYEDKYLMSIPSLETPVXXA

SEQ ID NO: 4514 - protein, 37 aa, Artificial Sequence
  Non-cyclic GFR-binding peptide
  MOD_RES (1)..(3)..(37): Xaa is C or S
  MOD_RES (15)..(16)..(17)..(18)..(19): Xaa is A or G
  MOD_RES (20)..(21)..(22)..(23): Xaa is A or G or absent
XGXAKVVMNYHYKLXXXXXXXXXKYLVSIPSLKTPAX

SEQ ID NO: 4515 - protein, 42 aa, Artificial Sequence
  Non-cyclic GFR-binding peptide
  MOD_RES (1)..(3)..(36)..(37): Xaa is C or S
  MOD_RES (14)..(15)..(16)..(17)..(18): Xaa is A or G
  MOD_RES (19)..(20)..(21)..(22): Xaa is A or G or absent
XKXSKVIMQYNKLXXXXXXXXXLYLISIASLDQSVXXPSASA

SEQ ID NO: 4516 - protein, 41 aa, Artificial Sequence
  Non-cyclic GFR-binding peptide
  MOD_RES (1)..(3)..(36)..(37): Xaa is C or S
  MOD_RES (14)..(15)..(16)..(17)..(18): Xaa is A or G
  MOD_RES (19)..(20)..(21)..(22): Xaa is A or G or absent
XKXSKVIMQYNKLXXXXXXXXXLYLISIASLDQSVXXPSAS

SEQ ID NO: 4517 - protein, 37 aa, Artificial Sequence
  Non-cyclic GFR-binding peptide
  MOD_RES (31)..(32): Xaa is C or S
SKVIMRHKRLIKPTKGIYYLISTASLDQSVXXPSASA

SEQ ID NO: 4518 - protein, 41 aa, Artificial Sequence
  Non-cyclic GFR-binding peptide
  MOD_RES (1)..(3)..(37)..(38): Xaa is C or S
  MOD_RES (15)..(16)..(17)..(18)..(19): Xaa is A or G
  MOD_RES (20)..(21)..(22)..(23): Xaa is A or G or absent
XGXARVVMNQYNKLXXXXXXXXXLYLVSIASLQTPAXXPKP

SEQ ID NO: 4519 - protein, 32 aa, Artificial Sequence; identical to SEQ ID NO: 1841
  Non-cyclic GFR-binding peptide

SEQ ID NO: 4520 - protein, 31 aa, Artificial Sequence
  Non-cyclic GFR-binding peptide
  MOD_RES (31)..(31): Xaa is C or S
SKVIMYHYKLIKPTKGIKYLISIPSLDQSVX

SEQ ID NO: 4521 - protein, 37 aa, Artificial Sequence
  Non-cyclic GFR-binding peptide
  MOD_RES (1)..(3)..(34)..(35): Xaa is C or S
XKXSKVIMRYKKLIKPTKGIFYLISIANLDQSVXXPS

SEQ ID NO: 4522 - protein, 34 aa, Artificial Sequence
  Non-cyclic GFR-binding peptide
  MOD_RES (1)..(33)..(34): Xaa is C or S
XGEVVMDRHKRLVVKENEDYYLMSTASLETPVXX

SEQ ID NO: 4523 - protein, 39 aa, Artificial Sequence
  Non-cyclic GFR-binding peptide
  MOD_RES (2)..(4)..(37)..(38): Xaa is C or S
  MOD_RES (15)..(16)..(17)..(18)..(19): Xaa is A or G
  MOD_RES (20)..(21)..(22)..(23): Xaa is A or G or absent
SXKXSKVIMRYKKLXXXXXXXXXFYLISIANLDQSVXXP

SEQ ID NO: 4524 - protein, 43 aa, Artificial Sequence
  Non-cyclic GFR-binding peptide
  MOD_RES (1)..(3)..(38)..(39): Xaa is C or S
  MOD_RES (16)..(17)..(18)..(19)..(20): Xaa is A or G
  MOD_RES (21)..(22)..(23)..(24): Xaa is A or G or absent
XGXEAVSMGEQYNKLXXXXXXXXXLYLVSIASLKTPVXXAKGV

SEQ ID NO: 4525 - protein, 35 aa, Artificial Sequence
  Non-cyclic GFR-binding peptide
  MOD_RES (2)..(35): Xaa is C or S
  MOD_RES (13)..(14)..(15)..(16)..(17): Xaa is A or G
  MOD_RES (18)..(19)..(20)..(21): Xaa is A or G or absent
KXSKVVMRYKKLXXXXXXXXXFYLISIANLDQPVX

SEQ ID NO: 4526 - protein, 34 aa, Artificial Sequence
  Non-cyclic GFR-binding peptide
  MOD_RES (32)..(33): Xaa is C or S
GEVVMDYHYKLVVKENEDKYLMSIPSLETPVXXA

SEQ ID NO: 4527 - protein, 34 aa, Artificial Sequence
  Non-cyclic GFR-binding peptide
  MOD_RES (1)..(3): Xaa is C or S
XGXGEVVMEYHYKLVVKDYEDKYLMSIPSLETPV

SEQ ID NO: 4528 - protein, 37 aa, Artificial Sequence
  Non-cyclic GFR-binding peptide
  MOD_RES (2)..(37): Xaa is C or S
  MOD_RES (15)..(16)..(17)..(18)..(19): Xaa is A or G
  MOD_RES (20)..(21)..(22)..(23): Xaa is A or G or absent
GXEAVSMGEQYNKLXXXXXXXXXLYLVSIASLKTPVX

SEQ ID NO: 4529 - protein, 38 aa, Artificial Sequence
  Non-cyclic GFR-binding peptide
  MOD_RES (32)..(32): Xaa is C or S
SRVVMNYHYKLIVNSSDDKYLVSIPSLKTPAXTPKTVH

SEQ ID NO: 4530 - protein, 42 aa, Artificial Sequence
  Non-cyclic GFR-binding peptide
  MOD_RES (2)..(36)..(37): Xaa is C or S
  MOD_RES (14)..(15)..(16)..(17)..(18): Xaa is A or G
  MOD_RES (19)..(20)..(21)..(22): Xaa is A or G or absent
GXARVVMNYHYKLXXXXXXXXXKYLVSIPSLQTPAXXPKPVT

SEQ ID NO: 4531 - protein, 42 aa, Artificial Sequence
  Non-cyclic GFR-binding peptide
  MOD_RES (1)..(3)..(36)..(37): Xaa is C or S
  MOD_RES (14)..(15)..(16)..(17)..(18): Xaa is A or G
  MOD_RES (19)..(20)..(21)..(22): Xaa is A or G or absent
XKXSRVIMQYNKLXXXXXXXXXLYLISIASLAQPVXXPAASA

SEQ ID NO: 4532 - protein, 38 aa, Artificial Sequence
  Non-cyclic GFR-binding peptide
  MOD_RES (2)..(4)..(38): Xaa is C or S
  MOD_RES (16)..(17)..(18)..(19)..(20): Xaa is A or G
  MOD_RES (21)..(22)..(23)..(24): Xaa is A or G or absent
RXGXGEVVMDYHYKLXXXXXXXXXKYLMSIPSLETPVX

SEQ ID NO: 4533 - protein, 40 aa, Artificial Sequence
  Non-cyclic GFR-binding peptide
  MOD_RES (2)..(36)..(37): Xaa is C or S
  MOD_RES (14)..(15)..(16)..(17)..(18): Xaa is A or G
  MOD_RES (19)..(20)..(21)..(22): Xaa is A or G or absent
GXARVVMNYHYKLXXXXXXXXXKYLVSIPSLQTPAXXPKP

SEQ ID NO: 4534 - protein, 40 aa, Artificial Sequence
  Non-cyclic GFR-binding peptide
  MOD_RES (1)..(3)..(40): Xaa is C or S
  MOD_RES (16)..(17)..(18)..(19)..(20): Xaa is A or G
  MOD_RES (21)..(22)..(23)..(24): Xaa is A or G or absent
XKXALHDELTQYNKLXXXXXXXXXLYLVSIASLQVQTPRX

SEQ ID NO: 4535 - protein, 36 aa, Artificial Sequence
  Non-cyclic GFR-binding peptide
  MOD_RES (1)..(1): Xaa is C or S
XALHDELTRHKRLFIPKKRVIEYYLVSTASLQVQTP

SEQ ID NO: 4536 - protein, 33 aa, Artificial Sequence
  Non-cyclic GFR-binding peptide
  MOD_RES (1)..(33): Xaa is C or S
XGEVVMERHKRLVVKDYEDYYLMSTASLETPVX

SEQ ID NO: 4537 - protein, 41 aa, Artificial Sequence
  Non-cyclic GFR-binding peptide
  MOD_RES (1)..(3)..(40): Xaa is C or S
  MOD_RES (16)..(17)..(18)..(19)..(20): Xaa is A or G
  MOD_RES (21)..(22)..(23)..(24): Xaa is A or G or absent
XKXALHDELTYHYKLXXXXXXXXXKYLVSIPSLQVQTPRXQ

SEQ ID NO: 4538 - protein, 34 aa, Artificial Sequence
  Non-cyclic GFR-binding peptide
  MOD_RES (1)..(3)..(34): Xaa is C or S
XKXSKVVMQYNKLVKPTRGVLYLISIASLDQPVX

SEQ ID NO: 4539 - protein, 42 aa, Artificial Sequence
  Non-cyclic GFR-binding peptide
  MOD_RES (1)..(36)..(37): Xaa is C or S
  MOD_RES (14)..(15)..(16)..(17)..(18): Xaa is A or G
  MOD_RES (19)..(20)..(21)..(22): Xaa is A or G or absent
XEAVSMGEQYNKLXXXXXXXXXLYLVSIASLKTPVXXAKGVK

SEQ ID NO: 4540 - protein, 39 aa, Artificial Sequence
  Non-cyclic GFR-binding peptide
  MOD_RES (2)..(33)..(34): Xaa is C or S
KXSKVVMRYKKLVKPTRGVFYLISIANLDQPVXXPSASA

SEQ ID NO: 4541 - protein, 41 aa, Artificial Sequence
  Non-cyclic GFR-binding peptide
  MOD_RES (2)..(4)..(35)..(36): Xaa is C or S
SXKXSRVIMYHYKLVKPKRGVKYLISIPSLAQPVXXPAASA

SEQ ID NO: 4542 - protein, 39 aa, Artificial Sequence
  Non-cyclic GFR-binding peptide
  MOD_RES (1)..(3): Xaa is C or S
XKXALHDELTRYKKLFIPKKRVIEFYLVSIANLQVQTPR

SEQ ID NO: 4543 - protein, 38 aa, Artificial Sequence
  Non-cyclic GFR-binding peptide
  MOD_RES (2)..(35)..(36): Xaa is C or S
  MOD_RES (13)..(14)..(15)..(16)..(17): Xaa is A or G
  MOD_RES (18)..(19)..(20)..(21): Xaa is A or G or absent
KXSKVIMRYKKLXXXXXXXXXFYLISIANLDQSVXXPS

SEQ ID NO: 4544 - protein, 36 aa, Artificial Sequence
  Non-cyclic GFR-binding peptide
  MOD_RES (36)..(36): Xaa is C or S
  MOD_RES (12)..(13)..(14)..(15)..(16): Xaa is A or G
  MOD_RES (17)..(18)..(19)..(20): Xaa is A or G or absent
LHDELTYHYKLXXXXXXXXXKYLVSIPSLQVQTPRX

SEQ ID NO: 4545 - protein, 39 aa, Artificial Sequence
  Non-cyclic GFR-binding peptide
  MOD_RES (2)..(4)..(38)..(39): Xaa is C or S
  MOD_RES (16)..(17)..(18)..(19)..(20): Xaa is A or G
  MOD_RES (21)..(22)..(23)..(24): Xaa is A or G or absent
RXGXGEVVMDRYKKLXXXXXXXXXFYLMSIANLETPVXX

SEQ ID NO: 4546 - protein, 38 aa, Artificial Sequence
  Non-cyclic GFR-binding peptide
  MOD_RES (1)..(3)..(37): Xaa is C or S
  MOD_RES (15)..(16)..(17)..(18)..(19): Xaa is A or G
  MOD_RES (20)..(21)..(22)..(23): Xaa is A or G or absent
XGXSRVVMNYHYKLXXXXXXXXXKYLVSIPSLKTPAXT

SEQ ID NO: 4547 - protein, 36 aa, Artificial Sequence
  Non-cyclic GFR-binding peptide
  MOD_RES (1)..(33)..(34): Xaa is C or S
XARVVMNRHKRLIVNSSDDYYLVSTASLQTPAXXPK

SEQ ID NO: 4548 - protein, 35 aa, Artificial Sequence
  Non-cyclic GFR-binding peptide
  MOD_RES (1)..(35): Xaa is C or S
  MOD_RES (13)..(14)..(15)..(16)..(17): Xaa is A or G
  MOD_RES (18)..(19)..(20)..(21): Xaa is A or G or absent
XGEVVMDYHYKLXXXXXXXXXKYLMSIPSLETPVX

SEQ ID NO: 4549 - protein, 36 aa, Artificial Sequence
  Non-cyclic GFR-binding peptide
  MOD_RES (31)..(32): Xaa is C or S
SRVIMYHYKLVKPKRGVKYLISIPSLAQPVXXPAAS

SEQ ID NO: 4550 - protein, 36 aa, Artificial Sequence
  Non-cyclic GFR-binding peptide
  MOD_RES (33)..(34): Xaa is C or S
  MOD_RES (11)..(12)..(13)..(14)..(15): Xaa is A or G
  MOD_RES (16)..(17)..(18)..(19): Xaa is A or G or absent
SKVVMRHKRLXXXXXXXXXYYLISTASLDQPVXXPS

SEQ ID NO: 4551 - protein, 38 aa, Artificial Sequence
  Non-cyclic GFR-binding peptide
  MOD_RES (33)..(34): Xaa is C or S
  MOD_RES (11)..(12)..(13)..(14)..(15): Xaa is A or G
  MOD_RES (16)..(17)..(18)..(19): Xaa is A or G or absent
EVVMEYHYKLXXXXXXXXXKYLMSIPSLETPVXXAKPI

SEQ ID NO: 4552 - protein, 40 aa, Artificial Sequence
  Non-cyclic GFR-binding peptide
  MOD_RES (1)..(35)..(36): Xaa is C or S
  MOD_RES (13)..(14)..(15)..(16)..(17): Xaa is A or G
  MOD_RES (18)..(19)..(20)..(21): Xaa is A or G or absent
XARVVMNYHYKLXXXXXXXXXKYLVSIPSLQTPAXXPKPV

SEQ ID NO: 4553 - protein, 33 aa, Artificial Sequence
  Non-cyclic GFR-binding peptide
  MOD_RES (32)..(33): Xaa is C or S
GEVVMDRHKRLVVKENEDYYLMSTASLETPVXX

SEQ ID NO: 4554 - protein, 35 aa, Artificial Sequence
  Non-cyclic GFR-binding peptide
  MOD_RES (12)..(13)..(14)..(15)..(16): Xaa is A or G
  MOD_RES (17)..(18)..(19)..(20): Xaa is A or G or absent
LHDELTRHKRLXXXXXXXXXYYLVSTASLQVQTPR

SEQ ID NO: 4555 - protein, 45 aa, Artificial Sequence
  Non-cyclic GFR-binding peptide
  MOD_RES (2)..(4)..(39)..(40): Xaa is C or S
  MOD_RES (17)..(18)..(19)..(20)..(21): Xaa is A or G
  MOD_RES (22)..(23)..(24)..(25): Xaa is A or G or absent
RXGXEAVSMGERHKRLXXXXXXXXXYYLVSTASLKTPVXXAKGVK

SEQ ID NO: 4556 - protein, 34 aa, Artificial Sequence
  Non-cyclic GFR-binding peptide
  MOD_RES (2)..(33)..(34): Xaa is C or S
KXSKVIMRHKRLIKPTKGIYYLISTASLDQSVXX

SEQ ID NO: 4557 - protein, 37 aa, Artificial Sequence
  Non-cyclic GFR-binding peptide
  MOD_RES (2)..(2): Xaa is C or S
KXALHDELTRYKKLFIPKKRVIEFYLVSIANLQVQTP

SEQ ID NO: 4558 - protein, 38 aa, Artificial Sequence
  Non-cyclic GFR-binding peptide
  MOD_RES (1)..(3)..(38): Xaa is C or S
  MOD_RES (16)..(17)..(18)..(19)..(20): Xaa is A or G
  MOD_RES (21)..(22)..(23)..(24): Xaa is A or G or absent
XGXEAVSMGERYKKLXXXXXXXXXFYLVSIANLKTPVX

SEQ ID NO: 4559 - protein, 36 aa, Artificial Sequence
  Non-cyclic GFR-binding peptide
  MOD_RES (1)..(3): Xaa is C or S
  MOD_RES (15)..(16)..(17)..(18)..(19): Xaa is A or G
  MOD_RES (20)..(21)..(22)..(23): Xaa is A or G or absent
XGXGEVVMDRYKKLXXXXXXXXXFYLMSIANLETPV

SEQ ID NO: 4560 - protein, 38 aa, Artificial Sequence
  Non-cyclic GFR-binding peptide
  MOD_RES (1)..(3)..(37)..(38): Xaa is C or S
  MOD_RES (15)..(16)..(17)..(18)..(19): Xaa is A or G
  MOD_RES (20)..(21)..(22)..(23): Xaa is A or G or absent
XGXARVVMNYHYKLXXXXXXXXXKYLVSIPSLQTPAXX

SEQ ID NO: 4561 - protein, 37 aa, Artificial Sequence
  Non-cyclic GFR-binding peptide
  MOD_RES (2)..(4)..(37): Xaa is C or S
  MOD_RES (15)..(16)..(17)..(18)..(19): Xaa is A or G
  MOD_RES (20)..(21)..(22)..(23): Xaa is A or G or absent
SXKXSKVIMRYKKLXXXXXXXXXFYLISIANLDQSVX

SEQ ID NO: 4562 - protein, 36 aa, Artificial Sequence
  Non-cyclic GFR-binding peptide
  MOD_RES (1)..(35): Xaa is C or S
  MOD_RES (13)..(14)..(15)..(16)..(17): Xaa is A or G
  MOD_RES (18)..(19)..(20)..(21): Xaa is A or G or absent
XSRVVMNRHKRLXXXXXXXXXYYLVSTASLKTPAXT

SEQ ID NO: 4563 - protein, 42 aa, Artificial Sequence
  Non-cyclic GFR-binding peptide
  MOD_RES (2)..(4)..(39)..(40): Xaa is C or S
  MOD_RES (17)..(18)..(19)..(20)..(21): Xaa is A or G
  MOD_RES (22)..(23)..(24)..(25): Xaa is A or G or absent
RXGXEAVSMGEQYNKLXXXXXXXXXLYLVSIASLKTPVXXAK

SEQ ID NO: 4564 - protein, 35 aa, Artificial Sequence
  Non-cyclic GFR-binding peptide
  MOD_RES (35)..(35): Xaa is C or S
HDELTYHYKLFIPKKRVIEKYLVSIPSLQVQTPRX

SEQ ID NO: 4565 - protein, 40 aa, Artificial Sequence
  Non-cyclic GFR-binding peptide
  MOD_RES (2)..(36)..(37): Xaa is C or S
  MOD_RES (14)..(15)..(16)..(17)..(18): Xaa is A or G
  MOD_RES (19)..(20)..(21)..(22): Xaa is A or G or absent
GXGEVVMEYHYKLXXXXXXXXXKYLMSIPSLETPVXXAKP

SEQ ID NO: 4566 - protein, 36 aa, Artificial Sequence
  Non-cyclic GFR-binding peptide
  MOD_RES (1)..(33)..(34): Xaa is C or S
XSRVVMNQYNKLIVNSSDDLYLVSIASLKTPAXXPK

SEQ ID NO: 4567 - protein, 35 aa, Artificial Sequence
  Non-cyclic GFR-binding peptide
  MOD_RES (1)..(33)..(34): Xaa is C or S
XSRVVMNYHYKLIVNSSDDKYLVSIPSLKTPAXXP

SEQ ID NO: 4568 - protein, 37 aa, Artificial Sequence
  Non-cyclic GFR-binding peptide
  MOD_RES (2)..(4)..(37): Xaa is C or S
  MOD_RES (15)..(16)..(17)..(18)..(19): Xaa is A or G
  MOD_RES (20)..(21)..(22)..(23): Xaa is A or G or absent
SXKXSRVIMRHKRLXXXXXXXXXYYLISTASLAQPVX

SEQ ID NO: 4569 - protein, 43 aa, Artificial Sequence
  Non-cyclic GFR-binding peptide
  MOD_RES (1)..(3)..(40): Xaa is C or S
XKXALHDELTYHYKLFIPKKRVIEKYLVSIPSLQVQTPRXQVN

SEQ ID NO: 4570 - protein, 31 aa, Artificial Sequence
  Non-cyclic GFR-binding peptide
ARVVMNRHKRLIVNSSDDYYLVSTASLQTPA

SEQ ID NO: 4571 - protein, 33 aa, Artificial Sequence
  Non-cyclic GFR-binding peptide
  MOD_RES (2)..(33): Xaa is C or S
KXSKVIMRHKRLIKPTKGIYYLISTASLDQSVX

SEQ ID NO: 4572 - protein, 38 aa, Artificial Sequence
  Non-cyclic GFR-binding peptide
  MOD_RES (1)..(3)..(35): Xaa is C or S
XGXSRVVMNYHYKLIVNSSDDKYLVSIPSLKTPAXTPK

SEQ ID NO: 4573 - protein, 33 aa, Artificial Sequence
  Non-cyclic GFR-binding peptide
  MOD_RES (32)..(33): Xaa is C or S
GEVVMERHKRLVVKDYEDYYLMSTASLETPVXX

SEQ ID NO: 4574 - protein, 35 aa, Artificial Sequence
  Non-cyclic GFR-binding peptide
  MOD_RES (1)..(33): Xaa is C or S
XSRVVMNQYNKLIVNSSDDLYLVSIASLKTPAXTP

SEQ ID NO: 4575 - protein, 37 aa, Artificial Sequence
  Non-cyclic GFR-binding peptide
  MOD_RES (2)..(34)..(35): Xaa is C or S
GXAKVVMNRYKKLIVNNSSDFYLVSIANLKTPAXXAK

SEQ ID NO: 4576 - protein, 36 aa, Artificial Sequence
  Non-cyclic GFR-binding peptide
  MOD_RES (2)..(34)..(35): Xaa is C or S
GXSRVVMNYHYKLIVNSSDDKYLVSIPSLKTPAXXP

SEQ ID NO: 4577 - protein, 34 aa, Artificial Sequence
  Non-cyclic GFR-binding peptide
  MOD_RES (2)..(4): Xaa is C or S
SXKXSRVIMYHYKLVKPKRGVKYLISIPSLAQPV

SEQ ID NO: 4578 - protein, 35 aa, Artificial Sequence
  Non-cyclic GFR-binding peptide
  MOD_RES (1)..(32)..(33): Xaa is C or S
XSKVVMQYNKLVKPTRGVLYLISIASLDQPVXXPS

SEQ ID NO: 4579 - protein, 39 aa, Artificial Sequence
  Non-cyclic GFR-binding peptide
  MOD_RES (33)..(34): Xaa is C or S
  MOD_RES (11)..(12)..(13)..(14)..(15): Xaa is A or G
  MOD_RES (16)..(17)..(18)..(19): Xaa is A or G or absent
RVVMNQYNKLXXXXXXXXXLYLVSIASLQTPAXXPKPVT

SEQ ID NO: 4580 - protein, 36 aa, Artificial Sequence
  Non-cyclic GFR-binding peptide
  MOD_RES (33)..(34): Xaa is C or S
  MOD_RES (11)..(12)..(13)..(14)..(15): Xaa is A or G
  MOD_RES (16)..(17)..(18)..(19): Xaa is A or G or absent
SKVVMYHYKLXXXXXXXXXKYLISIPSLDQPVXXPS

SEQ ID NO: 4581 - protein, 36 aa, Artificial Sequence
  Non-cyclic GFR-binding peptide
  MOD_RES (35)..(35): Xaa is C or S
  MOD_RES (11)..(12)..(13)..(14)..(15): Xaa is A or G
  MOD_RES (16)..(17)..(18)..(19): Xaa is A or G or absent
HDELTRHKRLXXXXXXXXXYYLVSTASLQVQTPRXQ

SEQ ID NO: 4582 - protein, 32 aa, Artificial Sequence
  Non-cyclic GFR-binding peptide
  MOD_RES (11)..(12)..(13)..(14)..(15): Xaa is A or G
  MOD_RES (16)..(17)..(18)..(19): Xaa is A or G or absent
EVVMEYHYKLXXXXXXXXXKYLMSIPSLETPV

SEQ ID NO: 4583 - protein, 38 aa, Artificial Sequence
  Non-cyclic GFR-binding peptide
  MOD_RES (1)..(32)..(33): Xaa is C or S
XSKVVMRHKRLVKPTRGVYYLISTASLDQPVXXPSASA

SEQ ID NO: 4584 - protein, 33 aa, Artificial Sequence
  Non-cyclic GFR-binding peptide
  MOD_RES (1)..(32)..(33): Xaa is C or S
XSKVIMQYNKLIKPTKGILYLISIASLDQSVXX

SEQ ID NO: 4585 - protein, 40 aa, Artificial Sequence
  Non-cyclic GFR-binding peptide
  MOD_RES (2)..(37)..(38): Xaa is C or S
  MOD_RES (15)..(16)..(17)..(18)..(19): Xaa is A or G
  MOD_RES (20)..(21)..(22)..(23): Xaa is A or G or absent
GXEAVSMGEQYNKLXXXXXXXXXLYLVSIASLKTPVXXAK

SEQ ID NO: 4586 - protein, 37 aa, Artificial Sequence
  Non-cyclic GFR-binding peptide
  MOD_RES (36)..(36): Xaa is C or S
  MOD_RES (12)..(13)..(14)..(15)..(16): Xaa is A or G
  MOD_RES (17)..(18)..(19)..(20): Xaa is A or G or absent
LHDELTQYNKLXXXXXXXXXLYLVSIASLQVQTPRXQ

SEQ ID NO: 4587 - protein, 36 aa, Artificial Sequence
  Non-cyclic GFR-binding peptide
  MOD_RES (2)..(4)..(35)..(36): Xaa is C or S
SXKXSKVVMRHKRLVKPTRGVYYLISTASLDQPVXX

SEQ ID NO: 4588 - protein, 36 aa, Artificial Sequence
  Non-cyclic GFR-binding peptide
  MOD_RES (2)..(4)..(36): Xaa is C or S
HXGXSRVVMNYHYKLIVNSSDDKYLVSIPSLKTPAX

SEQ ID NO: 4589 - protein, 42 aa, Artificial Sequence
  Non-cyclic GFR-binding peptide
  MOD_RES (2)..(4)..(41): Xaa is C or S
EXKXALHDELTRHKRLFIPKKRVIEYYLVSTASLQVQTPRXQ

SEQ ID NO: 4590 - protein, 35 aa, Artificial Sequence
  Non-cyclic GFR-binding peptide
  MOD_RES (2)..(2): Xaa is C or S
  MOD_RES (14)..(15)..(16)..(17)..(18): Xaa is A or G
  MOD_RES (19)..(20)..(21)..(22): Xaa is A or G or absent
GXGEVVMEYHYKLXXXXXXXXXKYLMSIPSLETPV

SEQ ID NO: 4591 - protein, 38 aa, Artificial Sequence
  Non-cyclic GFR-binding peptide
  MOD_RES (2)..(36)..(37): Xaa is C or S
  MOD_RES (14)..(15)..(16)..(17)..(18): Xaa is A or G
  MOD_RES (19)..(20)..(21)..(22): Xaa is A or G or absent
GXARVVMNQYNKLXXXXXXXXXLYLVSIASLQTPAXXP

SEQ ID NO: 4592 - protein, 32 aa, Artificial Sequence
  Non-cyclic GFR-binding peptide
  MOD_RES (11)..(12)..(13)..(14)..(15): Xaa is A or G
  MOD_RES (16)..(17)..(18)..(19): Xaa is A or G or absent
SRVIMYHYKLXXXXXXXXXKYLISIPSLAQPV

SEQ ID NO: 4593 - protein, 40 aa, Artificial Sequence
  Non-cyclic GFR-binding peptide
  MOD_RES (2)..(4)..(37)..(38): Xaa is C or S
  MOD_RES (15)..(16)..(17)..(18)..(19): Xaa is A or G
  MOD_RES (20)..(21)..(22)..(23): Xaa is A or G or absent
SXKXSRVIMRHKRLXXXXXXXXXYYLISTASLAQPVXXPA

SEQ ID NO: 4594 - protein, 43 aa, Artificial Sequence
  Non-cyclic GFR-binding peptide
  MOD_RES (1)..(3)..(37)..(38): Xaa is C or S
  MOD_RES (15)..(16)..(17)..(18)..(19): Xaa is A or G
  MOD_RES (20)..(21)..(22)..(23): Xaa is A or G or absent
XGXAKVVMNRYKKLXXXXXXXXXFYLVSIANLKTPAXXAKPVA

SEQ ID NO: 4595 - protein, 40 aa, Artificial Sequence
  Non-cyclic GFR-binding peptide
  MOD_RES (34)..(34): Xaa is C or S
  MOD_RES (12)..(13)..(14)..(15)..(16): Xaa is A or G
  MOD_RES (17)..(18)..(19)..(20): Xaa is A or G or absent
SRVVMNYHYKLXXXXXXXXXKYLVSIPSLKTPAXTPKTVH

SEQ ID NO: 4596 - protein, 40 aa, Artificial Sequence
  Non-cyclic GFR-binding peptide
  MOD_RES (36)..(36): Xaa is C or S
  MOD_RES (12)..(13)..(14)..(15)..(16): Xaa is A or G
  MOD_RES (17)..(18)..(19)..(20): Xaa is A or G or absent
LHDELTYHYKLXXXXXXXXXKYLVSIPSLQVQTPRXQVNR

SEQ ID NO: 4597 - protein, 38 aa, Artificial Sequence
  Non-cyclic GFR-binding peptide
  MOD_RES (2)..(4)..(35)..(36): Xaa is C or S
SXKXSKVVMRYKKLVKPTRGVFYLISIANLDQPVXXPS

SEQ ID NO: 4598 - protein, 41 aa, Artificial Sequence
  Non-cyclic GFR-binding peptide
  MOD_RES (2)..(39): Xaa is C or S
  MOD_RES (15)..(16)..(17)..(18)..(19): Xaa is A or G
  MOD_RES (20)..(21)..(22)..(23): Xaa is A or G or absent
KXALHDELTQYNKLXXXXXXXXXLYLVSIASLQVQTPRXQV

SEQ ID NO: 4599 - protein, 39 aa, Artificial Sequence
  Non-cyclic GFR-binding peptide
  MOD_RES (2)..(36)..(37): Xaa is C or S
  MOD_RES (14)..(15)..(16)..(17)..(18): Xaa is A or G
  MOD_RES (19)..(20)..(21)..(22): Xaa is A or G or absent
GXAKVVMNYHYKLXXXXXXXXXKYLVSIPSLKTPAXXAK

SEQ ID NO: 4600 - protein, 36 aa, Artificial Sequence
  Non-cyclic GFR-binding peptide
  MOD_RES (35)..(36): Xaa is C or S
  MOD_RES (13)..(14)..(15)..(16)..(17): Xaa is A or G
  MOD_RES (18)..(19)..(20)..(21): Xaa is A or G or absent
EAVSMGERYKKLXXXXXXXXXFYLVSIANLKTPVXX

SEQ ID NO: 4601 - protein, 38 aa, Artificial Sequence
  Non-cyclic GFR-binding peptide
  MOD_RES (33)..(34): Xaa is C or S
  MOD_RES (11)..(12)..(13)..(14)..(15): Xaa is A or G
  MOD_RES (16)..(17)..(18)..(19): Xaa is A or G or absent
EVVMERHKRLXXXXXXXXXYYLMSTASLETPVXXAKPI

SEQ ID NO: 4602 - protein, 44 aa, Artificial Sequence
  Non-cyclic GFR-binding peptide
  MOD_RES (2)..(4)..(38)..(39): Xaa is C or S
  MOD_RES (16)..(17)..(18)..(19)..(20): Xaa is A or G
  MOD_RES (21)..(22)..(23)..(24): Xaa is A or G or absent
HXGXARVVMNRHKRLXXXXXXXXXYYLVSTASLQTPAXXPKPVT

SEQ ID NO: 4603 - protein, 38 aa, Artificial Sequence
  Non-cyclic GFR-binding peptide
  MOD_RES (2)..(33)..(34): Xaa is C or S
KXSKVVMRYKKLVKPTRGVFYLISIANLDQPVXXPSAS

SEQ ID NO: 4604 - protein, 42 aa, Artificial Sequence
  Non-cyclic GFR-binding peptide
  MOD_RES (1)..(3)..(36)..(37): Xaa is C or S
  MOD_RES (14)..(15)..(16)..(17)..(18): Xaa is A or G
  MOD_RES (19)..(20)..(21)..(22): Xaa is A or G or absent
XKXSRVIMRHKRLXXXXXXXXXYYLISTASLAQPVXXPAASA

SEQ ID NO: 4605 - protein, 43 aa, Artificial Sequence
  Non-cyclic GFR-binding peptide
  MOD_RES (1)..(3)..(37)..(38): Xaa is C or S
  MOD_RES (15)..(16)..(17)..(18)..(19): Xaa is A or G
  MOD_RES (20)..(21)..(22)..(23): Xaa is A or G or absent
XGXARVVMNYHYKLXXXXXXXXXKYLVSIPSLQTPAXXPKPVT

SEQ ID NO: 4606 - protein, 36 aa, Artificial Sequence
  Non-cyclic GFR-binding peptide
  MOD_RES (1)..(3)..(35)..(36): Xaa is C or S
XGXGEVVMERHKRLVVKDYEDYYLMSTASLETPVXX

SEQ ID NO: 4607 - protein, 42 aa, Artificial Sequence
  Non-cyclic GFR-binding peptide
  MOD_RES (2)..(39): Xaa is C or S
KXALHDELTQYNKLFIPKKRVIELYLVSIASLQVQTPRXQVN

SEQ ID NO: 4608 - protein, 34 aa, Artificial Sequence
  Non-cyclic GFR-binding peptide
ALHDELTYHYKLFIPKKRVIEKYLVSIPSLQVQT

SEQ ID NO: 4609 - protein, 34 aa, Artificial Sequence
  Non-cyclic GFR-binding peptide
  MOD_RES (11)..(12)..(13)..(14)..(15): Xaa is A or G
  MOD_RES (16)..(17)..(18)..(19): Xaa is A or G or absent
HDELTYHYKLXXXXXXXXXKYLVSIPSLQVQTPR

SEQ ID NO: 4610 - protein, 35 aa, Artificial Sequence
  Non-cyclic GFR-binding peptide
  MOD_RES (2)..(34)..(35): Xaa is C or S
GXGEVVMDRYKKLVVKENEDFYLMSIANLETPVXX

SEQ ID NO: 4611 - protein, 39 aa, Artificial Sequence
  Non-cyclic GFR-binding peptide
  MOD_RES (2)..(4)..(36)..(37): Xaa is C or S
HXGXSRVVMNRHKRLIVNSSDDYYLVSTASLKTPAXXPK

SEQ ID NO: 4612 - protein, 31 aa, Artificial Sequence
  Non-cyclic GFR-binding peptide
  MOD_RES (31)..(31): Xaa is C or S
SKVVMYHYKLVKPTRGVKYLISIPSLDQPVX

SEQ ID NO: 4613 - protein, 39 aa, Artificial Sequence
  Non-cyclic GFR-binding peptide
  MOD_RES (1)..(3)..(35)..(36): Xaa is C or S
XGXAKVVMNRYKKLIVNNSSDFYLVSIANLKTPAXXAKP

SEQ ID NO: 4614 - protein, 33 aa, Artificial Sequence
  Non-cyclic GFR-binding peptide
  MOD_RES (31)..(32): Xaa is C or S
SRVIMRHKRLVKPKRGVYYLISTASLAQPVXXP

SEQ ID NO: 4615 - protein, 37 aa, Artificial Sequence
  Non-cyclic GFR-binding peptide
  MOD_RES (1)..(3)..(34)..(35): Xaa is C or S
XKXSKVVMRYKKLVKPTRGVFYLISIANLDQPVXXPS

SEQ ID NO: 4616 - protein, 39 aa, Artificial Sequence
  Non-cyclic GFR-binding peptide
  MOD_RES (1)..(38): Xaa is C or S
XALHDELTYHYKLFIPKKRVIEKYLVSIPSLQVQTPRXQ

SEQ ID NO: 4617 - protein, 37 aa, Artificial Sequence
  Non-cyclic GFR-binding peptide
  MOD_RES (1)..(3)..(36)..(37): Xaa is C or S
XGXEAVSMGEQYNKLTPVGMDDLYLVSIASLKTPVXX

SEQ ID NO: 4618 - protein, 37 aa, Artificial Sequence
  Non-cyclic GFR-binding peptide
  MOD_RES (1)..(3)..(36)..(37): Xaa is C or S
  MOD_RES (14)..(15)..(16)..(17)..(18): Xaa is A or G
  MOD_RES (19)..(20)..(21)..(22): Xaa is A or G or absent
XKXSKVVMQYNKLXXXXXXXXXLYLISIASLDQPVXX

SEQ ID NO: 4619 - protein, 34 aa, Artificial Sequence
  Non-cyclic GFR-binding peptide
  MOD_RES (1)..(34): Xaa is C or S
  MOD_RES (12)..(13)..(14)..(15)..(16): Xaa is A or G
  MOD_RES (17)..(18)..(19)..(20): Xaa is A or G or absent
XSKVVMQYNKLXXXXXXXXXLYLISIASLDQPVX

SEQ ID NO: 4620 - protein, 37 aa, Artificial Sequence
  Non-cyclic GFR-binding peptide
  MOD_RES (1)..(32)..(33): Xaa is C or S
XSKVIMYHYKLIKPTKGIKYLISIPSLDQSVXXPSAS

SEQ ID NO: 4621 - protein, 37 aa, Artificial Sequence
  Non-cyclic GFR-binding peptide
  MOD_RES (2)..(4)..(37): Xaa is C or S
RXGXEAVSMGEQYNKLTPVGMDDLYLVSIASLKTPVX

SEQ ID NO: 4622 - protein, 37 aa, Artificial Sequence
  Non-cyclic GFR-binding peptide
  MOD_RES (31)..(32): Xaa is C or S
SRVIMYHYKLVKPKRGVKYLISIPSLAQPVXXPAASA

SEQ ID NO: 4623 - protein, 39 aa, Artificial Sequence
  Non-cyclic GFR-binding peptide
  MOD_RES (1)..(3)..(37)..(38): Xaa is C or S
  MOD_RES (15)..(16)..(17)..(18)..(19): Xaa is A or G
  MOD_RES (20)..(21)..(22)..(23): Xaa is A or G or absent
XGXSRVVMNRHKRLXXXXXXXXXYYLVSTASLKTPAXXP

SEQ ID NO: 4624 - protein, 39 aa, Artificial Sequence
  Non-cyclic GFR-binding peptide
  MOD_RES (1)..(35)..(36): Xaa is C or S
  MOD_RES (13)..(14)..(15)..(16)..(17): Xaa is A or G
  MOD_RES (18)..(19)..(20)..(21): Xaa is A or G or absent
XAKVVMNRYKKLXXXXXXXXXFYLVSIANLKTPAXXAKP

SEQ ID NO: 4625 - protein, 36 aa, Artificial Sequence
  Non-cyclic GFR-binding peptide
  MOD_RES (2)..(34)..(35): Xaa is C or S
GXGEVVMERHKRLVVKDYEDYYLMSTASLETPVXXA

SEQ ID NO: 4626 - protein, 34 aa, Artificial Sequence
  Non-cyclic GFR-binding peptide
  MOD_RES (12)..(13)..(14)..(15)..(16): Xaa is A or G
  MOD_RES (17)..(18)..(19)..(20): Xaa is A or G or absent
LHDELTYHYKLXXXXXXXXXKYLVSIPSLQVQTP

SEQ ID NO: 4627 - protein, 40 aa, Artificial Sequence
  Non-cyclic GFR-binding peptide
  MOD_RES (2)..(4): Xaa is C or S
EXKXALHDELTYHYKLFIPKKRVIEKYLVSIPSLQVQTPR

SEQ ID NO: 4628 - protein, 43 aa, Artificial Sequence
  Non-cyclic GFR-binding peptide
  MOD_RES (2)..(4)..(38)..(39): Xaa is C or S
  MOD_RES (16)..(17)..(18)..(19)..(20): Xaa is A or G
  MOD_RES (21)..(22)..(23)..(24): Xaa is A or G or absent
HXGXARVVMNQYNKLXXXXXXXXXLYLVSIASLQTPAXXPKPV

SEQ ID NO: 4629 - protein, 40 aa, Artificial Sequence
  Non-cyclic GFR-binding peptide
  MOD_RES (2)..(36)..(37): Xaa is C or S
  MOD_RES (14)..(15)..(16)..(17)..(18): Xaa is A or G
  MOD_RES (19)..(20)..(21)..(22): Xaa is A or G or absent
GXAKVVMNYHYKLXXXXXXXXXKYLVSIPSLKTPAXXAKP

SEQ ID NO: 4630 - protein, 42 aa, Artificial Sequence
  Non-cyclic GFR-binding peptide
  MOD_RES (2)..(4)..(38)..(39): Xaa is C or S
  MOD_RES (16)..(17)..(18)..(19)..(20): Xaa is A or G
  MOD_RES (21)..(22)..(23)..(24): Xaa is A or G or absent
RXGXGEVVMERHKRLXXXXXXXXXYYLMSTASLETPVXXAKP

SEQ ID NO: 4631 - protein, 39 aa, Artificial Sequence
  Non-cyclic GFR-binding peptide
  MOD_RES (36)..(36): Xaa is C or S
  MOD_RES (12)..(13)..(14)..(15)..(16): Xaa is A or G
  MOD_RES (17)..(18)..(19)..(20): Xaa is A or G or absent
LHDELTRHKRLXXXXXXXXXYYLVSTASLQVQTPRXQVN

SEQ ID NO: 4632 - protein, 34 aa, Artificial Sequence
  Non-cyclic GFR-binding peptide
  MOD_RES (1)..(33): Xaa is C or S
XSRVVMNRHKRLIVNSSDDYYLVSTASLKTPAXT

SEQ ID NO: 4633 - protein, 36 aa, Artificial Sequence
  Non-cyclic GFR-binding peptide
  MOD_RES (2)..(35)..(36): Xaa is C or S
  MOD_RES (13)..(14)..(15)..(16)..(17): Xaa is A or G
  MOD_RES (18)..(19)..(20)..(21): Xaa is A or G or absent
KXSRVIMRYKKLXXXXXXXXXFYLISIANLAQPVXX

SEQ ID NO: 4634 - protein, 33 aa, Artificial Sequence
  Non-cyclic GFR-binding peptide
  MOD_RES (32)..(32): Xaa is C or S
SRVVMNYHYKLIVNSSDDKYLVSIPSLKTPAXT

SEQ ID NO: 4635 - protein, 33 aa, Artificial Sequence
  Non-cyclic GFR-binding peptide
  MOD_RES (31)..(32): Xaa is C or S
RVVMNYHYKLIVNSSDDKYLVSIPSLKTPAXXP

SEQ ID NO: 4636 - protein, 40 aa, Artificial Sequence
  Non-cyclic GFR-binding peptide
  MOD_RES (2)..(4)..(37)..(38): Xaa is C or S
RXGXEAVSMGERHKRLTPVGMDDYYLVSTASLKTPVXXAK

SEQ ID NO: 4637 - protein, 32 aa, Artificial Sequence
  Non-cyclic GFR-binding peptide
  MOD_RES (32)..(32): Xaa is C or S
SRVVMNQYNKLIVNSSDDLYLVSIASLKTPAX

SEQ ID NO: 4638 - protein, 36 aa, Artificial Sequence
  Non-cyclic GFR-binding peptide
  MOD_RES (32)..(32): Xaa is C or S
SRVVMNRHKRLIVNSSDDYYLVSTASLKTPAXTPKT

SEQ ID NO: 4639 - protein, 34 aa, Artificial Sequence
  Non-cyclic GFR-binding peptide
  MOD_RES (1)..(34): Xaa is C or S
  MOD_RES (12)..(13)..(14)..(15)..(16): Xaa is A or G
  MOD_RES (17)..(18)..(19)..(20): Xaa is A or G or absent
XSKVVMRHKRLXXXXXXXXXYYLISTASLDQPVX

SEQ ID NO: 4640 - protein, 40 aa, Artificial Sequence
  Non-cyclic GFR-binding peptide
  MOD_RES (34)..(35): Xaa is C or S
  MOD_RES (12)..(13)..(14)..(15)..(16): Xaa is A or G
  MOD_RES (17)..(18)..(19)..(20): Xaa is A or G or absent
AKVVMNQYNKLXXXXXXXXXLYLVSIASLKTPAXXAKPVA

SEQ ID NO: 4641 - protein, 37 aa, Artificial Sequence
  Non-cyclic GFR-binding peptide
  MOD_RES (31)..(32): Xaa is C or S
SKVIMYHYKLIKPTKGIKYLISIPSLDQSVXXPSASA

SEQ ID NO: 4642 - protein, 35 aa, Artificial Sequence
  Non-cyclic GFR-binding peptide
  MOD_RES (1)..(3)..(35): Xaa is C or S
XGXSRVVMNYHYKLIVNSSDDKYLVSIPSLKTPAX

SEQ ID NO: 4643 - protein, 37 aa, Artificial Sequence
  Non-cyclic GFR-binding peptide
  MOD_RES (35)..(35): Xaa is C or S
HDELTYHYKLFIPKKRVIEKYLVSIPSLQVQTPRXQV

SEQ ID NO: 4644 - protein, 38 aa, Artificial Sequence
  Non-cyclic GFR-binding peptide
  MOD_RES (2)..(4)..(37)..(38): Xaa is C or S
RXGXEAVSMGERYKKLTPVGMDDFYLVSIANLKTPVXX

SEQ ID NO: 4645 - protein, 42 aa, Artificial Sequence
  Non-cyclic GFR-binding peptide
  MOD_RES (1)..(3)..(36)..(37): Xaa is C or S
XGXEAVSMGEQYNKLTPVGMDDLYLVSIASLKTPVXXAKGVK

SEQ ID NO: 4646 - protein, 34 aa, Artificial Sequence
  Non-cyclic GFR-binding peptide
  MOD_RES (32)..(33): Xaa is C or S
ARVVMNRHKRLIVNSSDDYYLVSTASLQTPAXXP

SEQ ID NO: 4647 - protein, 39 aa, Artificial Sequence
  Non-cyclic GFR-binding peptide
  MOD_RES (1)..(3)..(37)..(38): Xaa is C or S
  MOD_RES (15)..(16)..(17)..(18)..(19): Xaa is A or G
  MOD_RES (20)..(21)..(22)..(23): Xaa is A or G or absent
XGXARVVMNYHYKLXXXXXXXXXKYLVSIPSLQTPAXXP

SEQ ID NO: 4648 - protein, 37 aa, Artificial Sequence
  Non-cyclic GFR-binding peptide
  MOD_RES (32)..(33): Xaa is C or S
GEVVMERYKKLVVKDYEDFYLMSIANLETPVXXAKPI

SEQ ID NO: 4649 - protein, 43 aa, Artificial Sequence
  Non-cyclic GFR-binding peptide
  MOD_RES (1)..(3)..(40): Xaa is C or S
XKXALHDELTRHKRLFIPKKRVIEYYLVSTASLQVQTPRXQVN

SEQ ID NO: 4650 - protein, 39 aa, Artificial Sequence
  Non-cyclic GFR-binding peptide
  MOD_RES (34)..(35): Xaa is C or S
  MOD_RES (12)..(13)..(14)..(15)..(16): Xaa is A or G
  MOD_RES (17)..(18)..(19)..(20): Xaa is A or G or absent
GEVVMEYHYKLXXXXXXXXXKYLMSIPSLETPVXXAKPI

SEQ ID NO: 4651 - protein, 38 aa, Artificial Sequence
  Non-cyclic GFR-binding peptide
  MOD_RES (2)..(4)..(38): Xaa is C or S
  MOD_RES (16)..(17)..(18)..(19)..(20): Xaa is A or G
  MOD_RES (21)..(22)..(23)..(24): Xaa is A or G or absent
RXGXGEVVMDRHKRLXXXXXXXXXYYLMSTASLETPVX

SEQ ID NO: 4652 - protein, 42 aa, Artificial Sequence
  Non-cyclic GFR-binding peptide
  MOD_RES (2)..(4)..(36)..(37): Xaa is C or S
RXGXGEVVMERHKRLVVKDYEDYYLMSTASLETPVXXAKPIS

SEQ ID NO: 4653 - protein, 39 aa, Artificial Sequence
  Non-cyclic GFR-binding peptide
  MOD_RES (2)..(39): Xaa is C or S
KXALHDELTQYNKLFIPKKRVIELYLVSIASLQVQTPRX

SEQ ID NO: 4654 - protein, 41 aa, Artificial Sequence
  Non-cyclic GFR-binding peptide
  MOD_RES (2)..(4)..(37)..(38): Xaa is C or S
  MOD_RES (15)..(16)..(17)..(18)..(19): Xaa is A or G
  MOD_RES (20)..(21)..(22)..(23): Xaa is A or G or absent
SXKXSKVVMYHYKLXXXXXXXXXKYLISIPSLDQPVXXPSA

SEQ ID NO: 4655 - protein, 39 aa, Artificial Sequence
  Non-cyclic GFR-binding peptide
  MOD_RES (2)..(4)..(38)..(39): Xaa is C or S
  MOD_RES (16)..(17)..(18)..(19)..(20): Xaa is A or G
  MOD_RES (21)..(22)..(23)..(24): Xaa is A or G or absent
RXGXGEVVMEYHYKLXXXXXXXXXKYLMSIPSLETPVXX

SEQ ID NO: 4656 - protein, 40 aa, Artificial Sequence
  Non-cyclic GFR-binding peptide
  MOD_RES (2)..(34)..(35): Xaa is C or S
GXSRVVMNQYNKLIVNSSDDLYLVSIASLKTPAXXPKPVY

SEQ ID NO: 4657 - protein, 38 aa, Artificial Sequence
  Non-cyclic GFR-binding peptide
  MOD_RES (33)..(33): Xaa is C or S
  MOD_RES (11)..(12)..(13)..(14)..(15): Xaa is A or G
  MOD_RES (16)..(17)..(18)..(19): Xaa is A or G or absent
RVVMNRHKRLXXXXXXXXXYYLVSTASLKTPAXTPKTV

SEQ ID NO: 4658 - protein, 35 aa, Artificial Sequence
  Non-cyclic GFR-binding peptide
  MOD_RES (1)..(3)..(35): Xaa is C or S
XGXARVVMNQYNKLIVNSSDDLYLVSIASLQTPAX

SEQ ID NO: 4659 - protein, 39 aa, Artificial Sequence
  Non-cyclic GFR-binding peptide
  MOD_RES (34)..(35): Xaa is C or S
  MOD_RES (12)..(13)..(14)..(15)..(16): Xaa is A or G
  MOD_RES (17)..(18)..(19)..(20): Xaa is A or G or absent
ARVVMNQYNKLXXXXXXXXXLYLVSIASLQTPAXXPKPV

SEQ ID NO: 4660 - protein, 39 aa, Artificial Sequence
  Non-cyclic GFR-binding peptide
  MOD_RES (2)..(36)..(37): Xaa is C or S
  MOD_RES (14)..(15)..(16)..(17)..(18): Xaa is A or G
  MOD_RES (19)..(20)..(21)..(22): Xaa is A or G or absent
GXARVVMNYHYKLXXXXXXXXXKYLVSIPSLQTPAXXPK

SEQ ID NO: 4661 - protein, 41 aa, Artificial Sequence
  Non-cyclic GFR-binding peptide
  MOD_RES (1)..(3)..(36)..(37): Xaa is C or S
  MOD_RES (14)..(15)..(16)..(17)..(18): Xaa is A or G
  MOD_RES (19)..(20)..(21)..(22): Xaa is A or G or absent
XKXSRVIMQYNKLXXXXXXXXXLYLISIASLAQPVXXPAAS

SEQ ID NO: 4662 - protein, 36 aa, Artificial Sequence
  Non-cyclic GFR-binding peptide
  MOD_RES (31)..(32): Xaa is C or S
EVVMERYKKLVVKDYEDFYLMSIANLETPVXXAKPI

SEQ ID NO: 4663 - protein, 40 aa, Artificial Sequence
  Non-cyclic GFR-binding peptide
  MOD_RES (1)..(34)..(35): Xaa is C or S
XEAVSMGERHKRLTPVGMDDYYLVSTASLKTPVXXAKGVK

SEQ ID NO: 4664 - protein, 33 aa, Artificial Sequence
  Non-cyclic GFR-binding peptide
  MOD_RES (12)..(13)..(14)..(15)..(16): Xaa is A or G
  MOD_RES (17)..(18)..(19)..(20): Xaa is A or G or absent
LHDELTRHKRLXXXXXXXXXYYLVSTASLQVQT

SEQ ID NO: 4665 - protein, 41 aa, Artificial Sequence
  Non-cyclic GFR-binding peptide
  MOD_RES (2)..(36): Xaa is C or S
  MOD_RES (14)..(15)..(16)..(17)..(18): Xaa is A or G
  MOD_RES (19)..(20)..(21)..(22): Xaa is A or G or absent
GXSRVVMNRHKRLXXXXXXXXXYYLVSTASLKTPAXTPKTV

SEQ ID NO: 4666 - protein, 37 aa, Artificial Sequence
  Non-cyclic GFR-binding peptide
  MOD_RES (2)..(37): Xaa is C or S
  MOD_RES (15)..(16)..(17)..(18)..(19): Xaa is A or G
  MOD_RES (20)..(21)..(22)..(23): Xaa is A or G or absent
GXEAVSMGERHKRLXXXXXXXXXYYLVSTASLKTPVX

SEQ ID NO: 4667 - protein, 36 aa, Artificial Sequence
  Non-cyclic GFR-binding peptide
  MOD_RES (31)..(32): Xaa is C or S
SKVIMYHYKLIKPTKGIKYLISIPSLDQSVXXPSAS

SEQ ID NO: 4668 - protein, 42 aa, Artificial Sequence
  Non-cyclic GFR-binding peptide
  MOD_RES (2)..(4)..(36)..(37): Xaa is C or S
HXGXAKVVMNQYNKLIVNNSSDLYLVSIASLKTPAXXAKPVA

SEQ ID NO: 4669 - protein, 36 aa, Artificial Sequence
  Non-cyclic GFR-binding peptide
  MOD_RES (1)..(33)..(34): Xaa is C or S
XAKVVMNRYKKLIVNNSSDFYLVSIANLKTPAXXAK

SEQ ID NO: 4670 - protein, 41 aa, Artificial Sequence
  Non-cyclic GFR-binding peptide
  MOD_RES (1)..(36)..(37): Xaa is C or S
  MOD_RES (14)..(15)..(16)..(17)..(18): Xaa is A or G
  MOD_RES (19)..(20)..(21)..(22): Xaa is A or G or absent
XEAVSMGERYKKLXXXXXXXXXFYLVSIANLKTPVXXAKGV

SEQ ID NO: 4671 - protein, 36 aa, Artificial Sequence
  Non-cyclic GFR-binding peptide
  MOD_RES (33)..(34): Xaa is C or S
  MOD_RES (11)..(12)..(13)..(14)..(15): Xaa is A or G
  MOD_RES (16)..(17)..(18)..(19): Xaa is A or G or absent
RVVMNRHKRLXXXXXXXXXYYLVSTASLQTPAXXPK

SEQ ID NO: 4672 - protein, 35 aa, Artificial Sequence
  Non-cyclic GFR-binding peptide
  MOD_RES (31)..(31): Xaa is C or S
RVVMNYHYKLIVNSSDDKYLVSIPSLKTPAXTPKT

SEQ ID NO: 4673 - protein, 31 aa, Artificial Sequence
  Non-cyclic GFR-binding peptide
  MOD_RES (31)..(31): Xaa is C or S
EVVMDRHKRLVVKENEDYYLMSTASLETPVX

SEQ ID NO: 4674 - protein, 35 aa, Artificial Sequence
  Non-cyclic GFR-binding peptide
  MOD_RES (1)..(3)..(34)..(35): Xaa is C or S
XKXSKVIMQYNKLIKPTKGILYLISIASLDQSVXX

SEQ ID NO: 4675 - protein, 37 aa, Artificial Sequence
  Non-cyclic GFR-binding peptide
  MOD_RES (2)..(4)..(36)..(37): Xaa is C or S
HXGXARVVMNRHKRLIVNSSDDYYLVSTASLQTPAXX

SEQ ID NO: 4676 - protein, 36 aa, Artificial Sequence
  Non-cyclic GFR-binding peptide
  MOD_RES (2)..(34)..(35): Xaa is C or S
GXGEVVMDYHYKLVVKENEDKYLMSIPSLETPVXXA

SEQ ID NO: 4677 - protein, 41 aa, Artificial Sequence
  Non-cyclic GFR-binding peptide
  MOD_RES (1)..(35)..(36): Xaa is C or S
  MOD_RES (13)..(14)..(15)..(16)..(17): Xaa is A or G
  MOD_RES (18)..(19)..(20)..(21): Xaa is A or G or absent
XSRVVMNRHKRLXXXXXXXXXYYLVSTASLKTPAXXPKPVY

SEQ ID NO: 4678 - protein, 42 aa, Artificial Sequence
  Non-cyclic GFR-binding peptide
  MOD_RES (2)..(36)..(37): Xaa is C or S
  MOD_RES (14)..(15)..(16)..(17)..(18): Xaa is A or G
  MOD_RES (19)..(20)..(21)..(22): Xaa is A or G or absent
GXAKVVMNQYNKLXXXXXXXXXLYLVSIASLKTPAXXAKPVA

SEQ ID NO: 4679 - protein, 38 aa, Artificial Sequence
  Non-cyclic GFR-binding peptide
  MOD_RES (1)..(3)..(37)..(38): Xaa is C or S
  MOD_RES (15)..(16)..(17)..(18)..(19): Xaa is A or G
  MOD_RES (20)..(21)..(22)..(23): Xaa is A or G or absent
XGXAKVVMNQYNKLXXXXXXXXXLYLVSIASLKTPAXX

SEQ ID NO: 4680 - protein, 38 aa, Artificial Sequence
  Non-cyclic GFR-binding peptide
  MOD_RES (32)..(33): Xaa is C or S
AKVVMNRYKKLIVNNSSDFYLVSIANLKTPAXXAKPVA

SEQ ID NO: 4681 - protein, 32 aa, Artificial Sequence
  Non-cyclic GFR-binding peptide
  MOD_RES (1)..(1): Xaa is C or S
XGEVVMDRHKRLVVKENEDYYLMSTASLETPV

SEQ ID NO: 4682 - protein, 32 aa, Artificial Sequence; identical to SEQ ID NO: 1853
  Non-cyclic GFR-binding peptide

SEQ ID NO: 4683 - protein, 37 aa, Artificial Sequence
  Non-cyclic GFR-binding peptide
  MOD_RES (31)..(32): Xaa is C or S
SKVVMYHYKLVKPTRGVKYLISIPSLDQPVXXPSASA

SEQ ID NO: 4684 - protein, 38 aa, Artificial Sequence
  Non-cyclic GFR-binding peptide
  MOD_RES (2)..(36): Xaa is C or S
  MOD_RES (14)..(15)..(16)..(17)..(18): Xaa is A or G
  MOD_RES (19)..(20)..(21)..(22): Xaa is A or G or absent
GXSRVVMNYHYKLXXXXXXXXXKYLVSIPSLKTPAXTP

SEQ ID NO: 4685 - protein, 35 aa, Artificial Sequence
  Non-cyclic GFR-binding peptide
  MOD_RES (1)..(3)..(35): Xaa is C or S
XGXAKVVMNYHYKLIVNNSSDKYLVSIPSLKTPAX

SEQ ID NO: 4686 - protein, 36 aa, Artificial Sequence
  Non-cyclic GFR-binding peptide
  MOD_RES (34)..(35): Xaa is C or S
  MOD_RES (12)..(13)..(14)..(15)..(16): Xaa is A or G
  MOD_RES (17)..(18)..(19)..(20): Xaa is A or G or absent
AKVVMNQYNKLXXXXXXXXXLYLVSIASLKTPAXXA

SEQ ID NO: 4687 - protein, 41 aa, Artificial Sequence
  Non-cyclic GFR-binding peptide
  MOD_RES (1)..(35)..(36): Xaa is C or S
  MOD_RES (13)..(14)..(15)..(16)..(17): Xaa is A or G
  MOD_RES (18)..(19)..(20)..(21): Xaa is A or G or absent
XGEVVMDRHKRLXXXXXXXXXYYLMSTASLETPVXXAKPIK

SEQ ID NO: 4688 - protein, 39 aa, Artificial Sequence
  Non-cyclic GFR-binding peptide
  MOD_RES (2)..(4)..(36): Xaa is C or S
HXGXSRVVMNRHKRLIVNSSDDYYLVSTASLKTPAXTPK

SEQ ID NO: 4689 - protein, 41 aa, Artificial Sequence
  Non-cyclic GFR-binding peptide
  MOD_RES (2)..(36)..(37): Xaa is C or S
  MOD_RES (14)..(15)..(16)..(17)..(18): Xaa is A or G
  MOD_RES (19)..(20)..(21)..(22): Xaa is A or G or absent
GXGEVVMDYHYKLXXXXXXXXXKYLMSIPSLETPVXXAKPI

SEQ ID NO: 4690 - protein, 38 aa, Artificial Sequence
  Non-cyclic GFR-binding peptide
  MOD_RES (2)..(4)..(36)..(37): Xaa is C or S
HXGXARVVMNQYNKLIVNSSDDLYLVSIASLQTPAXXP

SEQ ID NO: 4691 - protein, 37 aa, Artificial Sequence
  Non-cyclic GFR-binding peptide
  MOD_RES (36)..(36): Xaa is C or S
LHDELTQYNKLFIPKKRVIELYLVSIASLQVQTPRXQ

SEQ ID NO: 4692 - protein, 38 aa, Artificial Sequence
  Non-cyclic GFR-binding peptide
  MOD_RES (36)..(36): Xaa is C or S
LHDELTYHYKLFIPKKRVIEKYLVSIPSLQVQTPRXQV

SEQ ID NO: 4693 - protein, 38 aa, Artificial Sequence
  Non-cyclic GFR-binding peptide
  MOD_RES (33)..(34): Xaa is C or S
  MOD_RES (11)..(12)..(13)..(14)..(15): Xaa is A or G
  MOD_RES (16)..(17)..(18)..(19): Xaa is A or G or absent
RVVMNYHYKLXXXXXXXXXKYLVSIPSLQTPAXXPKPV

SEQ ID NO: 4694 - protein, 41 aa, Artificial Sequence
  Non-cyclic GFR-binding peptide
  MOD_RES (2)..(35)..(36): Xaa is C or S
GXEAVSMGERHKRLTPVGMDDYYLVSTASLKTPVXXAKGVK

SEQ ID NO: 4695 - protein, 40 aa, Artificial Sequence
  Non-cyclic GFR-binding peptide
  MOD_RES (2)..(35)..(36): Xaa is C or S
  MOD_RES (13)..(14)..(15)..(16)..(17): Xaa is A or G
  MOD_RES (18)..(19)..(20)..(21): Xaa is A or G or absent
KXSKVVMRHKRLXXXXXXXXXYYLISTASLDQPVXXPSAS

SEQ ID NO: 4696 - protein, 36 aa, Artificial Sequence
  Non-cyclic GFR-binding peptide
  MOD_RES (1)..(32)..(33): Xaa is C or S
XSKVVMRYKKLVKPTRGVFYLISIANLDQPVXXPSA

SEQ ID NO: 4697 - protein, 31 aa, Artificial Sequence
  Non-cyclic GFR-binding peptide
SRVVMNRHKRLIVNSSDDYYLVSTASLKTPA

SEQ ID NO: 4698 - protein, 33 aa, Artificial Sequence
  Non-cyclic GFR-binding peptide
  MOD_RES (33)..(33): Xaa is C or S
  MOD_RES (11)..(12)..(13)..(14)..(15): Xaa is A or G
  MOD_RES (16)..(17)..(18)..(19): Xaa is A or G or absent
RVVMNRHKRLXXXXXXXXXYYLVSTASLKTPAX

SEQ ID NO: 4699 - protein, 37 aa, Artificial Sequence
  Non-cyclic GFR-binding peptide
  MOD_RES (2)..(4)..(36)..(37): Xaa is C or S
RXGXGEVVMEYHYKLVVKDYEDKYLMSIPSLETPVXX

SEQ ID NO: 4700 - protein, 38 aa, Artificial Sequence
  Non-cyclic GFR-binding peptide
  MOD_RES (1)..(35)..(36): Xaa is C or S
  MOD_RES (13)..(14)..(15)..(16)..(17): Xaa is A or G
  MOD_RES (18)..(19)..(20)..(21): Xaa is A or G or absent
XGEVVMDRYKKLXXXXXXXXXFYLMSIANLETPVXXAK

SEQ ID NO: 4701 - protein, 38 aa, Artificial Sequence
  Non-cyclic GFR-binding peptide
  MOD_RES (33)..(34): Xaa is C or S
  MOD_RES (11)..(12)..(13)..(14)..(15): Xaa is A or G
  MOD_RES (16)..(17)..(18)..(19): Xaa is A or G or absent
SRVIMRYKKLXXXXXXXXXFYLISIANLAQPVXXPAAS

SEQ ID NO: 4702 - protein, 35 aa, Artificial Sequence
  Non-cyclic GFR-binding peptide
  MOD_RES (31)..(31): Xaa is C or S
RVVMNQYNKLIVNSSDDLYLVSIASLKTPAXTPKT

SEQ ID NO: 4703 - protein, 30 aa, Artificial Sequence
  Non-cyclic GFR-binding peptide
EVVMERYKKLVVKDYEDFYLMSIANLETPV

SEQ ID NO: 4704 - protein, 35 aa, Artificial Sequence
  Non-cyclic GFR-binding peptide
  MOD_RES (1)..(32)..(33): Xaa is C or S
XSRVIMRHKRLVKPKRGVYYLISTASLAQPVXXPA

SEQ ID NO: 4705 - protein, 41 aa, Artificial Sequence
  Non-cyclic GFR-binding peptide
  MOD_RES (1)..(35): Xaa is C or S
  MOD_RES (13)..(14)..(15)..(16)..(17): Xaa is A or G
  MOD_RES (18)..(19)..(20)..(21): Xaa is A or G or absent
XSRVVMNRHKRLXXXXXXXXXYYLVSTASLKTPAXTPKTVH

SEQ ID NO: 4706 - protein, 34 aa, Artificial Sequence
  Non-cyclic GFR-binding peptide
  MOD_RES (11)..(12)..(13)..(14)..(15): Xaa is A or G
  MOD_RES (16)..(17)..(18)..(19): Xaa is A or G or absent
HDELTQYNKLXXXXXXXXXLYLVSIASLQVQTPR

SEQ ID NO: 4707 - protein, 31 aa, Artificial Sequence
  Non-cyclic GFR-binding peptide
  MOD_RES (1)..(1): Xaa is C or S
XSRVIMRHKRLVKPKRGVYYLISTASLAQPV

SEQ ID NO: 4708 - protein, 35 aa, Artificial Sequence
  Non-cyclic GFR-binding peptide
  MOD_RES (1)..(3): Xaa is C or S
XGXEAVSMGERYKKLTPVGMDDFYLVSIANLKTPV

SEQ ID NO: 4709 - protein, 36 aa, Artificial Sequence
  Non-cyclic GFR-binding peptide
  MOD_RES (31)..(32): Xaa is C or S
SKVIMQYNKLIKPTKGILYLISIASLDQSVXXPSAS

SEQ ID NO: 4710 - protein, 37 aa, Artificial Sequence
  Non-cyclic GFR-binding peptide
  MOD_RES (31)..(31): Xaa is C or S
RVVMNRHKRLIVNSSDDYYLVSTASLKTPAXTPKTVH

SEQ ID NO: 4711 - protein, 32 aa, Artificial Sequence
  Non-cyclic GFR-binding peptide
  MOD_RES (31)..(32): Xaa is C or S
SKVIMRYKKLIKPTKGIFYLISIANLDQSVXX

SEQ ID NO: 4712 - protein, 36 aa, Artificial Sequence
  Non-cyclic GFR-binding peptide
  MOD_RES (1)..(3)..(36): Xaa is C or S
XGXEAVSMGERHKRLTPVGMDDYYLVSTASLKTPVX

SEQ ID NO: 4713 - protein, 33 aa, Artificial Sequence
  Non-cyclic GFR-binding peptide
  MOD_RES (1)..(3): Xaa is C or S
XKXSKVVMYHYKLVKPTRGVKYLISIPSLDQPV

SEQ ID NO: 4714 - protein, 41 aa, Artificial Sequence
  Non-cyclic GFR-binding peptide
  MOD_RES (2)..(4)..(36)..(37): Xaa is C or S
HXGXSRVVMNYHYKLIVNSSDDKYLVSIPSLKTPAXXPKPV

SEQ ID NO: 4715 - protein, 37 aa, Artificial Sequence
  Non-cyclic GFR-binding peptide
  MOD_RES (2)..(2): Xaa is C or S
  MOD_RES (15)..(16)..(17)..(18)..(19): Xaa is A or G
  MOD_RES (20)..(21)..(22)..(23): Xaa is A or G or absent
KXALHDELTYHYKLXXXXXXXXXKYLVSIPSLQVQTP

SEQ ID NO: 4716 - protein, 36 aa, Artificial Sequence
  Non-cyclic GFR-binding peptide
  MOD_RES (33)..(34): Xaa is C or S
  MOD_RES (11)..(12)..(13)..(14)..(15): Xaa is A or G
  MOD_RES (16)..(17)..(18)..(19): Xaa is A or G or absent
EVVMDRYKKLXXXXXXXXXFYLMSIANLETPVXXAK

SEQ ID NO: 4717 - protein, 39 aa, Artificial Sequence
  Non-cyclic GFR-binding peptide
  MOD_RES (2)..(36)..(37): Xaa is C or S
  MOD_RES (14)..(15)..(16)..(17)..(18): Xaa is A or G
  MOD_RES (19)..(20)..(21)..(22): Xaa is A or G or absent
GXGEVVMERHKRLXXXXXXXXXYYLMSTASLETPVXXAK

SEQ ID NO: 4718 - protein, 34 aa, Artificial Sequence
  Non-cyclic GFR-binding peptide
  MOD_RES (33)..(34): Xaa is C or S
  MOD_RES (11)..(12)..(13)..(14)..(15): Xaa is A or G
  MOD_RES (16)..(17)..(18)..(19): Xaa is A or G or absent
SRVIMRYKKLXXXXXXXXXFYLISIANLAQPVXX

SEQ ID NO: 4719 - protein, 37 aa, Artificial Sequence
  Non-cyclic GFR-binding peptide
  MOD_RES (2)..(34)..(35): Xaa is C or S
GXARVVMNRHKRLIVNSSDDYYLVSTASLQTPAXXPK

SEQ ID NO: 4720 - protein, 41 aa, Artificial Sequence
  Non-cyclic GFR-binding peptide
  MOD_RES (1)..(35)..(36): Xaa is C or S
  MOD_RES (13)..(14)..(15)..(16)..(17): Xaa is A or G
  MOD_RES (18)..(19)..(20)..(21): Xaa is A or G or absent
XARVVMNRHKRLXXXXXXXXXYYLVSTASLQTPAXXPKPVT

SEQ ID NO: 4721 - protein, 34 aa, Artificial Sequence
  Non-cyclic GFR-binding peptide
  MOD_RES (33)..(34): Xaa is C or S
EAVSMGERHKRLTPVGMDDYYLVSTASLKTPVXX

SEQ ID NO: 4722 - protein, 37 aa, Artificial Sequence
  Non-cyclic GFR-binding peptide
  MOD_RES (34)..(35): Xaa is C or S
  MOD_RES (12)..(13)..(14)..(15)..(16): Xaa is A or G
  MOD_RES (17)..(18)..(19)..(20): Xaa is A or G or absent
SRVVMNYHYKLXXXXXXXXXKYLVSIPSLKTPAXXPK

SEQ ID NO: 4723 - protein, 40 aa, Artificial Sequence
  Non-cyclic GFR-binding peptide
  MOD_RES (2)..(4)..(36): Xaa is C or S
HXGXSRVVMNRHKRLIVNSSDDYYLVSTASLKTPAXTPKT

SEQ ID NO: 4724 - protein, 44 aa, Artificial Sequence
  Non-cyclic GFR-binding peptide
  MOD_RES (2)..(4)..(38)..(39): Xaa is C or S
  MOD_RES (16)..(17)..(18)..(19)..(20): Xaa is A or G
  MOD_RES (21)..(22)..(23)..(24): Xaa is A or G or absent
RXGXGEVVMDRYKKLXXXXXXXXXFYLMSIANLETPVXXAKPIK

SEQ ID NO: 4725 - protein, 37 aa, Artificial Sequence
  Non-cyclic GFR-binding peptide
  MOD_RES (32)..(33): Xaa is C or S
ARVVMNQYNKLIVNSSDDLYLVSIASLQTPAXXPKPV

SEQ ID NO: 4726 - protein, 33 aa, Artificial Sequence
  Non-cyclic GFR-binding peptide
  MOD_RES (1)..(1): Xaa is C or S
  MOD_RES (12)..(13)..(14)..(15)..(16): Xaa is A or G
  MOD_RES (17)..(18)..(19)..(20): Xaa is A or G or absent
XSKVIMYHYKLXXXXXXXXXKYLISIPSLDQSV

SEQ ID NO: 4727 - protein, 37 aa, Artificial Sequence
  Non-cyclic GFR-binding peptide
  MOD_RES (2)..(36): Xaa is C or S
  MOD_RES (14)..(15)..(16)..(17)..(18): Xaa is A or G
  MOD_RES (19)..(20)..(21)..(22): Xaa is A or G or absent
GXSRVVMNRHKRLXXXXXXXXXYYLVSTASLKTPAXT

SEQ ID NO: 4728 - protein, 38 aa, Artificial Sequence
  Non-cyclic GFR-binding peptide
  MOD_RES (2)..(34)..(35): Xaa is C or S
GXGEVVMERYKKLVVKDYEDFYLMSIANLETPVXXAKP

SEQ ID NO: 4729 - protein, 32 aa, Artificial Sequence
  Non-cyclic GFR-binding peptide
  MOD_RES (1)..(1): Xaa is C or S
XAKVVMNRYKKLIVNNSSDFYLVSIANLKTPA

SEQ ID NO: 4730 - protein, 40 aa, Artificial Sequence
  Non-cyclic GFR-binding peptide
  MOD_RES (2)..(4)..(38)..(39): Xaa is C or S
  MOD_RES (16)..(17)..(18)..(19)..(20): Xaa is A or G
  MOD_RES (21)..(22)..(23)..(24): Xaa is A or G or absent
HXGXARVVMNQYNKLXXXXXXXXXLYLVSIASLQTPAXXP

SEQ ID NO: 4731 - protein, 37 aa, Artificial Sequence
  Non-cyclic GFR-binding peptide
  MOD_RES (31)..(32): Xaa is C or S
SKVIMQYNKLIKPTKGILYLISIASLDQSVXXPSASA

SEQ ID NO: 4732 - protein, 32 aa, Artificial Sequence
  Non-cyclic GFR-binding peptide
  MOD_RES (1)..(32): Xaa is C or S
XSRVIMYHYKLVKPKRGVKYLISIPSLAQPVX

SEQ ID NO: 4733 - protein, 42 aa, Artificial Sequence
  Non-cyclic GFR-binding peptide
  MOD_RES (2)..(39): Xaa is C or S
KXALHDELTRHKRLFIPKKRVIEYYLVSTASLQVQTPRXQVN

SEQ ID NO: 4734 - protein, 39 aa, Artificial Sequence
  Non-cyclic GFR-binding peptide
  MOD_RES (1)..(33)..(34): Xaa is C or S
XGEVVMDRYKKLVVKENEDFYLMSIANLETPVXXAKPIK

SEQ ID NO: 4735 - protein, 36 aa, Artificial Sequence
  Non-cyclic GFR-binding peptide
  MOD_RES (2)..(4)..(35)..(36): Xaa is C or S
SXKXSRVIMRYKKLVKPKRGVFYLISIANLAQPVXX

SEQ ID NO: 4736 - protein, 37 aa, Artificial Sequence
  Non-cyclic GFR-binding peptide
  MOD_RES (34)..(35): Xaa is C or S
  MOD_RES (12)..(13)..(14)..(15)..(16): Xaa is A or G
  MOD_RES (17)..(18)..(19)..(20): Xaa is A or G or absent
ARVVMNQYNKLXXXXXXXXXLYLVSIASLQTPAXXPK

SEQ ID NO: 4737 - protein, 41 aa, Artificial Sequence
  Non-cyclic GFR-binding peptide
  MOD_RES (1)..(3)..(37)..(38): Xaa is C or S
  MOD_RES (15)..(16)..(17)..(18)..(19): Xaa is A or G
  MOD_RES (20)..(21)..(22)..(23): Xaa is A or G or absent
XGXSRVVMNQYNKLXXXXXXXXXLYLVSIASLKTPAXXPKP

SEQ ID NO: 4738 - protein, 41 aa, Artificial Sequence
  Non-cyclic GFR-binding peptide
  MOD_RES (2)..(36)..(37): Xaa is C or S
  MOD_RES (14)..(15)..(16)..(17)..(18): Xaa is A or G
  MOD_RES (19)..(20)..(21)..(22): Xaa is A or G or absent
GXSRVVMNQYNKLXXXXXXXXXLYLVSIASLKTPAXXPKPV

SEQ ID NO: 4739 - protein, 31 aa, Artificial Sequence
  Non-cyclic GFR-binding peptide
  MOD_RES (31)..(31): Xaa is C or S
SKVVMQYNKLVKPTRGVLYLISIASLDQPVX

SEQ ID NO: 4740 - protein, 38 aa, Artificial Sequence
  Non-cyclic GFR-binding peptide
  MOD_RES (32)..(33): Xaa is C or S
AKVVMNQYNKLIVNNSSDLYLVSIASLKTPAXXAKPVA

SEQ ID NO: 4741 - protein, 36 aa, Artificial Sequence
  Non-cyclic GFR-binding peptide
  MOD_RES (2)..(34)..(35): Xaa is C or S
GXGEVVMDRYKKLVVKENEDFYLMSIANLETPVXXA

SEQ ID NO: 4742 - protein, 36 aa, Artificial Sequence
  Non-cyclic GFR-binding peptide
  MOD_RES (1)..(33)..(34): Xaa is C or S
XGEVVMERHKRLVVKDYEDYYLMSTASLETPVXXAK

SEQ ID NO: 4743 - protein, 35 aa, Artificial Sequence
  Non-cyclic GFR-binding peptide
  MOD_RES (1)..(3)..(35): Xaa is C or S
XGXARVVMNYHYKLIVNSSDDKYLVSIPSLQTPAX

SEQ ID NO: 4744 - protein, 42 aa, Artificial Sequence
  Non-cyclic GFR-binding peptide
  MOD_RES (2)..(36): Xaa is C or S
  MOD_RES (14)..(15)..(16)..(17)..(18): Xaa is A or G
  MOD_RES (19)..(20)..(21)..(22): Xaa is A or G or absent
GXSRVVMNQYNKLXXXXXXXXXLYLVSIASLKTPAXTPKTVH

SEQ ID NO: 4745 - protein, 35 aa, Artificial Sequence
  Non-cyclic GFR-binding peptide
  MOD_RES (2)..(4): Xaa is C or S
HXGXSRVVMNYHYKLIVNSSDDKYLVSIPSLKTPA

SEQ ID NO: 4746 - protein, 41 aa, Artificial Sequence
  Non-cyclic GFR-binding peptide
  MOD_RES (2)..(4)..(36): Xaa is C or S
HXGXSRVVMNYHYKLIVNSSDDKYLVSIPSLKTPAXTPKTV

SEQ ID NO: 4747 - protein, 40 aa, Artificial Sequence
  Non-cyclic GFR-binding peptide
  MOD_RES (2)..(39): Xaa is C or S
KXALHDELTRYKKLFIPKKRVIEFYLVSIANLQVQTPRXQ

SEQ ID NO: 4748 - protein, 38 aa, Artificial Sequence
  Non-cyclic GFR-binding peptide
  MOD_RES (33)..(34): Xaa is C or S
  MOD_RES (11)..(12)..(13)..(14)..(15): Xaa is A or G
  MOD_RES (16)..(17)..(18)..(19): Xaa is A or G or absent
RVVMNQYNKLXXXXXXXXXLYLVSIASLQTPAXXPKPV

SEQ ID NO: 4749 - protein, 43 aa, Artificial Sequence
  Non-cyclic GFR-binding peptide
  MOD_RES (2)..(4)..(38): Xaa is C or S
  MOD_RES (16)..(17)..(18)..(19)..(20): Xaa is A or G
  MOD_RES (21)..(22)..(23)..(24): Xaa is A or G or absent
HXGXSRVVMNQYNKLXXXXXXXXXLYLVSIASLKTPAXTPKTV

SEQ ID NO: 4750 - protein, 36 aa, Artificial Sequence
  Non-cyclic GFR-binding peptide
  MOD_RES (1)..(33)..(34): Xaa is C or S
XGEVVMDRHKRLVVKENEDYYLMSTASLETPVXXAK

SEQ ID NO: 4751 - protein, 37 aa, Artificial Sequence
  Non-cyclic GFR-binding peptide
  MOD_RES (34)..(35): Xaa is C or S
  MOD_RES (12)..(13)..(14)..(15)..(16): Xaa is A or G
  MOD_RES (17)..(18)..(19)..(20): Xaa is A or G or absent
GEVVMDRYKKLXXXXXXXXXFYLMSIANLETPVXXAK

SEQ ID NO: 4752 - protein, 36 aa, Artificial Sequence
  Non-cyclic GFR-binding peptide
  MOD_RES (1)..(35)..(36): Xaa is C or S
  MOD_RES (13)..(14)..(15)..(16)..(17): Xaa is A or G
  MOD_RES (18)..(19)..(20)..(21): Xaa is A or G or absent
XGEVVMDYHYKLXXXXXXXXXKYLMSIPSLETPVXX

SEQ ID NO: 4753 - protein, 37 aa, Artificial Sequence
  Non-cyclic GFR-binding peptide
  MOD_RES (1)..(32)..(33): Xaa is C or S
XSKVIMRHKRLIKPTKGIYYLISTASLDQSVXXPSAS

SEQ ID NO: 4754 - protein, 32 aa, Artificial Sequence
  Non-cyclic GFR-binding peptide
  MOD_RES (31)..(32): Xaa is C or S
SRVIMRYKKLVKPKRGVFYLISIANLAQPVXX

SEQ ID NO: 4755 - protein, 42 aa, Artificial Sequence
  Non-cyclic GFR-binding peptide
  MOD_RES (1)..(3)..(36)..(37): Xaa is C or S
  MOD_RES (14)..(15)..(16)..(17)..(18): Xaa is A or G
  MOD_RES (19)..(20)..(21)..(22): Xaa is A or G or absent
XKXSKVIMRHKRLXXXXXXXXXYYLISTASLDQSVXXPSASA

SEQ ID NO: 4756 - protein, 30 aa, Artificial Sequence
  Non-cyclic GFR-binding peptide
RVVMNQYNKLIVNSSDDLYLVSIASLQTPA

SEQ ID NO: 4757 - protein, 35 aa, Artificial Sequence
  Non-cyclic GFR-binding peptide
  MOD_RES (2)..(34)..(35): Xaa is C or S
GXGEVVMDYHYKLVVKENEDKYLMSIPSLETPVXX

SEQ ID NO: 4758 - protein, 34 aa, Artificial Sequence
  Non-cyclic GFR-binding peptide
  MOD_RES (1)..(3)..(34): Xaa is C or S
XKXSKVVMYHYKLVKPTRGVKYLISIPSLDQPVX

SEQ ID NO: 4759 - protein, 38 aa, Artificial Sequence
  Non-cyclic GFR-binding peptide
  MOD_RES (1)..(34)..(35): Xaa is C or S
XEAVSMGERHKRLTPVGMDDYYLVSTASLKTPVXXAKG

SEQ ID NO: 4760 - protein, 34 aa, Artificial Sequence
  Non-cyclic GFR-binding peptide
  MOD_RES (33)..(34): Xaa is C or S
  MOD_RES (11)..(12)..(13)..(14)..(15): Xaa is A or G
  MOD_RES (16)..(17)..(18)..(19): Xaa is A or G or absent
EVVMERYKKLXXXXXXXXXFYLMSIANLETPVXX

SEQ ID NO: 4761 - protein, 32 aa, Artificial Sequence
  Non-cyclic GFR-binding peptide
  MOD_RES (1)..(1): Xaa is C or S
XGEVVMERHKRLVVKDYEDYYLMSTASLETPV

SEQ ID NO: 4762 - protein, 37 aa, Artificial Sequence
  Non-cyclic GFR-binding peptide
  MOD_RES (33)..(34): Xaa is C or S
  MOD_RES (11)..(12)..(13)..(14)..(15): Xaa is A or G
  MOD_RES (16)..(17)..(18)..(19): Xaa is A or G or absent
SKVVMYHYKLXXXXXXXXXKYLISIPSLDQPVXXPSA

SEQ ID NO: 4763 - protein, 33 aa, Artificial Sequence
  Non-cyclic GFR-binding peptide
  MOD_RES (12)..(13)..(14)..(15)..(16): Xaa is A or G
  MOD_RES (17)..(18)..(19)..(20): Xaa is A or G or absent
GEVVMDRYKKLXXXXXXXXXFYLMSIANLETPV

SEQ ID NO: 4764 - protein, 40 aa, Artificial Sequence
  Non-cyclic GFR-binding peptide
  MOD_RES (2)..(4): Xaa is C or S
EXKXALHDELTRYKKLFIPKKRVIEFYLVSIANLQVQTPR

SEQ ID NO: 4765 - protein, 38 aa, Artificial Sequence
  Non-cyclic GFR-binding peptide
  MOD_RES (1)..(32)..(33): Xaa is C or S
XSKVVMYHYKLVKPTRGVKYLISIPSLDQPVXXPSASA

SEQ ID NO: 4766 - protein, 36 aa, Artificial Sequence
  Non-cyclic GFR-binding peptide
  MOD_RES (2)..(33)..(34): Xaa is C or S
KXSKVVMRYKKLVKPTRGVFYLISIANLDQPVXXPS

SEQ ID NO: 4767 - protein, 38 aa, Artificial Sequence
  Non-cyclic GFR-binding peptide
  MOD_RES (1)..(35)..(36): Xaa is C or S
  MOD_RES (13)..(14)..(15)..(16)..(17): Xaa is A or G
  MOD_RES (18)..(19)..(20)..(21): Xaa is A or G or absent
XARVVMNYHYKLXXXXXXXXXKYLVSIPSLQTPAXXPK

SEQ ID NO: 4768 - protein, 37 aa, Artificial Sequence
  Non-cyclic GFR-binding peptide
  MOD_RES (1)..(32)..(33): Xaa is C or S
XSKVVMYHYKLVKPTRGVKYLISIPSLDQPVXXPSAS

SEQ ID NO: 4769 - protein, 32 aa, Artificial Sequence
  Non-cyclic GFR-binding peptide
EAVSMGEQYNKLTPVGMDDLYLVSIASLKTPV

SEQ ID NO: 4770 - protein, 44 aa, Artificial Sequence
  Non-cyclic GFR-binding peptide
  MOD_RES (2)..(4)..(38)..(39): Xaa is C or S
  MOD_RES (16)..(17)..(18)..(19)..(20): Xaa is A or G
  MOD_RES (21)..(22)..(23)..(24): Xaa is A or G or absent
HXGXARVVMNYHYKLXXXXXXXXXKYLVSIPSLQTPAXXPKPVT

SEQ ID NO: 4771 - protein, 38 aa, Artificial Sequence
  Non-cyclic GFR-binding peptide
  MOD_RES (1)..(38): Xaa is C or S
XALHDELTQYNKLFIPKKRVIELYLVSIASLQVQTPRX

SEQ ID NO: 4772 - protein, 35 aa, Artificial Sequence
  Non-cyclic GFR-binding peptide
  MOD_RES (1)..(3)..(35): Xaa is C or S
XGXAKVVMNQYNKLIVNNSSDLYLVSIASLKTPAX

SEQ ID NO: 4773 - protein, 33 aa, Artificial Sequence
  Non-cyclic GFR-binding peptide
  MOD_RES (33)..(33): Xaa is C or S
  MOD_RES (11)..(12)..(13)..(14)..(15): Xaa is A or G
  MOD_RES (16)..(17)..(18)..(19): Xaa is A or G or absent
RVVMNQYNKLXXXXXXXXXLYLVSIASLQTPAX

SEQ ID NO: 4774 - protein, 42 aa, Artificial Sequence
  Non-cyclic GFR-binding peptide
  MOD_RES (2)..(4)..(38)..(39): Xaa is C or S
  MOD_RES (16)..(17)..(18)..(19)..(20): Xaa is A or G
  MOD_RES (21)..(22)..(23)..(24): Xaa is A or G or absent
RXGXGEVVMEYHYKLXXXXXXXXXKYLMSIPSLETPVXXAKP

SEQ ID NO: 4775 - protein, 35 aa, Artificial Sequence
  Non-cyclic GFR-binding peptide
  MOD_RES (1)..(32)..(33): Xaa is C or S
XSKVVMRYKKLVKPTRGVFYLISIANLDQPVXXPS

SEQ ID NO: 4776 - protein, 38 aa, Artificial Sequence
  Non-cyclic GFR-binding peptide
  MOD_RES (1)..(3)..(35)..(36): Xaa is C or S
XGXSRVVMNRHKRLIVNSSDDYYLVSTASLKTPAXXPK

SEQ ID NO: 4777 - protein, 39 aa, Artificial Sequence
  Non-cyclic GFR-binding peptide
  MOD_RES (1)..(3)..(37)..(38): Xaa is C or S
  MOD_RES (15)..(16)..(17)..(18)..(19): Xaa is A or G
  MOD_RES (20)..(21)..(22)..(23): Xaa is A or G or absent
XGXAKVVMNRYKKLXXXXXXXXXFYLVSIANLKTPAXXA

SEQ ID NO: 4778 - protein, 36 aa, Artificial Sequence
  Non-cyclic GFR-binding peptide
  MOD_RES (32)..(33): Xaa is C or S
SRVVMNYHYKLIVNSSDDKYLVSIPSLKTPAXXPKP

SEQ ID NO: 4779 - protein, 41 aa, Artificial Sequence
  Non-cyclic GFR-binding peptide
  MOD_RES (1)..(3)..(35): Xaa is C or S
XGXSRVVMNYHYKLIVNSSDDKYLVSIPSLKTPAXTPKTVH

SEQ ID NO: 4780 - protein, 38 aa, Artificial Sequence
  Non-cyclic GFR-binding peptide
  MOD_RES (1)..(33)..(34): Xaa is C or S
XGEVVMDYHYKLVVKENEDKYLMSIPSLETPVXXAKPI

SEQ ID NO: 4781 - protein, 36 aa, Artificial Sequence
  Non-cyclic GFR-binding peptide
  MOD_RES (33)..(34): Xaa is C or S
EAVSMGERYKKLTPVGMDDFYLVSIANLKTPVXXAK

SEQ ID NO: 4782 - protein, 35 aa, Artificial Sequence
  Non-cyclic GFR-binding peptide
  MOD_RES (1)..(35): Xaa is C or S
  MOD_RES (13)..(14)..(15)..(16)..(17): Xaa is A or G
  MOD_RES (18)..(19)..(20)..(21): Xaa is A or G or absent
XARVVMNQYNKLXXXXXXXXXLYLVSIASLQTPAX

SEQ ID NO: 4783 - protein, 36 aa, Artificial Sequence
  Non-cyclic GFR-binding peptide
  MOD_RES (1)..(36): Xaa is C or S
  MOD_RES (14)..(15)..(16)..(17)..(18): Xaa is A or G
  MOD_RES (19)..(20)..(21)..(22): Xaa is A or G or absent
XEAVSMGERHKRLXXXXXXXXXYYLVSTASLKTPVX

SEQ ID NO: 4784 - protein, 44 aa, Artificial Sequence
  Non-cyclic GFR-binding peptide
  MOD_RES (1)..(3)..(40): Xaa is C or S
  MOD_RES (16)..(17)..(18)..(19)..(20): Xaa is A or G
  MOD_RES (21)..(22)..(23)..(24): Xaa is A or G or absent
XKXALHDELTRYKKLXXXXXXXXXFYLVSIANLQVQTPRXQVNR

SEQ ID NO: 4785 - protein, 37 aa, Artificial Sequence
  Non-cyclic GFR-binding peptide
  MOD_RES (2)..(34)..(35): Xaa is C or S
GXGEVVMDRHKRLVVKENEDYYLMSTASLETPVXXAK

SEQ ID NO: 4786 - protein, 39 aa, Artificial Sequence
  Non-cyclic GFR-binding peptide
  MOD_RES (33)..(34): Xaa is C or S
  MOD_RES (11)..(12)..(13)..(14)..(15): Xaa is A or G
  MOD_RES (16)..(17)..(18)..(19): Xaa is A or G or absent
KVVMNQYNKLXXXXXXXXXLYLVSIASLKTPAXXAKPVA

SEQ ID NO: 4787 - protein, 31 aa, Artificial Sequence
  Non-cyclic GFR-binding peptide
  MOD_RES (1)..(1): Xaa is C or S
XSKVIMYHYKLIKPTKGIKYLISIPSLDQSV

SEQ ID NO: 4788 - protein, 35 aa, Artificial Sequence
  Non-cyclic GFR-binding peptide
  MOD_RES (1)..(34)..(35): Xaa is C or S
  MOD_RES (12)..(13)..(14)..(15)..(16): Xaa is A or G
  MOD_RES (17)..(18)..(19)..(20): Xaa is A or G or absent
XSRVIMQYNKLXXXXXXXXXLYLISIASLAQPVXX

SEQ ID NO: 4789 - protein, 39 aa, Artificial Sequence
  Non-cyclic GFR-binding peptide
  MOD_RES (37)..(37): Xaa is C or S
ALHDELTQYNKLFIPKKRVIELYLVSIASLQVQTPRXQV

SEQ ID NO: 4790 - protein, 39 aa, Artificial Sequence
  Non-cyclic GFR-binding peptide
  MOD_RES (37)..(37): Xaa is C or S
ALHDELTRHKRLFIPKKRVIEYYLVSTASLQVQTPRXQV

SEQ ID NO: 4791 - protein, 39 aa, Artificial Sequence
  Non-cyclic GFR-binding peptide
  MOD_RES (36)..(36): Xaa is C or S
LHDELTRHKRLFIPKKRVIEYYLVSTASLQVQTPRXQVN

SEQ ID NO: 4792 - protein, 40 aa, Artificial Sequence
  Non-cyclic GFR-binding peptide
  MOD_RES (34)..(35): Xaa is C or S
  MOD_RES (12)..(13)..(14)..(15)..(16): Xaa is A or G
  MOD_RES (17)..(18)..(19)..(20): Xaa is A or G or absent
GEVVMDYHYKLXXXXXXXXXKYLMSIPSLETPVXXAKPIK

SEQ ID NO: 4793 - protein, 32 aa, Artificial Sequence
  Non-cyclic GFR-binding peptide
  MOD_RES (31)..(32): Xaa is C or S
SRVIMQYNKLVKPKRGVLYLISIASLAQPVXX

SEQ ID NO: 4794 - protein, 35 aa, Artificial Sequence
  Non-cyclic GFR-binding peptide
  MOD_RES (34)..(34): Xaa is C or S
  MOD_RES (12)..(13)..(14)..(15)..(16): Xaa is A or G
  MOD_RES (17)..(18)..(19)..(20): Xaa is A or G or absent
SRVVMNYHYKLXXXXXXXXXKYLVSIPSLKTPAXT

SEQ ID NO: 4795 - protein, 41 aa, Artificial Sequence
  Non-cyclic GFR-binding peptide
  MOD_RES (2)..(37)..(38): Xaa is C or S
  MOD_RES (15)..(16)..(17)..(18)..(19): Xaa is A or G
  MOD_RES (20)..(21)..(22)..(23): Xaa is A or G or absent
GXEAVSMGEQYNKLXXXXXXXXXLYLVSIASLKTPVXXAKG

SEQ ID NO: 4796 - protein, 37 aa, Artificial Sequence
  Non-cyclic GFR-binding peptide
  MOD_RES (1)..(3)..(36)..(37): Xaa is C or S
  MOD_RES (14)..(15)..(16)..(17)..(18): Xaa is A or G
  MOD_RES (19)..(20)..(21)..(22): Xaa is A or G or absent
XKXSKVVMRYKKLXXXXXXXXXFYLISIANLDQPVXX

SEQ ID NO: 4797 - protein, 40 aa, Artificial Sequence
  Non-cyclic GFR-binding peptide
  MOD_RES (1)..(3)..(35)..(36): Xaa is C or S
XGXAKVVMNQYNKLIVNNSSDLYLVSIASLKTPAXXAKPV

SEQ ID NO: 4798 - protein, 35 aa, Artificial Sequence
  Non-cyclic GFR-binding peptide
  MOD_RES (2)..(34)..(35): Xaa is C or S
GXAKVVMNRYKKLIVNNSSDFYLVSIANLKTPAXX

SEQ ID NO: 4799 - protein, 40 aa, Artificial Sequence
  Non-cyclic GFR-binding peptide
  MOD_RES (2)..(4)..(35)..(36): Xaa is C or S
SXKXSRVIMQYNKLVKPKRGVLYLISIASLAQPVXXPAAS

SEQ ID NO: 4800 - protein, 37 aa, Artificial Sequence
  Non-cyclic GFR-binding peptide
  MOD_RES (2)..(35)..(36): Xaa is C or S
  MOD_RES (13)..(14)..(15)..(16)..(17): Xaa is A or G
  MOD_RES (18)..(19)..(20)..(21): Xaa is A or G or absent
KXSKVIMYHYKLXXXXXXXXXKYLISIPSLDQSVXXP

SEQ ID NO: 4801 - protein, 40 aa, Artificial Sequence
  Non-cyclic GFR-binding peptide
  MOD_RES (1)..(35)..(36): Xaa is C or S
  MOD_RES (13)..(14)..(15)..(16)..(17): Xaa is A or G
  MOD_RES (18)..(19)..(20)..(21): Xaa is A or G or absent
XARVVMNRHKRLXXXXXXXXXYYLVSTASLQTPAXXPKPV

SEQ ID NO: 4802 - protein, 37 aa, Artificial Sequence
  Non-cyclic GFR-binding peptide
  MOD_RES (31)..(32): Xaa is C or S
SKVIMRYKKLIKPTKGIFYLISIANLDQSVXXPSASA

SEQ ID NO: 4803 - protein, 42 aa, Artificial Sequence
  Non-cyclic GFR-binding peptide
  MOD_RES (2)..(37)..(38): Xaa is C or S
  MOD_RES (15)..(16)..(17)..(18)..(19): Xaa is A or G
  MOD_RES (20)..(21)..(22)..(23): Xaa is A or G or absent
GXEAVSMGERYKKLXXXXXXXXXFYLVSIANLKTPVXXAKGV

SEQ ID NO: 4804 - protein, 41 aa, Artificial Sequence
  Non-cyclic GFR-binding peptide
  MOD_RES (2)..(4)..(35)..(36): Xaa is C or S
SXKXSRVIMQYNKLVKPKRGVLYLISIASLAQPVXXPAASA

SEQ ID NO: 4805 - protein, 38 aa, Artificial Sequence
  Non-cyclic GFR-binding peptide
  MOD_RES (2)..(37)..(38): Xaa is C or S
  MOD_RES (15)..(16)..(17)..(18)..(19): Xaa is A or G
  MOD_RES (20)..(21)..(22)..(23): Xaa is A or G or absent
GXEAVSMGERHKRLXXXXXXXXXYYLVSTASLKTPVXX

SEQ ID NO: 4806 - protein, 35 aa, Artificial Sequence
  Non-cyclic GFR-binding peptide
  MOD_RES (33)..(34): Xaa is C or S
  MOD_RES (11)..(12)..(13)..(14)..(15): Xaa is A or G
  MOD_RES (16)..(17)..(18)..(19): Xaa is A or G or absent
SRVIMQYNKLXXXXXXXXXLYLISIASLAQPVXXP

SEQ ID NO: 4807 - protein, 39 aa, Artificial Sequence
  Non-cyclic GFR-binding peptide
  MOD_RES (2)..(4)..(38)..(39): Xaa is C or S
  MOD_RES (16)..(17)..(18)..(19)..(20): Xaa is A or G
  MOD_RES (21)..(22)..(23)..(24): Xaa is A or G or absent
HXGXARVVMNQYNKLXXXXXXXXXLYLVSIASLQTPAXX

SEQ ID NO: 4808 - protein, 34 aa, Artificial Sequence
  Non-cyclic GFR-binding peptide
  MOD_RES (1)..(1): Xaa is C or S
  MOD_RES (13)..(14)..(15)..(16)..(17): Xaa is A or G
  MOD_RES (18)..(19)..(20)..(21): Xaa is A or G or absent
XARVVMNYHYKLXXXXXXXXXKYLVSIPSLQTPA

SEQ ID NO: 4809 - protein, 35 aa, Artificial Sequence
  Non-cyclic GFR-binding peptide
  MOD_RES (33)..(34): Xaa is C or S
EAVSMGEQYNKLTPVGMDDLYLVSIASLKTPVXXA

SEQ ID NO: 4810 - protein, 36 aa, Artificial Sequence
  Non-cyclic GFR-binding peptide
  MOD_RES (1)..(32)..(33): Xaa is C or S
XSKVVMQYNKLVKPTRGVLYLISIASLDQPVXXPSA

SEQ ID NO: 4811 - protein, 35 aa, Artificial Sequence
  Non-cyclic GFR-binding peptide
  MOD_RES (2)..(34)..(35): Xaa is C or S
GXGEVVMERHKRLVVKDYEDYYLMSTASLETPVXX

SEQ ID NO: 4812 - protein, 35 aa, Artificial Sequence
  Non-cyclic GFR-binding peptide
  MOD_RES (2)..(4)..(35): Xaa is C or S
SXKXSKVVMYHYKLVKPTRGVKYLISIPSLDQPVX

SEQ ID NO: 4813 - protein, 31 aa, Artificial Sequence
  Non-cyclic GFR-binding peptide
  MOD_RES (31)..(31): Xaa is C or S
RVVMNQYNKLIVNSSDDLYLVSIASLQTPAX

SEQ ID NO: 4814 - protein, 40 aa, Artificial Sequence
  Non-cyclic GFR-binding peptide
  MOD_RES (2)..(39): Xaa is C or S
  MOD_RES (15)..(16)..(17)..(18)..(19): Xaa is A or G
  MOD_RES (20)..(21)..(22)..(23): Xaa is A or G or absent
KXALHDELTRHKRLXXXXXXXXXYYLVSTASLQVQTPRXQ

SEQ ID NO: 4815 - protein, 42 aa, Artificial Sequence
  Non-cyclic GFR-binding peptide
  MOD_RES (2)..(4)..(37)..(38): Xaa is C or S
  MOD_RES (15)..(16)..(17)..(18)..(19): Xaa is A or G
  MOD_RES (20)..(21)..(22)..(23): Xaa is A or G or absent
SXKXSRVIMQYNKLXXXXXXXXXLYLISIASLAQPVXXPAAS

SEQ ID NO: 4816 - protein, 34 aa, Artificial Sequence
  Non-cyclic GFR-binding peptide
  MOD_RES (1)..(3)..(34): Xaa is C or S
XKXSRVIMYHYKLVKPKRGVKYLISIPSLAQPVX

SEQ ID NO: 4817 - protein, 41 aa, Artificial Sequence
  Non-cyclic GFR-binding peptide
  MOD_RES (2)..(35)..(36): Xaa is C or S
  MOD_RES (13)..(14)..(15)..(16)..(17): Xaa is A or G
  MOD_RES (18)..(19)..(20)..(21): Xaa is A or G or absent
KXSKVIMQYNKLXXXXXXXXXLYLISIASLDQSVXXPSASA

SEQ ID NO: 4818 - protein, 41 aa, Artificial Sequence
  Non-cyclic GFR-binding peptide
  MOD_RES (2)..(35)..(36): Xaa is C or S
  MOD_RES (13)..(14)..(15)..(16)..(17): Xaa is A or G
  MOD_RES (18)..(19)..(20)..(21): Xaa is A or G or absent
KXSKVIMRYKKLXXXXXXXXXFYLISIANLDQSVXXPSASA

SEQ ID NO: 4819 - protein, 38 aa, Artificial Sequence
  Non-cyclic GFR-binding peptide
  MOD_RES (33)..(34): Xaa is C or S
  MOD_RES (11)..(12)..(13)..(14)..(15): Xaa is A or G
  MOD_RES (16)..(17)..(18)..(19): Xaa is A or G or absent
KVVMNYHYKLXXXXXXXXXKYLVSIPSLKTPAXXAKPV

SEQ ID NO: 4820 - protein, 39 aa, Artificial Sequence
  Non-cyclic GFR-binding peptide
  MOD_RES (1)..(3)..(37)..(38): Xaa is C or S
  MOD_RES (15)..(16)..(17)..(18)..(19): Xaa is A or G
  MOD_RES (20)..(21)..(22)..(23): Xaa is A or G or absent
XGXSRVVMNQYNKLXXXXXXXXXLYLVSIASLKTPAXXP

SEQ ID NO: 4821 - protein, 35 aa, Artificial Sequence
  Non-cyclic GFR-binding peptide
  MOD_RES (2)..(4): Xaa is C or S
HXGXSRVVMNQYNKLIVNSSDDLYLVSIASLKTPA

SEQ ID NO: 4822 - protein, 36 aa, Artificial Sequence
  Non-cyclic GFR-binding peptide
  MOD_RES (2)..(33)..(34): Xaa is C or S
KXSRVIMRHKRLVKPKRGVYYLISTASLAQPVXXPA

SEQ ID NO: 4823 - protein, 35 aa, Artificial Sequence
  Non-cyclic GFR-binding peptide
  MOD_RES (31)..(32): Xaa is C or S
RVVMNRHKRLIVNSSDDYYLVSTASLKTPAXXPKP

SEQ ID NO: 4824 - protein, 39 aa, Artificial Sequence
  Non-cyclic GFR-binding peptide
  MOD_RES (2)..(4)..(37)..(38): Xaa is C or S
RXGXEAVSMGERYKKLTPVGMDDFYLVSIANLKTPVXXA

SEQ ID NO: 4825 - protein, 38 aa, Artificial Sequence
  Non-cyclic GFR-binding peptide
  MOD_RES (1)..(3)..(35)..(36): Xaa is C or S
XGXGEVVMDRYKKLVVKENEDFYLMSIANLETPVXXAK

SEQ ID NO: 4826 - protein, 35 aa, Artificial Sequence
  Non-cyclic GFR-binding peptide
  MOD_RES (1)..(34)..(35): Xaa is C or S
  MOD_RES (12)..(13)..(14)..(15)..(16): Xaa is A or G
  MOD_RES (17)..(18)..(19)..(20): Xaa is A or G or absent
XSRVIMRHKRLXXXXXXXXXYYLISTASLAQPVXX

SEQ ID NO: 4827 - protein, 45 aa, Artificial Sequence
  Non-cyclic GFR-binding peptide
  MOD_RES (2)..(4)..(39)..(40): Xaa is C or S
  MOD_RES (17)..(18)..(19)..(20)..(21): Xaa is A or G
  MOD_RES (22)..(23)..(24)..(25): Xaa is A or G or absent
RXGXEAVSMGERYKKLXXXXXXXXXFYLVSIANLKTPVXXAKGVK

SEQ ID NO: 4828 - protein, 37 aa, Artificial Sequence
  Non-cyclic GFR-binding peptide
  MOD_RES (1)..(34)..(35): Xaa is C or S
XEAVSMGERYKKLTPVGMDDFYLVSIANLKTPVXXAK

SEQ ID NO: 4829 - protein, 36 aa, Artificial Sequence
  Non-cyclic GFR-binding peptide
  MOD_RES (2)..(4)..(36): Xaa is C or S
RXGXGEVVMEYHYKLVVKDYEDKYLMSIPSLETPVX

SEQ ID NO: 4830 - protein, 33 aa, Artificial Sequence
  Non-cyclic GFR-binding peptide
  MOD_RES (33)..(33): Xaa is C or S
  MOD_RES (11)..(12)..(13)..(14)..(15): Xaa is A or G
  MOD_RES (16)..(17)..(18)..(19): Xaa is A or G or absent
EVVMDRYKKLXXXXXXXXXFYLMSIANLETPVX

SEQ ID NO: 4831 - protein, 40 aa, Artificial Sequence
  Non-cyclic GFR-binding peptide
  MOD_RES (1)..(3)..(35)..(36): Xaa is C or S
XGXGEVVMERYKKLVVKDYEDFYLMSIANLETPVXXAKPI

SEQ ID NO: 4832 - protein, 39 aa, Artificial Sequence
  Non-cyclic GFR-binding peptide
  MOD_RES (2)..(33)..(34): Xaa is C or S
KXSKVIMQYNKLIKPTKGILYLISIASLDQSVXXPSASA

SEQ ID NO: 4833 - protein, 40 aa, Artificial Sequence
  Non-cyclic GFR-binding peptide
  MOD_RES (2)..(36)..(37): Xaa is C or S
  MOD_RES (14)..(15)..(16)..(17)..(18): Xaa is A or G
  MOD_RES (19)..(20)..(21)..(22): Xaa is A or G or absent
GXARVVMNQYNKLXXXXXXXXXLYLVSIASLQTPAXXPKP

SEQ ID NO: 4834 - protein, 39 aa, Artificial Sequence
  Non-cyclic GFR-binding peptide
  MOD_RES (1)..(3)..(37)..(38): Xaa is C or S
  MOD_RES (15)..(16)..(17)..(18)..(19): Xaa is A or G
  MOD_RES (20)..(21)..(22)..(23): Xaa is A or G or absent
XGXARVVMNRHKRLXXXXXXXXXYYLVSTASLQTPAXXP

SEQ ID NO: 4835 - protein, 36 aa, Artificial Sequence
  Non-cyclic GFR-binding peptide
  MOD_RES (35)..(35): Xaa is C or S
HDELTQYNKLFIPKKRVIELYLVSIASLQVQTPRXQ

SEQ ID NO: 4836 - protein, 32 aa, Artificial Sequence
  Non-cyclic GFR-binding peptide
  MOD_RES (11)..(12)..(13)..(14)..(15): Xaa is A or G
  MOD_RES (16)..(17)..(18)..(19): Xaa is A or G or absent
SKVVMYHYKLXXXXXXXXXKYLISIPSLDQPV

SEQ ID NO: 4837 - protein, 32 aa, Artificial Sequence
  Non-cyclic GFR-binding peptide
  MOD_RES (2)..(2): Xaa is C or S
KXSKVVMYHYKLVKPTRGVKYLISIPSLDQPV

SEQ ID NO: 4838 - protein, 39 aa, Artificial Sequence
  Non-cyclic GFR-binding peptide
  MOD_RES (1)..(3)..(36)..(37): Xaa is C or S
  MOD_RES (14)..(15)..(16)..(17)..(18): Xaa is A or G
  MOD_RES (19)..(20)..(21)..(22): Xaa is A or G or absent
XKXSRVIMRYKKLXXXXXXXXXFYLISIANLAQPVXXPA

SEQ ID NO: 4839 - protein, 39 aa, Artificial Sequence
  Non-cyclic GFR-binding peptide
  MOD_RES (36)..(36): Xaa is C or S
  MOD_RES (12)..(13)..(14)..(15)..(16): Xaa is A or G
  MOD_RES (17)..(18)..(19)..(20): Xaa is A or G or absent
LHDELTQYNKLXXXXXXXXXLYLVSIASLQVQTPRXQVN

SEQ ID NO: 4840 - protein, 35 aa, Artificial Sequence
  Non-cyclic GFR-binding peptide
  MOD_RES (2)..(4)..(35): Xaa is C or S
SXKXSRVIMQYNKLVKPKRGVLYLISIASLAQPVX

SEQ ID NO: 4841 - protein, 37 aa, Artificial Sequence
  Non-cyclic GFR-binding peptide
  MOD_RES (35)..(36): Xaa is C or S
  MOD_RES (13)..(14)..(15)..(16)..(17): Xaa is A or G
  MOD_RES (18)..(19)..(20)..(21): Xaa is A or G or absent
EAVSMGERYKKLXXXXXXXXXFYLVSIANLKTPVXXA

SEQ ID NO: 4842 - protein, 38 aa, Artificial Sequence
  Non-cyclic GFR-binding peptide
  MOD_RES (32)..(33): Xaa is C or S
GEVVMDRHKRLVVKENEDYYLMSTASLETPVXXAKPIK

SEQ ID NO: 4843 - protein, 36 aa, Artificial Sequence
  Non-cyclic GFR-binding peptide
  MOD_RES (1)..(32)..(33): Xaa is C or S
XSKVIMRHKRLIKPTKGIYYLISTASLDQSVXXPSA

SEQ ID NO: 4844 - protein, 37 aa, Artificial Sequence
  Non-cyclic GFR-binding peptide
  MOD_RES (1)..(35)..(36): Xaa is C or S
  MOD_RES (13)..(14)..(15)..(16)..(17): Xaa is A or G
  MOD_RES (18)..(19)..(20)..(21): Xaa is A or G or absent
XGEVVMERHKRLXXXXXXXXXYYLMSTASLETPVXXA

SEQ ID NO: 4845 - protein, 37 aa, Artificial Sequence
  Non-cyclic GFR-binding peptide
  MOD_RES (35)..(35): Xaa is C or S
  MOD_RES (11)..(12)..(13)..(14)..(15): Xaa is A or G
  MOD_RES (16)..(17)..(18)..(19): Xaa is A or G or absent
HDELTYHYKLXXXXXXXXXKYLVSIPSLQVQTPRXQV

SEQ ID NO: 4846 - protein, 39 aa, Artificial Sequence
  Non-cyclic GFR-binding peptide
  MOD_RES (1)..(3): Xaa is C or S
  MOD_RES (16)..(17)..(18)..(19)..(20): Xaa is A or G
  MOD_RES (21)..(22)..(23)..(24): Xaa is A or G or absent
XKXALHDELTRHKRLXXXXXXXXXYYLVSTASLQVQTPR

SEQ ID NO: 4847 - protein, 43 aa, Artificial Sequence
  Non-cyclic GFR-binding peptide
  MOD_RES (2)..(4)..(41): Xaa is C or S
EXKXALHDELTQYNKLFIPKKRVIELYLVSIASLQVQTPRXQV

SEQ ID NO: 4848 - protein, 40 aa, Artificial Sequence
  Non-cyclic GFR-binding peptide
  MOD_RES (2)..(34)..(35): Xaa is C or S
GXGEVVMDRHKRLVVKENEDYYLMSTASLETPVXXAKPIK

SEQ ID NO: 4849 - protein, 38 aa, Artificial Sequence
  Non-cyclic GFR-binding peptide
  MOD_RES (1)..(35)..(36): Xaa is C or S
  MOD_RES (13)..(14)..(15)..(16)..(17): Xaa is A or G
  MOD_RES (18)..(19)..(20)..(21): Xaa is A or G or absent
XAKVVMNYHYKLXXXXXXXXXKYLVSIPSLKTPAXXAK

SEQ ID NO: 4850 - protein, 41 aa, Artificial Sequence
  Non-cyclic GFR-binding peptide
  MOD_RES (2)..(4)..(36)..(37): Xaa is C or S
RXGXGEVVMERHKRLVVKDYEDYYLMSTASLETPVXXAKPI

SEQ ID NO: 4851 - protein, 36 aa, Artificial Sequence
  Non-cyclic GFR-binding peptide
  MOD_RES (34)..(35): Xaa is C or S
  MOD_RES (12)..(13)..(14)..(15)..(16): Xaa is A or G
  MOD_RES (17)..(18)..(19)..(20): Xaa is A or G or absent
SRVVMNQYNKLXXXXXXXXXLYLVSIASLKTPAXXP

SEQ ID NO: 4852 - protein, 35 aa, Artificial Sequence
  Non-cyclic GFR-binding peptide
  MOD_RES (1)..(33)..(34): Xaa is C or S
XSRVVMNQYNKLIVNSSDDLYLVSIASLKTPAXXP

SEQ ID NO: 4853 - protein, 39 aa, Artificial Sequence
  Non-cyclic GFR-binding peptide
  MOD_RES (2)..(34)..(35): Xaa is C or S
GXSRVVMNYHYKLIVNSSDDKYLVSIPSLKTPAXXPKPV

SEQ ID NO: 4854 - protein, 42 aa, Artificial Sequence
  Non-cyclic GFR-binding peptide
  MOD_RES (1)..(3)..(40): Xaa is C or S
XKXALHDELTQYNKLFIPKKRVIELYLVSIASLQVQTPRXQV

SEQ ID NO: 4855 - protein, 41 aa, Artificial Sequence
  Non-cyclic GFR-binding peptide
  MOD_RES (2)..(39): Xaa is C or S
  MOD_RES (15)..(16)..(17)..(18)..(19): Xaa is A or G
  MOD_RES (20)..(21)..(22)..(23): Xaa is A or G or absent
KXALHDELTRHKRLXXXXXXXXXYYLVSTASLQVQTPRXQV

SEQ ID NO: 4856 - protein, 42 aa, Artificial Sequence
  Non-cyclic GFR-binding peptide
  MOD_RES (2)..(4)..(36)..(37): Xaa is C or S
HXGXARVVMNQYNKLIVNSSDDLYLVSIASLQTPAXXPKPVT

SEQ ID NO: 4857 - protein, 31 aa, Artificial Sequence
  Non-cyclic GFR-binding peptide
  MOD_RES (31)..(31): Xaa is C or S
RVVMNRHKRLIVNSSDDYYLVSTASLKTPAX

SEQ ID NO: 4858 - protein, 35 aa, Artificial Sequence
  Non-cyclic GFR-binding peptide
  MOD_RES (1)..(3)..(35): Xaa is C or S
XGXGEVVMDRYKKLVVKENEDFYLMSIANLETPVX

SEQ ID NO: 4859 - protein, 33 aa, Artificial Sequence
  Non-cyclic GFR-binding peptide
  MOD_RES (31)..(32): Xaa is C or S
EVVMEYHYKLVVKDYEDKYLMSIPSLETPVXXA

SEQ ID NO: 4860 - protein, 40 aa, Artificial Sequence
  Non-cyclic GFR-binding peptide
  MOD_RES (2)..(4)..(37)..(38): Xaa is C or S
  MOD_RES (15)..(16)..(17)..(18)..(19): Xaa is A or G
  MOD_RES (20)..(21)..(22)..(23): Xaa is A or G or absent
SXKXSRVIMRYKKLXXXXXXXXXFYLISIANLAQPVXXPA

SEQ ID NO: 4861 - protein, 39 aa, Artificial Sequence
  Non-cyclic GFR-binding peptide
  MOD_RES (2)..(33)..(34): Xaa is C or S
KXSKVVMQYNKLVKPTRGVLYLISIASLDQPVXXPSASA

SEQ ID NO: 4862 - protein, 36 aa, Artificial Sequence
  Non-cyclic GFR-binding peptide
  MOD_RES (1)..(3)..(35): Xaa is C or S
XGXSRVVMNRHKRLIVNSSDDYYLVSTASLKTPAXT

SEQ ID NO: 4863 - protein, 32 aa, Artificial Sequence
  Non-cyclic GFR-binding peptide
  MOD_RES (31)..(32): Xaa is C or S
SRVIMYHYKLVKPKRGVKYLISIPSLAQPVXX

SEQ ID NO: 4864 - protein, 35 aa, Artificial Sequence
  Non-cyclic GFR-binding peptide
  MOD_RES (34)..(35): Xaa is C or S
  MOD_RES (12)..(13)..(14)..(15)..(16): Xaa is A or G
  MOD_RES (17)..(18)..(19)..(20): Xaa is A or G or absent
GEVVMEYHYKLXXXXXXXXXKYLMSIPSLETPVXX

SEQ ID NO: 4865 - protein, 34 aa, Artificial Sequence
  Non-cyclic GFR-binding peptide
  MOD_RES (1)..(3): Xaa is C or S
XGXARVVMNQYNKLIVNSSDDLYLVSIASLQTPA

SEQ ID NO: 4866 - protein, 37 aa, Artificial Sequence
  Non-cyclic GFR-binding peptide
  MOD_RES (32)..(33): Xaa is C or S
ARVVMNYHYKLIVNSSDDKYLVSIPSLQTPAXXPKPV

SEQ ID NO: 4867 - protein, 40 aa, Artificial Sequence
  Non-cyclic GFR-binding peptide
  MOD_RES (1)..(3)..(37)..(38): Xaa is C or S
  MOD_RES (15)..(16)..(17)..(18)..(19): Xaa is A or G
  MOD_RES (20)..(21)..(22)..(23): Xaa is A or G or absent
XGXSRVVMNYHYKLXXXXXXXXXKYLVSIPSLKTPAXXPK

SEQ ID NO: 4868 - protein, 36 aa, Artificial Sequence
  Non-cyclic GFR-binding peptide
  MOD_RES (2)..(2): Xaa is C or S
  MOD_RES (15)..(16)..(17)..(18)..(19): Xaa is A or G
  MOD_RES (20)..(21)..(22)..(23): Xaa is A or G or absent
KXALHDELTRHKRLXXXXXXXXXYYLVSTASLQVQT

SEQ ID NO: 4869 - protein, 35 aa, Artificial Sequence
  Non-cyclic GFR-binding peptide
  MOD_RES (2)..(4): Xaa is C or S
RXGXGEVVMDRYKKLVVKENEDFYLMSIANLETPV

SEQ ID NO: 4870 - protein, 39 aa, Artificial Sequence
  Non-cyclic GFR-binding peptide
  MOD_RES (2)..(4)..(37)..(38): Xaa is C or S
  MOD_RES (15)..(16)..(17)..(18)..(19): Xaa is A or G
  MOD_RES (20)..(21)..(22)..(23): Xaa is A or G or absent
SXKXSKVVMYHYKLXXXXXXXXXKYLISIPSLDQPVXXP

SEQ ID NO: 4871 - protein, 38 aa, Artificial Sequence
  Non-cyclic GFR-binding peptide
  MOD_RES (2)..(4)..(35)..(36): Xaa is C or S
SXKXSKVIMRHKRLIKPTKGIYYLISTASLDQSVXXPS

SEQ ID NO: 4872 - protein, 36 aa, Artificial Sequence
  Non-cyclic GFR-binding peptide
  MOD_RES (31)..(32): Xaa is C or S
SRVIMRYKKLVKPKRGVFYLISIANLAQPVXXPAAS

SEQ ID NO: 4873 - protein, 41 aa, Artificial Sequence
  Non-cyclic GFR-binding peptide
  MOD_RES (2)..(4)..(37)..(38): Xaa is C or S
  MOD_RES (15)..(16)..(17)..(18)..(19): Xaa is A or G
  MOD_RES (20)..(21)..(22)..(23): Xaa is A or G or absent
SXKXSRVIMRYKKLXXXXXXXXXFYLISIANLAQPVXXPAA

SEQ ID NO: 4874 - protein, 38 aa, Artificial Sequence
  Non-cyclic GFR-binding peptide
  MOD_RES (2)..(34)..(35): Xaa is C or S
GXARVVMNRHKRLIVNSSDDYYLVSTASLQTPAXXPKP

SEQ ID NO: 4875 - protein, 33 aa, Artificial Sequence
  Non-cyclic GFR-binding peptide
  MOD_RES (32)..(33): Xaa is C or S
ARVVMNYHYKLIVNSSDDKYLVSIPSLQTPAXX

SEQ ID NO: 4876 - protein, 31 aa, Artificial Sequence
  Non-cyclic GFR-binding peptide
  MOD_RES (31)..(31): Xaa is C or S
RVVMNYHYKLIVNSSDDKYLVSIPSLQTPAX

SEQ ID NO: 4877 - protein, 44 aa, Artificial Sequence
  Non-cyclic GFR-binding peptide
  MOD_RES (2)..(4)..(39)..(40): Xaa is C or S
  MOD_RES (17)..(18)..(19)..(20)..(21): Xaa is A or G
  MOD_RES (22)..(23)..(24)..(25): Xaa is A or G or absent
RXGXEAVSMGERYKKLXXXXXXXXXFYLVSIANLKTPVXXAKGV

SEQ ID NO: 4878 - protein, 39 aa, Artificial Sequence
  Non-cyclic GFR-binding peptide
  MOD_RES (2)..(4)..(36)..(37): Xaa is C or S
HXGXAKVVMNRYKKLIVNNSSDFYLVSIANLKTPAXXAK

SEQ ID NO: 4879 - protein, 44 aa, Artificial Sequence
  Non-cyclic GFR-binding peptide
  MOD_RES (2)..(4)..(38)..(39): Xaa is C or S
  MOD_RES (16)..(17)..(18)..(19)..(20): Xaa is A or G
  MOD_RES (21)..(22)..(23)..(24): Xaa is A or G or absent
HXGXAKVVMNYHYKLXXXXXXXXXKYLVSIPSLKTPAXXAKPVA

SEQ ID NO: 4880 - protein, 42 aa, Artificial Sequence
  Non-cyclic GFR-binding peptide
  MOD_RES (2)..(36)..(37): Xaa is C or S
  MOD_RES (14)..(15)..(16)..(17)..(18): Xaa is A or G
  MOD_RES (19)..(20)..(21)..(22): Xaa is A or G or absent
GXSRVVMNQYNKLXXXXXXXXXLYLVSIASLKTPAXXPKPVY

SEQ ID NO: 4881 - protein, 38 aa, Artificial Sequence
  Non-cyclic GFR-binding peptide
  MOD_RES (1)..(33)..(34): Xaa is C or S
XGEVVMDRYKKLVVKENEDFYLMSIANLETPVXXAKPI

SEQ ID NO: 4882 - protein, 32 aa, Artificial Sequence
  Non-cyclic GFR-binding peptide
  MOD_RES (2)..(2): Xaa is C or S
KXSKVVMRYKKLVKPTRGVFYLISIANLDQPV

SEQ ID NO: 4883 - protein, 42 aa, Artificial Sequence
  Non-cyclic GFR-binding peptide
  MOD_RES (2)..(39): Xaa is C or S
  MOD_RES (15)..(16)..(17)..(18)..(19): Xaa is A or G
  MOD_RES (20)..(21)..(22)..(23): Xaa is A or G or absent
KXALHDELTYHYKLXXXXXXXXXKYLVSIPSLQVQTPRXQVN

SEQ ID NO: 4884 - protein, 38 aa, Artificial Sequence
  Non-cyclic GFR-binding peptide
  MOD_RES (2)..(33)..(34): Xaa is C or S
KXSKVIMYHYKLIKPTKGIKYLISIPSLDQSVXXPSAS

SEQ ID NO: 4885 - protein, 42 aa, Artificial Sequence
  Non-cyclic GFR-binding peptide
  MOD_RES (2)..(4)..(38)..(39): Xaa is C or S
  MOD_RES (16)..(17)..(18)..(19)..(20): Xaa is A or G
  MOD_RES (21)..(22)..(23)..(24): Xaa is A or G or absent
RXGXGEVVMDYHYKLXXXXXXXXXKYLMSIPSLETPVXXAKP

SEQ ID NO: 4886 - protein, 40 aa, Artificial Sequence
  Non-cyclic GFR-binding peptide
  MOD_RES (1)..(35): Xaa is C or S
  MOD_RES (13)..(14)..(15)..(16)..(17): Xaa is A or G
  MOD_RES (18)..(19)..(20)..(21): Xaa is A or G or absent
XSRVVMNRHKRLXXXXXXXXXYYLVSTASLKTPAXTPKTV

SEQ ID NO: 4887 - protein, 39 aa, Artificial Sequence
  Non-cyclic GFR-binding peptide
  MOD_RES (2)..(4): Xaa is C or S
EXKXALHDELTYHYKLFIPKKRVIEKYLVSIPSLQVQTP

SEQ ID NO: 4888 - protein, 35 aa, Artificial Sequence
  Non-cyclic GFR-binding peptide
  MOD_RES (33)..(33): Xaa is C or S
  MOD_RES (11)..(12)..(13)..(14)..(15): Xaa is A or G
  MOD_RES (16)..(17)..(18)..(19): Xaa is A or G or absent
RVVMNQYNKLXXXXXXXXXLYLVSIASLKTPAXTP

SEQ ID NO: 4889 - protein, 35 aa, Artificial Sequence
  Non-cyclic GFR-binding peptide
  MOD_RES (1)..(1): Xaa is C or S
XALHDELTRHKRLFIPKKRVIEYYLVSTASLQVQT

SEQ ID NO: 4890 - protein, 39 aa, Artificial Sequence
  Non-cyclic GFR-binding peptide
  MOD_RES (2)..(4)..(39): Xaa is C or S
  MOD_RES (17)..(18)..(19)..(20)..(21): Xaa is A or G
  MOD_RES (22)..(23)..(24)..(25): Xaa is A or G or absent
RXGXEAVSMGERYKKLXXXXXXXXXFYLVSIANLKTPVX

SEQ ID NO: 4891 - protein, 33 aa, Artificial Sequence
  Non-cyclic GFR-binding peptide
  MOD_RES (1)..(33): Xaa is C or S
XAKVVMNYHYKLIVNNSSDKYLVSIPSLKTPAX

SEQ ID NO: 4892 - protein, 30 aa, Artificial Sequence
  Non-cyclic GFR-binding peptide
EVVMDRHKRLVVKENEDYYLMSTASLETPV

SEQ ID NO: 4893 - protein, 38 aa, Artificial Sequence
  Non-cyclic GFR-binding peptide
  MOD_RES (1)..(3): Xaa is C or S
XKXALHDELTYHYKLFIPKKRVIEKYLVSIPSLQVQTP

SEQ ID NO: 4894 - protein, 35 aa, Artificial Sequence
  Non-cyclic GFR-binding peptide
  MOD_RES (2)..(35): Xaa is C or S
  MOD_RES (13)..(14)..(15)..(16)..(17): Xaa is A or G
  MOD_RES (18)..(19)..(20)..(21): Xaa is A or G or absent
KXSRVIMQYNKLXXXXXXXXXLYLISIASLAQPVX

SEQ ID NO: 4895 - protein, 39 aa, Artificial Sequence
  Non-cyclic GFR-binding peptide
  MOD_RES (1)..(35)..(36): Xaa is C or S
  MOD_RES (13)..(14)..(15)..(16)..(17): Xaa is A or G
  MOD_RES (18)..(19)..(20)..(21): Xaa is A or G or absent
XARVVMNRHKRLXXXXXXXXXYYLVSTASLQTPAXXPKP

SEQ ID NO: 4896 - protein, 33 aa, Artificial Sequence
  Non-cyclic GFR-binding peptide
  MOD_RES (1)..(33): Xaa is C or S
XGEVVMERYKKLVVKDYEDFYLMSIANLETPVX

SEQ ID NO: 4897 - protein, 41 aa, Artificial Sequence
  Non-cyclic GFR-binding peptide
  MOD_RES (1)..(3)..(37)..(38): Xaa is C or S
  MOD_RES (15)..(16)..(17)..(18)..(19): Xaa is A or G
  MOD_RES (20)..(21)..(22)..(23): Xaa is A or G or absent
XGXAKVVMNYHYKLXXXXXXXXXKYLVSIPSLKTPAXXAKP

SEQ ID NO: 4898 - protein, 40 aa, Artificial Sequence
  Non-cyclic GFR-binding peptide
  MOD_RES (1)..(3)..(34)..(35): Xaa is C or S
XKXSRVIMRHKRLVKPKRGVYYLISTASLAQPVXXPAASA

SEQ ID NO: 4899 - protein, 39 aa, Artificial Sequence
  Non-cyclic GFR-binding peptide
  MOD_RES (1)..(33): Xaa is C or S
XSRVVMNRHKRLIVNSSDDYYLVSTASLKTPAXTPKTVH

SEQ ID NO: 4900 - protein, 39 aa, Artificial Sequence
  Non-cyclic GFR-binding peptide
  MOD_RES (2)..(4): Xaa is C or S
EXKXALHDELTQYNKLFIPKKRVIELYLVSIASLQVQTP

SEQ ID NO: 4901 - protein, 40 aa, Artificial Sequence
  Non-cyclic GFR-binding peptide
  MOD_RES (2)..(4): Xaa is C or S
EXKXALHDELTRHKRLFIPKKRVIEYYLVSTASLQVQTPR

SEQ ID NO: 4902 - protein, 38 aa, Artificial Sequence
  Non-cyclic GFR-binding peptide
  MOD_RES (1)..(3)..(35)..(36): Xaa is C or S
XGXGEVVMERYKKLVVKDYEDFYLMSIANLETPVXXAK

SEQ ID NO: 4903 - protein, 42 aa, Artificial Sequence
  Non-cyclic GFR-binding peptide
  MOD_RES (1)..(3)..(37)..(38): Xaa is C or S
  MOD_RES (15)..(16)..(17)..(18)..(19): Xaa is A or G
  MOD_RES (20)..(21)..(22)..(23): Xaa is A or G or absent
XGXSRVVMNQYNKLXXXXXXXXXLYLVSIASLKTPAXXPKPV

SEQ ID NO: 4904 - protein, 40 aa, Artificial Sequence
  Non-cyclic GFR-binding peptide
  MOD_RES (2)..(39): Xaa is C or S
  MOD_RES (15)..(16)..(17)..(18)..(19): Xaa is A or G
  MOD_RES (20)..(21)..(22)..(23): Xaa is A or G or absent
KXALHDELTQYNKLXXXXXXXXXLYLVSIASLQVQTPRXQ

SEQ ID NO: 4905 - protein, 39 aa, Artificial Sequence
  Non-cyclic GFR-binding peptide
  MOD_RES (2)..(4)..(36): Xaa is C or S
HXGXSRVVMNYHYKLIVNSSDDKYLVSIPSLKTPAXTPK

SEQ ID NO: 4906 - protein, 32 aa, Artificial Sequence
  Non-cyclic GFR-binding peptide
  MOD_RES (31)..(32): Xaa is C or S
RVVMNYHYKLIVNSSDDKYLVSIPSLKTPAXX

SEQ ID NO: 4907 - protein, 33 aa, Artificial Sequence
  Non-cyclic GFR-binding peptide
  MOD_RES (32)..(33): Xaa is C or S
AKVVMNRYKKLIVNNSSDFYLVSIANLKTPAXX

SEQ ID NO: 4908 - protein, 32 aa, Artificial Sequence
  Non-cyclic GFR-binding peptide
  MOD_RES (31)..(32): Xaa is C or S
SKVVMRYKKLVKPTRGVFYLISIANLDQPVXX

SEQ ID NO: 4909 - protein, 39 aa, Artificial Sequence
  Non-cyclic GFR-binding peptide
  MOD_RES (1)..(3)..(35)..(36): Xaa is C or S
XGXGEVVMEYHYKLVVKDYEDKYLMSIPSLETPVXXAKP

SEQ ID NO: 4910 - protein, 34 aa, Artificial Sequence
  Non-cyclic GFR-binding peptide
  MOD_RES (1)..(3)..(34): Xaa is C or S
XKXSKVIMQYNKLIKPTKGILYLISIASLDQSVX

SEQ ID NO: 4911 - protein, 33 aa, Artificial Sequence
  Non-cyclic GFR-binding peptide
  MOD_RES (31)..(32): Xaa is C or S
SKVIMYHYKLIKPTKGIKYLISIPSLDQSVXXP

SEQ ID NO: 4912 - protein, 39 aa, Artificial Sequence
  Non-cyclic GFR-binding peptide
  MOD_RES (33)..(33): Xaa is C or S
  MOD_RES (11)..(12)..(13)..(14)..(15): Xaa is A or G
  MOD_RES (16)..(17)..(18)..(19): Xaa is A or G or absent
RVVMNQYNKLXXXXXXXXXLYLVSIASLKTPAXTPKTVH

SEQ ID NO: 4913 - protein, 45 aa, Artificial Sequence
  Non-cyclic GFR-binding peptide
  MOD_RES (2)..(4)..(39)..(40): Xaa is C or S
  MOD_RES (17)..(18)..(19)..(20)..(21): Xaa is A or G
  MOD_RES (22)..(23)..(24)..(25): Xaa is A or G or absent
RXGXEAVSMGEQYNKLXXXXXXXXXLYLVSIASLKTPVXXAKGVK

SEQ ID NO: 4914 - protein, 37 aa, Artificial Sequence
  Non-cyclic GFR-binding peptide
  MOD_RES (31)..(32): Xaa is C or S
SKVVMQYNKLVKPTRGVLYLISIASLDQPVXXPSASA

SEQ ID NO: 4915 - protein, 40 aa, Artificial Sequence
  Non-cyclic GFR-binding peptide
  MOD_RES (1)..(35)..(36): Xaa is C or S
  MOD_RES (13)..(14)..(15)..(16)..(17): Xaa is A or G
  MOD_RES (18)..(19)..(20)..(21): Xaa is A or G or absent
XGEVVMDRYKKLXXXXXXXXXFYLMSIANLETPVXXAKPI

SEQ ID NO: 4916 - protein, 41 aa, Artificial Sequence
  Non-cyclic GFR-binding peptide
  MOD_RES (2)..(4)..(38)..(39): Xaa is C or S
  MOD_RES (16)..(17)..(18)..(19)..(20): Xaa is A or G
  MOD_RES (21)..(22)..(23)..(24): Xaa is A or G or absent
RXGXGEVVMERHKRLXXXXXXXXXYYLMSTASLETPVXXAK

SEQ ID NO: 4917 - protein, 34 aa, Artificial Sequence
  Non-cyclic GFR-binding peptide
  MOD_RES (33)..(34): Xaa is C or S
  MOD_RES (11)..(12)..(13)..(14)..(15): Xaa is A or G
  MOD_RES (16)..(17)..(18)..(19): Xaa is A or G or absent
SKVIMRHKRLXXXXXXXXXYYLISTASLDQSVXX

SEQ ID NO: 4918 - protein, 36 aa, Artificial Sequence
  Non-cyclic GFR-binding peptide
  MOD_RES (33)..(34): Xaa is C or S
  MOD_RES (11)..(12)..(13)..(14)..(15): Xaa is A or G
  MOD_RES (16)..(17)..(18)..(19): Xaa is A or G or absent
EVVMDYHYKLXXXXXXXXXKYLMSIPSLETPVXXAK

SEQ ID NO: 4919 - protein, 35 aa, Artificial Sequence
  Non-cyclic GFR-binding peptide
  MOD_RES (32)..(33): Xaa is C or S
GEVVMDYHYKLVVKENEDKYLMSIPSLETPVXXAK

SEQ ID NO: 4920 - protein, 35 aa, Artificial Sequence
  Non-cyclic GFR-binding peptide
  MOD_RES (31)..(32): Xaa is C or S
RVVMNYHYKLIVNSSDDKYLVSIPSLQTPAXXPKP

SEQ ID NO: 4921 - protein, 37 aa, Artificial Sequence
  Non-cyclic GFR-binding peptide
  MOD_RES (1)..(3)..(35)..(36): Xaa is C or S
XGXARVVMNRHKRLIVNSSDDYYLVSTASLQTPAXXP

SEQ ID NO: 4922 - protein, 41 aa, Artificial Sequence
  Non-cyclic GFR-binding peptide
  MOD_RES (1)..(35)..(36): Xaa is C or S
  MOD_RES (13)..(14)..(15)..(16)..(17): Xaa is A or G
  MOD_RES (18)..(19)..(20)..(21): Xaa is A or G or absent
XAKVVMNRYKKLXXXXXXXXXFYLVSIANLKTPAXXAKPVA

SEQ ID NO: 4923 - protein, 37 aa, Artificial Sequence
  Non-cyclic GFR-binding peptide
  MOD_RES (1)..(35): Xaa is C or S
  MOD_RES (13)..(14)..(15)..(16)..(17): Xaa is A or G
  MOD_RES (18)..(19)..(20)..(21): Xaa is A or G or absent
XSRVVMNRHKRLXXXXXXXXXYYLVSTASLKTPAXTP

SEQ ID NO: 4924 - protein, 34 aa, Artificial Sequence
  Non-cyclic GFR-binding peptide
  MOD_RES (33)..(34): Xaa is C or S
  MOD_RES (11)..(12)..(13)..(14)..(15): Xaa is A or G
  MOD_RES (16)..(17)..(18)..(19): Xaa is A or G or absent
RVVMNRHKRLXXXXXXXXXYYLVSTASLKTPAXX

SEQ ID NO: 4925 - protein, 33 aa, Artificial Sequence
  Non-cyclic GFR-binding peptide
  MOD_RES (31)..(32): Xaa is C or S
SKVIMQYNKLIKPTKGILYLISIASLDQSVXXP

SEQ ID NO: 4926 - protein, 35 aa, Artificial Sequence
  Non-cyclic GFR-binding peptide
  MOD_RES (33)..(34): Xaa is C or S
EAVSMGERYKKLTPVGMDDFYLVSIANLKTPVXXA

SEQ ID NO: 4927 - protein, 33 aa, Artificial Sequence
  Non-cyclic GFR-binding peptide
  MOD_RES (1)..(33): Xaa is C or S
XAKVVMNRYKKLIVNNSSDFYLVSIANLKTPAX

SEQ ID NO: 4928 - protein, 40 aa, Artificial Sequence
  Non-cyclic GFR-binding peptide
  MOD_RES (34)..(35): Xaa is C or S
  MOD_RES (12)..(13)..(14)..(15)..(16): Xaa is A or G
  MOD_RES (17)..(18)..(19)..(20): Xaa is A or G or absent
AKVVMNRYKKLXXXXXXXXXFYLVSIANLKTPAXXAKPVA

SEQ ID NO: 4929 - protein, 36 aa, Artificial Sequence
  Non-cyclic GFR-binding peptide
  MOD_RES (1)..(3)..(35): Xaa is C or S
XGXSRVVMNQYNKLIVNSSDDLYLVSIASLKTPAXT

SEQ ID NO: 4930 - protein, 36 aa, Artificial Sequence
  Non-cyclic GFR-binding peptide
  MOD_RES (1)..(3): Xaa is C or S
  MOD_RES (15)..(16)..(17)..(18)..(19): Xaa is A or G
  MOD_RES (20)..(21)..(22)..(23): Xaa is A or G or absent
XGXAKVVMNYHYKLXXXXXXXXXKYLVSIPSLKTPA

SEQ ID NO: 4931 - protein, 36 aa, Artificial Sequence
  Non-cyclic GFR-binding peptide
  MOD_RES (1)..(3)..(36): Xaa is C or S
  MOD_RES (14)..(15)..(16)..(17)..(18): Xaa is A or G
  MOD_RES (19)..(20)..(21)..(22): Xaa is A or G or absent
XKXSKVVMRYKKLXXXXXXXXXFYLISIANLDQPVX

SEQ ID NO: 4932 - protein, 37 aa, Artificial Sequence
  Non-cyclic GFR-binding peptide
  MOD_RES (1)..(3): Xaa is C or S
  MOD_RES (16)..(17)..(18)..(19)..(20): Xaa is A or G
  MOD_RES (21)..(22)..(23)..(24): Xaa is A or G or absent
XKXALHDELTRYKKLXXXXXXXXXFYLVSIANLQVQT

SEQ ID NO: 4933 - protein, 36 aa, Artificial Sequence
  Non-cyclic GFR-binding peptide
  MOD_RES (2)..(4): Xaa is C or S
  MOD_RES (15)..(16)..(17)..(18)..(19): Xaa is A or G
  MOD_RES (20)..(21)..(22)..(23): Xaa is A or G or absent
SXKXSKVIMRYKKLXXXXXXXXXFYLISIANLDQSV

SEQ ID NO: 4934 - protein, 39 aa, Artificial Sequence
  Non-cyclic GFR-binding peptide
  MOD_RES (1)..(3)..(36)..(37): Xaa is C or S
  MOD_RES (14)..(15)..(16)..(17)..(18): Xaa is A or G
  MOD_RES (19)..(20)..(21)..(22): Xaa is A or G or absent
XKXSKVVMRYKKLXXXXXXXXXFYLISIANLDQPVXXPS

SEQ ID NO: 4935 - protein, 39 aa, Artificial Sequence
  Non-cyclic GFR-binding peptide
  MOD_RES (1)..(3)..(37): Xaa is C or S
  MOD_RES (15)..(16)..(17)..(18)..(19): Xaa is A or G
  MOD_RES (20)..(21)..(22)..(23): Xaa is A or G or absent
XGXSRVVMNQYNKLXXXXXXXXXLYLVSIASLKTPAXTP

SEQ ID NO: 4936 - protein, 41 aa, Artificial Sequence
  Non-cyclic GFR-binding peptide
  MOD_RES (2)..(4)..(36): Xaa is C or S
HXGXSRVVMNQYNKLIVNSSDDLYLVSIASLKTPAXTPKTV

SEQ ID NO: 4937 - protein, 39 aa, Artificial Sequence
  Non-cyclic GFR-binding peptide
  MOD_RES (2)..(34)..(35): Xaa is C or S
GXSRVVMNQYNKLIVNSSDDLYLVSIASLKTPAXXPKPV

SEQ ID NO: 4938 - protein, 34 aa, Artificial Sequence
  Non-cyclic GFR-binding peptide
  MOD_RES (1)..(1): Xaa is C or S
  MOD_RES (13)..(14)..(15)..(16)..(17): Xaa is A or G
  MOD_RES (18)..(19)..(20)..(21): Xaa is A or G or absent
XGEVVMDYHYKLXXXXXXXXXKYLMSIPSLETPV

SEQ ID NO: 4939 - protein, 32 aa, Artificial Sequence
  Non-cyclic GFR-binding peptide
  MOD_RES (11)..(12)..(13)..(14)..(15): Xaa is A or G
  MOD_RES (16)..(17)..(18)..(19): Xaa is A or G or absent
SKVVMRHKRLXXXXXXXXXYYLISTASLDQPV

SEQ ID NO: 4940 - protein, 37 aa, Artificial Sequence
  Non-cyclic GFR-binding peptide
  MOD_RES (2)..(4): Xaa is C or S
  MOD_RES (16)..(17)..(18)..(19)..(20): Xaa is A or G
  MOD_RES (21)..(22)..(23)..(24): Xaa is A or G or absent
HXGXAKVVMNQYNKLXXXXXXXXXLYLVSIASLKTPA

SEQ ID NO: 4941 - protein, 35 aa, Artificial Sequence
  Non-cyclic GFR-binding peptide
  MOD_RES (2)..(35): Xaa is C or S
  MOD_RES (13)..(14)..(15)..(16)..(17): Xaa is A or G
  MOD_RES (18)..(19)..(20)..(21): Xaa is A or G or absent
KXSKVVMYHYKLXXXXXXXXXKYLISIPSLDQPVX

SEQ ID NO: 4942 - protein, 40 aa, Artificial Sequence
  Non-cyclic GFR-binding peptide
  MOD_RES (1)..(3)..(35)..(36): Xaa is C or S
XGXSRVVMNRHKRLIVNSSDDYYLVSTASLKTPAXXPKPV

SEQ ID NO: 4943 - protein, 40 aa, Artificial Sequence
  Non-cyclic GFR-binding peptide
  MOD_RES (2)..(4)..(35)..(36): Xaa is C or S
SXKXSKVIMQYNKLIKPTKGILYLISIASLDQSVXXPSAS

SEQ ID NO: 4944 - protein, 38 aa, Artificial Sequence
  Non-cyclic GFR-binding peptide
  MOD_RES (2)..(4): Xaa is C or S
  MOD_RES (17)..(18)..(19)..(20)..(21): Xaa is A or G
  MOD_RES (22)..(23)..(24)..(25): Xaa is A or G or absent
EXKXALHDELTYHYKLXXXXXXXXXKYLVSIPSLQVQT

SEQ ID NO: 4945 - protein, 43 aa, Artificial Sequence
  Non-cyclic GFR-binding peptide
  MOD_RES (2)..(4)..(38)..(39): Xaa is C or S
  MOD_RES (16)..(17)..(18)..(19)..(20): Xaa is A or G
  MOD_RES (21)..(22)..(23)..(24): Xaa is A or G or absent
RXGXGEVVMDRYKKLXXXXXXXXXFYLMSIANLETPVXXAKPI

SEQ ID NO: 4946 - protein, 40 aa, Artificial Sequence
  Non-cyclic GFR-binding peptide
  MOD_RES (34)..(35): Xaa is C or S
  MOD_RES (12)..(13)..(14)..(15)..(16): Xaa is A or G
  MOD_RES (17)..(18)..(19)..(20): Xaa is A or G or absent
ARVVMNQYNKLXXXXXXXXXLYLVSIASLQTPAXXPKPVT

SEQ ID NO: 4947 - protein, 35 aa, Artificial Sequence
  Non-cyclic GFR-binding peptide
  MOD_RES (31)..(32): Xaa is C or S
RVVMNQYNKLIVNSSDDLYLVSIASLQTPAXXPKP

SEQ ID NO: 4948 - protein, 42 aa, Artificial Sequence
  Non-cyclic GFR-binding peptide
  MOD_RES (2)..(36)..(37): Xaa is C or S
  MOD_RES (14)..(15)..(16)..(17)..(18): Xaa is A or G
  MOD_RES (19)..(20)..(21)..(22): Xaa is A or G or absent
GXGEVVMERYKKLXXXXXXXXXFYLMSIANLETPVXXAKPIS

SEQ ID NO: 4949 - protein, 43 aa, Artificial Sequence
  Non-cyclic GFR-binding peptide
  MOD_RES (1)..(3)..(37): Xaa is C or S
  MOD_RES (15)..(16)..(17)..(18)..(19): Xaa is A or G
  MOD_RES (20)..(21)..(22)..(23): Xaa is A or G or absent
XGXSRVVMNRHKRLXXXXXXXXXYYLVSTASLKTPAXTPKTVH

SEQ ID NO: 4950 - protein, 36 aa, Artificial Sequence
  Non-cyclic GFR-binding peptide
  MOD_RES (31)..(32): Xaa is C or S
SRVIMRHKRLVKPKRGVYYLISTASLAQPVXXPAAS

SEQ ID NO: 4951 - protein, 41 aa, Artificial Sequence
  Non-cyclic GFR-binding peptide
  MOD_RES (2)..(37)..(38): Xaa is C or S
  MOD_RES (15)..(16)..(17)..(18)..(19): Xaa is A or G
  MOD_RES (20)..(21)..(22)..(23): Xaa is A or G or absent
GXEAVSMGERHKRLXXXXXXXXXYYLVSTASLKTPVXXAKG

SEQ ID NO: 4952 - protein, 40 aa, Artificial Sequence
  Non-cyclic GFR-binding peptide
  MOD_RES (1)..(35)..(36): Xaa is C or S
  MOD_RES (13)..(14)..(15)..(16)..(17): Xaa is A or G
  MOD_RES (18)..(19)..(20)..(21): Xaa is A or G or absent
XGEVVMEYHYKLXXXXXXXXXKYLMSIPSLETPVXXAKPI

SEQ ID NO: 4953 - protein, 32 aa, Artificial Sequence
  Non-cyclic GFR-binding peptide
  MOD_RES (11)..(12)..(13)..(14)..(15): Xaa is A or G
  MOD_RES (16)..(17)..(18)..(19): Xaa is A or G or absent
HDELTQYNKLXXXXXXXXXLYLVSIASLQVQT

SEQ ID NO: 4954 - protein, 40 aa, Artificial Sequence
  Non-cyclic GFR-binding peptide
  MOD_RES (1)..(3)..(40): Xaa is C or S
XKXALHDELTYHYKLFIPKKRVIEKYLVSIPSLQVQTPRX

SEQ ID NO: 4955 - protein, 37 aa, Artificial Sequence
  Non-cyclic GFR-binding peptide
  MOD_RES (2)..(4)..(35)..(36): Xaa is C or S
SXKXSRVIMYHYKLVKPKRGVKYLISIPSLAQPVXXP

SEQ ID NO: 4956 - protein, 43 aa, Artificial Sequence
  Non-cyclic GFR-binding peptide
  MOD_RES (2)..(4)..(38)..(39): Xaa is C or S
  MOD_RES (16)..(17)..(18)..(19)..(20): Xaa is A or G
  MOD_RES (21)..(22)..(23)..(24): Xaa is A or G or absent
HXGXARVVMNRHKRLXXXXXXXXXYYLVSTASLQTPAXXPKPV

SEQ ID NO: 4957 - protein, 41 aa, Artificial Sequence
  Non-cyclic GFR-binding peptide
  MOD_RES (2)..(4)..(38)..(39): Xaa is C or S
  MOD_RES (16)..(17)..(18)..(19)..(20): Xaa is A or G
  MOD_RES (21)..(22)..(23)..(24): Xaa is A or G or absent
HXGXARVVMNRHKRLXXXXXXXXXYYLVSTASLQTPAXXPK

SEQ ID NO: 4958 - protein, 39 aa, Artificial Sequence
  Non-cyclic GFR-binding peptide
  MOD_RES (2)..(4)..(38)..(39): Xaa is C or S
  MOD_RES (16)..(17)..(18)..(19)..(20): Xaa is A or G
  MOD_RES (21)..(22)..(23)..(24): Xaa is A or G or absent
RXGXGEVVMERHKRLXXXXXXXXXYYLMSTASLETPVXX

SEQ ID NO: 4959 - protein, 41 aa, Artificial Sequence
  Non-cyclic GFR-binding peptide
  MOD_RES (2)..(36)..(37): Xaa is C or S
  MOD_RES (14)..(15)..(16)..(17)..(18): Xaa is A or G
  MOD_RES (19)..(20)..(21)..(22): Xaa is A or G or absent
GXGEVVMERHKRLXXXXXXXXXYYLMSTASLETPVXXAKPI

SEQ ID NO: 4960 - protein, 35 aa, Artificial Sequence
  Non-cyclic GFR-binding peptide
  MOD_RES (32)..(33): Xaa is C or S
AKVVMNYHYKLIVNNSSDKYLVSIPSLKTPAXXAK

SEQ ID NO: 4961 - protein, 44 aa, Artificial Sequence
  Non-cyclic GFR-binding peptide
  MOD_RES (1)..(3)..(40): Xaa is C or S
XKXALHDELTYHYKLFIPKKRVIEKYLVSIPSLQVQTPRXQVNR

SEQ ID NO: 4962 - protein, 39 aa, Artificial Sequence
  Non-cyclic GFR-binding peptide
  MOD_RES (1)..(3)..(36)..(37): Xaa is C or S
  MOD_RES (14)..(15)..(16)..(17)..(18): Xaa is A or G
  MOD_RES (19)..(20)..(21)..(22): Xaa is A or G or absent
XKXSKVIMRYKKLXXXXXXXXXFYLISIANLDQSVXXPS

SEQ ID NO: 4963 - protein, 38 aa, Artificial Sequence
  Non-cyclic GFR-binding peptide
  MOD_RES (2)..(35)..(36): Xaa is C or S
  MOD_RES (13)..(14)..(15)..(16)..(17): Xaa is A or G
  MOD_RES (18)..(19)..(20)..(21): Xaa is A or G or absent
KXSRVIMRYKKLXXXXXXXXXFYLISIANLAQPVXXPA

SEQ ID NO: 4964 - protein, 35 aa, Artificial Sequence
  Non-cyclic GFR-binding peptide
  MOD_RES (1)..(35): Xaa is C or S
  MOD_RES (13)..(14)..(15)..(16)..(17): Xaa is A or G
  MOD_RES (18)..(19)..(20)..(21): Xaa is A or G or absent
XGEVVMDRYKKLXXXXXXXXXFYLMSIANLETPVX

SEQ ID NO: 4965 - protein, 39 aa, Artificial Sequence
  Non-cyclic GFR-binding peptide
  MOD_RES (2)..(4)..(35)..(36): Xaa is C or S
SXKXSKVVMYHYKLVKPTRGVKYLISIPSLDQPVXXPSA

SEQ ID NO: 4966 - protein, 38 aa, Artificial Sequence
  Non-cyclic GFR-binding peptide
  MOD_RES (2)..(36)..(37): Xaa is C or S
  MOD_RES (14)..(15)..(16)..(17)..(18): Xaa is A or G
  MOD_RES (19)..(20)..(21)..(22): Xaa is A or G or absent
GXSRVVMNYHYKLXXXXXXXXXKYLVSIPSLKTPAXXP

SEQ ID NO: 4967 - protein, 37 aa, Artificial Sequence
  Non-cyclic GFR-binding peptide
  MOD_RES (2)..(4)..(36)..(37): Xaa is C or S
HXGXSRVVMNQYNKLIVNSSDDLYLVSIASLKTPAXX

SEQ ID NO: 4968 - protein, 36 aa, Artificial Sequence
  Non-cyclic GFR-binding peptide
  MOD_RES (1)..(3)..(36): Xaa is C or S
  MOD_RES (14)..(15)..(16)..(17)..(18): Xaa is A or G
  MOD_RES (19)..(20)..(21)..(22): Xaa is A or G or absent
XKXSKVIMYHYKLXXXXXXXXXKYLISIPSLDQSVX

SEQ ID NO: 4969 - protein, 39 aa, Artificial Sequence
  Non-cyclic GFR-binding peptide
  MOD_RES (33)..(34): Xaa is C or S
  MOD_RES (11)..(12)..(13)..(14)..(15): Xaa is A or G
  MOD_RES (16)..(17)..(18)..(19): Xaa is A or G or absent
EVVMERHKRLXXXXXXXXXYYLMSTASLETPVXXAKPIS

SEQ ID NO: 4970 - protein, 41 aa, Artificial Sequence
  Non-cyclic GFR-binding peptide
  MOD_RES (1)..(3)..(40): Xaa is C or S
  MOD_RES (16)..(17)..(18)..(19)..(20): Xaa is A or G
  MOD_RES (21)..(22)..(23)..(24): Xaa is A or G or absent
XKXALHDELTQYNKLXXXXXXXXXLYLVSIASLQVQTPRXQ

SEQ ID NO: 4971 - protein, 36 aa, Artificial Sequence
  Non-cyclic GFR-binding peptide
  MOD_RES (2)..(36): Xaa is C or S
  MOD_RES (14)..(15)..(16)..(17)..(18): Xaa is A or G
  MOD_RES (19)..(20)..(21)..(22): Xaa is A or G or absent
GXARVVMNQYNKLXXXXXXXXXLYLVSIASLQTPAX

SEQ ID NO: 4972 - protein, 31 aa, Artificial Sequence
  Non-cyclic GFR-binding peptide
  MOD_RES (31)..(31): Xaa is C or S
KVVMNRYKKLIVNNSSDFYLVSIANLKTPAX

SEQ ID NO: 4973 - protein, 44 aa, Artificial Sequence
  Non-cyclic GFR-binding peptide
  MOD_RES (2)..(4)..(39)..(40): Xaa is C or S
  MOD_RES (17)..(18)..(19)..(20)..(21): Xaa is A or G
  MOD_RES (22)..(23)..(24)..(25): Xaa is A or G or absent
RXGXEAVSMGEQYNKLXXXXXXXXXLYLVSIASLKTPVXXAKGV

SEQ ID NO: 4974 - protein, 38 aa, Artificial Sequence
  Non-cyclic GFR-binding peptide
  MOD_RES (2)..(4)..(37)..(38): Xaa is C or S
RXGXEAVSMGERHKRLTPVGMDDYYLVSTASLKTPVXX

SEQ ID NO: 4975 - protein, 41 aa, Artificial Sequence
  Non-cyclic GFR-binding peptide
  MOD_RES (1)..(3)..(35)..(36): Xaa is C or S
XGXAKVVMNQYNKLIVNNSSDLYLVSIASLKTPAXXAKPVA

SEQ ID NO: 4976 - protein, 34 aa, Artificial Sequence
  Non-cyclic GFR-binding peptide
  MOD_RES (2)..(4): Xaa is C or S
SXKXSKVIMRHKRLIKPTKGIYYLISTASLDQSV

SEQ ID NO: 4977 - protein, 36 aa, Artificial Sequence
  Non-cyclic GFR-binding peptide
  MOD_RES (33)..(34): Xaa is C or S
  MOD_RES (11)..(12)..(13)..(14)..(15): Xaa is A or G
  MOD_RES (16)..(17)..(18)..(19): Xaa is A or G or absent
SRVIMQYNKLXXXXXXXXXLYLISIASLAQPVXXPA

SEQ ID NO: 4978 - protein, 34 aa, Artificial Sequence
  Non-cyclic GFR-binding peptide
  MOD_RES (1)..(32)..(33): Xaa is C or S
XSKVVMRHKRLVKPTRGVYYLISTASLDQPVXXP

SEQ ID NO: 4979 - protein, 39 aa, Artificial Sequence
  Non-cyclic GFR-binding peptide
  MOD_RES (1)..(3)..(35)..(36): Xaa is C or S
XGXGEVVMDYHYKLVVKENEDKYLMSIPSLETPVXXAKP

SEQ ID NO: 4980 - protein, 44 aa, Artificial Sequence
  Non-cyclic GFR-binding peptide
  MOD_RES (1)..(3)..(38)..(39): Xaa is C or S
  MOD_RES (16)..(17)..(18)..(19)..(20): Xaa is A or G
  MOD_RES (21)..(22)..(23)..(24): Xaa is A or G or absent
XGXEAVSMGERHKRLXXXXXXXXXYYLVSTASLKTPVXXAKGVK

SEQ ID NO: 4981 - protein, 36 aa, Artificial Sequence
  Non-cyclic GFR-binding peptide
  MOD_RES (2)..(2): Xaa is C or S
  MOD_RES (15)..(16)..(17)..(18)..(19): Xaa is A or G
  MOD_RES (20)..(21)..(22)..(23): Xaa is A or G or absent
GXEAVSMGERHKRLXXXXXXXXXYYLVSTASLKTPV

SEQ ID NO: 4982 - protein, 33 aa, Artificial Sequence
  Non-cyclic GFR-binding peptide
  MOD_RES (33)..(33): Xaa is C or S
  MOD_RES (11)..(12)..(13)..(14)..(15): Xaa is A or G
  MOD_RES (16)..(17)..(18)..(19): Xaa is A or G or absent
KVVMNYHYKLXXXXXXXXXKYLVSIPSLKTPAX

SEQ ID NO: 4983 - protein, 33 aa, Artificial Sequence
  Non-cyclic GFR-binding peptide
  MOD_RES (1)..(33): Xaa is C or S
XGEVVMDRHKRLVVKENEDYYLMSTASLETPVX

SEQ ID NO: 4984 - protein, 33 aa, Artificial Sequence
  Non-cyclic GFR-binding peptide
  MOD_RES (33)..(33): Xaa is C or S
  MOD_RES (11)..(12)..(13)..(14)..(15): Xaa is A or G
  MOD_RES (16)..(17)..(18)..(19): Xaa is A or G or absent
RVVMNYHYKLXXXXXXXXXKYLVSIPSLKTPAX

SEQ ID NO: 4985 - protein, 33 aa, Artificial Sequence
  Non-cyclic GFR-binding peptide
  MOD_RES (33)..(33): Xaa is C or S
  MOD_RES (11)..(12)..(13)..(14)..(15): Xaa is A or G
  MOD_RES (16)..(17)..(18)..(19): Xaa is A or G or absent
SKVVMRHKRLXXXXXXXXXYYLISTASLDQPVX

SEQ ID NO: 4986 - protein, 35 aa, Artificial Sequence
  Non-cyclic GFR-binding peptide
  MOD_RES (1)..(1): Xaa is C or S
  MOD_RES (14)..(15)..(16)..(17)..(18): Xaa is A or G
  MOD_RES (19)..(20)..(21)..(22): Xaa is A or G or absent
XALHDELTQYNKLXXXXXXXXXLYLVSIASLQVQT

SEQ ID NO: 4987 - protein, 44 aa, Artificial Sequence
  Non-cyclic GFR-binding peptide
  MOD_RES (2)..(4)..(41): Xaa is C or S
EXKXALHDELTYHYKLFIPKKRVIEKYLVSIPSLQVQTPRXQVN

SEQ ID NO: 4988 - protein, 32 aa, Artificial Sequence
  Non-cyclic GFR-binding peptide
  MOD_RES (31)..(32): Xaa is C or S
RVVMNQYNKLIVNSSDDLYLVSIASLKTPAXX

SEQ ID NO: 4989 - protein, 40 aa, Artificial Sequence
  Non-cyclic GFR-binding peptide
  MOD_RES (1)..(34)..(35): Xaa is C or S
  MOD_RES (12)..(13)..(14)..(15)..(16): Xaa is A or G
  MOD_RES (17)..(18)..(19)..(20): Xaa is A or G or absent
XSRVIMYHYKLXXXXXXXXXKYLISIPSLAQPVXXPAASA

SEQ ID NO: 4990 - protein, 39 aa, Artificial Sequence
  Non-cyclic GFR-binding peptide
  MOD_RES (2)..(39): Xaa is C or S
KXALHDELTYHYKLFIPKKRVIEKYLVSIPSLQVQTPRX

SEQ ID NO: 4991 - protein, 35 aa, Artificial Sequence
  Non-cyclic GFR-binding peptide
  MOD_RES (1)..(3): Xaa is C or S
  MOD_RES (14)..(15)..(16)..(17)..(18): Xaa is A or G
  MOD_RES (19)..(20)..(21)..(22): Xaa is A or G or absent
XKXSKVIMRYKKLXXXXXXXXXFYLISIANLDQSV

SEQ ID NO: 4992 - protein, 34 aa, Artificial Sequence
  Non-cyclic GFR-binding peptide
  MOD_RES (2)..(34): Xaa is C or S
GXGEVVMEYHYKLVVKDYEDKYLMSIPSLETPVX

SEQ ID NO: 4993 - protein, 33 aa, Artificial Sequence
  Non-cyclic GFR-binding peptide
  MOD_RES (1)..(32)..(33): Xaa is C or S
XSKVVMRHKRLVKPTRGVYYLISTASLDQPVXX

SEQ ID NO: 4994 - protein, 33 aa, Artificial Sequence
  Non-cyclic GFR-binding peptide
  MOD_RES (12)..(13)..(14)..(15)..(16): Xaa is A or G
  MOD_RES (17)..(18)..(19)..(20): Xaa is A or G or absent
GEVVMERYKKLXXXXXXXXXFYLMSIANLETPV

SEQ ID NO: 4995 - protein, 34 aa, Artificial Sequence
  Non-cyclic GFR-binding peptide
  MOD_RES (2)..(34): Xaa is C or S
GXAKVVMNQYNKLIVNNSSDLYLVSIASLKTPAX

SEQ ID NO: 4996 - protein, 39 aa, Artificial Sequence
  Non-cyclic GFR-binding peptide
  MOD_RES (2)..(4)..(38)..(39): Xaa is C or S
  MOD_RES (16)..(17)..(18)..(19)..(20): Xaa is A or G
  MOD_RES (21)..(22)..(23)..(24): Xaa is A or G or absent
HXGXARVVMNRHKRLXXXXXXXXXYYLVSTASLQTPAXX

SEQ ID NO: 4997 - protein, 31 aa, Artificial Sequence
  Non-cyclic GFR-binding peptide
  MOD_RES (1)..(1): Xaa is C or S
XSKVIMRYKKLIKPTKGIFYLISIANLDQSV

SEQ ID NO: 4998 - protein, 40 aa, Artificial Sequence
  Non-cyclic GFR-binding peptide
  MOD_RES (34)..(35): Xaa is C or S
  MOD_RES (12)..(13)..(14)..(15)..(16): Xaa is A or G
  MOD_RES (17)..(18)..(19)..(20): Xaa is A or G or absent
GEVVMDRHKRLXXXXXXXXXYYLMSTASLETPVXXAKPIK

SEQ ID NO: 4999 - protein, 40 aa, Artificial Sequence
  Non-cyclic GFR-binding peptide
  MOD_RES (2)..(35)..(36): Xaa is C or S
  MOD_RES (13)..(14)..(15)..(16)..(17): Xaa is A or G
  MOD_RES (18)..(19)..(20)..(21): Xaa is A or G or absent
KXSRVIMQYNKLXXXXXXXXXLYLISIASLAQPVXXPAAS

SEQ ID NO: 5000 - protein, 41 aa, Artificial Sequence
  Non-cyclic GFR-binding peptide
  MOD_RES (2)..(4)..(37)..(38): Xaa is C or S
RXGXEAVSMGEQYNKLTPVGMDDLYLVSIASLKTPVXXAKG

SEQ ID NO: 5001 - protein, 38 aa, Artificial Sequence
  Non-cyclic GFR-binding peptide
  MOD_RES (1)..(3)..(37): Xaa is C or S
  MOD_RES (15)..(16)..(17)..(18)..(19): Xaa is A or G
  MOD_RES (20)..(21)..(22)..(23): Xaa is A or G or absent
XGXSRVVMNRHKRLXXXXXXXXXYYLVSTASLKTPAXT

SEQ ID NO: 5002 - protein, 37 aa, Artificial Sequence
  Non-cyclic GFR-binding peptide
  MOD_RES (1)..(34)..(35): Xaa is C or S
  MOD_RES (12)..(13)..(14)..(15)..(16): Xaa is A or G
  MOD_RES (17)..(18)..(19)..(20): Xaa is A or G or absent
XSRVIMRHKRLXXXXXXXXXYYLISTASLAQPVXXPA

SEQ ID NO: 5003 - protein, 39 aa, Artificial Sequence
  Non-cyclic GFR-binding peptide
  MOD_RES (2)..(4)..(39): Xaa is C or S
  MOD_RES (17)..(18)..(19)..(20)..(21): Xaa is A or G
  MOD_RES (22)..(23)..(24)..(25): Xaa is A or G or absent
RXGXEAVSMGEQYNKLXXXXXXXXXLYLVSIASLKTPVX

SEQ ID NO: 5004 - protein, 38 aa, Artificial Sequence
  Non-cyclic GFR-binding peptide
  MOD_RES (1)..(3)..(38): Xaa is C or S
  MOD_RES (16)..(17)..(18)..(19)..(20): Xaa is A or G
  MOD_RES (21)..(22)..(23)..(24): Xaa is A or G or absent
XGXEAVSMGERHKRLXXXXXXXXXYYLVSTASLKTPVX

SEQ ID NO: 5005 - protein, 43 aa, Artificial Sequence
  Non-cyclic GFR-binding peptide
  MOD_RES (2)..(4)..(37)..(38): Xaa is C or S
  MOD_RES (15)..(16)..(17)..(18)..(19): Xaa is A or G
  MOD_RES (20)..(21)..(22)..(23): Xaa is A or G or absent
SXKXSKVVMYHYKLXXXXXXXXXKYLISIPSLDQPVXXPSASA

SEQ ID NO: 5006 - protein, 41 aa, Artificial Sequence
  Non-cyclic GFR-binding peptide
  MOD_RES (2)..(35)..(36): Xaa is C or S
  MOD_RES (13)..(14)..(15)..(16)..(17): Xaa is A or G
  MOD_RES (18)..(19)..(20)..(21): Xaa is A or G or absent
KXSRVIMYHYKLXXXXXXXXXKYLISIPSLAQPVXXPAASA

SEQ ID NO: 5007 - protein, 31 aa, Artificial Sequence
  Non-cyclic GFR-binding peptide
  MOD_RES (31)..(31): Xaa is C or S
SRVIMYHYKLVKPKRGVKYLISIPSLAQPVX

SEQ ID NO: 5008 - protein, 37 aa, Artificial Sequence
  Non-cyclic GFR-binding peptide
  MOD_RES (31)..(32): Xaa is C or S
SKVVMRHKRLVKPTRGVYYLISTASLDQPVXXPSASA

SEQ ID NO: 5009 - protein, 38 aa, Artificial Sequence
  Non-cyclic GFR-binding peptide
  MOD_RES (33)..(34): Xaa is C or S
  MOD_RES (11)..(12)..(13)..(14)..(15): Xaa is A or G
  MOD_RES (16)..(17)..(18)..(19): Xaa is A or G or absent
SRVIMRHKRLXXXXXXXXXYYLISTASLAQPVXXPAAS

SEQ ID NO: 5010 - protein, 39 aa, Artificial Sequence
  Non-cyclic GFR-binding peptide
  MOD_RES (1)..(36)..(37): Xaa is C or S
  MOD_RES (14)..(15)..(16)..(17)..(18): Xaa is A or G
  MOD_RES (19)..(20)..(21)..(22): Xaa is A or G or absent
XEAVSMGERYKKLXXXXXXXXXFYLVSIANLKTPVXXAK

SEQ ID NO: 5011 - protein, 43 aa, Artificial Sequence
  Non-cyclic GFR-binding peptide
  MOD_RES (1)..(3)..(37)..(38): Xaa is C or S
  MOD_RES (15)..(16)..(17)..(18)..(19): Xaa is A or G
  MOD_RES (20)..(21)..(22)..(23): Xaa is A or G or absent
XGXGEVVMDRHKRLXXXXXXXXXYYLMSTASLETPVXXAKPIK

SEQ ID NO: 5012 - protein, 41 aa, Artificial Sequence
  Non-cyclic GFR-binding peptide
  MOD_RES (1)..(3)..(40): Xaa is C or S
  MOD_RES (16)..(17)..(18)..(19)..(20): Xaa is A or G
  MOD_RES (21)..(22)..(23)..(24): Xaa is A or G or absent
XKXALHDELTRHKRLXXXXXXXXXYYLVSTASLQVQTPRXQ

SEQ ID NO: 5013 - protein, 37 aa, Artificial Sequence
  Non-cyclic GFR-binding peptide
  MOD_RES (2)..(33)..(34): Xaa is C or S
KXSRVIMQYNKLVKPKRGVLYLISIASLAQPVXXPAA

SEQ ID NO: 5014 - protein, 36 aa, Artificial Sequence
  Non-cyclic GFR-binding peptide
  MOD_RES (1)..(33): Xaa is C or S
XSRVVMNRHKRLIVNSSDDYYLVSTASLKTPAXTPK

SEQ ID NO: 5015 - protein, 32 aa, Artificial Sequence
  Non-cyclic GFR-binding peptide
  MOD_RES (31)..(32): Xaa is C or S
RVVMNRHKRLIVNSSDDYYLVSTASLKTPAXX

SEQ ID NO: 5016 - protein, 44 aa, Artificial Sequence
  Non-cyclic GFR-binding peptide
  MOD_RES (2)..(4)..(38)..(39): Xaa is C or S
  MOD_RES (16)..(17)..(18)..(19)..(20): Xaa is A or G
  MOD_RES (21)..(22)..(23)..(24): Xaa is A or G or absent
RXGXGEVVMERYKKLXXXXXXXXXFYLMSIANLETPVXXAKPIS

SEQ ID NO: 5017 - protein, 35 aa, Artificial Sequence
  Non-cyclic GFR-binding peptide
  MOD_RES (12)..(13)..(14)..(15)..(16): Xaa is A or G
  MOD_RES (17)..(18)..(19)..(20): Xaa is A or G or absent
LHDELTRYKKLXXXXXXXXXFYLVSIANLQVQTPR

SEQ ID NO: 5018 - protein, 38 aa, Artificial Sequence
  Non-cyclic GFR-binding peptide
  MOD_RES (1)..(33)..(34): Xaa is C or S
XSRVVMNQYNKLIVNSSDDLYLVSIASLKTPAXXPKPV

SEQ ID NO: 5019 - protein, 37 aa, Artificial Sequence
  Non-cyclic GFR-binding peptide
  MOD_RES (1)..(34)..(35): Xaa is C or S
  MOD_RES (12)..(13)..(14)..(15)..(16): Xaa is A or G
  MOD_RES (17)..(18)..(19)..(20): Xaa is A or G or absent
XSRVIMQYNKLXXXXXXXXXLYLISIASLAQPVXXPA

SEQ ID NO: 5020 - protein, 38 aa, Artificial Sequence
  Non-cyclic GFR-binding peptide
  MOD_RES (2)..(4)..(37)..(38): Xaa is C or S
RXGXEAVSMGEQYNKLTPVGMDDLYLVSIASLKTPVXX

SEQ ID NO: 5021 - protein, 35 aa, Artificial Sequence
  Non-cyclic GFR-binding peptide
  MOD_RES (12)..(13)..(14)..(15)..(16): Xaa is A or G
  MOD_RES (17)..(18)..(19)..(20): Xaa is A or G or absent
LHDELTQYNKLXXXXXXXXXLYLVSIASLQVQTPR

SEQ ID NO: 5022 - protein, 34 aa, Artificial Sequence
  Non-cyclic GFR-binding peptide
  MOD_RES (2)..(34): Xaa is C or S
GXAKVVMNYHYKLIVNNSSDKYLVSIPSLKTPAX

SEQ ID NO: 5023 - protein, 39 aa, Artificial Sequence
  Non-cyclic GFR-binding peptide
  MOD_RES (2)..(35)..(36): Xaa is C or S
  MOD_RES (13)..(14)..(15)..(16)..(17): Xaa is A or G
  MOD_RES (18)..(19)..(20)..(21): Xaa is A or G or absent
KXSRVIMRYKKLXXXXXXXXXFYLISIANLAQPVXXPAA

SEQ ID NO: 5024 - protein, 39 aa, Artificial Sequence
  Non-cyclic GFR-binding peptide
  MOD_RES (2)..(37)..(38): Xaa is C or S
  MOD_RES (15)..(16)..(17)..(18)..(19): Xaa is A or G
  MOD_RES (20)..(21)..(22)..(23): Xaa is A or G or absent
GXEAVSMGEQYNKLXXXXXXXXXLYLVSIASLKTPVXXA

SEQ ID NO: 5025 - protein, 36 aa, Artificial Sequence
  Non-cyclic GFR-binding peptide
  MOD_RES (2)..(4)..(35)..(36): Xaa is C or S
SXKXSKVIMRHKRLIKPTKGIYYLISTASLDQSVXX

SEQ ID NO: 5026 - protein, 38 aa, Artificial Sequence
  Non-cyclic GFR-binding peptide
  MOD_RES (2)..(34)..(35): Xaa is C or S
GXGEVVMDRHKRLVVKENEDYYLMSTASLETPVXXAKP

SEQ ID NO: 5027 - protein, 36 aa, Artificial Sequence
  Non-cyclic GFR-binding peptide
  MOD_RES (31)..(32): Xaa is C or S
EVVMDYHYKLVVKENEDKYLMSIPSLETPVXXAKPI

SEQ ID NO: 5028 - protein, 36 aa, Artificial Sequence
  Non-cyclic GFR-binding peptide
  MOD_RES (32)..(33): Xaa is C or S
ARVVMNRHKRLIVNSSDDYYLVSTASLQTPAXXPKP

SEQ ID NO: 5029 - protein, 36 aa, Artificial Sequence
  Non-cyclic GFR-binding peptide
  MOD_RES (33)..(34): Xaa is C or S
  MOD_RES (11)..(12)..(13)..(14)..(15): Xaa is A or G
  MOD_RES (16)..(17)..(18)..(19): Xaa is A or G or absent
EVVMDRHKRLXXXXXXXXXYYLMSTASLETPVXXAK

SEQ ID NO: 5030 - protein, 32 aa, Artificial Sequence
  Non-cyclic GFR-binding peptide
  MOD_RES (31)..(32): Xaa is C or S
RVVMNQYNKLIVNSSDDLYLVSIASLQTPAXX

SEQ ID NO: 5031 - protein, 34 aa, Artificial Sequence
  Non-cyclic GFR-binding peptide
  MOD_RES (1)..(3): Xaa is C or S
XGXAKVVMNYHYKLIVNNSSDKYLVSIPSLKTPA

SEQ ID NO: 5032 - protein, 40 aa, Artificial Sequence
  Non-cyclic GFR-binding peptide
  MOD_RES (2)..(4)..(38): Xaa is C or S
  MOD_RES (16)..(17)..(18)..(19)..(20): Xaa is A or G
  MOD_RES (21)..(22)..(23)..(24): Xaa is A or G or absent
HXGXSRVVMNQYNKLXXXXXXXXXLYLVSIASLKTPAXTP

SEQ ID NO: 5033 - protein, 42 aa, Artificial Sequence
  Non-cyclic GFR-binding peptide
  MOD_RES (2)..(4)..(38)..(39): Xaa is C or S
  MOD_RES (16)..(17)..(18)..(19)..(20): Xaa is A or G
  MOD_RES (21)..(22)..(23)..(24): Xaa is A or G or absent
HXGXAKVVMNQYNKLXXXXXXXXXLYLVSIASLKTPAXXAKP

SEQ ID NO: 5034 - protein, 34 aa, Artificial Sequence
  Non-cyclic GFR-binding peptide
  MOD_RES (31)..(32): Xaa is C or S
SRVIMRHKRLVKPKRGVYYLISTASLAQPVXXPA

SEQ ID NO: 5035 - protein, 38 aa, Artificial Sequence
  Non-cyclic GFR-binding peptide
  MOD_RES (2)..(4): Xaa is C or S
EXKXALHDELTYHYKLFIPKKRVIEKYLVSIPSLQVQT

SEQ ID NO: 5036 - protein, 35 aa, Artificial Sequence
  Non-cyclic GFR-binding peptide
  MOD_RES (2)..(2): Xaa is C or S
  MOD_RES (14)..(15)..(16)..(17)..(18): Xaa is A or G
  MOD_RES (19)..(20)..(21)..(22): Xaa is A or G or absent
GXSRVVMNQYNKLXXXXXXXXXLYLVSIASLKTPA

SEQ ID NO: 5037 - protein, 34 aa, Artificial Sequence
  Non-cyclic GFR-binding peptide
  MOD_RES (2)..(2): Xaa is C or S
  MOD_RES (13)..(14)..(15)..(16)..(17): Xaa is A or G
  MOD_RES (18)..(19)..(20)..(21): Xaa is A or G or absent
KXSRVIMQYNKLXXXXXXXXXLYLISIASLAQPV

SEQ ID NO: 5038 - protein, 35 aa, Artificial Sequence
  Non-cyclic GFR-binding peptide
LHDELTRHKRLFIPKKRVIEYYLVSTASLQVQTPR

SEQ ID NO: 5039 - protein, 39 aa, Artificial Sequence
  Non-cyclic GFR-binding peptide
  MOD_RES (1)..(35)..(36): Xaa is C or S
  MOD_RES (13)..(14)..(15)..(16)..(17): Xaa is A or G
  MOD_RES (18)..(19)..(20)..(21): Xaa is A or G or absent
XGEVVMERYKKLXXXXXXXXXFYLMSIANLETPVXXAKP

SEQ ID NO: 5040 - protein, 40 aa, Artificial Sequence
  Non-cyclic GFR-binding peptide
  MOD_RES (1)..(3)..(38)..(39): Xaa is C or S
  MOD_RES (16)..(17)..(18)..(19)..(20): Xaa is A or G
  MOD_RES (21)..(22)..(23)..(24): Xaa is A or G or absent
XGXEAVSMGERYKKLXXXXXXXXXFYLVSIANLKTPVXXA

SEQ ID NO: 5041 - protein, 35 aa, Artificial Sequence
  Non-cyclic GFR-binding peptide
  MOD_RES (2)..(2): Xaa is C or S
  MOD_RES (14)..(15)..(16)..(17)..(18): Xaa is A or G
  MOD_RES (19)..(20)..(21)..(22): Xaa is A or G or absent
GXGEVVMDRYKKLXXXXXXXXXFYLMSIANLETPV

SEQ ID NO: 5042 - protein, 37 aa, Artificial Sequence
  Non-cyclic GFR-binding peptide
  MOD_RES (1)..(33)..(34): Xaa is C or S
XARVVMNYHYKLIVNSSDDKYLVSIPSLQTPAXXPKP

SEQ ID NO: 5043 - protein, 37 aa, Artificial Sequence
  Non-cyclic GFR-binding peptide
  MOD_RES (1)..(1): Xaa is C or S
XALHDELTQYNKLFIPKKRVIELYLVSIASLQVQTPR

SEQ ID NO: 5044 - protein, 43 aa, Artificial Sequence
  Non-cyclic GFR-binding peptide
  MOD_RES (1)..(3)..(38)..(39): Xaa is C or S
  MOD_RES (16)..(17)..(18)..(19)..(20): Xaa is A or G
  MOD_RES (21)..(22)..(23)..(24): Xaa is A or G or absent
XGXEAVSMGERHKRLXXXXXXXXXYYLVSTASLKTPVXXAKGV

SEQ ID NO: 5045 - protein, 40 aa, Artificial Sequence
  Non-cyclic GFR-binding peptide
  MOD_RES (1)..(3)..(36)..(37): Xaa is C or S
  MOD_RES (14)..(15)..(16)..(17)..(18): Xaa is A or G
  MOD_RES (19)..(20)..(21)..(22): Xaa is A or G or absent
XKXSKVVMRYKKLXXXXXXXXXFYLISIANLDQPVXXPSA

SEQ ID NO: 5046 - protein, 41 aa, Artificial Sequence
  Non-cyclic GFR-binding peptide
  MOD_RES (1)..(35)..(36): Xaa is C or S
  MOD_RES (13)..(14)..(15)..(16)..(17): Xaa is A or G
  MOD_RES (18)..(19)..(20)..(21): Xaa is A or G or absent
XAKVVMNYHYKLXXXXXXXXXKYLVSIPSLKTPAXXAKPVA

SEQ ID NO: 5047 - protein, 34 aa, Artificial Sequence
  Non-cyclic GFR-binding peptide
  MOD_RES (32)..(33): Xaa is C or S
SRVVMNYHYKLIVNSSDDKYLVSIPSLKTPAXXP

SEQ ID NO: 5048 - protein, 35 aa, Artificial Sequence
  Non-cyclic GFR-binding peptide
  MOD_RES (2)..(4): Xaa is C or S
HXGXARVVMNYHYKLIVNSSDDKYLVSIPSLQTPA

SEQ ID NO: 5049 - protein, 38 aa, Artificial Sequence
  Non-cyclic GFR-binding peptide
  MOD_RES (33)..(34): Xaa is C or S
  MOD_RES (11)..(12)..(13)..(14)..(15): Xaa is A or G
  MOD_RES (16)..(17)..(18)..(19): Xaa is A or G or absent
RVVMNRHKRLXXXXXXXXXYYLVSTASLQTPAXXPKPV

SEQ ID NO: 5050 - protein, 40 aa, Artificial Sequence
  Non-cyclic GFR-binding peptide
  MOD_RES (2)..(4): Xaa is C or S
  MOD_RES (17)..(18)..(19)..(20)..(21): Xaa is A or G
  MOD_RES (22)..(23)..(24)..(25): Xaa is A or G or absent
EXKXALHDELTRYKKLXXXXXXXXXFYLVSIANLQVQTPR

SEQ ID NO: 5051 - protein, 34 aa, Artificial Sequence
  Non-cyclic GFR-binding peptide
  MOD_RES (32)..(32): Xaa is C or S
SRVVMNRHKRLIVNSSDDYYLVSTASLKTPAXTP

SEQ ID NO: 5052 - protein, 42 aa, Artificial Sequence
  Non-cyclic GFR-binding peptide
  MOD_RES (2)..(36)..(37): Xaa is C or S
  MOD_RES (14)..(15)..(16)..(17)..(18): Xaa is A or G
  MOD_RES (19)..(20)..(21)..(22): Xaa is A or G or absent
GXGEVVMEYHYKLXXXXXXXXXKYLMSIPSLETPVXXAKPIS

SEQ ID NO: 5053 - protein, 32 aa, Artificial Sequence
  Non-cyclic GFR-binding peptide
  MOD_RES (31)..(32): Xaa is C or S
KVVMNYHYKLIVNNSSDKYLVSIPSLKTPAXX

SEQ ID NO: 5054 - protein, 41 aa, Artificial Sequence
  Non-cyclic GFR-binding peptide
  MOD_RES (2)..(4)..(36)..(37): Xaa is C or S
RXGXGEVVMDRHKRLVVKENEDYYLMSTASLETPVXXAKPI

SEQ ID NO: 5055 - protein, 39 aa, Artificial Sequence
  Non-cyclic GFR-binding peptide
  MOD_RES (1)..(3)..(36)..(37): Xaa is C or S
XGXEAVSMGERYKKLTPVGMDDFYLVSIANLKTPVXXAK

SEQ ID NO: 5056 - protein, 35 aa, Artificial Sequence
  Non-cyclic GFR-binding peptide
  MOD_RES (2)..(35): Xaa is C or S
  MOD_RES (13)..(14)..(15)..(16)..(17): Xaa is A or G
  MOD_RES (18)..(19)..(20)..(21): Xaa is A or G or absent
KXSRVIMRHKRLXXXXXXXXXYYLISTASLAQPVX

SEQ ID NO: 5057 - protein, 34 aa, Artificial Sequence
  Non-cyclic GFR-binding peptide
HDELTQYNKLFIPKKRVIELYLVSIASLQVQTPR

SEQ ID NO: 5058 - protein, 38 aa, Artificial Sequence
  Non-cyclic GFR-binding peptide
  MOD_RES (2)..(2): Xaa is C or S
  MOD_RES (15)..(16)..(17)..(18)..(19): Xaa is A or G
  MOD_RES (20)..(21)..(22)..(23): Xaa is A or G or absent
KXALHDELTYHYKLXXXXXXXXXKYLVSIPSLQVQTPR

SEQ ID NO: 5059 - protein, 36 aa, Artificial Sequence
  Non-cyclic GFR-binding peptide
  MOD_RES (2)..(2): Xaa is C or S
KXALHDELTRHKRLFIPKKRVIEYYLVSTASLQVQT

SEQ ID NO: 5060 - protein, 32 aa, Artificial Sequence
  Non-cyclic GFR-binding peptide
  MOD_RES (32)..(32): Xaa is C or S
SRVVMNRHKRLIVNSSDDYYLVSTASLKTPAX

SEQ ID NO: 5061 - protein, 32 aa, Artificial Sequence
  Non-cyclic GFR-binding peptide
  MOD_RES (31)..(32): Xaa is C or S
RVVMNYHYKLIVNSSDDKYLVSIPSLQTPAXX

SEQ ID NO: 5062 - protein, 35 aa, Artificial Sequence
  Non-cyclic GFR-binding peptide
  MOD_RES (33)..(34): Xaa is C or S
  MOD_RES (11)..(12)..(13)..(14)..(15): Xaa is A or G
  MOD_RES (16)..(17)..(18)..(19): Xaa is A or G or absent
SKVIMRHKRLXXXXXXXXXYYLISTASLDQSVXXP

SEQ ID NO: 5063 - protein, 38 aa, Artificial Sequence
  Non-cyclic GFR-binding peptide
  MOD_RES (2)..(36)..(37): Xaa is C or S
  MOD_RES (14)..(15)..(16)..(17)..(18): Xaa is A or G
  MOD_RES (19)..(20)..(21)..(22): Xaa is A or G or absent
GXAKVVMNQYNKLXXXXXXXXXLYLVSIASLKTPAXXA

SEQ ID NO: 5064 - protein, 36 aa, Artificial Sequence
  Non-cyclic GFR-binding peptide
  MOD_RES (1)..(35)..(36): Xaa is C or S
  MOD_RES (13)..(14)..(15)..(16)..(17): Xaa is A or G
  MOD_RES (18)..(19)..(20)..(21): Xaa is A or G or absent
XGEVVMDRHKRLXXXXXXXXXYYLMSTASLETPVXX

SEQ ID NO: 5065 - protein, 32 aa, Artificial Sequence
  Non-cyclic GFR-binding peptide
  MOD_RES (1)..(32): Xaa is C or S
XSKVIMYHYKLIKPTKGIKYLISIPSLDQSVX

SEQ ID NO: 5066 - protein, 39 aa, Artificial Sequence
  Non-cyclic GFR-binding peptide
  MOD_RES (34)..(35): Xaa is C or S
  MOD_RES (12)..(13)..(14)..(15)..(16): Xaa is A or G
  MOD_RES (17)..(18)..(19)..(20): Xaa is A or G or absent
AKVVMNQYNKLXXXXXXXXXLYLVSIASLKTPAXXAKPV

SEQ ID NO: 5067 - protein, 38 aa, Artificial Sequence
  Non-cyclic GFR-binding peptide
  MOD_RES (2)..(36)..(37): Xaa is C or S
  MOD_RES (14)..(15)..(16)..(17)..(18): Xaa is A or G
  MOD_RES (19)..(20)..(21)..(22): Xaa is A or G or absent
GXGEVVMERHKRLXXXXXXXXXYYLMSTASLETPVXXA

SEQ ID NO: 5068 - protein, 42 aa, Artificial Sequence
  Non-cyclic GFR-binding peptide
  MOD_RES (1)..(3)..(37)..(38): Xaa is C or S
  MOD_RES (15)..(16)..(17)..(18)..(19): Xaa is A or G
  MOD_RES (20)..(21)..(22)..(23): Xaa is A or G or absent
XGXGEVVMERHKRLXXXXXXXXXYYLMSTASLETPVXXAKPI

SEQ ID NO: 5069 - protein, 35 aa, Artificial Sequence
  Non-cyclic GFR-binding peptide
  MOD_RES (2)..(2): Xaa is C or S
  MOD_RES (14)..(15)..(16)..(17)..(18): Xaa is A or G
  MOD_RES (19)..(20)..(21)..(22): Xaa is A or G or absent
GXAKVVMNRYKKLXXXXXXXXXFYLVSIANLKTPA

SEQ ID NO: 5070 - protein, 40 aa, Artificial Sequence
  Non-cyclic GFR-binding peptide
  MOD_RES (1)..(35)..(36): Xaa is C or S
  MOD_RES (13)..(14)..(15)..(16)..(17): Xaa is A or G
  MOD_RES (18)..(19)..(20)..(21): Xaa is A or G or absent
XAKVVMNQYNKLXXXXXXXXXLYLVSIASLKTPAXXAKPV

SEQ ID NO: 5071 - protein, 35 aa, Artificial Sequence
  Non-cyclic GFR-binding peptide
  MOD_RES (31)..(32): Xaa is C or S
SKVIMYHYKLIKPTKGIKYLISIPSLDQSVXXPSA

SEQ ID NO: 5072 - protein, 40 aa, Artificial Sequence
  Non-cyclic GFR-binding peptide
  MOD_RES (2)..(4): Xaa is C or S
  MOD_RES (17)..(18)..(19)..(20)..(21): Xaa is A or G
  MOD_RES (22)..(23)..(24)..(25): Xaa is A or G or absent
EXKXALHDELTRHKRLXXXXXXXXXYYLVSTASLQVQTPR

SEQ ID NO: 5073 - protein, 40 aa, Artificial Sequence
  Non-cyclic GFR-binding peptide
  MOD_RES (1)..(3)..(37)..(38): Xaa is C or S
  MOD_RES (15)..(16)..(17)..(18)..(19): Xaa is A or G
  MOD_RES (20)..(21)..(22)..(23): Xaa is A or G or absent
XGXGEVVMERYKKLXXXXXXXXXFYLMSIANLETPVXXAK

SEQ ID NO: 5074 - protein, 35 aa, Artificial Sequence
  Non-cyclic GFR-binding peptide
  MOD_RES (33)..(34): Xaa is C or S
  MOD_RES (11)..(12)..(13)..(14)..(15): Xaa is A or G
  MOD_RES (16)..(17)..(18)..(19): Xaa is A or G or absent
EVVMDYHYKLXXXXXXXXXKYLMSIPSLETPVXXA

SEQ ID NO: 5075 - protein, 31 aa, Artificial Sequence
  Non-cyclic GFR-binding peptide
ARVVMNQYNKLIVNSSDDLYLVSIASLQTPA

SEQ ID NO: 5076 - protein, 36 aa, Artificial Sequence
  Non-cyclic GFR-binding peptide
  MOD_RES (1)..(3)..(36): Xaa is C or S
  MOD_RES (14)..(15)..(16)..(17)..(18): Xaa is A or G
  MOD_RES (19)..(20)..(21)..(22): Xaa is A or G or absent
XKXSRVIMQYNKLXXXXXXXXXLYLISIASLAQPVX

SEQ ID NO: 5077 - protein, 33 aa, Artificial Sequence
  Non-cyclic GFR-binding peptide
  MOD_RES (1)..(33): Xaa is C or S
XARVVMNRHKRLIVNSSDDYYLVSTASLQTPAX

SEQ ID NO: 5078 - protein, 39 aa, Artificial Sequence
  Non-cyclic GFR-binding peptide
  MOD_RES (33)..(34): Xaa is C or S
  MOD_RES (11)..(12)..(13)..(14)..(15): Xaa is A or G
  MOD_RES (16)..(17)..(18)..(19): Xaa is A or G or absent
RVVMNYHYKLXXXXXXXXXKYLVSIPSLKTPAXXPKPVY

SEQ ID NO: 5079 - protein, 43 aa, Artificial Sequence
  Non-cyclic GFR-binding peptide
  MOD_RES (2)..(4)..(41): Xaa is C or S
  MOD_RES (17)..(18)..(19)..(20)..(21): Xaa is A or G
  MOD_RES (22)..(23)..(24)..(25): Xaa is A or G or absent
EXKXALHDELTRYKKLXXXXXXXXXFYLVSIANLQVQTPRXQV

SEQ ID NO: 5080 - protein, 34 aa, Artificial Sequence
  Non-cyclic GFR-binding peptide
  MOD_RES (2)..(4): Xaa is C or S
SXKXSKVVMRYKKLVKPTRGVFYLISIANLDQPV

SEQ ID NO: 5081 - protein, 41 aa, Artificial Sequence
  Non-cyclic GFR-binding peptide
  MOD_RES (2)..(4)..(38): Xaa is C or S
  MOD_RES (16)..(17)..(18)..(19)..(20): Xaa is A or G
  MOD_RES (21)..(22)..(23)..(24): Xaa is A or G or absent
HXGXSRVVMNYHYKLXXXXXXXXXKYLVSIPSLKTPAXTPK

SEQ ID NO: 5082 - protein, 37 aa, Artificial Sequence
  Non-cyclic GFR-binding peptide
  MOD_RES (1)..(3): Xaa is C or S
XKXALHDELTYHYKLFIPKKRVIEKYLVSIPSLQVQT

SEQ ID NO: 5083 - protein, 37 aa, Artificial Sequence
  Non-cyclic GFR-binding peptide
  MOD_RES (1)..(3)..(35)..(36): Xaa is C or S
XGXSRVVMNYHYKLIVNSSDDKYLVSIPSLKTPAXXP

SEQ ID NO: 5084 - protein, 37 aa, Artificial Sequence
  Non-cyclic GFR-binding peptide
  MOD_RES (1)..(33)..(34): Xaa is C or S
XSRVVMNRHKRLIVNSSDDYYLVSTASLKTPAXXPKP

SEQ ID NO: 5085 - protein, 32 aa, Artificial Sequence
  Non-cyclic GFR-binding peptide
  MOD_RES (31)..(32): Xaa is C or S
SKVVMRHKRLVKPTRGVYYLISTASLDQPVXX

SEQ ID NO: 5086 - protein, 35 aa, Artificial Sequence
  Non-cyclic GFR-binding peptide
  MOD_RES (1)..(35): Xaa is C or S
  MOD_RES (13)..(14)..(15)..(16)..(17): Xaa is A or G
  MOD_RES (18)..(19)..(20)..(21): Xaa is A or G or absent
XGEVVMEYHYKLXXXXXXXXXKYLMSIPSLETPVX

SEQ ID NO: 5087 - protein, 42 aa, Artificial Sequence
  Non-cyclic GFR-binding peptide
  MOD_RES (2)..(4)..(39)..(40): Xaa is C or S
  MOD_RES (17)..(18)..(19)..(20)..(21): Xaa is A or G
  MOD_RES (22)..(23)..(24)..(25): Xaa is A or G or absent
RXGXEAVSMGERYKKLXXXXXXXXXFYLVSIANLKTPVXXAK

SEQ ID NO: 5088 - protein, 42 aa, Artificial Sequence
  Non-cyclic GFR-binding peptide
  MOD_RES (1)..(3)..(37)..(38): Xaa is C or S
  MOD_RES (15)..(16)..(17)..(18)..(19): Xaa is A or G
  MOD_RES (20)..(21)..(22)..(23): Xaa is A or G or absent
XGXARVVMNRHKRLXXXXXXXXXYYLVSTASLQTPAXXPKPV

SEQ ID NO: 5089 - protein, 40 aa, Artificial Sequence
  Non-cyclic GFR-binding peptide
  MOD_RES (1)..(3)..(35)..(36): Xaa is C or S
XGXARVVMNYHYKLIVNSSDDKYLVSIPSLQTPAXXPKPV

SEQ ID NO: 5090 - protein, 40 aa, Artificial Sequence
  Non-cyclic GFR-binding peptide
  MOD_RES (1)..(38): Xaa is C or S
XALHDELTYHYKLFIPKKRVIEKYLVSIPSLQVQTPRXQV

SEQ ID NO: 5091 - protein, 38 aa, Artificial Sequence
  Non-cyclic GFR-binding peptide
  MOD_RES (2)..(37)..(38): Xaa is C or S
  MOD_RES (15)..(16)..(17)..(18)..(19): Xaa is A or G
  MOD_RES (20)..(21)..(22)..(23): Xaa is A or G or absent
GXEAVSMGEQYNKLXXXXXXXXXLYLVSIASLKTPVXX

SEQ ID NO: 5092 - protein, 38 aa, Artificial Sequence
  Non-cyclic GFR-binding peptide
  MOD_RES (34)..(35): Xaa is C or S
  MOD_RES (12)..(13)..(14)..(15)..(16): Xaa is A or G
  MOD_RES (17)..(18)..(19)..(20): Xaa is A or G or absent
GEVVMDRHKRLXXXXXXXXXYYLMSTASLETPVXXAKP

SEQ ID NO: 5093 - protein, 39 aa, Artificial Sequence
  Non-cyclic GFR-binding peptide
  MOD_RES (1)..(3)..(37)..(38): Xaa is C or S
  MOD_RES (15)..(16)..(17)..(18)..(19): Xaa is A or G
  MOD_RES (20)..(21)..(22)..(23): Xaa is A or G or absent
XGXGEVVMEYHYKLXXXXXXXXXKYLMSIPSLETPVXXA

SEQ ID NO: 5094 - protein, 38 aa, Artificial Sequence
  Non-cyclic GFR-binding peptide
  MOD_RES (33)..(33): Xaa is C or S
  MOD_RES (11)..(12)..(13)..(14)..(15): Xaa is A or G
  MOD_RES (16)..(17)..(18)..(19): Xaa is A or G or absent
RVVMNQYNKLXXXXXXXXXLYLVSIASLKTPAXTPKTV

SEQ ID NO: 5095 - protein, 33 aa, Artificial Sequence
  Non-cyclic GFR-binding peptide
  MOD_RES (12)..(13)..(14)..(15)..(16): Xaa is A or G
  MOD_RES (17)..(18)..(19)..(20): Xaa is A or G or absent
AKVVMNRYKKLXXXXXXXXXFYLVSIANLKTPA

SEQ ID NO: 5096 - protein, 35 aa, Artificial Sequence
  Non-cyclic GFR-binding peptide
  MOD_RES (2)..(33)..(34): Xaa is C or S
KXSKVVMQYNKLVKPTRGVLYLISIASLDQPVXXP

SEQ ID NO: 5097 - protein, 36 aa, Artificial Sequence
  Non-cyclic GFR-binding peptide
  MOD_RES (34)..(35): Xaa is C or S
  MOD_RES (12)..(13)..(14)..(15)..(16): Xaa is A or G
  MOD_RES (17)..(18)..(19)..(20): Xaa is A or G or absent
GEVVMDRYKKLXXXXXXXXXFYLMSIANLETPVXXA

SEQ ID NO: 5098 - protein, 42 aa, Artificial Sequence
  Non-cyclic GFR-binding peptide
  MOD_RES (1)..(3)..(37)..(38): Xaa is C or S
  MOD_RES (15)..(16)..(17)..(18)..(19): Xaa is A or G
  MOD_RES (20)..(21)..(22)..(23): Xaa is A or G or absent
XGXGEVVMERYKKLXXXXXXXXXFYLMSIANLETPVXXAKPI

SEQ ID NO: 5099 - protein, 34 aa, Artificial Sequence
  Non-cyclic GFR-binding peptide
  MOD_RES (11)..(12)..(13)..(14)..(15): Xaa is A or G
  MOD_RES (16)..(17)..(18)..(19): Xaa is A or G or absent
HDELTRHKRLXXXXXXXXXYYLVSTASLQVQTPR

SEQ ID NO: 5100 - protein, 34 aa, Artificial Sequence
  Non-cyclic GFR-binding peptide
  MOD_RES (33)..(34): Xaa is C or S
  MOD_RES (11)..(12)..(13)..(14)..(15): Xaa is A or G
  MOD_RES (16)..(17)..(18)..(19): Xaa is A or G or absent
SRVIMYHYKLXXXXXXXXXKYLISIPSLAQPVXX

SEQ ID NO: 5101 - protein, 38 aa, Artificial Sequence
  Non-cyclic GFR-binding peptide
  MOD_RES (1)..(3)..(37)..(38): Xaa is C or S
  MOD_RES (15)..(16)..(17)..(18)..(19): Xaa is A or G
  MOD_RES (20)..(21)..(22)..(23): Xaa is A or G or absent
XGXGEVVMDRYKKLXXXXXXXXXFYLMSIANLETPVXX

SEQ ID NO: 5102 - protein, 34 aa, Artificial Sequence
  Non-cyclic GFR-binding peptide
  MOD_RES (1)..(32)..(33): Xaa is C or S
XSKVIMYHYKLIKPTKGIKYLISIPSLDQSVXXP

SEQ ID NO: 5103 - protein, 40 aa, Artificial Sequence
  Non-cyclic GFR-binding peptide
  MOD_RES (2)..(35)..(36): Xaa is C or S
  MOD_RES (13)..(14)..(15)..(16)..(17): Xaa is A or G
  MOD_RES (18)..(19)..(20)..(21): Xaa is A or G or absent
KXSRVIMYHYKLXXXXXXXXXKYLISIPSLAQPVXXPAAS

SEQ ID NO: 5104 - protein, 39 aa, Artificial Sequence
  Non-cyclic GFR-binding peptide
  MOD_RES (2)..(4)..(38)..(39): Xaa is C or S
  MOD_RES (16)..(17)..(18)..(19)..(20): Xaa is A or G
  MOD_RES (21)..(22)..(23)..(24): Xaa is A or G or absent
RXGXGEVVMDYHYKLXXXXXXXXXKYLMSIPSLETPVXX

SEQ ID NO: 5105 - protein, 32 aa, Artificial Sequence
  Non-cyclic GFR-binding peptide
  MOD_RES (31)..(32): Xaa is C or S
KVVMNQYNKLIVNNSSDLYLVSIASLKTPAXX

SEQ ID NO: 5106 - protein, 35 aa, Artificial Sequence
  Non-cyclic GFR-binding peptide
  MOD_RES (33)..(34): Xaa is C or S
  MOD_RES (11)..(12)..(13)..(14)..(15): Xaa is A or G
  MOD_RES (16)..(17)..(18)..(19): Xaa is A or G or absent
RVVMNQYNKLXXXXXXXXXLYLVSIASLKTPAXXP

SEQ ID NO: 5107 - protein, 39 aa, Artificial Sequence
  Non-cyclic GFR-binding peptide
  MOD_RES (1)..(3): Xaa is C or S
  MOD_RES (16)..(17)..(18)..(19)..(20): Xaa is A or G
  MOD_RES (21)..(22)..(23)..(24): Xaa is A or G or absent
XKXALHDELTQYNKLXXXXXXXXXLYLVSIASLQVQTPR

SEQ ID NO: 5108 - protein, 37 aa, Artificial Sequence
  Non-cyclic GFR-binding peptide
  MOD_RES (2)..(35)..(36): Xaa is C or S
  MOD_RES (13)..(14)..(15)..(16)..(17): Xaa is A or G
  MOD_RES (18)..(19)..(20)..(21): Xaa is A or G or absent
KXSKVIMRYKKLXXXXXXXXXFYLISIANLDQSVXXP

SEQ ID NO: 5109 - protein, 37 aa, Artificial Sequence
  Non-cyclic GFR-binding peptide
  MOD_RES (33)..(34): Xaa is C or S
EAVSMGEQYNKLTPVGMDDLYLVSIASLKTPVXXAKG

SEQ ID NO: 5110 - protein, 33 aa, Artificial Sequence
  Non-cyclic GFR-binding peptide
  MOD_RES (12)..(13)..(14)..(15)..(16): Xaa is A or G
  MOD_RES (17)..(18)..(19)..(20): Xaa is A or G or absent
AKVVMNQYNKLXXXXXXXXXLYLVSIASLKTPA

SEQ ID NO: 5111 - protein, 37 aa, Artificial Sequence
  Non-cyclic GFR-binding peptide
  MOD_RES (1)..(3)..(36)..(37): Xaa is C or S
  MOD_RES (14)..(15)..(16)..(17)..(18): Xaa is A or G
  MOD_RES (19)..(20)..(21)..(22): Xaa is A or G or absent
XKXSKVIMRYKKLXXXXXXXXXFYLISIANLDQSVXX

SEQ ID NO: 5112 - protein, 33 aa, Artificial Sequence
  Non-cyclic GFR-binding peptide
  MOD_RES (1)..(33): Xaa is C or S
XGEVVMEYHYKLVVKDYEDKYLMSIPSLETPVX

SEQ ID NO: 5113 - protein, 41 aa, Artificial Sequence
  Non-cyclic GFR-binding peptide
  MOD_RES (1)..(3)..(36)..(37): Xaa is C or S
  MOD_RES (14)..(15)..(16)..(17)..(18): Xaa is A or G
  MOD_RES (19)..(20)..(21)..(22): Xaa is A or G or absent
XKXSKVIMYHYKLXXXXXXXXXKYLISIPSLDQSVXXPSAS

SEQ ID NO: 5114 - protein, 36 aa, Artificial Sequence
  Non-cyclic GFR-binding peptide
  MOD_RES (1)..(3)..(36): Xaa is C or S
  MOD_RES (14)..(15)..(16)..(17)..(18): Xaa is A or G
  MOD_RES (19)..(20)..(21)..(22): Xaa is A or G or absent
XKXSRVIMRHKRLXXXXXXXXXYYLISTASLAQPVX

SEQ ID NO: 5115 - protein, 45 aa, Artificial Sequence
  Non-cyclic GFR-binding peptide
  MOD_RES (2)..(4)..(41): Xaa is C or S
  MOD_RES (17)..(18)..(19)..(20)..(21): Xaa is A or G
  MOD_RES (22)..(23)..(24)..(25): Xaa is A or G or absent
EXKXALHDELTRHKRLXXXXXXXXXYYLVSTASLQVQTPRXQVNR

SEQ ID NO: 5116 - protein, 37 aa, Artificial Sequence
  Non-cyclic GFR-binding peptide
  MOD_RES (1)..(34)..(35): Xaa is C or S
  MOD_RES (12)..(13)..(14)..(15)..(16): Xaa is A or G
  MOD_RES (17)..(18)..(19)..(20): Xaa is A or G or absent
XSKVVMRYKKLXXXXXXXXXFYLISIANLDQPVXXPS

SEQ ID NO: 5117 - protein, 41 aa, Artificial Sequence
  Non-cyclic GFR-binding peptide
  MOD_RES (1)..(3)..(38)..(39): Xaa is C or S
  MOD_RES (16)..(17)..(18)..(19)..(20): Xaa is A or G
  MOD_RES (21)..(22)..(23)..(24): Xaa is A or G or absent
XGXEAVSMGERYKKLXXXXXXXXXFYLVSIANLKTPVXXAK

SEQ ID NO: 5118 - protein, 40 aa, Artificial Sequence
  Non-cyclic GFR-binding peptide
  MOD_RES (2)..(4)..(36)..(37): Xaa is C or S
HXGXARVVMNRHKRLIVNSSDDYYLVSTASLQTPAXXPKP

SEQ ID NO: 5119 - protein, 33 aa, Artificial Sequence
  Non-cyclic GFR-binding peptide
  MOD_RES (33)..(33): Xaa is C or S
  MOD_RES (11)..(12)..(13)..(14)..(15): Xaa is A or G
  MOD_RES (16)..(17)..(18)..(19): Xaa is A or G or absent
SKVVMYHYKLXXXXXXXXXKYLISIPSLDQPVX

SEQ ID NO: 5120 - protein, 39 aa, Artificial Sequence
  Non-cyclic GFR-binding peptide
  MOD_RES (2)..(4)..(36)..(37): Xaa is C or S
HXGXARVVMNYHYKLIVNSSDDKYLVSIPSLQTPAXXPK

SEQ ID NO: 5121 - protein, 34 aa, Artificial Sequence
  Non-cyclic GFR-binding peptide
  MOD_RES (1)..(33)..(34): Xaa is C or S
XARVVMNRHKRLIVNSSDDYYLVSTASLQTPAXX

SEQ ID NO: 5122 - protein, 43 aa, Artificial Sequence
  Non-cyclic GFR-binding peptide
  MOD_RES (1)..(3)..(37)..(38): Xaa is C or S
  MOD_RES (15)..(16)..(17)..(18)..(19): Xaa is A or G
  MOD_RES (20)..(21)..(22)..(23): Xaa is A or G or absent
XGXSRVVMNYHYKLXXXXXXXXXKYLVSIPSLKTPAXXPKPVY

SEQ ID NO: 5123 - protein, 38 aa, Artificial Sequence
  Non-cyclic GFR-binding peptide
  MOD_RES (2)..(2): Xaa is C or S
KXALHDELTYHYKLFIPKKRVIEKYLVSIPSLQVQTPR

SEQ ID NO: 5124 - protein, 39 aa, Artificial Sequence
  Non-cyclic GFR-binding peptide
  MOD_RES (33)..(34): Xaa is C or S
  MOD_RES (11)..(12)..(13)..(14)..(15): Xaa is A or G
  MOD_RES (16)..(17)..(18)..(19): Xaa is A or G or absent
SKVIMQYNKLXXXXXXXXXLYLISIASLDQSVXXPSASA

SEQ ID NO: 5125 - protein, 36 aa, Artificial Sequence
  Non-cyclic GFR-binding peptide
  MOD_RES (1)..(3)..(36): Xaa is C or S
  MOD_RES (14)..(15)..(16)..(17)..(18): Xaa is A or G
  MOD_RES (19)..(20)..(21)..(22): Xaa is A or G or absent
XKXSRVIMRYKKLXXXXXXXXXFYLISIANLAQPVX

SEQ ID NO: 5126 - protein, 38 aa, Artificial Sequence
  Non-cyclic GFR-binding peptide
  MOD_RES (2)..(33)..(34): Xaa is C or S
KXSKVIMRYKKLIKPTKGIFYLISIANLDQSVXXPSAS

SEQ ID NO: 5127 - protein, 36 aa, Artificial Sequence
  Non-cyclic GFR-binding peptide
  MOD_RES (2)..(4)..(36): Xaa is C or S
RXGXGEVVMERYKKLVVKDYEDFYLMSIANLETPVX

SEQ ID NO: 5128 - protein, 37 aa, Artificial Sequence
  Non-cyclic GFR-binding peptide
  MOD_RES (2)..(33)..(34): Xaa is C or S
KXSRVIMRYKKLVKPKRGVFYLISIANLAQPVXXPAA

SEQ ID NO: 5129 - protein, 36 aa, Artificial Sequence
  Non-cyclic GFR-binding peptide
  MOD_RES (31)..(31): Xaa is C or S
RVVMNRHKRLIVNSSDDYYLVSTASLKTPAXTPKTV

SEQ ID NO: 5130 - protein, 41 aa, Artificial Sequence
  Non-cyclic GFR-binding peptide
  MOD_RES (1)..(35)..(36): Xaa is C or S
  MOD_RES (13)..(14)..(15)..(16)..(17): Xaa is A or G
  MOD_RES (18)..(19)..(20)..(21): Xaa is A or G or absent
XGEVVMDYHYKLXXXXXXXXXKYLMSIPSLETPVXXAKPIK

SEQ ID NO: 5131 - protein, 34 aa, Artificial Sequence
  Non-cyclic GFR-binding peptide
  MOD_RES (31)..(32): Xaa is C or S
SRVIMRYKKLVKPKRGVFYLISIANLAQPVXXPA

SEQ ID NO: 5132 - protein, 34 aa, Artificial Sequence
  Non-cyclic GFR-binding peptide
  MOD_RES (1)..(1): Xaa is C or S
  MOD_RES (13)..(14)..(15)..(16)..(17): Xaa is A or G
  MOD_RES (18)..(19)..(20)..(21): Xaa is A or G or absent
XARVVMNQYNKLXXXXXXXXXLYLVSIASLQTPA

SEQ ID NO: 5133 - protein, 41 aa, Artificial Sequence
  Non-cyclic GFR-binding peptide
  MOD_RES (1)..(35)..(36): Xaa is C or S
  MOD_RES (13)..(14)..(15)..(16)..(17): Xaa is A or G
  MOD_RES (18)..(19)..(20)..(21): Xaa is A or G or absent
XAKVVMNQYNKLXXXXXXXXXLYLVSIASLKTPAXXAKPVA

SEQ ID NO: 5134 - protein, 40 aa, Artificial Sequence
  Non-cyclic GFR-binding peptide
  MOD_RES (2)..(4)..(36)..(37): Xaa is C or S
HXGXARVVMNQYNKLIVNSSDDLYLVSIASLQTPAXXPKP

SEQ ID NO: 5135 - protein, 37 aa, Artificial Sequence
  Non-cyclic GFR-binding peptide
  MOD_RES (33)..(34): Xaa is C or S
  MOD_RES (11)..(12)..(13)..(14)..(15): Xaa is A or G
  MOD_RES (16)..(17)..(18)..(19): Xaa is A or G or absent
SKVIMRYKKLXXXXXXXXXFYLISIANLDQSVXXPSA

SEQ ID NO: 5136 - protein, 32 aa, Artificial Sequence
  Non-cyclic GFR-binding peptide
  MOD_RES (1)..(32): Xaa is C or S
XSKVVMRHKRLVKPTRGVYYLISTASLDQPVX

SEQ ID NO: 5137 - protein, 42 aa, Artificial Sequence
  Non-cyclic GFR-binding peptide
  MOD_RES (1)..(3)..(40): Xaa is C or S
  MOD_RES (16)..(17)..(18)..(19)..(20): Xaa is A or G
  MOD_RES (21)..(22)..(23)..(24): Xaa is A or G or absent
XKXALHDELTRHKRLXXXXXXXXXYYLVSTASLQVQTPRXQV

SEQ ID NO: 5138 - protein, 41 aa, Artificial Sequence
  Non-cyclic GFR-binding peptide
  MOD_RES (2)..(35)..(36): Xaa is C or S
  MOD_RES (13)..(14)..(15)..(16)..(17): Xaa is A or G
  MOD_RES (18)..(19)..(20)..(21): Xaa is A or G or absent
KXSKVIMYHYKLXXXXXXXXXKYLISIPSLDQSVXXPSASA

SEQ ID NO: 5139 - protein, 41 aa, Artificial Sequence
  Non-cyclic GFR-binding peptide
  MOD_RES (1)..(3)..(36)..(37): Xaa is C or S
  MOD_RES (14)..(15)..(16)..(17)..(18): Xaa is A or G
  MOD_RES (19)..(20)..(21)..(22): Xaa is A or G or absent
XKXSRVIMYHYKLXXXXXXXXXKYLISIPSLAQPVXXPAAS

SEQ ID NO: 5140 - protein, 39 aa, Artificial Sequence
  Non-cyclic GFR-binding peptide
  MOD_RES (2)..(39): Xaa is C or S
  MOD_RES (15)..(16)..(17)..(18)..(19): Xaa is A or G
  MOD_RES (20)..(21)..(22)..(23): Xaa is A or G or absent
KXALHDELTYHYKLXXXXXXXXXKYLVSIPSLQVQTPRX

SEQ ID NO: 5141 - protein, 40 aa, Artificial Sequence
  Non-cyclic GFR-binding peptide
  MOD_RES (1)..(3)..(37)..(38): Xaa is C or S
  MOD_RES (15)..(16)..(17)..(18)..(19): Xaa is A or G
  MOD_RES (20)..(21)..(22)..(23): Xaa is A or G or absent
XGXGEVVMDRHKRLXXXXXXXXXYYLMSTASLETPVXXAK

SEQ ID NO: 5142 - protein, 38 aa, Artificial Sequence
  Non-cyclic GFR-binding peptide
  MOD_RES (2)..(36)..(37): Xaa is C or S
  MOD_RES (14)..(15)..(16)..(17)..(18): Xaa is A or G
  MOD_RES (19)..(20)..(21)..(22): Xaa is A or G or absent
GXARVVMNRHKRLXXXXXXXXXYYLVSTASLQTPAXXP

SEQ ID NO: 5143 - protein, 36 aa, Artificial Sequence
  Non-cyclic GFR-binding peptide
  MOD_RES (34)..(35): Xaa is C or S
  MOD_RES (12)..(13)..(14)..(15)..(16): Xaa is A or G
  MOD_RES (17)..(18)..(19)..(20): Xaa is A or G or absent
ARVVMNQYNKLXXXXXXXXXLYLVSIASLQTPAXXP

SEQ ID NO: 5144 - protein, 40 aa, Artificial Sequence
  Non-cyclic GFR-binding peptide
  MOD_RES (2)..(4)..(38)..(39): Xaa is C or S
  MOD_RES (16)..(17)..(18)..(19)..(20): Xaa is A or G
  MOD_RES (21)..(22)..(23)..(24): Xaa is A or G or absent
HXGXARVVMNYHYKLXXXXXXXXXKYLVSIPSLQTPAXXP

SEQ ID NO: 5145 - protein, 31 aa, Artificial Sequence
  Non-cyclic GFR-binding peptide
  MOD_RES (1)..(1): Xaa is C or S
XSKVVMRHKRLVKPTRGVYYLISTASLDQPV

SEQ ID NO: 5146 - protein, 41 aa, Artificial Sequence
  Non-cyclic GFR-binding peptide
  MOD_RES (2)..(4)..(35)..(36): Xaa is C or S
SXKXSKVIMRYKKLIKPTKGIFYLISIANLDQSVXXPSASA

SEQ ID NO: 5147 - protein, 35 aa, Artificial Sequence
  Non-cyclic GFR-binding peptide
  MOD_RES (33)..(34): Xaa is C or S
  MOD_RES (11)..(12)..(13)..(14)..(15): Xaa is A or G
  MOD_RES (16)..(17)..(18)..(19): Xaa is A or G or absent
RVVMNYHYKLXXXXXXXXXKYLVSIPSLKTPAXXP

SEQ ID NO: 5148 - protein, 35 aa, Artificial Sequence
  Non-cyclic GFR-binding peptide
  MOD_RES (1)..(1): Xaa is C or S
  MOD_RES (14)..(15)..(16)..(17)..(18): Xaa is A or G
  MOD_RES (19)..(20)..(21)..(22): Xaa is A or G or absent
XALHDELTYHYKLXXXXXXXXXKYLVSIPSLQVQT

SEQ ID NO: 5149 - protein, 39 aa, Artificial Sequence
  Non-cyclic GFR-binding peptide
  MOD_RES (2)..(4)..(35)..(36): Xaa is C or S
SXKXSRVIMRYKKLVKPKRGVFYLISIANLAQPVXXPAA

SEQ ID NO: 5150 - protein, 36 aa, Artificial Sequence
  Non-cyclic GFR-binding peptide
  MOD_RES (1)..(3)..(35)..(36): Xaa is C or S
XGXAKVVMNQYNKLIVNNSSDLYLVSIASLKTPAXX

SEQ ID NO: 5151 - protein, 34 aa, Artificial Sequence
  Non-cyclic GFR-binding peptide
  MOD_RES (1)..(1): Xaa is C or S
  MOD_RES (13)..(14)..(15)..(16)..(17): Xaa is A or G
  MOD_RES (18)..(19)..(20)..(21): Xaa is A or G or absent
XAKVVMNYHYKLXXXXXXXXXKYLVSIPSLKTPA

SEQ ID NO: 5152 - protein, 33 aa, Artificial Sequence
  Non-cyclic GFR-binding peptide
  MOD_RES (2)..(2): Xaa is C or S
GXARVVMNQYNKLIVNSSDDLYLVSIASLQTPA

SEQ ID NO: 5153 - protein, 37 aa, Artificial Sequence
  Non-cyclic GFR-binding peptide
  MOD_RES (33)..(34): Xaa is C or S
  MOD_RES (11)..(12)..(13)..(14)..(15): Xaa is A or G
  MOD_RES (16)..(17)..(18)..(19): Xaa is A or G or absent
EVVMERYKKLXXXXXXXXXFYLMSIANLETPVXXAKP

SEQ ID NO: 5154 - protein, 40 aa, Artificial Sequence
  Non-cyclic GFR-binding peptide
  MOD_RES (1)..(36)..(37): Xaa is C or S
  MOD_RES (14)..(15)..(16)..(17)..(18): Xaa is A or G
  MOD_RES (19)..(20)..(21)..(22): Xaa is A or G or absent
XEAVSMGEQYNKLXXXXXXXXXLYLVSIASLKTPVXXAKG

SEQ ID NO: 5155 - protein, 40 aa, Artificial Sequence
  Non-cyclic GFR-binding peptide
  MOD_RES (1)..(3)..(35)..(36): Xaa is C or S
XGXGEVVMDRYKKLVVKENEDFYLMSIANLETPVXXAKPI

SEQ ID NO: 5156 - protein, 39 aa, Artificial Sequence
  Non-cyclic GFR-binding peptide
  MOD_RES (1)..(34)..(35): Xaa is C or S
XEAVSMGERHKRLTPVGMDDYYLVSTASLKTPVXXAKGV

SEQ ID NO: 5157 - protein, 34 aa, Artificial Sequence
  Non-cyclic GFR-binding peptide
  MOD_RES (31)..(32): Xaa is C or S
EVVMDYHYKLVVKENEDKYLMSIPSLETPVXXAK

SEQ ID NO: 5158 - protein, 39 aa, Artificial Sequence
  Non-cyclic GFR-binding peptide
  MOD_RES (2)..(34)..(35): Xaa is C or S
GXGEVVMERHKRLVVKDYEDYYLMSTASLETPVXXAKPI

SEQ ID NO: 5159 - protein, 39 aa, Artificial Sequence
  Non-cyclic GFR-binding peptide
  MOD_RES (33)..(34): Xaa is C or S
  MOD_RES (11)..(12)..(13)..(14)..(15): Xaa is A or G
  MOD_RES (16)..(17)..(18)..(19): Xaa is A or G or absent
SKVVMRYKKLXXXXXXXXXFYLISIANLDQPVXXPSASA

SEQ ID NO: 5160 - protein, 34 aa, Artificial Sequence
  Non-cyclic GFR-binding peptide
  MOD_RES (33)..(34): Xaa is C or S
  MOD_RES (11)..(12)..(13)..(14)..(15): Xaa is A or G
  MOD_RES (16)..(17)..(18)..(19): Xaa is A or G or absent
SKVIMYHYKLXXXXXXXXXKYLISIPSLDQSVXX

SEQ ID NO: 5161 - protein, 39 aa, Artificial Sequence
  Non-cyclic GFR-binding peptide
  MOD_RES (36)..(36): Xaa is C or S
  MOD_RES (12)..(13)..(14)..(15)..(16): Xaa is A or G
  MOD_RES (17)..(18)..(19)..(20): Xaa is A or G or absent
LHDELTRYKKLXXXXXXXXXFYLVSIANLQVQTPRXQVN

SEQ ID NO: 5162 - protein, 36 aa, Artificial Sequence
  Non-cyclic GFR-binding peptide
  MOD_RES (2)..(2): Xaa is C or S
  MOD_RES (15)..(16)..(17)..(18)..(19): Xaa is A or G
  MOD_RES (20)..(21)..(22)..(23): Xaa is A or G or absent
GXEAVSMGEQYNKLXXXXXXXXXLYLVSIASLKTPV

SEQ ID NO: 5163 - protein, 38 aa, Artificial Sequence
  Non-cyclic GFR-binding peptide
  MOD_RES (2)..(4): Xaa is C or S
  MOD_RES (17)..(18)..(19)..(20)..(21): Xaa is A or G
  MOD_RES (22)..(23)..(24)..(25): Xaa is A or G or absent
EXKXALHDELTQYNKLXXXXXXXXXLYLVSIASLQVQT

SEQ ID NO: 5164 - protein, 39 aa, Artificial Sequence
  Non-cyclic GFR-binding peptide
  MOD_RES (1)..(3)..(38)..(39): Xaa is C or S
  MOD_RES (16)..(17)..(18)..(19)..(20): Xaa is A or G
  MOD_RES (21)..(22)..(23)..(24): Xaa is A or G or absent
XGXEAVSMGERYKKLXXXXXXXXXFYLVSIANLKTPVXX

SEQ ID NO: 5165 - protein, 36 aa, Artificial Sequence
  Non-cyclic GFR-binding peptide
  MOD_RES (31)..(32): Xaa is C or S
EVVMEYHYKLVVKDYEDKYLMSIPSLETPVXXAKPI

SEQ ID NO: 5166 - protein, 39 aa, Artificial Sequence
  Non-cyclic GFR-binding peptide
  MOD_RES (2)..(37)..(38): Xaa is C or S
  MOD_RES (15)..(16)..(17)..(18)..(19): Xaa is A or G
  MOD_RES (20)..(21)..(22)..(23): Xaa is A or G or absent
GXEAVSMGERHKRLXXXXXXXXXYYLVSTASLKTPVXXA

SEQ ID NO: 5167 - protein, 42 aa, Artificial Sequence
  Non-cyclic GFR-binding peptide
  MOD_RES (1)..(3)..(36)..(37): Xaa is C or S
  MOD_RES (14)..(15)..(16)..(17)..(18): Xaa is A or G
  MOD_RES (19)..(20)..(21)..(22): Xaa is A or G or absent
XKXSKVVMRYKKLXXXXXXXXXFYLISIANLDQPVXXPSASA

SEQ ID NO: 5168 - protein, 43 aa, Artificial Sequence
  Non-cyclic GFR-binding peptide
  MOD_RES (2)..(4)..(37)..(38): Xaa is C or S
  MOD_RES (15)..(16)..(17)..(18)..(19): Xaa is A or G
  MOD_RES (20)..(21)..(22)..(23): Xaa is A or G or absent
SXKXSKVVMRYKKLXXXXXXXXXFYLISIANLDQPVXXPSASA

SEQ ID NO: 5169 - protein, 33 aa, Artificial Sequence
  Non-cyclic GFR-binding peptide
  MOD_RES (1)..(3): Xaa is C or S
XKXSKVVMRYKKLVKPTRGVFYLISIANLDQPV

SEQ ID NO: 5170 - protein, 40 aa, Artificial Sequence
  Non-cyclic GFR-binding peptide
  MOD_RES (1)..(35): Xaa is C or S
  MOD_RES (13)..(14)..(15)..(16)..(17): Xaa is A or G
  MOD_RES (18)..(19)..(20)..(21): Xaa is A or G or absent
XSRVVMNQYNKLXXXXXXXXXLYLVSIASLKTPAXTPKTV

SEQ ID NO: 5171 - protein, 41 aa, Artificial Sequence
  Non-cyclic GFR-binding peptide
  MOD_RES (2)..(4)..(36)..(37): Xaa is C or S
HXGXARVVMNYHYKLIVNSSDDKYLVSIPSLQTPAXXPKPV

SEQ ID NO: 5172 - protein, 35 aa, Artificial Sequence
  Non-cyclic GFR-binding peptide
  MOD_RES (2)..(2): Xaa is C or S
  MOD_RES (14)..(15)..(16)..(17)..(18): Xaa is A or G
  MOD_RES (19)..(20)..(21)..(22): Xaa is A or G or absent
GXGEVVMDRHKRLXXXXXXXXXYYLMSTASLETPV

SEQ ID NO: 5173 - protein, 39 aa, Artificial Sequence
  Non-cyclic GFR-binding peptide
  MOD_RES (1)..(36)..(37): Xaa is C or S
  MOD_RES (14)..(15)..(16)..(17)..(18): Xaa is A or G
  MOD_RES (19)..(20)..(21)..(22): Xaa is A or G or absent
XEAVSMGERHKRLXXXXXXXXXYYLVSTASLKTPVXXAK

SEQ ID NO: 5174 - protein, 39 aa, Artificial Sequence
  Non-cyclic GFR-binding peptide
  MOD_RES (1)..(3)..(35): Xaa is C or S
XGXSRVVMNQYNKLIVNSSDDLYLVSIASLKTPAXTPKT

SEQ ID NO: 5175 - protein, 41 aa, Artificial Sequence
  Non-cyclic GFR-binding peptide
  MOD_RES (2)..(4)..(38)..(39): Xaa is C or S
  MOD_RES (16)..(17)..(18)..(19)..(20): Xaa is A or G
  MOD_RES (21)..(22)..(23)..(24): Xaa is A or G or absent
RXGXGEVVMDYHYKLXXXXXXXXXKYLMSIPSLETPVXXAK

SEQ ID NO: 5176 - protein, 35 aa, Artificial Sequence
  Non-cyclic GFR-binding peptide
  MOD_RES (1)..(35): Xaa is C or S
  MOD_RES (13)..(14)..(15)..(16)..(17): Xaa is A or G
  MOD_RES (18)..(19)..(20)..(21): Xaa is A or G or absent
XAKVVMNYHYKLXXXXXXXXXKYLVSIPSLKTPAX

SEQ ID NO: 5177 - protein, 33 aa, Artificial Sequence
  Non-cyclic GFR-binding peptide
  MOD_RES (2)..(2): Xaa is C or S
GXSRVVMNQYNKLIVNSSDDLYLVSIASLKTPA

SEQ ID NO: 5178 - protein, 39 aa, Artificial Sequence
  Non-cyclic GFR-binding peptide
  MOD_RES (2)..(4)..(37)..(38): Xaa is C or S
  MOD_RES (15)..(16)..(17)..(18)..(19): Xaa is A or G
  MOD_RES (20)..(21)..(22)..(23): Xaa is A or G or absent
SXKXSRVIMYHYKLXXXXXXXXXKYLISIPSLAQPVXXP

SEQ ID NO: 5179 - protein, 36 aa, Artificial Sequence
  Non-cyclic GFR-binding peptide
  MOD_RES (1)..(3)..(35)..(36): Xaa is C or S
XGXARVVMNRHKRLIVNSSDDYYLVSTASLQTPAXX

SEQ ID NO: 5180 - protein, 36 aa, Artificial Sequence
  Non-cyclic GFR-binding peptide
  MOD_RES (33)..(34): Xaa is C or S
  MOD_RES (11)..(12)..(13)..(14)..(15): Xaa is A or G
  MOD_RES (16)..(17)..(18)..(19): Xaa is A or G or absent
SKVVMRYKKLXXXXXXXXXFYLISIANLDQPVXXPS

SEQ ID NO: 5181 - protein, 37 aa, Artificial Sequence
  Non-cyclic GFR-binding peptide
  MOD_RES (1)..(34)..(35): Xaa is C or S
  MOD_RES (12)..(13)..(14)..(15)..(16): Xaa is A or G
  MOD_RES (17)..(18)..(19)..(20): Xaa is A or G or absent
XSKVIMRYKKLXXXXXXXXXFYLISIANLDQSVXXPS

SEQ ID NO: 5182 - protein, 38 aa, Artificial Sequence
  Non-cyclic GFR-binding peptide
  MOD_RES (1)..(33)..(34): Xaa is C or S
XGEVVMDRHKRLVVKENEDYYLMSTASLETPVXXAKPI

SEQ ID NO: 5183 - protein, 40 aa, Artificial Sequence
  Non-cyclic GFR-binding peptide
  MOD_RES (37)..(37): Xaa is C or S
ALHDELTYHYKLFIPKKRVIEKYLVSIPSLQVQTPRXQVN

SEQ ID NO: 5184 - protein, 37 aa, Artificial Sequence
  Non-cyclic GFR-binding peptide
  MOD_RES (1)..(3)..(35): Xaa is C or S
XGXSRVVMNRHKRLIVNSSDDYYLVSTASLKTPAXTP

SEQ ID NO: 5185 - protein, 42 aa, Artificial Sequence
  Non-cyclic GFR-binding peptide
  MOD_RES (1)..(3)..(37): Xaa is C or S
  MOD_RES (15)..(16)..(17)..(18)..(19): Xaa is A or G
  MOD_RES (20)..(21)..(22)..(23): Xaa is A or G or absent
XGXSRVVMNRHKRLXXXXXXXXXYYLVSTASLKTPAXTPKTV

SEQ ID NO: 5186 - protein, 33 aa, Artificial Sequence
  Non-cyclic GFR-binding peptide
  MOD_RES (2)..(33): Xaa is C or S
KXSKVIMQYNKLIKPTKGILYLISIASLDQSVX

SEQ ID NO: 5187 - protein, 40 aa, Artificial Sequence
  Non-cyclic GFR-binding peptide
  MOD_RES (1)..(35)..(36): Xaa is C or S
  MOD_RES (13)..(14)..(15)..(16)..(17): Xaa is A or G
  MOD_RES (18)..(19)..(20)..(21): Xaa is A or G or absent
XARVVMNQYNKLXXXXXXXXXLYLVSIASLQTPAXXPKPV

SEQ ID NO: 5188 - protein, 35 aa, Artificial Sequence
  Non-cyclic GFR-binding peptide
  MOD_RES (1)..(3)..(35): Xaa is C or S
XGXGEVVMERYKKLVVKDYEDFYLMSIANLETPVX

SEQ ID NO: 5189 - protein, 39 aa, Artificial Sequence
  Non-cyclic GFR-binding peptide
  MOD_RES (34)..(35): Xaa is C or S
  MOD_RES (12)..(13)..(14)..(15)..(16): Xaa is A or G
  MOD_RES (17)..(18)..(19)..(20): Xaa is A or G or absent
AKVVMNRYKKLXXXXXXXXXFYLVSIANLKTPAXXAKPV

SEQ ID NO: 5190 - protein, 40 aa, Artificial Sequence
  Non-cyclic GFR-binding peptide
  MOD_RES (2)..(36)..(37): Xaa is C or S
  MOD_RES (14)..(15)..(16)..(17)..(18): Xaa is A or G
  MOD_RES (19)..(20)..(21)..(22): Xaa is A or G or absent
GXSRVVMNYHYKLXXXXXXXXXKYLVSIPSLKTPAXXPKP

SEQ ID NO: 5191 - protein, 37 aa, Artificial Sequence
  Non-cyclic GFR-binding peptide
  MOD_RES (1)..(3)..(36)..(37): Xaa is C or S
  MOD_RES (14)..(15)..(16)..(17)..(18): Xaa is A or G
  MOD_RES (19)..(20)..(21)..(22): Xaa is A or G or absent
XKXSRVIMRYKKLXXXXXXXXXFYLISIANLAQPVXX

SEQ ID NO: 5192 - protein, 37 aa, Artificial Sequence
  Non-cyclic GFR-binding peptide
  MOD_RES (2)..(34)..(35): Xaa is C or S
GXGEVVMDRYKKLVVKENEDFYLMSIANLETPVXXAK

SEQ ID NO: 5193 - protein, 37 aa, Artificial Sequence
  Non-cyclic GFR-binding peptide
  MOD_RES (1)..(35)..(36): Xaa is C or S
  MOD_RES (13)..(14)..(15)..(16)..(17): Xaa is A or G
  MOD_RES (18)..(19)..(20)..(21): Xaa is A or G or absent
XSRVVMNRHKRLXXXXXXXXXYYLVSTASLKTPAXXP

SEQ ID NO: 5194 - protein, 33 aa, Artificial Sequence
  Non-cyclic GFR-binding peptide
  MOD_RES (12)..(13)..(14)..(15)..(16): Xaa is A or G
  MOD_RES (17)..(18)..(19)..(20): Xaa is A or G or absent
SRVVMNQYNKLXXXXXXXXXLYLVSIASLKTPA

SEQ ID NO: 5195 - protein, 35 aa, Artificial Sequence
  Non-cyclic GFR-binding peptide
  MOD_RES (1)..(32)..(33): Xaa is C or S
XSRVIMRYKKLVKPKRGVFYLISIANLAQPVXXPA

SEQ ID NO: 5196 - protein, 43 aa, Artificial Sequence
  Non-cyclic GFR-binding peptide
  MOD_RES (2)..(4)..(39)..(40): Xaa is C or S
  MOD_RES (17)..(18)..(19)..(20)..(21): Xaa is A or G
  MOD_RES (22)..(23)..(24)..(25): Xaa is A or G or absent
RXGXEAVSMGERHKRLXXXXXXXXXYYLVSTASLKTPVXXAKG

SEQ ID NO: 5197 - protein, 43 aa, Artificial Sequence
  Non-cyclic GFR-binding peptide
  MOD_RES (1)..(3)..(37)..(38): Xaa is C or S
  MOD_RES (15)..(16)..(17)..(18)..(19): Xaa is A or G
  MOD_RES (20)..(21)..(22)..(23): Xaa is A or G or absent
XGXSRVVMNQYNKLXXXXXXXXXLYLVSIASLKTPAXXPKPVY

SEQ ID NO: 5198 - protein, 35 aa, Artificial Sequence
  Non-cyclic GFR-binding peptide
  MOD_RES (2)..(33)..(34): Xaa is C or S
KXSKVVMRYKKLVKPTRGVFYLISIANLDQPVXXP

SEQ ID NO: 5199 - protein, 36 aa, Artificial Sequence
  Non-cyclic GFR-binding peptide
  MOD_RES (1)..(33)..(34): Xaa is C or S
XAKVVMNQYNKLIVNNSSDLYLVSIASLKTPAXXAK

SEQ ID NO: 5200 - protein, 33 aa, Artificial Sequence
  Non-cyclic GFR-binding peptide
  MOD_RES (12)..(13)..(14)..(15)..(16): Xaa is A or G
  MOD_RES (17)..(18)..(19)..(20): Xaa is A or G or absent
LHDELTRYKKLXXXXXXXXXFYLVSIANLQVQT

SEQ ID NO: 5201 - protein, 34 aa, Artificial Sequence
  Non-cyclic GFR-binding peptide
HDELTYHYKLFIPKKRVIEKYLVSIPSLQVQTPR

SEQ ID NO: 5202 - protein, 38 aa, Artificial Sequence
  Non-cyclic GFR-binding peptide
  MOD_RES (1)..(3)..(37)..(38): Xaa is C or S
  MOD_RES (15)..(16)..(17)..(18)..(19): Xaa is A or G
  MOD_RES (20)..(21)..(22)..(23): Xaa is A or G or absent
XGXAKVVMNYHYKLXXXXXXXXXKYLVSIPSLKTPAXX

SEQ ID NO: 5203 - protein, 41 aa, Artificial Sequence
  Non-cyclic GFR-binding peptide
  MOD_RES (2)..(4)..(35)..(36): Xaa is C or S
SXKXSKVVMRHKRLVKPTRGVYYLISTASLDQPVXXPSASA

SEQ ID NO: 5204 - protein, 31 aa, Artificial Sequence
  Non-cyclic GFR-binding peptide
GEVVMERYKKLVVKDYEDFYLMSIANLETPV

SEQ ID NO: 5205 - protein, 39 aa, Artificial Sequence
  Non-cyclic GFR-binding peptide
  MOD_RES (2)..(36)..(37): Xaa is C or S
  MOD_RES (14)..(15)..(16)..(17)..(18): Xaa is A or G
  MOD_RES (19)..(20)..(21)..(22): Xaa is A or G or absent
GXSRVVMNYHYKLXXXXXXXXXKYLVSIPSLKTPAXXPK

SEQ ID NO: 5206 - protein, 39 aa, Artificial Sequence
  Non-cyclic GFR-binding peptide
  MOD_RES (2)..(4)..(38)..(39): Xaa is C or S
  MOD_RES (16)..(17)..(18)..(19)..(20): Xaa is A or G
  MOD_RES (21)..(22)..(23)..(24): Xaa is A or G or absent
HXGXAKVVMNQYNKLXXXXXXXXXLYLVSIASLKTPAXX

SEQ ID NO: 5207 - protein, 34 aa, Artificial Sequence
  Non-cyclic GFR-binding peptide
  MOD_RES (12)..(13)..(14)..(15)..(16): Xaa is A or G
  MOD_RES (17)..(18)..(19)..(20): Xaa is A or G or absent
LHDELTQYNKLXXXXXXXXXLYLVSIASLQVQTP

SEQ ID NO: 5208 - protein, 37 aa, Artificial Sequence
  Non-cyclic GFR-binding peptide
  MOD_RES (2)..(4): Xaa is C or S
  MOD_RES (16)..(17)..(18)..(19)..(20): Xaa is A or G
  MOD_RES (21)..(22)..(23)..(24): Xaa is A or G or absent
HXGXARVVMNQYNKLXXXXXXXXXLYLVSIASLQTPA

SEQ ID NO: 5209 - protein, 41 aa, Artificial Sequence
  Non-cyclic GFR-binding peptide
  MOD_RES (2)..(4)..(37)..(38): Xaa is C or S
  MOD_RES (15)..(16)..(17)..(18)..(19): Xaa is A or G
  MOD_RES (20)..(21)..(22)..(23): Xaa is A or G or absent
SXKXSRVIMYHYKLXXXXXXXXXKYLISIPSLAQPVXXPAA

SEQ ID NO: 5210 - protein, 38 aa, Artificial Sequence
  Non-cyclic GFR-binding peptide
  MOD_RES (2)..(4)..(35)..(36): Xaa is C or S
SXKXSRVIMYHYKLVKPKRGVKYLISIPSLAQPVXXPA

SEQ ID NO: 5211 - protein, 37 aa, Artificial Sequence
  Non-cyclic GFR-binding peptide
  MOD_RES (32)..(33): Xaa is C or S
SRVVMNRHKRLIVNSSDDYYLVSTASLKTPAXXPKPV

SEQ ID NO: 5212 - protein, 39 aa, Artificial Sequence
  Non-cyclic GFR-binding peptide
  MOD_RES (2)..(34)..(35): Xaa is C or S
GXGEVVMDRYKKLVVKENEDFYLMSIANLETPVXXAKPI

SEQ ID NO: 5213 - protein, 36 aa, Artificial Sequence
  Non-cyclic GFR-binding peptide
  MOD_RES (2)..(4): Xaa is C or S
  MOD_RES (15)..(16)..(17)..(18)..(19): Xaa is A or G
  MOD_RES (20)..(21)..(22)..(23): Xaa is A or G or absent
SXKXSRVIMYHYKLXXXXXXXXXKYLISIPSLAQPV

SEQ ID NO: 5214 - protein, 36 aa, Artificial Sequence
  Non-cyclic GFR-binding peptide
  MOD_RES (33)..(34): Xaa is C or S
  MOD_RES (11)..(12)..(13)..(14)..(15): Xaa is A or G
  MOD_RES (16)..(17)..(18)..(19): Xaa is A or G or absent
RVVMNQYNKLXXXXXXXXXLYLVSIASLKTPAXXPK

SEQ ID NO: 5215 - protein, 37 aa, Artificial Sequence
  Non-cyclic GFR-binding peptide
  MOD_RES (1)..(33)..(34): Xaa is C or S
XSRVVMNYHYKLIVNSSDDKYLVSIPSLKTPAXXPKP

SEQ ID NO: 5216 - protein, 36 aa, Artificial Sequence
  Non-cyclic GFR-binding peptide
  MOD_RES (1)..(3)..(35)..(36): Xaa is C or S
XGXGEVVMDYHYKLVVKENEDKYLMSIPSLETPVXX

SEQ ID NO: 5217 - protein, 33 aa, Artificial Sequence
  Non-cyclic GFR-binding peptide
  MOD_RES (33)..(33): Xaa is C or S
EAVSMGERHKRLTPVGMDDYYLVSTASLKTPVX

SEQ ID NO: 5218 - protein, 35 aa, Artificial Sequence
  Non-cyclic GFR-binding peptide
  MOD_RES (31)..(32): Xaa is C or S
SKVVMRYKKLVKPTRGVFYLISIANLDQPVXXPSA

SEQ ID NO: 5219 - protein, 36 aa, Artificial Sequence
  Non-cyclic GFR-binding peptide
  MOD_RES (2)..(4)..(36): Xaa is C or S
HXGXARVVMNRHKRLIVNSSDDYYLVSTASLQTPAX

SEQ ID NO: 5220 - protein, 38 aa, Artificial Sequence
  Non-cyclic GFR-binding peptide
  MOD_RES (1)..(35)..(36): Xaa is C or S
  MOD_RES (13)..(14)..(15)..(16)..(17): Xaa is A or G
  MOD_RES (18)..(19)..(20)..(21): Xaa is A or G or absent
XGEVVMERYKKLXXXXXXXXXFYLMSIANLETPVXXAK

SEQ ID NO: 5221 - protein, 38 aa, Artificial Sequence
  Non-cyclic GFR-binding peptide
  MOD_RES (35)..(35): Xaa is C or S
HDELTQYNKLFIPKKRVIELYLVSIASLQVQTPRXQVN

SEQ ID NO: 5222 - protein, 37 aa, Artificial Sequence
  Non-cyclic GFR-binding peptide
  MOD_RES (2)..(4): Xaa is C or S
  MOD_RES (16)..(17)..(18)..(19)..(20): Xaa is A or G
  MOD_RES (21)..(22)..(23)..(24): Xaa is A or G or absent
RXGXGEVVMERHKRLXXXXXXXXXYYLMSTASLETPV

SEQ ID NO: 5223 - protein, 38 aa, Artificial Sequence
  Non-cyclic GFR-binding peptide
  MOD_RES (2)..(33)..(34): Xaa is C or S
KXSKVIMQYNKLIKPTKGILYLISIASLDQSVXXPSAS

SEQ ID NO: 5224 - protein, 39 aa, Artificial Sequence
  Non-cyclic GFR-binding peptide
  MOD_RES (35)..(35): Xaa is C or S
  MOD_RES (11)..(12)..(13)..(14)..(15): Xaa is A or G
  MOD_RES (16)..(17)..(18)..(19): Xaa is A or G or absent
HDELTRYKKLXXXXXXXXXFYLVSIANLQVQTPRXQVNR

SEQ ID NO: 5225 - protein, 31 aa, Artificial Sequence
  Non-cyclic GFR-binding peptide
  MOD_RES (31)..(31): Xaa is C or S
EVVMDYHYKLVVKENEDKYLMSIPSLETPVX

SEQ ID NO: 5226 - protein, 35 aa, Artificial Sequence
  Non-cyclic GFR-binding peptide
  MOD_RES (34)..(35): Xaa is C or S
  MOD_RES (12)..(13)..(14)..(15)..(16): Xaa is A or G
  MOD_RES (17)..(18)..(19)..(20): Xaa is A or G or absent
ARVVMNYHYKLXXXXXXXXXKYLVSIPSLQTPAXX

SEQ ID NO: 5227 - protein, 34 aa, Artificial Sequence
  Non-cyclic GFR-binding peptide
  MOD_RES (1)..(33)..(34): Xaa is C or S
XGEVVMEYHYKLVVKDYEDKYLMSIPSLETPVXX

SEQ ID NO: 5228 - protein, 39 aa, Artificial Sequence
  Non-cyclic GFR-binding peptide
  MOD_RES (33)..(34): Xaa is C or S
  MOD_RES (11)..(12)..(13)..(14)..(15): Xaa is A or G
  MOD_RES (16)..(17)..(18)..(19): Xaa is A or G or absent
SRVIMYHYKLXXXXXXXXXKYLISIPSLAQPVXXPAASA

SEQ ID NO: 5229 - protein, 43 aa, Artificial Sequence
  Non-cyclic GFR-binding peptide
  MOD_RES (2)..(4)..(37)..(38): Xaa is C or S
RXGXEAVSMGERHKRLTPVGMDDYYLVSTASLKTPVXXAKGVK

SEQ ID NO: 5230 - protein, 41 aa, Artificial Sequence
  Non-cyclic GFR-binding peptide
  MOD_RES (1)..(3)..(35)..(36): Xaa is C or S
XGXAKVVMNRYKKLIVNNSSDFYLVSIANLKTPAXXAKPVA

SEQ ID NO: 5231 - protein, 37 aa, Artificial Sequence
  Non-cyclic GFR-binding peptide
  MOD_RES (1)..(34)..(35): Xaa is C or S
  MOD_RES (12)..(13)..(14)..(15)..(16): Xaa is A or G
  MOD_RES (17)..(18)..(19)..(20): Xaa is A or G or absent
XSKVIMRHKRLXXXXXXXXXYYLISTASLDQSVXXPS

SEQ ID NO: 5232 - protein, 39 aa, Artificial Sequence
  Non-cyclic GFR-binding peptide
  MOD_RES (2)..(4)..(35)..(36): Xaa is C or S
SXKXSKVIMRYKKLIKPTKGIFYLISIANLDQSVXXPSA

SEQ ID NO: 5233 - protein, 42 aa, Artificial Sequence
  Non-cyclic GFR-binding peptide
  MOD_RES (2)..(4)..(38)..(39): Xaa is C or S
  MOD_RES (16)..(17)..(18)..(19)..(20): Xaa is A or G
  MOD_RES (21)..(22)..(23)..(24): Xaa is A or G or absent
HXGXARVVMNYHYKLXXXXXXXXXKYLVSIPSLQTPAXXPKP

SEQ ID NO: 5234 - protein, 33 aa, Artificial Sequence
  Non-cyclic GFR-binding peptide
  MOD_RES (2)..(2): Xaa is C or S
GXSRVVMNYHYKLIVNSSDDKYLVSIPSLKTPA

SEQ ID NO: 5235 - protein, 37 aa, Artificial Sequence
  Non-cyclic GFR-binding peptide
  MOD_RES (32)..(33): Xaa is C or S
AKVVMNQYNKLIVNNSSDLYLVSIASLKTPAXXAKPV

SEQ ID NO: 5236 - protein, 37 aa, Artificial Sequence
  Non-cyclic GFR-binding peptide
  MOD_RES (2)..(4)..(37): Xaa is C or S
  MOD_RES (15)..(16)..(17)..(18)..(19): Xaa is A or G
  MOD_RES (20)..(21)..(22)..(23): Xaa is A or G or absent
SXKXSRVIMQYNKLXXXXXXXXXLYLISIASLAQPVX

SEQ ID NO: 5237 - protein, 36 aa, Artificial Sequence
  Non-cyclic GFR-binding peptide
  MOD_RES (33)..(33): Xaa is C or S
  MOD_RES (11)..(12)..(13)..(14)..(15): Xaa is A or G
  MOD_RES (16)..(17)..(18)..(19): Xaa is A or G or absent
RVVMNRHKRLXXXXXXXXXYYLVSTASLKTPAXTPK

SEQ ID NO: 5238 - protein, 36 aa, Artificial Sequence
  Non-cyclic GFR-binding peptide
  MOD_RES (31)..(32): Xaa is C or S
EVVMDRHKRLVVKENEDYYLMSTASLETPVXXAKPI

SEQ ID NO: 5239 - protein, 37 aa, Artificial Sequence
  Non-cyclic GFR-binding peptide
  MOD_RES (1)..(34)..(35): Xaa is C or S
  MOD_RES (12)..(13)..(14)..(15)..(16): Xaa is A or G
  MOD_RES (17)..(18)..(19)..(20): Xaa is A or G or absent
XSKVIMQYNKLXXXXXXXXXLYLISIASLDQSVXXPS

SEQ ID NO: 5240 - protein, 35 aa, Artificial Sequence
  Non-cyclic GFR-binding peptide
  MOD_RES (33)..(34): Xaa is C or S
  MOD_RES (11)..(12)..(13)..(14)..(15): Xaa is A or G
  MOD_RES (16)..(17)..(18)..(19): Xaa is A or G or absent
RVVMNRHKRLXXXXXXXXXYYLVSTASLKTPAXXP

SEQ ID NO: 5241 - protein, 42 aa, Artificial Sequence
  Non-cyclic GFR-binding peptide
  MOD_RES (2)..(4)..(37)..(38): Xaa is C or S
  MOD_RES (15)..(16)..(17)..(18)..(19): Xaa is A or G
  MOD_RES (20)..(21)..(22)..(23): Xaa is A or G or absent
SXKXSKVIMQYNKLXXXXXXXXXLYLISIASLDQSVXXPSAS

SEQ ID NO: 5242 - protein, 42 aa, Artificial Sequence
  Non-cyclic GFR-binding peptide
  MOD_RES (2)..(4)..(36)..(37): Xaa is C or S
HXGXARVVMNRHKRLIVNSSDDYYLVSTASLQTPAXXPKPVT

SEQ ID NO: 5243 - protein, 32 aa, Artificial Sequence
  Non-cyclic GFR-binding peptide
  MOD_RES (11)..(12)..(13)..(14)..(15): Xaa is A or G
  MOD_RES (16)..(17)..(18)..(19): Xaa is A or G or absent
SKVIMRYKKLXXXXXXXXXFYLISIANLDQSV

SEQ ID NO: 5244 - protein, 43 aa, Artificial Sequence
  Non-cyclic GFR-binding peptide
  MOD_RES (2)..(37)..(38): Xaa is C or S
  MOD_RES (15)..(16)..(17)..(18)..(19): Xaa is A or G
  MOD_RES (20)..(21)..(22)..(23): Xaa is A or G or absent
GXEAVSMGERHKRLXXXXXXXXXYYLVSTASLKTPVXXAKGVK

SEQ ID NO: 5245 - protein, 35 aa, Artificial Sequence
  Non-cyclic GFR-binding peptide
  MOD_RES (31)..(32): Xaa is C or S
RVVMNRHKRLIVNSSDDYYLVSTASLQTPAXXPKP

SEQ ID NO: 5246 - protein, 37 aa, Artificial Sequence
  Non-cyclic GFR-binding peptide
  MOD_RES (1)..(3)..(35)..(36): Xaa is C or S
XGXGEVVMEYHYKLVVKDYEDKYLMSIPSLETPVXXA

SEQ ID NO: 5247 - protein, 40 aa, Artificial Sequence
  Non-cyclic GFR-binding peptide
  MOD_RES (1)..(3)..(37)..(38): Xaa is C or S
  MOD_RES (15)..(16)..(17)..(18)..(19): Xaa is A or G
  MOD_RES (20)..(21)..(22)..(23): Xaa is A or G or absent
XGXGEVVMERHKRLXXXXXXXXXYYLMSTASLETPVXXAK

SEQ ID NO: 5248 - protein, 38 aa, Artificial Sequence
  Non-cyclic GFR-binding peptide
  MOD_RES (2)..(35)..(36): Xaa is C or S
  MOD_RES (13)..(14)..(15)..(16)..(17): Xaa is A or G
  MOD_RES (18)..(19)..(20)..(21): Xaa is A or G or absent
KXSKVVMRHKRLXXXXXXXXXYYLISTASLDQPVXXPS

SEQ ID NO: 5249 - protein, 38 aa, Artificial Sequence
  Non-cyclic GFR-binding peptide
  MOD_RES (2)..(4)..(37)..(38): Xaa is C or S
  MOD_RES (15)..(16)..(17)..(18)..(19): Xaa is A or G
  MOD_RES (20)..(21)..(22)..(23): Xaa is A or G or absent
SXKXSRVIMRYKKLXXXXXXXXXFYLISIANLAQPVXX

SEQ ID NO: 5250 - protein, 34 aa, Artificial Sequence
  Non-cyclic GFR-binding peptide
  MOD_RES (31)..(32): Xaa is C or S
SRVIMYHYKLVKPKRGVKYLISIPSLAQPVXXPA

SEQ ID NO: 5251 - protein, 34 aa, Artificial Sequence
  Non-cyclic GFR-binding peptide
  MOD_RES (34)..(34): Xaa is C or S
  MOD_RES (12)..(13)..(14)..(15)..(16): Xaa is A or G
  MOD_RES (17)..(18)..(19)..(20): Xaa is A or G or absent
GEVVMEYHYKLXXXXXXXXXKYLMSIPSLETPVX

SEQ ID NO: 5252 - protein, 34 aa, Artificial Sequence
  Non-cyclic GFR-binding peptide
LHDELTRHKRLFIPKKRVIEYYLVSTASLQVQTP

SEQ ID NO: 5253 - protein, 37 aa, Artificial Sequence
  Non-cyclic GFR-binding peptide
  MOD_RES (1)..(3): Xaa is C or S
  MOD_RES (16)..(17)..(18)..(19)..(20): Xaa is A or G
  MOD_RES (21)..(22)..(23)..(24): Xaa is A or G or absent
XGXEAVSMGERYKKLXXXXXXXXXFYLVSIANLKTPV

SEQ ID NO: 5254 - protein, 38 aa, Artificial Sequence
  Non-cyclic GFR-binding peptide
  MOD_RES (1)..(35)..(36): Xaa is C or S
  MOD_RES (13)..(14)..(15)..(16)..(17): Xaa is A or G
  MOD_RES (18)..(19)..(20)..(21): Xaa is A or G or absent
XAKVVMNRYKKLXXXXXXXXXFYLVSIANLKTPAXXAK

SEQ ID NO: 5255 - protein, 42 aa, Artificial Sequence
  Non-cyclic GFR-binding peptide
  MOD_RES (1)..(3)..(37)..(38): Xaa is C or S
  MOD_RES (15)..(16)..(17)..(18)..(19): Xaa is A or G
  MOD_RES (20)..(21)..(22)..(23): Xaa is A or G or absent
XGXSRVVMNYHYKLXXXXXXXXXKYLVSIPSLKTPAXXPKPV

SEQ ID NO: 5256 - protein, 38 aa, Artificial Sequence
  Non-cyclic GFR-binding peptide
  MOD_RES (33)..(34): Xaa is C or S
  MOD_RES (11)..(12)..(13)..(14)..(15): Xaa is A or G
  MOD_RES (16)..(17)..(18)..(19): Xaa is A or G or absent
SKVIMQYNKLXXXXXXXXXLYLISIASLDQSVXXPSAS

SEQ ID NO: 5257 - protein, 34 aa, Artificial Sequence
  Non-cyclic GFR-binding peptide
  MOD_RES (33)..(34): Xaa is C or S
  MOD_RES (11)..(12)..(13)..(14)..(15): Xaa is A or G
  MOD_RES (16)..(17)..(18)..(19): Xaa is A or G or absent
SRVIMQYNKLXXXXXXXXXLYLISIASLAQPVXX

SEQ ID NO: 5258 - protein, 38 aa, Artificial Sequence
  Non-cyclic GFR-binding peptide
  MOD_RES (1)..(34)..(35): Xaa is C or S
  MOD_RES (12)..(13)..(14)..(15)..(16): Xaa is A or G
  MOD_RES (17)..(18)..(19)..(20): Xaa is A or G or absent
XSRVIMRHKRLXXXXXXXXXYYLISTASLAQPVXXPAA

SEQ ID NO: 5259 - protein, 39 aa, Artificial Sequence
  Non-cyclic GFR-binding peptide
  MOD_RES (1)..(35)..(36): Xaa is C or S
  MOD_RES (13)..(14)..(15)..(16)..(17): Xaa is A or G
  MOD_RES (18)..(19)..(20)..(21): Xaa is A or G or absent
XARVVMNQYNKLXXXXXXXXXLYLVSIASLQTPAXXPKP

SEQ ID NO: 5260 - protein, 38 aa, Artificial Sequence
  Non-cyclic GFR-binding peptide
  MOD_RES (1)..(34)..(35): Xaa is C or S
  MOD_RES (12)..(13)..(14)..(15)..(16): Xaa is A or G
  MOD_RES (17)..(18)..(19)..(20): Xaa is A or G or absent
XSRVIMQYNKLXXXXXXXXXLYLISIASLAQPVXXPAA

SEQ ID NO: 5261 - protein, 40 aa, Artificial Sequence
  Non-cyclic GFR-binding peptide
  MOD_RES (34)..(34): Xaa is C or S
  MOD_RES (12)..(13)..(14)..(15)..(16): Xaa is A or G
  MOD_RES (17)..(18)..(19)..(20): Xaa is A or G or absent
SRVVMNRHKRLXXXXXXXXXYYLVSTASLKTPAXTPKTVH

SEQ ID NO: 5262 - protein, 36 aa, Artificial Sequence
  Non-cyclic GFR-binding peptide
  MOD_RES (1)..(32)..(33): Xaa is C or S
XSKVVMYHYKLVKPTRGVKYLISIPSLDQPVXXPSA

SEQ ID NO: 5263 - protein, 34 aa, Artificial Sequence
  Non-cyclic GFR-binding peptide
  MOD_RES (1)..(33)..(34): Xaa is C or S
XGEVVMERYKKLVVKDYEDFYLMSIANLETPVXX

SEQ ID NO: 5264 - protein, 35 aa, Artificial Sequence
  Non-cyclic GFR-binding peptide
  MOD_RES (1)..(1): Xaa is C or S
  MOD_RES (14)..(15)..(16)..(17)..(18): Xaa is A or G
  MOD_RES (19)..(20)..(21)..(22): Xaa is A or G or absent
XEAVSMGEQYNKLXXXXXXXXXLYLVSIASLKTPV

SEQ ID NO: 5265 - protein, 37 aa, Artificial Sequence
  Non-cyclic GFR-binding peptide
  MOD_RES (2)..(33)..(34): Xaa is C or S
KXSKVVMRYKKLVKPTRGVFYLISIANLDQPVXXPSA

SEQ ID NO: 5266 - protein, 38 aa, Artificial Sequence
  Non-cyclic GFR-binding peptide
  MOD_RES (1)..(35)..(36): Xaa is C or S
  MOD_RES (13)..(14)..(15)..(16)..(17): Xaa is A or G
  MOD_RES (18)..(19)..(20)..(21): Xaa is A or G or absent
XAKVVMNQYNKLXXXXXXXXXLYLVSIASLKTPAXXAK

SEQ ID NO: 5267 - protein, 36 aa, Artificial Sequence
  Non-cyclic GFR-binding peptide
  MOD_RES (2)..(35)..(36): Xaa is C or S
GXEAVSMGERYKKLTPVGMDDFYLVSIANLKTPVXX

SEQ ID NO: 5268 - protein, 34 aa, Artificial Sequence
  Non-cyclic GFR-binding peptide
  MOD_RES (2)..(2): Xaa is C or S
  MOD_RES (13)..(14)..(15)..(16)..(17): Xaa is A or G
  MOD_RES (18)..(19)..(20)..(21): Xaa is A or G or absent
KXSRVIMRHKRLXXXXXXXXXYYLISTASLAQPV

SEQ ID NO: 5269 - protein, 41 aa, Artificial Sequence
  Non-cyclic GFR-binding peptide
  MOD_RES (2)..(4)..(37)..(38): Xaa is C or S
RXGXEAVSMGERHKRLTPVGMDDYYLVSTASLKTPVXXAKG

SEQ ID NO: 5270 - protein, 43 aa, Artificial Sequence
  Non-cyclic GFR-binding peptide
  MOD_RES (2)..(37)..(38): Xaa is C or S
  MOD_RES (15)..(16)..(17)..(18)..(19): Xaa is A or G
  MOD_RES (20)..(21)..(22)..(23): Xaa is A or G or absent
GXEAVSMGEQYNKLXXXXXXXXXLYLVSIASLKTPVXXAKGVK

SEQ ID NO: 5271 - protein, 42 aa, Artificial Sequence
  Non-cyclic GFR-binding peptide
  MOD_RES (2)..(4)..(41): Xaa is C or S
EXKXALHDELTQYNKLFIPKKRVIELYLVSIASLQVQTPRXQ

SEQ ID NO: 5272 - protein, 35 aa, Artificial Sequence
  Non-cyclic GFR-binding peptide
  MOD_RES (2)..(33)..(34): Xaa is C or S
KXSKVVMYHYKLVKPTRGVKYLISIPSLDQPVXXP

SEQ ID NO: 5273 - protein, 36 aa, Artificial Sequence
  Non-cyclic GFR-binding peptide
  MOD_RES (2)..(36): Xaa is C or S
  MOD_RES (14)..(15)..(16)..(17)..(18): Xaa is A or G
  MOD_RES (19)..(20)..(21)..(22): Xaa is A or G or absent
GXGEVVMEYHYKLXXXXXXXXXKYLMSIPSLETPVX

SEQ ID NO: 5274 - protein, 32 aa, Artificial Sequence
  Non-cyclic GFR-binding peptide
  MOD_RES (1)..(32): Xaa is C or S
XSKVIMRYKKLIKPTKGIFYLISIANLDQSVX

SEQ ID NO: 5275 - protein, 36 aa, Artificial Sequence
  Non-cyclic GFR-binding peptide
  MOD_RES (2)..(34)..(35): Xaa is C or S
GXGEVVMDRHKRLVVKENEDYYLMSTASLETPVXXA

SEQ ID NO: 5276 - protein, 40 aa, Artificial Sequence
  Non-cyclic GFR-binding peptide
  MOD_RES (1)..(3)..(35): Xaa is C or S
XGXSRVVMNQYNKLIVNSSDDLYLVSIASLKTPAXTPKTV

SEQ ID NO: 5277 - protein, 36 aa, Artificial Sequence
  Non-cyclic GFR-binding peptide
  MOD_RES (34)..(35): Xaa is C or S
  MOD_RES (12)..(13)..(14)..(15)..(16): Xaa is A or G
  MOD_RES (17)..(18)..(19)..(20): Xaa is A or G or absent
GEVVMERYKKLXXXXXXXXXFYLMSIANLETPVXXA

SEQ ID NO: 5278 - protein, 33 aa, Artificial Sequence
  Non-cyclic GFR-binding peptide
  MOD_RES (1)..(1): Xaa is C or S
  MOD_RES (12)..(13)..(14)..(15)..(16): Xaa is A or G
  MOD_RES (17)..(18)..(19)..(20): Xaa is A or G or absent
XSKVVMRHKRLXXXXXXXXXYYLISTASLDQPV

SEQ ID NO: 5279 - protein, 37 aa, Artificial Sequence
  Non-cyclic GFR-binding peptide
  MOD_RES (33)..(34): Xaa is C or S
EAVSMGERHKRLTPVGMDDYYLVSTASLKTPVXXAKG

SEQ ID NO: 5280 - protein, 40 aa, Artificial Sequence
  Non-cyclic GFR-binding peptide
  MOD_RES (2)..(4): Xaa is C or S
EXKXALHDELTQYNKLFIPKKRVIELYLVSIASLQVQTPR

SEQ ID NO: 5281 - protein, 39 aa, Artificial Sequence
  Non-cyclic GFR-binding peptide
  MOD_RES (2)..(4)..(36)..(37): Xaa is C or S
RXGXGEVVMDRHKRLVVKENEDYYLMSTASLETPVXXAK

SEQ ID NO: 5282 - protein, 39 aa, Artificial Sequence
  Non-cyclic GFR-binding peptide
  MOD_RES (1)..(33)..(34): Xaa is C or S
XSRVVMNRHKRLIVNSSDDYYLVSTASLKTPAXXPKPVY

SEQ ID NO: 5283 - protein, 38 aa, Artificial Sequence
  Non-cyclic GFR-binding peptide
  MOD_RES (2)..(4): Xaa is C or S
EXKXALHDELTRHKRLFIPKKRVIEYYLVSTASLQVQT

SEQ ID NO: 5284 - protein, 34 aa, Artificial Sequence
  Non-cyclic GFR-binding peptide
  MOD_RES (33)..(34): Xaa is C or S
  MOD_RES (11)..(12)..(13)..(14)..(15): Xaa is A or G
  MOD_RES (16)..(17)..(18)..(19): Xaa is A or G or absent
EVVMEYHYKLXXXXXXXXXKYLMSIPSLETPVXX

SEQ ID NO: 5285 - protein, 39 aa, Artificial Sequence
  Non-cyclic GFR-binding peptide
  MOD_RES (1)..(3)..(37)..(38): Xaa is C or S
  MOD_RES (15)..(16)..(17)..(18)..(19): Xaa is A or G
  MOD_RES (20)..(21)..(22)..(23): Xaa is A or G or absent
XGXGEVVMDRHKRLXXXXXXXXXYYLMSTASLETPVXXA

SEQ ID NO: 5286 - protein, 32 aa, Artificial Sequence
  Non-cyclic GFR-binding peptide
  MOD_RES (1)..(32): Xaa is C or S
XSKVVMQYNKLVKPTRGVLYLISIASLDQPVX

SEQ ID NO: 5287 - protein, 37 aa, Artificial Sequence
  Non-cyclic GFR-binding peptide
  MOD_RES (32)..(33): Xaa is C or S
GEVVMDRHKRLVVKENEDYYLMSTASLETPVXXAKPI

SEQ ID NO: 5288 - protein, 38 aa, Artificial Sequence
  Non-cyclic GFR-binding peptide
  MOD_RES (2)..(4)..(38): Xaa is C or S
  MOD_RES (16)..(17)..(18)..(19)..(20): Xaa is A or G
  MOD_RES (21)..(22)..(23)..(24): Xaa is A or G or absent
HXGXSRVVMNQYNKLXXXXXXXXXLYLVSIASLKTPAX

SEQ ID NO: 5289 - protein, 39 aa, Artificial Sequence
  Non-cyclic GFR-binding peptide
  MOD_RES (1)..(3)..(36)..(37): Xaa is C or S
XGXEAVSMGEQYNKLTPVGMDDLYLVSIASLKTPVXXAK

SEQ ID NO: 5290 - protein, 38 aa, Artificial Sequence
  Non-cyclic GFR-binding peptide
  MOD_RES (2)..(4)..(37)..(38): Xaa is C or S
  MOD_RES (15)..(16)..(17)..(18)..(19): Xaa is A or G
  MOD_RES (20)..(21)..(22)..(23): Xaa is A or G or absent
SXKXSKVVMQYNKLXXXXXXXXXLYLISIASLDQPVXX

SEQ ID NO: 5291 - protein, 36 aa, Artificial Sequence
  Non-cyclic GFR-binding peptide
  MOD_RES (1)..(35)..(36): Xaa is C or S
  MOD_RES (13)..(14)..(15)..(16)..(17): Xaa is A or G
  MOD_RES (18)..(19)..(20)..(21): Xaa is A or G or absent
XSRVVMNQYNKLXXXXXXXXXLYLVSIASLKTPAXX

SEQ ID NO: 5292 - protein, 34 aa, Artificial Sequence
  Non-cyclic GFR-binding peptide
HDELTRHKRLFIPKKRVIEYYLVSTASLQVQTPR

SEQ ID NO: 5293 - protein, 34 aa, Artificial Sequence
  Non-cyclic GFR-binding peptide
  MOD_RES (1)..(3): Xaa is C or S
XGXGEVVMERHKRLVVKDYEDYYLMSTASLETPV

SEQ ID NO: 5294 - protein, 40 aa, Artificial Sequence
  Non-cyclic GFR-binding peptide
  MOD_RES (1)..(3)..(37)..(38): Xaa is C or S
  MOD_RES (15)..(16)..(17)..(18)..(19): Xaa is A or G
  MOD_RES (20)..(21)..(22)..(23): Xaa is A or G or absent
XGXARVVMNRHKRLXXXXXXXXXYYLVSTASLQTPAXXPK

SEQ ID NO: 5295 - protein, 38 aa, Artificial Sequence
  Non-cyclic GFR-binding peptide
  MOD_RES (1)..(3)..(36)..(37): Xaa is C or S
  MOD_RES (14)..(15)..(16)..(17)..(18): Xaa is A or G
  MOD_RES (19)..(20)..(21)..(22): Xaa is A or G or absent
XKXSRVIMYHYKLXXXXXXXXXKYLISIPSLAQPVXXP

SEQ ID NO: 5296 - protein, 37 aa, Artificial Sequence
  Non-cyclic GFR-binding peptide
  MOD_RES (34)..(34): Xaa is C or S
  MOD_RES (12)..(13)..(14)..(15)..(16): Xaa is A or G
  MOD_RES (17)..(18)..(19)..(20): Xaa is A or G or absent
SRVVMNYHYKLXXXXXXXXXKYLVSIPSLKTPAXTPK

SEQ ID NO: 5297 - protein, 31 aa, Artificial Sequence
  Non-cyclic GFR-binding peptide
  MOD_RES (1)..(1): Xaa is C or S
XSKVIMQYNKLIKPTKGILYLISIASLDQSV

SEQ ID NO: 5298 - protein, 36 aa, Artificial Sequence
  Non-cyclic GFR-binding peptide
  MOD_RES (2)..(34)..(35): Xaa is C or S
GXAKVVMNQYNKLIVNNSSDLYLVSIASLKTPAXXA

SEQ ID NO: 5299 - protein, 39 aa, Artificial Sequence
  Non-cyclic GFR-binding peptide
  MOD_RES (1)..(33)..(34): Xaa is C or S
XGEVVMDRHKRLVVKENEDYYLMSTASLETPVXXAKPIK

SEQ ID NO: 5300 - protein, 34 aa, Artificial Sequence
  Non-cyclic GFR-binding peptide
  MOD_RES (2)..(4): Xaa is C or S
SXKXSKVIMQYNKLIKPTKGILYLISIASLDQSV

SEQ ID NO: 5301 - protein, 30 aa, Artificial Sequence
  Non-cyclic GFR-binding peptide
SRVIMRYKKLVKPKRGVFYLISIANLAQPV

SEQ ID NO: 5302 - protein, 38 aa, Artificial Sequence
  Non-cyclic GFR-binding peptide
  MOD_RES (2)..(33)..(34): Xaa is C or S
KXSKVVMQYNKLVKPTRGVLYLISIASLDQPVXXPSAS

SEQ ID NO: 5303 - protein, 38 aa, Artificial Sequence
  Non-cyclic GFR-binding peptide
  MOD_RES (32)..(33): Xaa is C or S
ARVVMNYHYKLIVNSSDDKYLVSIPSLQTPAXXPKPVT

SEQ ID NO: 5304 - protein, 38 aa, Artificial Sequence
  Non-cyclic GFR-binding peptide
  MOD_RES (1)..(3)..(34)..(35): Xaa is C or S
XKXSKVIMQYNKLIKPTKGILYLISIASLDQSVXXPSA

SEQ ID NO: 5305 - protein, 31 aa, Artificial Sequence
  Non-cyclic GFR-binding peptide
SRVVMNYHYKLIVNSSDDKYLVSIPSLKTPA

SEQ ID NO: 5306 - protein, 41 aa, Artificial Sequence
  Non-cyclic GFR-binding peptide
  MOD_RES (1)..(36)..(37): Xaa is C or S
  MOD_RES (14)..(15)..(16)..(17)..(18): Xaa is A or G
  MOD_RES (19)..(20)..(21)..(22): Xaa is A or G or absent
XEAVSMGEQYNKLXXXXXXXXXLYLVSIASLKTPVXXAKGV

SEQ ID NO: 5307 - protein, 35 aa, Artificial Sequence
  Non-cyclic GFR-binding peptide
  MOD_RES (1)..(32)..(33): Xaa is C or S
XSRVIMQYNKLVKPKRGVLYLISIASLAQPVXXPA

SEQ ID NO: 5308 - protein, 39 aa, Artificial Sequence
  Non-cyclic GFR-binding peptide
  MOD_RES (34)..(35): Xaa is C or S
  MOD_RES (12)..(13)..(14)..(15)..(16): Xaa is A or G
  MOD_RES (17)..(18)..(19)..(20): Xaa is A or G or absent
SRVVMNQYNKLXXXXXXXXXLYLVSIASLKTPAXXPKPV

SEQ ID NO: 5309 - protein, 37 aa, Artificial Sequence
  Non-cyclic GFR-binding peptide
  MOD_RES (1)..(1): Xaa is C or S
  MOD_RES (14)..(15)..(16)..(17)..(18): Xaa is A or G
  MOD_RES (19)..(20)..(21)..(22): Xaa is A or G or absent
XALHDELTRYKKLXXXXXXXXXFYLVSIANLQVQTPR

SEQ ID NO: 5310 - protein, 40 aa, Artificial Sequence
  Non-cyclic GFR-binding peptide
  MOD_RES (2)..(4)..(36)..(37): Xaa is C or S
RXGXGEVVMDYHYKLVVKENEDKYLMSIPSLETPVXXAKP

SEQ ID NO: 5311 - protein, 38 aa, Artificial Sequence
  Non-cyclic GFR-binding peptide
  MOD_RES (33)..(34): Xaa is C or S
  MOD_RES (11)..(12)..(13)..(14)..(15): Xaa is A or G
  MOD_RES (16)..(17)..(18)..(19): Xaa is A or G or absent
EVVMDYHYKLXXXXXXXXXKYLMSIPSLETPVXXAKPI

SEQ ID NO: 5312 - protein, 40 aa, Artificial Sequence
  Non-cyclic GFR-binding peptide
  MOD_RES (1)..(35): Xaa is C or S
  MOD_RES (13)..(14)..(15)..(16)..(17): Xaa is A or G
  MOD_RES (18)..(19)..(20)..(21): Xaa is A or G or absent
XSRVVMNYHYKLXXXXXXXXXKYLVSIPSLKTPAXTPKTV

SEQ ID NO: 5313 - protein, 36 aa, Artificial Sequence
  Non-cyclic GFR-binding peptide
  MOD_RES (2)..(2): Xaa is C or S
KXALHDELTQYNKLFIPKKRVIELYLVSIASLQVQT

SEQ ID NO: 5314 - protein, 38 aa, Artificial Sequence
  Non-cyclic GFR-binding peptide
  MOD_RES (2)..(4)..(36)..(37): Xaa is C or S
HXGXARVVMNYHYKLIVNSSDDKYLVSIPSLQTPAXXP

SEQ ID NO: 5315 - protein, 36 aa, Artificial Sequence
  Non-cyclic GFR-binding peptide
  MOD_RES (2)..(2): Xaa is C or S
  MOD_RES (15)..(16)..(17)..(18)..(19): Xaa is A or G
  MOD_RES (20)..(21)..(22)..(23): Xaa is A or G or absent
GXEAVSMGERYKKLXXXXXXXXXFYLVSIANLKTPV

SEQ ID NO: 5316 - protein, 34 aa, Artificial Sequence
  Non-cyclic GFR-binding peptide
  MOD_RES (2)..(34): Xaa is C or S
GXSRVVMNRHKRLIVNSSDDYYLVSTASLKTPAX

SEQ ID NO: 5317 - protein, 36 aa, Artificial Sequence
  Non-cyclic GFR-binding peptide
  MOD_RES (33)..(34): Xaa is C or S
  MOD_RES (11)..(12)..(13)..(14)..(15): Xaa is A or G
  MOD_RES (16)..(17)..(18)..(19): Xaa is A or G or absent
RVVMNYHYKLXXXXXXXXXKYLVSIPSLKTPAXXPK

SEQ ID NO: 5318 - protein, 37 aa, Artificial Sequence
  Non-cyclic GFR-binding peptide
  MOD_RES (2)..(35)..(36): Xaa is C or S
  MOD_RES (13)..(14)..(15)..(16)..(17): Xaa is A or G
  MOD_RES (18)..(19)..(20)..(21): Xaa is A or G or absent
KXSKVIMQYNKLXXXXXXXXXLYLISIASLDQSVXXP

SEQ ID NO: 5319 - protein, 39 aa, Artificial Sequence
  Non-cyclic GFR-binding peptide
  MOD_RES (1)..(33): Xaa is C or S
XSRVVMNYHYKLIVNSSDDKYLVSIPSLKTPAXTPKTVH

SEQ ID NO: 5320 - protein, 39 aa, Artificial Sequence
  Non-cyclic GFR-binding peptide
  MOD_RES (2)..(4)..(36)..(37): Xaa is C or S
RXGXGEVVMEYHYKLVVKDYEDKYLMSIPSLETPVXXAK

SEQ ID NO: 5321 - protein, 45 aa, Artificial Sequence
  Non-cyclic GFR-binding peptide
  MOD_RES (2)..(4)..(41): Xaa is C or S
EXKXALHDELTYHYKLFIPKKRVIEKYLVSIPSLQVQTPRXQVNR

SEQ ID NO: 5322 - protein, 34 aa, Artificial Sequence
  Non-cyclic GFR-binding peptide
  MOD_RES (31)..(32): Xaa is C or S
SRVIMQYNKLVKPKRGVLYLISIASLAQPVXXPA

SEQ ID NO: 5323 - protein, 41 aa, Artificial Sequence
  Non-cyclic GFR-binding peptide
  MOD_RES (1)..(3)..(36)..(37): Xaa is C or S
  MOD_RES (14)..(15)..(16)..(17)..(18): Xaa is A or G
  MOD_RES (19)..(20)..(21)..(22): Xaa is A or G or absent
XKXSKVVMQYNKLXXXXXXXXXLYLISIASLDQPVXXPSAS

SEQ ID NO: 5324 - protein, 36 aa, Artificial Sequence
  Non-cyclic GFR-binding peptide
  MOD_RES (2)..(33)..(34): Xaa is C or S
KXSRVIMRYKKLVKPKRGVFYLISIANLAQPVXXPA

SEQ ID NO: 5325 - protein, 37 aa, Artificial Sequence
  Non-cyclic GFR-binding peptide
  MOD_RES (2)..(4)..(36)..(37): Xaa is C or S
HXGXSRVVMNRHKRLIVNSSDDYYLVSTASLKTPAXX

SEQ ID NO: 5326 - protein, 36 aa, Artificial Sequence
  Non-cyclic GFR-binding peptide
  MOD_RES (1)..(3)..(35)..(36): Xaa is C or S
XGXSRVVMNYHYKLIVNSSDDKYLVSIPSLKTPAXX

SEQ ID NO: 5327 - protein, 39 aa, Artificial Sequence
  Non-cyclic GFR-binding peptide
  MOD_RES (33)..(34): Xaa is C or S
  MOD_RES (11)..(12)..(13)..(14)..(15): Xaa is A or G
  MOD_RES (16)..(17)..(18)..(19): Xaa is A or G or absent
SRVIMQYNKLXXXXXXXXXLYLISIASLAQPVXXPAASA

SEQ ID NO: 5328 - protein, 35 aa, Artificial Sequence
  Non-cyclic GFR-binding peptide
  MOD_RES (2)..(33)..(34): Xaa is C or S
KXSKVIMRYKKLIKPTKGIFYLISIANLDQSVXXP

SEQ ID NO: 5329 - protein, 39 aa, Artificial Sequence
  Non-cyclic GFR-binding peptide
  MOD_RES (2)..(34)..(35): Xaa is C or S
GXAKVVMNRYKKLIVNNSSDFYLVSIANLKTPAXXAKPV

SEQ ID NO: 5330 - protein, 36 aa, Artificial Sequence
  Non-cyclic GFR-binding peptide
  MOD_RES (36)..(36): Xaa is C or S
  MOD_RES (12)..(13)..(14)..(15)..(16): Xaa is A or G
  MOD_RES (17)..(18)..(19)..(20): Xaa is A or G or absent
LHDELTRYKKLXXXXXXXXXFYLVSIANLQVQTPRX

SEQ ID NO: 5331 - protein, 34 aa, Artificial Sequence
  Non-cyclic GFR-binding peptide
  MOD_RES (34)..(34): Xaa is C or S
  MOD_RES (12)..(13)..(14)..(15)..(16): Xaa is A or G
  MOD_RES (17)..(18)..(19)..(20): Xaa is A or G or absent
GEVVMDYHYKLXXXXXXXXXKYLMSIPSLETPVX

SEQ ID NO: 5332 - protein, 38 aa, Artificial Sequence
  Non-cyclic GFR-binding peptide
  MOD_RES (33)..(34): Xaa is C or S
  MOD_RES (11)..(12)..(13)..(14)..(15): Xaa is A or G
  MOD_RES (16)..(17)..(18)..(19): Xaa is A or G or absent
SKVIMYHYKLXXXXXXXXXKYLISIPSLDQSVXXPSAS

SEQ ID NO: 5333 - protein, 37 aa, Artificial Sequence
  Non-cyclic GFR-binding peptide
  MOD_RES (32)..(33): Xaa is C or S
AKVVMNRYKKLIVNNSSDFYLVSIANLKTPAXXAKPV

SEQ ID NO: 5334 - protein, 38 aa, Artificial Sequence
  Non-cyclic GFR-binding peptide
  MOD_RES (33)..(34): Xaa is C or S
  MOD_RES (11)..(12)..(13)..(14)..(15): Xaa is A or G
  MOD_RES (16)..(17)..(18)..(19): Xaa is A or G or absent
SRVIMYHYKLXXXXXXXXXKYLISIPSLAQPVXXPAAS

SEQ ID NO: 5335 - protein, 36 aa, Artificial Sequence
  Non-cyclic GFR-binding peptide
  MOD_RES (2)..(4): Xaa is C or S
  MOD_RES (15)..(16)..(17)..(18)..(19): Xaa is A or G
  MOD_RES (20)..(21)..(22)..(23): Xaa is A or G or absent
SXKXSKVIMRHKRLXXXXXXXXXYYLISTASLDQSV

SEQ ID NO: 5336 - protein, 39 aa, Artificial Sequence
  Non-cyclic GFR-binding peptide
  MOD_RES (2)..(33)..(34): Xaa is C or S
KXSKVIMYHYKLIKPTKGIKYLISIPSLDQSVXXPSASA

SEQ ID NO: 5337 - protein, 32 aa, Artificial Sequence
  Non-cyclic GFR-binding peptide
HDELTQYNKLFIPKKRVIELYLVSIASLQVQT

SEQ ID NO: 5338 - protein, 35 aa, Artificial Sequence
  Non-cyclic GFR-binding peptide
  MOD_RES (2)..(34)..(35): Xaa is C or S
GXARVVMNYHYKLIVNSSDDKYLVSIPSLQTPAXX

SEQ ID NO: 5339 - protein, 41 aa, Artificial Sequence
  Non-cyclic GFR-binding peptide
  MOD_RES (2)..(4)..(38)..(39): Xaa is C or S
  MOD_RES (16)..(17)..(18)..(19)..(20): Xaa is A or G
  MOD_RES (21)..(22)..(23)..(24): Xaa is A or G or absent
RXGXGEVVMDRYKKLXXXXXXXXXFYLMSIANLETPVXXAK

SEQ ID NO: 5340 - protein, 37 aa, Artificial Sequence
  Non-cyclic GFR-binding peptide
  MOD_RES (31)..(32): Xaa is C or S
KVVMNRYKKLIVNNSSDFYLVSIANLKTPAXXAKPVA

SEQ ID NO: 5341 - protein, 41 aa, Artificial Sequence
  Non-cyclic GFR-binding peptide
  MOD_RES (1)..(3)..(37)..(38): Xaa is C or S
  MOD_RES (15)..(16)..(17)..(18)..(19): Xaa is A or G
  MOD_RES (20)..(21)..(22)..(23): Xaa is A or G or absent
XGXGEVVMERHKRLXXXXXXXXXYYLMSTASLETPVXXAKP

SEQ ID NO: 5342 - protein, 36 aa, Artificial Sequence
  Non-cyclic GFR-binding peptide
  MOD_RES (32)..(32): Xaa is C or S
SRVVMNQYNKLIVNSSDDLYLVSIASLKTPAXTPKT

SEQ ID NO: 5343 - protein, 37 aa, Artificial Sequence
  Non-cyclic GFR-binding peptide
  MOD_RES (2)..(4)..(35)..(36): Xaa is C or S
SXKXSKVIMRHKRLIKPTKGIYYLISTASLDQSVXXP

SEQ ID NO: 5344 - protein, 34 aa, Artificial Sequence
  Non-cyclic GFR-binding peptide
  MOD_RES (32)..(33): Xaa is C or S
ARVVMNQYNKLIVNSSDDLYLVSIASLQTPAXXP

SEQ ID NO: 5345 - protein, 36 aa, Artificial Sequence
  Non-cyclic GFR-binding peptide
  MOD_RES (2)..(35)..(36): Xaa is C or S
  MOD_RES (13)..(14)..(15)..(16)..(17): Xaa is A or G
  MOD_RES (18)..(19)..(20)..(21): Xaa is A or G or absent
KXSKVIMYHYKLXXXXXXXXXKYLISIPSLDQSVXX

SEQ ID NO: 5346 - protein, 40 aa, Artificial Sequence
  Non-cyclic GFR-binding peptide
  MOD_RES (2)..(4)..(38)..(39): Xaa is C or S
  MOD_RES (16)..(17)..(18)..(19)..(20): Xaa is A or G
  MOD_RES (21)..(22)..(23)..(24): Xaa is A or G or absent
RXGXGEVVMERYKKLXXXXXXXXXFYLMSIANLETPVXXA

SEQ ID NO: 5347 - protein, 40 aa, Artificial Sequence
  Non-cyclic GFR-binding peptide
  MOD_RES (1)..(3)..(37)..(38): Xaa is C or S
  MOD_RES (15)..(16)..(17)..(18)..(19): Xaa is A or G
  MOD_RES (20)..(21)..(22)..(23): Xaa is A or G or absent
XGXSRVVMNQYNKLXXXXXXXXXLYLVSIASLKTPAXXPK

SEQ ID NO: 5348 - protein, 40 aa, Artificial Sequence
  Non-cyclic GFR-binding peptide
  MOD_RES (2)..(34)..(35): Xaa is C or S
GXAKVVMNYHYKLIVNNSSDKYLVSIPSLKTPAXXAKPVA

SEQ ID NO: 5349 - protein, 32 aa, Artificial Sequence
  Non-cyclic GFR-binding peptide
  MOD_RES (31)..(32): Xaa is C or S
KVVMNRYKKLIVNNSSDFYLVSIANLKTPAXX

SEQ ID NO: 5350 - protein, 45 aa, Artificial Sequence
  Non-cyclic GFR-binding peptide
  MOD_RES (2)..(4)..(41): Xaa is C or S
  MOD_RES (17)..(18)..(19)..(20)..(21): Xaa is A or G
  MOD_RES (22)..(23)..(24)..(25): Xaa is A or G or absent
EXKXALHDELTYHYKLXXXXXXXXXKYLVSIPSLQVQTPRXQVNR

SEQ ID NO: 5351 - protein, 34 aa, Artificial Sequence
  Non-cyclic GFR-binding peptide
  MOD_RES (1)..(1): Xaa is C or S
  MOD_RES (13)..(14)..(15)..(16)..(17): Xaa is A or G
  MOD_RES (18)..(19)..(20)..(21): Xaa is A or G or absent
XGEVVMDRYKKLXXXXXXXXXFYLMSIANLETPV

SEQ ID NO: 5352 - protein, 37 aa, Artificial Sequence
  Non-cyclic GFR-binding peptide
  MOD_RES (36)..(36): Xaa is C or S
LHDELTYHYKLFIPKKRVIEKYLVSIPSLQVQTPRXQ

SEQ ID NO: 5353 - protein, 39 aa, Artificial Sequence
  Non-cyclic GFR-binding peptide
  MOD_RES (1)..(34)..(35): Xaa is C or S
  MOD_RES (12)..(13)..(14)..(15)..(16): Xaa is A or G
  MOD_RES (17)..(18)..(19)..(20): Xaa is A or G or absent
XSKVIMRHKRLXXXXXXXXXYYLISTASLDQSVXXPSAS

SEQ ID NO: 5354 - protein, 43 aa, Artificial Sequence
  Non-cyclic GFR-binding peptide
  MOD_RES (2)..(4)..(37)..(38): Xaa is C or S
  MOD_RES (15)..(16)..(17)..(18)..(19): Xaa is A or G
  MOD_RES (20)..(21)..(22)..(23): Xaa is A or G or absent
SXKXSRVIMRYKKLXXXXXXXXXFYLISIANLAQPVXXPAASA

SEQ ID NO: 5355 - protein, 41 aa, Artificial Sequence
  Non-cyclic GFR-binding peptide
  MOD_RES (2)..(4)..(35)..(36): Xaa is C or S
SXKXSRVIMRYKKLVKPKRGVFYLISIANLAQPVXXPAASA

SEQ ID NO: 5356 - protein, 35 aa, Artificial Sequence
  Non-cyclic GFR-binding peptide
  MOD_RES (31)..(32): Xaa is C or S
SKVIMQYNKLIKPTKGILYLISIASLDQSVXXPSA

SEQ ID NO: 5357 - protein, 35 aa, Artificial Sequence
  Non-cyclic GFR-binding peptide
  MOD_RES (2)..(34)..(35): Xaa is C or S
GXGEVVMERYKKLVVKDYEDFYLMSIANLETPVXX

SEQ ID NO: 5358 - protein, 36 aa, Artificial Sequence
  Non-cyclic GFR-binding peptide
  MOD_RES (2)..(4)..(36): Xaa is C or S
HXGXAKVVMNRYKKLIVNNSSDFYLVSIANLKTPAX

SEQ ID NO: 5359 - protein, 42 aa, Artificial Sequence
  Non-cyclic GFR-binding peptide
  MOD_RES (2)..(36): Xaa is C or S
  MOD_RES (14)..(15)..(16)..(17)..(18): Xaa is A or G
  MOD_RES (19)..(20)..(21)..(22): Xaa is A or G or absent
GXSRVVMNYHYKLXXXXXXXXXKYLVSIPSLKTPAXTPKTVH

SEQ ID NO: 5360 - protein, 39 aa, Artificial Sequence
  Non-cyclic GFR-binding peptide
  MOD_RES (1)..(34)..(35): Xaa is C or S
  MOD_RES (12)..(13)..(14)..(15)..(16): Xaa is A or G
  MOD_RES (17)..(18)..(19)..(20): Xaa is A or G or absent
XSKVIMQYNKLXXXXXXXXXLYLISIASLDQSVXXPSAS

SEQ ID NO: 5361 - protein, 38 aa, Artificial Sequence
  Non-cyclic GFR-binding peptide
  MOD_RES (1)..(3): Xaa is C or S
  MOD_RES (16)..(17)..(18)..(19)..(20): Xaa is A or G
  MOD_RES (21)..(22)..(23)..(24): Xaa is A or G or absent
XKXALHDELTYHYKLXXXXXXXXXKYLVSIPSLQVQTP

SEQ ID NO: 5362 - protein, 38 aa, Artificial Sequence
  Non-cyclic GFR-binding peptide
  MOD_RES (1)..(3)..(35)..(36): Xaa is C or S
XGXAKVVMNQYNKLIVNNSSDLYLVSIASLKTPAXXAK

SEQ ID NO: 5363 - protein, 35 aa, Artificial Sequence
  Non-cyclic GFR-binding peptide
  MOD_RES (1)..(35): Xaa is C or S
  MOD_RES (13)..(14)..(15)..(16)..(17): Xaa is A or G
  MOD_RES (18)..(19)..(20)..(21): Xaa is A or G or absent
XAKVVMNQYNKLXXXXXXXXXLYLVSIASLKTPAX

SEQ ID NO: 5364 - protein, 37 aa, Artificial Sequence
  Non-cyclic GFR-binding peptide
  MOD_RES (2)..(33)..(34): Xaa is C or S
KXSKVIMRHKRLIKPTKGIYYLISTASLDQSVXXPSA

SEQ ID NO: 5365 - protein, 33 aa, Artificial Sequence
  Non-cyclic GFR-binding peptide
  MOD_RES (1)..(32)..(33): Xaa is C or S
XSKVIMRHKRLIKPTKGIYYLISTASLDQSVXX

SEQ ID NO: 5366 - protein, 33 aa, Artificial Sequence
  Non-cyclic GFR-binding peptide
  MOD_RES (1)..(1): Xaa is C or S
  MOD_RES (12)..(13)..(14)..(15)..(16): Xaa is A or G
  MOD_RES (17)..(18)..(19)..(20): Xaa is A or G or absent
XSRVIMQYNKLXXXXXXXXXLYLISIASLAQPV

SEQ ID NO: 5367 - protein, 44 aa, Artificial Sequence
  Non-cyclic GFR-binding peptide
  MOD_RES (2)..(4)..(38)..(39): Xaa is C or S
  MOD_RES (16)..(17)..(18)..(19)..(20): Xaa is A or G
  MOD_RES (21)..(22)..(23)..(24): Xaa is A or G or absent
RXGXGEVVMDYHYKLXXXXXXXXXKYLMSIPSLETPVXXAKPIK

SEQ ID NO: 5368 - protein, 38 aa, Artificial Sequence
  Non-cyclic GFR-binding peptide
  MOD_RES (2)..(4)..(38): Xaa is C or S
  MOD_RES (16)..(17)..(18)..(19)..(20): Xaa is A or G
  MOD_RES (21)..(22)..(23)..(24): Xaa is A or G or absent
HXGXSRVVMNRHKRLXXXXXXXXXYYLVSTASLKTPAX

SEQ ID NO: 5369 - protein, 34 aa, Artificial Sequence
  Non-cyclic GFR-binding peptide
  MOD_RES (2)..(2): Xaa is C or S
  MOD_RES (13)..(14)..(15)..(16)..(17): Xaa is A or G
  MOD_RES (18)..(19)..(20)..(21): Xaa is A or G or absent
KXSKVVMYHYKLXXXXXXXXXKYLISIPSLDQPV

SEQ ID NO: 5370 - protein, 31 aa, Artificial Sequence
  Non-cyclic GFR-binding peptide
GEVVMDYHYKLVVKENEDKYLMSIPSLETPV

SEQ ID NO: 5371 - protein, 32 aa, Artificial Sequence
  Non-cyclic GFR-binding peptide
  MOD_RES (2)..(2): Xaa is C or S
KXSKVVMQYNKLVKPTRGVLYLISIASLDQPV

SEQ ID NO: 5372 - protein, 39 aa, Artificial Sequence
  Non-cyclic GFR-binding peptide
  MOD_RES (2)..(4)..(37)..(38): Xaa is C or S
  MOD_RES (15)..(16)..(17)..(18)..(19): Xaa is A or G
  MOD_RES (20)..(21)..(22)..(23): Xaa is A or G or absent
SXKXSKVIMRHKRLXXXXXXXXXYYLISTASLDQSVXXP

SEQ ID NO: 5373 - protein, 39 aa, Artificial Sequence
  Non-cyclic GFR-binding peptide
  MOD_RES (2)..(4)..(37)..(38): Xaa is C or S
  MOD_RES (15)..(16)..(17)..(18)..(19): Xaa is A or G
  MOD_RES (20)..(21)..(22)..(23): Xaa is A or G or absent
SXKXSRVIMRYKKLXXXXXXXXXFYLISIANLAQPVXXP

SEQ ID NO: 5374 - protein, 33 aa, Artificial Sequence
  Non-cyclic GFR-binding peptide
  MOD_RES (1)..(1): Xaa is C or S
  MOD_RES (12)..(13)..(14)..(15)..(16): Xaa is A or G
  MOD_RES (17)..(18)..(19)..(20): Xaa is A or G or absent
XSRVIMRHKRLXXXXXXXXXYYLISTASLAQPV

SEQ ID NO: 5375 - protein, 36 aa, Artificial Sequence
  Non-cyclic GFR-binding peptide
  MOD_RES (2)..(33)..(34): Xaa is C or S
KXSRVIMYHYKLVKPKRGVKYLISIPSLAQPVXXPA

SEQ ID NO: 5376 - protein, 38 aa, Artificial Sequence
  Non-cyclic GFR-binding peptide
  MOD_RES (2)..(36): Xaa is C or S
  MOD_RES (14)..(15)..(16)..(17)..(18): Xaa is A or G
  MOD_RES (19)..(20)..(21)..(22): Xaa is A or G or absent
GXSRVVMNQYNKLXXXXXXXXXLYLVSIASLKTPAXTP

SEQ ID NO: 5377 - protein, 42 aa, Artificial Sequence
  Non-cyclic GFR-binding peptide
  MOD_RES (2)..(4)..(41): Xaa is C or S
EXKXALHDELTRYKKLFIPKKRVIEFYLVSIANLQVQTPRXQ

SEQ ID NO: 5378 - protein, 39 aa, Artificial Sequence
  Non-cyclic GFR-binding peptide
  MOD_RES (2)..(4)..(35)..(36): Xaa is C or S
SXKXSKVVMRHKRLVKPTRGVYYLISTASLDQPVXXPSA

SEQ ID NO: 5379 - protein, 36 aa, Artificial Sequence
  Non-cyclic GFR-binding peptide
  MOD_RES (34)..(35): Xaa is C or S
  MOD_RES (12)..(13)..(14)..(15)..(16): Xaa is A or G
  MOD_RES (17)..(18)..(19)..(20): Xaa is A or G or absent
ARVVMNYHYKLXXXXXXXXXKYLVSIPSLQTPAXXP

SEQ ID NO: 5380 - protein, 30 aa, Artificial Sequence
  Non-cyclic GFR-binding peptide
EVVMDYHYKLVVKENEDKYLMSIPSLETPV

SEQ ID NO: 5381 - protein, 39 aa, Artificial Sequence
  Non-cyclic GFR-binding peptide
  MOD_RES (2)..(4): Xaa is C or S
  MOD_RES (17)..(18)..(19)..(20)..(21): Xaa is A or G
  MOD_RES (22)..(23)..(24)..(25): Xaa is A or G or absent
EXKXALHDELTQYNKLXXXXXXXXXLYLVSIASLQVQTP

SEQ ID NO: 5382 - protein, 38 aa, Artificial Sequence
  Non-cyclic GFR-binding peptide
  MOD_RES (32)..(33): Xaa is C or S
GEVVMERYKKLVVKDYEDFYLMSIANLETPVXXAKPIS

SEQ ID NO: 5383 - protein, 40 aa, Artificial Sequence
  Non-cyclic GFR-binding peptide
  MOD_RES (2)..(4)..(35)..(36): Xaa is C or S
SXKXSKVIMRYKKLIKPTKGIFYLISIANLDQSVXXPSAS

SEQ ID NO: 5384 - protein, 37 aa, Artificial Sequence
  Non-cyclic GFR-binding peptide
  MOD_RES (2)..(34): Xaa is C or S
GXSRVVMNQYNKLIVNSSDDLYLVSIASLKTPAXTPK

SEQ ID NO: 5385 - protein, 41 aa, Artificial Sequence
  Non-cyclic GFR-binding peptide
  MOD_RES (2)..(39): Xaa is C or S
KXALHDELTYHYKLFIPKKRVIEKYLVSIPSLQVQTPRXQV

SEQ ID NO: 5386 - protein, 36 aa, Artificial Sequence
  Non-cyclic GFR-binding peptide
  MOD_RES (1)..(3)..(36): Xaa is C or S
  MOD_RES (14)..(15)..(16)..(17)..(18): Xaa is A or G
  MOD_RES (19)..(20)..(21)..(22): Xaa is A or G or absent
XKXSKVVMRHKRLXXXXXXXXXYYLISTASLDQPVX

SEQ ID NO: 5387 - protein, 39 aa, Artificial Sequence
  Non-cyclic GFR-binding peptide
  MOD_RES (1)..(38): Xaa is C or S
XALHDELTQYNKLFIPKKRVIELYLVSIASLQVQTPRXQ

SEQ ID NO: 5388 - protein, 33 aa, Artificial Sequence
  Non-cyclic GFR-binding peptide
  MOD_RES (31)..(31): Xaa is C or S
RVVMNRHKRLIVNSSDDYYLVSTASLKTPAXTP

SEQ ID NO: 5389 - protein, 34 aa, Artificial Sequence
  Non-cyclic GFR-binding peptide
  MOD_RES (2)..(34): Xaa is C or S
GXGEVVMDYHYKLVVKENEDKYLMSIPSLETPVX

SEQ ID NO: 5390 - protein, 39 aa, Artificial Sequence
  Non-cyclic GFR-binding peptide
  MOD_RES (2)..(33)..(34): Xaa is C or S
KXSKVIMRYKKLIKPTKGIFYLISIANLDQSVXXPSASA

SEQ ID NO: 5391 - protein, 38 aa, Artificial Sequence
  Non-cyclic GFR-binding peptide
  MOD_RES (2)..(4): Xaa is C or S
  MOD_RES (17)..(18)..(19)..(20)..(21): Xaa is A or G
  MOD_RES (22)..(23)..(24)..(25): Xaa is A or G or absent
EXKXALHDELTRHKRLXXXXXXXXXYYLVSTASLQVQT

SEQ ID NO: 5392 - protein, 37 aa, Artificial Sequence
  Non-cyclic GFR-binding peptide
  MOD_RES (1)..(3)..(36)..(37): Xaa is C or S
XGXEAVSMGERYKKLTPVGMDDFYLVSIANLKTPVXX

SEQ ID NO: 5393 - protein, 41 aa, Artificial Sequence
  Non-cyclic GFR-binding peptide
  MOD_RES (2)..(4)..(37)..(38): Xaa is C or S
  MOD_RES (15)..(16)..(17)..(18)..(19): Xaa is A or G
  MOD_RES (20)..(21)..(22)..(23): Xaa is A or G or absent
SXKXSKVVMQYNKLXXXXXXXXXLYLISIASLDQPVXXPSA

SEQ ID NO: 5394 - protein, 34 aa, Artificial Sequence
  Non-cyclic GFR-binding peptide
  MOD_RES (1)..(1): Xaa is C or S
  MOD_RES (13)..(14)..(15)..(16)..(17): Xaa is A or G
  MOD_RES (18)..(19)..(20)..(21): Xaa is A or G or absent
XGEVVMERHKRLXXXXXXXXXYYLMSTASLETPV

SEQ ID NO: 5395 - protein, 39 aa, Artificial Sequence
  Non-cyclic GFR-binding peptide
  MOD_RES (37)..(37): Xaa is C or S
  MOD_RES (13)..(14)..(15)..(16)..(17): Xaa is A or G
  MOD_RES (18)..(19)..(20)..(21): Xaa is A or G or absent
ALHDELTRHKRLXXXXXXXXXYYLVSTASLQVQTPRXQV

SEQ ID NO: 5396 - protein, 40 aa, Artificial Sequence
  Non-cyclic GFR-binding peptide
  MOD_RES (1)..(34)..(35): Xaa is C or S
XEAVSMGERYKKLTPVGMDDFYLVSIANLKTPVXXAKGVK

SEQ ID NO: 5397 - protein, 40 aa, Artificial Sequence
  Non-cyclic GFR-binding peptide
  MOD_RES (1)..(38): Xaa is C or S
XALHDELTRYKKLFIPKKRVIEFYLVSIANLQVQTPRXQV

SEQ ID NO: 5398 - protein, 37 aa, Artificial Sequence
  Non-cyclic GFR-binding peptide
  MOD_RES (1)..(36)..(37): Xaa is C or S
  MOD_RES (14)..(15)..(16)..(17)..(18): Xaa is A or G
  MOD_RES (19)..(20)..(21)..(22): Xaa is A or G or absent
XEAVSMGERYKKLXXXXXXXXXFYLVSIANLKTPVXX

SEQ ID NO: 5399 - protein, 32 aa, Artificial Sequence
  Non-cyclic GFR-binding peptide
  MOD_RES (32)..(32): Xaa is C or S
AKVVMNRYKKLIVNNSSDFYLVSIANLKTPAX

SEQ ID NO: 5400 - protein, 39 aa, Artificial Sequence
  Non-cyclic GFR-binding peptide
  MOD_RES (33)..(34): Xaa is C or S
  MOD_RES (11)..(12)..(13)..(14)..(15): Xaa is A or G
  MOD_RES (16)..(17)..(18)..(19): Xaa is A or G or absent
EVVMEYHYKLXXXXXXXXXKYLMSIPSLETPVXXAKPIS

SEQ ID NO: 5401 - protein, 38 aa, Artificial Sequence
  Non-cyclic GFR-binding peptide
  MOD_RES (37)..(37): Xaa is C or S
ALHDELTYHYKLFIPKKRVIEKYLVSIPSLQVQTPRXQ

SEQ ID NO: 5402 - protein, 34 aa, Artificial Sequence
  Non-cyclic GFR-binding peptide
  MOD_RES (1)..(3)..(34): Xaa is C or S
XKXSRVIMRYKKLVKPKRGVFYLISIANLAQPVX

SEQ ID NO: 5403 - protein, 40 aa, Artificial Sequence
  Non-cyclic GFR-binding peptide
  MOD_RES (36)..(36): Xaa is C or S
LHDELTRYKKLFIPKKRVIEFYLVSIANLQVQTPRXQVNR

SEQ ID NO: 5404 - protein, 40 aa, Artificial Sequence
  Non-cyclic GFR-binding peptide
  MOD_RES (2)..(35)..(36): Xaa is C or S
  MOD_RES (13)..(14)..(15)..(16)..(17): Xaa is A or G
  MOD_RES (18)..(19)..(20)..(21): Xaa is A or G or absent
KXSRVIMRYKKLXXXXXXXXXFYLISIANLAQPVXXPAAS

SEQ ID NO: 5405 - protein, 32 aa, Artificial Sequence
  Non-cyclic GFR-binding peptide
  MOD_RES (31)..(31): Xaa is C or S
RVVMNRHKRLIVNSSDDYYLVSTASLKTPAXT

SEQ ID NO: 5406 - protein, 36 aa, Artificial Sequence
  Non-cyclic GFR-binding peptide
  MOD_RES (2)..(4)..(36): Xaa is C or S
HXGXAKVVMNYHYKLIVNNSSDKYLVSIPSLKTPAX

SEQ ID NO: 5407 - protein, 41 aa, Artificial Sequence
  Non-cyclic GFR-binding peptide
  MOD_RES (1)..(3)..(38)..(39): Xaa is C or S
  MOD_RES (16)..(17)..(18)..(19)..(20): Xaa is A or G
  MOD_RES (21)..(22)..(23)..(24): Xaa is A or G or absent
XGXEAVSMGEQYNKLXXXXXXXXXLYLVSIASLKTPVXXAK

SEQ ID NO: 5408 - protein, 37 aa, Artificial Sequence
  Non-cyclic GFR-binding peptide
  MOD_RES (2)..(34)..(35): Xaa is C or S
GXGEVVMERHKRLVVKDYEDYYLMSTASLETPVXXAK

SEQ ID NO: 5409 - protein, 36 aa, Artificial Sequence
  Non-cyclic GFR-binding peptide
  MOD_RES (1)..(32)..(33): Xaa is C or S
XSKVVMRHKRLVKPTRGVYYLISTASLDQPVXXPSA

SEQ ID NO: 5410 - protein, 37 aa, Artificial Sequence
  Non-cyclic GFR-binding peptide
  MOD_RES (1)..(35)..(36): Xaa is C or S
  MOD_RES (13)..(14)..(15)..(16)..(17): Xaa is A or G
  MOD_RES (18)..(19)..(20)..(21): Xaa is A or G or absent
XGEVVMDYHYKLXXXXXXXXXKYLMSIPSLETPVXXA

SEQ ID NO: 5411 - protein, 36 aa, Artificial Sequence
  Non-cyclic GFR-binding peptide
  MOD_RES (2)..(36): Xaa is C or S
  MOD_RES (14)..(15)..(16)..(17)..(18): Xaa is A or G
  MOD_RES (19)..(20)..(21)..(22): Xaa is A or G or absent
GXGEVVMDYHYKLXXXXXXXXXKYLMSIPSLETPVX

SEQ ID NO: 5412 - protein, 33 aa, Artificial Sequence
  Non-cyclic GFR-binding peptide
  MOD_RES (12)..(13)..(14)..(15)..(16): Xaa is A or G
  MOD_RES (17)..(18)..(19)..(20): Xaa is A or G or absent
GEVVMDYHYKLXXXXXXXXXKYLMSIPSLETPV

SEQ ID NO: 5413 - protein, 36 aa, Artificial Sequence
  Non-cyclic GFR-binding peptide
  MOD_RES (2)..(4): Xaa is C or S
  MOD_RES (15)..(16)..(17)..(18)..(19): Xaa is A or G
  MOD_RES (20)..(21)..(22)..(23): Xaa is A or G or absent
SXKXSKVVMQYNKLXXXXXXXXXLYLISIASLDQPV

SEQ ID NO: 5414 - protein, 33 aa, Artificial Sequence
  Non-cyclic GFR-binding peptide
  MOD_RES (33)..(33): Xaa is C or S
  MOD_RES (11)..(12)..(13)..(14)..(15): Xaa is A or G
  MOD_RES (16)..(17)..(18)..(19): Xaa is A or G or absent
SKVIMRYKKLXXXXXXXXXFYLISIANLDQSVX

SEQ ID NO: 5415 - protein, 42 aa, Artificial Sequence
  Non-cyclic GFR-binding peptide
  MOD_RES (2)..(4)..(37)..(38): Xaa is C or S
RXGXEAVSMGERHKRLTPVGMDDYYLVSTASLKTPVXXAKGV

SEQ ID NO: 5416 - protein, 40 aa, Artificial Sequence
  Non-cyclic GFR-binding peptide
  MOD_RES (2)..(39): Xaa is C or S
KXALHDELTQYNKLFIPKKRVIELYLVSIASLQVQTPRXQ

SEQ ID NO: 5417 - protein, 38 aa, Artificial Sequence
  Non-cyclic GFR-binding peptide
  MOD_RES (36)..(36): Xaa is C or S
LHDELTRYKKLFIPKKRVIEFYLVSIANLQVQTPRXQV

SEQ ID NO: 5418 - protein, 41 aa, Artificial Sequence
  Non-cyclic GFR-binding peptide
  MOD_RES (2)..(4)..(38)..(39): Xaa is C or S
  MOD_RES (16)..(17)..(18)..(19)..(20): Xaa is A or G
  MOD_RES (21)..(22)..(23)..(24): Xaa is A or G or absent
HXGXARVVMNQYNKLXXXXXXXXXLYLVSIASLQTPAXXPK

SEQ ID NO: 5419 - protein, 38 aa, Artificial Sequence
  Non-cyclic GFR-binding peptide
  MOD_RES (2)..(34)..(35): Xaa is C or S
GXGEVVMDRYKKLVVKENEDFYLMSIANLETPVXXAKP

SEQ ID NO: 5420 - protein, 38 aa, Artificial Sequence
  Non-cyclic GFR-binding peptide
  MOD_RES (1)..(34)..(35): Xaa is C or S
  MOD_RES (12)..(13)..(14)..(15)..(16): Xaa is A or G
  MOD_RES (17)..(18)..(19)..(20): Xaa is A or G or absent
XSKVVMYHYKLXXXXXXXXXKYLISIPSLDQPVXXPSA

SEQ ID NO: 5421 - protein, 34 aa, Artificial Sequence
  Non-cyclic GFR-binding peptide
  MOD_RES (31)..(32): Xaa is C or S
KVVMNRYKKLIVNNSSDFYLVSIANLKTPAXXAK

SEQ ID NO: 5422 - protein, 41 aa, Artificial Sequence
  Non-cyclic GFR-binding peptide
  MOD_RES (1)..(35)..(36): Xaa is C or S
  MOD_RES (13)..(14)..(15)..(16)..(17): Xaa is A or G
  MOD_RES (18)..(19)..(20)..(21): Xaa is A or G or absent
XGEVVMDRYKKLXXXXXXXXXFYLMSIANLETPVXXAKPIK

SEQ ID NO: 5423 - protein, 40 aa, Artificial Sequence
  Non-cyclic GFR-binding peptide
  MOD_RES (1)..(34)..(35): Xaa is C or S
  MOD_RES (12)..(13)..(14)..(15)..(16): Xaa is A or G
  MOD_RES (17)..(18)..(19)..(20): Xaa is A or G or absent
XSKVVMRHKRLXXXXXXXXXYYLISTASLDQPVXXPSASA

SEQ ID NO: 5424 - protein, 38 aa, Artificial Sequence
  Non-cyclic GFR-binding peptide
  MOD_RES (32)..(33): Xaa is C or S
AKVVMNYHYKLIVNNSSDKYLVSIPSLKTPAXXAKPVA

SEQ ID NO: 5425 - protein, 32 aa, Artificial Sequence
  Non-cyclic GFR-binding peptide
  MOD_RES (2)..(2): Xaa is C or S
KXSKVIMYHYKLIKPTKGIKYLISIPSLDQSV

SEQ ID NO: 5426 - protein, 39 aa, Artificial Sequence
  Non-cyclic GFR-binding peptide
  MOD_RES (1)..(34)..(35): Xaa is C or S
XEAVSMGERYKKLTPVGMDDFYLVSIANLKTPVXXAKGV

SEQ ID NO: 5427 - protein, 35 aa, Artificial Sequence
  Non-cyclic GFR-binding peptide
  MOD_RES (2)..(34)..(35): Xaa is C or S
GXSRVVMNQYNKLIVNSSDDLYLVSIASLKTPAXX

SEQ ID NO: 5428 - protein, 34 aa, Artificial Sequence
  Non-cyclic GFR-binding peptide
  MOD_RES (1)..(3): Xaa is C or S
XGXGEVVMDRHKRLVVKENEDYYLMSTASLETPV

SEQ ID NO: 5429 - protein, 30 aa, Artificial Sequence
  Non-cyclic GFR-binding peptide
SRVIMYHYKLVKPKRGVKYLISIPSLAQPV

SEQ ID NO: 5430 - protein, 37 aa, Artificial Sequence
  Non-cyclic GFR-binding peptide
  MOD_RES (1)..(3)..(35)..(36): Xaa is C or S
XGXGEVVMDYHYKLVVKENEDKYLMSIPSLETPVXXA

SEQ ID NO: 5431 - protein, 36 aa, Artificial Sequence
  Non-cyclic GFR-binding peptide
  MOD_RES (1)..(3)..(36): Xaa is C or S
  MOD_RES (14)..(15)..(16)..(17)..(18): Xaa is A or G
  MOD_RES (19)..(20)..(21)..(22): Xaa is A or G or absent
XKXSKVVMQYNKLXXXXXXXXXLYLISIASLDQPVX

SEQ ID NO: 5432 - protein, 36 aa, Artificial Sequence
  Non-cyclic GFR-binding peptide
  MOD_RES (2)..(36): Xaa is C or S
  MOD_RES (14)..(15)..(16)..(17)..(18): Xaa is A or G
  MOD_RES (19)..(20)..(21)..(22): Xaa is A or G or absent
GXARVVMNYHYKLXXXXXXXXXKYLVSIPSLQTPAX

SEQ ID NO: 5433 - protein, 40 aa, Artificial Sequence
  Non-cyclic GFR-binding peptide
  MOD_RES (1)..(35)..(36): Xaa is C or S
  MOD_RES (13)..(14)..(15)..(16)..(17): Xaa is A or G
  MOD_RES (18)..(19)..(20)..(21): Xaa is A or G or absent
XAKVVMNRYKKLXXXXXXXXXFYLVSIANLKTPAXXAKPV

SEQ ID NO: 5434 - protein, 32 aa, Artificial Sequence
  Non-cyclic GFR-binding peptide
  MOD_RES (11)..(12)..(13)..(14)..(15): Xaa is A or G
  MOD_RES (16)..(17)..(18)..(19): Xaa is A or G or absent
SRVIMRYKKLXXXXXXXXXFYLISIANLAQPV

SEQ ID NO: 5435 - protein, 36 aa, Artificial Sequence
  Non-cyclic GFR-binding peptide
  MOD_RES (31)..(31): Xaa is C or S
RVVMNQYNKLIVNSSDDLYLVSIASLKTPAXTPKTV

SEQ ID NO: 5436 - protein, 39 aa, Artificial Sequence
  Non-cyclic GFR-binding peptide
  MOD_RES (37)..(37): Xaa is C or S
  MOD_RES (13)..(14)..(15)..(16)..(17): Xaa is A or G
  MOD_RES (18)..(19)..(20)..(21): Xaa is A or G or absent
ALHDELTQYNKLXXXXXXXXXLYLVSIASLQVQTPRXQV

SEQ ID NO: 5437 - protein, 42 aa, Artificial Sequence
  Non-cyclic GFR-binding peptide
  MOD_RES (1)..(3)..(36)..(37): Xaa is C or S
  MOD_RES (14)..(15)..(16)..(17)..(18): Xaa is A or G
  MOD_RES (19)..(20)..(21)..(22): Xaa is A or G or absent
XKXSKVIMRYKKLXXXXXXXXXFYLISIANLDQSVXXPSASA

SEQ ID NO: 5438 - protein, 40 aa, Artificial Sequence
  Non-cyclic GFR-binding peptide
  MOD_RES (1)..(34)..(35): Xaa is C or S
  MOD_RES (12)..(13)..(14)..(15)..(16): Xaa is A or G
  MOD_RES (17)..(18)..(19)..(20): Xaa is A or G or absent
XSKVVMQYNKLXXXXXXXXXLYLISIASLDQPVXXPSASA

SEQ ID NO: 5439 - protein, 40 aa, Artificial Sequence
  Non-cyclic GFR-binding peptide
  MOD_RES (36)..(36): Xaa is C or S
LHDELTQYNKLFIPKKRVIELYLVSIASLQVQTPRXQVNR

SEQ ID NO: 5440 - protein, 37 aa, Artificial Sequence
  Non-cyclic GFR-binding peptide
  MOD_RES (1)..(33)..(34): Xaa is C or S
XGEVVMDYHYKLVVKENEDKYLMSIPSLETPVXXAKP

SEQ ID NO: 5441 - protein, 33 aa, Artificial Sequence
  Non-cyclic GFR-binding peptide
  MOD_RES (32)..(33): Xaa is C or S
GEVVMEYHYKLVVKDYEDKYLMSIPSLETPVXX

SEQ ID NO: 5442 - protein, 39 aa, Artificial Sequence
  Non-cyclic GFR-binding peptide
  MOD_RES (1)..(3)..(35)..(36): Xaa is C or S
XGXSRVVMNYHYKLIVNSSDDKYLVSIPSLKTPAXXPKP

SEQ ID NO: 5443 - protein, 40 aa, Artificial Sequence
  Non-cyclic GFR-binding peptide
  MOD_RES (2)..(36): Xaa is C or S
  MOD_RES (14)..(15)..(16)..(17)..(18): Xaa is A or G
  MOD_RES (19)..(20)..(21)..(22): Xaa is A or G or absent
GXSRVVMNRHKRLXXXXXXXXXYYLVSTASLKTPAXTPKT

SEQ ID NO: 5444 - protein, 35 aa, Artificial Sequence
  Non-cyclic GFR-binding peptide
  MOD_RES (33)..(34): Xaa is C or S
  MOD_RES (11)..(12)..(13)..(14)..(15): Xaa is A or G
  MOD_RES (16)..(17)..(18)..(19): Xaa is A or G or absent
SKVIMYHYKLXXXXXXXXXKYLISIPSLDQSVXXP

SEQ ID NO: 5445 - protein, 36 aa, Artificial Sequence
  Non-cyclic GFR-binding peptide
  MOD_RES (1)..(33)..(34): Xaa is C or S
XGEVVMDYHYKLVVKENEDKYLMSIPSLETPVXXAK

SEQ ID NO: 5446 - protein, 35 aa, Artificial Sequence
  Non-cyclic GFR-binding peptide
  MOD_RES (2)..(4): Xaa is C or S
RXGXGEVVMERHKRLVVKDYEDYYLMSTASLETPV

SEQ ID NO: 5447 - protein, 36 aa, Artificial Sequence
  Non-cyclic GFR-binding peptide
  MOD_RES (2)..(2): Xaa is C or S
  MOD_RES (15)..(16)..(17)..(18)..(19): Xaa is A or G
  MOD_RES (20)..(21)..(22)..(23): Xaa is A or G or absent
KXALHDELTQYNKLXXXXXXXXXLYLVSIASLQVQT

SEQ ID NO: 5448 - protein, 41 aa, Artificial Sequence
  Non-cyclic GFR-binding peptide
  MOD_RES (2)..(36)..(37): Xaa is C or S
  MOD_RES (14)..(15)..(16)..(17)..(18): Xaa is A or G
  MOD_RES (19)..(20)..(21)..(22): Xaa is A or G or absent
GXSRVVMNYHYKLXXXXXXXXXKYLVSIPSLKTPAXXPKPV

SEQ ID NO: 5449 - protein, 35 aa, Artificial Sequence
  Non-cyclic GFR-binding peptide
  MOD_RES (31)..(32): Xaa is C or S
SKVIMRHKRLIKPTKGIYYLISTASLDQSVXXPSA

SEQ ID NO: 5450 - protein, 43 aa, Artificial Sequence
  Non-cyclic GFR-binding peptide
  MOD_RES (2)..(4)..(37)..(38): Xaa is C or S
RXGXEAVSMGEQYNKLTPVGMDDLYLVSIASLKTPVXXAKGVK

SEQ ID NO: 5451 - protein, 39 aa, Artificial Sequence
  Non-cyclic GFR-binding peptide
  MOD_RES (1)..(34)..(35): Xaa is C or S
  MOD_RES (12)..(13)..(14)..(15)..(16): Xaa is A or G
  MOD_RES (17)..(18)..(19)..(20): Xaa is A or G or absent
XSKVVMYHYKLXXXXXXXXXKYLISIPSLDQPVXXPSAS

SEQ ID NO: 5452 - protein, 36 aa, Artificial Sequence
  Non-cyclic GFR-binding peptide
  MOD_RES (32)..(33): Xaa is C or S
GEVVMERHKRLVVKDYEDYYLMSTASLETPVXXAKP

SEQ ID NO: 5453 - protein, 38 aa, Artificial Sequence
  Non-cyclic GFR-binding peptide
  MOD_RES (2)..(4)..(37)..(38): Xaa is C or S
  MOD_RES (15)..(16)..(17)..(18)..(19): Xaa is A or G
  MOD_RES (20)..(21)..(22)..(23): Xaa is A or G or absent
SXKXSKVIMRHKRLXXXXXXXXXYYLISTASLDQSVXX

SEQ ID NO: 5454 - protein, 35 aa, Artificial Sequence
  Non-cyclic GFR-binding peptide
  MOD_RES (1)..(35): Xaa is C or S
  MOD_RES (13)..(14)..(15)..(16)..(17): Xaa is A or G
  MOD_RES (18)..(19)..(20)..(21): Xaa is A or G or absent
XARVVMNRHKRLXXXXXXXXXYYLVSTASLQTPAX

SEQ ID NO: 5455 - protein, 36 aa, Artificial Sequence
  Non-cyclic GFR-binding peptide
  MOD_RES (2)..(34)..(35): Xaa is C or S
GXSRVVMNRHKRLIVNSSDDYYLVSTASLKTPAXXP

SEQ ID NO: 5456 - protein, 42 aa, Artificial Sequence
  Non-cyclic GFR-binding peptide
  MOD_RES (2)..(36)..(37): Xaa is C or S
  MOD_RES (14)..(15)..(16)..(17)..(18): Xaa is A or G
  MOD_RES (19)..(20)..(21)..(22): Xaa is A or G or absent
GXGEVVMDRHKRLXXXXXXXXXYYLMSTASLETPVXXAKPIK

SEQ ID NO: 5457 - protein, 37 aa, Artificial Sequence
  Non-cyclic GFR-binding peptide
  MOD_RES (34)..(35): Xaa is C or S
  MOD_RES (12)..(13)..(14)..(15)..(16): Xaa is A or G
  MOD_RES (17)..(18)..(19)..(20): Xaa is A or G or absent
GEVVMERHKRLXXXXXXXXXYYLMSTASLETPVXXAK

SEQ ID NO: 5458 - protein, 35 aa, Artificial Sequence
  Non-cyclic GFR-binding peptide
  MOD_RES (34)..(35): Xaa is C or S
  MOD_RES (12)..(13)..(14)..(15)..(16): Xaa is A or G
  MOD_RES (17)..(18)..(19)..(20): Xaa is A or G or absent
AKVVMNRYKKLXXXXXXXXXFYLVSIANLKTPAXX

SEQ ID NO: 5459 - protein, 40 aa, Artificial Sequence
  Non-cyclic GFR-binding peptide
  MOD_RES (1)..(3)..(36)..(37): Xaa is C or S
  MOD_RES (14)..(15)..(16)..(17)..(18): Xaa is A or G
  MOD_RES (19)..(20)..(21)..(22): Xaa is A or G or absent
XKXSKVIMRYKKLXXXXXXXXXFYLISIANLDQSVXXPSA

SEQ ID NO: 5460 - protein, 39 aa, Artificial Sequence
  Non-cyclic GFR-binding peptide
  MOD_RES (2)..(4): Xaa is C or S
EXKXALHDELTRHKRLFIPKKRVIEYYLVSTASLQVQTP

SEQ ID NO: 5461 - protein, 37 aa, Artificial Sequence
  Non-cyclic GFR-binding peptide
  MOD_RES (1)..(35)..(36): Xaa is C or S
  MOD_RES (13)..(14)..(15)..(16)..(17): Xaa is A or G
  MOD_RES (18)..(19)..(20)..(21): Xaa is A or G or absent
XSRVVMNQYNKLXXXXXXXXXLYLVSIASLKTPAXXP

SEQ ID NO: 5462 - protein, 36 aa, Artificial Sequence
  Non-cyclic GFR-binding peptide
  MOD_RES (2)..(4)..(35)..(36): Xaa is C or S
SXKXSRVIMYHYKLVKPKRGVKYLISIPSLAQPVXX

SEQ ID NO: 5463 - protein, 39 aa, Artificial Sequence
  Non-cyclic GFR-binding peptide
  MOD_RES (1)..(35)..(36): Xaa is C or S
  MOD_RES (13)..(14)..(15)..(16)..(17): Xaa is A or G
  MOD_RES (18)..(19)..(20)..(21): Xaa is A or G or absent
XARVVMNYHYKLXXXXXXXXXKYLVSIPSLQTPAXXPKP

SEQ ID NO: 5464 - protein, 33 aa, Artificial Sequence
  Non-cyclic GFR-binding peptide
  MOD_RES (31)..(32): Xaa is C or S
EVVMERHKRLVVKDYEDYYLMSTASLETPVXXA

SEQ ID NO: 5465 - protein, 41 aa, Artificial Sequence
  Non-cyclic GFR-binding peptide
  MOD_RES (1)..(35)..(36): Xaa is C or S
  MOD_RES (13)..(14)..(15)..(16)..(17): Xaa is A or G
  MOD_RES (18)..(19)..(20)..(21): Xaa is A or G or absent
XGEVVMERHKRLXXXXXXXXXYYLMSTASLETPVXXAKPIS

SEQ ID NO: 5466 - protein, 35 aa, Artificial Sequence
  Non-cyclic GFR-binding peptide
  MOD_RES (1)..(34)..(35): Xaa is C or S
  MOD_RES (12)..(13)..(14)..(15)..(16): Xaa is A or G
  MOD_RES (17)..(18)..(19)..(20): Xaa is A or G or absent
XSKVVMRHKRLXXXXXXXXXYYLISTASLDQPVXX

SEQ ID NO: 5467 - protein, 42 aa, Artificial Sequence
  Non-cyclic GFR-binding peptide
  MOD_RES (1)..(38): Xaa is C or S
XALHDELTQYNKLFIPKKRVIELYLVSIASLQVQTPRXQVNR

SEQ ID NO: 5468 - protein, 42 aa, Artificial Sequence
  Non-cyclic GFR-binding peptide
  MOD_RES (2)..(4)..(37)..(38): Xaa is C or S
  MOD_RES (15)..(16)..(17)..(18)..(19): Xaa is A or G
  MOD_RES (20)..(21)..(22)..(23): Xaa is A or G or absent
SXKXSKVVMRHKRLXXXXXXXXXYYLISTASLDQPVXXPSAS

SEQ ID NO: 5469 - protein, 36 aa, Artificial Sequence
  Non-cyclic GFR-binding peptide
  MOD_RES (32)..(33): Xaa is C or S
AKVVMNYHYKLIVNNSSDKYLVSIPSLKTPAXXAKP

SEQ ID NO: 5470 - protein, 39 aa, Artificial Sequence
  Non-cyclic GFR-binding peptide
  MOD_RES (1)..(3)..(37): Xaa is C or S
  MOD_RES (15)..(16)..(17)..(18)..(19): Xaa is A or G
  MOD_RES (20)..(21)..(22)..(23): Xaa is A or G or absent
XGXSRVVMNYHYKLXXXXXXXXXKYLVSIPSLKTPAXTP

SEQ ID NO: 5471 - protein, 33 aa, Artificial Sequence
  Non-cyclic GFR-binding peptide
  MOD_RES (2)..(2): Xaa is C or S
GXARVVMNYHYKLIVNSSDDKYLVSIPSLQTPA

SEQ ID NO: 5472 - protein, 32 aa, Artificial Sequence
  Non-cyclic GFR-binding peptide
  MOD_RES (1)..(32): Xaa is C or S
XSKVIMQYNKLIKPTKGILYLISIASLDQSVX

SEQ ID NO: 5473 - protein, 40 aa, Artificial Sequence
  Non-cyclic GFR-binding peptide
  MOD_RES (2)..(34)..(35): Xaa is C or S
GXGEVVMERHKRLVVKDYEDYYLMSTASLETPVXXAKPIS

SEQ ID NO: 5474 - protein, 40 aa, Artificial Sequence
  Non-cyclic GFR-binding peptide
  MOD_RES (2)..(34): Xaa is C or S
GXSRVVMNRHKRLIVNSSDDYYLVSTASLKTPAXTPKTVH

SEQ ID NO: 5475 - protein, 34 aa, Artificial Sequence
  Non-cyclic GFR-binding peptide
  MOD_RES (34)..(34): Xaa is C or S
  MOD_RES (12)..(13)..(14)..(15)..(16): Xaa is A or G
  MOD_RES (17)..(18)..(19)..(20): Xaa is A or G or absent
SRVVMNQYNKLXXXXXXXXXLYLVSIASLKTPAX

SEQ ID NO: 5476 - protein, 43 aa, Artificial Sequence
  Non-cyclic GFR-binding peptide
  MOD_RES (1)..(3)..(37)..(38): Xaa is C or S
  MOD_RES (15)..(16)..(17)..(18)..(19): Xaa is A or G
  MOD_RES (20)..(21)..(22)..(23): Xaa is A or G or absent
XGXGEVVMERHKRLXXXXXXXXXYYLMSTASLETPVXXAKPIS

SEQ ID NO: 5477 - protein, 40 aa, Artificial Sequence
  Non-cyclic GFR-binding peptide
  MOD_RES (2)..(36)..(37): Xaa is C or S
  MOD_RES (14)..(15)..(16)..(17)..(18): Xaa is A or G
  MOD_RES (19)..(20)..(21)..(22): Xaa is A or G or absent
GXAKVVMNQYNKLXXXXXXXXXLYLVSIASLKTPAXXAKP

SEQ ID NO: 5478 - protein, 36 aa, Artificial Sequence
  Non-cyclic GFR-binding peptide
  MOD_RES (32)..(33): Xaa is C or S
SRVVMNQYNKLIVNSSDDLYLVSIASLKTPAXXPKP

SEQ ID NO: 5479 - protein, 34 aa, Artificial Sequence
  Non-cyclic GFR-binding peptide
  MOD_RES (34)..(34): Xaa is C or S
  MOD_RES (12)..(13)..(14)..(15)..(16): Xaa is A or G
  MOD_RES (17)..(18)..(19)..(20): Xaa is A or G or absent
AKVVMNRYKKLXXXXXXXXXFYLVSIANLKTPAX

SEQ ID NO: 5480 - protein, 37 aa, Artificial Sequence
  Non-cyclic GFR-binding peptide
  MOD_RES (2)..(4): Xaa is C or S
  MOD_RES (16)..(17)..(18)..(19)..(20): Xaa is A or G
  MOD_RES (21)..(22)..(23)..(24): Xaa is A or G or absent
RXGXGEVVMDYHYKLXXXXXXXXXKYLMSIPSLETPV

SEQ ID NO: 5481 - protein, 39 aa, Artificial Sequence
  Non-cyclic GFR-binding peptide
  MOD_RES (1)..(3)..(37)..(38): Xaa is C or S
  MOD_RES (15)..(16)..(17)..(18)..(19): Xaa is A or G
  MOD_RES (20)..(21)..(22)..(23): Xaa is A or G or absent
XGXGEVVMERYKKLXXXXXXXXXFYLMSIANLETPVXXA

SEQ ID NO: 5482 - protein, 41 aa, Artificial Sequence
  Non-cyclic GFR-binding peptide
  MOD_RES (2)..(4)..(36)..(37): Xaa is C or S
HXGXAKVVMNYHYKLIVNNSSDKYLVSIPSLKTPAXXAKPV

SEQ ID NO: 5483 - protein, 34 aa, Artificial Sequence
  Non-cyclic GFR-binding peptide
  MOD_RES (1)..(1): Xaa is C or S
  MOD_RES (13)..(14)..(15)..(16)..(17): Xaa is A or G
  MOD_RES (18)..(19)..(20)..(21): Xaa is A or G or absent
XARVVMNRHKRLXXXXXXXXXYYLVSTASLQTPA

SEQ ID NO: 5484 - protein, 41 aa, Artificial Sequence
  Non-cyclic GFR-binding peptide
  MOD_RES (2)..(4)..(36)..(37): Xaa is C or S
HXGXSRVVMNQYNKLIVNSSDDLYLVSIASLKTPAXXPKPV

SEQ ID NO: 5485 - protein, 32 aa, Artificial Sequence
  Non-cyclic GFR-binding peptide
  MOD_RES (2)..(2): Xaa is C or S
KXSKVIMRYKKLIKPTKGIFYLISIANLDQSV

SEQ ID NO: 5486 - protein, 37 aa, Artificial Sequence
  Non-cyclic GFR-binding peptide
  MOD_RES (2)..(4)..(37): Xaa is C or S
  MOD_RES (15)..(16)..(17)..(18)..(19): Xaa is A or G
  MOD_RES (20)..(21)..(22)..(23): Xaa is A or G or absent
SXKXSKVVMRHKRLXXXXXXXXXYYLISTASLDQPVX

SEQ ID NO: 5487 - protein, 42 aa, Artificial Sequence
  Non-cyclic GFR-binding peptide
  MOD_RES (1)..(3)..(36)..(37): Xaa is C or S
  MOD_RES (14)..(15)..(16)..(17)..(18): Xaa is A or G
  MOD_RES (19)..(20)..(21)..(22): Xaa is A or G or absent
XKXSRVIMRYKKLXXXXXXXXXFYLISIANLAQPVXXPAASA

SEQ ID NO: 5488 - protein, 38 aa, Artificial Sequence
  Non-cyclic GFR-binding peptide
  MOD_RES (36)..(36): Xaa is C or S
LHDELTQYNKLFIPKKRVIELYLVSIASLQVQTPRXQV

SEQ ID NO: 5489 - protein, 41 aa, Artificial Sequence
  Non-cyclic GFR-binding peptide
  MOD_RES (1)..(3)..(37)..(38): Xaa is C or S
  MOD_RES (15)..(16)..(17)..(18)..(19): Xaa is A or G
  MOD_RES (20)..(21)..(22)..(23): Xaa is A or G or absent
XGXAKVVMNQYNKLXXXXXXXXXLYLVSIASLKTPAXXAKP

SEQ ID NO: 5490 - protein, 37 aa, Artificial Sequence
  Non-cyclic GFR-binding peptide
  MOD_RES (2)..(4)..(36)..(37): Xaa is C or S
HXGXARVVMNQYNKLIVNSSDDLYLVSIASLQTPAXX

SEQ ID NO: 5491 - protein, 39 aa, Artificial Sequence
  Non-cyclic GFR-binding peptide
  MOD_RES (35)..(35): Xaa is C or S
HDELTRYKKLFIPKKRVIEFYLVSIANLQVQTPRXQVNR

SEQ ID NO: 5492 - protein, 38 aa, Artificial Sequence
  Non-cyclic GFR-binding peptide
  MOD_RES (33)..(34): Xaa is C or S
  MOD_RES (11)..(12)..(13)..(14)..(15): Xaa is A or G
  MOD_RES (16)..(17)..(18)..(19): Xaa is A or G or absent
EVVMDRHKRLXXXXXXXXXYYLMSTASLETPVXXAKPI

SEQ ID NO: 5493 - protein, 44 aa, Artificial Sequence
  Non-cyclic GFR-binding peptide
  MOD_RES (1)..(3)..(38)..(39): Xaa is C or S
  MOD_RES (16)..(17)..(18)..(19)..(20): Xaa is A or G
  MOD_RES (21)..(22)..(23)..(24): Xaa is A or G or absent
XGXEAVSMGEQYNKLXXXXXXXXXLYLVSIASLKTPVXXAKGVK

SEQ ID NO: 5494 - protein, 35 aa, Artificial Sequence
  Non-cyclic GFR-binding peptide
  MOD_RES (31)..(32): Xaa is C or S
KVVMNYHYKLIVNNSSDKYLVSIPSLKTPAXXAKP

SEQ ID NO: 5495 - protein, 36 aa, Artificial Sequence
  Non-cyclic GFR-binding peptide
  MOD_RES (1)..(33)..(34): Xaa is C or S
XGEVVMDRYKKLVVKENEDFYLMSIANLETPVXXAK

SEQ ID NO: 5496 - protein, 43 aa, Artificial Sequence
  Non-cyclic GFR-binding peptide
  MOD_RES (2)..(4)..(38)..(39): Xaa is C or S
  MOD_RES (16)..(17)..(18)..(19)..(20): Xaa is A or G
  MOD_RES (21)..(22)..(23)..(24): Xaa is A or G or absent
HXGXAKVVMNYHYKLXXXXXXXXXKYLVSIPSLKTPAXXAKPV

SEQ ID NO: 5497 - protein, 42 aa, Artificial Sequence
  Non-cyclic GFR-binding peptide
  MOD_RES (2)..(39): Xaa is C or S
KXALHDELTYHYKLFIPKKRVIEKYLVSIPSLQVQTPRXQVN

SEQ ID NO: 5498 - protein, 37 aa, Artificial Sequence
  Non-cyclic GFR-binding peptide
  MOD_RES (1)..(35)..(36): Xaa is C or S
  MOD_RES (13)..(14)..(15)..(16)..(17): Xaa is A or G
  MOD_RES (18)..(19)..(20)..(21): Xaa is A or G or absent
XSRVVMNYHYKLXXXXXXXXXKYLVSIPSLKTPAXXP

SEQ ID NO: 5499 - protein, 39 aa, Artificial Sequence
  Non-cyclic GFR-binding peptide
  MOD_RES (1)..(3)..(35)..(36): Xaa is C or S
XGXAKVVMNQYNKLIVNNSSDLYLVSIASLKTPAXXAKP

SEQ ID NO: 5500 - protein, 35 aa, Artificial Sequence
  Non-cyclic GFR-binding peptide
  MOD_RES (2)..(33)..(34): Xaa is C or S
KXSKVIMYHYKLIKPTKGIKYLISIPSLDQSVXXP

SEQ ID NO: 5501 - protein, 43 aa, Artificial Sequence
  Non-cyclic GFR-binding peptide
  MOD_RES (1)..(3)..(37)..(38): Xaa is C or S
  MOD_RES (15)..(16)..(17)..(18)..(19): Xaa is A or G
  MOD_RES (20)..(21)..(22)..(23): Xaa is A or G or absent
XGXARVVMNQYNKLXXXXXXXXXLYLVSIASLQTPAXXPKPVT

SEQ ID NO: 5502 - protein, 43 aa, Artificial Sequence
  Non-cyclic GFR-binding peptide
  MOD_RES (2)..(4)..(38)..(39): Xaa is C or S
  MOD_RES (16)..(17)..(18)..(19)..(20): Xaa is A or G
  MOD_RES (21)..(22)..(23)..(24): Xaa is A or G or absent
HXGXSRVVMNQYNKLXXXXXXXXXLYLVSIASLKTPAXXPKPV

SEQ ID NO: 5503 - protein, 35 aa, Artificial Sequence
  Non-cyclic GFR-binding peptide
  MOD_RES (31)..(32): Xaa is C or S
KVVMNQYNKLIVNNSSDLYLVSIASLKTPAXXAKP

SEQ ID NO: 5504 - protein, 40 aa, Artificial Sequence
  Non-cyclic GFR-binding peptide
  MOD_RES (1)..(38): Xaa is C or S
  MOD_RES (14)..(15)..(16)..(17)..(18): Xaa is A or G
  MOD_RES (19)..(20)..(21)..(22): Xaa is A or G or absent
XALHDELTRHKRLXXXXXXXXXYYLVSTASLQVQTPRXQV

SEQ ID NO: 5505 - protein, 38 aa, Artificial Sequence
  Non-cyclic GFR-binding peptide
  MOD_RES (1)..(3)..(35)..(36): Xaa is C or S
XGXARVVMNYHYKLIVNSSDDKYLVSIPSLQTPAXXPK

SEQ ID NO: 5506 - protein, 40 aa, Artificial Sequence
  Non-cyclic GFR-binding peptide
  MOD_RES (2)..(34)..(35): Xaa is C or S
GXARVVMNRHKRLIVNSSDDYYLVSTASLQTPAXXPKPVT

SEQ ID NO: 5507 - protein, 33 aa, Artificial Sequence
  Non-cyclic GFR-binding peptide
  MOD_RES (1)..(32)..(33): Xaa is C or S
XSKVIMYHYKLIKPTKGIKYLISIPSLDQSVXX

SEQ ID NO: 5508 - protein, 31 aa, Artificial Sequence
  Non-cyclic GFR-binding peptide
  MOD_RES (31)..(31): Xaa is C or S
RVVMNRHKRLIVNSSDDYYLVSTASLQTPAX

SEQ ID NO: 5509 - protein, 39 aa, Artificial Sequence
  Non-cyclic GFR-binding peptide
  MOD_RES (2)..(4)..(37)..(38): Xaa is C or S
  MOD_RES (15)..(16)..(17)..(18)..(19): Xaa is A or G
  MOD_RES (20)..(21)..(22)..(23): Xaa is A or G or absent
SXKXSKVVMQYNKLXXXXXXXXXLYLISIASLDQPVXXP

SEQ ID NO: 5510 - protein, 36 aa, Artificial Sequence
  Non-cyclic GFR-binding peptide
  MOD_RES (2)..(36): Xaa is C or S
  MOD_RES (14)..(15)..(16)..(17)..(18): Xaa is A or G
  MOD_RES (19)..(20)..(21)..(22): Xaa is A or G or absent
GXAKVVMNYHYKLXXXXXXXXXKYLVSIPSLKTPAX

SEQ ID NO: 5511 - protein, 35 aa, Artificial Sequence
  Non-cyclic GFR-binding peptide
  MOD_RES (33)..(34): Xaa is C or S
  MOD_RES (11)..(12)..(13)..(14)..(15): Xaa is A or G
  MOD_RES (16)..(17)..(18)..(19): Xaa is A or G or absent
SKVIMQYNKLXXXXXXXXXLYLISIASLDQSVXXP

SEQ ID NO: 5512 - protein, 36 aa, Artificial Sequence
  Non-cyclic GFR-binding peptide
  MOD_RES (34)..(34): Xaa is C or S
  MOD_RES (12)..(13)..(14)..(15)..(16): Xaa is A or G
  MOD_RES (17)..(18)..(19)..(20): Xaa is A or G or absent
SRVVMNQYNKLXXXXXXXXXLYLVSIASLKTPAXTP

SEQ ID NO: 5513 - protein, 39 aa, Artificial Sequence
  Non-cyclic GFR-binding peptide
  MOD_RES (33)..(34): Xaa is C or S
  MOD_RES (11)..(12)..(13)..(14)..(15): Xaa is A or G
  MOD_RES (16)..(17)..(18)..(19): Xaa is A or G or absent
SKVIMRHKRLXXXXXXXXXYYLISTASLDQSVXXPSASA

SEQ ID NO: 5514 - protein, 36 aa, Artificial Sequence
  Non-cyclic GFR-binding peptide
  MOD_RES (1)..(3)..(35)..(36): Xaa is C or S
XGXGEVVMEYHYKLVVKDYEDKYLMSIPSLETPVXX

SEQ ID NO: 5515 - protein, 36 aa, Artificial Sequence
  Non-cyclic GFR-binding peptide
  MOD_RES (31)..(32): Xaa is C or S
EVVMDRYKKLVVKENEDFYLMSIANLETPVXXAKPI

SEQ ID NO: 5516 - protein, 34 aa, Artificial Sequence
  Non-cyclic GFR-binding peptide
  MOD_RES (2)..(33)..(34): Xaa is C or S
KXSKVVMQYNKLVKPTRGVLYLISIASLDQPVXX

SEQ ID NO: 5517 - protein, 38 aa, Artificial Sequence
  Non-cyclic GFR-binding peptide
  MOD_RES (1)..(35)..(36): Xaa is C or S
  MOD_RES (13)..(14)..(15)..(16)..(17): Xaa is A or G
  MOD_RES (18)..(19)..(20)..(21): Xaa is A or G or absent
XGEVVMEYHYKLXXXXXXXXXKYLMSIPSLETPVXXAK

SEQ ID NO: 5518 - protein, 40 aa, Artificial Sequence
  Non-cyclic GFR-binding peptide
  MOD_RES (2)..(4)..(36): Xaa is C or S
HXGXSRVVMNQYNKLIVNSSDDLYLVSIASLKTPAXTPKT

SEQ ID NO: 5519 - protein, 42 aa, Artificial Sequence
  Non-cyclic GFR-binding peptide
  MOD_RES (1)..(3)..(40): Xaa is C or S
XKXALHDELTRHKRLFIPKKRVIEYYLVSTASLQVQTPRXQV

SEQ ID NO: 5520 - protein, 37 aa, Artificial Sequence
  Non-cyclic GFR-binding peptide
  MOD_RES (31)..(32): Xaa is C or S
KVVMNQYNKLIVNNSSDLYLVSIASLKTPAXXAKPVA

SEQ ID NO: 5521 - protein, 41 aa, Artificial Sequence
  Non-cyclic GFR-binding peptide
  MOD_RES (2)..(35)..(36): Xaa is C or S
  MOD_RES (13)..(14)..(15)..(16)..(17): Xaa is A or G
  MOD_RES (18)..(19)..(20)..(21): Xaa is A or G or absent
KXSRVIMRYKKLXXXXXXXXXFYLISIANLAQPVXXPAASA

SEQ ID NO: 5522 - protein, 37 aa, Artificial Sequence
  Non-cyclic GFR-binding peptide
  MOD_RES (33)..(34): Xaa is C or S
  MOD_RES (11)..(12)..(13)..(14)..(15): Xaa is A or G
  MOD_RES (16)..(17)..(18)..(19): Xaa is A or G or absent
SRVIMRYKKLXXXXXXXXXFYLISIANLAQPVXXPAA

SEQ ID NO: 5523 - protein, 35 aa, Artificial Sequence
  Non-cyclic GFR-binding peptide
  MOD_RES (1)..(34)..(35): Xaa is C or S
  MOD_RES (12)..(13)..(14)..(15)..(16): Xaa is A or G
  MOD_RES (17)..(18)..(19)..(20): Xaa is A or G or absent
XSKVVMQYNKLXXXXXXXXXLYLISIASLDQPVXX

SEQ ID NO: 5524 - protein, 42 aa, Artificial Sequence
  Non-cyclic GFR-binding peptide
  MOD_RES (1)..(3)..(36)..(37): Xaa is C or S
XGXEAVSMGERYKKLTPVGMDDFYLVSIANLKTPVXXAKGVK

SEQ ID NO: 5525 - protein, 40 aa, Artificial Sequence
  Non-cyclic GFR-binding peptide
  MOD_RES (1)..(3)..(40): Xaa is C or S
  MOD_RES (16)..(17)..(18)..(19)..(20): Xaa is A or G
  MOD_RES (21)..(22)..(23)..(24): Xaa is A or G or absent
XKXALHDELTRYKKLXXXXXXXXXFYLVSIANLQVQTPRX

SEQ ID NO: 5526 - protein, 40 aa, Artificial Sequence
  Non-cyclic GFR-binding peptide
  MOD_RES (2)..(39): Xaa is C or S
KXALHDELTRHKRLFIPKKRVIEYYLVSTASLQVQTPRXQ

SEQ ID NO: 5527 - protein, 30 aa, Artificial Sequence
  Non-cyclic GFR-binding peptide
EVVMDRYKKLVVKENEDFYLMSIANLETPV

SEQ ID NO: 5528 - protein, 40 aa, Artificial Sequence
  Non-cyclic GFR-binding peptide
  MOD_RES (34)..(35): Xaa is C or S
  MOD_RES (12)..(13)..(14)..(15)..(16): Xaa is A or G
  MOD_RES (17)..(18)..(19)..(20): Xaa is A or G or absent
SRVVMNYHYKLXXXXXXXXXKYLVSIPSLKTPAXXPKPVY

SEQ ID NO: 5529 - protein, 42 aa, Artificial Sequence
  Non-cyclic GFR-binding peptide
  MOD_RES (2)..(4)..(37)..(38): Xaa is C or S
RXGXEAVSMGEQYNKLTPVGMDDLYLVSIASLKTPVXXAKGV

SEQ ID NO: 5530 - protein, 44 aa, Artificial Sequence
  Non-cyclic GFR-binding peptide
  MOD_RES (2)..(4)..(38)..(39): Xaa is C or S
  MOD_RES (16)..(17)..(18)..(19)..(20): Xaa is A or G
  MOD_RES (21)..(22)..(23)..(24): Xaa is A or G or absent
HXGXAKVVMNRYKKLXXXXXXXXXFYLVSIANLKTPAXXAKPVA

SEQ ID NO: 5531 - protein, 35 aa, Artificial Sequence
  Non-cyclic GFR-binding peptide
  MOD_RES (33)..(34): Xaa is C or S
  MOD_RES (11)..(12)..(13)..(14)..(15): Xaa is A or G
  MOD_RES (16)..(17)..(18)..(19): Xaa is A or G or absent
SRVIMYHYKLXXXXXXXXXKYLISIPSLAQPVXXP

SEQ ID NO: 5532 - protein, 39 aa, Artificial Sequence
  Non-cyclic GFR-binding peptide
  MOD_RES (34)..(35): Xaa is C or S
  MOD_RES (12)..(13)..(14)..(15)..(16): Xaa is A or G
  MOD_RES (17)..(18)..(19)..(20): Xaa is A or G or absent
ARVVMNYHYKLXXXXXXXXXKYLVSIPSLQTPAXXPKPV

SEQ ID NO: 5533 - protein, 37 aa, Artificial Sequence
  Non-cyclic GFR-binding peptide
  MOD_RES (33)..(34): Xaa is C or S
  MOD_RES (11)..(12)..(13)..(14)..(15): Xaa is A or G
  MOD_RES (16)..(17)..(18)..(19): Xaa is A or G or absent
KVVMNRYKKLXXXXXXXXXFYLVSIANLKTPAXXAKP

SEQ ID NO: 5534 - protein, 37 aa, Artificial Sequence
  Non-cyclic GFR-binding peptide
  MOD_RES (35)..(36): Xaa is C or S
  MOD_RES (13)..(14)..(15)..(16)..(17): Xaa is A or G
  MOD_RES (18)..(19)..(20)..(21): Xaa is A or G or absent
EAVSMGERHKRLXXXXXXXXXYYLVSTASLKTPVXXA

SEQ ID NO: 5535 - protein, 38 aa, Artificial Sequence
  Non-cyclic GFR-binding peptide
  MOD_RES (1)..(36)..(37): Xaa is C or S
  MOD_RES (14)..(15)..(16)..(17)..(18): Xaa is A or G
  MOD_RES (19)..(20)..(21)..(22): Xaa is A or G or absent
XEAVSMGERYKKLXXXXXXXXXFYLVSIANLKTPVXXA

SEQ ID NO: 5536 - protein, 37 aa, Artificial Sequence
  Non-cyclic GFR-binding peptide
  MOD_RES (2)..(34): Xaa is C or S
GXSRVVMNYHYKLIVNSSDDKYLVSIPSLKTPAXTPK

SEQ ID NO: 5537 - protein, 33 aa, Artificial Sequence
  Non-cyclic GFR-binding peptide
  MOD_RES (1)..(3): Xaa is C or S
XKXSRVIMRYKKLVKPKRGVFYLISIANLAQPV

SEQ ID NO: 5538 - protein, 39 aa, Artificial Sequence
  Non-cyclic GFR-binding peptide
  MOD_RES (34)..(35): Xaa is C or S
  MOD_RES (12)..(13)..(14)..(15)..(16): Xaa is A or G
  MOD_RES (17)..(18)..(19)..(20): Xaa is A or G or absent
GEVVMDRHKRLXXXXXXXXXYYLMSTASLETPVXXAKPI

SEQ ID NO: 5539 - protein, 39 aa, Artificial Sequence
  Non-cyclic GFR-binding peptide
  MOD_RES (33)..(34): Xaa is C or S
  MOD_RES (11)..(12)..(13)..(14)..(15): Xaa is A or G
  MOD_RES (16)..(17)..(18)..(19): Xaa is A or G or absent
EVVMDRYKKLXXXXXXXXXFYLMSIANLETPVXXAKPIK

SEQ ID NO: 5540 - protein, 40 aa, Artificial Sequence
  Non-cyclic GFR-binding peptide
  MOD_RES (2)..(35)..(36): Xaa is C or S
  MOD_RES (13)..(14)..(15)..(16)..(17): Xaa is A or G
  MOD_RES (18)..(19)..(20)..(21): Xaa is A or G or absent
KXSKVIMRYKKLXXXXXXXXXFYLISIANLDQSVXXPSAS

SEQ ID NO: 5541 - protein, 37 aa, Artificial Sequence
  Non-cyclic GFR-binding peptide
  MOD_RES (2)..(35)..(36): Xaa is C or S
GXEAVSMGERHKRLTPVGMDDYYLVSTASLKTPVXXA

SEQ ID NO: 5542 - protein, 40 aa, Artificial Sequence
  Non-cyclic GFR-binding peptide
  MOD_RES (2)..(4): Xaa is C or S
  MOD_RES (17)..(18)..(19)..(20)..(21): Xaa is A or G
  MOD_RES (22)..(23)..(24)..(25): Xaa is A or G or absent
EXKXALHDELTQYNKLXXXXXXXXXLYLVSIASLQVQTPR

SEQ ID NO: 5543 - protein, 35 aa, Artificial Sequence
  Non-cyclic GFR-binding peptide
  MOD_RES (1)..(35): Xaa is C or S
  MOD_RES (13)..(14)..(15)..(16)..(17): Xaa is A or G
  MOD_RES (18)..(19)..(20)..(21): Xaa is A or G or absent
XGEVVMERHKRLXXXXXXXXXYYLMSTASLETPVX

SEQ ID NO: 5544 - protein, 35 aa, Artificial Sequence
  Non-cyclic GFR-binding peptide
  MOD_RES (31)..(32): Xaa is C or S
SKVVMQYNKLVKPTRGVLYLISIASLDQPVXXPSA

SEQ ID NO: 5545 - protein, 35 aa, Artificial Sequence
  Non-cyclic GFR-binding peptide
  MOD_RES (33)..(34): Xaa is C or S
  MOD_RES (11)..(12)..(13)..(14)..(15): Xaa is A or G
  MOD_RES (16)..(17)..(18)..(19): Xaa is A or G or absent
EVVMDRHKRLXXXXXXXXXYYLMSTASLETPVXXA

SEQ ID NO: 5546 - protein, 42 aa, Artificial Sequence
  Non-cyclic GFR-binding peptide
  MOD_RES (2)..(36)..(37): Xaa is C or S
  MOD_RES (14)..(15)..(16)..(17)..(18): Xaa is A or G
  MOD_RES (19)..(20)..(21)..(22): Xaa is A or G or absent
GXSRVVMNYHYKLXXXXXXXXXKYLVSIPSLKTPAXXPKPVY

SEQ ID NO: 5547 - protein, 37 aa, Artificial Sequence
  Non-cyclic GFR-binding peptide
  MOD_RES (35)..(36): Xaa is C or S
  MOD_RES (13)..(14)..(15)..(16)..(17): Xaa is A or G
  MOD_RES (18)..(19)..(20)..(21): Xaa is A or G or absent
EAVSMGEQYNKLXXXXXXXXXLYLVSIASLKTPVXXA

SEQ ID NO: 5548 - protein, 34 aa, Artificial Sequence
  Non-cyclic GFR-binding peptide
  MOD_RES (32)..(33): Xaa is C or S
GEVVMERYKKLVVKDYEDFYLMSIANLETPVXXA

SEQ ID NO: 5549 - protein, 34 aa, Artificial Sequence
  Non-cyclic GFR-binding peptide
  MOD_RES (33)..(34): Xaa is C or S
  MOD_RES (11)..(12)..(13)..(14)..(15): Xaa is A or G
  MOD_RES (16)..(17)..(18)..(19): Xaa is A or G or absent
KVVMNYHYKLXXXXXXXXXKYLVSIPSLKTPAXX

SEQ ID NO: 5550 - protein, 35 aa, Artificial Sequence
  Non-cyclic GFR-binding peptide
  MOD_RES (2)..(35): Xaa is C or S
  MOD_RES (13)..(14)..(15)..(16)..(17): Xaa is A or G
  MOD_RES (18)..(19)..(20)..(21): Xaa is A or G or absent
KXSKVVMQYNKLXXXXXXXXXLYLISIASLDQPVX

SEQ ID NO: 5551 - protein, 37 aa, Artificial Sequence
  Non-cyclic GFR-binding peptide
  MOD_RES (1)..(33)..(34): Xaa is C or S
XGEVVMDRYKKLVVKENEDFYLMSIANLETPVXXAKP

SEQ ID NO: 5552 - protein, 37 aa, Artificial Sequence
  Non-cyclic GFR-binding peptide
  MOD_RES (2)..(36)..(37): Xaa is C or S
  MOD_RES (14)..(15)..(16)..(17)..(18): Xaa is A or G
  MOD_RES (19)..(20)..(21)..(22): Xaa is A or G or absent
GXSRVVMNYHYKLXXXXXXXXXKYLVSIPSLKTPAXX

SEQ ID NO: 5553 - protein, 38 aa, Artificial Sequence
  Non-cyclic GFR-binding peptide
  MOD_RES (1)..(3)..(35)..(36): Xaa is C or S
XGXSRVVMNYHYKLIVNSSDDKYLVSIPSLKTPAXXPK

SEQ ID NO: 5554 - protein, 34 aa, Artificial Sequence
  Non-cyclic GFR-binding peptide
  MOD_RES (33)..(34): Xaa is C or S
  MOD_RES (11)..(12)..(13)..(14)..(15): Xaa is A or G
  MOD_RES (16)..(17)..(18)..(19): Xaa is A or G or absent
EVVMDRYKKLXXXXXXXXXFYLMSIANLETPVXX

SEQ ID NO: 5555 - protein, 38 aa, Artificial Sequence
  Non-cyclic GFR-binding peptide
  MOD_RES (2)..(34): Xaa is C or S
GXSRVVMNYHYKLIVNSSDDKYLVSIPSLKTPAXTPKT

SEQ ID NO: 5556 - protein, 39 aa, Artificial Sequence
  Non-cyclic GFR-binding peptide
  MOD_RES (1)..(3): Xaa is C or S
XKXALHDELTQYNKLFIPKKRVIELYLVSIASLQVQTPR

SEQ ID NO: 5557 - protein, 44 aa, Artificial Sequence
  Non-cyclic GFR-binding peptide
  MOD_RES (2)..(4)..(38): Xaa is C or S
  MOD_RES (16)..(17)..(18)..(19)..(20): Xaa is A or G
  MOD_RES (21)..(22)..(23)..(24): Xaa is A or G or absent
HXGXSRVVMNYHYKLXXXXXXXXXKYLVSIPSLKTPAXTPKTVH

SEQ ID NO: 5558 - protein, 37 aa, Artificial Sequence
  Non-cyclic GFR-binding peptide
  MOD_RES (2)..(4): Xaa is C or S
  MOD_RES (16)..(17)..(18)..(19)..(20): Xaa is A or G
  MOD_RES (21)..(22)..(23)..(24): Xaa is A or G or absent
HXGXARVVMNRHKRLXXXXXXXXXYYLVSTASLQTPA

SEQ ID NO: 5559 - protein, 30 aa, Artificial Sequence
  Non-cyclic GFR-binding peptide
SRVIMQYNKLVKPKRGVLYLISIASLAQPV

SEQ ID NO: 5560 - protein, 39 aa, Artificial Sequence
  Non-cyclic GFR-binding peptide
  MOD_RES (33)..(34): Xaa is C or S
  MOD_RES (11)..(12)..(13)..(14)..(15): Xaa is A or G
  MOD_RES (16)..(17)..(18)..(19): Xaa is A or G or absent
RVVMNRHKRLXXXXXXXXXYYLVSTASLKTPAXXPKPVY

SEQ ID NO: 5561 - protein, 40 aa, Artificial Sequence
  Non-cyclic GFR-binding peptide
  MOD_RES (2)..(34)..(35): Xaa is C or S
GXGEVVMDRYKKLVVKENEDFYLMSIANLETPVXXAKPIK

SEQ ID NO: 5562 - protein, 33 aa, Artificial Sequence
  Non-cyclic GFR-binding peptide
  MOD_RES (12)..(13)..(14)..(15)..(16): Xaa is A or G
  MOD_RES (17)..(18)..(19)..(20): Xaa is A or G or absent
ARVVMNYHYKLXXXXXXXXXKYLVSIPSLQTPA

SEQ ID NO: 5563 - protein, 37 aa, Artificial Sequence
  Non-cyclic GFR-binding peptide
  MOD_RES (1)..(3)..(34)..(35): Xaa is C or S
XKXSKVIMQYNKLIKPTKGILYLISIASLDQSVXXPS

SEQ ID NO: 5564 - protein, 44 aa, Artificial Sequence
  Non-cyclic GFR-binding peptide
  MOD_RES (2)..(4)..(41): Xaa is C or S
  MOD_RES (17)..(18)..(19)..(20)..(21): Xaa is A or G
  MOD_RES (22)..(23)..(24)..(25): Xaa is A or G or absent
EXKXALHDELTRHKRLXXXXXXXXXYYLVSTASLQVQTPRXQVN

SEQ ID NO: 5565 - protein, 38 aa, Artificial Sequence
  Non-cyclic GFR-binding peptide
  MOD_RES (35)..(35): Xaa is C or S
HDELTRHKRLFIPKKRVIEYYLVSTASLQVQTPRXQVN

SEQ ID NO: 5566 - protein, 43 aa, Artificial Sequence
  Non-cyclic GFR-binding peptide
  MOD_RES (2)..(4)..(41): Xaa is C or S
EXKXALHDELTRYKKLFIPKKRVIEFYLVSIANLQVQTPRXQV

SEQ ID NO: 5567 - protein, 37 aa, Artificial Sequence
  Non-cyclic GFR-binding peptide
  MOD_RES (1)..(33)..(34): Xaa is C or S
XAKVVMNQYNKLIVNNSSDLYLVSIASLKTPAXXAKP

SEQ ID NO: 5568 - protein, 42 aa, Artificial Sequence
  Non-cyclic GFR-binding peptide
  MOD_RES (2)..(4)..(36)..(37): Xaa is C or S
HXGXSRVVMNRHKRLIVNSSDDYYLVSTASLKTPAXXPKPVY

SEQ ID NO: 5569 - protein, 32 aa, Artificial Sequence
  Non-cyclic GFR-binding peptide
  MOD_RES (31)..(32): Xaa is C or S
RVVMNRHKRLIVNSSDDYYLVSTASLQTPAXX

SEQ ID NO: 5570 - protein, 35 aa, Artificial Sequence
  Non-cyclic GFR-binding peptide
  MOD_RES (13)..(14)..(15)..(16)..(17): Xaa is A or G
  MOD_RES (18)..(19)..(20)..(21): Xaa is A or G or absent
ALHDELTRYKKLXXXXXXXXXFYLVSIANLQVQTP

SEQ ID NO: 5571 - protein, 40 aa, Artificial Sequence
  Non-cyclic GFR-binding peptide
  MOD_RES (1)..(3)..(36)..(37): Xaa is C or S
  MOD_RES (14)..(15)..(16)..(17)..(18): Xaa is A or G
  MOD_RES (19)..(20)..(21)..(22): Xaa is A or G or absent
XKXSRVIMRYKKLXXXXXXXXXFYLISIANLAQPVXXPAA

SEQ ID NO: 5572 - protein, 38 aa, Artificial Sequence
  Non-cyclic GFR-binding peptide
  MOD_RES (2)..(4)..(36)..(37): Xaa is C or S
RXGXGEVVMDRHKRLVVKENEDYYLMSTASLETPVXXA

SEQ ID NO: 5573 - protein, 37 aa, Artificial Sequence
  Non-cyclic GFR-binding peptide
  MOD_RES (2)..(33)..(34): Xaa is C or S
KXSKVVMYHYKLVKPTRGVKYLISIPSLDQPVXXPSA

SEQ ID NO: 5574 - protein, 38 aa, Artificial Sequence
  Non-cyclic GFR-binding peptide
  MOD_RES (33)..(34): Xaa is C or S
  MOD_RES (11)..(12)..(13)..(14)..(15): Xaa is A or G
  MOD_RES (16)..(17)..(18)..(19): Xaa is A or G or absent
SKVIMRHKRLXXXXXXXXXYYLISTASLDQSVXXPSAS

SEQ ID NO: 5575 - protein, 34 aa, Artificial Sequence
  Non-cyclic GFR-binding peptide
  MOD_RES (33)..(34): Xaa is C or S
  MOD_RES (11)..(12)..(13)..(14)..(15): Xaa is A or G
  MOD_RES (16)..(17)..(18)..(19): Xaa is A or G or absent
RVVMNYHYKLXXXXXXXXXKYLVSIPSLKTPAXX

SEQ ID NO: 5576 - protein, 37 aa, Artificial Sequence
  Non-cyclic GFR-binding peptide
  MOD_RES (1)..(34)..(35): Xaa is C or S
  MOD_RES (12)..(13)..(14)..(15)..(16): Xaa is A or G
  MOD_RES (17)..(18)..(19)..(20): Xaa is A or G or absent
XSKVVMYHYKLXXXXXXXXXKYLISIPSLDQPVXXPS

SEQ ID NO: 5577 - protein, 38 aa, Artificial Sequence
  Non-cyclic GFR-binding peptide
  MOD_RES (1)..(33): Xaa is C or S
XSRVVMNRHKRLIVNSSDDYYLVSTASLKTPAXTPKTV

SEQ ID NO: 5578 - protein, 36 aa, Artificial Sequence
  Non-cyclic GFR-binding peptide
  MOD_RES (1)..(3): Xaa is C or S
  MOD_RES (15)..(16)..(17)..(18)..(19): Xaa is A or G
  MOD_RES (20)..(21)..(22)..(23): Xaa is A or G or absent
XGXGEVVMDYHYKLXXXXXXXXXKYLMSIPSLETPV

SEQ ID NO: 5579 - protein, 40 aa, Artificial Sequence
  Non-cyclic GFR-binding peptide
  MOD_RES (2)..(34)..(35): Xaa is C or S
GXAKVVMNQYNKLIVNNSSDLYLVSIASLKTPAXXAKPVA

SEQ ID NO: 5580 - protein, 36 aa, Artificial Sequence
  Non-cyclic GFR-binding peptide
  MOD_RES (1)..(3)..(36): Xaa is C or S
XGXEAVSMGEQYNKLTPVGMDDLYLVSIASLKTPVX

SEQ ID NO: 5581 - protein, 35 aa, Artificial Sequence
  Non-cyclic GFR-binding peptide
  MOD_RES (2)..(34)..(35): Xaa is C or S
GXARVVMNQYNKLIVNSSDDLYLVSIASLQTPAXX

SEQ ID NO: 5582 - protein, 39 aa, Artificial Sequence
  Non-cyclic GFR-binding peptide
  MOD_RES (2)..(4)..(36)..(37): Xaa is C or S
HXGXSRVVMNQYNKLIVNSSDDLYLVSIASLKTPAXXPK

SEQ ID NO: 5583 - protein, 38 aa, Artificial Sequence
  Non-cyclic GFR-binding peptide
  MOD_RES (2)..(4)..(38): Xaa is C or S
  MOD_RES (16)..(17)..(18)..(19)..(20): Xaa is A or G
  MOD_RES (21)..(22)..(23)..(24): Xaa is A or G or absent
RXGXGEVVMDRYKKLXXXXXXXXXFYLMSIANLETPVX

SEQ ID NO: 5584 - protein, 37 aa, Artificial Sequence
  Non-cyclic GFR-binding peptide
  MOD_RES (2)..(4)..(37): Xaa is C or S
  MOD_RES (15)..(16)..(17)..(18)..(19): Xaa is A or G
  MOD_RES (20)..(21)..(22)..(23): Xaa is A or G or absent
SXKXSKVIMYHYKLXXXXXXXXXKYLISIPSLDQSVX

SEQ ID NO: 5585 - protein, 32 aa, Artificial Sequence
  Non-cyclic GFR-binding peptide
  MOD_RES (32)..(32): Xaa is C or S
AKVVMNQYNKLIVNNSSDLYLVSIASLKTPAX

SEQ ID NO: 5586 - protein, 36 aa, Artificial Sequence
  Non-cyclic GFR-binding peptide
  MOD_RES (31)..(31): Xaa is C or S
RVVMNYHYKLIVNSSDDKYLVSIPSLKTPAXTPKTV

SEQ ID NO: 5587 - protein, 40 aa, Artificial Sequence
  Non-cyclic GFR-binding peptide
  MOD_RES (2)..(4)..(36)..(37): Xaa is C or S
HXGXSRVVMNRHKRLIVNSSDDYYLVSTASLKTPAXXPKP

SEQ ID NO: 5588 - protein, 41 aa, Artificial Sequence
  Non-cyclic GFR-binding peptide
  MOD_RES (1)..(3)..(36)..(37): Xaa is C or S
  MOD_RES (14)..(15)..(16)..(17)..(18): Xaa is A or G
  MOD_RES (19)..(20)..(21)..(22): Xaa is A or G or absent
XKXSKVVMRHKRLXXXXXXXXXYYLISTASLDQPVXXPSAS

SEQ ID NO: 5589 - protein, 37 aa, Artificial Sequence
  Non-cyclic GFR-binding peptide
  MOD_RES (1)..(3)..(34)..(35): Xaa is C or S
XKXSKVVMQYNKLVKPTRGVLYLISIASLDQPVXXPS

SEQ ID NO: 5590 - protein, 41 aa, Artificial Sequence
  Non-cyclic GFR-binding peptide
  MOD_RES (1)..(3)..(40): Xaa is C or S
XKXALHDELTRYKKLFIPKKRVIEFYLVSIANLQVQTPRXQ

SEQ ID NO: 5591 - protein, 38 aa, Artificial Sequence
  Non-cyclic GFR-binding peptide
  MOD_RES (1)..(3)..(38): Xaa is C or S
  MOD_RES (16)..(17)..(18)..(19)..(20): Xaa is A or G
  MOD_RES (21)..(22)..(23)..(24): Xaa is A or G or absent
XGXEAVSMGEQYNKLXXXXXXXXXLYLVSIASLKTPVX

SEQ ID NO: 5592 - protein, 36 aa, Artificial Sequence
  Non-cyclic GFR-binding peptide
  MOD_RES (2)..(34)..(35): Xaa is C or S
GXAKVVMNYHYKLIVNNSSDKYLVSIPSLKTPAXXA

SEQ ID NO: 5593 - protein, 39 aa, Artificial Sequence
  Non-cyclic GFR-binding peptide
  MOD_RES (2)..(36)..(37): Xaa is C or S
  MOD_RES (14)..(15)..(16)..(17)..(18): Xaa is A or G
  MOD_RES (19)..(20)..(21)..(22): Xaa is A or G or absent
GXAKVVMNQYNKLXXXXXXXXXLYLVSIASLKTPAXXAK

SEQ ID NO: 5594 - protein, 35 aa, Artificial Sequence
  Non-cyclic GFR-binding peptide
  MOD_RES (2)..(4)..(35): Xaa is C or S
SXKXSKVIMRYKKLIKPTKGIFYLISIANLDQSVX

SEQ ID NO: 5595 - protein, 36 aa, Artificial Sequence
  Non-cyclic GFR-binding peptide
  MOD_RES (1)..(34)..(35): Xaa is C or S
  MOD_RES (12)..(13)..(14)..(15)..(16): Xaa is A or G
  MOD_RES (17)..(18)..(19)..(20): Xaa is A or G or absent
XSKVIMYHYKLXXXXXXXXXKYLISIPSLDQSVXXP

SEQ ID NO: 5596 - protein, 36 aa, Artificial Sequence
  Non-cyclic GFR-binding peptide
  MOD_RES (1)..(35)..(36): Xaa is C or S
  MOD_RES (13)..(14)..(15)..(16)..(17): Xaa is A or G
  MOD_RES (18)..(19)..(20)..(21): Xaa is A or G or absent
XSRVVMNYHYKLXXXXXXXXXKYLVSIPSLKTPAXX

SEQ ID NO: 5597 - protein, 39 aa, Artificial Sequence
  Non-cyclic GFR-binding peptide
  MOD_RES (2)..(4)..(36)..(37): Xaa is C or S
HXGXAKVVMNYHYKLIVNNSSDKYLVSIPSLKTPAXXAK

SEQ ID NO: 5598 - protein, 34 aa, Artificial Sequence
  Non-cyclic GFR-binding peptide
  MOD_RES (12)..(13)..(14)..(15)..(16): Xaa is A or G
  MOD_RES (17)..(18)..(19)..(20): Xaa is A or G or absent
LHDELTRYKKLXXXXXXXXXFYLVSIANLQVQTP

SEQ ID NO: 5599 - protein, 33 aa, Artificial Sequence
  Non-cyclic GFR-binding peptide
  MOD_RES (31)..(32): Xaa is C or S
EVVMERYKKLVVKDYEDFYLMSIANLETPVXXA

SEQ ID NO: 5600 - protein, 33 aa, Artificial Sequence
  Non-cyclic GFR-binding peptide
  MOD_RES (2)..(33): Xaa is C or S
KXSKVVMQYNKLVKPTRGVLYLISIASLDQPVX

SEQ ID NO: 5601 - protein, 38 aa, Artificial Sequence
  Non-cyclic GFR-binding peptide
  MOD_RES (6)..(7): Xaa is C or S
KIPKAXXVPTELNAISMLYFDENEKVVLKKYRDMVVEG

SEQ ID NO: 5602 - protein, 35 aa, Artificial Sequence
  Non-cyclic GFR-binding peptide
  MOD_RES (32)..(34): Xaa is C or S
APTQLSAISVLYLDDSSNVILKNYQNMVVRAXGXH

SEQ ID NO: 5603 - protein, 34 aa, Artificial Sequence
  Non-cyclic GFR-binding peptide
  MOD_RES (14)..(15)..(16)..(17)..(18): Xaa is A or G
  MOD_RES (19)..(20)..(21)..(22): Xaa is A or G or absent
VPTKLNAISVLYFXXXXXXXXXLKKYREGMSVAE

SEQ ID NO: 5604 - protein, 38 aa, Artificial Sequence
  Non-cyclic GFR-binding peptide
  MOD_RES (1)..(38): Xaa is C or S
  MOD_RES (17)..(18)..(19)..(20)..(21): Xaa is A or G
  MOD_RES (22)..(23)..(24)..(25): Xaa is A or G or absent
XRPTQVQLSATSVLYYXXXXXXXXXLRKHRTLEDHLAX

SEQ ID NO: 5605 - protein, 42 aa, Artificial Sequence
  Non-cyclic GFR-binding peptide
  MOD_RES (4)..(5)..(40)..(42): Xaa is C or S
  MOD_RES (19)..(20)..(21)..(22)..(23): Xaa is A or G
  MOD_RES (24)..(25)..(26)..(27): Xaa is A or G or absent
GKAXXVPTKLNAISVLYFXXXXXXXXXLKKYREGMSVAEXGX

SEQ ID NO: 5606 - protein, 40 aa, Artificial Sequence
  Non-cyclic GFR-binding peptide
  MOD_RES (4)..(5)..(38)..(40): Xaa is C or S
  MOD_RES (19)..(20)..(21)..(22)..(23): Xaa is A or G
  MOD_RES (24)..(25)..(26)..(27): Xaa is A or G or absent
AAPXXVPQALSAISILYLXXXXXXXXXLKNYQMIVRSXKX

SEQ ID NO: 5607 - protein, 38 aa, Artificial Sequence
  Non-cyclic GFR-binding peptide
  MOD_RES (7)..(7): Xaa is C or S
HVTKPTXAPTKLSATSVLYYDDSSNVILRKHRNMVVRS

SEQ ID NO: 5608 - protein, 33 aa, Artificial Sequence
  Non-cyclic GFR-binding peptide
  MOD_RES (32)..(32): Xaa is C or S
VPTELNAISMLYFDENEKVVLKKYRDMVVEGXG

SEQ ID NO: 5609 - protein, 38 aa, Artificial Sequence
  Non-cyclic GFR-binding peptide
  MOD_RES (2)..(3)..(36)..(38): Xaa is C or S
  MOD_RES (17)..(18)..(19)..(20)..(21): Xaa is A or G
  MOD_RES (22)..(23)..(24)..(25): Xaa is A or G or absent
PXXVSQDLSPISILYKXXXXXXXXXLKYHYMIVKSXKX

SEQ ID NO: 5610 - protein, 38 aa, Artificial Sequence
  Non-cyclic GFR-binding peptide
  MOD_RES (1)..(2)..(36)..(38): Xaa is C or S
  MOD_RES (16)..(17)..(18)..(19)..(20): Xaa is A or G
  MOD_RES (21)..(22)..(23)..(24): Xaa is A or G or absent
XXAPTKLSAISVLYLXXXXXXXXXLKNYQNMVVRSXGX

SEQ ID NO: 5611 - protein, 36 aa, Artificial Sequence
  Non-cyclic GFR-binding peptide
  MOD_RES (3)..(4)..(36): Xaa is C or S
KPXXAPTKLSPISVLYKDDSSNVILKYHYNMVVRSX

SEQ ID NO: 5612 - protein, 32 aa, Artificial Sequence
  Non-cyclic GFR-binding peptide
  MOD_RES (1)..(32): Xaa is C or S
XVPQDLSPISILYKVGRTPKVLKYHYMVVKSX

SEQ ID NO: 5613 - protein, 37 aa, Artificial Sequence
  Non-cyclic GFR-binding peptide
  MOD_RES (4)..(5): Xaa is C or S
  MOD_RES (19)..(20)..(21)..(22)..(23): Xaa is A or G
  MOD_RES (24)..(25)..(26)..(27): Xaa is A or G or absent
PKPXXAPTKLSATSVLYYXXXXXXXXXLRKHRNMVVR

SEQ ID NO: 5614 - protein, 38 aa, Artificial Sequence
  Non-cyclic GFR-binding peptide
  MOD_RES (4)..(5)..(36)..(38): Xaa is C or S
AAPXXVPQALSAISILYLVGRKPKVLKNYQMIVRSXKX

SEQ ID NO: 5615 - protein, 35 aa, Artificial Sequence
  Non-cyclic GFR-binding peptide
  MOD_RES (1)..(35): Xaa is C or S
  MOD_RES (15)..(16)..(17)..(18)..(19): Xaa is A or G
  MOD_RES (20)..(21)..(22)..(23): Xaa is A or G or absent
XAPTKLSATSVLYYXXXXXXXXXLRKHRNMVVRSX

SEQ ID NO: 5616 - protein, 39 aa, Artificial Sequence
  Non-cyclic GFR-binding peptide
  MOD_RES (5)..(6)..(39): Xaa is C or S
  MOD_RES (20)..(21)..(22)..(23)..(24): Xaa is A or G
  MOD_RES (25)..(26)..(27)..(28): Xaa is A or G or absent
SAAPXXVPQALSATSILYYXXXXXXXXXLRKHRMIVRSX

SEQ ID NO: 5617 - protein, 38 aa, Artificial Sequence
  Non-cyclic GFR-binding peptide
  MOD_RES (6)..(7): Xaa is C or S
YVPKPXXAPTKLSATSVLYYDDSSNVILRKHRNMVVRS

SEQ ID NO: 5618 - protein, 35 aa, Artificial Sequence
  Non-cyclic GFR-binding peptide
  MOD_RES (4)..(5): Xaa is C or S
ASPXXVSQDLNAISILYFIGKTPKILKKYRMIVKS

SEQ ID NO: 5619 - protein, 42 aa, Artificial Sequence
  Non-cyclic GFR-binding peptide
  MOD_RES (5)..(6)..(40)..(42): Xaa is C or S
  MOD_RES (20)..(21)..(22)..(23)..(24): Xaa is A or G
  MOD_RES (25)..(26)..(27)..(28): Xaa is A or G or absent
IPKAXXVPTELSPISMLYKXXXXXXXXXLKYHYEMVVEGXGX

SEQ ID NO: 5620 - protein, 39 aa, Artificial Sequence
  Non-cyclic GFR-binding peptide
  MOD_RES (3)..(4)..(38): Xaa is C or S
  MOD_RES (18)..(19)..(20)..(21)..(22): Xaa is A or G
  MOD_RES (23)..(24)..(25)..(26): Xaa is A or G or absent
KPXXAPTQLSATSVLYYXXXXXXXXXLRKHRNMVVRAXG

SEQ ID NO: 5621 - protein, 35 aa, Artificial Sequence
  Non-cyclic GFR-binding peptide
  MOD_RES (15)..(16)..(17)..(18)..(19): Xaa is A or G
  MOD_RES (20)..(21)..(22)..(23): Xaa is A or G or absent
PTQVQLSATSVLYYXXXXXXXXXLRKHRTLEDHLA

SEQ ID NO: 5622 - protein, 38 aa, Artificial Sequence
  Non-cyclic GFR-binding peptide
  MOD_RES (1)..(2)..(35)..(37): Xaa is C or S
  MOD_RES (16)..(17)..(18)..(19)..(20): Xaa is A or G
  MOD_RES (21)..(22)..(23)..(24): Xaa is A or G or absent
XXVPQDLSPISILYKXXXXXXXXXLKYHYMVVKSXKXS

SEQ ID NO: 5623 - protein, 39 aa, Artificial Sequence
  Non-cyclic GFR-binding peptide
  MOD_RES (1)..(2)..(37)..(39): Xaa is C or S
  MOD_RES (16)..(17)..(18)..(19)..(20): Xaa is A or G
  MOD_RES (21)..(22)..(23)..(24): Xaa is A or G or absent
XXVPTKLSAISVLYLXXXXXXXXXLKNYQEGMSVAEXGX

SEQ ID NO: 5624 - protein, 33 aa, Artificial Sequence
  Non-cyclic GFR-binding peptide
  MOD_RES (14)..(15)..(16)..(17)..(18): Xaa is A or G
  MOD_RES (19)..(20)..(21)..(22): Xaa is A or G or absent
VPTELSATSMLYYXXXXXXXXXLRKHRDMVVEG

SEQ ID NO: 5625 - protein, 39 aa, Artificial Sequence
  Non-cyclic GFR-binding peptide
  MOD_RES (4)..(5)..(37)..(39): Xaa is C or S
PKAXXVPTELNAISMLYFDENEKVVLKKYRDMVVEGXGX

SEQ ID NO: 5626 - protein, 35 aa, Artificial Sequence
  Non-cyclic GFR-binding peptide
  MOD_RES (3)..(4)..(35): Xaa is C or S
SPXXVSQDLSAISILYLIGKTPKILKNYQMIVKSX

SEQ ID NO: 5627 - protein, 32 aa, Artificial Sequence
  Non-cyclic GFR-binding peptide
  MOD_RES (1)..(2): Xaa is C or S
XXVSQDLSPISILYKIGKTPKILKYHYMIVKS

SEQ ID NO: 5628 - protein, 40 aa, Artificial Sequence
  Non-cyclic GFR-binding peptide
  MOD_RES (4)..(5)..(38)..(40): Xaa is C or S
  MOD_RES (19)..(20)..(21)..(22)..(23): Xaa is A or G
  MOD_RES (24)..(25)..(26)..(27): Xaa is A or G or absent
ASPXXVSQDLSAISILYLXXXXXXXXXLKNYQMIVKSXKX

SEQ ID NO: 5629 - protein, 41 aa, Artificial Sequence
  Non-cyclic GFR-binding peptide
  MOD_RES (6)..(7)..(41): Xaa is C or S
  MOD_RES (21)..(22)..(23)..(24)..(25): Xaa is A or G
  MOD_RES (26)..(27)..(28)..(29): Xaa is A or G or absent
SIPKAXXVPTELSPISMLYKXXXXXXXXXLKYHYEMVVEGX

SEQ ID NO: 5630 - protein, 34 aa, Artificial Sequence
  Non-cyclic GFR-binding peptide
  MOD_RES (33)..(33): Xaa is C or S
  MOD_RES (14)..(15)..(16)..(17)..(18): Xaa is A or G
  MOD_RES (19)..(20)..(21)..(22): Xaa is A or G or absent
VPQDLSAISILYLXXXXXXXXXLKNYQMVVKSXK

SEQ ID NO: 5631 - protein, 34 aa, Artificial Sequence
  Non-cyclic GFR-binding peptide
  MOD_RES (2)..(3): Xaa is C or S
AXXVPTELSATSMLYYDENEKVVLRKHRDMVVEG

SEQ ID NO: 5632 - protein, 32 aa, Artificial Sequence
  Non-cyclic GFR-binding peptide
  MOD_RES (14)..(15)..(16)..(17)..(18): Xaa is A or G
  MOD_RES (19)..(20)..(21)..(22): Xaa is A or G or absent
TQVQLSATSVLYYXXXXXXXXXLRKHRTLEDH

SEQ ID NO: 5633 - protein, 30 aa, Artificial Sequence
  Non-cyclic GFR-binding peptide
VPTELSPISMLYKDEYDKVVLKYHYEMVVE

SEQ ID NO: 5634 - protein, 43 aa, Artificial Sequence
  Non-cyclic GFR-binding peptide
  MOD_RES (5)..(6)..(40)..(42): Xaa is C or S
  MOD_RES (20)..(21)..(22)..(23)..(24): Xaa is A or G
  MOD_RES (25)..(26)..(27)..(28): Xaa is A or G or absent
IPKAXXVPTELSPISMLYKXXXXXXXXXLKYHYDMVVEGXGXR

SEQ ID NO: 5635 - protein, 37 aa, Artificial Sequence
  Non-cyclic GFR-binding peptide
  MOD_RES (6)..(7): Xaa is C or S
TVPKPXXAPTQLSAISVLYLDDSSNVILKNYQNMVVR

SEQ ID NO: 5636 - protein, 32 aa, Artificial Sequence
  Non-cyclic GFR-binding peptide
  MOD_RES (1)..(1): Xaa is C or S
XVPTELSPISMLYKDEYDKVVLKYHYEMVVEG

SEQ ID NO: 5637 - protein, 35 aa, Artificial Sequence
  Non-cyclic GFR-binding peptide
  MOD_RES (2)..(3)..(35): Xaa is C or S
AXXVPTELSATSMLYYDEYDKVVLRKHREMVVEGX

SEQ ID NO: 5638 - protein, 35 aa, Artificial Sequence
  Non-cyclic GFR-binding peptide
  MOD_RES (1)..(34): Xaa is C or S
XVPTKLSATSVLYYDDMGVPTLRKHREGMSVAEXG

SEQ ID NO: 5639 - protein, 36 aa, Artificial Sequence
  Non-cyclic GFR-binding peptide
  MOD_RES (2)..(2): Xaa is C or S
QXRPTQVQLSATSVLYYEIVRKKPIFLRKHRTLEDH

SEQ ID NO: 5640 - protein, 38 aa, Artificial Sequence
  Non-cyclic GFR-binding peptide
  MOD_RES (7)..(7): Xaa is C or S
HVTKPTXAPTKLSAISVLYLDDSSNVILKNYQNMVVRS

SEQ ID NO: 5641 - protein, 32 aa, Artificial Sequence
  Non-cyclic GFR-binding peptide
  MOD_RES (32)..(32): Xaa is C or S
VPTELSPISMLYKDEYDKVVLKYHYEMVVEGX

SEQ ID NO: 5642 - protein, 40 aa, Artificial Sequence
  Non-cyclic GFR-binding peptide
  MOD_RES (5)..(6)..(39): Xaa is C or S
VGKAXXVPTKLSAISVLYLDDMGVPTLKNYQEGMSVAEXG

SEQ ID NO: 5643 - protein, 38 aa, Artificial Sequence
  Non-cyclic GFR-binding peptide
  MOD_RES (3)..(3): Xaa is C or S
  MOD_RES (19)..(20)..(21)..(22)..(23): Xaa is A or G
  MOD_RES (24)..(25)..(26)..(27): Xaa is A or G or absent
VQXRPTQVQLSAISVLYLXXXXXXXXXLKNYQTLEDHL

SEQ ID NO: 5644 - protein, 39 aa, Artificial Sequence
  Non-cyclic GFR-binding peptide
  MOD_RES (1)..(38): Xaa is C or S
  MOD_RES (17)..(18)..(19)..(20)..(21): Xaa is A or G
  MOD_RES (22)..(23)..(24)..(25): Xaa is A or G or absent
XRPTQVQLSATSVLYYXXXXXXXXXLRKHRTLEDHLAXK

SEQ ID NO: 5645 - protein, 39 aa, Artificial Sequence
  Non-cyclic GFR-binding peptide
  MOD_RES (1)..(2)..(36)..(38): Xaa is C or S
  MOD_RES (16)..(17)..(18)..(19)..(20): Xaa is A or G
  MOD_RES (21)..(22)..(23)..(24): Xaa is A or G or absent
XXAPTKLSATSVLYYXXXXXXXXXLRKHRNMVVRSXGXH

SEQ ID NO: 5646 - protein, 37 aa, Artificial Sequence
  Non-cyclic GFR-binding peptide
  MOD_RES (34)..(36): Xaa is C or S
  MOD_RES (14)..(15)..(16)..(17)..(18): Xaa is A or G
  MOD_RES (19)..(20)..(21)..(22): Xaa is A or G or absent
APTKLNAISVLYFXXXXXXXXXLKKYRNMVVKAXGXH

SEQ ID NO: 5647 - protein, 36 aa, Artificial Sequence
  Non-cyclic GFR-binding peptide
  MOD_RES (16)..(17)..(18)..(19)..(20): Xaa is A or G
  MOD_RES (21)..(22)..(23)..(24): Xaa is A or G or absent
RPTQVQLNAISVLYFXXXXXXXXXLKKYRTLEDHLA

SEQ ID NO: 5648 - protein, 38 aa, Artificial Sequence
  Non-cyclic GFR-binding peptide
  MOD_RES (4)..(5)..(37): Xaa is C or S
PKAXXVPTELSATSMLYYDEYDKVVLRKHREMVVEGXG

SEQ ID NO: 5649 - protein, 34 aa, Artificial Sequence
  Non-cyclic GFR-binding peptide
  MOD_RES (1)..(34): Xaa is C or S
  MOD_RES (15)..(16)..(17)..(18)..(19): Xaa is A or G
  MOD_RES (20)..(21)..(22)..(23): Xaa is A or G or absent
XVSQDLSPISILYKXXXXXXXXXLKYHYMIVKSX

SEQ ID NO: 5650 - protein, 42 aa, Artificial Sequence
  Non-cyclic GFR-binding peptide
  MOD_RES (5)..(6)..(39)..(41): Xaa is C or S
  MOD_RES (20)..(21)..(22)..(23)..(24): Xaa is A or G
  MOD_RES (25)..(26)..(27)..(28): Xaa is A or G or absent
SASPXXVSQDLSPISILYKXXXXXXXXXLKYHYMIVKSXKXS

SEQ ID NO: 5651 - protein, 36 aa, Artificial Sequence
  Non-cyclic GFR-binding peptide
  MOD_RES (1)..(2)..(36): Xaa is C or S
  MOD_RES (16)..(17)..(18)..(19)..(20): Xaa is A or G
  MOD_RES (21)..(22)..(23)..(24): Xaa is A or G or absent
XXAPTKLSATSVLYYXXXXXXXXXLRKHRNMVVRSX

SEQ ID NO: 5652 - protein, 33 aa, Artificial Sequence
  Non-cyclic GFR-binding peptide
  MOD_RES (33)..(33): Xaa is C or S
  MOD_RES (14)..(15)..(16)..(17)..(18): Xaa is A or G
  MOD_RES (19)..(20)..(21)..(22): Xaa is A or G or absent
VPQDLSPISILYKXXXXXXXXXLKYHYMVVKSX

SEQ ID NO: 5653 - protein, 37 aa, Artificial Sequence
  Non-cyclic GFR-binding peptide
  MOD_RES (35)..(37): Xaa is C or S
  MOD_RES (14)..(15)..(16)..(17)..(18): Xaa is A or G
  MOD_RES (19)..(20)..(21)..(22): Xaa is A or G or absent
TQVQLSATSVLYYXXXXXXXXXLRKHRTLEDHLAXKX

SEQ ID NO: 5654 - protein, 35 aa, Artificial Sequence
  Non-cyclic GFR-binding peptide
  MOD_RES (1)..(32)..(34): Xaa is C or S
XVSQDLSAISILYLIGKTPKILKNYQMIVKSXKXS

SEQ ID NO: 5655 - protein, 40 aa, Artificial Sequence
  Non-cyclic GFR-binding peptide
  MOD_RES (4)..(5)..(38)..(40): Xaa is C or S
GKAXXVPTKLNAISVLYFDDMGVPTLKKYREGMSVAEXGX

SEQ ID NO: 5656 - protein, 36 aa, Artificial Sequence
  Non-cyclic GFR-binding peptide
  MOD_RES (34)..(36): Xaa is C or S
  MOD_RES (14)..(15)..(16)..(17)..(18): Xaa is A or G
  MOD_RES (19)..(20)..(21)..(22): Xaa is A or G or absent
APTKLSPISVLYKXXXXXXXXXLKYHYNMVVRSXGX

SEQ ID NO: 5657 - protein, 39 aa, Artificial Sequence
  Non-cyclic GFR-binding peptide
  MOD_RES (4)..(5)..(38): Xaa is C or S
  MOD_RES (19)..(20)..(21)..(22)..(23): Xaa is A or G
  MOD_RES (24)..(25)..(26)..(27): Xaa is A or G or absent
ASPXXVSQDLSAISILYLXXXXXXXXXLKNYQMIVKSXK

SEQ ID NO: 5658 - protein, 37 aa, Artificial Sequence
  Non-cyclic GFR-binding peptide
  MOD_RES (2)..(3)..(35)..(37): Xaa is C or S
AXXAPTKLSAISVLYLDSSNNVILKNYQNMVVKAXGX

SEQ ID NO: 5659 - protein, 38 aa, Artificial Sequence
  Non-cyclic GFR-binding peptide
  MOD_RES (1)..(38): Xaa is C or S
XRPTQVQLSATSVLYYEIVRKKPIFLRKHRTLEDHLAX

SEQ ID NO: 5660 - protein, 37 aa, Artificial Sequence
  Non-cyclic GFR-binding peptide
  MOD_RES (4)..(5)..(37): Xaa is C or S
PKPXXAPTQLSAISVLYLDDSSNVILKNYQNMVVRAX

SEQ ID NO: 5661 - protein, 39 aa, Artificial Sequence
  Non-cyclic GFR-binding peptide
  MOD_RES (6)..(7): Xaa is C or S
  MOD_RES (21)..(22)..(23)..(24)..(25): Xaa is A or G
  MOD_RES (26)..(27)..(28)..(29): Xaa is A or G or absent
ASASPXXVPQDLSPISILYKXXXXXXXXXLKYHYMVVKS

SEQ ID NO: 5662 - protein, 30 aa, Artificial Sequence
  Non-cyclic GFR-binding peptide
VPQALSATSILYYVGRKPKVLRKHRMIVRS

SEQ ID NO: 5663 - protein, 41 aa, Artificial Sequence
  Non-cyclic GFR-binding peptide
  MOD_RES (5)..(39)..(41): Xaa is C or S
  MOD_RES (19)..(20)..(21)..(22)..(23): Xaa is A or G
  MOD_RES (24)..(25)..(26)..(27): Xaa is A or G or absent
TKPTXAPTKLSAISVLYLXXXXXXXXXLKNYQNMVVRSXGX

SEQ ID NO: 5664 - protein, 34 aa, Artificial Sequence
  Non-cyclic GFR-binding peptide
  MOD_RES (3)..(4): Xaa is C or S
SPXXVSQDLSAISILYLIGKTPKILKNYQMIVKS

SEQ ID NO: 5665 - protein, 43 aa, Artificial Sequence
  Non-cyclic GFR-binding peptide
  MOD_RES (4)..(41)..(43): Xaa is C or S
  MOD_RES (20)..(21)..(22)..(23)..(24): Xaa is A or G
  MOD_RES (25)..(26)..(27)..(28): Xaa is A or G or absent
NVQXRPTQVQLSATSVLYYXXXXXXXXXLRKHRTLEDHLAXKX

SEQ ID NO: 5666 - protein, 35 aa, Artificial Sequence
  Non-cyclic GFR-binding peptide
  MOD_RES (34)..(34): Xaa is C or S
  MOD_RES (14)..(15)..(16)..(17)..(18): Xaa is A or G
  MOD_RES (19)..(20)..(21)..(22): Xaa is A or G or absent
VPTELSATSMLYYXXXXXXXXXLRKHREMVVEGXG

SEQ ID NO: 5667 - protein, 43 aa, Artificial Sequence
  Non-cyclic GFR-binding peptide
  MOD_RES (5)..(6)..(40)..(42): Xaa is C or S
  MOD_RES (20)..(21)..(22)..(23)..(24): Xaa is A or G
  MOD_RES (25)..(26)..(27)..(28): Xaa is A or G or absent
VPKPXXAPTKLSPISVLYKXXXXXXXXXLKYHYNMVVRSXGXH

SEQ ID NO: 5668 - protein, 38 aa, Artificial Sequence
  Non-cyclic GFR-binding peptide
  MOD_RES (4)..(5): Xaa is C or S
  MOD_RES (19)..(20)..(21)..(22)..(23): Xaa is A or G
  MOD_RES (24)..(25)..(26)..(27): Xaa is A or G or absent
PKPXXAPTKLSAISVLYLXXXXXXXXXLKNYQNMVVRS

SEQ ID NO: 5669 - protein, 33 aa, Artificial Sequence
  Non-cyclic GFR-binding peptide
  MOD_RES (1)..(32): Xaa is C or S
XVSQDLSPISILYKIGKTPKILKYHYMIVKSXK

SEQ ID NO: 5670 - protein, 42 aa, Artificial Sequence
  Non-cyclic GFR-binding peptide
  MOD_RES (5)..(6)..(40)..(42): Xaa is C or S
  MOD_RES (20)..(21)..(22)..(23)..(24): Xaa is A or G
  MOD_RES (25)..(26)..(27)..(28): Xaa is A or G or absent
VPKAXXAPTKLSAISVLYLXXXXXXXXXLKNYQNMVVKAXGX

SEQ ID NO: 5671 - protein, 36 aa, Artificial Sequence
  Non-cyclic GFR-binding peptide
  MOD_RES (1)..(1): Xaa is C or S
XRPTQVQLSPISVLYKEIVRKKPIFLKYHYTLEDHL

SEQ ID NO: 5672 - protein, 43 aa, Artificial Sequence
  Non-cyclic GFR-binding peptide
  MOD_RES (5)..(6)..(40)..(42): Xaa is C or S
  MOD_RES (20)..(21)..(22)..(23)..(24): Xaa is A or G
  MOD_RES (25)..(26)..(27)..(28): Xaa is A or G or absent
IPKAXXVPTELSATSMLYYXXXXXXXXXLRKHRDMVVEGXGXR

SEQ ID NO: 5673 - protein, 34 aa, Artificial Sequence
  Non-cyclic GFR-binding peptide
  MOD_RES (1)..(34): Xaa is C or S
  MOD_RES (15)..(16)..(17)..(18)..(19): Xaa is A or G
  MOD_RES (20)..(21)..(22)..(23): Xaa is A or G or absent
XVPQDLNAISILYFXXXXXXXXXLKKYRMVVKSX

SEQ ID NO: 5674 - protein, 33 aa, Artificial Sequence
  Non-cyclic GFR-binding peptide
  MOD_RES (1)..(1): Xaa is C or S
  MOD_RES (15)..(16)..(17)..(18)..(19): Xaa is A or G
  MOD_RES (20)..(21)..(22)..(23): Xaa is A or G or absent
XVPQALNAISILYFXXXXXXXXXLKKYRMIVRS

SEQ ID NO: 5675 - protein, 38 aa, Artificial Sequence
  Non-cyclic GFR-binding peptide
  MOD_RES (4)..(5)..(38): Xaa is C or S
  MOD_RES (19)..(20)..(21)..(22)..(23): Xaa is A or G
  MOD_RES (24)..(25)..(26)..(27): Xaa is A or G or absent
ASPXXVPQDLNAISILYFXXXXXXXXXLKKYRMVVKSX

SEQ ID NO: 5676 - protein, 37 aa, Artificial Sequence
  Non-cyclic GFR-binding peptide
  MOD_RES (1)..(35)..(37): Xaa is C or S
  MOD_RES (15)..(16)..(17)..(18)..(19): Xaa is A or G
  MOD_RES (20)..(21)..(22)..(23): Xaa is A or G or absent
XVPTELNAISMLYFXXXXXXXXXLKKYREMVVEGXGX

SEQ ID NO: 5677 - protein, 34 aa, Artificial Sequence
  Non-cyclic GFR-binding peptide
  MOD_RES (1)..(2)..(34): Xaa is C or S
XXAPTKLSAISVLYLDDSSNVILKNYQNMVVRSX

SEQ ID NO: 5678 - protein, 39 aa, Artificial Sequence
  Non-cyclic GFR-binding peptide
  MOD_RES (6)..(7): Xaa is C or S
  MOD_RES (21)..(22)..(23)..(24)..(25): Xaa is A or G
  MOD_RES (26)..(27)..(28)..(29): Xaa is A or G or absent
ASAAPXXVPQALNAISILYFXXXXXXXXXLKKYRMIVRS

SEQ ID NO: 5679 - protein, 41 aa, Artificial Sequence
  Non-cyclic GFR-binding peptide
  MOD_RES (4)..(5)..(38)..(40): Xaa is C or S
  MOD_RES (19)..(20)..(21)..(22)..(23): Xaa is A or G
  MOD_RES (24)..(25)..(26)..(27): Xaa is A or G or absent
AAPXXVPQALSAISILYLXXXXXXXXXLKNYQMIVRSXKXS

SEQ ID NO: 5680 - protein, 42 aa, Artificial Sequence
  Non-cyclic GFR-binding peptide
  MOD_RES (3)..(40)..(42): Xaa is C or S
VQXRPTQVQLNAISVLYFEIVRKKPIFLKKYRTLEDHLAXKX

SEQ ID NO: 5681 - protein, 33 aa, Artificial Sequence
  Non-cyclic GFR-binding peptide
PTQVQLSATSVLYYEIVRKKPIFLRKHRTLEDH

SEQ ID NO: 5682 - protein, 35 aa, Artificial Sequence
  Non-cyclic GFR-binding peptide
  MOD_RES (1)..(2): Xaa is C or S
  MOD_RES (16)..(17)..(18)..(19)..(20): Xaa is A or G
  MOD_RES (21)..(22)..(23)..(24): Xaa is A or G or absent
XXAPTKLSAISVLYLXXXXXXXXXLKNYQNMVVRS

SEQ ID NO: 5683 - protein, 33 aa, Artificial Sequence
  Non-cyclic GFR-binding peptide
  MOD_RES (32)..(32): Xaa is C or S
APTQLSATSVLYYDDSSNVILRKHRNMVVRAXG

SEQ ID NO: 5684 - protein, 37 aa, Artificial Sequence
  Non-cyclic GFR-binding peptide
  MOD_RES (5)..(6): Xaa is C or S
IPKAXXVPTELSPISMLYKDEYDKVVLKYHYEMVVEG

SEQ ID NO: 5685 - protein, 35 aa, Artificial Sequence
  Non-cyclic GFR-binding peptide
  MOD_RES (15)..(16)..(17)..(18)..(19): Xaa is A or G
  MOD_RES (20)..(21)..(22)..(23): Xaa is A or G or absent
PTQVQLSAISVLYLXXXXXXXXXLKNYQTLEDHLA

SEQ ID NO: 5686 - protein, 39 aa, Artificial Sequence
  Non-cyclic GFR-binding peptide
  MOD_RES (36)..(38): Xaa is C or S
  MOD_RES (15)..(16)..(17)..(18)..(19): Xaa is A or G
  MOD_RES (20)..(21)..(22)..(23): Xaa is A or G or absent
PTQVQLSATSVLYYXXXXXXXXXLRKHRTLEDHLAXKXE

SEQ ID NO: 5687 - protein, 34 aa, Artificial Sequence
  Non-cyclic GFR-binding peptide
RPTQVQLNAISVLYFEIVRKKPIFLKKYRTLEDH

SEQ ID NO: 5688 - protein, 38 aa, Artificial Sequence
  Non-cyclic GFR-binding peptide
  MOD_RES (5)..(6)..(38): Xaa is C or S
VPKAXXAPTKLSPISVLYKDSSNNVILKYHYNMVVKAX

SEQ ID NO: 5689 - protein, 37 aa, Artificial Sequence
  Non-cyclic GFR-binding peptide
  MOD_RES (35)..(37): Xaa is C or S
  MOD_RES (14)..(15)..(16)..(17)..(18): Xaa is A or G
  MOD_RES (19)..(20)..(21)..(22): Xaa is A or G or absent
TQVQLSPISVLYKXXXXXXXXXLKYHYTLEDHLAXKX

SEQ ID NO: 5690 - protein, 39 aa, Artificial Sequence
  Non-cyclic GFR-binding peptide
  MOD_RES (5)..(6)..(38): Xaa is C or S
VPKPXXAPTKLSATSVLYYDDSSNVILRKHRNMVVRSXG

SEQ ID NO: 5691 - protein, 37 aa, Artificial Sequence
  Non-cyclic GFR-binding peptide
  MOD_RES (1)..(34)..(36): Xaa is C or S
XVPTKLSATSVLYYDDMGVPTLRKHREGMSVAEXGXR

SEQ ID NO: 5692 - protein, 42 aa, Artificial Sequence
  Non-cyclic GFR-binding peptide
  MOD_RES (4)..(5)..(39)..(41): Xaa is C or S
  MOD_RES (19)..(20)..(21)..(22)..(23): Xaa is A or G
  MOD_RES (24)..(25)..(26)..(27): Xaa is A or G or absent
PKPXXAPTKLSAISVLYLXXXXXXXXXLKNYQNMVVRSXGXH

SEQ ID NO: 5693 - protein, 38 aa, Artificial Sequence
  Non-cyclic GFR-binding peptide
  MOD_RES (1)..(2)..(36)..(38): Xaa is C or S
  MOD_RES (16)..(17)..(18)..(19)..(20): Xaa is A or G
  MOD_RES (21)..(22)..(23)..(24): Xaa is A or G or absent
XXVPTELSPISMLYKXXXXXXXXXLKYHYDMVVEGXGX

SEQ ID NO: 5694 - protein, 39 aa, Artificial Sequence
  Non-cyclic GFR-binding peptide
  MOD_RES (3)..(4)..(38): Xaa is C or S
  MOD_RES (18)..(19)..(20)..(21)..(22): Xaa is A or G
  MOD_RES (23)..(24)..(25)..(26): Xaa is A or G or absent
KAXXAPTKLNAISVLYFXXXXXXXXXLKKYRNMVVKAXG

SEQ ID NO: 5695 - protein, 42 aa, Artificial Sequence
  Non-cyclic GFR-binding peptide
  MOD_RES (6)..(7)..(41): Xaa is C or S
  MOD_RES (21)..(22)..(23)..(24)..(25): Xaa is A or G
  MOD_RES (26)..(27)..(28)..(29): Xaa is A or G or absent
KIPKAXXVPTELSPISMLYKXXXXXXXXXLKYHYDMVVEGXG

SEQ ID NO: 5696 - protein, 37 aa, Artificial Sequence
  Non-cyclic GFR-binding peptide
  MOD_RES (6)..(7): Xaa is C or S
TVPKPXXAPTQLSPISVLYKDDSSNVILKYHYNMVVR

SEQ ID NO: 5697 - protein, 36 aa, Artificial Sequence
  Non-cyclic GFR-binding peptide
  MOD_RES (2)..(3)..(34)..(36): Xaa is C or S
PXXVPQDLSPISILYKVGRTPKVLKYHYMVVKSXKX

SEQ ID NO: 5698 - protein, 34 aa, Artificial Sequence
  Non-cyclic GFR-binding peptide
  MOD_RES (1)..(2): Xaa is C or S
  MOD_RES (16)..(17)..(18)..(19)..(20): Xaa is A or G
  MOD_RES (21)..(22)..(23)..(24): Xaa is A or G or absent
XXVSQDLSAISILYLXXXXXXXXXLKNYQMIVKS

SEQ ID NO: 5699 - protein, 44 aa, Artificial Sequence
  Non-cyclic GFR-binding peptide
  MOD_RES (6)..(7)..(42)..(44): Xaa is C or S
  MOD_RES (21)..(22)..(23)..(24)..(25): Xaa is A or G
  MOD_RES (26)..(27)..(28)..(29): Xaa is A or G or absent
KVGKAXXVPTKLNAISVLYFXXXXXXXXXLKKYREGMSVAEXGX

SEQ ID NO: 5700 - protein, 35 aa, Artificial Sequence
  Non-cyclic GFR-binding peptide
  MOD_RES (3)..(4)..(35): Xaa is C or S
SPXXVSQDLNAISILYFIGKTPKILKKYRMIVKSX

SEQ ID NO: 5701 - protein, 40 aa, Artificial Sequence
  Non-cyclic GFR-binding peptide
  MOD_RES (5)..(5): Xaa is C or S
RNVQXRPTQVQLSPISVLYKEIVRKKPIFLKYHYTLEDHL

SEQ ID NO: 5702 - protein, 35 aa, Artificial Sequence
  Non-cyclic GFR-binding peptide
  MOD_RES (1)..(33)..(35): Xaa is C or S
XVPTELSPISMLYKDENEKVVLKYHYDMVVEGXGX

SEQ ID NO: 5703 - protein, 41 aa, Artificial Sequence
  Non-cyclic GFR-binding peptide
  MOD_RES (5)..(6)..(40): Xaa is C or S
  MOD_RES (20)..(21)..(22)..(23)..(24): Xaa is A or G
  MOD_RES (25)..(26)..(27)..(28): Xaa is A or G or absent
IPKAXXVPTELNAISMLYFXXXXXXXXXLKKYRDMVVEGXG

SEQ ID NO: 5704 - protein, 39 aa, Artificial Sequence
  Non-cyclic GFR-binding peptide
  MOD_RES (2)..(3)..(37)..(39): Xaa is C or S
  MOD_RES (17)..(18)..(19)..(20)..(21): Xaa is A or G
  MOD_RES (22)..(23)..(24)..(25): Xaa is A or G or absent
AXXVPTELSATSMLYYXXXXXXXXXLRKHREMVVEGXGX

SEQ ID NO: 5705 - protein, 38 aa, Artificial Sequence
  Non-cyclic GFR-binding peptide
  MOD_RES (2)..(2): Xaa is C or S
QXRPTQVQLNAISVLYFEIVRKKPIFLKKYRTLEDHLA

SEQ ID NO: 5706 - protein, 35 aa, Artificial Sequence
  Non-cyclic GFR-binding peptide
  MOD_RES (2)..(3): Xaa is C or S
  MOD_RES (17)..(18)..(19)..(20)..(21): Xaa is A or G
  MOD_RES (22)..(23)..(24)..(25): Xaa is A or G or absent
PXXVPQALSATSILYYXXXXXXXXXLRKHRMIVRS

SEQ ID NO: 5707 - protein, 36 aa, Artificial Sequence
  Non-cyclic GFR-binding peptide
  MOD_RES (2)..(3)..(36): Xaa is C or S
  MOD_RES (17)..(18)..(19)..(20)..(21): Xaa is A or G
  MOD_RES (22)..(23)..(24)..(25): Xaa is A or G or absent
PXXVSQDLNAISILYFXXXXXXXXXLKKYRMIVKSX

SEQ ID NO: 5708 - protein, 34 aa, Artificial Sequence
  Non-cyclic GFR-binding peptide
  MOD_RES (2)..(3)..(34): Xaa is C or S
PXXVSQDLSATSILYYIGKTPKILRKHRMIVKSX

SEQ ID NO: 5709 - protein, 30 aa, Artificial Sequence; identical to SEQ ID NO: 816
  Non-cyclic GFR-binding peptide

SEQ ID NO: 5710 - protein, 41 aa, Artificial Sequence
  Non-cyclic GFR-binding peptide
  MOD_RES (6)..(7)..(39)..(41): Xaa is C or S
TVPKPXXAPTQLSPISVLYKDDSSNVILKYHYNMVVRAXGX

SEQ ID NO: 5711 - protein, 38 aa, Artificial Sequence
  Non-cyclic GFR-binding peptide
  MOD_RES (2)..(3)..(35)..(37): Xaa is C or S
AXXAPTKLNAISVLYFDSSNNVILKKYRNMVVKAXGXH

SEQ ID NO: 5712 - protein, 34 aa, Artificial Sequence
  Non-cyclic GFR-binding peptide
  MOD_RES (1)..(2): Xaa is C or S
  MOD_RES (16)..(17)..(18)..(19)..(20): Xaa is A or G
  MOD_RES (21)..(22)..(23)..(24): Xaa is A or G or absent
XXAPTKLSAISVLYLXXXXXXXXXLKNYQNMVVK

SEQ ID NO: 5713 - protein, 36 aa, Artificial Sequence
  Non-cyclic GFR-binding peptide
  MOD_RES (2)..(3)..(35): Xaa is C or S
PXXAPTQLSATSVLYYDDSSNVILRKHRNMVVRAXG

SEQ ID NO: 5714 - protein, 40 aa, Artificial Sequence
  Non-cyclic GFR-binding peptide
  MOD_RES (4)..(5)..(37)..(39): Xaa is C or S
PKPXXAPTQLSPISVLYKDDSSNVILKYHYNMVVRAXGXH

SEQ ID NO: 5715 - protein, 38 aa, Artificial Sequence
  Non-cyclic GFR-binding peptide
  MOD_RES (5)..(6): Xaa is C or S
  MOD_RES (20)..(21)..(22)..(23)..(24): Xaa is A or G
  MOD_RES (25)..(26)..(27)..(28): Xaa is A or G or absent
SASPXXVSQDLNAISILYFXXXXXXXXXLKKYRMIVKS

SEQ ID NO: 5716 - protein, 34 aa, Artificial Sequence
  Non-cyclic GFR-binding peptide
  MOD_RES (1)..(2): Xaa is C or S
  MOD_RES (16)..(17)..(18)..(19)..(20): Xaa is A or G
  MOD_RES (21)..(22)..(23)..(24): Xaa is A or G or absent
XXAPTKLSAISVLYLXXXXXXXXXLKNYQNMVVR

SEQ ID NO: 5717 - protein, 32 aa, Artificial Sequence
  Non-cyclic GFR-binding peptide
  MOD_RES (2)..(2): Xaa is C or S
TXAPTKLSAISVLYLDDSSNVILKNYQNMVVR

SEQ ID NO: 5718 - protein, 34 aa, Artificial Sequence
  Non-cyclic GFR-binding peptide
  MOD_RES (3)..(4): Xaa is C or S
SPXXVSQDLSPISILYKIGKTPKILKYHYMIVKS

SEQ ID NO: 5719 - protein, 38 aa, Artificial Sequence
  Non-cyclic GFR-binding peptide
  MOD_RES (2)..(3)..(35)..(37): Xaa is C or S
AXXVPTELSPISMLYKDENEKVVLKYHYDMVVEGXGXR

SEQ ID NO: 5720 - protein, 36 aa, Artificial Sequence
  Non-cyclic GFR-binding peptide
  MOD_RES (1)..(2)..(35): Xaa is C or S
  MOD_RES (16)..(17)..(18)..(19)..(20): Xaa is A or G
  MOD_RES (21)..(22)..(23)..(24): Xaa is A or G or absent
XXVSQDLSATSILYYXXXXXXXXXLRKHRMIVKSXK

SEQ ID NO: 5721 - protein, 41 aa, Artificial Sequence
  Non-cyclic GFR-binding peptide
  MOD_RES (5)..(5): Xaa is C or S
RNVQXRPTQVQLSATSVLYYEIVRKKPIFLRKHRTLEDHLA

SEQ ID NO: 5722 - protein, 39 aa, Artificial Sequence
  Non-cyclic GFR-binding peptide
  MOD_RES (4)..(5)..(37)..(39): Xaa is C or S
PKPXXAPTQLSPISVLYKDDSSNVILKYHYNMVVRAXGX

SEQ ID NO: 5723 - protein, 36 aa, Artificial Sequence
  Non-cyclic GFR-binding peptide
  MOD_RES (2)..(2): Xaa is C or S
QXRPTQVQLSPISVLYKEIVRKKPIFLKYHYTLEDH

SEQ ID NO: 5724 - protein, 38 aa, Artificial Sequence
  Non-cyclic GFR-binding peptide
  MOD_RES (5)..(6)..(38): Xaa is C or S
VPKPXXAPTQLSPISVLYKDDSSNVILKYHYNMVVRAX

SEQ ID NO: 5725 - protein, 36 aa, Artificial Sequence
  Non-cyclic GFR-binding peptide
  MOD_RES (4)..(5)..(36): Xaa is C or S
ASPXXVSQDLNAISILYFIGKTPKILKKYRMIVKSX

SEQ ID NO: 5726 - protein, 37 aa, Artificial Sequence
  Non-cyclic GFR-binding peptide
  MOD_RES (3)..(4)..(35)..(37): Xaa is C or S
SPXXVPQDLSATSILYYVGRTPKVLRKHRMVVKSXKX

SEQ ID NO: 5727 - protein, 40 aa, Artificial Sequence
  Non-cyclic GFR-binding peptide
  MOD_RES (4)..(5)..(37)..(39): Xaa is C or S
PKAXXVPTELSPISMLYKDEYDKVVLKYHYEMVVEGXGXR

SEQ ID NO: 5728 - protein, 44 aa, Artificial Sequence
  Non-cyclic GFR-binding peptide
  MOD_RES (5)..(42)..(44): Xaa is C or S
  MOD_RES (21)..(22)..(23)..(24)..(25): Xaa is A or G
  MOD_RES (26)..(27)..(28)..(29): Xaa is A or G or absent
RNVQXRPTQVQLSAISVLYLXXXXXXXXXLKNYQTLEDHLAXKX

SEQ ID NO: 5729 - protein, 41 aa, Artificial Sequence
  Non-cyclic GFR-binding peptide
  MOD_RES (4)..(41): Xaa is C or S
NVQXRPTQVQLNAISVLYFEIVRKKPIFLKKYRTLEDHLAX

SEQ ID NO: 5730 - protein, 35 aa, Artificial Sequence
  Non-cyclic GFR-binding peptide
  MOD_RES (1)..(34): Xaa is C or S
  MOD_RES (15)..(16)..(17)..(18)..(19): Xaa is A or G
  MOD_RES (20)..(21)..(22)..(23): Xaa is A or G or absent
XVSQDLSAISILYLXXXXXXXXXLKNYQMIVKSXK

SEQ ID NO: 5731 - protein, 35 aa, Artificial Sequence
  Non-cyclic GFR-binding peptide
  MOD_RES (1)..(34): Xaa is C or S
  MOD_RES (15)..(16)..(17)..(18)..(19): Xaa is A or G
  MOD_RES (20)..(21)..(22)..(23): Xaa is A or G or absent
XVPQDLSATSILYYXXXXXXXXXLRKHRMVVKSXK

SEQ ID NO: 5732 - protein, 35 aa, Artificial Sequence
  Non-cyclic GFR-binding peptide
  MOD_RES (34)..(34): Xaa is C or S
  MOD_RES (14)..(15)..(16)..(17)..(18): Xaa is A or G
  MOD_RES (19)..(20)..(21)..(22): Xaa is A or G or absent
VPTELNAISMLYFXXXXXXXXXLKKYREMVVEGXG

SEQ ID NO: 5733 - protein, 36 aa, Artificial Sequence
  Non-cyclic GFR-binding peptide
  MOD_RES (3)..(4)..(36): Xaa is C or S
KAXXVPTELSPISMLYKDEYDKVVLKYHYEMVVEGX

SEQ ID NO: 5734 - protein, 32 aa, Artificial Sequence
  Non-cyclic GFR-binding peptide
  MOD_RES (1)..(1): Xaa is C or S
XAPTKLSPISVLYKDSSNNVILKYHYNMVVKA

SEQ ID NO: 5735 - protein, 37 aa, Artificial Sequence
  Non-cyclic GFR-binding peptide
  MOD_RES (1)..(2)..(34)..(36): Xaa is C or S
XXVPTELSATSMLYYDEYDKVVLRKHREMVVEGXGXR

SEQ ID NO: 5736 - protein, 41 aa, Artificial Sequence
  Non-cyclic GFR-binding peptide
  MOD_RES (5)..(5): Xaa is C or S
RNVQXRPTQVQLSAISVLYLEIVRKKPIFLKNYQTLEDHLA

SEQ ID NO: 5737 - protein, 40 aa, Artificial Sequence
  Non-cyclic GFR-binding peptide
  MOD_RES (6)..(7): Xaa is C or S
  MOD_RES (21)..(22)..(23)..(24)..(25): Xaa is A or G
  MOD_RES (26)..(27)..(28)..(29): Xaa is A or G or absent
SIPKAXXVPTELSATSMLYYXXXXXXXXXLRKHREMVVEG

SEQ ID NO: 5738 - protein, 35 aa, Artificial Sequence
  Non-cyclic GFR-binding peptide
  MOD_RES (2)..(3)..(35): Xaa is C or S
PXXAPTQLSATSVLYYDDSSNVILRKHRNMVVRAX

SEQ ID NO: 5739 - protein, 37 aa, Artificial Sequence
  Non-cyclic GFR-binding peptide
  MOD_RES (1)..(2)..(36): Xaa is C or S
  MOD_RES (16)..(17)..(18)..(19)..(20): Xaa is A or G
  MOD_RES (21)..(22)..(23)..(24): Xaa is A or G or absent
XXVPTELSPISMLYKXXXXXXXXXLKYHYEMVVEGXG

SEQ ID NO: 5740 - protein, 36 aa, Artificial Sequence
  Non-cyclic GFR-binding peptide
  MOD_RES (36)..(36): Xaa is C or S
  MOD_RES (15)..(16)..(17)..(18)..(19): Xaa is A or G
  MOD_RES (20)..(21)..(22)..(23): Xaa is A or G or absent
PTQVQLSPISVLYKXXXXXXXXXLKYHYTLEDHLAX

SEQ ID NO: 5741 - protein, 42 aa, Artificial Sequence
  Non-cyclic GFR-binding peptide
  MOD_RES (4)..(41): Xaa is C or S
  MOD_RES (20)..(21)..(22)..(23)..(24): Xaa is A or G
  MOD_RES (25)..(26)..(27)..(28): Xaa is A or G or absent
NVQXRPTQVQLSAISVLYLXXXXXXXXXLKNYQTLEDHLAXK

SEQ ID NO: 5742 - protein, 41 aa, Artificial Sequence
  Non-cyclic GFR-binding peptide
  MOD_RES (5)..(6)..(40): Xaa is C or S
  MOD_RES (20)..(21)..(22)..(23)..(24): Xaa is A or G
  MOD_RES (25)..(26)..(27)..(28): Xaa is A or G or absent
IPKAXXVPTELSATSMLYYXXXXXXXXXLRKHRDMVVEGXG

SEQ ID NO: 5743 - protein, 34 aa, Artificial Sequence
  Non-cyclic GFR-binding peptide
  MOD_RES (1)..(32)..(34): Xaa is C or S
XVPQALSAISILYLVGRKPKVLKNYQMIVRSXKX

SEQ ID NO: 5744 - protein, 33 aa, Artificial Sequence
  Non-cyclic GFR-binding peptide
  MOD_RES (2)..(3): Xaa is C or S
AXXVPTELNAISMLYFDENEKVVLKKYRDMVVE

SEQ ID NO: 5745 - protein, 36 aa, Artificial Sequence
  Non-cyclic GFR-binding peptide
  MOD_RES (3)..(4): Xaa is C or S
KAXXVPTKLSATSVLYYDDMGVPTLRKHREGMSVAE

SEQ ID NO: 5746 - protein, 32 aa, Artificial Sequence
  Non-cyclic GFR-binding peptide
  MOD_RES (14)..(15)..(16)..(17)..(18): Xaa is A or G
  MOD_RES (19)..(20)..(21)..(22): Xaa is A or G or absent
TQVQLSPISVLYKXXXXXXXXXLKYHYTLEDH

SEQ ID NO: 5747 - protein, 35 aa, Artificial Sequence
  Non-cyclic GFR-binding peptide
  MOD_RES (4)..(5): Xaa is C or S
PKAXXVPTELSATSMLYYDEYDKVVLRKHREMVVE

SEQ ID NO: 5748 - protein, 43 aa, Artificial Sequence
  Non-cyclic GFR-binding peptide
  MOD_RES (6)..(7)..(40)..(42): Xaa is C or S
  MOD_RES (21)..(22)..(23)..(24)..(25): Xaa is A or G
  MOD_RES (26)..(27)..(28)..(29): Xaa is A or G or absent
ASAAPXXVPQALSATSILYYXXXXXXXXXLRKHRMIVRSXKXS

SEQ ID NO: 5749 - protein, 37 aa, Artificial Sequence
  Non-cyclic GFR-binding peptide
  MOD_RES (36)..(36): Xaa is C or S
PTQVQLSATSVLYYEIVRKKPIFLRKHRTLEDHLAXK

SEQ ID NO: 5750 - protein, 37 aa, Artificial Sequence
  Non-cyclic GFR-binding peptide
  MOD_RES (2)..(36): Xaa is C or S
  MOD_RES (16)..(17)..(18)..(19)..(20): Xaa is A or G
  MOD_RES (21)..(22)..(23)..(24): Xaa is A or G or absent
TXAPTKLSPISVLYKXXXXXXXXXLKYHYNMVVRSXG

SEQ ID NO: 5751 - protein, 39 aa, Artificial Sequence
  Non-cyclic GFR-binding peptide
  MOD_RES (4)..(5)..(38): Xaa is C or S
  MOD_RES (19)..(20)..(21)..(22)..(23): Xaa is A or G
  MOD_RES (24)..(25)..(26)..(27): Xaa is A or G or absent
ASPXXVPQDLSATSILYYXXXXXXXXXLRKHRMVVKSXK

SEQ ID NO: 5752 - protein, 41 aa, Artificial Sequence
  Non-cyclic GFR-binding peptide
  MOD_RES (2)..(39)..(41): Xaa is C or S
QXRPTQVQLSPISVLYKEIVRKKPIFLKYHYTLEDHLAXKX

SEQ ID NO: 5753 - protein, 31 aa, Artificial Sequence
  Non-cyclic GFR-binding peptide
  MOD_RES (1)..(1): Xaa is C or S
XVPTELNAISMLYFDENEKVVLKKYRDMVVE

SEQ ID NO: 5754 - protein, 33 aa, Artificial Sequence
  Non-cyclic GFR-binding peptide
  MOD_RES (2)..(2): Xaa is C or S
TXAPTKLSATSVLYYDDSSNVILRKHRNMVVRS

SEQ ID NO: 5755 - protein, 41 aa, Artificial Sequence
  Non-cyclic GFR-binding peptide
  MOD_RES (4)..(5)..(39)..(41): Xaa is C or S
  MOD_RES (19)..(20)..(21)..(22)..(23): Xaa is A or G
  MOD_RES (24)..(25)..(26)..(27): Xaa is A or G or absent
PKPXXAPTQLSATSVLYYXXXXXXXXXLRKHRNMVVRAXGX

SEQ ID NO: 5756 - protein, 35 aa, Artificial Sequence
  Non-cyclic GFR-binding peptide
  MOD_RES (34)..(34): Xaa is C or S
  MOD_RES (14)..(15)..(16)..(17)..(18): Xaa is A or G
  MOD_RES (19)..(20)..(21)..(22): Xaa is A or G or absent
APTQLSPISVLYKXXXXXXXXXLKYHYNMVVRAXG

SEQ ID NO: 5757 - protein, 40 aa, Artificial Sequence
  Non-cyclic GFR-binding peptide
  MOD_RES (4)..(5)..(37)..(39): Xaa is C or S
PKAXXVPTELNAISMLYFDENEKVVLKKYRDMVVEGXGXR

SEQ ID NO: 5758 - protein, 34 aa, Artificial Sequence
  Non-cyclic GFR-binding peptide
  MOD_RES (32)..(34): Xaa is C or S
APTKLSATSVLYYDDSSNVILRKHRNMVVRSXGX

SEQ ID NO: 5759 - protein, 32 aa, Artificial Sequence
  Non-cyclic GFR-binding peptide
  MOD_RES (1)..(2): Xaa is C or S
XXVSQDLSAISILYLIGKTPKILKNYQMIVKS

SEQ ID NO: 5760 - protein, 33 aa, Artificial Sequence
  Non-cyclic GFR-binding peptide
  MOD_RES (1)..(1): Xaa is C or S
  MOD_RES (15)..(16)..(17)..(18)..(19): Xaa is A or G
  MOD_RES (20)..(21)..(22)..(23): Xaa is A or G or absent
XVPTELNAISMLYFXXXXXXXXXLKKYREMVVE

SEQ ID NO: 5761 - protein, 39 aa, Artificial Sequence
  Non-cyclic GFR-binding peptide
  MOD_RES (6)..(7): Xaa is C or S
  MOD_RES (21)..(22)..(23)..(24)..(25): Xaa is A or G
  MOD_RES (26)..(27)..(28)..(29): Xaa is A or G or absent
AVPKAXXAPTKLSPISVLYKXXXXXXXXXLKYHYNMVVK

SEQ ID NO: 5762 - protein, 42 aa, Artificial Sequence
  Non-cyclic GFR-binding peptide
  MOD_RES (5)..(42): Xaa is C or S
RNVQXRPTQVQLSPISVLYKEIVRKKPIFLKYHYTLEDHLAX

SEQ ID NO: 5763 - protein, 35 aa, Artificial Sequence
  Non-cyclic GFR-binding peptide
  MOD_RES (1)..(1): Xaa is C or S
  MOD_RES (15)..(16)..(17)..(18)..(19): Xaa is A or G
  MOD_RES (20)..(21)..(22)..(23): Xaa is A or G or absent
XVPTKLSATSVLYYXXXXXXXXXLRKHREGMSVAE

SEQ ID NO: 5764 - protein, 38 aa, Artificial Sequence
  Non-cyclic GFR-binding peptide
  MOD_RES (6)..(7)..(38): Xaa is C or S
ASAAPXXVPQALSAISILYLVGRKPKVLKNYQMIVRSX

SEQ ID NO: 5765 - protein, 36 aa, Artificial Sequence
  Non-cyclic GFR-binding peptide
  MOD_RES (1)..(35): Xaa is C or S
  MOD_RES (15)..(16)..(17)..(18)..(19): Xaa is A or G
  MOD_RES (20)..(21)..(22)..(23): Xaa is A or G or absent
XAPTKLSATSVLYYXXXXXXXXXLRKHRNMVVRSXG

SEQ ID NO: 5766 - protein, 33 aa, Artificial Sequence
  Non-cyclic GFR-binding peptide
  MOD_RES (1)..(1): Xaa is C or S
  MOD_RES (15)..(16)..(17)..(18)..(19): Xaa is A or G
  MOD_RES (20)..(21)..(22)..(23): Xaa is A or G or absent
XVPQDLSAISILYLXXXXXXXXXLKNYQMVVKS

SEQ ID NO: 5767 - protein, 35 aa, Artificial Sequence
  Non-cyclic GFR-binding peptide
  MOD_RES (1)..(1): Xaa is C or S
  MOD_RES (15)..(16)..(17)..(18)..(19): Xaa is A or G
  MOD_RES (20)..(21)..(22)..(23): Xaa is A or G or absent
XVPTKLSAISVLYLXXXXXXXXXLKNYQEGMSVAE

SEQ ID NO: 5768 - protein, 32 aa, Artificial Sequence
  Non-cyclic GFR-binding peptide
  MOD_RES (1)..(32): Xaa is C or S
XVPQALSAISILYLVGRKPKVLKNYQMIVRSX

SEQ ID NO: 5769 - protein, 41 aa, Artificial Sequence
  Non-cyclic GFR-binding peptide
  MOD_RES (3)..(40): Xaa is C or S
  MOD_RES (19)..(20)..(21)..(22)..(23): Xaa is A or G
  MOD_RES (24)..(25)..(26)..(27): Xaa is A or G or absent
VQXRPTQVQLSPISVLYKXXXXXXXXXLKYHYTLEDHLAXK

SEQ ID NO: 5770 - protein, 39 aa, Artificial Sequence
  Non-cyclic GFR-binding peptide
  MOD_RES (6)..(7): Xaa is C or S
  MOD_RES (21)..(22)..(23)..(24)..(25): Xaa is A or G
  MOD_RES (26)..(27)..(28)..(29): Xaa is A or G or absent
TVPKPXXAPTQLSPISVLYKXXXXXXXXXLKYHYNMVVR

SEQ ID NO: 5771 - protein, 40 aa, Artificial Sequence
  Non-cyclic GFR-binding peptide
  MOD_RES (2)..(3)..(38)..(40): Xaa is C or S
  MOD_RES (17)..(18)..(19)..(20)..(21): Xaa is A or G
  MOD_RES (22)..(23)..(24)..(25): Xaa is A or G or absent
AXXVPTKLSATSVLYYXXXXXXXXXLRKHREGMSVAEXGX

SEQ ID NO: 5772 - protein, 35 aa, Artificial Sequence
  Non-cyclic GFR-binding peptide
  MOD_RES (1)..(2): Xaa is C or S
  MOD_RES (16)..(17)..(18)..(19)..(20): Xaa is A or G
  MOD_RES (21)..(22)..(23)..(24): Xaa is A or G or absent
XXAPTKLSAISVLYLXXXXXXXXXLKNYQNMVVKA

SEQ ID NO: 5773 - protein, 37 aa, Artificial Sequence
  Non-cyclic GFR-binding peptide
  MOD_RES (5)..(6): Xaa is C or S
VPKPXXAPTKLSPISVLYKDDSSNVILKYHYNMVVRS

SEQ ID NO: 5774 - protein, 43 aa, Artificial Sequence
  Non-cyclic GFR-binding peptide
  MOD_RES (4)..(5)..(40)..(42): Xaa is C or S
  MOD_RES (19)..(20)..(21)..(22)..(23): Xaa is A or G
  MOD_RES (24)..(25)..(26)..(27): Xaa is A or G or absent
GKAXXVPTKLNAISVLYFXXXXXXXXXLKKYREGMSVAEXGXR

SEQ ID NO: 5775 - protein, 31 aa, Artificial Sequence
  Non-cyclic GFR-binding peptide
  MOD_RES (31)..(31): Xaa is C or S
VPQDLSAISILYLVGRTPKVLKNYQMVVKSX

SEQ ID NO: 5776 - protein, 40 aa, Artificial Sequence
  Non-cyclic GFR-binding peptide
  MOD_RES (6)..(7)..(38)..(40): Xaa is C or S
ASAAPXXVPQALSPISILYKVGRKPKVLKYHYMIVRSXKX

SEQ ID NO: 5777 - protein, 38 aa, Artificial Sequence
  Non-cyclic GFR-binding peptide
  MOD_RES (35)..(37): Xaa is C or S
  MOD_RES (14)..(15)..(16)..(17)..(18): Xaa is A or G
  MOD_RES (19)..(20)..(21)..(22): Xaa is A or G or absent
VPTKLNAISVLYFXXXXXXXXXLKKYREGMSVAEXGXR

SEQ ID NO: 5778 - protein, 35 aa, Artificial Sequence
  Non-cyclic GFR-binding peptide
  MOD_RES (4)..(5): Xaa is C or S
PKAXXVPTELSPISMLYKDEYDKVVLKYHYEMVVE

SEQ ID NO: 5779 - protein, 36 aa, Artificial Sequence
  Non-cyclic GFR-binding peptide
  MOD_RES (3)..(4): Xaa is C or S
  MOD_RES (18)..(19)..(20)..(21)..(22): Xaa is A or G
  MOD_RES (23)..(24)..(25)..(26): Xaa is A or G or absent
KAXXVPTELSPISMLYKXXXXXXXXXLKYHYEMVVE

SEQ ID NO: 5780 - protein, 37 aa, Artificial Sequence
  Non-cyclic GFR-binding peptide
  MOD_RES (2)..(3)..(35)..(37): Xaa is C or S
PXXAPTQLSPISVLYKDDSSNVILKYHYNMVVRAXGX

SEQ ID NO: 5781 - protein, 35 aa, Artificial Sequence
  Non-cyclic GFR-binding peptide
  MOD_RES (35)..(35): Xaa is C or S
  MOD_RES (14)..(15)..(16)..(17)..(18): Xaa is A or G
  MOD_RES (19)..(20)..(21)..(22): Xaa is A or G or absent
VPTKLNAISVLYFXXXXXXXXXLKKYREGMSVAEX

SEQ ID NO: 5782 - protein, 40 aa, Artificial Sequence
  Non-cyclic GFR-binding peptide
  MOD_RES (3)..(4)..(37)..(39): Xaa is C or S
  MOD_RES (18)..(19)..(20)..(21)..(22): Xaa is A or G
  MOD_RES (23)..(24)..(25)..(26): Xaa is A or G or absent
APXXVPQALSAISILYLXXXXXXXXXLKNYQMIVRSXKXS

SEQ ID NO: 5783 - protein, 38 aa, Artificial Sequence
  Non-cyclic GFR-binding peptide
  MOD_RES (6)..(7): Xaa is C or S
YVPKPXXAPTKLSAISVLYLDDSSNVILKNYQNMVVRS

SEQ ID NO: 5784 - protein, 39 aa, Artificial Sequence
  Non-cyclic GFR-binding peptide
  MOD_RES (4)..(5)..(36)..(38): Xaa is C or S
ASPXXVPQDLNAISILYFVGRTPKVLKKYRMVVKSXKXS

SEQ ID NO: 5785 - protein, 39 aa, Artificial Sequence
  Non-cyclic GFR-binding peptide
  MOD_RES (5)..(6): Xaa is C or S
  MOD_RES (20)..(21)..(22)..(23)..(24): Xaa is A or G
  MOD_RES (25)..(26)..(27)..(28): Xaa is A or G or absent
IPKAXXVPTELNAISMLYFXXXXXXXXXLKKYREMVVEG

SEQ ID NO: 5786 - protein, 35 aa, Artificial Sequence
  Non-cyclic GFR-binding peptide
  MOD_RES (33)..(35): Xaa is C or S
  MOD_RES (14)..(15)..(16)..(17)..(18): Xaa is A or G
  MOD_RES (19)..(20)..(21)..(22): Xaa is A or G or absent
VSQDLSAISILYLXXXXXXXXXLKNYQMIVKSXKX

SEQ ID NO: 5787 - protein, 40 aa, Artificial Sequence
  Non-cyclic GFR-binding peptide
  MOD_RES (5)..(6)..(37)..(39): Xaa is C or S
SASPXXVPQDLSPISILYKVGRTPKVLKYHYMVVKSXKXS

SEQ ID NO: 5788 - protein, 43 aa, Artificial Sequence
  Non-cyclic GFR-binding peptide
  MOD_RES (5)..(6)..(40)..(42): Xaa is C or S
  MOD_RES (20)..(21)..(22)..(23)..(24): Xaa is A or G
  MOD_RES (25)..(26)..(27)..(28): Xaa is A or G or absent
IPKAXXVPTELSATSMLYYXXXXXXXXXLRKHREMVVEGXGXR

SEQ ID NO: 5789 - protein, 40 aa, Artificial Sequence
  Non-cyclic GFR-binding peptide
  MOD_RES (7)..(39): Xaa is C or S
HVTKPTXAPTKLSAISVLYLDDSSNVILKNYQNMVVRSXG

SEQ ID NO: 5790 - protein, 33 aa, Artificial Sequence
  Non-cyclic GFR-binding peptide
TQVQLSAISVLYLEIVRKKPIFLKNYQTLEDHL

SEQ ID NO: 5791 - protein, 34 aa, Artificial Sequence
  Non-cyclic GFR-binding peptide
  MOD_RES (2)..(3)..(34): Xaa is C or S
PXXVPQALSATSILYYVGRKPKVLRKHRMIVRSX

SEQ ID NO: 5792 - protein, 38 aa, Artificial Sequence
  Non-cyclic GFR-binding peptide
  MOD_RES (4)..(5): Xaa is C or S
  MOD_RES (19)..(20)..(21)..(22)..(23): Xaa is A or G
  MOD_RES (24)..(25)..(26)..(27): Xaa is A or G or absent
PKAXXVPTELSPISMLYKXXXXXXXXXLKYHYEMVVEG

SEQ ID NO: 5793 - protein, 38 aa, Artificial Sequence
  Non-cyclic GFR-binding peptide
  MOD_RES (4)..(5)..(37): Xaa is C or S
PKAXXVPTELSPISMLYKDENEKVVLKYHYDMVVEGXG

SEQ ID NO: 5794 - protein, 34 aa, Artificial Sequence
  Non-cyclic GFR-binding peptide
  MOD_RES (32)..(34): Xaa is C or S
APTKLSAISVLYLDDSSNVILKNYQNMVVRSXGX

SEQ ID NO: 5795 - protein, 33 aa, Artificial Sequence
  Non-cyclic GFR-binding peptide
PTQVQLSPISVLYKEIVRKKPIFLKYHYTLEDH

SEQ ID NO: 5796 - protein, 38 aa, Artificial Sequence
  Non-cyclic GFR-binding peptide
  MOD_RES (3)..(4)..(35)..(37): Xaa is C or S
SPXXVPQDLSAISILYLVGRTPKVLKNYQMVVKSXKXS

SEQ ID NO: 5797 - protein, 37 aa, Artificial Sequence
  Non-cyclic GFR-binding peptide
  MOD_RES (4)..(5): Xaa is C or S
  MOD_RES (19)..(20)..(21)..(22)..(23): Xaa is A or G
  MOD_RES (24)..(25)..(26)..(27): Xaa is A or G or absent
PKAXXVPTELSATSMLYYXXXXXXXXXLRKHRDMVVE

SEQ ID NO: 5798 - protein, 34 aa, Artificial Sequence
  Non-cyclic GFR-binding peptide
  MOD_RES (31)..(33): Xaa is C or S
VSQDLSPISILYKIGKTPKILKYHYMIVKSXKXS

SEQ ID NO: 5799 - protein, 34 aa, Artificial Sequence
  Non-cyclic GFR-binding peptide
  MOD_RES (1)..(1): Xaa is C or S
  MOD_RES (15)..(16)..(17)..(18)..(19): Xaa is A or G
  MOD_RES (20)..(21)..(22)..(23): Xaa is A or G or absent
XAPTQLSATSVLYYXXXXXXXXXLRKHRNMVVRA

SEQ ID NO: 5800 - protein, 38 aa, Artificial Sequence
  Non-cyclic GFR-binding peptide
  MOD_RES (1)..(35)..(37): Xaa is C or S
  MOD_RES (15)..(16)..(17)..(18)..(19): Xaa is A or G
  MOD_RES (20)..(21)..(22)..(23): Xaa is A or G or absent
XAPTQLSPISVLYKXXXXXXXXXLKYHYNMVVRAXGXH

SEQ ID NO: 5801 - protein, 38 aa, Artificial Sequence
  Non-cyclic GFR-binding peptide
  MOD_RES (3)..(4)..(37): Xaa is C or S
  MOD_RES (18)..(19)..(20)..(21)..(22): Xaa is A or G
  MOD_RES (23)..(24)..(25)..(26): Xaa is A or G or absent
SPXXVSQDLSPISILYKXXXXXXXXXLKYHYMIVKSXK

SEQ ID NO: 5802 - protein, 32 aa, Artificial Sequence
  Non-cyclic GFR-binding peptide
  MOD_RES (2)..(2): Xaa is C or S
TXAPTKLSPISVLYKDDSSNVILKYHYNMVVR

SEQ ID NO: 5803 - protein, 43 aa, Artificial Sequence
  Non-cyclic GFR-binding peptide
  MOD_RES (5)..(42): Xaa is C or S
  MOD_RES (21)..(22)..(23)..(24)..(25): Xaa is A or G
  MOD_RES (26)..(27)..(28)..(29): Xaa is A or G or absent
RNVQXRPTQVQLSPISVLYKXXXXXXXXXLKYHYTLEDHLAXK

SEQ ID NO: 5804 - protein, 35 aa, Artificial Sequence
  Non-cyclic GFR-binding peptide
  MOD_RES (3)..(3): Xaa is C or S
  MOD_RES (17)..(18)..(19)..(20)..(21): Xaa is A or G
  MOD_RES (22)..(23)..(24)..(25): Xaa is A or G or absent
PTXAPTKLSPISVLYKXXXXXXXXXLKYHYNMVVR

SEQ ID NO: 5805 - protein, 39 aa, Artificial Sequence
  Non-cyclic GFR-binding peptide
  MOD_RES (37)..(39): Xaa is C or S
  MOD_RES (16)..(17)..(18)..(19)..(20): Xaa is A or G
  MOD_RES (21)..(22)..(23)..(24): Xaa is A or G or absent
RPTQVQLNAISVLYFXXXXXXXXXLKKYRTLEDHLAXKX

SEQ ID NO: 5806 - protein, 36 aa, Artificial Sequence
  Non-cyclic GFR-binding peptide
  MOD_RES (1)..(35): Xaa is C or S
  MOD_RES (15)..(16)..(17)..(18)..(19): Xaa is A or G
  MOD_RES (20)..(21)..(22)..(23): Xaa is A or G or absent
XAPTKLSAISVLYLXXXXXXXXXLKNYQNMVVKAXG

SEQ ID NO: 5807 - protein, 38 aa, Artificial Sequence
  Non-cyclic GFR-binding peptide
  MOD_RES (3)..(4)..(37): Xaa is C or S
KAXXVPTKLSAISVLYLDDMGVPTLKNYQEGMSVAEXG

SEQ ID NO: 5808 - protein, 39 aa, Artificial Sequence
  Non-cyclic GFR-binding peptide
  MOD_RES (6)..(7)..(39): Xaa is C or S
TVPKPXXAPTQLSPISVLYKDDSSNVILKYHYNMVVRAX

SEQ ID NO: 5809 - protein, 38 aa, Artificial Sequence
  Non-cyclic GFR-binding peptide
  MOD_RES (3)..(4)..(36)..(38): Xaa is C or S
KAXXVPTELSPISMLYKDEYDKVVLKYHYEMVVEGXGX

SEQ ID NO: 5810 - protein, 39 aa, Artificial Sequence
  Non-cyclic GFR-binding peptide
  MOD_RES (4)..(5): Xaa is C or S
  MOD_RES (19)..(20)..(21)..(22)..(23): Xaa is A or G
  MOD_RES (24)..(25)..(26)..(27): Xaa is A or G or absent
GKAXXVPTKLNAISVLYFXXXXXXXXXLKKYREGMSVAE

SEQ ID NO: 5811 - protein, 33 aa, Artificial Sequence
  Non-cyclic GFR-binding peptide
  MOD_RES (2)..(2): Xaa is C or S
TXAPTKLSAISVLYLDDSSNVILKNYQNMVVRS

SEQ ID NO: 5812 - protein, 42 aa, Artificial Sequence
  Non-cyclic GFR-binding peptide
  MOD_RES (6)..(40)..(42): Xaa is C or S
  MOD_RES (20)..(21)..(22)..(23)..(24): Xaa is A or G
  MOD_RES (25)..(26)..(27)..(28): Xaa is A or G or absent
VTKPTXAPTKLSPISVLYKXXXXXXXXXLKYHYNMVVRSXGX

SEQ ID NO: 5813 - protein, 38 aa, Artificial Sequence
  Non-cyclic GFR-binding peptide
  MOD_RES (4)..(5): Xaa is C or S
  MOD_RES (19)..(20)..(21)..(22)..(23): Xaa is A or G
  MOD_RES (24)..(25)..(26)..(27): Xaa is A or G or absent
PKAXXVPTELSATSMLYYXXXXXXXXXLRKHREMVVEG

SEQ ID NO: 5814 - protein, 32 aa, Artificial Sequence
  Non-cyclic GFR-binding peptide
  MOD_RES (31)..(31): Xaa is C or S
VPQALSATSILYYVGRKPKVLRKHRMIVRSXK

SEQ ID NO: 5815 - protein, 34 aa, Artificial Sequence
  Non-cyclic GFR-binding peptide
  MOD_RES (1)..(1): Xaa is C or S
  MOD_RES (15)..(16)..(17)..(18)..(19): Xaa is A or G
  MOD_RES (20)..(21)..(22)..(23): Xaa is A or G or absent
XAPTQLSPISVLYKXXXXXXXXXLKYHYNMVVRA

SEQ ID NO: 5816 - protein, 34 aa, Artificial Sequence
  Non-cyclic GFR-binding peptide
  MOD_RES (1)..(1): Xaa is C or S
  MOD_RES (15)..(16)..(17)..(18)..(19): Xaa is A or G
  MOD_RES (20)..(21)..(22)..(23): Xaa is A or G or absent
XAPTKLSAISVLYLXXXXXXXXXLKNYQNMVVKA

SEQ ID NO: 5817 - protein, 36 aa, Artificial Sequence
  Non-cyclic GFR-binding peptide
  MOD_RES (1)..(35): Xaa is C or S
  MOD_RES (15)..(16)..(17)..(18)..(19): Xaa is A or G
  MOD_RES (20)..(21)..(22)..(23): Xaa is A or G or absent
XVPTELSATSMLYYXXXXXXXXXLRKHRDMVVEGXG

SEQ ID NO: 5818 - protein, 44 aa, Artificial Sequence
  Non-cyclic GFR-binding peptide
  MOD_RES (5)..(42)..(44): Xaa is C or S
  MOD_RES (21)..(22)..(23)..(24)..(25): Xaa is A or G
  MOD_RES (26)..(27)..(28)..(29): Xaa is A or G or absent
RNVQXRPTQVQLSPISVLYKXXXXXXXXXLKYHYTLEDHLAXKX

SEQ ID NO: 5819 - protein, 39 aa, Artificial Sequence
  Non-cyclic GFR-binding peptide
  MOD_RES (5)..(6)..(37)..(39): Xaa is C or S
SASPXXVSQDLSAISILYLIGKTPKILKNYQMIVKSXKX

SEQ ID NO: 5820 - protein, 37 aa, Artificial Sequence
  Non-cyclic GFR-binding peptide
  MOD_RES (2)..(36): Xaa is C or S
  MOD_RES (16)..(17)..(18)..(19)..(20): Xaa is A or G
  MOD_RES (21)..(22)..(23)..(24): Xaa is A or G or absent
TXAPTKLSAISVLYLXXXXXXXXXLKNYQNMVVRSXG

SEQ ID NO: 5821 - protein, 33 aa, Artificial Sequence
  Non-cyclic GFR-binding peptide
PTQVQLNAISVLYFEIVRKKPIFLKKYRTLEDH

SEQ ID NO: 5822 - protein, 35 aa, Artificial Sequence
  Non-cyclic GFR-binding peptide
  MOD_RES (2)..(34): Xaa is C or S
TXAPTKLSATSVLYYDDSSNVILRKHRNMVVRSXG

SEQ ID NO: 5823 - protein, 36 aa, Artificial Sequence
  Non-cyclic GFR-binding peptide
  MOD_RES (3)..(4)..(36): Xaa is C or S
KPXXAPTQLSPISVLYKDDSSNVILKYHYNMVVRAX

SEQ ID NO: 5824 - protein, 39 aa, Artificial Sequence
  Non-cyclic GFR-binding peptide
  MOD_RES (2)..(39): Xaa is C or S
  MOD_RES (18)..(19)..(20)..(21)..(22): Xaa is A or G
  MOD_RES (23)..(24)..(25)..(26): Xaa is A or G or absent
QXRPTQVQLNAISVLYFXXXXXXXXXLKKYRTLEDHLAX

SEQ ID NO: 5825 - protein, 39 aa, Artificial Sequence
  Non-cyclic GFR-binding peptide
  MOD_RES (2)..(36)..(38): Xaa is C or S
  MOD_RES (16)..(17)..(18)..(19)..(20): Xaa is A or G
  MOD_RES (21)..(22)..(23)..(24): Xaa is A or G or absent
TXAPTKLSAISVLYLXXXXXXXXXLKNYQNMVVRSXGXH

SEQ ID NO: 5826 - protein, 36 aa, Artificial Sequence
  Non-cyclic GFR-binding peptide
  MOD_RES (2)..(3): Xaa is C or S
  MOD_RES (17)..(18)..(19)..(20)..(21): Xaa is A or G
  MOD_RES (22)..(23)..(24)..(25): Xaa is A or G or absent
PXXAPTKLSPISVLYKXXXXXXXXXLKYHYNMVVRS

SEQ ID NO: 5827 - protein, 34 aa, Artificial Sequence
  Non-cyclic GFR-binding peptide
  MOD_RES (2)..(3): Xaa is C or S
AXXVPTELSATSMLYYDEYDKVVLRKHREMVVEG

SEQ ID NO: 5828 - protein, 38 aa, Artificial Sequence
  Non-cyclic GFR-binding peptide
  MOD_RES (37)..(37): Xaa is C or S
  MOD_RES (16)..(17)..(18)..(19)..(20): Xaa is A or G
  MOD_RES (21)..(22)..(23)..(24): Xaa is A or G or absent
RPTQVQLSAISVLYLXXXXXXXXXLKNYQTLEDHLAXK

SEQ ID NO: 5829 - protein, 38 aa, Artificial Sequence
  Non-cyclic GFR-binding peptide
  MOD_RES (4)..(5)..(38): Xaa is C or S
  MOD_RES (19)..(20)..(21)..(22)..(23): Xaa is A or G
  MOD_RES (24)..(25)..(26)..(27): Xaa is A or G or absent
ASPXXVSQDLSAISILYLXXXXXXXXXLKNYQMIVKSX

SEQ ID NO: 5830 - protein, 39 aa, Artificial Sequence
  Non-cyclic GFR-binding peptide
  MOD_RES (5)..(5): Xaa is C or S
RNVQXRPTQVQLSPISVLYKEIVRKKPIFLKYHYTLEDH

SEQ ID NO: 5831 - protein, 33 aa, Artificial Sequence
  Non-cyclic GFR-binding peptide
  MOD_RES (32)..(32): Xaa is C or S
APTKLNAISVLYFDSSNNVILKKYRNMVVKAXG

SEQ ID NO: 5832 - protein, 36 aa, Artificial Sequence
  Non-cyclic GFR-binding peptide
  MOD_RES (1)..(2)..(34)..(36): Xaa is C or S
XXAPTKLNAISVLYFDSSNNVILKKYRNMVVKAXGX

SEQ ID NO: 5833 - protein, 37 aa, Artificial Sequence
  Non-cyclic GFR-binding peptide
  MOD_RES (4)..(5)..(36): Xaa is C or S
ASPXXVSQDLNAISILYFIGKTPKILKKYRMIVKSXK

SEQ ID NO: 5834 - protein, 43 aa, Artificial Sequence
  Non-cyclic GFR-binding peptide
  MOD_RES (6)..(7)..(41)..(43): Xaa is C or S
  MOD_RES (21)..(22)..(23)..(24)..(25): Xaa is A or G
  MOD_RES (26)..(27)..(28)..(29): Xaa is A or G or absent
AVPKAXXAPTKLSAISVLYLXXXXXXXXXLKNYQNMVVKAXGX

SEQ ID NO: 5835 - protein, 41 aa, Artificial Sequence
  Non-cyclic GFR-binding peptide
  MOD_RES (4)..(5)..(39)..(41): Xaa is C or S
  MOD_RES (19)..(20)..(21)..(22)..(23): Xaa is A or G
  MOD_RES (24)..(25)..(26)..(27): Xaa is A or G or absent
PKAXXAPTKLNAISVLYFXXXXXXXXXLKKYRNMVVKAXGX

SEQ ID NO: 5836 - protein, 41 aa, Artificial Sequence
  Non-cyclic GFR-binding peptide
  MOD_RES (5)..(6)..(38)..(40): Xaa is C or S
IPKAXXVPTELNAISMLYFDENEKVVLKKYRDMVVEGXGXR

SEQ ID NO: 5837 - protein, 41 aa, Artificial Sequence
  Non-cyclic GFR-binding peptide
  MOD_RES (3)..(4)..(38)..(40): Xaa is C or S
  MOD_RES (18)..(19)..(20)..(21)..(22): Xaa is A or G
  MOD_RES (23)..(24)..(25)..(26): Xaa is A or G or absent
KAXXAPTKLSAISVLYLXXXXXXXXXLKNYQNMVVKAXGXH

SEQ ID NO: 5838 - protein, 35 aa, Artificial Sequence
  Non-cyclic GFR-binding peptide
  MOD_RES (1)..(2)..(34): Xaa is C or S
XXVPTELSATSMLYYDENEKVVLRKHRDMVVEGXG

SEQ ID NO: 5839 - protein, 35 aa, Artificial Sequence
  Non-cyclic GFR-binding peptide
  MOD_RES (3)..(4): Xaa is C or S
KPXXAPTQLSATSVLYYDDSSNVILRKHRNMVVRA

SEQ ID NO: 5840 - protein, 38 aa, Artificial Sequence
  Non-cyclic GFR-binding peptide
  MOD_RES (3)..(4)..(37): Xaa is C or S
  MOD_RES (18)..(19)..(20)..(21)..(22): Xaa is A or G
  MOD_RES (23)..(24)..(25)..(26): Xaa is A or G or absent
SPXXVPQDLSAISILYLXXXXXXXXXLKNYQMVVKSXK

SEQ ID NO: 5841 - protein, 34 aa, Artificial Sequence
  Non-cyclic GFR-binding peptide
  MOD_RES (2)..(34): Xaa is C or S
TXAPTKLSAISVLYLDDSSNVILKNYQNMVVRSX

SEQ ID NO: 5842 - protein, 41 aa, Artificial Sequence
  Non-cyclic GFR-binding peptide
  MOD_RES (3)..(4)..(38)..(40): Xaa is C or S
  MOD_RES (18)..(19)..(20)..(21)..(22): Xaa is A or G
  MOD_RES (23)..(24)..(25)..(26): Xaa is A or G or absent
KAXXVPTELNAISMLYFXXXXXXXXXLKKYREMVVEGXGXR

SEQ ID NO: 5843 - protein, 35 aa, Artificial Sequence
  Non-cyclic GFR-binding peptide
  MOD_RES (1)..(2)..(34): Xaa is C or S
XXAPTKLSPISVLYKDDSSNVILKYHYNMVVRSXG

SEQ ID NO: 5844 - protein, 36 aa, Artificial Sequence
  Non-cyclic GFR-binding peptide
  MOD_RES (4)..(5): Xaa is C or S
PKAXXVPTELNAISMLYFDEYDKVVLKKYREMVVEG

SEQ ID NO: 5845 - protein, 33 aa, Artificial Sequence
  Non-cyclic GFR-binding peptide
  MOD_RES (2)..(3): Xaa is C or S
PXXAPTQLSPISVLYKDDSSNVILKYHYNMVVR

SEQ ID NO: 5846 - protein, 35 aa, Artificial Sequence
  Non-cyclic GFR-binding peptide
  MOD_RES (33)..(35): Xaa is C or S
  MOD_RES (14)..(15)..(16)..(17)..(18): Xaa is A or G
  MOD_RES (19)..(20)..(21)..(22): Xaa is A or G or absent
VPQALSPISILYKXXXXXXXXXLKYHYMIVRSXKX

SEQ ID NO: 5847 - protein, 37 aa, Artificial Sequence
  Non-cyclic GFR-binding peptide
  MOD_RES (34)..(36): Xaa is C or S
  MOD_RES (14)..(15)..(16)..(17)..(18): Xaa is A or G
  MOD_RES (19)..(20)..(21)..(22): Xaa is A or G or absent
APTKLSAISVLYLXXXXXXXXXLKNYQNMVVRSXGXH

SEQ ID NO: 5848 - protein, 34 aa, Artificial Sequence
  Non-cyclic GFR-binding peptide
  MOD_RES (31)..(33): Xaa is C or S
VPQALNAISILYFVGRKPKVLKKYRMIVRSXKXS

SEQ ID NO: 5849 - protein, 38 aa, Artificial Sequence
  Non-cyclic GFR-binding peptide
  MOD_RES (5)..(6): Xaa is C or S
VGKAXXVPTKLSAISVLYLDDMGVPTLKNYQEGMSVAE

SEQ ID NO: 5850 - protein, 36 aa, Artificial Sequence
  Non-cyclic GFR-binding peptide
  MOD_RES (1)..(34)..(36): Xaa is C or S
  MOD_RES (15)..(16)..(17)..(18)..(19): Xaa is A or G
  MOD_RES (20)..(21)..(22)..(23): Xaa is A or G or absent
XVSQDLSATSILYYXXXXXXXXXLRKHRMIVKSXKX

SEQ ID NO: 5851 - protein, 38 aa, Artificial Sequence
  Non-cyclic GFR-binding peptide
  MOD_RES (3)..(4)..(36)..(38): Xaa is C or S
KAXXAPTKLSPISVLYKDSSNNVILKYHYNMVVKAXGX

SEQ ID NO: 5852 - protein, 36 aa, Artificial Sequence
  Non-cyclic GFR-binding peptide
  MOD_RES (1)..(33)..(35): Xaa is C or S
XVPTELSATSMLYYDEYDKVVLRKHREMVVEGXGXR

SEQ ID NO: 5853 - protein, 40 aa, Artificial Sequence
  Non-cyclic GFR-binding peptide
  MOD_RES (5)..(6)..(38)..(40): Xaa is C or S
IPKAXXVPTELSPISMLYKDENEKVVLKYHYDMVVEGXGX

SEQ ID NO: 5854 - protein, 36 aa, Artificial Sequence
  Non-cyclic GFR-binding peptide
  MOD_RES (1)..(34)..(36): Xaa is C or S
  MOD_RES (15)..(16)..(17)..(18)..(19): Xaa is A or G
  MOD_RES (20)..(21)..(22)..(23): Xaa is A or G or absent
XVPQALSPISILYKXXXXXXXXXLKYHYMIVRSXKX

SEQ ID NO: 5855 - protein, 34 aa, Artificial Sequence
  Non-cyclic GFR-binding peptide
  MOD_RES (2)..(3): Xaa is C or S
PXXAPTQLSPISVLYKDDSSNVILKYHYNMVVRA

SEQ ID NO: 5856 - protein, 39 aa, Artificial Sequence
  Non-cyclic GFR-binding peptide
  MOD_RES (4)..(5)..(38): Xaa is C or S
GKAXXVPTKLSATSVLYYDDMGVPTLRKHREGMSVAEXG

SEQ ID NO: 5857 - protein, 35 aa, Artificial Sequence
  Non-cyclic GFR-binding peptide
  MOD_RES (2)..(3)..(35): Xaa is C or S
AXXVPTELNAISMLYFDEYDKVVLKKYREMVVEGX

SEQ ID NO: 5858 - protein, 34 aa, Artificial Sequence
  Non-cyclic GFR-binding peptide
  MOD_RES (33)..(33): Xaa is C or S
  MOD_RES (14)..(15)..(16)..(17)..(18): Xaa is A or G
  MOD_RES (19)..(20)..(21)..(22): Xaa is A or G or absent
VPQDLSATSILYYXXXXXXXXXLRKHRMVVKSXK

SEQ ID NO: 5859 - protein, 39 aa, Artificial Sequence
  Non-cyclic GFR-binding peptide
  MOD_RES (6)..(7): Xaa is C or S
  MOD_RES (21)..(22)..(23)..(24)..(25): Xaa is A or G
  MOD_RES (26)..(27)..(28)..(29): Xaa is A or G or absent
TVPKPXXAPTQLSATSVLYYXXXXXXXXXLRKHRNMVVR

SEQ ID NO: 5860 - protein, 39 aa, Artificial Sequence
  Non-cyclic GFR-binding peptide
  MOD_RES (5)..(6)..(37)..(39): Xaa is C or S
SASPXXVPQDLSAISILYLVGRTPKVLKNYQMVVKSXKX

SEQ ID NO: 5861 - protein, 35 aa, Artificial Sequence
  Non-cyclic GFR-binding peptide
  MOD_RES (33)..(35): Xaa is C or S
  MOD_RES (14)..(15)..(16)..(17)..(18): Xaa is A or G
  MOD_RES (19)..(20)..(21)..(22): Xaa is A or G or absent
VSQDLSATSILYYXXXXXXXXXLRKHRMIVKSXKX

SEQ ID NO: 5862 - protein, 39 aa, Artificial Sequence
  Non-cyclic GFR-binding peptide
  MOD_RES (4)..(5)..(39): Xaa is C or S
  MOD_RES (19)..(20)..(21)..(22)..(23): Xaa is A or G
  MOD_RES (24)..(25)..(26)..(27): Xaa is A or G or absent
PKAXXAPTKLSPISVLYKXXXXXXXXXLKYHYNMVVKAX

SEQ ID NO: 5863 - protein, 36 aa, Artificial Sequence
  Non-cyclic GFR-binding peptide
  MOD_RES (33)..(35): Xaa is C or S
  MOD_RES (14)..(15)..(16)..(17)..(18): Xaa is A or G
  MOD_RES (19)..(20)..(21)..(22): Xaa is A or G or absent
VPQALSATSILYYXXXXXXXXXLRKHRMIVRSXKXS

SEQ ID NO: 5864 - protein, 42 aa, Artificial Sequence
  Non-cyclic GFR-binding peptide
  MOD_RES (4)..(5)..(39)..(41): Xaa is C or S
  MOD_RES (19)..(20)..(21)..(22)..(23): Xaa is A or G
  MOD_RES (24)..(25)..(26)..(27): Xaa is A or G or absent
PKPXXAPTKLSPISVLYKXXXXXXXXXLKYHYNMVVRSXGXH

SEQ ID NO: 5865 - protein, 38 aa, Artificial Sequence
  Non-cyclic GFR-binding peptide
  MOD_RES (2)..(3)..(36)..(38): Xaa is C or S
  MOD_RES (17)..(18)..(19)..(20)..(21): Xaa is A or G
  MOD_RES (22)..(23)..(24)..(25): Xaa is A or G or absent
PXXVPQALNAISILYFXXXXXXXXXLKKYRMIVRSXKX

SEQ ID NO: 5866 - protein, 34 aa, Artificial Sequence
  Non-cyclic GFR-binding peptide
PTQVQLNAISVLYFEIVRKKPIFLKKYRTLEDHL

SEQ ID NO: 5867 - protein, 42 aa, Artificial Sequence
  Non-cyclic GFR-binding peptide
  MOD_RES (5)..(6)..(40)..(42): Xaa is C or S
  MOD_RES (20)..(21)..(22)..(23)..(24): Xaa is A or G
  MOD_RES (25)..(26)..(27)..(28): Xaa is A or G or absent
IPKAXXVPTELSPISMLYKXXXXXXXXXLKYHYDMVVEGXGX

SEQ ID NO: 5868 - protein, 36 aa, Artificial Sequence
  Non-cyclic GFR-binding peptide
  MOD_RES (34)..(36): Xaa is C or S
  MOD_RES (14)..(15)..(16)..(17)..(18): Xaa is A or G
  MOD_RES (19)..(20)..(21)..(22): Xaa is A or G or absent
APTKLNAISVLYFXXXXXXXXXLKKYRNMVVKAXGX

SEQ ID NO: 5869 - protein, 37 aa, Artificial Sequence
  Non-cyclic GFR-binding peptide
  MOD_RES (3)..(3): Xaa is C or S
  MOD_RES (19)..(20)..(21)..(22)..(23): Xaa is A or G
  MOD_RES (24)..(25)..(26)..(27): Xaa is A or G or absent
VQXRPTQVQLSAISVLYLXXXXXXXXXLKNYQTLEDH

SEQ ID NO: 5870 - protein, 37 aa, Artificial Sequence
  Non-cyclic GFR-binding peptide
  MOD_RES (35)..(37): Xaa is C or S
  MOD_RES (14)..(15)..(16)..(17)..(18): Xaa is A or G
  MOD_RES (19)..(20)..(21)..(22): Xaa is A or G or absent
TQVQLSAISVLYLXXXXXXXXXLKNYQTLEDHLAXKX

SEQ ID NO: 5871 - protein, 36 aa, Artificial Sequence
  Non-cyclic GFR-binding peptide
  MOD_RES (4)..(5)..(36): Xaa is C or S
ASPXXVSQDLSAISILYLIGKTPKILKNYQMIVKSX

SEQ ID NO: 5872 - protein, 38 aa, Artificial Sequence
  Non-cyclic GFR-binding peptide
  MOD_RES (4)..(5)..(38): Xaa is C or S
  MOD_RES (19)..(20)..(21)..(22)..(23): Xaa is A or G
  MOD_RES (24)..(25)..(26)..(27): Xaa is A or G or absent
ASPXXVSQDLSATSILYYXXXXXXXXXLRKHRMIVKSX

SEQ ID NO: 5873 - protein, 38 aa, Artificial Sequence
  Non-cyclic GFR-binding peptide
  MOD_RES (3)..(4)..(35)..(37): Xaa is C or S
SPXXVSQDLSPISILYKIGKTPKILKYHYMIVKSXKXS

SEQ ID NO: 5874 - protein, 43 aa, Artificial Sequence
  Non-cyclic GFR-binding peptide
  MOD_RES (5)..(42): Xaa is C or S
RNVQXRPTQVQLNAISVLYFEIVRKKPIFLKKYRTLEDHLAXK

SEQ ID NO: 5875 - protein, 37 aa, Artificial Sequence
  Non-cyclic GFR-binding peptide
  MOD_RES (1)..(2)..(35)..(37): Xaa is C or S
  MOD_RES (16)..(17)..(18)..(19)..(20): Xaa is A or G
  MOD_RES (21)..(22)..(23)..(24): Xaa is A or G or absent
XXVSQDLSAISILYLXXXXXXXXXLKNYQMIVKSXKX

SEQ ID NO: 5876 - protein, 33 aa, Artificial Sequence
  Non-cyclic GFR-binding peptide
  MOD_RES (2)..(3): Xaa is C or S
PXXAPTQLSAISVLYLDDSSNVILKNYQNMVVR

SEQ ID NO: 5877 - protein, 42 aa, Artificial Sequence
  Non-cyclic GFR-binding peptide
  MOD_RES (7)..(39)..(41): Xaa is C or S
HVTKPTXAPTKLSAISVLYLDDSSNVILKNYQNMVVRSXGXH

SEQ ID NO: 5878 - protein, 41 aa, Artificial Sequence
  Non-cyclic GFR-binding peptide
  MOD_RES (6)..(40): Xaa is C or S
  MOD_RES (20)..(21)..(22)..(23)..(24): Xaa is A or G
  MOD_RES (25)..(26)..(27)..(28): Xaa is A or G or absent
VTKPTXAPTKLSAISVLYLXXXXXXXXXLKNYQNMVVRSXG

SEQ ID NO: 5879 - protein, 36 aa, Artificial Sequence
  Non-cyclic GFR-binding peptide
  MOD_RES (1)..(1): Xaa is C or S
XRPTQVQLSATSVLYYEIVRKKPIFLRKHRTLEDHL

SEQ ID NO: 5880 - protein, 39 aa, Artificial Sequence
  Non-cyclic GFR-binding peptide
  MOD_RES (2)..(39): Xaa is C or S
QXRPTQVQLNAISVLYFEIVRKKPIFLKKYRTLEDHLAX

SEQ ID NO: 5881 - protein, 34 aa, Artificial Sequence
  Non-cyclic GFR-binding peptide
  MOD_RES (31)..(33): Xaa is C or S
VPQDLSATSILYYVGRTPKVLRKHRMVVKSXKXS

SEQ ID NO: 5882 - protein, 34 aa, Artificial Sequence
  Non-cyclic GFR-binding peptide
  MOD_RES (1)..(2)..(34): Xaa is C or S
XXAPTQLSAISVLYLDDSSNVILKNYQNMVVRAX

SEQ ID NO: 5883 - protein, 36 aa, Artificial Sequence
  Non-cyclic GFR-binding peptide
  MOD_RES (4)..(5): Xaa is C or S
PKPXXAPTKLSATSVLYYDDSSNVILRKHRNMVVRS

SEQ ID NO: 5884 - protein, 36 aa, Artificial Sequence
  Non-cyclic GFR-binding peptide
  MOD_RES (2)..(3)..(36): Xaa is C or S
  MOD_RES (17)..(18)..(19)..(20)..(21): Xaa is A or G
  MOD_RES (22)..(23)..(24)..(25): Xaa is A or G or absent
PXXVPQDLSATSILYYXXXXXXXXXLRKHRMVVKSX

SEQ ID NO: 5885 - protein, 43 aa, Artificial Sequence
  Non-cyclic GFR-binding peptide
  MOD_RES (6)..(7)..(41)..(43): Xaa is C or S
  MOD_RES (21)..(22)..(23)..(24)..(25): Xaa is A or G
  MOD_RES (26)..(27)..(28)..(29): Xaa is A or G or absent
AVPKAXXAPTKLSPISVLYKXXXXXXXXXLKYHYNMVVKAXGX

SEQ ID NO: 5886 - protein, 35 aa, Artificial Sequence
  Non-cyclic GFR-binding peptide
  MOD_RES (1)..(32)..(34): Xaa is C or S
XVPQDLSATSILYYVGRTPKVLRKHRMVVKSXKXS

SEQ ID NO: 5887 - protein, 36 aa, Artificial Sequence
  Non-cyclic GFR-binding peptide
  MOD_RES (3)..(35): Xaa is C or S
PTXAPTKLSPISVLYKDDSSNVILKYHYNMVVRSXG

SEQ ID NO: 5888 - protein, 32 aa, Artificial Sequence
  Non-cyclic GFR-binding peptide
  MOD_RES (14)..(15)..(16)..(17)..(18): Xaa is A or G
  MOD_RES (19)..(20)..(21)..(22): Xaa is A or G or absent
APTKLNAISVLYFXXXXXXXXXLKKYRNMVVK

SEQ ID NO: 5889 - protein, 39 aa, Artificial Sequence
  Non-cyclic GFR-binding peptide
  MOD_RES (1)..(2)..(37)..(39): Xaa is C or S
  MOD_RES (16)..(17)..(18)..(19)..(20): Xaa is A or G
  MOD_RES (21)..(22)..(23)..(24): Xaa is A or G or absent
XXVPTKLSATSVLYYXXXXXXXXXLRKHREGMSVAEXGX

SEQ ID NO: 5890 - protein, 33 aa, Artificial Sequence
  Non-cyclic GFR-binding peptide
  MOD_RES (33)..(33): Xaa is C or S
  MOD_RES (14)..(15)..(16)..(17)..(18): Xaa is A or G
  MOD_RES (19)..(20)..(21)..(22): Xaa is A or G or absent
VSQDLNAISILYFXXXXXXXXXLKKYRMIVKSX

SEQ ID NO: 5891 - protein, 43 aa, Artificial Sequence
  Non-cyclic GFR-binding peptide
  MOD_RES (5)..(6)..(40)..(42): Xaa is C or S
  MOD_RES (20)..(21)..(22)..(23)..(24): Xaa is A or G
  MOD_RES (25)..(26)..(27)..(28): Xaa is A or G or absent
VPKPXXAPTKLSATSVLYYXXXXXXXXXLRKHRNMVVRSXGXH

SEQ ID NO: 5892 - protein, 35 aa, Artificial Sequence
  Non-cyclic GFR-binding peptide
  MOD_RES (2)..(3): Xaa is C or S
  MOD_RES (17)..(18)..(19)..(20)..(21): Xaa is A or G
  MOD_RES (22)..(23)..(24)..(25): Xaa is A or G or absent
PXXVPQALNAISILYFXXXXXXXXXLKKYRMIVRS

SEQ ID NO: 5893 - protein, 38 aa, Artificial Sequence
  Non-cyclic GFR-binding peptide
  MOD_RES (37)..(37): Xaa is C or S
RPTQVQLNAISVLYFEIVRKKPIFLKKYRTLEDHLAXK

SEQ ID NO: 5894 - protein, 38 aa, Artificial Sequence
  Non-cyclic GFR-binding peptide
  MOD_RES (4)..(4): Xaa is C or S
NVQXRPTQVQLSPISVLYKEIVRKKPIFLKYHYTLEDH

SEQ ID NO: 5895 - protein, 37 aa, Artificial Sequence
  Non-cyclic GFR-binding peptide
  MOD_RES (37)..(37): Xaa is C or S
RPTQVQLSPISVLYKEIVRKKPIFLKYHYTLEDHLAX

SEQ ID NO: 5896 - protein, 40 aa, Artificial Sequence
  Non-cyclic GFR-binding peptide
  MOD_RES (5)..(6)..(37)..(39): Xaa is C or S
SASPXXVPQDLSAISILYLVGRTPKVLKNYQMVVKSXKXS

SEQ ID NO: 5897 - protein, 39 aa, Artificial Sequence
  Non-cyclic GFR-binding peptide
  MOD_RES (4)..(5)..(37)..(39): Xaa is C or S
PKAXXVPTELSATSMLYYDEYDKVVLRKHREMVVEGXGX

SEQ ID NO: 5898 - protein, 36 aa, Artificial Sequence
  Non-cyclic GFR-binding peptide
  MOD_RES (2)..(3)..(36): Xaa is C or S
  MOD_RES (17)..(18)..(19)..(20)..(21): Xaa is A or G
  MOD_RES (22)..(23)..(24)..(25): Xaa is A or G or absent
PXXVPQDLSAISILYLXXXXXXXXXLKNYQMVVKSX

SEQ ID NO: 5899 - protein, 41 aa, Artificial Sequence
  Non-cyclic GFR-binding peptide
  MOD_RES (6)..(7)..(39)..(41): Xaa is C or S
TVPKPXXAPTQLSAISVLYLDDSSNVILKNYQNMVVRAXGX

SEQ ID NO: 5900 - protein, 33 aa, Artificial Sequence
  Non-cyclic GFR-binding peptide
  MOD_RES (1)..(33): Xaa is C or S
XAPTQLSAISVLYLDDSSNVILKNYQNMVVRAX

SEQ ID NO: 5901 - protein, 42 aa, Artificial Sequence
  Non-cyclic GFR-binding peptide
  MOD_RES (5)..(6)..(39)..(41): Xaa is C or S
  MOD_RES (20)..(21)..(22)..(23)..(24): Xaa is A or G
  MOD_RES (25)..(26)..(27)..(28): Xaa is A or G or absent
SAAPXXVPQALSATSILYYXXXXXXXXXLRKHRMIVRSXKXS

SEQ ID NO: 5902 - protein, 33 aa, Artificial Sequence
  Non-cyclic GFR-binding peptide
  MOD_RES (2)..(3): Xaa is C or S
PXXVPQDLSATSILYYVGRTPKVLRKHRMVVKS

SEQ ID NO: 5903 - protein, 35 aa, Artificial Sequence
  Non-cyclic GFR-binding peptide
  MOD_RES (1)..(2): Xaa is C or S
  MOD_RES (16)..(17)..(18)..(19)..(20): Xaa is A or G
  MOD_RES (21)..(22)..(23)..(24): Xaa is A or G or absent
XXVPTELSPISMLYKXXXXXXXXXLKYHYDMVVEG

SEQ ID NO: 5904 - protein, 41 aa, Artificial Sequence
  Non-cyclic GFR-binding peptide
  MOD_RES (6)..(7)..(38)..(40): Xaa is C or S
ASASPXXVSQDLSPISILYKIGKTPKILKYHYMIVKSXKXS

SEQ ID NO: 5905 - protein, 31 aa, Artificial Sequence
  Non-cyclic GFR-binding peptide
  MOD_RES (1)..(1): Xaa is C or S
XVPTELNAISMLYFDEYDKVVLKKYREMVVE

SEQ ID NO: 5906 - protein, 37 aa, Artificial Sequence
  Non-cyclic GFR-binding peptide
  MOD_RES (6)..(6): Xaa is C or S
VTKPTXAPTKLSAISVLYLDDSSNVILKNYQNMVVRS

SEQ ID NO: 5907 - protein, 35 aa, Artificial Sequence
  Non-cyclic GFR-binding peptide
  MOD_RES (2)..(2): Xaa is C or S
  MOD_RES (16)..(17)..(18)..(19)..(20): Xaa is A or G
  MOD_RES (21)..(22)..(23)..(24): Xaa is A or G or absent
TXAPTKLSAISVLYLXXXXXXXXXLKNYQNMVVRS

SEQ ID NO: 5908 - protein, 36 aa, Artificial Sequence
  Non-cyclic GFR-binding peptide
  MOD_RES (3)..(4): Xaa is C or S
  MOD_RES (18)..(19)..(20)..(21)..(22): Xaa is A or G
  MOD_RES (23)..(24)..(25)..(26): Xaa is A or G or absent
KAXXVPTELSATSMLYYXXXXXXXXXLRKHREMVVE

SEQ ID NO: 5909 - protein, 35 aa, Artificial Sequence
  Non-cyclic GFR-binding peptide
PTQVQLSAISVLYLEIVRKKPIFLKNYQTLEDHLA

SEQ ID NO: 5910 - protein, 41 aa, Artificial Sequence
  Non-cyclic GFR-binding peptide
  MOD_RES (6)..(7)..(40): Xaa is C or S
  MOD_RES (21)..(22)..(23)..(24)..(25): Xaa is A or G
  MOD_RES (26)..(27)..(28)..(29): Xaa is A or G or absent
ASAAPXXVPQALSAISILYLXXXXXXXXXLKNYQMIVRSXK

SEQ ID NO: 5911 - protein, 37 aa, Artificial Sequence
  Non-cyclic GFR-binding peptide
  MOD_RES (36)..(36): Xaa is C or S
PTQVQLSAISVLYLEIVRKKPIFLKNYQTLEDHLAXK

SEQ ID NO: 5912 - protein, 39 aa, Artificial Sequence
  Non-cyclic GFR-binding peptide
  MOD_RES (2)..(3)..(36)..(38): Xaa is C or S
  MOD_RES (17)..(18)..(19)..(20)..(21): Xaa is A or G
  MOD_RES (22)..(23)..(24)..(25): Xaa is A or G or absent
PXXVPQDLNAISILYFXXXXXXXXXLKKYRMVVKSXKXS

SEQ ID NO: 5913 - protein, 37 aa, Artificial Sequence
  Non-cyclic GFR-binding peptide
  MOD_RES (4)..(5)..(37): Xaa is C or S
PKPXXAPTKLSAISVLYLDDSSNVILKNYQNMVVRSX

SEQ ID NO: 5914 - protein, 38 aa, Artificial Sequence
  Non-cyclic GFR-binding peptide
  MOD_RES (5)..(5): Xaa is C or S
  MOD_RES (19)..(20)..(21)..(22)..(23): Xaa is A or G
  MOD_RES (24)..(25)..(26)..(27): Xaa is A or G or absent
TKPTXAPTKLSAISVLYLXXXXXXXXXLKNYQNMVVRS

SEQ ID NO: 5915 - protein, 39 aa, Artificial Sequence
  Non-cyclic GFR-binding peptide
  MOD_RES (4)..(38): Xaa is C or S
  MOD_RES (18)..(19)..(20)..(21)..(22): Xaa is A or G
  MOD_RES (23)..(24)..(25)..(26): Xaa is A or G or absent
KPTXAPTKLSATSVLYYXXXXXXXXXLRKHRNMVVRSXG

SEQ ID NO: 5916 - protein, 37 aa, Artificial Sequence
  Non-cyclic GFR-binding peptide
  MOD_RES (5)..(6): Xaa is C or S
IPKAXXVPTELSPISMLYKDENEKVVLKYHYDMVVEG

SEQ ID NO: 5917 - protein, 37 aa, Artificial Sequence
  Non-cyclic GFR-binding peptide
  MOD_RES (6)..(7): Xaa is C or S
KIPKAXXVPTELNAISMLYFDENEKVVLKKYRDMVVE

SEQ ID NO: 5918 - protein, 43 aa, Artificial Sequence
  Non-cyclic GFR-binding peptide
  MOD_RES (6)..(7)..(40)..(42): Xaa is C or S
  MOD_RES (21)..(22)..(23)..(24)..(25): Xaa is A or G
  MOD_RES (26)..(27)..(28)..(29): Xaa is A or G or absent
ASASPXXVSQDLSPISILYKXXXXXXXXXLKYHYMIVKSXKXS

SEQ ID NO: 5919 - protein, 35 aa, Artificial Sequence
  Non-cyclic GFR-binding peptide
PTQVQLSATSVLYYEIVRKKPIFLRKHRTLEDHLA

SEQ ID NO: 5920 - protein, 37 aa, Artificial Sequence
  Non-cyclic GFR-binding peptide
  MOD_RES (5)..(37): Xaa is C or S
TKPTXAPTKLSAISVLYLDDSSNVILKNYQNMVVRSX

SEQ ID NO: 5921 - protein, 32 aa, Artificial Sequence
  Non-cyclic GFR-binding peptide
  MOD_RES (32)..(32): Xaa is C or S
APTKLSAISVLYLDDSSNVILKNYQNMVVRSX

SEQ ID NO: 5922 - protein, 42 aa, Artificial Sequence
  Non-cyclic GFR-binding peptide
  MOD_RES (5)..(42): Xaa is C or S
  MOD_RES (21)..(22)..(23)..(24)..(25): Xaa is A or G
  MOD_RES (26)..(27)..(28)..(29): Xaa is A or G or absent
RNVQXRPTQVQLSAISVLYLXXXXXXXXXLKNYQTLEDHLAX

SEQ ID NO: 5923 - protein, 39 aa, Artificial Sequence
  Non-cyclic GFR-binding peptide
  MOD_RES (5)..(6)..(38): Xaa is C or S
VPKPXXAPTQLSPISVLYKDDSSNVILKYHYNMVVRAXG

SEQ ID NO: 5924 - protein, 39 aa, Artificial Sequence
  Non-cyclic GFR-binding peptide
  MOD_RES (1)..(2)..(36)..(38): Xaa is C or S
  MOD_RES (16)..(17)..(18)..(19)..(20): Xaa is A or G
  MOD_RES (21)..(22)..(23)..(24): Xaa is A or G or absent
XXAPTKLSPISVLYKXXXXXXXXXLKYHYNMVVRSXGXH

SEQ ID NO: 5925 - protein, 39 aa, Artificial Sequence
  Non-cyclic GFR-binding peptide
  MOD_RES (4)..(5)..(36)..(38): Xaa is C or S
AAPXXVPQALSAISILYLVGRKPKVLKNYQMIVRSXKXS

SEQ ID NO: 5926 - protein, 39 aa, Artificial Sequence
  Non-cyclic GFR-binding peptide
  MOD_RES (6)..(6): Xaa is C or S
  MOD_RES (20)..(21)..(22)..(23)..(24): Xaa is A or G
  MOD_RES (25)..(26)..(27)..(28): Xaa is A or G or absent
VTKPTXAPTKLSPISVLYKXXXXXXXXXLKYHYNMVVRS

SEQ ID NO: 5927 - protein, 39 aa, Artificial Sequence
  Non-cyclic GFR-binding peptide
  MOD_RES (4)..(5)..(38): Xaa is C or S
  MOD_RES (19)..(20)..(21)..(22)..(23): Xaa is A or G
  MOD_RES (24)..(25)..(26)..(27): Xaa is A or G or absent
ASPXXVSQDLSATSILYYXXXXXXXXXLRKHRMIVKSXK

SEQ ID NO: 5928 - protein, 42 aa, Artificial Sequence
  Non-cyclic GFR-binding peptide
  MOD_RES (5)..(42): Xaa is C or S
  MOD_RES (21)..(22)..(23)..(24)..(25): Xaa is A or G
  MOD_RES (26)..(27)..(28)..(29): Xaa is A or G or absent
RNVQXRPTQVQLSPISVLYKXXXXXXXXXLKYHYTLEDHLAX

SEQ ID NO: 5929 - protein, 37 aa, Artificial Sequence
  Non-cyclic GFR-binding peptide
  MOD_RES (1)..(2)..(35)..(37): Xaa is C or S
  MOD_RES (16)..(17)..(18)..(19)..(20): Xaa is A or G
  MOD_RES (21)..(22)..(23)..(24): Xaa is A or G or absent
XXVSQDLSATSILYYXXXXXXXXXLRKHRMIVKSXKX

SEQ ID NO: 5930 - protein, 36 aa, Artificial Sequence
  Non-cyclic GFR-binding peptide
  MOD_RES (34)..(36): Xaa is C or S
  MOD_RES (14)..(15)..(16)..(17)..(18): Xaa is A or G
  MOD_RES (19)..(20)..(21)..(22): Xaa is A or G or absent
APTKLSAISVLYLXXXXXXXXXLKNYQNMVVRSXGX

SEQ ID NO: 5931 - protein, 35 aa, Artificial Sequence
  Non-cyclic GFR-binding peptide
  MOD_RES (1)..(32)..(34): Xaa is C or S
XVPQALNAISILYFVGRKPKVLKKYRMIVRSXKXS

SEQ ID NO: 5932 - protein, 37 aa, Artificial Sequence
  Non-cyclic GFR-binding peptide
  MOD_RES (4)..(5)..(36): Xaa is C or S
ASPXXVSQDLSAISILYLIGKTPKILKNYQMIVKSXK

SEQ ID NO: 5933 - protein, 35 aa, Artificial Sequence
  Non-cyclic GFR-binding peptide
  MOD_RES (1)..(2)..(33)..(35): Xaa is C or S
XXVPQALSAISILYLVGRKPKVLKNYQMIVRSXKX

SEQ ID NO: 5934 - protein, 38 aa, Artificial Sequence
  Non-cyclic GFR-binding peptide
  MOD_RES (1)..(2)..(36)..(38): Xaa is C or S
  MOD_RES (16)..(17)..(18)..(19)..(20): Xaa is A or G
  MOD_RES (21)..(22)..(23)..(24): Xaa is A or G or absent
XXAPTKLNAISVLYFXXXXXXXXXLKKYRNMVVKAXGX

SEQ ID NO: 5935 - protein, 37 aa, Artificial Sequence
  Non-cyclic GFR-binding peptide
  MOD_RES (4)..(5): Xaa is C or S
  MOD_RES (19)..(20)..(21)..(22)..(23): Xaa is A or G
  MOD_RES (24)..(25)..(26)..(27): Xaa is A or G or absent
PKAXXVPTELNAISMLYFXXXXXXXXXLKKYRDMVVE

SEQ ID NO: 5936 - protein, 36 aa, Artificial Sequence
  Non-cyclic GFR-binding peptide
  MOD_RES (1)..(35): Xaa is C or S
  MOD_RES (15)..(16)..(17)..(18)..(19): Xaa is A or G
  MOD_RES (20)..(21)..(22)..(23): Xaa is A or G or absent
XVPTELNAISMLYFXXXXXXXXXLKKYRDMVVEGXG

SEQ ID NO: 5937 - protein, 38 aa, Artificial Sequence
  Non-cyclic GFR-binding peptide
  MOD_RES (1)..(38): Xaa is C or S
XRPTQVQLNAISVLYFEIVRKKPIFLKKYRTLEDHLAX

SEQ ID NO: 5938 - protein, 38 aa, Artificial Sequence
  Non-cyclic GFR-binding peptide
  MOD_RES (3)..(4)..(38): Xaa is C or S
  MOD_RES (18)..(19)..(20)..(21)..(22): Xaa is A or G
  MOD_RES (23)..(24)..(25)..(26): Xaa is A or G or absent
KPXXAPTQLSATSVLYYXXXXXXXXXLRKHRNMVVRAX

SEQ ID NO: 5939 - protein, 33 aa, Artificial Sequence
  Non-cyclic GFR-binding peptide
  MOD_RES (33)..(33): Xaa is C or S
  MOD_RES (14)..(15)..(16)..(17)..(18): Xaa is A or G
  MOD_RES (19)..(20)..(21)..(22): Xaa is A or G or absent
VPQDLSAISILYLXXXXXXXXXLKNYQMVVKSX

SEQ ID NO: 5940 - protein, 34 aa, Artificial Sequence
  Non-cyclic GFR-binding peptide
  MOD_RES (4)..(4): Xaa is C or S
KPTXAPTKLSAISVLYLDDSSNVILKNYQNMVVR

SEQ ID NO: 5941 - protein, 40 aa, Artificial Sequence
  Non-cyclic GFR-binding peptide
  MOD_RES (2)..(3)..(37)..(39): Xaa is C or S
  MOD_RES (17)..(18)..(19)..(20)..(21): Xaa is A or G
  MOD_RES (22)..(23)..(24)..(25): Xaa is A or G or absent
AXXVPTELSATSMLYYXXXXXXXXXLRKHRDMVVEGXGXR

SEQ ID NO: 5942 - protein, 31 aa, Artificial Sequence
  Non-cyclic GFR-binding peptide
  MOD_RES (1)..(1): Xaa is C or S
XAPTKLSPISVLYKDSSNNVILKYHYNMVVK

SEQ ID NO: 5943 - protein, 38 aa, Artificial Sequence
  Non-cyclic GFR-binding peptide
  MOD_RES (2)..(3)..(37): Xaa is C or S
  MOD_RES (17)..(18)..(19)..(20)..(21): Xaa is A or G
  MOD_RES (22)..(23)..(24)..(25): Xaa is A or G or absent
AXXVPTELSPISMLYKXXXXXXXXXLKYHYDMVVEGXG

SEQ ID NO: 5944 - protein, 38 aa, Artificial Sequence
  Non-cyclic GFR-binding peptide
  MOD_RES (1)..(35)..(37): Xaa is C or S
  MOD_RES (15)..(16)..(17)..(18)..(19): Xaa is A or G
  MOD_RES (20)..(21)..(22)..(23): Xaa is A or G or absent
XAPTKLNAISVLYFXXXXXXXXXLKKYRNMVVKAXGXH

SEQ ID NO: 5945 - protein, 37 aa, Artificial Sequence
  Non-cyclic GFR-binding peptide
  MOD_RES (6)..(7): Xaa is C or S
TVPKPXXAPTQLSATSVLYYDDSSNVILRKHRNMVVR

SEQ ID NO: 5946 - protein, 36 aa, Artificial Sequence
  Non-cyclic GFR-binding peptide
  MOD_RES (1)..(34)..(36): Xaa is C or S
  MOD_RES (15)..(16)..(17)..(18)..(19): Xaa is A or G
  MOD_RES (20)..(21)..(22)..(23): Xaa is A or G or absent
XVSQDLSAISILYLXXXXXXXXXLKNYQMIVKSXKX

SEQ ID NO: 5947 - protein, 38 aa, Artificial Sequence
  Non-cyclic GFR-binding peptide
  MOD_RES (4)..(5): Xaa is C or S
  MOD_RES (19)..(20)..(21)..(22)..(23): Xaa is A or G
  MOD_RES (24)..(25)..(26)..(27): Xaa is A or G or absent
PKPXXAPTQLSATSVLYYXXXXXXXXXLRKHRNMVVRA

SEQ ID NO: 5948 - protein, 35 aa, Artificial Sequence
  Non-cyclic GFR-binding peptide
  MOD_RES (35)..(35): Xaa is C or S
  MOD_RES (14)..(15)..(16)..(17)..(18): Xaa is A or G
  MOD_RES (19)..(20)..(21)..(22): Xaa is A or G or absent
VPTKLSATSVLYYXXXXXXXXXLRKHREGMSVAEX

SEQ ID NO: 5949 - protein, 35 aa, Artificial Sequence
  Non-cyclic GFR-binding peptide
  MOD_RES (2)..(3)..(35): Xaa is C or S
AXXVPTELSATSMLYYDENEKVVLRKHRDMVVEGX

SEQ ID NO: 5950 - protein, 35 aa, Artificial Sequence
  Non-cyclic GFR-binding peptide
  MOD_RES (4)..(4): Xaa is C or S
KPTXAPTKLSAISVLYLDDSSNVILKNYQNMVVRS

SEQ ID NO: 5951 - protein, 42 aa, Artificial Sequence
  Non-cyclic GFR-binding peptide
  MOD_RES (7)..(41): Xaa is C or S
  MOD_RES (21)..(22)..(23)..(24)..(25): Xaa is A or G
  MOD_RES (26)..(27)..(28)..(29): Xaa is A or G or absent
HVTKPTXAPTKLSATSVLYYXXXXXXXXXLRKHRNMVVRSXG

SEQ ID NO: 5952 - protein, 36 aa, Artificial Sequence
  Non-cyclic GFR-binding peptide
  MOD_RES (2)..(34)..(36): Xaa is C or S
TXAPTKLSPISVLYKDDSSNVILKYHYNMVVRSXGX

SEQ ID NO: 5953 - protein, 36 aa, Artificial Sequence
  Non-cyclic GFR-binding peptide
  MOD_RES (36)..(36): Xaa is C or S
PTQVQLSPISVLYKEIVRKKPIFLKYHYTLEDHLAX

SEQ ID NO: 5954 - protein, 38 aa, Artificial Sequence
  Non-cyclic GFR-binding peptide
  MOD_RES (4)..(5): Xaa is C or S
  MOD_RES (19)..(20)..(21)..(22)..(23): Xaa is A or G
  MOD_RES (24)..(25)..(26)..(27): Xaa is A or G or absent
PKAXXAPTKLSPISVLYKXXXXXXXXXLKYHYNMVVKA

SEQ ID NO: 5955 - protein, 38 aa, Artificial Sequence
  Non-cyclic GFR-binding peptide
  MOD_RES (5)..(6)..(38): Xaa is C or S
VPKPXXAPTKLSPISVLYKDDSSNVILKYHYNMVVRSX

SEQ ID NO: 5956 - protein, 38 aa, Artificial Sequence
  Non-cyclic GFR-binding peptide
  MOD_RES (1)..(2)..(35)..(37): Xaa is C or S
  MOD_RES (16)..(17)..(18)..(19)..(20): Xaa is A or G
  MOD_RES (21)..(22)..(23)..(24): Xaa is A or G or absent
XXVPQALSPISILYKXXXXXXXXXLKYHYMIVRSXKXS

SEQ ID NO: 5957 - protein, 36 aa, Artificial Sequence
  Non-cyclic GFR-binding peptide
  MOD_RES (33)..(35): Xaa is C or S
  MOD_RES (14)..(15)..(16)..(17)..(18): Xaa is A or G
  MOD_RES (19)..(20)..(21)..(22): Xaa is A or G or absent
VPQDLSATSILYYXXXXXXXXXLRKHRMVVKSXKXS

SEQ ID NO: 5958 - protein, 32 aa, Artificial Sequence
  Non-cyclic GFR-binding peptide
  MOD_RES (1)..(2): Xaa is C or S
XXVPTELSPISMLYKDENEKVVLKYHYDMVVE

SEQ ID NO: 5959 - protein, 36 aa, Artificial Sequence
  Non-cyclic GFR-binding peptide
  MOD_RES (4)..(5): Xaa is C or S
PKAXXAPTKLNAISVLYFDSSNNVILKKYRNMVVKA

SEQ ID NO: 5960 - protein, 43 aa, Artificial Sequence
  Non-cyclic GFR-binding peptide
  MOD_RES (5)..(6)..(41)..(43): Xaa is C or S
  MOD_RES (20)..(21)..(22)..(23)..(24): Xaa is A or G
  MOD_RES (25)..(26)..(27)..(28): Xaa is A or G or absent
VGKAXXVPTKLNAISVLYFXXXXXXXXXLKKYREGMSVAEXGX

SEQ ID NO: 5961 - protein, 34 aa, Artificial Sequence
  Non-cyclic GFR-binding peptide
  MOD_RES (31)..(33): Xaa is C or S
VPQDLSAISILYLVGRTPKVLKNYQMVVKSXKXS

SEQ ID NO: 5962 - protein, 36 aa, Artificial Sequence
  Non-cyclic GFR-binding peptide
  MOD_RES (1)..(2)..(35): Xaa is C or S
  MOD_RES (16)..(17)..(18)..(19)..(20): Xaa is A or G
  MOD_RES (21)..(22)..(23)..(24): Xaa is A or G or absent
XXVPQDLSATSILYYXXXXXXXXXLRKHRMVVKSXK

SEQ ID NO: 5963 - protein, 35 aa, Artificial Sequence
  Non-cyclic GFR-binding peptide
  MOD_RES (2)..(3): Xaa is C or S
  MOD_RES (17)..(18)..(19)..(20)..(21): Xaa is A or G
  MOD_RES (22)..(23)..(24)..(25): Xaa is A or G or absent
AXXVPTELSPISMLYKXXXXXXXXXLKYHYEMVVE

SEQ ID NO: 5964 - protein, 39 aa, Artificial Sequence
  Non-cyclic GFR-binding peptide
  MOD_RES (2)..(39): Xaa is C or S
  MOD_RES (18)..(19)..(20)..(21)..(22): Xaa is A or G
  MOD_RES (23)..(24)..(25)..(26): Xaa is A or G or absent
QXRPTQVQLSATSVLYYXXXXXXXXXLRKHRTLEDHLAX

SEQ ID NO: 5965 - protein, 34 aa, Artificial Sequence
  Non-cyclic GFR-binding peptide
  MOD_RES (1)..(2)..(33): Xaa is C or S
XXVSQDLSPISILYKIGKTPKILKYHYMIVKSXK

SEQ ID NO: 5966 - protein, 30 aa, Artificial Sequence
  Non-cyclic GFR-binding peptide
VPQDLNAISILYFVGRTPKVLKKYRMVVKS

SEQ ID NO: 5967 - protein, 35 aa, Artificial Sequence
  Non-cyclic GFR-binding peptide
  MOD_RES (3)..(3): Xaa is C or S
  MOD_RES (17)..(18)..(19)..(20)..(21): Xaa is A or G
  MOD_RES (22)..(23)..(24)..(25): Xaa is A or G or absent
PTXAPTKLSATSVLYYXXXXXXXXXLRKHRNMVVR

SEQ ID NO: 5968 - protein, 37 aa, Artificial Sequence
  Non-cyclic GFR-binding peptide
  MOD_RES (3)..(4): Xaa is C or S
  MOD_RES (18)..(19)..(20)..(21)..(22): Xaa is A or G
  MOD_RES (23)..(24)..(25)..(26): Xaa is A or G or absent
KAXXVPTELSATSMLYYXXXXXXXXXLRKHRDMVVEG

SEQ ID NO: 5969 - protein, 37 aa, Artificial Sequence
  Non-cyclic GFR-binding peptide
  MOD_RES (4)..(5): Xaa is C or S
  MOD_RES (19)..(20)..(21)..(22)..(23): Xaa is A or G
  MOD_RES (24)..(25)..(26)..(27): Xaa is A or G or absent
PKPXXAPTQLSATSVLYYXXXXXXXXXLRKHRNMVVR

SEQ ID NO: 5970 - protein, 37 aa, Artificial Sequence
  Non-cyclic GFR-binding peptide
  MOD_RES (1)..(2)..(35)..(37): Xaa is C or S
  MOD_RES (16)..(17)..(18)..(19)..(20): Xaa is A or G
  MOD_RES (21)..(22)..(23)..(24): Xaa is A or G or absent
XXVPQALSPISILYKXXXXXXXXXLKYHYMIVRSXKX

SEQ ID NO: 5971 - protein, 30 aa, Artificial Sequence; identical to SEQ ID NO: 848
  Non-cyclic GFR-binding peptide

SEQ ID NO: 5972 - protein, 33 aa, Artificial Sequence
  Non-cyclic GFR-binding peptide
  MOD_RES (1)..(1): Xaa is C or S
  MOD_RES (15)..(16)..(17)..(18)..(19): Xaa is A or G
  MOD_RES (20)..(21)..(22)..(23): Xaa is A or G or absent
XVPQALSATSILYYXXXXXXXXXLRKHRMIVRS

SEQ ID NO: 5973 - protein, 32 aa, Artificial Sequence
  Non-cyclic GFR-binding peptide
  MOD_RES (14)..(15)..(16)..(17)..(18): Xaa is A or G
  MOD_RES (19)..(20)..(21)..(22): Xaa is A or G or absent
TQVQLNAISVLYFXXXXXXXXXLKKYRTLEDH

SEQ ID NO: 5974 - protein, 32 aa, Artificial Sequence
  Non-cyclic GFR-binding peptide
  MOD_RES (14)..(15)..(16)..(17)..(18): Xaa is A or G
  MOD_RES (19)..(20)..(21)..(22): Xaa is A or G or absent
APTQLSATSVLYYXXXXXXXXXLRKHRNMVVR

SEQ ID NO: 5975 - protein, 34 aa, Artificial Sequence
  Non-cyclic GFR-binding peptide
  MOD_RES (1)..(34): Xaa is C or S
XVPTKLSAISVLYLDDMGVPTLKNYQEGMSVAEX

SEQ ID NO: 5976 - protein, 37 aa, Artificial Sequence
  Non-cyclic GFR-binding peptide
  MOD_RES (4)..(5): Xaa is C or S
  MOD_RES (19)..(20)..(21)..(22)..(23): Xaa is A or G
  MOD_RES (24)..(25)..(26)..(27): Xaa is A or G or absent
PKAXXAPTKLSPISVLYKXXXXXXXXXLKYHYNMVVK

SEQ ID NO: 5977 - protein, 34 aa, Artificial Sequence
  Non-cyclic GFR-binding peptide
  MOD_RES (4)..(4): Xaa is C or S
KPTXAPTKLSPISVLYKDDSSNVILKYHYNMVVR

SEQ ID NO: 5978 - protein, 39 aa, Artificial Sequence
  Non-cyclic GFR-binding peptide
  MOD_RES (2)..(3)..(37)..(39): Xaa is C or S
  MOD_RES (17)..(18)..(19)..(20)..(21): Xaa is A or G
  MOD_RES (22)..(23)..(24)..(25): Xaa is A or G or absent
AXXAPTKLSAISVLYLXXXXXXXXXLKNYQNMVVKAXGX

SEQ ID NO: 5979 - protein, 40 aa, Artificial Sequence
  Non-cyclic GFR-binding peptide
  MOD_RES (2)..(3)..(37)..(39): Xaa is C or S
  MOD_RES (17)..(18)..(19)..(20)..(21): Xaa is A or G
  MOD_RES (22)..(23)..(24)..(25): Xaa is A or G or absent
PXXAPTKLSATSVLYYXXXXXXXXXLRKHRNMVVRSXGXH

SEQ ID NO: 5980 - protein, 35 aa, Artificial Sequence
  Non-cyclic GFR-binding peptide
  MOD_RES (1)..(34): Xaa is C or S
  MOD_RES (15)..(16)..(17)..(18)..(19): Xaa is A or G
  MOD_RES (20)..(21)..(22)..(23): Xaa is A or G or absent
XVSQDLSATSILYYXXXXXXXXXLRKHRMIVKSXK

SEQ ID NO: 5981 - protein, 37 aa, Artificial Sequence
  Non-cyclic GFR-binding peptide
  MOD_RES (2)..(3)..(37): Xaa is C or S
  MOD_RES (17)..(18)..(19)..(20)..(21): Xaa is A or G
  MOD_RES (22)..(23)..(24)..(25): Xaa is A or G or absent
AXXVPTELSATSMLYYXXXXXXXXXLRKHRDMVVEGX

SEQ ID NO: 5982 - protein, 44 aa, Artificial Sequence
  Non-cyclic GFR-binding peptide
  MOD_RES (5)..(42)..(44): Xaa is C or S
RNVQXRPTQVQLNAISVLYFEIVRKKPIFLKKYRTLEDHLAXKX

SEQ ID NO: 5983 - protein, 39 aa, Artificial Sequence
  Non-cyclic GFR-binding peptide
  MOD_RES (2)..(3)..(36)..(38): Xaa is C or S
  MOD_RES (17)..(18)..(19)..(20)..(21): Xaa is A or G
  MOD_RES (22)..(23)..(24)..(25): Xaa is A or G or absent
PXXVSQDLSPISILYKXXXXXXXXXLKYHYMIVKSXKXS

SEQ ID NO: 5984 - protein, 42 aa, Artificial Sequence
  Non-cyclic GFR-binding peptide
  MOD_RES (4)..(5)..(39)..(41): Xaa is C or S
  MOD_RES (19)..(20)..(21)..(22)..(23): Xaa is A or G
  MOD_RES (24)..(25)..(26)..(27): Xaa is A or G or absent
PKPXXAPTKLSATSVLYYXXXXXXXXXLRKHRNMVVRSXGXH

SEQ ID NO: 5985 - protein, 39 aa, Artificial Sequence
  Non-cyclic GFR-binding peptide
  MOD_RES (5)..(37)..(39): Xaa is C or S
TKPTXAPTKLSATSVLYYDDSSNVILRKHRNMVVRSXGX

SEQ ID NO: 5986 - protein, 36 aa, Artificial Sequence
  Non-cyclic GFR-binding peptide
  MOD_RES (1)..(2)..(35): Xaa is C or S
  MOD_RES (16)..(17)..(18)..(19)..(20): Xaa is A or G
  MOD_RES (21)..(22)..(23)..(24): Xaa is A or G or absent
XXVSQDLSAISILYLXXXXXXXXXLKNYQMIVKSXK

SEQ ID NO: 5987 - protein, 41 aa, Artificial Sequence
  Non-cyclic GFR-binding peptide
  MOD_RES (4)..(41): Xaa is C or S
NVQXRPTQVQLSATSVLYYEIVRKKPIFLRKHRTLEDHLAX

SEQ ID NO: 5988 - protein, 34 aa, Artificial Sequence
  Non-cyclic GFR-binding peptide
  MOD_RES (1)..(1): Xaa is C or S
  MOD_RES (15)..(16)..(17)..(18)..(19): Xaa is A or G
  MOD_RES (20)..(21)..(22)..(23): Xaa is A or G or absent
XAPTKLSATSVLYYXXXXXXXXXLRKHRNMVVRS

SEQ ID NO: 5989 - protein, 36 aa, Artificial Sequence
  Non-cyclic GFR-binding peptide
  MOD_RES (1)..(2)..(34)..(36): Xaa is C or S
XXAPTQLSPISVLYKDDSSNVILKYHYNMVVRAXGX

SEQ ID NO: 5990 - protein, 38 aa, Artificial Sequence
  Non-cyclic GFR-binding peptide
  MOD_RES (37)..(37): Xaa is C or S
  MOD_RES (16)..(17)..(18)..(19)..(20): Xaa is A or G
  MOD_RES (21)..(22)..(23)..(24): Xaa is A or G or absent
RPTQVQLSATSVLYYXXXXXXXXXLRKHRTLEDHLAXK

SEQ ID NO: 5991 - protein, 36 aa, Artificial Sequence
  Non-cyclic GFR-binding peptide
  MOD_RES (2)..(3)..(35): Xaa is C or S
PXXAPTKLSAISVLYLDDSSNVILKNYQNMVVRSXG

SEQ ID NO: 5992 - protein, 39 aa, Artificial Sequence
  Non-cyclic GFR-binding peptide
  MOD_RES (4)..(5)..(36)..(38): Xaa is C or S
AAPXXVPQALSATSILYYVGRKPKVLRKHRMIVRSXKXS

SEQ ID NO: 5993 - protein, 30 aa, Artificial Sequence
  Non-cyclic GFR-binding peptide
APTKLSAISVLYLDDSSNVILKNYQNMVVR

SEQ ID NO: 5994 - protein, 33 aa, Artificial Sequence
  Non-cyclic GFR-binding peptide
  MOD_RES (1)..(2): Xaa is C or S
XXAPTQLSAISVLYLDDSSNVILKNYQNMVVRA

SEQ ID NO: 5995 - protein, 38 aa, Artificial Sequence
  Non-cyclic GFR-binding peptide
  MOD_RES (5)..(6)..(38): Xaa is C or S
IPKAXXVPTELSATSMLYYDEYDKVVLRKHREMVVEGX

SEQ ID NO: 5996 - protein, 31 aa, Artificial Sequence
  Non-cyclic GFR-binding peptide
  MOD_RES (1)..(1): Xaa is C or S
XAPTKLSAISVLYLDSSNNVILKNYQNMVVK

SEQ ID NO: 5997 - protein, 41 aa, Artificial Sequence
  Non-cyclic GFR-binding peptide
  MOD_RES (5)..(6)..(39)..(41): Xaa is C or S
VGKAXXVPTKLSATSVLYYDDMGVPTLRKHREGMSVAEXGX

SEQ ID NO: 5998 - protein, 35 aa, Artificial Sequence
  Non-cyclic GFR-binding peptide
  MOD_RES (2)..(3)..(35): Xaa is C or S
AXXAPTKLNAISVLYFDSSNNVILKKYRNMVVKAX

SEQ ID NO: 5999 - protein, 31 aa, Artificial Sequence
  Non-cyclic GFR-binding peptide
  MOD_RES (31)..(31): Xaa is C or S
VPQDLNAISILYFVGRTPKVLKKYRMVVKSX

SEQ ID NO: 6000 - protein, 39 aa, Artificial Sequence
  Non-cyclic GFR-binding peptide
  MOD_RES (5)..(6)..(39): Xaa is C or S
  MOD_RES (20)..(21)..(22)..(23)..(24): Xaa is A or G
  MOD_RES (25)..(26)..(27)..(28): Xaa is A or G or absent
SAAPXXVPQALSAISILYLXXXXXXXXXLKNYQMIVRSX

SEQ ID NO: 6001 - protein, 36 aa, Artificial Sequence
  Non-cyclic GFR-binding peptide
  MOD_RES (2)..(3)..(34)..(36): Xaa is C or S
PXXVPQALSATSILYYVGRKPKVLRKHRMIVRSXKX

SEQ ID NO: 6002 - protein, 33 aa, Artificial Sequence
  Non-cyclic GFR-binding peptide
  MOD_RES (1)..(1): Xaa is C or S
  MOD_RES (15)..(16)..(17)..(18)..(19): Xaa is A or G
  MOD_RES (20)..(21)..(22)..(23): Xaa is A or G or absent
XVPTELSATSMLYYXXXXXXXXXLRKHREMVVE

SEQ ID NO: 6003 - protein, 39 aa, Artificial Sequence
  Non-cyclic GFR-binding peptide
  MOD_RES (6)..(7): Xaa is C or S
KVGKAXXVPTKLSATSVLYYDDMGVPTLRKHREGMSVAE

SEQ ID NO: 6004 - protein, 41 aa, Artificial Sequence
  Non-cyclic GFR-binding peptide
  MOD_RES (4)..(5)..(38)..(40): Xaa is C or S
  MOD_RES (19)..(20)..(21)..(22)..(23): Xaa is A or G
  MOD_RES (24)..(25)..(26)..(27): Xaa is A or G or absent
ASPXXVSQDLNAISILYFXXXXXXXXXLKKYRMIVKSXKXS

SEQ ID NO: 6005 - protein, 39 aa, Artificial Sequence
  Non-cyclic GFR-binding peptide
  MOD_RES (4)..(5)..(36)..(38): Xaa is C or S
AAPXXVPQALSPISILYKVGRKPKVLKYHYMIVRSXKXS

SEQ ID NO: 6006 - protein, 39 aa, Artificial Sequence
  Non-cyclic GFR-binding peptide
  MOD_RES (6)..(7): Xaa is C or S
  MOD_RES (21)..(22)..(23)..(24)..(25): Xaa is A or G
  MOD_RES (26)..(27)..(28)..(29): Xaa is A or G or absent
YVPKPXXAPTKLSAISVLYLXXXXXXXXXLKNYQNMVVR

SEQ ID NO: 6007 - protein, 36 aa, Artificial Sequence
  Non-cyclic GFR-binding peptide
  MOD_RES (33)..(35): Xaa is C or S
VPTKLSAISVLYLDDMGVPTLKNYQEGMSVAEXGXR

SEQ ID NO: 6008 - protein, 37 aa, Artificial Sequence
  Non-cyclic GFR-binding peptide
  MOD_RES (2)..(3)..(36): Xaa is C or S
AXXVPTKLNAISVLYFDDMGVPTLKKYREGMSVAEXG

SEQ ID NO: 6009 - protein, 40 aa, Artificial Sequence
  Non-cyclic GFR-binding peptide
  MOD_RES (3)..(4)..(38)..(40): Xaa is C or S
  MOD_RES (18)..(19)..(20)..(21)..(22): Xaa is A or G
  MOD_RES (23)..(24)..(25)..(26): Xaa is A or G or absent
KAXXAPTKLSPISVLYKXXXXXXXXXLKYHYNMVVKAXGX

SEQ ID NO: 6010 - protein, 43 aa, Artificial Sequence
  Non-cyclic GFR-binding peptide
  MOD_RES (4)..(41)..(43): Xaa is C or S
  MOD_RES (20)..(21)..(22)..(23)..(24): Xaa is A or G
  MOD_RES (25)..(26)..(27)..(28): Xaa is A or G or absent
NVQXRPTQVQLSPISVLYKXXXXXXXXXLKYHYTLEDHLAXKX

SEQ ID NO: 6011 - protein, 37 aa, Artificial Sequence
  Non-cyclic GFR-binding peptide
  MOD_RES (2)..(3)..(37): Xaa is C or S
  MOD_RES (17)..(18)..(19)..(20)..(21): Xaa is A or G
  MOD_RES (22)..(23)..(24)..(25): Xaa is A or G or absent
AXXVPTELSPISMLYKXXXXXXXXXLKYHYEMVVEGX

SEQ ID NO: 6012 - protein, 36 aa, Artificial Sequence
  Non-cyclic GFR-binding peptide
  MOD_RES (35)..(35): Xaa is C or S
  MOD_RES (14)..(15)..(16)..(17)..(18): Xaa is A or G
  MOD_RES (19)..(20)..(21)..(22): Xaa is A or G or absent
TQVQLSPISVLYKXXXXXXXXXLKYHYTLEDHLAXK

SEQ ID NO: 6013 - protein, 40 aa, Artificial Sequence
  Non-cyclic GFR-binding peptide
  MOD_RES (4)..(38)..(40): Xaa is C or S
  MOD_RES (18)..(19)..(20)..(21)..(22): Xaa is A or G
  MOD_RES (23)..(24)..(25)..(26): Xaa is A or G or absent
KPTXAPTKLSPISVLYKXXXXXXXXXLKYHYNMVVRSXGX

SEQ ID NO: 6014 - protein, 37 aa, Artificial Sequence
  Non-cyclic GFR-binding peptide
  MOD_RES (36)..(36): Xaa is C or S
  MOD_RES (15)..(16)..(17)..(18)..(19): Xaa is A or G
  MOD_RES (20)..(21)..(22)..(23): Xaa is A or G or absent
PTQVQLNAISVLYFXXXXXXXXXLKKYRTLEDHLAXK

SEQ ID NO: 6015 - protein, 37 aa, Artificial Sequence
  Non-cyclic GFR-binding peptide
  MOD_RES (34)..(36): Xaa is C or S
  MOD_RES (14)..(15)..(16)..(17)..(18): Xaa is A or G
  MOD_RES (19)..(20)..(21)..(22): Xaa is A or G or absent
APTKLSATSVLYYXXXXXXXXXLRKHRNMVVRSXGXH

SEQ ID NO: 6016 - protein, 41 aa, Artificial Sequence
  Non-cyclic GFR-binding peptide
  MOD_RES (6)..(7)..(39)..(41): Xaa is C or S
AVPKAXXAPTKLSPISVLYKDSSNNVILKYHYNMVVKAXGX

SEQ ID NO: 6017 - protein, 40 aa, Artificial Sequence
  Non-cyclic GFR-binding peptide
  MOD_RES (6)..(7)..(40): Xaa is C or S
  MOD_RES (21)..(22)..(23)..(24)..(25): Xaa is A or G
  MOD_RES (26)..(27)..(28)..(29): Xaa is A or G or absent
ASASPXXVPQDLNAISILYFXXXXXXXXXLKKYRMVVKSX

SEQ ID NO: 6018 - protein, 36 aa, Artificial Sequence
  Non-cyclic GFR-binding peptide
  MOD_RES (36)..(36): Xaa is C or S
PTQVQLSAISVLYLEIVRKKPIFLKNYQTLEDHLAX

SEQ ID NO: 6019 - protein, 32 aa, Artificial Sequence
  Non-cyclic GFR-binding peptide
  MOD_RES (14)..(15)..(16)..(17)..(18): Xaa is A or G
  MOD_RES (19)..(20)..(21)..(22): Xaa is A or G or absent
APTKLSAISVLYLXXXXXXXXXLKNYQNMVVR

SEQ ID NO: 6020 - protein, 37 aa, Artificial Sequence
  Non-cyclic GFR-binding peptide
  MOD_RES (4)..(5)..(37): Xaa is C or S
PKAXXVPTELSATSMLYYDENEKVVLRKHRDMVVEGX

SEQ ID NO: 6021 - protein, 44 aa, Artificial Sequence
  Non-cyclic GFR-binding peptide
  MOD_RES (6)..(7)..(41)..(43): Xaa is C or S
  MOD_RES (21)..(22)..(23)..(24)..(25): Xaa is A or G
  MOD_RES (26)..(27)..(28)..(29): Xaa is A or G or absent
SIPKAXXVPTELSPISMLYKXXXXXXXXXLKYHYEMVVEGXGXR

SEQ ID NO: 6022 - protein, 33 aa, Artificial Sequence
  Non-cyclic GFR-binding peptide
  MOD_RES (31)..(33): Xaa is C or S
VSQDLSATSILYYIGKTPKILRKHRMIVKSXKX

SEQ ID NO: 6023 - protein, 40 aa, Artificial Sequence
  Non-cyclic GFR-binding peptide
  MOD_RES (5)..(6)..(37)..(39): Xaa is C or S
SASPXXVPQDLSATSILYYVGRTPKVLRKHRMVVKSXKXS

SEQ ID NO: 6024 - protein, 35 aa, Artificial Sequence
  Non-cyclic GFR-binding peptide
  MOD_RES (1)..(34): Xaa is C or S
  MOD_RES (15)..(16)..(17)..(18)..(19): Xaa is A or G
  MOD_RES (20)..(21)..(22)..(23): Xaa is A or G or absent
XVPQALSPISILYKXXXXXXXXXLKYHYMIVRSXK

SEQ ID NO: 6025 - protein, 44 aa, Artificial Sequence
  Non-cyclic GFR-binding peptide
  MOD_RES (4)..(41)..(43): Xaa is C or S
  MOD_RES (20)..(21)..(22)..(23)..(24): Xaa is A or G
  MOD_RES (25)..(26)..(27)..(28): Xaa is A or G or absent
NVQXRPTQVQLSAISVLYLXXXXXXXXXLKNYQTLEDHLAXKXE

SEQ ID NO: 6026 - protein, 37 aa, Artificial Sequence
  Non-cyclic GFR-binding peptide
  MOD_RES (3)..(4)..(37): Xaa is C or S
  MOD_RES (18)..(19)..(20)..(21)..(22): Xaa is A or G
  MOD_RES (23)..(24)..(25)..(26): Xaa is A or G or absent
APXXVPQALNAISILYFXXXXXXXXXLKKYRMIVRSX

SEQ ID NO: 6027 - protein, 34 aa, Artificial Sequence
  Non-cyclic GFR-binding peptide
  MOD_RES (1)..(2)..(33): Xaa is C or S
XXVPQDLSPISILYKVGRTPKVLKYHYMVVKSXK

SEQ ID NO: 6028 - protein, 39 aa, Artificial Sequence
  Non-cyclic GFR-binding peptide
  MOD_RES (2)..(39): Xaa is C or S
QXRPTQVQLSATSVLYYEIVRKKPIFLRKHRTLEDHLAX

SEQ ID NO: 6029 - protein, 42 aa, Artificial Sequence
  Non-cyclic GFR-binding peptide
  MOD_RES (5)..(6)..(41): Xaa is C or S
  MOD_RES (20)..(21)..(22)..(23)..(24): Xaa is A or G
  MOD_RES (25)..(26)..(27)..(28): Xaa is A or G or absent
VGKAXXVPTKLSATSVLYYXXXXXXXXXLRKHREGMSVAEXG

SEQ ID NO: 6030 - protein, 33 aa, Artificial Sequence
  Non-cyclic GFR-binding peptide
  MOD_RES (1)..(2): Xaa is C or S
XXAPTKLSATSVLYYDDSSNVILRKHRNMVVRS

SEQ ID NO: 6031 - protein, 41 aa, Artificial Sequence
  Non-cyclic GFR-binding peptide
  MOD_RES (5)..(5): Xaa is C or S
RNVQXRPTQVQLSPISVLYKEIVRKKPIFLKYHYTLEDHLA

SEQ ID NO: 6032 - protein, 35 aa, Artificial Sequence
  Non-cyclic GFR-binding peptide
  MOD_RES (2)..(3): Xaa is C or S
  MOD_RES (17)..(18)..(19)..(20)..(21): Xaa is A or G
  MOD_RES (22)..(23)..(24)..(25): Xaa is A or G or absent
PXXVPQDLNAISILYFXXXXXXXXXLKKYRMVVKS

SEQ ID NO: 6033 - protein, 35 aa, Artificial Sequence
  Non-cyclic GFR-binding peptide
  MOD_RES (1)..(32)..(34): Xaa is C or S
XVSQDLSPISILYKIGKTPKILKYHYMIVKSXKXS

SEQ ID NO: 6034 - protein, 37 aa, Artificial Sequence
  Non-cyclic GFR-binding peptide
  MOD_RES (3)..(4)..(35)..(37): Xaa is C or S
APXXVPQALSAISILYLVGRKPKVLKNYQMIVRSXKX

SEQ ID NO: 6035 - protein, 36 aa, Artificial Sequence
  Non-cyclic GFR-binding peptide
  MOD_RES (4)..(5): Xaa is C or S
PKAXXVPTELNAISMLYFDENEKVVLKKYRDMVVEG

SEQ ID NO: 6036 - protein, 39 aa, Artificial Sequence
  Non-cyclic GFR-binding peptide
  MOD_RES (3)..(3): Xaa is C or S
  MOD_RES (19)..(20)..(21)..(22)..(23): Xaa is A or G
  MOD_RES (24)..(25)..(26)..(27): Xaa is A or G or absent
VQXRPTQVQLNAISVLYFXXXXXXXXXLKKYRTLEDHLA

SEQ ID NO: 6037 - protein, 43 aa, Artificial Sequence
  Non-cyclic GFR-binding peptide
  MOD_RES (5)..(6)..(40)..(42): Xaa is C or S
  MOD_RES (20)..(21)..(22)..(23)..(24): Xaa is A or G
  MOD_RES (25)..(26)..(27)..(28): Xaa is A or G or absent
VPKAXXAPTKLNAISVLYFXXXXXXXXXLKKYRNMVVKAXGXH

SEQ ID NO: 6038 - protein, 34 aa, Artificial Sequence
  Non-cyclic GFR-binding peptide
  MOD_RES (3)..(4): Xaa is C or S
KPXXAPTKLSATSVLYYDDSSNVILRKHRNMVVR

SEQ ID NO: 6039 - protein, 33 aa, Artificial Sequence
  Non-cyclic GFR-binding peptide
  MOD_RES (1)..(33): Xaa is C or S
XAPTKLSATSVLYYDDSSNVILRKHRNMVVRSX

SEQ ID NO: 6040 - protein, 39 aa, Artificial Sequence
  Non-cyclic GFR-binding peptide
  MOD_RES (6)..(7)..(39): Xaa is C or S
AVPKAXXAPTKLSPISVLYKDSSNNVILKYHYNMVVKAX

SEQ ID NO: 6041 - protein, 42 aa, Artificial Sequence
  Non-cyclic GFR-binding peptide
  MOD_RES (5)..(6)..(40)..(42): Xaa is C or S
  MOD_RES (20)..(21)..(22)..(23)..(24): Xaa is A or G
  MOD_RES (25)..(26)..(27)..(28): Xaa is A or G or absent
VPKAXXAPTKLSPISVLYKXXXXXXXXXLKYHYNMVVKAXGX

SEQ ID NO: 6042 - protein, 40 aa, Artificial Sequence
  Non-cyclic GFR-binding peptide
  MOD_RES (3)..(4)..(37)..(39): Xaa is C or S
  MOD_RES (18)..(19)..(20)..(21)..(22): Xaa is A or G
  MOD_RES (23)..(24)..(25)..(26): Xaa is A or G or absent
APXXVPQALSPISILYKXXXXXXXXXLKYHYMIVRSXKXS

SEQ ID NO: 6043 - protein, 37 aa, Artificial Sequence
  Non-cyclic GFR-binding peptide
  MOD_RES (4)..(5): Xaa is C or S
GKAXXVPTKLNAISVLYFDDMGVPTLKKYREGMSVAE

SEQ ID NO: 6044 - protein, 34 aa, Artificial Sequence
  Non-cyclic GFR-binding peptide
  MOD_RES (1)..(2)..(34): Xaa is C or S
XXAPTKLSPISVLYKDSSNNVILKYHYNMVVKAX

SEQ ID NO: 6045 - protein, 36 aa, Artificial Sequence
  Non-cyclic GFR-binding peptide
  MOD_RES (3)..(4)..(35): Xaa is C or S
SPXXVSQDLSPISILYKIGKTPKILKYHYMIVKSXK

SEQ ID NO: 6046 - protein, 41 aa, Artificial Sequence
  Non-cyclic GFR-binding peptide
  MOD_RES (5)..(39)..(41): Xaa is C or S
  MOD_RES (19)..(20)..(21)..(22)..(23): Xaa is A or G
  MOD_RES (24)..(25)..(26)..(27): Xaa is A or G or absent
TKPTXAPTKLSPISVLYKXXXXXXXXXLKYHYNMVVRSXGX

SEQ ID NO: 6047 - protein, 36 aa, Artificial Sequence
  Non-cyclic GFR-binding peptide
  MOD_RES (4)..(36): Xaa is C or S
KPTXAPTKLSPISVLYKDDSSNVILKYHYNMVVRSX

SEQ ID NO: 6048 - protein, 40 aa, Artificial Sequence
  Non-cyclic GFR-binding peptide
  MOD_RES (5)..(6)..(40): Xaa is C or S
  MOD_RES (20)..(21)..(22)..(23)..(24): Xaa is A or G
  MOD_RES (25)..(26)..(27)..(28): Xaa is A or G or absent
IPKAXXVPTELNAISMLYFXXXXXXXXXLKKYREMVVEGX

SEQ ID NO: 6049 - protein, 35 aa, Artificial Sequence
  Non-cyclic GFR-binding peptide
  MOD_RES (3)..(4): Xaa is C or S
KAXXVPTELNAISMLYFDENEKVVLKKYRDMVVEG

SEQ ID NO: 6050 - protein, 36 aa, Artificial Sequence
  Non-cyclic GFR-binding peptide
  MOD_RES (1)..(35): Xaa is C or S
  MOD_RES (15)..(16)..(17)..(18)..(19): Xaa is A or G
  MOD_RES (20)..(21)..(22)..(23): Xaa is A or G or absent
XVPTELNAISMLYFXXXXXXXXXLKKYREMVVEGXG

SEQ ID NO: 6051 - protein, 33 aa, Artificial Sequence
  Non-cyclic GFR-binding peptide
  MOD_RES (33)..(33): Xaa is C or S
  MOD_RES (14)..(15)..(16)..(17)..(18): Xaa is A or G
  MOD_RES (19)..(20)..(21)..(22): Xaa is A or G or absent
VPQALNAISILYFXXXXXXXXXLKKYRMIVRSX

SEQ ID NO: 6052 - protein, 34 aa, Artificial Sequence
  Non-cyclic GFR-binding peptide
  MOD_RES (1)..(2): Xaa is C or S
  MOD_RES (16)..(17)..(18)..(19)..(20): Xaa is A or G
  MOD_RES (21)..(22)..(23)..(24): Xaa is A or G or absent
XXAPTQLSATSVLYYXXXXXXXXXLRKHRNMVVR

SEQ ID NO: 6053 - protein, 34 aa, Artificial Sequence
  Non-cyclic GFR-binding peptide
  MOD_RES (1)..(1): Xaa is C or S
  MOD_RES (15)..(16)..(17)..(18)..(19): Xaa is A or G
  MOD_RES (20)..(21)..(22)..(23): Xaa is A or G or absent
XAPTQLSAISVLYLXXXXXXXXXLKNYQNMVVRA

SEQ ID NO: 6054 - protein, 39 aa, Artificial Sequence
  Non-cyclic GFR-binding peptide
  MOD_RES (2)..(36)..(38): Xaa is C or S
  MOD_RES (16)..(17)..(18)..(19)..(20): Xaa is A or G
  MOD_RES (21)..(22)..(23)..(24): Xaa is A or G or absent
TXAPTKLSATSVLYYXXXXXXXXXLRKHRNMVVRSXGXH

SEQ ID NO: 6055 - protein, 34 aa, Artificial Sequence
  Non-cyclic GFR-binding peptide
  MOD_RES (1)..(32)..(34): Xaa is C or S
XVPQDLSATSILYYVGRTPKVLRKHRMVVKSXKX

SEQ ID NO: 6056 - protein, 38 aa, Artificial Sequence
  Non-cyclic GFR-binding peptide
  MOD_RES (2)..(3)..(37): Xaa is C or S
  MOD_RES (17)..(18)..(19)..(20)..(21): Xaa is A or G
  MOD_RES (22)..(23)..(24)..(25): Xaa is A or G or absent
PXXAPTKLSAISVLYLXXXXXXXXXLKNYQNMVVRSXG

SEQ ID NO: 6057 - protein, 36 aa, Artificial Sequence
  Non-cyclic GFR-binding peptide
  MOD_RES (1)..(33)..(35): Xaa is C or S
XAPTKLSATSVLYYDDSSNVILRKHRNMVVRSXGXH

SEQ ID NO: 6058 - protein, 33 aa, Artificial Sequence
  Non-cyclic GFR-binding peptide
  MOD_RES (1)..(2): Xaa is C or S
XXVPTELNAISMLYFDENEKVVLKKYRDMVVEG

SEQ ID NO: 6059 - protein, 32 aa, Artificial Sequence
  Non-cyclic GFR-binding peptide
  MOD_RES (14)..(15)..(16)..(17)..(18): Xaa is A or G
  MOD_RES (19)..(20)..(21)..(22): Xaa is A or G or absent
APTKLSATSVLYYXXXXXXXXXLRKHRNMVVR

SEQ ID NO: 6060 - protein, 36 aa, Artificial Sequence
  Non-cyclic GFR-binding peptide
  MOD_RES (2)..(3)..(34)..(36): Xaa is C or S
PXXVSQDLSPISILYKIGKTPKILKYHYMIVKSXKX

SEQ ID NO: 6061 - protein, 39 aa, Artificial Sequence
  Non-cyclic GFR-binding peptide
  MOD_RES (6)..(7): Xaa is C or S
  MOD_RES (21)..(22)..(23)..(24)..(25): Xaa is A or G
  MOD_RES (26)..(27)..(28)..(29): Xaa is A or G or absent
KIPKAXXVPTELSPISMLYKXXXXXXXXXLKYHYDMVVE

SEQ ID NO: 6062 - protein, 33 aa, Artificial Sequence
  Non-cyclic GFR-binding peptide
  MOD_RES (2)..(3): Xaa is C or S
PXXVPQDLSPISILYKVGRTPKVLKYHYMVVKS

SEQ ID NO: 6063 - protein, 40 aa, Artificial Sequence
  Non-cyclic GFR-binding peptide
  MOD_RES (5)..(6)..(40): Xaa is C or S
  MOD_RES (20)..(21)..(22)..(23)..(24): Xaa is A or G
  MOD_RES (25)..(26)..(27)..(28): Xaa is A or G or absent
IPKAXXVPTELSPISMLYKXXXXXXXXXLKYHYDMVVEGX

SEQ ID NO: 6064 - protein, 32 aa, Artificial Sequence
  Non-cyclic GFR-binding peptide
  MOD_RES (1)..(32): Xaa is C or S
XVSQDLSATSILYYIGKTPKILRKHRMIVKSX

SEQ ID NO: 6065 - protein, 32 aa, Artificial Sequence
  Non-cyclic GFR-binding peptide
  MOD_RES (1)..(2): Xaa is C or S
XXVPQDLSPISILYKVGRTPKVLKYHYMVVKS

SEQ ID NO: 6066 - protein, 39 aa, Artificial Sequence
  Non-cyclic GFR-binding peptide
  MOD_RES (2)..(3)..(36)..(38): Xaa is C or S
  MOD_RES (17)..(18)..(19)..(20)..(21): Xaa is A or G
  MOD_RES (22)..(23)..(24)..(25): Xaa is A or G or absent
PXXVPQALSAISILYLXXXXXXXXXLKNYQMIVRSXKXS

SEQ ID NO: 6067 - protein, 40 aa, Artificial Sequence
  Non-cyclic GFR-binding peptide
  MOD_RES (3)..(4)..(38)..(40): Xaa is C or S
  MOD_RES (18)..(19)..(20)..(21)..(22): Xaa is A or G
  MOD_RES (23)..(24)..(25)..(26): Xaa is A or G or absent
KAXXAPTKLSAISVLYLXXXXXXXXXLKNYQNMVVKAXGX

SEQ ID NO: 6068 - protein, 39 aa, Artificial Sequence
  Non-cyclic GFR-binding peptide
  MOD_RES (5)..(6)..(37)..(39): Xaa is C or S
SAAPXXVPQALSATSILYYVGRKPKVLRKHRMIVRSXKX

SEQ ID NO: 6069 - protein, 38 aa, Artificial Sequence
  Non-cyclic GFR-binding peptide
  MOD_RES (3)..(4)..(38): Xaa is C or S
  MOD_RES (18)..(19)..(20)..(21)..(22): Xaa is A or G
  MOD_RES (23)..(24)..(25)..(26): Xaa is A or G or absent
KAXXVPTELSPISMLYKXXXXXXXXXLKYHYDMVVEGX

SEQ ID NO: 6070 - protein, 37 aa, Artificial Sequence
  Non-cyclic GFR-binding peptide
  MOD_RES (1)..(2)..(37): Xaa is C or S
  MOD_RES (16)..(17)..(18)..(19)..(20): Xaa is A or G
  MOD_RES (21)..(22)..(23)..(24): Xaa is A or G or absent
XXVPTKLSAISVLYLXXXXXXXXXLKNYQEGMSVAEX

SEQ ID NO: 6071 - protein, 39 aa, Artificial Sequence
  Non-cyclic GFR-binding peptide
  MOD_RES (3)..(4)..(36)..(38): Xaa is C or S
KPXXAPTKLSPISVLYKDDSSNVILKYHYNMVVRSXGXH

SEQ ID NO: 6072 - protein, 33 aa, Artificial Sequence
  Non-cyclic GFR-binding peptide
TQVQLSATSVLYYEIVRKKPIFLRKHRTLEDHL

SEQ ID NO: 6073 - protein, 42 aa, Artificial Sequence
  Non-cyclic GFR-binding peptide
  MOD_RES (5)..(6)..(40)..(42): Xaa is C or S
  MOD_RES (20)..(21)..(22)..(23)..(24): Xaa is A or G
  MOD_RES (25)..(26)..(27)..(28): Xaa is A or G or absent
IPKAXXVPTELSATSMLYYXXXXXXXXXLRKHRDMVVEGXGX

SEQ ID NO: 6074 - protein, 36 aa, Artificial Sequence
  Non-cyclic GFR-binding peptide
  MOD_RES (3)..(4): Xaa is C or S
  MOD_RES (18)..(19)..(20)..(21)..(22): Xaa is A or G
  MOD_RES (23)..(24)..(25)..(26): Xaa is A or G or absent
SPXXVSQDLSATSILYYXXXXXXXXXLRKHRMIVKS

SEQ ID NO: 6075 - protein, 39 aa, Artificial Sequence
  Non-cyclic GFR-binding peptide
  MOD_RES (1)..(36)..(38): Xaa is C or S
  MOD_RES (15)..(16)..(17)..(18)..(19): Xaa is A or G
  MOD_RES (20)..(21)..(22)..(23): Xaa is A or G or absent
XVPTKLSATSVLYYXXXXXXXXXLRKHREGMSVAEXGXR

SEQ ID NO: 6076 - protein, 39 aa, Artificial Sequence
  Non-cyclic GFR-binding peptide
  MOD_RES (5)..(6)..(37)..(39): Xaa is C or S
SAAPXXVPQALSPISILYKVGRKPKVLKYHYMIVRSXKX

SEQ ID NO: 6077 - protein, 35 aa, Artificial Sequence
  Non-cyclic GFR-binding peptide
  MOD_RES (1)..(2): Xaa is C or S
  MOD_RES (16)..(17)..(18)..(19)..(20): Xaa is A or G
  MOD_RES (21)..(22)..(23)..(24): Xaa is A or G or absent
XXVPTELSATSMLYYXXXXXXXXXLRKHRDMVVEG

SEQ ID NO: 6078 - protein, 34 aa, Artificial Sequence
  Non-cyclic GFR-binding peptide
  MOD_RES (1)..(2): Xaa is C or S
  MOD_RES (16)..(17)..(18)..(19)..(20): Xaa is A or G
  MOD_RES (21)..(22)..(23)..(24): Xaa is A or G or absent
XXVPQDLSPISILYKXXXXXXXXXLKYHYMVVKS

SEQ ID NO: 6079 - protein, 34 aa, Artificial Sequence
  Non-cyclic GFR-binding peptide
  MOD_RES (1)..(1): Xaa is C or S
  MOD_RES (15)..(16)..(17)..(18)..(19): Xaa is A or G
  MOD_RES (20)..(21)..(22)..(23): Xaa is A or G or absent
XAPTKLSPISVLYKXXXXXXXXXLKYHYNMVVKA

SEQ ID NO: 6080 - protein, 38 aa, Artificial Sequence
  Non-cyclic GFR-binding peptide
  MOD_RES (3)..(35)..(37): Xaa is C or S
PTXAPTKLSPISVLYKDDSSNVILKYHYNMVVRSXGXH

SEQ ID NO: 6081 - protein, 37 aa, Artificial Sequence
  Non-cyclic GFR-binding peptide
  MOD_RES (5)..(6)..(37): Xaa is C or S
SASPXXVPQDLSATSILYYVGRTPKVLRKHRMVVKSX

SEQ ID NO: 6082 - protein, 33 aa, Artificial Sequence
  Non-cyclic GFR-binding peptide
  MOD_RES (31)..(33): Xaa is C or S
VPQALSAISILYLVGRKPKVLKNYQMIVRSXKX

SEQ ID NO: 6083 - protein, 34 aa, Artificial Sequence
  Non-cyclic GFR-binding peptide
  MOD_RES (34)..(34): Xaa is C or S
  MOD_RES (14)..(15)..(16)..(17)..(18): Xaa is A or G
  MOD_RES (19)..(20)..(21)..(22): Xaa is A or G or absent
VPTELSPISMLYKXXXXXXXXXLKYHYEMVVEGX

SEQ ID NO: 6084 - protein, 39 aa, Artificial Sequence
  Non-cyclic GFR-binding peptide
  MOD_RES (4)..(5)..(39): Xaa is C or S
  MOD_RES (19)..(20)..(21)..(22)..(23): Xaa is A or G
  MOD_RES (24)..(25)..(26)..(27): Xaa is A or G or absent
PKPXXAPTKLSATSVLYYXXXXXXXXXLRKHRNMVVRSX

SEQ ID NO: 6085 - protein, 38 aa, Artificial Sequence
  Non-cyclic GFR-binding peptide
  MOD_RES (6)..(7): Xaa is C or S
SIPKAXXVPTELSATSMLYYDEYDKVVLRKHREMVVEG

SEQ ID NO: 6086 - protein, 43 aa, Artificial Sequence
  Non-cyclic GFR-binding peptide
  MOD_RES (6)..(7)..(41)..(43): Xaa is C or S
  MOD_RES (21)..(22)..(23)..(24)..(25): Xaa is A or G
  MOD_RES (26)..(27)..(28)..(29): Xaa is A or G or absent
SIPKAXXVPTELNAISMLYFXXXXXXXXXLKKYREMVVEGXGX

SEQ ID NO: 6087 - protein, 37 aa, Artificial Sequence
  Non-cyclic GFR-binding peptide
  MOD_RES (35)..(37): Xaa is C or S
TQVQLNAISVLYFEIVRKKPIFLKKYRTLEDHLAXKX

SEQ ID NO: 6088 - protein, 38 aa, Artificial Sequence
  Non-cyclic GFR-binding peptide
  MOD_RES (2)..(3)..(35)..(37): Xaa is C or S
AXXVPTELNAISMLYFDEYDKVVLKKYREMVVEGXGXR

SEQ ID NO: 6089 - protein, 35 aa, Artificial Sequence
  Non-cyclic GFR-binding peptide
  MOD_RES (1)..(33)..(35): Xaa is C or S
XVPTELSATSMLYYDENEKVVLRKHRDMVVEGXGX

SEQ ID NO: 6090 - protein, 40 aa, Artificial Sequence
  Non-cyclic GFR-binding peptide
  MOD_RES (5)..(6)..(39): Xaa is C or S
  MOD_RES (20)..(21)..(22)..(23)..(24): Xaa is A or G
  MOD_RES (25)..(26)..(27)..(28): Xaa is A or G or absent
SAAPXXVPQALSATSILYYXXXXXXXXXLRKHRMIVRSXK

SEQ ID NO: 6091 - protein, 36 aa, Artificial Sequence
  Non-cyclic GFR-binding peptide
  MOD_RES (36)..(36): Xaa is C or S
  MOD_RES (15)..(16)..(17)..(18)..(19): Xaa is A or G
  MOD_RES (20)..(21)..(22)..(23): Xaa is A or G or absent
PTQVQLSAISVLYLXXXXXXXXXLKNYQTLEDHLAX

SEQ ID NO: 6092 - protein, 35 aa, Artificial Sequence
  Non-cyclic GFR-binding peptide
  MOD_RES (15)..(16)..(17)..(18)..(19): Xaa is A or G
  MOD_RES (20)..(21)..(22)..(23): Xaa is A or G or absent
PTQVQLSPISVLYKXXXXXXXXXLKYHYTLEDHLA

SEQ ID NO: 6093 - protein, 35 aa, Artificial Sequence
  Non-cyclic GFR-binding peptide
  MOD_RES (1)..(32)..(34): Xaa is C or S
XVPQDLSAISILYLVGRTPKVLKNYQMVVKSXKXS

SEQ ID NO: 6094 - protein, 36 aa, Artificial Sequence
  Non-cyclic GFR-binding peptide
  MOD_RES (1)..(2)..(35): Xaa is C or S
  MOD_RES (16)..(17)..(18)..(19)..(20): Xaa is A or G
  MOD_RES (21)..(22)..(23)..(24): Xaa is A or G or absent
XXVPQALSPISILYKXXXXXXXXXLKYHYMIVRSXK

SEQ ID NO: 6095 - protein, 37 aa, Artificial Sequence
  Non-cyclic GFR-binding peptide
  MOD_RES (35)..(37): Xaa is C or S
  MOD_RES (14)..(15)..(16)..(17)..(18): Xaa is A or G
  MOD_RES (19)..(20)..(21)..(22): Xaa is A or G or absent
VPTKLSAISVLYLXXXXXXXXXLKNYQEGMSVAEXGX

SEQ ID NO: 6096 - protein, 42 aa, Artificial Sequence
  Non-cyclic GFR-binding peptide
  MOD_RES (6)..(7)..(42): Xaa is C or S
  MOD_RES (21)..(22)..(23)..(24)..(25): Xaa is A or G
  MOD_RES (26)..(27)..(28)..(29): Xaa is A or G or absent
KVGKAXXVPTKLSATSVLYYXXXXXXXXXLRKHREGMSVAEX

SEQ ID NO: 6097 - protein, 39 aa, Artificial Sequence
  Non-cyclic GFR-binding peptide
  MOD_RES (6)..(7): Xaa is C or S
  MOD_RES (21)..(22)..(23)..(24)..(25): Xaa is A or G
  MOD_RES (26)..(27)..(28)..(29): Xaa is A or G or absent
ASAAPXXVPQALSATSILYYXXXXXXXXXLRKHRMIVRS

SEQ ID NO: 6098 - protein, 38 aa, Artificial Sequence
  Non-cyclic GFR-binding peptide
  MOD_RES (2)..(3)..(38): Xaa is C or S
  MOD_RES (17)..(18)..(19)..(20)..(21): Xaa is A or G
  MOD_RES (22)..(23)..(24)..(25): Xaa is A or G or absent
AXXVPTKLSATSVLYYXXXXXXXXXLRKHREGMSVAEX

SEQ ID NO: 6099 - protein, 39 aa, Artificial Sequence
  Non-cyclic GFR-binding peptide
  MOD_RES (5)..(6)..(39): Xaa is C or S
  MOD_RES (20)..(21)..(22)..(23)..(24): Xaa is A or G
  MOD_RES (25)..(26)..(27)..(28): Xaa is A or G or absent
SASPXXVSQDLNAISILYFXXXXXXXXXLKKYRMIVKSX

SEQ ID NO: 6100 - protein, 35 aa, Artificial Sequence
  Non-cyclic GFR-binding peptide
  MOD_RES (1)..(2)..(35): Xaa is C or S
  MOD_RES (16)..(17)..(18)..(19)..(20): Xaa is A or G
  MOD_RES (21)..(22)..(23)..(24): Xaa is A or G or absent
XXVPQDLNAISILYFXXXXXXXXXLKKYRMVVKSX

SEQ ID NO: 6101 - protein, 33 aa, Artificial Sequence
  Non-cyclic GFR-binding peptide
  MOD_RES (1)..(1): Xaa is C or S
  MOD_RES (15)..(16)..(17)..(18)..(19): Xaa is A or G
  MOD_RES (20)..(21)..(22)..(23): Xaa is A or G or absent
XVPTELSPISMLYKXXXXXXXXXLKYHYEMVVE

SEQ ID NO: 6102 - protein, 39 aa, Artificial Sequence
  Non-cyclic GFR-binding peptide
  MOD_RES (36)..(38): Xaa is C or S
  MOD_RES (15)..(16)..(17)..(18)..(19): Xaa is A or G
  MOD_RES (20)..(21)..(22)..(23): Xaa is A or G or absent
PTQVQLNAISVLYFXXXXXXXXXLKKYRTLEDHLAXKXE

SEQ ID NO: 6103 - protein, 39 aa, Artificial Sequence
  Non-cyclic GFR-binding peptide
  MOD_RES (5)..(6)..(39): Xaa is C or S
  MOD_RES (20)..(21)..(22)..(23)..(24): Xaa is A or G
  MOD_RES (25)..(26)..(27)..(28): Xaa is A or G or absent
SASPXXVPQDLSATSILYYXXXXXXXXXLRKHRMVVKSX

SEQ ID NO: 6104 - protein, 34 aa, Artificial Sequence
  Non-cyclic GFR-binding peptide
  MOD_RES (2)..(3)..(34): Xaa is C or S
PXXVPQDLSPISILYKVGRTPKVLKYHYMVVKSX

SEQ ID NO: 6105 - protein, 34 aa, Artificial Sequence
  Non-cyclic GFR-binding peptide
  MOD_RES (2)..(3): Xaa is C or S
AXXAPTKLNAISVLYFDSSNNVILKKYRNMVVKA

SEQ ID NO: 6106 - protein, 33 aa, Artificial Sequence
  Non-cyclic GFR-binding peptide
  MOD_RES (1)..(2): Xaa is C or S
XXAPTKLSAISVLYLDDSSNVILKNYQNMVVRS

SEQ ID NO: 6107 - protein, 33 aa, Artificial Sequence
  Non-cyclic GFR-binding peptide
  MOD_RES (32)..(32): Xaa is C or S
APTKLSATSVLYYDDSSNVILRKHRNMVVRSXG

SEQ ID NO: 6108 - protein, 33 aa, Artificial Sequence
  Non-cyclic GFR-binding peptide
  MOD_RES (1)..(33): Xaa is C or S
XAPTKLSAISVLYLDDSSNVILKNYQNMVVRSX

SEQ ID NO: 6109 - protein, 31 aa, Artificial Sequence
  Non-cyclic GFR-binding peptide
VPTELSATSMLYYDEYDKVVLRKHREMVVEG

SEQ ID NO: 6110 - protein, 37 aa, Artificial Sequence
  Non-cyclic GFR-binding peptide
  MOD_RES (4)..(5)..(36): Xaa is C or S
AAPXXVPQALSPISILYKVGRKPKVLKYHYMIVRSXK

SEQ ID NO: 6111 - protein, 43 aa, Artificial Sequence
  Non-cyclic GFR-binding peptide
  MOD_RES (6)..(7)..(40)..(42): Xaa is C or S
  MOD_RES (21)..(22)..(23)..(24)..(25): Xaa is A or G
  MOD_RES (26)..(27)..(28)..(29): Xaa is A or G or absent
ASASPXXVSQDLSATSILYYXXXXXXXXXLRKHRMIVKSXKXS

SEQ ID NO: 6112 - protein, 41 aa, Artificial Sequence
  Non-cyclic GFR-binding peptide
  MOD_RES (5)..(5): Xaa is C or S
  MOD_RES (21)..(22)..(23)..(24)..(25): Xaa is A or G
  MOD_RES (26)..(27)..(28)..(29): Xaa is A or G or absent
RNVQXRPTQVQLSAISVLYLXXXXXXXXXLKNYQTLEDHLA

SEQ ID NO: 6113 - protein, 40 aa, Artificial Sequence
  Non-cyclic GFR-binding peptide
  MOD_RES (2)..(3)..(37)..(39): Xaa is C or S
  MOD_RES (17)..(18)..(19)..(20)..(21): Xaa is A or G
  MOD_RES (22)..(23)..(24)..(25): Xaa is A or G or absent
AXXVPTELSPISMLYKXXXXXXXXXLKYHYDMVVEGXGXR

SEQ ID NO: 6114 - protein, 34 aa, Artificial Sequence
  Non-cyclic GFR-binding peptide
  MOD_RES (32)..(34): Xaa is C or S
VPTELSPISMLYKDENEKVVLKYHYDMVVEGXGX

SEQ ID NO: 6115 - protein, 41 aa, Artificial Sequence
  Non-cyclic GFR-binding peptide
  MOD_RES (3)..(4)..(38)..(40): Xaa is C or S
  MOD_RES (18)..(19)..(20)..(21)..(22): Xaa is A or G
  MOD_RES (23)..(24)..(25)..(26): Xaa is A or G or absent
KAXXAPTKLSPISVLYKXXXXXXXXXLKYHYNMVVKAXGXH

SEQ ID NO: 6116 - protein, 32 aa, Artificial Sequence
  Non-cyclic GFR-binding peptide
  MOD_RES (14)..(15)..(16)..(17)..(18): Xaa is A or G
  MOD_RES (19)..(20)..(21)..(22): Xaa is A or G or absent
APTKLSAISVLYLXXXXXXXXXLKNYQNMVVK

SEQ ID NO: 6117 - protein, 39 aa, Artificial Sequence
  Non-cyclic GFR-binding peptide
  MOD_RES (5)..(6)..(39): Xaa is C or S
  MOD_RES (20)..(21)..(22)..(23)..(24): Xaa is A or G
  MOD_RES (25)..(26)..(27)..(28): Xaa is A or G or absent
SASPXXVPQDLSAISILYLXXXXXXXXXLKNYQMVVKSX

SEQ ID NO: 6118 - protein, 39 aa, Artificial Sequence
  Non-cyclic GFR-binding peptide
  MOD_RES (4)..(5)..(38): Xaa is C or S
  MOD_RES (19)..(20)..(21)..(22)..(23): Xaa is A or G
  MOD_RES (24)..(25)..(26)..(27): Xaa is A or G or absent
ASPXXVPQDLSPISILYKXXXXXXXXXLKYHYMVVKSXK

SEQ ID NO: 6119 - protein, 37 aa, Artificial Sequence
  Non-cyclic GFR-binding peptide
  MOD_RES (2)..(3)..(36): Xaa is C or S
  MOD_RES (17)..(18)..(19)..(20)..(21): Xaa is A or G
  MOD_RES (22)..(23)..(24)..(25): Xaa is A or G or absent
PXXVPQALNAISILYFXXXXXXXXXLKKYRMIVRSXK

SEQ ID NO: 6120 - protein, 37 aa, Artificial Sequence
  Non-cyclic GFR-binding peptide
  MOD_RES (2)..(3)..(34)..(36): Xaa is C or S
PXXVPQDLNAISILYFVGRTPKVLKKYRMVVKSXKXS

SEQ ID NO: 6121 - protein, 36 aa, Artificial Sequence
  Non-cyclic GFR-binding peptide
  MOD_RES (1)..(2)..(36): Xaa is C or S
  MOD_RES (16)..(17)..(18)..(19)..(20): Xaa is A or G
  MOD_RES (21)..(22)..(23)..(24): Xaa is A or G or absent
XXAPTKLNAISVLYFXXXXXXXXXLKKYRNMVVKAX

SEQ ID NO: 6122 - protein, 34 aa, Artificial Sequence
  Non-cyclic GFR-binding peptide
  MOD_RES (34)..(34): Xaa is C or S
  MOD_RES (14)..(15)..(16)..(17)..(18): Xaa is A or G
  MOD_RES (19)..(20)..(21)..(22): Xaa is A or G or absent
VPTELSATSMLYYXXXXXXXXXLRKHRDMVVEGX

SEQ ID NO: 6123 - protein, 35 aa, Artificial Sequence
  Non-cyclic GFR-binding peptide
  MOD_RES (1)..(35): Xaa is C or S
  MOD_RES (15)..(16)..(17)..(18)..(19): Xaa is A or G
  MOD_RES (20)..(21)..(22)..(23): Xaa is A or G or absent
XAPTQLSPISVLYKXXXXXXXXXLKYHYNMVVRAX

SEQ ID NO: 6124 - protein, 30 aa, Artificial Sequence; identical to SEQ ID NO: 850
  Non-cyclic GFR-binding peptide

SEQ ID NO: 6125 - protein, 41 aa, Artificial Sequence
  Non-cyclic GFR-binding peptide
  MOD_RES (5)..(5): Xaa is C or S
  MOD_RES (21)..(22)..(23)..(24)..(25): Xaa is A or G
  MOD_RES (26)..(27)..(28)..(29): Xaa is A or G or absent
RNVQXRPTQVQLSATSVLYYXXXXXXXXXLRKHRTLEDHLA

SEQ ID NO: 6126 - protein, 32 aa, Artificial Sequence
  Non-cyclic GFR-binding peptide
  MOD_RES (1)..(1): Xaa is C or S
XAPTQLSAISVLYLDDSSNVILKNYQNMVVRA

SEQ ID NO: 6127 - protein, 44 aa, Artificial Sequence
  Non-cyclic GFR-binding peptide
  MOD_RES (6)..(7)..(41)..(43): Xaa is C or S
  MOD_RES (21)..(22)..(23)..(24)..(25): Xaa is A or G
  MOD_RES (26)..(27)..(28)..(29): Xaa is A or G or absent
SIPKAXXVPTELSATSMLYYXXXXXXXXXLRKHREMVVEGXGXR

SEQ ID NO: 6128 - protein, 31 aa, Artificial Sequence
  Non-cyclic GFR-binding peptide
  MOD_RES (1)..(1): Xaa is C or S
XAPTKLSPISVLYKDDSSNVILKYHYNMVVR

SEQ ID NO: 6129 - protein, 38 aa, Artificial Sequence
  Non-cyclic GFR-binding peptide
  MOD_RES (2)..(3)..(35)..(37): Xaa is C or S
PXXAPTKLSPISVLYKDDSSNVILKYHYNMVVRSXGXH

SEQ ID NO: 6130 - protein, 38 aa, Artificial Sequence
  Non-cyclic GFR-binding peptide
  MOD_RES (1)..(2)..(35)..(37): Xaa is C or S
  MOD_RES (16)..(17)..(18)..(19)..(20): Xaa is A or G
  MOD_RES (21)..(22)..(23)..(24): Xaa is A or G or absent
XXVPQALSATSILYYXXXXXXXXXLRKHRMIVRSXKXS

SEQ ID NO: 6131 - protein, 36 aa, Artificial Sequence
  Non-cyclic GFR-binding peptide
  MOD_RES (33)..(35): Xaa is C or S
  MOD_RES (14)..(15)..(16)..(17)..(18): Xaa is A or G
  MOD_RES (19)..(20)..(21)..(22): Xaa is A or G or absent
VPQDLSPISILYKXXXXXXXXXLKYHYMVVKSXKXS

SEQ ID NO: 6132 - protein, 35 aa, Artificial Sequence
  Non-cyclic GFR-binding peptide
  MOD_RES (4)..(5): Xaa is C or S
PKPXXAPTKLSAISVLYLDDSSNVILKNYQNMVVR

SEQ ID NO: 6133 - protein, 42 aa, Artificial Sequence
  Non-cyclic GFR-binding peptide
  MOD_RES (5)..(6)..(39)..(41): Xaa is C or S
  MOD_RES (20)..(21)..(22)..(23)..(24): Xaa is A or G
  MOD_RES (25)..(26)..(27)..(28): Xaa is A or G or absent
SASPXXVPQDLNAISILYFXXXXXXXXXLKKYRMVVKSXKXS

SEQ ID NO: 6134 - protein, 38 aa, Artificial Sequence
  Non-cyclic GFR-binding peptide
  MOD_RES (2)..(2): Xaa is C or S
  MOD_RES (18)..(19)..(20)..(21)..(22): Xaa is A or G
  MOD_RES (23)..(24)..(25)..(26): Xaa is A or G or absent
QXRPTQVQLNAISVLYFXXXXXXXXXLKKYRTLEDHLA

SEQ ID NO: 6135 - protein, 40 aa, Artificial Sequence
  Non-cyclic GFR-binding peptide
  MOD_RES (4)..(5)..(38)..(40): Xaa is C or S
GKAXXVPTKLSAISVLYLDDMGVPTLKNYQEGMSVAEXGX

SEQ ID NO: 6136 - protein, 33 aa, Artificial Sequence
  Non-cyclic GFR-binding peptide
  MOD_RES (1)..(1): Xaa is C or S
XVPTKLNAISVLYFDDMGVPTLKKYREGMSVAE

SEQ ID NO: 6137 - protein, 35 aa, Artificial Sequence
  Non-cyclic GFR-binding peptide
  MOD_RES (2)..(3): Xaa is C or S
  MOD_RES (17)..(18)..(19)..(20)..(21): Xaa is A or G
  MOD_RES (22)..(23)..(24)..(25): Xaa is A or G or absent
AXXVPTELNAISMLYFXXXXXXXXXLKKYREMVVE

SEQ ID NO: 6138 - protein, 41 aa, Artificial Sequence
  Non-cyclic GFR-binding peptide
  MOD_RES (6)..(7)..(40): Xaa is C or S
KVGKAXXVPTKLSAISVLYLDDMGVPTLKNYQEGMSVAEXG

SEQ ID NO: 6139 - protein, 39 aa, Artificial Sequence
  Non-cyclic GFR-binding peptide
  MOD_RES (1)..(2)..(36)..(38): Xaa is C or S
  MOD_RES (16)..(17)..(18)..(19)..(20): Xaa is A or G
  MOD_RES (21)..(22)..(23)..(24): Xaa is A or G or absent
XXAPTKLNAISVLYFXXXXXXXXXLKKYRNMVVKAXGXH

SEQ ID NO: 6140 - protein, 41 aa, Artificial Sequence
  Non-cyclic GFR-binding peptide
  MOD_RES (2)..(3)..(38)..(40): Xaa is C or S
  MOD_RES (17)..(18)..(19)..(20)..(21): Xaa is A or G
  MOD_RES (22)..(23)..(24)..(25): Xaa is A or G or absent
AXXVPTKLSAISVLYLXXXXXXXXXLKNYQEGMSVAEXGXR

SEQ ID NO: 6141 - protein, 40 aa, Artificial Sequence
  Non-cyclic GFR-binding peptide
  MOD_RES (3)..(4)..(37)..(39): Xaa is C or S
  MOD_RES (18)..(19)..(20)..(21)..(22): Xaa is A or G
  MOD_RES (23)..(24)..(25)..(26): Xaa is A or G or absent
SPXXVSQDLNAISILYFXXXXXXXXXLKKYRMIVKSXKXS

SEQ ID NO: 6142 - protein, 37 aa, Artificial Sequence
  Non-cyclic GFR-binding peptide
  MOD_RES (35)..(37): Xaa is C or S
  MOD_RES (14)..(15)..(16)..(17)..(18): Xaa is A or G
  MOD_RES (19)..(20)..(21)..(22): Xaa is A or G or absent
VPTKLSATSVLYYXXXXXXXXXLRKHREGMSVAEXGX

SEQ ID NO: 6143 - protein, 39 aa, Artificial Sequence
  Non-cyclic GFR-binding peptide
  MOD_RES (3)..(4)..(38): Xaa is C or S
  MOD_RES (18)..(19)..(20)..(21)..(22): Xaa is A or G
  MOD_RES (23)..(24)..(25)..(26): Xaa is A or G or absent
KAXXVPTELSPISMLYKXXXXXXXXXLKYHYEMVVEGXG

SEQ ID NO: 6144 - protein, 42 aa, Artificial Sequence
  Non-cyclic GFR-binding peptide
  MOD_RES (5)..(6)..(41): Xaa is C or S
  MOD_RES (20)..(21)..(22)..(23)..(24): Xaa is A or G
  MOD_RES (25)..(26)..(27)..(28): Xaa is A or G or absent
VGKAXXVPTKLSAISVLYLXXXXXXXXXLKNYQEGMSVAEXG

SEQ ID NO: 6145 - protein, 40 aa, Artificial Sequence
  Non-cyclic GFR-binding peptide
  MOD_RES (5)..(6)..(37)..(39): Xaa is C or S
SASPXXVSQDLSPISILYKIGKTPKILKYHYMIVKSXKXS

SEQ ID NO: 6146 - protein, 40 aa, Artificial Sequence
  Non-cyclic GFR-binding peptide
  MOD_RES (6)..(7)..(38)..(40): Xaa is C or S
ASASPXXVPQDLSAISILYLVGRTPKVLKNYQMVVKSXKX

SEQ ID NO: 6147 - protein, 40 aa, Artificial Sequence
  Non-cyclic GFR-binding peptide
  MOD_RES (2)..(3)..(38)..(40): Xaa is C or S
  MOD_RES (17)..(18)..(19)..(20)..(21): Xaa is A or G
  MOD_RES (22)..(23)..(24)..(25): Xaa is A or G or absent
AXXVPTKLSAISVLYLXXXXXXXXXLKNYQEGMSVAEXGX

SEQ ID NO: 6148 - protein, 35 aa, Artificial Sequence
  Non-cyclic GFR-binding peptide
  MOD_RES (1)..(2)..(35): Xaa is C or S
XXVPTKLSAISVLYLDDMGVPTLKNYQEGMSVAEX

SEQ ID NO: 6149 - protein, 36 aa, Artificial Sequence
  Non-cyclic GFR-binding peptide
  MOD_RES (35)..(35): Xaa is C or S
TQVQLNAISVLYFEIVRKKPIFLKKYRTLEDHLAXK

SEQ ID NO: 6150 - protein, 38 aa, Artificial Sequence
  Non-cyclic GFR-binding peptide
  MOD_RES (4)..(5)..(37): Xaa is C or S
PKPXXAPTKLSATSVLYYDDSSNVILRKHRNMVVRSXG

SEQ ID NO: 6151 - protein, 37 aa, Artificial Sequence
  Non-cyclic GFR-binding peptide
  MOD_RES (1)..(34)..(36): Xaa is C or S
  MOD_RES (15)..(16)..(17)..(18)..(19): Xaa is A or G
  MOD_RES (20)..(21)..(22)..(23): Xaa is A or G or absent
XVSQDLSAISILYLXXXXXXXXXLKNYQMIVKSXKXS

SEQ ID NO: 6152 - protein, 36 aa, Artificial Sequence
  Non-cyclic GFR-binding peptide
  MOD_RES (2)..(3): Xaa is C or S
  MOD_RES (17)..(18)..(19)..(20)..(21): Xaa is A or G
  MOD_RES (22)..(23)..(24)..(25): Xaa is A or G or absent
AXXAPTKLNAISVLYFXXXXXXXXXLKKYRNMVVKA

SEQ ID NO: 6153 - protein, 41 aa, Artificial Sequence
  Non-cyclic GFR-binding peptide
  MOD_RES (6)..(7)..(39)..(41): Xaa is C or S
SIPKAXXVPTELSATSMLYYDEYDKVVLRKHREMVVEGXGX

SEQ ID NO: 6154 - protein, 37 aa, Artificial Sequence
  Non-cyclic GFR-binding peptide
  MOD_RES (4)..(5)..(37): Xaa is C or S
PKAXXAPTKLNAISVLYFDSSNNVILKKYRNMVVKAX

SEQ ID NO: 6155 - protein, 35 aa, Artificial Sequence
  Non-cyclic GFR-binding peptide
  MOD_RES (1)..(2)..(33)..(35): Xaa is C or S
XXVPQDLSATSILYYVGRTPKVLRKHRMVVKSXKX

SEQ ID NO: 6156 - protein, 38 aa, Artificial Sequence
  Non-cyclic GFR-binding peptide
  MOD_RES (4)..(5)..(37): Xaa is C or S
PKAXXAPTKLSPISVLYKDSSNNVILKYHYNMVVKAXG

SEQ ID NO: 6157 - protein, 38 aa, Artificial Sequence
  Non-cyclic GFR-binding peptide
  MOD_RES (4)..(5): Xaa is C or S
  MOD_RES (19)..(20)..(21)..(22)..(23): Xaa is A or G
  MOD_RES (24)..(25)..(26)..(27): Xaa is A or G or absent
PKPXXAPTKLSPISVLYKXXXXXXXXXLKYHYNMVVRS

SEQ ID NO: 6158 - protein, 40 aa, Artificial Sequence
  Non-cyclic GFR-binding peptide
  MOD_RES (2)..(3)..(37)..(39): Xaa is C or S
  MOD_RES (17)..(18)..(19)..(20)..(21): Xaa is A or G
  MOD_RES (22)..(23)..(24)..(25): Xaa is A or G or absent
PXXAPTKLSPISVLYKXXXXXXXXXLKYHYNMVVRSXGXH

SEQ ID NO: 6159 - protein, 35 aa, Artificial Sequence
  Non-cyclic GFR-binding peptide
  MOD_RES (3)..(4): Xaa is C or S
KPXXAPTKLSAISVLYLDDSSNVILKNYQNMVVRS

SEQ ID NO: 6160 - protein, 38 aa, Artificial Sequence
  Non-cyclic GFR-binding peptide
  MOD_RES (4)..(5): Xaa is C or S
  MOD_RES (19)..(20)..(21)..(22)..(23): Xaa is A or G
  MOD_RES (24)..(25)..(26)..(27): Xaa is A or G or absent
PKPXXAPTKLSATSVLYYXXXXXXXXXLRKHRNMVVRS

SEQ ID NO: 6161 - protein, 34 aa, Artificial Sequence
  Non-cyclic GFR-binding peptide
  MOD_RES (31)..(33): Xaa is C or S
VPQDLSPISILYKVGRTPKVLKYHYMVVKSXKXS

SEQ ID NO: 6162 - protein, 38 aa, Artificial Sequence
  Non-cyclic GFR-binding peptide
  MOD_RES (3)..(4)..(35)..(37): Xaa is C or S
SPXXVPQDLSATSILYYVGRTPKVLRKHRMVVKSXKXS

SEQ ID NO: 6163 - protein, 38 aa, Artificial Sequence
  Non-cyclic GFR-binding peptide
  MOD_RES (4)..(5)..(38): Xaa is C or S
  MOD_RES (19)..(20)..(21)..(22)..(23): Xaa is A or G
  MOD_RES (24)..(25)..(26)..(27): Xaa is A or G or absent
AAPXXVPQALNAISILYFXXXXXXXXXLKKYRMIVRSX

SEQ ID NO: 6164 - protein, 32 aa, Artificial Sequence
  Non-cyclic GFR-binding peptide
  MOD_RES (14)..(15)..(16)..(17)..(18): Xaa is A or G
  MOD_RES (19)..(20)..(21)..(22): Xaa is A or G or absent
APTKLSPISVLYKXXXXXXXXXLKYHYNMVVK

SEQ ID NO: 6165 - protein, 41 aa, Artificial Sequence
  Non-cyclic GFR-binding peptide
  MOD_RES (7)..(39)..(41): Xaa is C or S
HVTKPTXAPTKLSATSVLYYDDSSNVILRKHRNMVVRSXGX

SEQ ID NO: 6166 - protein, 40 aa, Artificial Sequence
  Non-cyclic GFR-binding peptide
  MOD_RES (6)..(7)..(40): Xaa is C or S
  MOD_RES (21)..(22)..(23)..(24)..(25): Xaa is A or G
  MOD_RES (26)..(27)..(28)..(29): Xaa is A or G or absent
ASASPXXVSQDLSPISILYKXXXXXXXXXLKYHYMIVKSX

SEQ ID NO: 6167 - protein, 31 aa, Artificial Sequence
  Non-cyclic GFR-binding peptide
  MOD_RES (1)..(1): Xaa is C or S
XVPQALSAISILYLVGRKPKVLKNYQMIVRS

SEQ ID NO: 6168 - protein, 41 aa, Artificial Sequence
  Non-cyclic GFR-binding peptide
  MOD_RES (6)..(7)..(39)..(41): Xaa is C or S
TVPKPXXAPTQLSATSVLYYDDSSNVILRKHRNMVVRAXGX

SEQ ID NO: 6169 - protein, 39 aa, Artificial Sequence
  Non-cyclic GFR-binding peptide
  MOD_RES (6)..(38): Xaa is C or S
VTKPTXAPTKLSATSVLYYDDSSNVILRKHRNMVVRSXG

SEQ ID NO: 6170 - protein, 31 aa, Artificial Sequence
  Non-cyclic GFR-binding peptide
  MOD_RES (1)..(1): Xaa is C or S
XAPTKLSAISVLYLDDSSNVILKNYQNMVVR

SEQ ID NO: 6171 - protein, 41 aa, Artificial Sequence
  Non-cyclic GFR-binding peptide
  MOD_RES (6)..(38)..(40): Xaa is C or S
VTKPTXAPTKLSATSVLYYDDSSNVILRKHRNMVVRSXGXH

SEQ ID NO: 6172 - protein, 35 aa, Artificial Sequence
  Non-cyclic GFR-binding peptide
  MOD_RES (4)..(5): Xaa is C or S
PKPXXAPTKLSPISVLYKDDSSNVILKYHYNMVVR

SEQ ID NO: 6173 - protein, 39 aa, Artificial Sequence
  Non-cyclic GFR-binding peptide
  MOD_RES (3)..(4)..(37)..(39): Xaa is C or S
  MOD_RES (18)..(19)..(20)..(21)..(22): Xaa is A or G
  MOD_RES (23)..(24)..(25)..(26): Xaa is A or G or absent
APXXVPQALSATSILYYXXXXXXXXXLRKHRMIVRSXKX

SEQ ID NO: 6174 - protein, 37 aa, Artificial Sequence
  Non-cyclic GFR-binding peptide
  MOD_RES (3)..(37): Xaa is C or S
  MOD_RES (17)..(18)..(19)..(20)..(21): Xaa is A or G
  MOD_RES (22)..(23)..(24)..(25): Xaa is A or G or absent
PTXAPTKLSPISVLYKXXXXXXXXXLKYHYNMVVRSX

SEQ ID NO: 6175 - protein, 35 aa, Artificial Sequence
  Non-cyclic GFR-binding peptide
  MOD_RES (32)..(34): Xaa is C or S
APTKLSATSVLYYDDSSNVILRKHRNMVVRSXGXH

SEQ ID NO: 6176 - protein, 36 aa, Artificial Sequence
  Non-cyclic GFR-binding peptide
  MOD_RES (34)..(36): Xaa is C or S
  MOD_RES (14)..(15)..(16)..(17)..(18): Xaa is A or G
  MOD_RES (19)..(20)..(21)..(22): Xaa is A or G or absent
VPTELSATSMLYYXXXXXXXXXLRKHREMVVEGXGX

SEQ ID NO: 6177 - protein, 34 aa, Artificial Sequence
  Non-cyclic GFR-binding peptide
  MOD_RES (2)..(3): Xaa is C or S
AXXAPTKLSAISVLYLDSSNNVILKNYQNMVVKA

SEQ ID NO: 6178 - protein, 36 aa, Artificial Sequence
  Non-cyclic GFR-binding peptide
  MOD_RES (3)..(4): Xaa is C or S
  MOD_RES (18)..(19)..(20)..(21)..(22): Xaa is A or G
  MOD_RES (23)..(24)..(25)..(26): Xaa is A or G or absent
SPXXVPQDLSAISILYLXXXXXXXXXLKNYQMVVKS

SEQ ID NO: 6179 - protein, 41 aa, Artificial Sequence
  Non-cyclic GFR-binding peptide
  MOD_RES (5)..(6)..(38)..(40): Xaa is C or S
VPKPXXAPTQLSAISVLYLDDSSNVILKNYQNMVVRAXGXH

SEQ ID NO: 6180 - protein, 32 aa, Artificial Sequence
  Non-cyclic GFR-binding peptide
  MOD_RES (14)..(15)..(16)..(17)..(18): Xaa is A or G
  MOD_RES (19)..(20)..(21)..(22): Xaa is A or G or absent
APTKLSPISVLYKXXXXXXXXXLKYHYNMVVR

SEQ ID NO: 6181 - protein, 37 aa, Artificial Sequence
  Non-cyclic GFR-binding peptide
  MOD_RES (1)..(2)..(36): Xaa is C or S
  MOD_RES (16)..(17)..(18)..(19)..(20): Xaa is A or G
  MOD_RES (21)..(22)..(23)..(24): Xaa is A or G or absent
XXAPTQLSATSVLYYXXXXXXXXXLRKHRNMVVRAXG

SEQ ID NO: 6182 - protein, 37 aa, Artificial Sequence
  Non-cyclic GFR-binding peptide
  MOD_RES (3)..(4)..(37): Xaa is C or S
KAXXVPTKLSATSVLYYDDMGVPTLRKHREGMSVAEX

SEQ ID NO: 6183 - protein, 37 aa, Artificial Sequence
  Non-cyclic GFR-binding peptide
  MOD_RES (3)..(3): Xaa is C or S
  MOD_RES (19)..(20)..(21)..(22)..(23): Xaa is A or G
  MOD_RES (24)..(25)..(26)..(27): Xaa is A or G or absent
VQXRPTQVQLNAISVLYFXXXXXXXXXLKKYRTLEDH

SEQ ID NO: 6184 - protein, 32 aa, Artificial Sequence
  Non-cyclic GFR-binding peptide
  MOD_RES (1)..(2): Xaa is C or S
XXVPTELSPISMLYKDEYDKVVLKYHYEMVVE

SEQ ID NO: 6185 - protein, 40 aa, Artificial Sequence
  Non-cyclic GFR-binding peptide
  MOD_RES (6)..(7)..(39): Xaa is C or S
TVPKPXXAPTQLSPISVLYKDDSSNVILKYHYNMVVRAXG

SEQ ID NO: 6186 - protein, 33 aa, Artificial Sequence
  Non-cyclic GFR-binding peptide
  MOD_RES (1)..(1): Xaa is C or S
  MOD_RES (15)..(16)..(17)..(18)..(19): Xaa is A or G
  MOD_RES (20)..(21)..(22)..(23): Xaa is A or G or absent
XVPQALSPISILYKXXXXXXXXXLKYHYMIVRS

SEQ ID NO: 6187 - protein, 38 aa, Artificial Sequence
  Non-cyclic GFR-binding peptide
  MOD_RES (1)..(2)..(35)..(37): Xaa is C or S
  MOD_RES (16)..(17)..(18)..(19)..(20): Xaa is A or G
  MOD_RES (21)..(22)..(23)..(24): Xaa is A or G or absent
XXVPQALSAISILYLXXXXXXXXXLKNYQMIVRSXKXS

SEQ ID NO: 6188 - protein, 36 aa, Artificial Sequence
  Non-cyclic GFR-binding peptide
  MOD_RES (3)..(4): Xaa is C or S
  MOD_RES (18)..(19)..(20)..(21)..(22): Xaa is A or G
  MOD_RES (23)..(24)..(25)..(26): Xaa is A or G or absent
SPXXVSQDLSPISILYKXXXXXXXXXLKYHYMIVKS

SEQ ID NO: 6189 - protein, 38 aa, Artificial Sequence
  Non-cyclic GFR-binding peptide
  MOD_RES (3)..(3): Xaa is C or S
  MOD_RES (19)..(20)..(21)..(22)..(23): Xaa is A or G
  MOD_RES (24)..(25)..(26)..(27): Xaa is A or G or absent
VQXRPTQVQLSATSVLYYXXXXXXXXXLRKHRTLEDHL

SEQ ID NO: 6190 - protein, 40 aa, Artificial Sequence
  Non-cyclic GFR-binding peptide
  MOD_RES (6)..(7): Xaa is C or S
  MOD_RES (21)..(22)..(23)..(24)..(25): Xaa is A or G
  MOD_RES (26)..(27)..(28)..(29): Xaa is A or G or absent
SIPKAXXVPTELSPISMLYKXXXXXXXXXLKYHYEMVVEG

SEQ ID NO: 6191 - protein, 38 aa, Artificial Sequence
  Non-cyclic GFR-binding peptide
  MOD_RES (3)..(3): Xaa is C or S
  MOD_RES (19)..(20)..(21)..(22)..(23): Xaa is A or G
  MOD_RES (24)..(25)..(26)..(27): Xaa is A or G or absent
VQXRPTQVQLSPISVLYKXXXXXXXXXLKYHYTLEDHL

SEQ ID NO: 6192 - protein, 39 aa, Artificial Sequence
  Non-cyclic GFR-binding peptide
  MOD_RES (3)..(4)..(37)..(39): Xaa is C or S
  MOD_RES (18)..(19)..(20)..(21)..(22): Xaa is A or G
  MOD_RES (23)..(24)..(25)..(26): Xaa is A or G or absent
SPXXVSQDLSATSILYYXXXXXXXXXLRKHRMIVKSXKX

SEQ ID NO: 6193 - protein, 40 aa, Artificial Sequence
  Non-cyclic GFR-binding peptide
  MOD_RES (6)..(7)..(38)..(40): Xaa is C or S
ASAAPXXVPQALNAISILYFVGRKPKVLKKYRMIVRSXKX

SEQ ID NO: 6194 - protein, 39 aa, Artificial Sequence
  Non-cyclic GFR-binding peptide
  MOD_RES (6)..(6): Xaa is C or S
  MOD_RES (20)..(21)..(22)..(23)..(24): Xaa is A or G
  MOD_RES (25)..(26)..(27)..(28): Xaa is A or G or absent
VTKPTXAPTKLSAISVLYLXXXXXXXXXLKNYQNMVVRS

SEQ ID NO: 6195 - protein, 36 aa, Artificial Sequence
  Non-cyclic GFR-binding peptide
  MOD_RES (4)..(5)..(36): Xaa is C or S
AAPXXVPQALSPISILYKVGRKPKVLKYHYMIVRSX

SEQ ID NO: 6196 - protein, 37 aa, Artificial Sequence
  Non-cyclic GFR-binding peptide
  MOD_RES (34)..(36): Xaa is C or S
  MOD_RES (14)..(15)..(16)..(17)..(18): Xaa is A or G
  MOD_RES (19)..(20)..(21)..(22): Xaa is A or G or absent
APTKLSPISVLYKXXXXXXXXXLKYHYNMVVRSXGXH

SEQ ID NO: 6197 - protein, 41 aa, Artificial Sequence
  Non-cyclic GFR-binding peptide
  MOD_RES (2)..(39)..(41): Xaa is C or S
QXRPTQVQLSAISVLYLEIVRKKPIFLKNYQTLEDHLAXKX

SEQ ID NO: 6198 - protein, 32 aa, Artificial Sequence
  Non-cyclic GFR-binding peptide
  MOD_RES (1)..(1): Xaa is C or S
XAPTQLSATSVLYYDDSSNVILRKHRNMVVRA

SEQ ID NO: 6199 - protein, 33 aa, Artificial Sequence
  Non-cyclic GFR-binding peptide
  MOD_RES (1)..(2)..(33): Xaa is C or S
XXVPQDLNAISILYFVGRTPKVLKKYRMVVKSX

SEQ ID NO: 6200 - protein, 38 aa, Artificial Sequence
  Non-cyclic GFR-binding peptide
  MOD_RES (5)..(6): Xaa is C or S
  MOD_RES (20)..(21)..(22)..(23)..(24): Xaa is A or G
  MOD_RES (25)..(26)..(27)..(28): Xaa is A or G or absent
VPKPXXAPTKLSPISVLYKXXXXXXXXXLKYHYNMVVR

SEQ ID NO: 6201 - protein, 37 aa, Artificial Sequence
  Non-cyclic GFR-binding peptide
  MOD_RES (2)..(2): Xaa is C or S
QXRPTQVQLSATSVLYYEIVRKKPIFLRKHRTLEDHL

SEQ ID NO: 6202 - protein, 30 aa, Artificial Sequence
  Non-cyclic GFR-binding peptide
APTKLSAISVLYLDSSNNVILKNYQNMVVK

SEQ ID NO: 6203 - protein, 38 aa, Artificial Sequence
  Non-cyclic GFR-binding peptide
  MOD_RES (1)..(35)..(37): Xaa is C or S
  MOD_RES (15)..(16)..(17)..(18)..(19): Xaa is A or G
  MOD_RES (20)..(21)..(22)..(23): Xaa is A or G or absent
XAPTQLSAISVLYLXXXXXXXXXLKNYQNMVVRAXGXH

SEQ ID NO: 6204 - protein, 38 aa, Artificial Sequence
  Non-cyclic GFR-binding peptide
  MOD_RES (3)..(4)..(38): Xaa is C or S
  MOD_RES (18)..(19)..(20)..(21)..(22): Xaa is A or G
  MOD_RES (23)..(24)..(25)..(26): Xaa is A or G or absent
KPXXAPTQLSAISVLYLXXXXXXXXXLKNYQNMVVRAX

SEQ ID NO: 6205 - protein, 37 aa, Artificial Sequence
  Non-cyclic GFR-binding peptide
  MOD_RES (2)..(3)..(34)..(36): Xaa is C or S
PXXVPQALSATSILYYVGRKPKVLRKHRMIVRSXKXS

SEQ ID NO: 6206 - protein, 37 aa, Artificial Sequence
  Non-cyclic GFR-binding peptide
  MOD_RES (3)..(4)..(36): Xaa is C or S
KAXXVPTELSPISMLYKDEYDKVVLKYHYEMVVEGXG

SEQ ID NO: 6207 - protein, 39 aa, Artificial Sequence
  Non-cyclic GFR-binding peptide
  MOD_RES (5)..(6)..(38): Xaa is C or S
IPKAXXVPTELSPISMLYKDEYDKVVLKYHYEMVVEGXG

SEQ ID NO: 6208 - protein, 35 aa, Artificial Sequence
  Non-cyclic GFR-binding peptide
  MOD_RES (1)..(2)..(35): Xaa is C or S
  MOD_RES (16)..(17)..(18)..(19)..(20): Xaa is A or G
  MOD_RES (21)..(22)..(23)..(24): Xaa is A or G or absent
XXVPQALNAISILYFXXXXXXXXXLKKYRMIVRSX

SEQ ID NO: 6209 - protein, 36 aa, Artificial Sequence
  Non-cyclic GFR-binding peptide
  MOD_RES (4)..(4): Xaa is C or S
  MOD_RES (18)..(19)..(20)..(21)..(22): Xaa is A or G
  MOD_RES (23)..(24)..(25)..(26): Xaa is A or G or absent
KPTXAPTKLSAISVLYLXXXXXXXXXLKNYQNMVVR

SEQ ID NO: 6210 - protein, 36 aa, Artificial Sequence
  Non-cyclic GFR-binding peptide
  MOD_RES (1)..(33)..(35): Xaa is C or S
XVPTELSPISMLYKDENEKVVLKYHYDMVVEGXGXR

SEQ ID NO: 6211 - protein, 39 aa, Artificial Sequence
  Non-cyclic GFR-binding peptide
  MOD_RES (4)..(5)..(37)..(39): Xaa is C or S
PKPXXAPTQLSATSVLYYDDSSNVILRKHRNMVVRAXGX

SEQ ID NO: 6212 - protein, 41 aa, Artificial Sequence
  Non-cyclic GFR-binding peptide
  MOD_RES (4)..(5)..(39)..(41): Xaa is C or S
  MOD_RES (19)..(20)..(21)..(22)..(23): Xaa is A or G
  MOD_RES (24)..(25)..(26)..(27): Xaa is A or G or absent
PKAXXVPTELSATSMLYYXXXXXXXXXLRKHRDMVVEGXGX

SEQ ID NO: 6213 - protein, 34 aa, Artificial Sequence
  Non-cyclic GFR-binding peptide
  MOD_RES (33)..(33): Xaa is C or S
VPTKLSATSVLYYDDMGVPTLRKHREGMSVAEXG

SEQ ID NO: 6214 - protein, 39 aa, Artificial Sequence
  Non-cyclic GFR-binding peptide
  MOD_RES (3)..(4)..(38): Xaa is C or S
  MOD_RES (18)..(19)..(20)..(21)..(22): Xaa is A or G
  MOD_RES (23)..(24)..(25)..(26): Xaa is A or G or absent
KAXXVPTELSPISMLYKXXXXXXXXXLKYHYDMVVEGXG

SEQ ID NO: 6215 - protein, 33 aa, Artificial Sequence
  Non-cyclic GFR-binding peptide
  MOD_RES (32)..(32): Xaa is C or S
VPTELNAISMLYFDEYDKVVLKKYREMVVEGXG

SEQ ID NO: 6216 - protein, 36 aa, Artificial Sequence
  Non-cyclic GFR-binding peptide
RPTQVQLNAISVLYFEIVRKKPIFLKKYRTLEDHLA

SEQ ID NO: 6217 - protein, 35 aa, Artificial Sequence
  Non-cyclic GFR-binding peptide
  MOD_RES (3)..(4)..(35): Xaa is C or S
APXXVPQALSPISILYKVGRKPKVLKYHYMIVRSX

SEQ ID NO: 6218 - protein, 34 aa, Artificial Sequence
  Non-cyclic GFR-binding peptide
  MOD_RES (2)..(3): Xaa is C or S
PXXAPTKLSATSVLYYDDSSNVILRKHRNMVVRS

SEQ ID NO: 6219 - protein, 38 aa, Artificial Sequence
  Non-cyclic GFR-binding peptide
  MOD_RES (4)..(5): Xaa is C or S
  MOD_RES (19)..(20)..(21)..(22)..(23): Xaa is A or G
  MOD_RES (24)..(25)..(26)..(27): Xaa is A or G or absent
PKPXXAPTQLSAISVLYLXXXXXXXXXLKNYQNMVVRA

SEQ ID NO: 6220 - protein, 37 aa, Artificial Sequence
  Non-cyclic GFR-binding peptide
  MOD_RES (4)..(5): Xaa is C or S
  MOD_RES (19)..(20)..(21)..(22)..(23): Xaa is A or G
  MOD_RES (24)..(25)..(26)..(27): Xaa is A or G or absent
PKPXXAPTQLSPISVLYKXXXXXXXXXLKYHYNMVVR

SEQ ID NO: 6221 - protein, 43 aa, Artificial Sequence
  Non-cyclic GFR-binding peptide
  MOD_RES (6)..(7)..(40)..(42): Xaa is C or S
  MOD_RES (21)..(22)..(23)..(24)..(25): Xaa is A or G
  MOD_RES (26)..(27)..(28)..(29): Xaa is A or G or absent
ASASPXXVSQDLSAISILYLXXXXXXXXXLKNYQMIVKSXKXS

SEQ ID NO: 6222 - protein, 35 aa, Artificial Sequence
  Non-cyclic GFR-binding peptide
  MOD_RES (1)..(2)..(35): Xaa is C or S
  MOD_RES (16)..(17)..(18)..(19)..(20): Xaa is A or G
  MOD_RES (21)..(22)..(23)..(24): Xaa is A or G or absent
XXVSQDLSATSILYYXXXXXXXXXLRKHRMIVKSX

SEQ ID NO: 6223 - protein, 38 aa, Artificial Sequence
  Non-cyclic GFR-binding peptide
  MOD_RES (5)..(37): Xaa is C or S
TKPTXAPTKLSATSVLYYDDSSNVILRKHRNMVVRSXG

SEQ ID NO: 6224 - protein, 33 aa, Artificial Sequence
  Non-cyclic GFR-binding peptide
  MOD_RES (2)..(3): Xaa is C or S
PXXVSQDLSATSILYYIGKTPKILRKHRMIVKS

SEQ ID NO: 6225 - protein, 37 aa, Artificial Sequence
  Non-cyclic GFR-binding peptide
  MOD_RES (6)..(6): Xaa is C or S
VTKPTXAPTKLSATSVLYYDDSSNVILRKHRNMVVRS

SEQ ID NO: 6226 - protein, 40 aa, Artificial Sequence
  Non-cyclic GFR-binding peptide
  MOD_RES (3)..(4)..(37)..(39): Xaa is C or S
  MOD_RES (18)..(19)..(20)..(21)..(22): Xaa is A or G
  MOD_RES (23)..(24)..(25)..(26): Xaa is A or G or absent
SPXXVPQDLNAISILYFXXXXXXXXXLKKYRMVVKSXKXS

SEQ ID NO: 6227 - protein, 35 aa, Artificial Sequence
  Non-cyclic GFR-binding peptide
  MOD_RES (1)..(33)..(35): Xaa is C or S
XAPTKLSAISVLYLDDSSNVILKNYQNMVVRSXGX

SEQ ID NO: 6228 - protein, 35 aa, Artificial Sequence
  Non-cyclic GFR-binding peptide
  MOD_RES (1)..(2): Xaa is C or S
  MOD_RES (16)..(17)..(18)..(19)..(20): Xaa is A or G
  MOD_RES (21)..(22)..(23)..(24): Xaa is A or G or absent
XXAPTQLSATSVLYYXXXXXXXXXLRKHRNMVVRA

SEQ ID NO: 6229 - protein, 35 aa, Artificial Sequence
  Non-cyclic GFR-binding peptide
  MOD_RES (3)..(4): Xaa is C or S
KPXXAPTQLSAISVLYLDDSSNVILKNYQNMVVRA

SEQ ID NO: 6230 - protein, 38 aa, Artificial Sequence
  Non-cyclic GFR-binding peptide
  MOD_RES (3)..(4): Xaa is C or S
  MOD_RES (18)..(19)..(20)..(21)..(22): Xaa is A or G
  MOD_RES (23)..(24)..(25)..(26): Xaa is A or G or absent
KAXXVPTKLSAISVLYLXXXXXXXXXLKNYQEGMSVAE

SEQ ID NO: 6231 - protein, 39 aa, Artificial Sequence
  Non-cyclic GFR-binding peptide
  MOD_RES (4)..(4): Xaa is C or S
NVQXRPTQVQLSPISVLYKEIVRKKPIFLKYHYTLEDHL

SEQ ID NO: 6232 - protein, 35 aa, Artificial Sequence
  Non-cyclic GFR-binding peptide
  MOD_RES (1)..(2)..(35): Xaa is C or S
  MOD_RES (16)..(17)..(18)..(19)..(20): Xaa is A or G
  MOD_RES (21)..(22)..(23)..(24): Xaa is A or G or absent
XXVSQDLSAISILYLXXXXXXXXXLKNYQMIVKSX

SEQ ID NO: 6233 - protein, 40 aa, Artificial Sequence
  Non-cyclic GFR-binding peptide
  MOD_RES (5)..(6)..(37)..(39): Xaa is C or S
SAAPXXVPQALSATSILYYVGRKPKVLRKHRMIVRSXKXS

SEQ ID NO: 6234 - protein, 35 aa, Artificial Sequence
  Non-cyclic GFR-binding peptide
  MOD_RES (2)..(3)..(34): Xaa is C or S
PXXVSQDLSAISILYLIGKTPKILKNYQMIVKSXK

SEQ ID NO: 6235 - protein, 38 aa, Artificial Sequence
  Non-cyclic GFR-binding peptide
  MOD_RES (3)..(4): Xaa is C or S
  MOD_RES (18)..(19)..(20)..(21)..(22): Xaa is A or G
  MOD_RES (23)..(24)..(25)..(26): Xaa is A or G or absent
KAXXVPTKLSATSVLYYXXXXXXXXXLRKHREGMSVAE

SEQ ID NO: 6236 - protein, 45 aa, Artificial Sequence
  Non-cyclic GFR-binding peptide
  MOD_RES (5)..(42)..(44): Xaa is C or S
RNVQXRPTQVQLSATSVLYYEIVRKKPIFLRKHRTLEDHLAXKXE

SEQ ID NO: 6237 - protein, 41 aa, Artificial Sequence
  Non-cyclic GFR-binding peptide
  MOD_RES (5)..(6)..(38)..(40): Xaa is C or S
IPKAXXVPTELSPISMLYKDEYDKVVLKYHYEMVVEGXGXR

SEQ ID NO: 6238 - protein, 42 aa, Artificial Sequence
  Non-cyclic GFR-binding peptide
  MOD_RES (6)..(7)..(39)..(41): Xaa is C or S
KIPKAXXVPTELSATSMLYYDENEKVVLRKHRDMVVEGXGXR

SEQ ID NO: 6239 - protein, 36 aa, Artificial Sequence
  Non-cyclic GFR-binding peptide
  MOD_RES (2)..(3)..(36): Xaa is C or S
  MOD_RES (17)..(18)..(19)..(20)..(21): Xaa is A or G
  MOD_RES (22)..(23)..(24)..(25): Xaa is A or G or absent
PXXVPQDLSPISILYKXXXXXXXXXLKYHYMVVKSX

SEQ ID NO: 6240 - protein, 39 aa, Artificial Sequence
  Non-cyclic GFR-binding peptide
  MOD_RES (4)..(5)..(38): Xaa is C or S
  MOD_RES (19)..(20)..(21)..(22)..(23): Xaa is A or G
  MOD_RES (24)..(25)..(26)..(27): Xaa is A or G or absent
ASPXXVPQDLSAISILYLXXXXXXXXXLKNYQMVVKSXK

SEQ ID NO: 6241 - protein, 40 aa, Artificial Sequence
  Non-cyclic GFR-binding peptide
  MOD_RES (2)..(39): Xaa is C or S
QXRPTQVQLSPISVLYKEIVRKKPIFLKYHYTLEDHLAXK

SEQ ID NO: 6242 - protein, 38 aa, Artificial Sequence
  Non-cyclic GFR-binding peptide
  MOD_RES (4)..(36)..(38): Xaa is C or S
KPTXAPTKLSAISVLYLDDSSNVILKNYQNMVVRSXGX

SEQ ID NO: 6243 - protein, 35 aa, Artificial Sequence
  Non-cyclic GFR-binding peptide
  MOD_RES (3)..(4): Xaa is C or S
KAXXVPTELNAISMLYFDEYDKVVLKKYREMVVEG

SEQ ID NO: 6244 - protein, 37 aa, Artificial Sequence
  Non-cyclic GFR-binding peptide
  MOD_RES (36)..(36): Xaa is C or S
PTQVQLSPISVLYKEIVRKKPIFLKYHYTLEDHLAXK

SEQ ID NO: 6245 - protein, 37 aa, Artificial Sequence
  Non-cyclic GFR-binding peptide
  MOD_RES (4)..(5)..(36): Xaa is C or S
ASPXXVPQDLSATSILYYVGRTPKVLRKHRMVVKSXK

SEQ ID NO: 6246 - protein, 37 aa, Artificial Sequence
  Non-cyclic GFR-binding peptide
  MOD_RES (37)..(37): Xaa is C or S
  MOD_RES (16)..(17)..(18)..(19)..(20): Xaa is A or G
  MOD_RES (21)..(22)..(23)..(24): Xaa is A or G or absent
RPTQVQLSPISVLYKXXXXXXXXXLKYHYTLEDHLAX

SEQ ID NO: 6247 - protein, 37 aa, Artificial Sequence
  Non-cyclic GFR-binding peptide
  MOD_RES (4)..(5)..(36): Xaa is C or S
ASPXXVPQDLSAISILYLVGRTPKVLKNYQMVVKSXK

SEQ ID NO: 6248 - protein, 35 aa, Artificial Sequence
  Non-cyclic GFR-binding peptide
  MOD_RES (1)..(2): Xaa is C or S
  MOD_RES (16)..(17)..(18)..(19)..(20): Xaa is A or G
  MOD_RES (21)..(22)..(23)..(24): Xaa is A or G or absent
XXAPTKLSPISVLYKXXXXXXXXXLKYHYNMVVRS

SEQ ID NO: 6249 - protein, 41 aa, Artificial Sequence
  Non-cyclic GFR-binding peptide
  MOD_RES (6)..(7)..(38)..(40): Xaa is C or S
ASASPXXVPQDLSAISILYLVGRTPKVLKNYQMVVKSXKXS

SEQ ID NO: 6250 - protein, 41 aa, Artificial Sequence
  Non-cyclic GFR-binding peptide
  MOD_RES (5)..(5): Xaa is C or S
  MOD_RES (21)..(22)..(23)..(24)..(25): Xaa is A or G
  MOD_RES (26)..(27)..(28)..(29): Xaa is A or G or absent
RNVQXRPTQVQLSPISVLYKXXXXXXXXXLKYHYTLEDHLA

SEQ ID NO: 6251 - protein, 44 aa, Artificial Sequence
  Non-cyclic GFR-binding peptide
  MOD_RES (6)..(7)..(41)..(43): Xaa is C or S
  MOD_RES (21)..(22)..(23)..(24)..(25): Xaa is A or G
  MOD_RES (26)..(27)..(28)..(29): Xaa is A or G or absent
AVPKAXXAPTKLSAISVLYLXXXXXXXXXLKNYQNMVVKAXGXH

SEQ ID NO: 6252 - protein, 39 aa, Artificial Sequence
  Non-cyclic GFR-binding peptide
  MOD_RES (4)..(5)..(39): Xaa is C or S
  MOD_RES (19)..(20)..(21)..(22)..(23): Xaa is A or G
  MOD_RES (24)..(25)..(26)..(27): Xaa is A or G or absent
PKPXXAPTKLSAISVLYLXXXXXXXXXLKNYQNMVVRSX

SEQ ID NO: 6253 - protein, 38 aa, Artificial Sequence
  Non-cyclic GFR-binding peptide
  MOD_RES (2)..(3)..(36)..(38): Xaa is C or S
  MOD_RES (17)..(18)..(19)..(20)..(21): Xaa is A or G
  MOD_RES (22)..(23)..(24)..(25): Xaa is A or G or absent
PXXVPQDLNAISILYFXXXXXXXXXLKKYRMVVKSXKX

SEQ ID NO: 6254 - protein, 33 aa, Artificial Sequence
  Non-cyclic GFR-binding peptide
  MOD_RES (1)..(2): Xaa is C or S
XXAPTKLSPISVLYKDSSNNVILKYHYNMVVKA

SEQ ID NO: 6255 - protein, 38 aa, Artificial Sequence
  Non-cyclic GFR-binding peptide
  MOD_RES (1)..(2)..(36)..(38): Xaa is C or S
  MOD_RES (16)..(17)..(18)..(19)..(20): Xaa is A or G
  MOD_RES (21)..(22)..(23)..(24): Xaa is A or G or absent
XXVPTELSPISMLYKXXXXXXXXXLKYHYEMVVEGXGX

SEQ ID NO: 6256 - protein, 40 aa, Artificial Sequence
  Non-cyclic GFR-binding peptide
  MOD_RES (2)..(3)..(37)..(39): Xaa is C or S
  MOD_RES (17)..(18)..(19)..(20)..(21): Xaa is A or G
  MOD_RES (22)..(23)..(24)..(25): Xaa is A or G or absent
AXXAPTKLNAISVLYFXXXXXXXXXLKKYRNMVVKAXGXH

SEQ ID NO: 6257 - protein, 40 aa, Artificial Sequence
  Non-cyclic GFR-binding peptide
  MOD_RES (4)..(38)..(40): Xaa is C or S
  MOD_RES (18)..(19)..(20)..(21)..(22): Xaa is A or G
  MOD_RES (23)..(24)..(25)..(26): Xaa is A or G or absent
KPTXAPTKLSAISVLYLXXXXXXXXXLKNYQNMVVRSXGX

SEQ ID NO: 6258 - protein, 36 aa, Artificial Sequence
  Non-cyclic GFR-binding peptide
  MOD_RES (3)..(35): Xaa is C or S
PTXAPTKLSATSVLYYDDSSNVILRKHRNMVVRSXG

SEQ ID NO: 6259 - protein, 32 aa, Artificial Sequence
  Non-cyclic GFR-binding peptide
  MOD_RES (14)..(15)..(16)..(17)..(18): Xaa is A or G
  MOD_RES (19)..(20)..(21)..(22): Xaa is A or G or absent
VPTELNAISMLYFXXXXXXXXXLKKYRDMVVE

SEQ ID NO: 6260 - protein, 37 aa, Artificial Sequence
  Non-cyclic GFR-binding peptide
  MOD_RES (4)..(5): Xaa is C or S
  MOD_RES (19)..(20)..(21)..(22)..(23): Xaa is A or G
  MOD_RES (24)..(25)..(26)..(27): Xaa is A or G or absent
ASPXXVSQDLSPISILYKXXXXXXXXXLKYHYMIVKS

SEQ ID NO: 6261 - protein, 41 aa, Artificial Sequence
  Non-cyclic GFR-binding peptide
  MOD_RES (4)..(41): Xaa is C or S
  MOD_RES (20)..(21)..(22)..(23)..(24): Xaa is A or G
  MOD_RES (25)..(26)..(27)..(28): Xaa is A or G or absent
NVQXRPTQVQLSATSVLYYXXXXXXXXXLRKHRTLEDHLAX

SEQ ID NO: 6262 - protein, 40 aa, Artificial Sequence
  Non-cyclic GFR-binding peptide
  MOD_RES (6)..(7)..(39): Xaa is C or S
YVPKPXXAPTKLSPISVLYKDDSSNVILKYHYNMVVRSXG

SEQ ID NO: 6263 - protein, 39 aa, Artificial Sequence
  Non-cyclic GFR-binding peptide
  MOD_RES (6)..(7)..(38): Xaa is C or S
ASASPXXVPQDLSPISILYKVGRTPKVLKYHYMVVKSXK

SEQ ID NO: 6264 - protein, 42 aa, Artificial Sequence
  Non-cyclic GFR-binding peptide
  MOD_RES (2)..(39)..(41): Xaa is C or S
  MOD_RES (18)..(19)..(20)..(21)..(22): Xaa is A or G
  MOD_RES (23)..(24)..(25)..(26): Xaa is A or G or absent
QXRPTQVQLSAISVLYLXXXXXXXXXLKNYQTLEDHLAXKXE

SEQ ID NO: 6265 - protein, 45 aa, Artificial Sequence
  Non-cyclic GFR-binding peptide
  MOD_RES (5)..(42)..(44): Xaa is C or S
  MOD_RES (21)..(22)..(23)..(24)..(25): Xaa is A or G
  MOD_RES (26)..(27)..(28)..(29): Xaa is A or G or absent
RNVQXRPTQVQLSAISVLYLXXXXXXXXXLKNYQTLEDHLAXKXE

SEQ ID NO: 6266 - protein, 36 aa, Artificial Sequence
  Non-cyclic GFR-binding peptide
  MOD_RES (34)..(36): Xaa is C or S
  MOD_RES (14)..(15)..(16)..(17)..(18): Xaa is A or G
  MOD_RES (19)..(20)..(21)..(22): Xaa is A or G or absent
APTKLSATSVLYYXXXXXXXXXLRKHRNMVVRSXGX

SEQ ID NO: 6267 - protein, 38 aa, Artificial Sequence
  Non-cyclic GFR-binding peptide
  MOD_RES (5)..(5): Xaa is C or S
  MOD_RES (19)..(20)..(21)..(22)..(23): Xaa is A or G
  MOD_RES (24)..(25)..(26)..(27): Xaa is A or G or absent
TKPTXAPTKLSATSVLYYXXXXXXXXXLRKHRNMVVRS

SEQ ID NO: 6268 - protein, 39 aa, Artificial Sequence
  Non-cyclic GFR-binding peptide
  MOD_RES (6)..(7)..(39): Xaa is C or S
YVPKPXXAPTKLSPISVLYKDDSSNVILKYHYNMVVRSX

SEQ ID NO: 6269 - protein, 35 aa, Artificial Sequence
  Non-cyclic GFR-binding peptide
  MOD_RES (34)..(34): Xaa is C or S
  MOD_RES (14)..(15)..(16)..(17)..(18): Xaa is A or G
  MOD_RES (19)..(20)..(21)..(22): Xaa is A or G or absent
APTKLSPISVLYKXXXXXXXXXLKYHYNMVVKAXG

SEQ ID NO: 6270 - protein, 31 aa, Artificial Sequence
  Non-cyclic GFR-binding peptide
  MOD_RES (1)..(1): Xaa is C or S
XVSQDLNAISILYFIGKTPKILKKYRMIVKS

SEQ ID NO: 6271 - protein, 41 aa, Artificial Sequence
  Non-cyclic GFR-binding peptide
  MOD_RES (4)..(5)..(40): Xaa is C or S
  MOD_RES (19)..(20)..(21)..(22)..(23): Xaa is A or G
  MOD_RES (24)..(25)..(26)..(27): Xaa is A or G or absent
GKAXXVPTKLNAISVLYFXXXXXXXXXLKKYREGMSVAEXG

SEQ ID NO: 6272 - protein, 40 aa, Artificial Sequence
  Non-cyclic GFR-binding peptide
  MOD_RES (4)..(5)..(38)..(40): Xaa is C or S
  MOD_RES (19)..(20)..(21)..(22)..(23): Xaa is A or G
  MOD_RES (24)..(25)..(26)..(27): Xaa is A or G or absent
ASPXXVSQDLSATSILYYXXXXXXXXXLRKHRMIVKSXKX

SEQ ID NO: 6273 - protein, 32 aa, Artificial Sequence
  Non-cyclic GFR-binding peptide
  MOD_RES (1)..(2): Xaa is C or S
XXVSQDLSATSILYYIGKTPKILRKHRMIVKS

SEQ ID NO: 6274 - protein, 34 aa, Artificial Sequence
  Non-cyclic GFR-binding peptide
  MOD_RES (1)..(2): Xaa is C or S
  MOD_RES (16)..(17)..(18)..(19)..(20): Xaa is A or G
  MOD_RES (21)..(22)..(23)..(24): Xaa is A or G or absent
XXVSQDLNAISILYFXXXXXXXXXLKKYRMIVKS

SEQ ID NO: 6275 - protein, 41 aa, Artificial Sequence
  Non-cyclic GFR-binding peptide
  MOD_RES (5)..(6)..(40): Xaa is C or S
  MOD_RES (20)..(21)..(22)..(23)..(24): Xaa is A or G
  MOD_RES (25)..(26)..(27)..(28): Xaa is A or G or absent
VPKPXXAPTQLSATSVLYYXXXXXXXXXLRKHRNMVVRAXG

SEQ ID NO: 6276 - protein, 38 aa, Artificial Sequence
  Non-cyclic GFR-binding peptide
  MOD_RES (35)..(37): Xaa is C or S
  MOD_RES (14)..(15)..(16)..(17)..(18): Xaa is A or G
  MOD_RES (19)..(20)..(21)..(22): Xaa is A or G or absent
TQVQLNAISVLYFXXXXXXXXXLKKYRTLEDHLAXKXE

SEQ ID NO: 6277 - protein, 41 aa, Artificial Sequence
  Non-cyclic GFR-binding peptide
  MOD_RES (2)..(39)..(41): Xaa is C or S
QXRPTQVQLSATSVLYYEIVRKKPIFLRKHRTLEDHLAXKX

SEQ ID NO: 6278 - protein, 35 aa, Artificial Sequence
  Non-cyclic GFR-binding peptide
  MOD_RES (2)..(3)..(35): Xaa is C or S
PXXAPTQLSAISVLYLDDSSNVILKNYQNMVVRAX

SEQ ID NO: 6279 - protein, 40 aa, Artificial Sequence
  Non-cyclic GFR-binding peptide
  MOD_RES (2)..(3)..(37)..(39): Xaa is C or S
  MOD_RES (17)..(18)..(19)..(20)..(21): Xaa is A or G
  MOD_RES (22)..(23)..(24)..(25): Xaa is A or G or absent
AXXVPTELSATSMLYYXXXXXXXXXLRKHREMVVEGXGXR

SEQ ID NO: 6280 - protein, 35 aa, Artificial Sequence
  Non-cyclic GFR-binding peptide
  MOD_RES (35)..(35): Xaa is C or S
  MOD_RES (14)..(15)..(16)..(17)..(18): Xaa is A or G
  MOD_RES (19)..(20)..(21)..(22): Xaa is A or G or absent
TQVQLNAISVLYFXXXXXXXXXLKKYRTLEDHLAX

SEQ ID NO: 6281 - protein, 35 aa, Artificial Sequence
  Non-cyclic GFR-binding peptide
  MOD_RES (4)..(5): Xaa is C or S
PKAXXVPTELSPISMLYKDENEKVVLKYHYDMVVE

SEQ ID NO: 6282 - protein, 34 aa, Artificial Sequence
  Non-cyclic GFR-binding peptide
  MOD_RES (32)..(34): Xaa is C or S
APTQLSATSVLYYDDSSNVILRKHRNMVVRAXGX

SEQ ID NO: 6283 - protein, 34 aa, Artificial Sequence
  Non-cyclic GFR-binding peptide
  MOD_RES (2)..(3)..(34): Xaa is C or S
PXXVPQALNAISILYFVGRKPKVLKKYRMIVRSX

SEQ ID NO: 6284 - protein, 38 aa, Artificial Sequence
  Non-cyclic GFR-binding peptide
  MOD_RES (6)..(7)..(38): Xaa is C or S
ASAAPXXVPQALNAISILYFVGRKPKVLKKYRMIVRSX

SEQ ID NO: 6285 - protein, 38 aa, Artificial Sequence
  Non-cyclic GFR-binding peptide
  MOD_RES (4)..(4): Xaa is C or S
  MOD_RES (20)..(21)..(22)..(23)..(24): Xaa is A or G
  MOD_RES (25)..(26)..(27)..(28): Xaa is A or G or absent
NVQXRPTQVQLSAISVLYLXXXXXXXXXLKNYQTLEDH

SEQ ID NO: 6286 - protein, 38 aa, Artificial Sequence
  Non-cyclic GFR-binding peptide
  MOD_RES (1)..(35)..(37): Xaa is C or S
  MOD_RES (15)..(16)..(17)..(18)..(19): Xaa is A or G
  MOD_RES (20)..(21)..(22)..(23): Xaa is A or G or absent
XAPTQLSATSVLYYXXXXXXXXXLRKHRNMVVRAXGXH

SEQ ID NO: 6287 - protein, 40 aa, Artificial Sequence
  Non-cyclic GFR-binding peptide
  MOD_RES (4)..(5)..(38)..(40): Xaa is C or S
  MOD_RES (19)..(20)..(21)..(22)..(23): Xaa is A or G
  MOD_RES (24)..(25)..(26)..(27): Xaa is A or G or absent
AAPXXVPQALSATSILYYXXXXXXXXXLRKHRMIVRSXKX

SEQ ID NO: 6288 - protein, 33 aa, Artificial Sequence
  Non-cyclic GFR-binding peptide
  MOD_RES (14)..(15)..(16)..(17)..(18): Xaa is A or G
  MOD_RES (19)..(20)..(21)..(22): Xaa is A or G or absent
APTQLSAISVLYLXXXXXXXXXLKNYQNMVVRA

SEQ ID NO: 6289 - protein, 39 aa, Artificial Sequence
  Non-cyclic GFR-binding peptide
  MOD_RES (1)..(2)..(36)..(38): Xaa is C or S
  MOD_RES (16)..(17)..(18)..(19)..(20): Xaa is A or G
  MOD_RES (21)..(22)..(23)..(24): Xaa is A or G or absent
XXAPTKLSAISVLYLXXXXXXXXXLKNYQNMVVRSXGXH

SEQ ID NO: 6290 - protein, 38 aa, Artificial Sequence
  Non-cyclic GFR-binding peptide
  MOD_RES (1)..(38): Xaa is C or S
  MOD_RES (17)..(18)..(19)..(20)..(21): Xaa is A or G
  MOD_RES (22)..(23)..(24)..(25): Xaa is A or G or absent
XRPTQVQLNAISVLYFXXXXXXXXXLKKYRTLEDHLAX

SEQ ID NO: 6291 - protein, 40 aa, Artificial Sequence
  Non-cyclic GFR-binding peptide
  MOD_RES (4)..(5)..(39): Xaa is C or S
  MOD_RES (19)..(20)..(21)..(22)..(23): Xaa is A or G
  MOD_RES (24)..(25)..(26)..(27): Xaa is A or G or absent
PKAXXVPTELSPISMLYKXXXXXXXXXLKYHYDMVVEGXG

SEQ ID NO: 6292 - protein, 32 aa, Artificial Sequence
  Non-cyclic GFR-binding peptide
  MOD_RES (14)..(15)..(16)..(17)..(18): Xaa is A or G
  MOD_RES (19)..(20)..(21)..(22): Xaa is A or G or absent
APTQLSPISVLYKXXXXXXXXXLKYHYNMVVR

SEQ ID NO: 6293 - protein, 39 aa, Artificial Sequence
  Non-cyclic GFR-binding peptide
  MOD_RES (4)..(5)..(38): Xaa is C or S
  MOD_RES (19)..(20)..(21)..(22)..(23): Xaa is A or G
  MOD_RES (24)..(25)..(26)..(27): Xaa is A or G or absent
AAPXXVPQALSPISILYKXXXXXXXXXLKYHYMIVRSXK

SEQ ID NO: 6294 - protein, 41 aa, Artificial Sequence
  Non-cyclic GFR-binding peptide
  MOD_RES (3)..(40): Xaa is C or S
VQXRPTQVQLSATSVLYYEIVRKKPIFLRKHRTLEDHLAXK

SEQ ID NO: 6295 - protein, 37 aa, Artificial Sequence
  Non-cyclic GFR-binding peptide
  MOD_RES (2)..(3)..(35)..(37): Xaa is C or S
AXXVPTELNAISMLYFDENEKVVLKKYRDMVVEGXGX

SEQ ID NO: 6296 - protein, 40 aa, Artificial Sequence
  Non-cyclic GFR-binding peptide
  MOD_RES (6)..(7): Xaa is C or S
  MOD_RES (21)..(22)..(23)..(24)..(25): Xaa is A or G
  MOD_RES (26)..(27)..(28)..(29): Xaa is A or G or absent
YVPKPXXAPTKLSAISVLYLXXXXXXXXXLKNYQNMVVRS

SEQ ID NO: 6297 - protein, 40 aa, Artificial Sequence
  Non-cyclic GFR-binding peptide
  MOD_RES (3)..(40): Xaa is C or S
  MOD_RES (19)..(20)..(21)..(22)..(23): Xaa is A or G
  MOD_RES (24)..(25)..(26)..(27): Xaa is A or G or absent
VQXRPTQVQLNAISVLYFXXXXXXXXXLKKYRTLEDHLAX

SEQ ID NO: 6298 - protein, 37 aa, Artificial Sequence
  Non-cyclic GFR-binding peptide
  MOD_RES (4)..(5): Xaa is C or S
  MOD_RES (19)..(20)..(21)..(22)..(23): Xaa is A or G
  MOD_RES (24)..(25)..(26)..(27): Xaa is A or G or absent
ASPXXVSQDLSATSILYYXXXXXXXXXLRKHRMIVKS

SEQ ID NO: 6299 - protein, 36 aa, Artificial Sequence
  Non-cyclic GFR-binding peptide
  MOD_RES (1)..(2)..(34)..(36): Xaa is C or S
XXVPTELSATSMLYYDENEKVVLRKHRDMVVEGXGX

SEQ ID NO: 6300 - protein, 40 aa, Artificial Sequence
  Non-cyclic GFR-binding peptide
  MOD_RES (6)..(7)..(38)..(40): Xaa is C or S
ASASPXXVSQDLSAISILYLIGKTPKILKNYQMIVKSXKX

SEQ ID NO: 6301 - protein, 40 aa, Artificial Sequence
  Non-cyclic GFR-binding peptide
  MOD_RES (6)..(7)..(40): Xaa is C or S
  MOD_RES (21)..(22)..(23)..(24)..(25): Xaa is A or G
  MOD_RES (26)..(27)..(28)..(29): Xaa is A or G or absent
ASASPXXVSQDLSATSILYYXXXXXXXXXLRKHRMIVKSX

SEQ ID NO: 6302 - protein, 36 aa, Artificial Sequence
  Non-cyclic GFR-binding peptide
  MOD_RES (4)..(5): Xaa is C or S
PKPXXAPTQLSPISVLYKDDSSNVILKYHYNMVVRA

SEQ ID NO: 6303 - protein, 35 aa, Artificial Sequence
  Non-cyclic GFR-binding peptide
  MOD_RES (33)..(35): Xaa is C or S
  MOD_RES (14)..(15)..(16)..(17)..(18): Xaa is A or G
  MOD_RES (19)..(20)..(21)..(22): Xaa is A or G or absent
VPQDLSPISILYKXXXXXXXXXLKYHYMVVKSXKX

SEQ ID NO: 6304 - protein, 38 aa, Artificial Sequence
  Non-cyclic GFR-binding peptide
  MOD_RES (3)..(37): Xaa is C or S
  MOD_RES (17)..(18)..(19)..(20)..(21): Xaa is A or G
  MOD_RES (22)..(23)..(24)..(25): Xaa is A or G or absent
PTXAPTKLSATSVLYYXXXXXXXXXLRKHRNMVVRSXG

SEQ ID NO: 6305 - protein, 35 aa, Artificial Sequence
  Non-cyclic GFR-binding peptide
  MOD_RES (2)..(3): Xaa is C or S
AXXVPTKLSATSVLYYDDMGVPTLRKHREGMSVAE

SEQ ID NO: 6306 - protein, 40 aa, Artificial Sequence
  Non-cyclic GFR-binding peptide
  MOD_RES (4)..(5)..(39): Xaa is C or S
  MOD_RES (19)..(20)..(21)..(22)..(23): Xaa is A or G
  MOD_RES (24)..(25)..(26)..(27): Xaa is A or G or absent
PKPXXAPTKLSAISVLYLXXXXXXXXXLKNYQNMVVRSXG

SEQ ID NO: 6307 - protein, 37 aa, Artificial Sequence
  Non-cyclic GFR-binding peptide
  MOD_RES (4)..(5): Xaa is C or S
  MOD_RES (19)..(20)..(21)..(22)..(23): Xaa is A or G
  MOD_RES (24)..(25)..(26)..(27): Xaa is A or G or absent
ASPXXVPQDLSAISILYLXXXXXXXXXLKNYQMVVKS

SEQ ID NO: 6308 - protein, 34 aa, Artificial Sequence
  Non-cyclic GFR-binding peptide
  MOD_RES (3)..(4): Xaa is C or S
KPXXAPTKLSPISVLYKDDSSNVILKYHYNMVVR

SEQ ID NO: 6309 - protein, 37 aa, Artificial Sequence
  Non-cyclic GFR-binding peptide
  MOD_RES (4)..(5): Xaa is C or S
  MOD_RES (19)..(20)..(21)..(22)..(23): Xaa is A or G
  MOD_RES (24)..(25)..(26)..(27): Xaa is A or G or absent
PKPXXAPTKLSPISVLYKXXXXXXXXXLKYHYNMVVR

SEQ ID NO: 6310 - protein, 39 aa, Artificial Sequence
  Non-cyclic GFR-binding peptide
  MOD_RES (4)..(5)..(38): Xaa is C or S
  MOD_RES (19)..(20)..(21)..(22)..(23): Xaa is A or G
  MOD_RES (24)..(25)..(26)..(27): Xaa is A or G or absent
AAPXXVPQALSAISILYLXXXXXXXXXLKNYQMIVRSXK

SEQ ID NO: 6311 - protein, 34 aa, Artificial Sequence
  Non-cyclic GFR-binding peptide
  MOD_RES (3)..(3): Xaa is C or S
PTXAPTKLSPISVLYKDDSSNVILKYHYNMVVRS

SEQ ID NO: 6312 - protein, 33 aa, Artificial Sequence
  Non-cyclic GFR-binding peptide
  MOD_RES (32)..(32): Xaa is C or S
APTKLSAISVLYLDSSNNVILKNYQNMVVKAXG

SEQ ID NO: 6313 - protein, 37 aa, Artificial Sequence
  Non-cyclic GFR-binding peptide
  MOD_RES (1)..(34)..(36): Xaa is C or S
  MOD_RES (15)..(16)..(17)..(18)..(19): Xaa is A or G
  MOD_RES (20)..(21)..(22)..(23): Xaa is A or G or absent
XVPQDLNAISILYFXXXXXXXXXLKKYRMVVKSXKXS

SEQ ID NO: 6314 - protein, 40 aa, Artificial Sequence
  Non-cyclic GFR-binding peptide
  MOD_RES (6)..(7)..(40): Xaa is C or S
  MOD_RES (21)..(22)..(23)..(24)..(25): Xaa is A or G
  MOD_RES (26)..(27)..(28)..(29): Xaa is A or G or absent
ASASPXXVSQDLSAISILYLXXXXXXXXXLKNYQMIVKSX

SEQ ID NO: 6315 - protein, 38 aa, Artificial Sequence
  Non-cyclic GFR-binding peptide
  MOD_RES (4)..(5)..(38): Xaa is C or S
  MOD_RES (19)..(20)..(21)..(22)..(23): Xaa is A or G
  MOD_RES (24)..(25)..(26)..(27): Xaa is A or G or absent
ASPXXVSQDLSPISILYKXXXXXXXXXLKYHYMIVKSX

SEQ ID NO: 6316 - protein, 41 aa, Artificial Sequence
  Non-cyclic GFR-binding peptide
  MOD_RES (6)..(40): Xaa is C or S
  MOD_RES (20)..(21)..(22)..(23)..(24): Xaa is A or G
  MOD_RES (25)..(26)..(27)..(28): Xaa is A or G or absent
VTKPTXAPTKLSPISVLYKXXXXXXXXXLKYHYNMVVRSXG

SEQ ID NO: 6317 - protein, 37 aa, Artificial Sequence
  Non-cyclic GFR-binding peptide
  MOD_RES (1)..(2)..(36): Xaa is C or S
  MOD_RES (16)..(17)..(18)..(19)..(20): Xaa is A or G
  MOD_RES (21)..(22)..(23)..(24): Xaa is A or G or absent
XXAPTKLSAISVLYLXXXXXXXXXLKNYQNMVVRSXG

SEQ ID NO: 6318 - protein, 35 aa, Artificial Sequence
  Non-cyclic GFR-binding peptide
  MOD_RES (2)..(3): Xaa is C or S
  MOD_RES (17)..(18)..(19)..(20)..(21): Xaa is A or G
  MOD_RES (22)..(23)..(24)..(25): Xaa is A or G or absent
AXXVPTELSATSMLYYXXXXXXXXXLRKHREMVVE

SEQ ID NO: 6319 - protein, 40 aa, Artificial Sequence
  Non-cyclic GFR-binding peptide
  MOD_RES (4)..(5)..(38)..(40): Xaa is C or S
  MOD_RES (19)..(20)..(21)..(22)..(23): Xaa is A or G
  MOD_RES (24)..(25)..(26)..(27): Xaa is A or G or absent
ASPXXVPQDLSPISILYKXXXXXXXXXLKYHYMVVKSXKX

SEQ ID NO: 6320 - protein, 37 aa, Artificial Sequence
  Non-cyclic GFR-binding peptide
  MOD_RES (3)..(4)..(36): Xaa is C or S
KAXXAPTKLSPISVLYKDSSNNVILKYHYNMVVKAXG

SEQ ID NO: 6321 - protein, 35 aa, Artificial Sequence
  Non-cyclic GFR-binding peptide
  MOD_RES (1)..(2): Xaa is C or S
  MOD_RES (16)..(17)..(18)..(19)..(20): Xaa is A or G
  MOD_RES (21)..(22)..(23)..(24): Xaa is A or G or absent
XXAPTQLSAISVLYLXXXXXXXXXLKNYQNMVVRA

SEQ ID NO: 6322 - protein, 32 aa, Artificial Sequence
  Non-cyclic GFR-binding peptide
  MOD_RES (1)..(2): Xaa is C or S
XXVPTELSATSMLYYDENEKVVLRKHRDMVVE

SEQ ID NO: 6323 - protein, 36 aa, Artificial Sequence
  Non-cyclic GFR-binding peptide
  MOD_RES (34)..(36): Xaa is C or S
  MOD_RES (14)..(15)..(16)..(17)..(18): Xaa is A or G
  MOD_RES (19)..(20)..(21)..(22): Xaa is A or G or absent
APTKLSAISVLYLXXXXXXXXXLKNYQNMVVKAXGX

SEQ ID NO: 6324 - protein, 37 aa, Artificial Sequence
  Non-cyclic GFR-binding peptide
  MOD_RES (2)..(3)..(35)..(37): Xaa is C or S
PXXAPTQLSAISVLYLDDSSNVILKNYQNMVVRAXGX

SEQ ID NO: 6325 - protein, 38 aa, Artificial Sequence
  Non-cyclic GFR-binding peptide
  MOD_RES (4)..(5): Xaa is C or S
  MOD_RES (19)..(20)..(21)..(22)..(23): Xaa is A or G
  MOD_RES (24)..(25)..(26)..(27): Xaa is A or G or absent
PKAXXVPTELNAISMLYFXXXXXXXXXLKKYRDMVVEG

SEQ ID NO: 6326 - protein, 32 aa, Artificial Sequence
  Non-cyclic GFR-binding peptide
  MOD_RES (14)..(15)..(16)..(17)..(18): Xaa is A or G
  MOD_RES (19)..(20)..(21)..(22): Xaa is A or G or absent
VSQDLSAISILYLXXXXXXXXXLKNYQMIVKS

SEQ ID NO: 6327 - protein, 38 aa, Artificial Sequence
  Non-cyclic GFR-binding peptide
  MOD_RES (5)..(6)..(37): Xaa is C or S
SASPXXVPQDLSPISILYKVGRTPKVLKYHYMVVKSXK

SEQ ID NO: 6328 - protein, 37 aa, Artificial Sequence
  Non-cyclic GFR-binding peptide
  MOD_RES (2)..(2): Xaa is C or S
  MOD_RES (18)..(19)..(20)..(21)..(22): Xaa is A or G
  MOD_RES (23)..(24)..(25)..(26): Xaa is A or G or absent
QXRPTQVQLNAISVLYFXXXXXXXXXLKKYRTLEDHL

SEQ ID NO: 6329 - protein, 41 aa, Artificial Sequence
  Non-cyclic GFR-binding peptide
  MOD_RES (3)..(40): Xaa is C or S
VQXRPTQVQLSAISVLYLEIVRKKPIFLKNYQTLEDHLAXK

SEQ ID NO: 6330 - protein, 35 aa, Artificial Sequence
  Non-cyclic GFR-binding peptide
  MOD_RES (1)..(1): Xaa is C or S
  MOD_RES (17)..(18)..(19)..(20)..(21): Xaa is A or G
  MOD_RES (22)..(23)..(24)..(25): Xaa is A or G or absent
XRPTQVQLNAISVLYFXXXXXXXXXLKKYRTLEDH

SEQ ID NO: 6331 - protein, 33 aa, Artificial Sequence
  Non-cyclic GFR-binding peptide
  MOD_RES (1)..(1): Xaa is C or S
  MOD_RES (15)..(16)..(17)..(18)..(19): Xaa is A or G
  MOD_RES (20)..(21)..(22)..(23): Xaa is A or G or absent
XVPQALSAISILYLXXXXXXXXXLKNYQMIVRS

SEQ ID NO: 6332 - protein, 32 aa, Artificial Sequence
  Non-cyclic GFR-binding peptide
  MOD_RES (1)..(32): Xaa is C or S
XVPQALSATSILYYVGRKPKVLRKHRMIVRSX

SEQ ID NO: 6333 - protein, 32 aa, Artificial Sequence
  Non-cyclic GFR-binding peptide
  MOD_RES (1)..(2): Xaa is C or S
XXVPQALSATSILYYVGRKPKVLRKHRMIVRS

SEQ ID NO: 6334 - protein, 34 aa, Artificial Sequence
  Non-cyclic GFR-binding peptide
  MOD_RES (3)..(4): Xaa is C or S
KPXXAPTKLSAISVLYLDDSSNVILKNYQNMVVR

SEQ ID NO: 6335 - protein, 33 aa, Artificial Sequence
  Non-cyclic GFR-binding peptide
  MOD_RES (31)..(33): Xaa is C or S
VPQDLSATSILYYVGRTPKVLRKHRMVVKSXKX

SEQ ID NO: 6336 - protein, 31 aa, Artificial Sequence
  Non-cyclic GFR-binding peptide
  MOD_RES (1)..(1): Xaa is C or S
XVPQALNAISILYFVGRKPKVLKKYRMIVRS

SEQ ID NO: 6337 - protein, 36 aa, Artificial Sequence
  Non-cyclic GFR-binding peptide
  MOD_RES (1)..(2)..(33)..(35): Xaa is C or S
XXVPQALSATSILYYVGRKPKVLRKHRMIVRSXKXS

SEQ ID NO: 6338 - protein, 38 aa, Artificial Sequence
  Non-cyclic GFR-binding peptide
  MOD_RES (1)..(35)..(37): Xaa is C or S
  MOD_RES (15)..(16)..(17)..(18)..(19): Xaa is A or G
  MOD_RES (20)..(21)..(22)..(23): Xaa is A or G or absent
XAPTKLSPISVLYKXXXXXXXXXLKYHYNMVVKAXGXH

SEQ ID NO: 6339 - protein, 38 aa, Artificial Sequence
  Non-cyclic GFR-binding peptide
  MOD_RES (4)..(5)..(37): Xaa is C or S
PKAXXVPTELSPISMLYKDEYDKVVLKYHYEMVVEGXG

SEQ ID NO: 6340 - protein, 38 aa, Artificial Sequence
  Non-cyclic GFR-binding peptide
  MOD_RES (1)..(2)..(36)..(38): Xaa is C or S
  MOD_RES (16)..(17)..(18)..(19)..(20): Xaa is A or G
  MOD_RES (21)..(22)..(23)..(24): Xaa is A or G or absent
XXAPTKLSPISVLYKXXXXXXXXXLKYHYNMVVRSXGX

SEQ ID NO: 6341 - protein, 34 aa, Artificial Sequence
  Non-cyclic GFR-binding peptide
  MOD_RES (3)..(4): Xaa is C or S
KAXXVPTELSATSMLYYDENEKVVLRKHRDMVVE

SEQ ID NO: 6342 - protein, 38 aa, Artificial Sequence
  Non-cyclic GFR-binding peptide
  MOD_RES (6)..(7)..(38): Xaa is C or S
ASASPXXVSQDLSPISILYKIGKTPKILKYHYMIVKSX

SEQ ID NO: 6343 - protein, 38 aa, Artificial Sequence
  Non-cyclic GFR-binding peptide
  MOD_RES (6)..(7): Xaa is C or S
TVPKPXXAPTQLSAISVLYLDDSSNVILKNYQNMVVRA

SEQ ID NO: 6344 - protein, 38 aa, Artificial Sequence
  Non-cyclic GFR-binding peptide
  MOD_RES (3)..(4)..(37): Xaa is C or S
  MOD_RES (18)..(19)..(20)..(21)..(22): Xaa is A or G
  MOD_RES (23)..(24)..(25)..(26): Xaa is A or G or absent
SPXXVPQDLSPISILYKXXXXXXXXXLKYHYMVVKSXK

SEQ ID NO: 6345 - protein, 38 aa, Artificial Sequence
  Non-cyclic GFR-binding peptide
  MOD_RES (35)..(37): Xaa is C or S
TQVQLSAISVLYLEIVRKKPIFLKNYQTLEDHLAXKXE

SEQ ID NO: 6346 - protein, 36 aa, Artificial Sequence
  Non-cyclic GFR-binding peptide
  MOD_RES (34)..(36): Xaa is C or S
  MOD_RES (14)..(15)..(16)..(17)..(18): Xaa is A or G
  MOD_RES (19)..(20)..(21)..(22): Xaa is A or G or absent
APTQLSPISVLYKXXXXXXXXXLKYHYNMVVRAXGX

SEQ ID NO: 6347 - protein, 44 aa, Artificial Sequence
  Non-cyclic GFR-binding peptide
  MOD_RES (4)..(41)..(43): Xaa is C or S
NVQXRPTQVQLSAISVLYLEIVRKKPIFLKNYQTLEDHLAXKXE

SEQ ID NO: 6348 - protein, 37 aa, Artificial Sequence
  Non-cyclic GFR-binding peptide
  MOD_RES (4)..(5): Xaa is C or S
  MOD_RES (19)..(20)..(21)..(22)..(23): Xaa is A or G
  MOD_RES (24)..(25)..(26)..(27): Xaa is A or G or absent
PKAXXVPTELSPISMLYKXXXXXXXXXLKYHYDMVVE

SEQ ID NO: 6349 - protein, 38 aa, Artificial Sequence
  Non-cyclic GFR-binding peptide
  MOD_RES (2)..(3)..(35)..(37): Xaa is C or S
AXXVPTELSATSMLYYDEYDKVVLRKHREMVVEGXGXR

SEQ ID NO: 6350 - protein, 34 aa, Artificial Sequence
  Non-cyclic GFR-binding peptide
  MOD_RES (1)..(32)..(34): Xaa is C or S
XVSQDLSATSILYYIGKTPKILRKHRMIVKSXKX

SEQ ID NO: 6351 - protein, 40 aa, Artificial Sequence
  Non-cyclic GFR-binding peptide
  MOD_RES (4)..(5)..(39): Xaa is C or S
  MOD_RES (19)..(20)..(21)..(22)..(23): Xaa is A or G
  MOD_RES (24)..(25)..(26)..(27): Xaa is A or G or absent
PKAXXVPTELSATSMLYYXXXXXXXXXLRKHREMVVEGXG

SEQ ID NO: 6352 - protein, 37 aa, Artificial Sequence
  Non-cyclic GFR-binding peptide
  MOD_RES (3)..(4)..(36): Xaa is C or S
KPXXAPTKLSATSVLYYDDSSNVILRKHRNMVVRSXG

SEQ ID NO: 6353 - protein, 38 aa, Artificial Sequence
  Non-cyclic GFR-binding peptide
  MOD_RES (5)..(6): Xaa is C or S
  MOD_RES (20)..(21)..(22)..(23)..(24): Xaa is A or G
  MOD_RES (25)..(26)..(27)..(28): Xaa is A or G or absent
VPKPXXAPTKLSATSVLYYXXXXXXXXXLRKHRNMVVR

SEQ ID NO: 6354 - protein, 37 aa, Artificial Sequence
  Non-cyclic GFR-binding peptide
  MOD_RES (2)..(34)..(36): Xaa is C or S
TXAPTKLSPISVLYKDDSSNVILKYHYNMVVRSXGXH

SEQ ID NO: 6355 - protein, 35 aa, Artificial Sequence
  Non-cyclic GFR-binding peptide
  MOD_RES (33)..(35): Xaa is C or S
  MOD_RES (14)..(15)..(16)..(17)..(18): Xaa is A or G
  MOD_RES (19)..(20)..(21)..(22): Xaa is A or G or absent
VPQDLNAISILYFXXXXXXXXXLKKYRMVVKSXKX

SEQ ID NO: 6356 - protein, 36 aa, Artificial Sequence
  Non-cyclic GFR-binding peptide
  MOD_RES (1)..(2)..(33)..(35): Xaa is C or S
XXVPQDLNAISILYFVGRTPKVLKKYRMVVKSXKXS

SEQ ID NO: 6357 - protein, 40 aa, Artificial Sequence
  Non-cyclic GFR-binding peptide
  MOD_RES (3)..(4)..(37)..(39): Xaa is C or S
KAXXVPTKLNAISVLYFDDMGVPTLKKYREGMSVAEXGXR

SEQ ID NO: 6358 - protein, 33 aa, Artificial Sequence
  Non-cyclic GFR-binding peptide
  MOD_RES (1)..(32): Xaa is C or S
XVPQDLSPISILYKVGRTPKVLKYHYMVVKSXK

SEQ ID NO: 6359 - protein, 34 aa, Artificial Sequence
  Non-cyclic GFR-binding peptide
  MOD_RES (2)..(3)..(34): Xaa is C or S
PXXVPQALSAISILYLVGRKPKVLKNYQMIVRSX

SEQ ID NO: 6360 - protein, 38 aa, Artificial Sequence
  Non-cyclic GFR-binding peptide
  MOD_RES (3)..(4)..(35)..(37): Xaa is C or S
APXXVPQALSATSILYYVGRKPKVLRKHRMIVRSXKXS

SEQ ID NO: 6361 - protein, 34 aa, Artificial Sequence
  Non-cyclic GFR-binding peptide
  MOD_RES (1)..(33): Xaa is C or S
XVPTELSATSMLYYDENEKVVLRKHRDMVVEGXG

SEQ ID NO: 6362 - protein, 34 aa, Artificial Sequence
  Non-cyclic GFR-binding peptide
  MOD_RES (1)..(34): Xaa is C or S
  MOD_RES (15)..(16)..(17)..(18)..(19): Xaa is A or G
  MOD_RES (20)..(21)..(22)..(23): Xaa is A or G or absent
XVPQALSATSILYYXXXXXXXXXLRKHRMIVRSX

SEQ ID NO: 6363 - protein, 39 aa, Artificial Sequence
  Non-cyclic GFR-binding peptide
  MOD_RES (3)..(4)..(37)..(39): Xaa is C or S
  MOD_RES (18)..(19)..(20)..(21)..(22): Xaa is A or G
  MOD_RES (23)..(24)..(25)..(26): Xaa is A or G or absent
SPXXVSQDLSAISILYLXXXXXXXXXLKNYQMIVKSXKX

SEQ ID NO: 6364 - protein, 34 aa, Artificial Sequence
  Non-cyclic GFR-binding peptide
  MOD_RES (1)..(33): Xaa is C or S
XAPTKLSPISVLYKDDSSNVILKYHYNMVVRSXG

SEQ ID NO: 6365 - protein, 37 aa, Artificial Sequence
  Non-cyclic GFR-binding peptide
  MOD_RES (1)..(2)..(34)..(36): Xaa is C or S
XXAPTKLNAISVLYFDSSNNVILKKYRNMVVKAXGXH

SEQ ID NO: 6366 - protein, 36 aa, Artificial Sequence
  Non-cyclic GFR-binding peptide
  MOD_RES (2)..(3)..(36): Xaa is C or S
AXXVPTKLNAISVLYFDDMGVPTLKKYREGMSVAEX

SEQ ID NO: 6367 - protein, 42 aa, Artificial Sequence
  Non-cyclic GFR-binding peptide
  MOD_RES (3)..(40)..(42): Xaa is C or S
  MOD_RES (19)..(20)..(21)..(22)..(23): Xaa is A or G
  MOD_RES (24)..(25)..(26)..(27): Xaa is A or G or absent
VQXRPTQVQLSAISVLYLXXXXXXXXXLKNYQTLEDHLAXKX

SEQ ID NO: 6368 - protein, 34 aa, Artificial Sequence
  Non-cyclic GFR-binding peptide
  MOD_RES (34)..(34): Xaa is C or S
  MOD_RES (14)..(15)..(16)..(17)..(18): Xaa is A or G
  MOD_RES (19)..(20)..(21)..(22): Xaa is A or G or absent
APTKLNAISVLYFXXXXXXXXXLKKYRNMVVKAX

SEQ ID NO: 6369 - protein, 41 aa, Artificial Sequence
  Non-cyclic GFR-binding peptide
  MOD_RES (4)..(38)..(40): Xaa is C or S
  MOD_RES (18)..(19)..(20)..(21)..(22): Xaa is A or G
  MOD_RES (23)..(24)..(25)..(26): Xaa is A or G or absent
KPTXAPTKLSAISVLYLXXXXXXXXXLKNYQNMVVRSXGXH

SEQ ID NO: 6370 - protein, 36 aa, Artificial Sequence
  Non-cyclic GFR-binding peptide
  MOD_RES (34)..(36): Xaa is C or S
  MOD_RES (14)..(15)..(16)..(17)..(18): Xaa is A or G
  MOD_RES (19)..(20)..(21)..(22): Xaa is A or G or absent
VPTELSPISMLYKXXXXXXXXXLKYHYEMVVEGXGX

SEQ ID NO: 6371 - protein, 36 aa, Artificial Sequence
  Non-cyclic GFR-binding peptide
  MOD_RES (2)..(3): Xaa is C or S
  MOD_RES (17)..(18)..(19)..(20)..(21): Xaa is A or G
  MOD_RES (22)..(23)..(24)..(25): Xaa is A or G or absent
AXXVPTELSPISMLYKXXXXXXXXXLKYHYEMVVEG

SEQ ID NO: 6372 - protein, 36 aa, Artificial Sequence
  Non-cyclic GFR-binding peptide
  MOD_RES (1)..(2)..(34)..(36): Xaa is C or S
XXVPTELNAISMLYFDEYDKVVLKKYREMVVEGXGX

SEQ ID NO: 6373 - protein, 42 aa, Artificial Sequence
  Non-cyclic GFR-binding peptide
  MOD_RES (4)..(5)..(39)..(41): Xaa is C or S
  MOD_RES (19)..(20)..(21)..(22)..(23): Xaa is A or G
  MOD_RES (24)..(25)..(26)..(27): Xaa is A or G or absent
PKAXXAPTKLNAISVLYFXXXXXXXXXLKKYRNMVVKAXGXH

SEQ ID NO: 6374 - protein, 39 aa, Artificial Sequence
  Non-cyclic GFR-binding peptide
  MOD_RES (6)..(6): Xaa is C or S
  MOD_RES (20)..(21)..(22)..(23)..(24): Xaa is A or G
  MOD_RES (25)..(26)..(27)..(28): Xaa is A or G or absent
VTKPTXAPTKLSATSVLYYXXXXXXXXXLRKHRNMVVRS

SEQ ID NO: 6375 - protein, 34 aa, Artificial Sequence
  Non-cyclic GFR-binding peptide
  MOD_RES (1)..(34): Xaa is C or S
  MOD_RES (15)..(16)..(17)..(18)..(19): Xaa is A or G
  MOD_RES (20)..(21)..(22)..(23): Xaa is A or G or absent
XVPQALSAISILYLXXXXXXXXXLKNYQMIVRSX

SEQ ID NO: 6376 - protein, 35 aa, Artificial Sequence
  Non-cyclic GFR-binding peptide
PTQVQLSPISVLYKEIVRKKPIFLKYHYTLEDHLA

SEQ ID NO: 6377 - protein, 41 aa, Artificial Sequence
  Non-cyclic GFR-binding peptide
  MOD_RES (5)..(6)..(39)..(41): Xaa is C or S
  MOD_RES (20)..(21)..(22)..(23)..(24): Xaa is A or G
  MOD_RES (25)..(26)..(27)..(28): Xaa is A or G or absent
SASPXXVPQDLNAISILYFXXXXXXXXXLKKYRMVVKSXKX

SEQ ID NO: 6378 - protein, 38 aa, Artificial Sequence
  Non-cyclic GFR-binding peptide
  MOD_RES (36)..(38): Xaa is C or S
  MOD_RES (15)..(16)..(17)..(18)..(19): Xaa is A or G
  MOD_RES (20)..(21)..(22)..(23): Xaa is A or G or absent
PTQVQLNAISVLYFXXXXXXXXXLKKYRTLEDHLAXKX

SEQ ID NO: 6379 - protein, 39 aa, Artificial Sequence
  Non-cyclic GFR-binding peptide
  MOD_RES (36)..(38): Xaa is C or S
  MOD_RES (15)..(16)..(17)..(18)..(19): Xaa is A or G
  MOD_RES (20)..(21)..(22)..(23): Xaa is A or G or absent
PTQVQLSPISVLYKXXXXXXXXXLKYHYTLEDHLAXKXE

SEQ ID NO: 6380 - protein, 37 aa, Artificial Sequence
  Non-cyclic GFR-binding peptide
  MOD_RES (2)..(3)..(35)..(37): Xaa is C or S
AXXVPTELSATSMLYYDEYDKVVLRKHREMVVEGXGX

SEQ ID NO: 6381 - protein, 34 aa, Artificial Sequence
  Non-cyclic GFR-binding peptide
  MOD_RES (33)..(33): Xaa is C or S
  MOD_RES (14)..(15)..(16)..(17)..(18): Xaa is A or G
  MOD_RES (19)..(20)..(21)..(22): Xaa is A or G or absent
VPQALSPISILYKXXXXXXXXXLKYHYMIVRSXK

SEQ ID NO: 6382 - protein, 42 aa, Artificial Sequence
  Non-cyclic GFR-binding peptide
  MOD_RES (6)..(40)..(42): Xaa is C or S
  MOD_RES (20)..(21)..(22)..(23)..(24): Xaa is A or G
  MOD_RES (25)..(26)..(27)..(28): Xaa is A or G or absent
VTKPTXAPTKLSAISVLYLXXXXXXXXXLKNYQNMVVRSXGX

SEQ ID NO: 6383 - protein, 36 aa, Artificial Sequence
  Non-cyclic GFR-binding peptide
  MOD_RES (3)..(4)..(35): Xaa is C or S
SPXXVPQDLSPISILYKVGRTPKVLKYHYMVVKSXK

SEQ ID NO: 6384 - protein, 38 aa, Artificial Sequence
  Non-cyclic GFR-binding peptide
  MOD_RES (5)..(6): Xaa is C or S
VGKAXXVPTKLNAISVLYFDDMGVPTLKKYREGMSVAE

SEQ ID NO: 6385 - protein, 33 aa, Artificial Sequence
  Non-cyclic GFR-binding peptide
TQVQLSPISVLYKEIVRKKPIFLKYHYTLEDHL

SEQ ID NO: 6386 - protein, 40 aa, Artificial Sequence
  Non-cyclic GFR-binding peptide
  MOD_RES (4)..(5)..(37)..(39): Xaa is C or S
PKAXXAPTKLSPISVLYKDSSNNVILKYHYNMVVKAXGXH

SEQ ID NO: 6387 - protein, 33 aa, Artificial Sequence
  Non-cyclic GFR-binding peptide
  MOD_RES (1)..(32): Xaa is C or S
XVPQALSATSILYYVGRKPKVLRKHRMIVRSXK

SEQ ID NO: 6388 - protein, 40 aa, Artificial Sequence
  Non-cyclic GFR-binding peptide
  MOD_RES (4)..(5)..(37)..(39): Xaa is C or S
PKPXXAPTKLSAISVLYLDDSSNVILKNYQNMVVRSXGXH

SEQ ID NO: 6389 - protein, 37 aa, Artificial Sequence
  Non-cyclic GFR-binding peptide
  MOD_RES (3)..(37): Xaa is C or S
  MOD_RES (17)..(18)..(19)..(20)..(21): Xaa is A or G
  MOD_RES (22)..(23)..(24)..(25): Xaa is A or G or absent
PTXAPTKLSAISVLYLXXXXXXXXXLKNYQNMVVRSX

SEQ ID NO: 6390 - protein, 40 aa, Artificial Sequence
  Non-cyclic GFR-binding peptide
  MOD_RES (2)..(39): Xaa is C or S
  MOD_RES (18)..(19)..(20)..(21)..(22): Xaa is A or G
  MOD_RES (23)..(24)..(25)..(26): Xaa is A or G or absent
QXRPTQVQLNAISVLYFXXXXXXXXXLKKYRTLEDHLAXK

SEQ ID NO: 6391 - protein, 43 aa, Artificial Sequence
  Non-cyclic GFR-binding peptide
  MOD_RES (6)..(7)..(40)..(42): Xaa is C or S
  MOD_RES (21)..(22)..(23)..(24)..(25): Xaa is A or G
  MOD_RES (26)..(27)..(28)..(29): Xaa is A or G or absent
ASAAPXXVPQALSPISILYKXXXXXXXXXLKYHYMIVRSXKXS

SEQ ID NO: 6392 - protein, 34 aa, Artificial Sequence
  Non-cyclic GFR-binding peptide
  MOD_RES (1)..(1): Xaa is C or S
  MOD_RES (15)..(16)..(17)..(18)..(19): Xaa is A or G
  MOD_RES (20)..(21)..(22)..(23): Xaa is A or G or absent
XAPTKLSPISVLYKXXXXXXXXXLKYHYNMVVRS

SEQ ID NO: 6393 - protein, 41 aa, Artificial Sequence
  Non-cyclic GFR-binding peptide
  MOD_RES (6)..(7)..(40): Xaa is C or S
  MOD_RES (21)..(22)..(23)..(24)..(25): Xaa is A or G
  MOD_RES (26)..(27)..(28)..(29): Xaa is A or G or absent
ASASPXXVSQDLSATSILYYXXXXXXXXXLRKHRMIVKSXK

SEQ ID NO: 6394 - protein, 35 aa, Artificial Sequence
  Non-cyclic GFR-binding peptide
  MOD_RES (1)..(2)..(35): Xaa is C or S
XXVPTKLNAISVLYFDDMGVPTLKKYREGMSVAEX

SEQ ID NO: 6395 - protein, 40 aa, Artificial Sequence
  Non-cyclic GFR-binding peptide
  MOD_RES (5)..(6)..(38)..(40): Xaa is C or S
VPKAXXAPTKLNAISVLYFDSSNNVILKKYRNMVVKAXGX

SEQ ID NO: 6396 - protein, 39 aa, Artificial Sequence
  Non-cyclic GFR-binding peptide
  MOD_RES (5)..(5): Xaa is C or S
  MOD_RES (21)..(22)..(23)..(24)..(25): Xaa is A or G
  MOD_RES (26)..(27)..(28)..(29): Xaa is A or G or absent
RNVQXRPTQVQLSAISVLYLXXXXXXXXXLKNYQTLEDH

SEQ ID NO: 6397 - protein, 35 aa, Artificial Sequence
  Non-cyclic GFR-binding peptide
RPTQVQLSPISVLYKEIVRKKPIFLKYHYTLEDHL

SEQ ID NO: 6398 - protein, 39 aa, Artificial Sequence
  Non-cyclic GFR-binding peptide
  MOD_RES (4)..(5)..(38): Xaa is C or S
  MOD_RES (19)..(20)..(21)..(22)..(23): Xaa is A or G
  MOD_RES (24)..(25)..(26)..(27): Xaa is A or G or absent
ASPXXVSQDLSPISILYKXXXXXXXXXLKYHYMIVKSXK

SEQ ID NO: 6399 - protein, 35 aa, Artificial Sequence
  Non-cyclic GFR-binding peptide
  MOD_RES (34)..(34): Xaa is C or S
  MOD_RES (14)..(15)..(16)..(17)..(18): Xaa is A or G
  MOD_RES (19)..(20)..(21)..(22): Xaa is A or G or absent
APTKLSATSVLYYXXXXXXXXXLRKHRNMVVRSXG

SEQ ID NO: 6400 - protein, 41 aa, Artificial Sequence
  Non-cyclic GFR-binding peptide
  MOD_RES (6)..(7)..(38)..(40): Xaa is C or S
ASASPXXVPQDLSPISILYKVGRTPKVLKYHYMVVKSXKXS

SEQ ID NO: 6401 - protein, 36 aa, Artificial Sequence
  Non-cyclic GFR-binding peptide
  MOD_RES (1)..(2)..(35): Xaa is C or S
XXVPTKLSATSVLYYDDMGVPTLRKHREGMSVAEXG

SEQ ID NO: 6402 - protein, 43 aa, Artificial Sequence
  Non-cyclic GFR-binding peptide
  MOD_RES (6)..(7)..(40)..(42): Xaa is C or S
  MOD_RES (21)..(22)..(23)..(24)..(25): Xaa is A or G
  MOD_RES (26)..(27)..(28)..(29): Xaa is A or G or absent
ASASPXXVPQDLSAISILYLXXXXXXXXXLKNYQMVVKSXKXS

SEQ ID NO: 6403 - protein, 36 aa, Artificial Sequence
  Non-cyclic GFR-binding peptide
  MOD_RES (5)..(6): Xaa is C or S
IPKAXXVPTELSATSMLYYDEYDKVVLRKHREMVVE

SEQ ID NO: 6404 - protein, 42 aa, Artificial Sequence
  Non-cyclic GFR-binding peptide
  MOD_RES (6)..(7)..(39)..(41): Xaa is C or S
KIPKAXXVPTELNAISMLYFDENEKVVLKKYRDMVVEGXGXR

SEQ ID NO: 6405 - protein, 39 aa, Artificial Sequence
  Non-cyclic GFR-binding peptide
  MOD_RES (6)..(7)..(39): Xaa is C or S
KIPKAXXVPTELSPISMLYKDENEKVVLKYHYDMVVEGX

SEQ ID NO: 6406 - protein, 34 aa, Artificial Sequence
  Non-cyclic GFR-binding peptide
  MOD_RES (1)..(2): Xaa is C or S
  MOD_RES (16)..(17)..(18)..(19)..(20): Xaa is A or G
  MOD_RES (21)..(22)..(23)..(24): Xaa is A or G or absent
XXVPQDLSATSILYYXXXXXXXXXLRKHRMVVKS

SEQ ID NO: 6407 - protein, 39 aa, Artificial Sequence
  Non-cyclic GFR-binding peptide
  MOD_RES (3)..(4)..(37)..(39): Xaa is C or S
  MOD_RES (18)..(19)..(20)..(21)..(22): Xaa is A or G
  MOD_RES (23)..(24)..(25)..(26): Xaa is A or G or absent
SPXXVPQDLSPISILYKXXXXXXXXXLKYHYMVVKSXKX

SEQ ID NO: 6408 - protein, 39 aa, Artificial Sequence
  Non-cyclic GFR-binding peptide
  MOD_RES (2)..(36)..(38): Xaa is C or S
  MOD_RES (16)..(17)..(18)..(19)..(20): Xaa is A or G
  MOD_RES (21)..(22)..(23)..(24): Xaa is A or G or absent
TXAPTKLSPISVLYKXXXXXXXXXLKYHYNMVVRSXGXH

SEQ ID NO: 6409 - protein, 33 aa, Artificial Sequence
  Non-cyclic GFR-binding peptide
  MOD_RES (1)..(2): Xaa is C or S
XXAPTQLSATSVLYYDDSSNVILRKHRNMVVRA

SEQ ID NO: 6410 - protein, 42 aa, Artificial Sequence
  Non-cyclic GFR-binding peptide
  MOD_RES (4)..(5)..(39)..(41): Xaa is C or S
  MOD_RES (19)..(20)..(21)..(22)..(23): Xaa is A or G
  MOD_RES (24)..(25)..(26)..(27): Xaa is A or G or absent
PKPXXAPTQLSAISVLYLXXXXXXXXXLKNYQNMVVRAXGXH

SEQ ID NO: 6411 - protein, 42 aa, Artificial Sequence
  Non-cyclic GFR-binding peptide
  MOD_RES (4)..(41): Xaa is C or S
  MOD_RES (20)..(21)..(22)..(23)..(24): Xaa is A or G
  MOD_RES (25)..(26)..(27)..(28): Xaa is A or G or absent
NVQXRPTQVQLSATSVLYYXXXXXXXXXLRKHRTLEDHLAXK

SEQ ID NO: 6412 - protein, 35 aa, Artificial Sequence
  Non-cyclic GFR-binding peptide
  MOD_RES (1)..(2): Xaa is C or S
  MOD_RES (16)..(17)..(18)..(19)..(20): Xaa is A or G
  MOD_RES (21)..(22)..(23)..(24): Xaa is A or G or absent
XXAPTKLSPISVLYKXXXXXXXXXLKYHYNMVVKA

SEQ ID NO: 6413 - protein, 33 aa, Artificial Sequence
  Non-cyclic GFR-binding peptide
  MOD_RES (1)..(2)..(33): Xaa is C or S
XXVPQDLSAISILYLVGRTPKVLKNYQMVVKSX

SEQ ID NO: 6414 - protein, 31 aa, Artificial Sequence
  Non-cyclic GFR-binding peptide
  MOD_RES (31)..(31): Xaa is C or S
VPQALSPISILYKVGRKPKVLKYHYMIVRSX

SEQ ID NO: 6415 - protein, 38 aa, Artificial Sequence
  Non-cyclic GFR-binding peptide
  MOD_RES (6)..(7)..(38): Xaa is C or S
ASASPXXVSQDLSATSILYYIGKTPKILRKHRMIVKSX

SEQ ID NO: 6416 - protein, 33 aa, Artificial Sequence
  Non-cyclic GFR-binding peptide
  MOD_RES (1)..(1): Xaa is C or S
XVPTKLSAISVLYLDDMGVPTLKNYQEGMSVAE

SEQ ID NO: 6417 - protein, 36 aa, Artificial Sequence
  Non-cyclic GFR-binding peptide
  MOD_RES (2)..(3)..(34)..(36): Xaa is C or S
PXXVSQDLSATSILYYIGKTPKILRKHRMIVKSXKX

SEQ ID NO: 6418 - protein, 41 aa, Artificial Sequence
  Non-cyclic GFR-binding peptide
  MOD_RES (6)..(7)..(40): Xaa is C or S
  MOD_RES (21)..(22)..(23)..(24)..(25): Xaa is A or G
  MOD_RES (26)..(27)..(28)..(29): Xaa is A or G or absent
ASAAPXXVPQALSATSILYYXXXXXXXXXLRKHRMIVRSXK

SEQ ID NO: 6419 - protein, 40 aa, Artificial Sequence
  Non-cyclic GFR-binding peptide
  MOD_RES (2)..(3)..(37)..(39): Xaa is C or S
  MOD_RES (17)..(18)..(19)..(20)..(21): Xaa is A or G
  MOD_RES (22)..(23)..(24)..(25): Xaa is A or G or absent
AXXVPTELSPISMLYKXXXXXXXXXLKYHYEMVVEGXGXR

SEQ ID NO: 6420 - protein, 33 aa, Artificial Sequence
  Non-cyclic GFR-binding peptide
  MOD_RES (2)..(3): Xaa is C or S
PXXVPQDLSAISILYLVGRTPKVLKNYQMVVKS

SEQ ID NO: 6421 - protein, 34 aa, Artificial Sequence
  Non-cyclic GFR-binding peptide
  MOD_RES (1)..(2)..(33): Xaa is C or S
XXVPQALSATSILYYVGRKPKVLRKHRMIVRSXK

SEQ ID NO: 6422 - protein, 33 aa, Artificial Sequence
  Non-cyclic GFR-binding peptide
  MOD_RES (2)..(3): Xaa is C or S
PXXVPQALNAISILYFVGRKPKVLKKYRMIVRS

SEQ ID NO: 6423 - protein, 36 aa, Artificial Sequence
  Non-cyclic GFR-binding peptide
  MOD_RES (2)..(3): Xaa is C or S
  MOD_RES (17)..(18)..(19)..(20)..(21): Xaa is A or G
  MOD_RES (22)..(23)..(24)..(25): Xaa is A or G or absent
PXXAPTKLSATSVLYYXXXXXXXXXLRKHRNMVVRS

SEQ ID NO: 6424 - protein, 43 aa, Artificial Sequence
  Non-cyclic GFR-binding peptide
  MOD_RES (3)..(40)..(42): Xaa is C or S
  MOD_RES (19)..(20)..(21)..(22)..(23): Xaa is A or G
  MOD_RES (24)..(25)..(26)..(27): Xaa is A or G or absent
VQXRPTQVQLSAISVLYLXXXXXXXXXLKNYQTLEDHLAXKXE

SEQ ID NO: 6425 - protein, 32 aa, Artificial Sequence
  Non-cyclic GFR-binding peptide
  MOD_RES (32)..(32): Xaa is C or S
APTKLSPISVLYKDSSNNVILKYHYNMVVKAX

SEQ ID NO: 6426 - protein, 41 aa, Artificial Sequence
  Non-cyclic GFR-binding peptide
  MOD_RES (4)..(5)..(39)..(41): Xaa is C or S
  MOD_RES (19)..(20)..(21)..(22)..(23): Xaa is A or G
  MOD_RES (24)..(25)..(26)..(27): Xaa is A or G or absent
PKAXXVPTELSPISMLYKXXXXXXXXXLKYHYDMVVEGXGX

SEQ ID NO: 6427 - protein, 32 aa, Artificial Sequence
  Non-cyclic GFR-binding peptide
  MOD_RES (31)..(31): Xaa is C or S
VPQALSAISILYLVGRKPKVLKNYQMIVRSXK

SEQ ID NO: 6428 - protein, 35 aa, Artificial Sequence
  Non-cyclic GFR-binding peptide
  MOD_RES (1)..(35): Xaa is C or S
  MOD_RES (15)..(16)..(17)..(18)..(19): Xaa is A or G
  MOD_RES (20)..(21)..(22)..(23): Xaa is A or G or absent
XAPTKLNAISVLYFXXXXXXXXXLKKYRNMVVKAX

SEQ ID NO: 6429 - protein, 37 aa, Artificial Sequence
  Non-cyclic GFR-binding peptide
  MOD_RES (1)..(34)..(36): Xaa is C or S
  MOD_RES (15)..(16)..(17)..(18)..(19): Xaa is A or G
  MOD_RES (20)..(21)..(22)..(23): Xaa is A or G or absent
XVPQALSPISILYKXXXXXXXXXLKYHYMIVRSXKXS

SEQ ID NO: 6430 - protein, 39 aa, Artificial Sequence
  Non-cyclic GFR-binding peptide
  MOD_RES (3)..(4)..(37)..(39): Xaa is C or S
  MOD_RES (18)..(19)..(20)..(21)..(22): Xaa is A or G
  MOD_RES (23)..(24)..(25)..(26): Xaa is A or G or absent
APXXVPQALSAISILYLXXXXXXXXXLKNYQMIVRSXKX

SEQ ID NO: 6431 - protein, 36 aa, Artificial Sequence
  Non-cyclic GFR-binding peptide
  MOD_RES (1)..(33)..(35): Xaa is C or S
XAPTQLSAISVLYLDDSSNVILKNYQNMVVRAXGXH

SEQ ID NO: 6432 - protein, 32 aa, Artificial Sequence
  Non-cyclic GFR-binding peptide
  MOD_RES (31)..(31): Xaa is C or S
VSQDLSATSILYYIGKTPKILRKHRMIVKSXK

SEQ ID NO: 6433 - protein, 36 aa, Artificial Sequence
  Non-cyclic GFR-binding peptide
  MOD_RES (3)..(4)..(36): Xaa is C or S
KAXXAPTKLSPISVLYKDSSNNVILKYHYNMVVKAX

SEQ ID NO: 6434 - protein, 32 aa, Artificial Sequence
  Non-cyclic GFR-binding peptide
  MOD_RES (14)..(15)..(16)..(17)..(18): Xaa is A or G
  MOD_RES (19)..(20)..(21)..(22): Xaa is A or G or absent
APTQLSAISVLYLXXXXXXXXXLKNYQNMVVR

SEQ ID NO: 6435 - protein, 37 aa, Artificial Sequence
  Non-cyclic GFR-binding peptide
  MOD_RES (3)..(3): Xaa is C or S
  MOD_RES (19)..(20)..(21)..(22)..(23): Xaa is A or G
  MOD_RES (24)..(25)..(26)..(27): Xaa is A or G or absent
VQXRPTQVQLSATSVLYYXXXXXXXXXLRKHRTLEDH

SEQ ID NO: 6436 - protein, 30 aa, Artificial Sequence
  Non-cyclic GFR-binding peptide
VPTELSATSMLYYDEYDKVVLRKHREMVVE

SEQ ID NO: 6437 - protein, 42 aa, Artificial Sequence
  Non-cyclic GFR-binding peptide
  MOD_RES (6)..(7)..(39)..(41): Xaa is C or S
YVPKPXXAPTKLSAISVLYLDDSSNVILKNYQNMVVRSXGXH

SEQ ID NO: 6438 - protein, 35 aa, Artificial Sequence
  Non-cyclic GFR-binding peptide
  MOD_RES (32)..(34): Xaa is C or S
VPTELSPISMLYKDENEKVVLKYHYDMVVEGXGXR

SEQ ID NO: 6439 - protein, 42 aa, Artificial Sequence
  Non-cyclic GFR-binding peptide
  MOD_RES (6)..(7)..(39)..(41): Xaa is C or S
SIPKAXXVPTELNAISMLYFDEYDKVVLKKYREMVVEGXGXR

SEQ ID NO: 6440 - protein, 37 aa, Artificial Sequence
  Non-cyclic GFR-binding peptide
  MOD_RES (5)..(5): Xaa is C or S
  MOD_RES (19)..(20)..(21)..(22)..(23): Xaa is A or G
  MOD_RES (24)..(25)..(26)..(27): Xaa is A or G or absent
TKPTXAPTKLSPISVLYKXXXXXXXXXLKYHYNMVVR

SEQ ID NO: 6441 - protein, 35 aa, Artificial Sequence
  Non-cyclic GFR-binding peptide
  MOD_RES (2)..(3): Xaa is C or S
  MOD_RES (17)..(18)..(19)..(20)..(21): Xaa is A or G
  MOD_RES (22)..(23)..(24)..(25): Xaa is A or G or absent
PXXAPTQLSAISVLYLXXXXXXXXXLKNYQNMVVR

SEQ ID NO: 6442 - protein, 39 aa, Artificial Sequence
  Non-cyclic GFR-binding peptide
  MOD_RES (6)..(7)..(39): Xaa is C or S
SIPKAXXVPTELSPISMLYKDEYDKVVLKYHYEMVVEGX

SEQ ID NO: 6443 - protein, 41 aa, Artificial Sequence
  Non-cyclic GFR-binding peptide
  MOD_RES (6)..(7)..(40): Xaa is C or S
KVGKAXXVPTKLNAISVLYFDDMGVPTLKKYREGMSVAEXG

SEQ ID NO: 6444 - protein, 40 aa, Artificial Sequence
  Non-cyclic GFR-binding peptide
  MOD_RES (4)..(5)..(39): Xaa is C or S
  MOD_RES (19)..(20)..(21)..(22)..(23): Xaa is A or G
  MOD_RES (24)..(25)..(26)..(27): Xaa is A or G or absent
PKPXXAPTQLSATSVLYYXXXXXXXXXLRKHRNMVVRAXG

SEQ ID NO: 6445 - protein, 33 aa, Artificial Sequence
  Non-cyclic GFR-binding peptide
  MOD_RES (1)..(32): Xaa is C or S
XVPQALNAISILYFVGRKPKVLKKYRMIVRSXK

SEQ ID NO: 6446 - protein, 41 aa, Artificial Sequence
  Non-cyclic GFR-binding peptide
  MOD_RES (6)..(7)..(40): Xaa is C or S
  MOD_RES (21)..(22)..(23)..(24)..(25): Xaa is A or G
  MOD_RES (26)..(27)..(28)..(29): Xaa is A or G or absent
ASASPXXVPQDLSATSILYYXXXXXXXXXLRKHRMVVKSXK

SEQ ID NO: 6447 - protein, 34 aa, Artificial Sequence
  Non-cyclic GFR-binding peptide
  MOD_RES (3)..(4): Xaa is C or S
SPXXVPQDLSATSILYYVGRTPKVLRKHRMVVKS

SEQ ID NO: 6448 - protein, 37 aa, Artificial Sequence
  Non-cyclic GFR-binding peptide
  MOD_RES (1)..(2)..(35)..(37): Xaa is C or S
  MOD_RES (16)..(17)..(18)..(19)..(20): Xaa is A or G
  MOD_RES (21)..(22)..(23)..(24): Xaa is A or G or absent
XXVPQALSATSILYYXXXXXXXXXLRKHRMIVRSXKX

SEQ ID NO: 6449 - protein, 35 aa, Artificial Sequence
  Non-cyclic GFR-binding peptide
  MOD_RES (1)..(2)..(33)..(35): Xaa is C or S
XXVPQALSPISILYKVGRKPKVLKYHYMIVRSXKX

SEQ ID NO: 6450 - protein, 36 aa, Artificial Sequence
  Non-cyclic GFR-binding peptide
  MOD_RES (1)..(33)..(35): Xaa is C or S
XAPTKLSAISVLYLDDSSNVILKNYQNMVVRSXGXH

SEQ ID NO: 6451 - protein, 37 aa, Artificial Sequence
  Non-cyclic GFR-binding peptide
  MOD_RES (4)..(5)..(37): Xaa is C or S
PKPXXAPTQLSATSVLYYDDSSNVILRKHRNMVVRAX

SEQ ID NO: 6452 - protein, 42 aa, Artificial Sequence
  Non-cyclic GFR-binding peptide
  MOD_RES (6)..(7)..(41): Xaa is C or S
  MOD_RES (21)..(22)..(23)..(24)..(25): Xaa is A or G
  MOD_RES (26)..(27)..(28)..(29): Xaa is A or G or absent
TVPKPXXAPTQLSATSVLYYXXXXXXXXXLRKHRNMVVRAXG

SEQ ID NO: 6453 - protein, 32 aa, Artificial Sequence
  Non-cyclic GFR-binding peptide
  MOD_RES (32)..(32): Xaa is C or S
APTKLSPISVLYKDDSSNVILKYHYNMVVRSX

SEQ ID NO: 6454 - protein, 41 aa, Artificial Sequence
  Non-cyclic GFR-binding peptide
  MOD_RES (5)..(6)..(39)..(41): Xaa is C or S
  MOD_RES (20)..(21)..(22)..(23)..(24): Xaa is A or G
  MOD_RES (25)..(26)..(27)..(28): Xaa is A or G or absent
SASPXXVSQDLNAISILYFXXXXXXXXXLKKYRMIVKSXKX

SEQ ID NO: 6455 - protein, 42 aa, Artificial Sequence
  Non-cyclic GFR-binding peptide
  MOD_RES (4)..(5)..(39)..(41): Xaa is C or S
  MOD_RES (19)..(20)..(21)..(22)..(23): Xaa is A or G
  MOD_RES (24)..(25)..(26)..(27): Xaa is A or G or absent
PKAXXVPTELSATSMLYYXXXXXXXXXLRKHRDMVVEGXGXR

SEQ ID NO: 6456 - protein, 33 aa, Artificial Sequence
  Non-cyclic GFR-binding peptide
  MOD_RES (1)..(32): Xaa is C or S
XVPQALSPISILYKVGRKPKVLKYHYMIVRSXK

SEQ ID NO: 6457 - protein, 35 aa, Artificial Sequence
  Non-cyclic GFR-binding peptide
  MOD_RES (35)..(35): Xaa is C or S
TQVQLSAISVLYLEIVRKKPIFLKNYQTLEDHLAX

SEQ ID NO: 6458 - protein, 36 aa, Artificial Sequence
  Non-cyclic GFR-binding peptide
  MOD_RES (1)..(2)..(36): Xaa is C or S
  MOD_RES (16)..(17)..(18)..(19)..(20): Xaa is A or G
  MOD_RES (21)..(22)..(23)..(24): Xaa is A or G or absent
XXAPTKLSPISVLYKXXXXXXXXXLKYHYNMVVKAX

SEQ ID NO: 6459 - protein, 39 aa, Artificial Sequence
  Non-cyclic GFR-binding peptide
  MOD_RES (3)..(4)..(39): Xaa is C or S
  MOD_RES (18)..(19)..(20)..(21)..(22): Xaa is A or G
  MOD_RES (23)..(24)..(25)..(26): Xaa is A or G or absent
KAXXVPTKLSAISVLYLXXXXXXXXXLKNYQEGMSVAEX

SEQ ID NO: 6460 - protein, 41 aa, Artificial Sequence
  Non-cyclic GFR-binding peptide
  MOD_RES (4)..(5)..(39)..(41): Xaa is C or S
  MOD_RES (19)..(20)..(21)..(22)..(23): Xaa is A or G
  MOD_RES (24)..(25)..(26)..(27): Xaa is A or G or absent
PKPXXAPTKLSATSVLYYXXXXXXXXXLRKHRNMVVRSXGX

SEQ ID NO: 6461 - protein, 36 aa, Artificial Sequence
  Non-cyclic GFR-binding peptide
  MOD_RES (2)..(3)..(35): Xaa is C or S
PXXAPTQLSAISVLYLDDSSNVILKNYQNMVVRAXG

SEQ ID NO: 6462 - protein, 37 aa, Artificial Sequence
  Non-cyclic GFR-binding peptide
  MOD_RES (7)..(7): Xaa is C or S
HVTKPTXAPTKLSAISVLYLDDSSNVILKNYQNMVVR

SEQ ID NO: 6463 - protein, 43 aa, Artificial Sequence
  Non-cyclic GFR-binding peptide
  MOD_RES (5)..(42): Xaa is C or S
RNVQXRPTQVQLSAISVLYLEIVRKKPIFLKNYQTLEDHLAXK

SEQ ID NO: 6464 - protein, 32 aa, Artificial Sequence
  Non-cyclic GFR-binding peptide
  MOD_RES (14)..(15)..(16)..(17)..(18): Xaa is A or G
  MOD_RES (19)..(20)..(21)..(22): Xaa is A or G or absent
VPTELSATSMLYYXXXXXXXXXLRKHRDMVVE

SEQ ID NO: 6465 - protein, 31 aa, Artificial Sequence
  Non-cyclic GFR-binding peptide
  MOD_RES (1)..(1): Xaa is C or S
XVPTELSPISMLYKDEYDKVVLKYHYEMVVE

SEQ ID NO: 6466 - protein, 36 aa, Artificial Sequence
  Non-cyclic GFR-binding peptide
  MOD_RES (2)..(3)..(34)..(36): Xaa is C or S
PXXVPQDLSATSILYYVGRTPKVLRKHRMVVKSXKX

SEQ ID NO: 6467 - protein, 41 aa, Artificial Sequence
  Non-cyclic GFR-binding peptide
  MOD_RES (6)..(7): Xaa is C or S
  MOD_RES (21)..(22)..(23)..(24)..(25): Xaa is A or G
  MOD_RES (26)..(27)..(28)..(29): Xaa is A or G or absent
KVGKAXXVPTKLSAISVLYLXXXXXXXXXLKNYQEGMSVAE

SEQ ID NO: 6468 - protein, 41 aa, Artificial Sequence
  Non-cyclic GFR-binding peptide
  MOD_RES (3)..(4)..(38)..(40): Xaa is C or S
  MOD_RES (18)..(19)..(20)..(21)..(22): Xaa is A or G
  MOD_RES (23)..(24)..(25)..(26): Xaa is A or G or absent
KPXXAPTQLSPISVLYKXXXXXXXXXLKYHYNMVVRAXGXH

SEQ ID NO: 6469 - protein, 34 aa, Artificial Sequence
  Non-cyclic GFR-binding peptide
  MOD_RES (1)..(34): Xaa is C or S
XVPTKLSATSVLYYDDMGVPTLRKHREGMSVAEX

SEQ ID NO: 6470 - protein, 38 aa, Artificial Sequence
  Non-cyclic GFR-binding peptide
  MOD_RES (36)..(38): Xaa is C or S
PTQVQLSATSVLYYEIVRKKPIFLRKHRTLEDHLAXKX

SEQ ID NO: 6471 - protein, 37 aa, Artificial Sequence
  Non-cyclic GFR-binding peptide
  MOD_RES (6)..(7): Xaa is C or S
YVPKPXXAPTKLSATSVLYYDDSSNVILRKHRNMVVR

SEQ ID NO: 6472 - protein, 40 aa, Artificial Sequence
  Non-cyclic GFR-binding peptide
  MOD_RES (5)..(6)..(40): Xaa is C or S
  MOD_RES (20)..(21)..(22)..(23)..(24): Xaa is A or G
  MOD_RES (25)..(26)..(27)..(28): Xaa is A or G or absent
VPKPXXAPTKLSPISVLYKXXXXXXXXXLKYHYNMVVRSX

SEQ ID NO: 6473 - protein, 38 aa, Artificial Sequence
  Non-cyclic GFR-binding peptide
  MOD_RES (35)..(37): Xaa is C or S
TQVQLNAISVLYFEIVRKKPIFLKKYRTLEDHLAXKXE

SEQ ID NO: 6474 - protein, 43 aa, Artificial Sequence
  Non-cyclic GFR-binding peptide
  MOD_RES (6)..(7)..(41)..(43): Xaa is C or S
  MOD_RES (21)..(22)..(23)..(24)..(25): Xaa is A or G
  MOD_RES (26)..(27)..(28)..(29): Xaa is A or G or absent
TVPKPXXAPTQLSATSVLYYXXXXXXXXXLRKHRNMVVRAXGX

SEQ ID NO: 6475 - protein, 37 aa, Artificial Sequence
  Non-cyclic GFR-binding peptide
  MOD_RES (5)..(6): Xaa is C or S
VPKAXXAPTKLSPISVLYKDSSNNVILKYHYNMVVKA

SEQ ID NO: 6476 - protein, 34 aa, Artificial Sequence
  Non-cyclic GFR-binding peptide
  MOD_RES (33)..(33): Xaa is C or S
VPTKLNAISVLYFDDMGVPTLKKYREGMSVAEXG

SEQ ID NO: 6477 - protein, 42 aa, Artificial Sequence
  Non-cyclic GFR-binding peptide
  MOD_RES (7)..(39)..(41): Xaa is C or S
HVTKPTXAPTKLSPISVLYKDDSSNVILKYHYNMVVRSXGXH

SEQ ID NO: 6478 - protein, 43 aa, Artificial Sequence
  Non-cyclic GFR-binding peptide
  MOD_RES (4)..(41)..(43): Xaa is C or S
  MOD_RES (20)..(21)..(22)..(23)..(24): Xaa is A or G
  MOD_RES (25)..(26)..(27)..(28): Xaa is A or G or absent
NVQXRPTQVQLNAISVLYFXXXXXXXXXLKKYRTLEDHLAXKX

SEQ ID NO: 6479 - protein, 33 aa, Artificial Sequence
  Non-cyclic GFR-binding peptide
  MOD_RES (33)..(33): Xaa is C or S
VPTKLSATSVLYYDDMGVPTLRKHREGMSVAEX

SEQ ID NO: 6480 - protein, 30 aa, Artificial Sequence
  Non-cyclic GFR-binding peptide
VSQDLSATSILYYIGKTPKILRKHRMIVKS

SEQ ID NO: 6481 - protein, 40 aa, Artificial Sequence
  Non-cyclic GFR-binding peptide
  MOD_RES (3)..(4)..(38)..(40): Xaa is C or S
  MOD_RES (18)..(19)..(20)..(21)..(22): Xaa is A or G
  MOD_RES (23)..(24)..(25)..(26): Xaa is A or G or absent
KAXXVPTELNAISMLYFXXXXXXXXXLKKYRDMVVEGXGX

SEQ ID NO: 6482 - protein, 37 aa, Artificial Sequence
  Non-cyclic GFR-binding peptide
  MOD_RES (1)..(35)..(37): Xaa is C or S
  MOD_RES (15)..(16)..(17)..(18)..(19): Xaa is A or G
  MOD_RES (20)..(21)..(22)..(23): Xaa is A or G or absent
XAPTKLSAISVLYLXXXXXXXXXLKNYQNMVVRSXGX

SEQ ID NO: 6483 - protein, 36 aa, Artificial Sequence
  Non-cyclic GFR-binding peptide
  MOD_RES (1)..(33)..(35): Xaa is C or S
XAPTKLSAISVLYLDSSNNVILKNYQNMVVKAXGXH

SEQ ID NO: 6484 - protein, 38 aa, Artificial Sequence
  Non-cyclic GFR-binding peptide
  MOD_RES (2)..(3)..(37): Xaa is C or S
  MOD_RES (17)..(18)..(19)..(20)..(21): Xaa is A or G
  MOD_RES (22)..(23)..(24)..(25): Xaa is A or G or absent
AXXVPTELSPISMLYKXXXXXXXXXLKYHYEMVVEGXG

SEQ ID NO: 6485 - protein, 40 aa, Artificial Sequence
  Non-cyclic GFR-binding peptide
  MOD_RES (3)..(40): Xaa is C or S
VQXRPTQVQLSAISVLYLEIVRKKPIFLKNYQTLEDHLAX

SEQ ID NO: 6486 - protein, 39 aa, Artificial Sequence
  Non-cyclic GFR-binding peptide
  MOD_RES (6)..(7): Xaa is C or S
KVGKAXXVPTKLSAISVLYLDDMGVPTLKNYQEGMSVAE

SEQ ID NO: 6487 - protein, 40 aa, Artificial Sequence
  Non-cyclic GFR-binding peptide
  MOD_RES (4)..(5)..(38)..(40): Xaa is C or S
  MOD_RES (19)..(20)..(21)..(22)..(23): Xaa is A or G
  MOD_RES (24)..(25)..(26)..(27): Xaa is A or G or absent
AAPXXVPQALSPISILYKXXXXXXXXXLKYHYMIVRSXKX

SEQ ID NO: 6488 - protein, 38 aa, Artificial Sequence
  Non-cyclic GFR-binding peptide
  MOD_RES (5)..(5): Xaa is C or S
  MOD_RES (19)..(20)..(21)..(22)..(23): Xaa is A or G
  MOD_RES (24)..(25)..(26)..(27): Xaa is A or G or absent
TKPTXAPTKLSPISVLYKXXXXXXXXXLKYHYNMVVRS

SEQ ID NO: 6489 - protein, 35 aa, Artificial Sequence
  Non-cyclic GFR-binding peptide
  MOD_RES (32)..(34): Xaa is C or S
VPTELSPISMLYKDEYDKVVLKYHYEMVVEGXGXR

SEQ ID NO: 6490 - protein, 39 aa, Artificial Sequence
  Non-cyclic GFR-binding peptide
  MOD_RES (6)..(7)..(39): Xaa is C or S
SIPKAXXVPTELNAISMLYFDEYDKVVLKKYREMVVEGX

SEQ ID NO: 6491 - protein, 38 aa, Artificial Sequence
  Non-cyclic GFR-binding peptide
  MOD_RES (2)..(3)..(36)..(38): Xaa is C or S
  MOD_RES (17)..(18)..(19)..(20)..(21): Xaa is A or G
  MOD_RES (22)..(23)..(24)..(25): Xaa is A or G or absent
PXXVPQDLSAISILYLXXXXXXXXXLKNYQMVVKSXKX

SEQ ID NO: 6492 - protein, 41 aa, Artificial Sequence
  Non-cyclic GFR-binding peptide
  MOD_RES (6)..(7)..(38)..(40): Xaa is C or S
ASASPXXVSQDLSATSILYYIGKTPKILRKHRMIVKSXKXS

SEQ ID NO: 6493 - protein, 39 aa, Artificial Sequence
  Non-cyclic GFR-binding peptide
  MOD_RES (6)..(7)..(38): Xaa is C or S
ASAAPXXVPQALSATSILYYVGRKPKVLRKHRMIVRSXK

SEQ ID NO: 6494 - protein, 43 aa, Artificial Sequence
  Non-cyclic GFR-binding peptide
  MOD_RES (3)..(40)..(42): Xaa is C or S
  MOD_RES (19)..(20)..(21)..(22)..(23): Xaa is A or G
  MOD_RES (24)..(25)..(26)..(27): Xaa is A or G or absent
VQXRPTQVQLSPISVLYKXXXXXXXXXLKYHYTLEDHLAXKXE

SEQ ID NO: 6495 - protein, 41 aa, Artificial Sequence
  Non-cyclic GFR-binding peptide
  MOD_RES (6)..(7): Xaa is C or S
  MOD_RES (21)..(22)..(23)..(24)..(25): Xaa is A or G
  MOD_RES (26)..(27)..(28)..(29): Xaa is A or G or absent
KVGKAXXVPTKLSATSVLYYXXXXXXXXXLRKHREGMSVAE

SEQ ID NO: 6496 - protein, 36 aa, Artificial Sequence
  Non-cyclic GFR-binding peptide
  MOD_RES (1)..(35): Xaa is C or S
  MOD_RES (15)..(16)..(17)..(18)..(19): Xaa is A or G
  MOD_RES (20)..(21)..(22)..(23): Xaa is A or G or absent
XAPTQLSATSVLYYXXXXXXXXXLRKHRNMVVRAXG

SEQ ID NO: 6497 - protein, 41 aa, Artificial Sequence
  Non-cyclic GFR-binding peptide
  MOD_RES (4)..(38)..(40): Xaa is C or S
  MOD_RES (18)..(19)..(20)..(21)..(22): Xaa is A or G
  MOD_RES (23)..(24)..(25)..(26): Xaa is A or G or absent
KPTXAPTKLSATSVLYYXXXXXXXXXLRKHRNMVVRSXGXH

SEQ ID NO: 6498 - protein, 37 aa, Artificial Sequence
  Non-cyclic GFR-binding peptide
  MOD_RES (5)..(6)..(37): Xaa is C or S
SASPXXVSQDLSAISILYLIGKTPKILKNYQMIVKSX

SEQ ID NO: 6499 - protein, 37 aa, Artificial Sequence
  Non-cyclic GFR-binding peptide
  MOD_RES (1)..(34)..(36): Xaa is C or S
  MOD_RES (15)..(16)..(17)..(18)..(19): Xaa is A or G
  MOD_RES (20)..(21)..(22)..(23): Xaa is A or G or absent
XVPQDLSPISILYKXXXXXXXXXLKYHYMVVKSXKXS

SEQ ID NO: 6500 - protein, 37 aa, Artificial Sequence
  Non-cyclic GFR-binding peptide
  MOD_RES (2)..(3)..(36): Xaa is C or S
  MOD_RES (17)..(18)..(19)..(20)..(21): Xaa is A or G
  MOD_RES (22)..(23)..(24)..(25): Xaa is A or G or absent
PXXVPQDLNAISILYFXXXXXXXXXLKKYRMVVKSXK

SEQ ID NO: 6501 - protein, 37 aa, Artificial Sequence
  Non-cyclic GFR-binding peptide
  MOD_RES (5)..(6)..(37): Xaa is C or S
SASPXXVSQDLNAISILYFIGKTPKILKKYRMIVKSX

SEQ ID NO: 6502 - protein, 40 aa, Artificial Sequence
  Non-cyclic GFR-binding peptide
  MOD_RES (4)..(5)..(37)..(39): Xaa is C or S
PKAXXVPTELSATSMLYYDENEKVVLRKHRDMVVEGXGXR

SEQ ID NO: 6503 - protein, 41 aa, Artificial Sequence
  Non-cyclic GFR-binding peptide
  MOD_RES (6)..(7)..(41): Xaa is C or S
  MOD_RES (21)..(22)..(23)..(24)..(25): Xaa is A or G
  MOD_RES (26)..(27)..(28)..(29): Xaa is A or G or absent
YVPKPXXAPTKLSAISVLYLXXXXXXXXXLKNYQNMVVRSX

SEQ ID NO: 6504 - protein, 40 aa, Artificial Sequence
  Non-cyclic GFR-binding peptide
  MOD_RES (4)..(4): Xaa is C or S
  MOD_RES (20)..(21)..(22)..(23)..(24): Xaa is A or G
  MOD_RES (25)..(26)..(27)..(28): Xaa is A or G or absent
NVQXRPTQVQLSATSVLYYXXXXXXXXXLRKHRTLEDHLA

SEQ ID NO: 6505 - protein, 40 aa, Artificial Sequence
  Non-cyclic GFR-binding peptide
  MOD_RES (3)..(40): Xaa is C or S
VQXRPTQVQLSATSVLYYEIVRKKPIFLRKHRTLEDHLAX

SEQ ID NO: 6506 - protein, 36 aa, Artificial Sequence
  Non-cyclic GFR-binding peptide
  MOD_RES (33)..(35): Xaa is C or S
  MOD_RES (14)..(15)..(16)..(17)..(18): Xaa is A or G
  MOD_RES (19)..(20)..(21)..(22): Xaa is A or G or absent
VPQALSAISILYLXXXXXXXXXLKNYQMIVRSXKXS

SEQ ID NO: 6507 - protein, 35 aa, Artificial Sequence
  Non-cyclic GFR-binding peptide
  MOD_RES (1)..(2)..(33)..(35): Xaa is C or S
XXVSQDLSATSILYYIGKTPKILRKHRMIVKSXKX

SEQ ID NO: 6508 - protein, 37 aa, Artificial Sequence
  Non-cyclic GFR-binding peptide
  MOD_RES (2)..(3)..(36): Xaa is C or S
  MOD_RES (17)..(18)..(19)..(20)..(21): Xaa is A or G
  MOD_RES (22)..(23)..(24)..(25): Xaa is A or G or absent
PXXVPQDLSAISILYLXXXXXXXXXLKNYQMVVKSXK

SEQ ID NO: 6509 - protein, 40 aa, Artificial Sequence
  Non-cyclic GFR-binding peptide
  MOD_RES (6)..(7): Xaa is C or S
  MOD_RES (21)..(22)..(23)..(24)..(25): Xaa is A or G
  MOD_RES (26)..(27)..(28)..(29): Xaa is A or G or absent
YVPKPXXAPTKLSATSVLYYXXXXXXXXXLRKHRNMVVRS

SEQ ID NO: 6510 - protein, 33 aa, Artificial Sequence
  Non-cyclic GFR-binding peptide
  MOD_RES (1)..(1): Xaa is C or S
  MOD_RES (15)..(16)..(17)..(18)..(19): Xaa is A or G
  MOD_RES (20)..(21)..(22)..(23): Xaa is A or G or absent
XVSQDLSATSILYYXXXXXXXXXLRKHRMIVKS

SEQ ID NO: 6511 - protein, 36 aa, Artificial Sequence
  Non-cyclic GFR-binding peptide
  MOD_RES (2)..(3)..(35): Xaa is C or S
PXXAPTQLSPISVLYKDDSSNVILKYHYNMVVRAXG

SEQ ID NO: 6512 - protein, 35 aa, Artificial Sequence
  Non-cyclic GFR-binding peptide
  MOD_RES (32)..(34): Xaa is C or S
APTKLSAISVLYLDSSNNVILKNYQNMVVKAXGXH

SEQ ID NO: 6513 - protein, 38 aa, Artificial Sequence
  Non-cyclic GFR-binding peptide
  MOD_RES (1)..(2)..(35)..(37): Xaa is C or S
  MOD_RES (16)..(17)..(18)..(19)..(20): Xaa is A or G
  MOD_RES (21)..(22)..(23)..(24): Xaa is A or G or absent
XXVSQDLSPISILYKXXXXXXXXXLKYHYMIVKSXKXS

SEQ ID NO: 6514 - protein, 43 aa, Artificial Sequence
  Non-cyclic GFR-binding peptide
  MOD_RES (6)..(7)..(41)..(43): Xaa is C or S
  MOD_RES (21)..(22)..(23)..(24)..(25): Xaa is A or G
  MOD_RES (26)..(27)..(28)..(29): Xaa is A or G or absent
KIPKAXXVPTELNAISMLYFXXXXXXXXXLKKYRDMVVEGXGX

SEQ ID NO: 6515 - protein, 31 aa, Artificial Sequence
  Non-cyclic GFR-binding peptide
  MOD_RES (1)..(1): Xaa is C or S
XVPQALSATSILYYVGRKPKVLRKHRMIVRS

SEQ ID NO: 6516 - protein, 36 aa, Artificial Sequence
  Non-cyclic GFR-binding peptide
  MOD_RES (1)..(2)..(36): Xaa is C or S
  MOD_RES (16)..(17)..(18)..(19)..(20): Xaa is A or G
  MOD_RES (21)..(22)..(23)..(24): Xaa is A or G or absent
XXAPTQLSAISVLYLXXXXXXXXXLKNYQNMVVRAX

SEQ ID NO: 6517 - protein, 34 aa, Artificial Sequence
  Non-cyclic GFR-binding peptide
  MOD_RES (2)..(3)..(34): Xaa is C or S
PXXVPQALSPISILYKVGRKPKVLKYHYMIVRSX

SEQ ID NO: 6518 - protein, 40 aa, Artificial Sequence
  Non-cyclic GFR-binding peptide
  MOD_RES (4)..(4): Xaa is C or S
  MOD_RES (20)..(21)..(22)..(23)..(24): Xaa is A or G
  MOD_RES (25)..(26)..(27)..(28): Xaa is A or G or absent
NVQXRPTQVQLSAISVLYLXXXXXXXXXLKNYQTLEDHLA

SEQ ID NO: 6519 - protein, 42 aa, Artificial Sequence
  Non-cyclic GFR-binding peptide
  MOD_RES (5)..(6)..(39)..(41): Xaa is C or S
  MOD_RES (20)..(21)..(22)..(23)..(24): Xaa is A or G
  MOD_RES (25)..(26)..(27)..(28): Xaa is A or G or absent
SASPXXVPQDLSPISILYKXXXXXXXXXLKYHYMVVKSXKXS

SEQ ID NO: 6520 - protein, 31 aa, Artificial Sequence
  Non-cyclic GFR-binding peptide
APTKLSPISVLYKDSSNNVILKYHYNMVVKA

SEQ ID NO: 6521 - protein, 33 aa, Artificial Sequence
  Non-cyclic GFR-binding peptide
  MOD_RES (2)..(3): Xaa is C or S
AXXAPTKLNAISVLYFDSSNNVILKKYRNMVVK

SEQ ID NO: 6522 - protein, 33 aa, Artificial Sequence
  Non-cyclic GFR-binding peptide
PTQVQLSAISVLYLEIVRKKPIFLKNYQTLEDH

SEQ ID NO: 6523 - protein, 37 aa, Artificial Sequence
  Non-cyclic GFR-binding peptide
  MOD_RES (1)..(2)..(34)..(36): Xaa is C or S
XXVPTELNAISMLYFDEYDKVVLKKYREMVVEGXGXR

SEQ ID NO: 6524 - protein, 37 aa, Artificial Sequence
  Non-cyclic GFR-binding peptide
  MOD_RES (1)..(2)..(34)..(36): Xaa is C or S
XXAPTQLSPISVLYKDDSSNVILKYHYNMVVRAXGXH

SEQ ID NO: 6525 - protein, 37 aa, Artificial Sequence
  Non-cyclic GFR-binding peptide
  MOD_RES (3)..(4)..(35)..(37): Xaa is C or S
APXXVPQALNAISILYFVGRKPKVLKKYRMIVRSXKX

SEQ ID NO: 6526 - protein, 37 aa, Artificial Sequence
  Non-cyclic GFR-binding peptide
  MOD_RES (1)..(35)..(37): Xaa is C or S
  MOD_RES (15)..(16)..(17)..(18)..(19): Xaa is A or G
  MOD_RES (20)..(21)..(22)..(23): Xaa is A or G or absent
XAPTQLSATSVLYYXXXXXXXXXLRKHRNMVVRAXGX

SEQ ID NO: 6527 - protein, 34 aa, Artificial Sequence
  Non-cyclic GFR-binding peptide
  MOD_RES (14)..(15)..(16)..(17)..(18): Xaa is A or G
  MOD_RES (19)..(20)..(21)..(22): Xaa is A or G or absent
TQVQLSATSVLYYXXXXXXXXXLRKHRTLEDHLA

SEQ ID NO: 6528 - protein, 36 aa, Artificial Sequence
  Non-cyclic GFR-binding peptide
  MOD_RES (3)..(4)..(35): Xaa is C or S
SPXXVPQDLSAISILYLVGRTPKVLKNYQMVVKSXK

SEQ ID NO: 6529 - protein, 40 aa, Artificial Sequence
  Non-cyclic GFR-binding peptide
  MOD_RES (6)..(7)..(39): Xaa is C or S
SIPKAXXVPTELSPISMLYKDEYDKVVLKYHYEMVVEGXG

SEQ ID NO: 6530 - protein, 37 aa, Artificial Sequence
  Non-cyclic GFR-binding peptide
  MOD_RES (4)..(5)..(37): Xaa is C or S
PKAXXVPTELSATSMLYYDEYDKVVLRKHREMVVEGX

SEQ ID NO: 6531 - protein, 36 aa, Artificial Sequence
  Non-cyclic GFR-binding peptide
  MOD_RES (2)..(3)..(34)..(36): Xaa is C or S
PXXVPQDLSAISILYLVGRTPKVLKNYQMVVKSXKX

SEQ ID NO: 6532 - protein, 36 aa, Artificial Sequence
  Non-cyclic GFR-binding peptide
  MOD_RES (1)..(2)..(36): Xaa is C or S
  MOD_RES (16)..(17)..(18)..(19)..(20): Xaa is A or G
  MOD_RES (21)..(22)..(23)..(24): Xaa is A or G or absent
XXVPTELSPISMLYKXXXXXXXXXLKYHYEMVVEGX

SEQ ID NO: 6533 - protein, 38 aa, Artificial Sequence
  Non-cyclic GFR-binding peptide
  MOD_RES (1)..(35)..(37): Xaa is C or S
  MOD_RES (15)..(16)..(17)..(18)..(19): Xaa is A or G
  MOD_RES (20)..(21)..(22)..(23): Xaa is A or G or absent
XAPTKLSAISVLYLXXXXXXXXXLKNYQNMVVKAXGXH

SEQ ID NO: 6534 - protein, 34 aa, Artificial Sequence
  Non-cyclic GFR-binding peptide
  MOD_RES (14)..(15)..(16)..(17)..(18): Xaa is A or G
  MOD_RES (19)..(20)..(21)..(22): Xaa is A or G or absent
TQVQLSAISVLYLXXXXXXXXXLKNYQTLEDHLA

SEQ ID NO: 6535 - protein, 40 aa, Artificial Sequence
  Non-cyclic GFR-binding peptide
  MOD_RES (1)..(38)..(40): Xaa is C or S
XRPTQVQLSATSVLYYEIVRKKPIFLRKHRTLEDHLAXKX

SEQ ID NO: 6536 - protein, 37 aa, Artificial Sequence
  Non-cyclic GFR-binding peptide
  MOD_RES (6)..(7): Xaa is C or S
ASAAPXXVPQALSATSILYYVGRKPKVLRKHRMIVRS

SEQ ID NO: 6537 - protein, 36 aa, Artificial Sequence
  Non-cyclic GFR-binding peptide
  MOD_RES (1)..(33)..(35): Xaa is C or S
XVPTELNAISMLYFDENEKVVLKKYRDMVVEGXGXR

SEQ ID NO: 6538 - protein, 32 aa, Artificial Sequence
  Non-cyclic GFR-binding peptide
  MOD_RES (14)..(15)..(16)..(17)..(18): Xaa is A or G
  MOD_RES (19)..(20)..(21)..(22): Xaa is A or G or absent
VPQALSAISILYLXXXXXXXXXLKNYQMIVRS

SEQ ID NO: 6539 - protein, 36 aa, Artificial Sequence
  Non-cyclic GFR-binding peptide
  MOD_RES (5)..(6): Xaa is C or S
SASPXXVPQDLSATSILYYVGRTPKVLRKHRMVVKS

SEQ ID NO: 6540 - protein, 35 aa, Artificial Sequence
  Non-cyclic GFR-binding peptide
RPTQVQLSAISVLYLEIVRKKPIFLKNYQTLEDHL

SEQ ID NO: 6541 - protein, 36 aa, Artificial Sequence
  Non-cyclic GFR-binding peptide
  MOD_RES (3)..(4): Xaa is C or S
KAXXVPTKLSAISVLYLDDMGVPTLKNYQEGMSVAE

SEQ ID NO: 6542 - protein, 41 aa, Artificial Sequence
  Non-cyclic GFR-binding peptide
  MOD_RES (4)..(5)..(38)..(40): Xaa is C or S
  MOD_RES (19)..(20)..(21)..(22)..(23): Xaa is A or G
  MOD_RES (24)..(25)..(26)..(27): Xaa is A or G or absent
ASPXXVPQDLSATSILYYXXXXXXXXXLRKHRMVVKSXKXS

SEQ ID NO: 6543 - protein, 41 aa, Artificial Sequence
  Non-cyclic GFR-binding peptide
  MOD_RES (3)..(4)..(38)..(40): Xaa is C or S
  MOD_RES (18)..(19)..(20)..(21)..(22): Xaa is A or G
  MOD_RES (23)..(24)..(25)..(26): Xaa is A or G or absent
KAXXVPTELSPISMLYKXXXXXXXXXLKYHYEMVVEGXGXR

SEQ ID NO: 6544 - protein, 34 aa, Artificial Sequence
  Non-cyclic GFR-binding peptide
  MOD_RES (1)..(2)..(34): Xaa is C or S
XXAPTKLSATSVLYYDDSSNVILRKHRNMVVRSX

SEQ ID NO: 6545 - protein, 40 aa, Artificial Sequence
  Non-cyclic GFR-binding peptide
  MOD_RES (4)..(5)..(39): Xaa is C or S
  MOD_RES (19)..(20)..(21)..(22)..(23): Xaa is A or G
  MOD_RES (24)..(25)..(26)..(27): Xaa is A or G or absent
PKAXXVPTELSATSMLYYXXXXXXXXXLRKHRDMVVEGXG

SEQ ID NO: 6546 - protein, 34 aa, Artificial Sequence
  Non-cyclic GFR-binding peptide
  MOD_RES (1)..(2)..(34): Xaa is C or S
XXAPTKLSAISVLYLDSSNNVILKNYQNMVVKAX

SEQ ID NO: 6547 - protein, 37 aa, Artificial Sequence
  Non-cyclic GFR-binding peptide
  MOD_RES (3)..(4)..(37): Xaa is C or S
  MOD_RES (18)..(19)..(20)..(21)..(22): Xaa is A or G
  MOD_RES (23)..(24)..(25)..(26): Xaa is A or G or absent
SPXXVSQDLSPISILYKXXXXXXXXXLKYHYMIVKSX

SEQ ID NO: 6548 - protein, 36 aa, Artificial Sequence
  Non-cyclic GFR-binding peptide
  MOD_RES (1)..(36): Xaa is C or S
  MOD_RES (15)..(16)..(17)..(18)..(19): Xaa is A or G
  MOD_RES (20)..(21)..(22)..(23): Xaa is A or G or absent
XVPTKLSAISVLYLXXXXXXXXXLKNYQEGMSVAEX

SEQ ID NO: 6549 - protein, 40 aa, Artificial Sequence
  Non-cyclic GFR-binding peptide
  MOD_RES (5)..(6)..(39): Xaa is C or S
  MOD_RES (20)..(21)..(22)..(23)..(24): Xaa is A or G
  MOD_RES (25)..(26)..(27)..(28): Xaa is A or G or absent
SASPXXVSQDLSATSILYYXXXXXXXXXLRKHRMIVKSXK

SEQ ID NO: 6550 - protein, 40 aa, Artificial Sequence
  Non-cyclic GFR-binding peptide
  MOD_RES (4)..(4): Xaa is C or S
NVQXRPTQVQLNAISVLYFEIVRKKPIFLKKYRTLEDHLA

SEQ ID NO: 6551 - protein, 35 aa, Artificial Sequence
  Non-cyclic GFR-binding peptide
  MOD_RES (35)..(35): Xaa is C or S
  MOD_RES (14)..(15)..(16)..(17)..(18): Xaa is A or G
  MOD_RES (19)..(20)..(21)..(22): Xaa is A or G or absent
TQVQLSATSVLYYXXXXXXXXXLRKHRTLEDHLAX

SEQ ID NO: 6552 - protein, 39 aa, Artificial Sequence
  Non-cyclic GFR-binding peptide
  MOD_RES (5)..(6)..(38): Xaa is C or S
VPKAXXAPTKLSPISVLYKDSSNNVILKYHYNMVVKAXG

SEQ ID NO: 6553 - protein, 41 aa, Artificial Sequence
  Non-cyclic GFR-binding peptide
  MOD_RES (5)..(6)..(38)..(40): Xaa is C or S
VPKPXXAPTKLSATSVLYYDDSSNVILRKHRNMVVRSXGXH

SEQ ID NO: 6554 - protein, 37 aa, Artificial Sequence
  Non-cyclic GFR-binding peptide
  MOD_RES (6)..(7): Xaa is C or S
SIPKAXXVPTELSPISMLYKDEYDKVVLKYHYEMVVE

SEQ ID NO: 6555 - protein, 34 aa, Artificial Sequence
  Non-cyclic GFR-binding peptide
  MOD_RES (2)..(34): Xaa is C or S
TXAPTKLSPISVLYKDDSSNVILKYHYNMVVRSX

SEQ ID NO: 6556 - protein, 35 aa, Artificial Sequence
  Non-cyclic GFR-binding peptide
  MOD_RES (34)..(34): Xaa is C or S
  MOD_RES (14)..(15)..(16)..(17)..(18): Xaa is A or G
  MOD_RES (19)..(20)..(21)..(22): Xaa is A or G or absent
APTKLSPISVLYKXXXXXXXXXLKYHYNMVVRSXG

SEQ ID NO: 6557 - protein, 40 aa, Artificial Sequence
  Non-cyclic GFR-binding peptide
  MOD_RES (6)..(7)..(40): Xaa is C or S
  MOD_RES (21)..(22)..(23)..(24)..(25): Xaa is A or G
  MOD_RES (26)..(27)..(28)..(29): Xaa is A or G or absent
ASAAPXXVPQALNAISILYFXXXXXXXXXLKKYRMIVRSX

SEQ ID NO: 6558 - protein, 42 aa, Artificial Sequence
  Non-cyclic GFR-binding peptide
  MOD_RES (6)..(7)..(41): Xaa is C or S
  MOD_RES (21)..(22)..(23)..(24)..(25): Xaa is A or G
  MOD_RES (26)..(27)..(28)..(29): Xaa is A or G or absent
YVPKPXXAPTKLSATSVLYYXXXXXXXXXLRKHRNMVVRSXG

SEQ ID NO: 6559 - protein, 36 aa, Artificial Sequence
  Non-cyclic GFR-binding peptide
  MOD_RES (3)..(4)..(35): Xaa is C or S
SPXXVSQDLSAISILYLIGKTPKILKNYQMIVKSXK

SEQ ID NO: 6560 - protein, 31 aa, Artificial Sequence
  Non-cyclic GFR-binding peptide
VPTELSATSMLYYDENEKVVLRKHRDMVVEG

SEQ ID NO: 6561 - protein, 36 aa, Artificial Sequence
  Non-cyclic GFR-binding peptide
  MOD_RES (3)..(4): Xaa is C or S
  MOD_RES (18)..(19)..(20)..(21)..(22): Xaa is A or G
  MOD_RES (23)..(24)..(25)..(26): Xaa is A or G or absent
SPXXVSQDLNAISILYFXXXXXXXXXLKKYRMIVKS

SEQ ID NO: 6562 - protein, 39 aa, Artificial Sequence
  Non-cyclic GFR-binding peptide
  MOD_RES (4)..(5)..(39): Xaa is C or S
  MOD_RES (19)..(20)..(21)..(22)..(23): Xaa is A or G
  MOD_RES (24)..(25)..(26)..(27): Xaa is A or G or absent
PKAXXVPTELSATSMLYYXXXXXXXXXLRKHREMVVEGX

SEQ ID NO: 6563 - protein, 35 aa, Artificial Sequence
  Non-cyclic GFR-binding peptide
  MOD_RES (3)..(4): Xaa is C or S
KAXXVPTELSPISMLYKDEYDKVVLKYHYEMVVEG

SEQ ID NO: 6564 - protein, 31 aa, Artificial Sequence
  Non-cyclic GFR-binding peptide
VPTELSPISMLYKDEYDKVVLKYHYEMVVEG

SEQ ID NO: 6565 - protein, 35 aa, Artificial Sequence
  Non-cyclic GFR-binding peptide
  MOD_RES (1)..(1): Xaa is C or S
  MOD_RES (17)..(18)..(19)..(20)..(21): Xaa is A or G
  MOD_RES (22)..(23)..(24)..(25): Xaa is A or G or absent
XRPTQVQLSPISVLYKXXXXXXXXXLKYHYTLEDH

SEQ ID NO: 6566 - protein, 36 aa, Artificial Sequence
  Non-cyclic GFR-binding peptide
  MOD_RES (2)..(3)..(36): Xaa is C or S
  MOD_RES (17)..(18)..(19)..(20)..(21): Xaa is A or G
  MOD_RES (22)..(23)..(24)..(25): Xaa is A or G or absent
PXXVPQALSPISILYKXXXXXXXXXLKYHYMIVRSX

SEQ ID NO: 6567 - protein, 33 aa, Artificial Sequence
  Non-cyclic GFR-binding peptide
  MOD_RES (14)..(15)..(16)..(17)..(18): Xaa is A or G
  MOD_RES (19)..(20)..(21)..(22): Xaa is A or G or absent
APTKLSPISVLYKXXXXXXXXXLKYHYNMVVRS

SEQ ID NO: 6568 - protein, 34 aa, Artificial Sequence
  Non-cyclic GFR-binding peptide
TQVQLNAISVLYFEIVRKKPIFLKKYRTLEDHLA

SEQ ID NO: 6569 - protein, 40 aa, Artificial Sequence
  Non-cyclic GFR-binding peptide
  MOD_RES (5)..(37)..(39): Xaa is C or S
TKPTXAPTKLSPISVLYKDDSSNVILKYHYNMVVRSXGXH

SEQ ID NO: 6570 - protein, 43 aa, Artificial Sequence
  Non-cyclic GFR-binding peptide
  MOD_RES (5)..(6)..(40)..(42): Xaa is C or S
  MOD_RES (20)..(21)..(22)..(23)..(24): Xaa is A or G
  MOD_RES (25)..(26)..(27)..(28): Xaa is A or G or absent
IPKAXXVPTELNAISMLYFXXXXXXXXXLKKYREMVVEGXGXR

SEQ ID NO: 6571 - protein, 34 aa, Artificial Sequence
  Non-cyclic GFR-binding peptide
  MOD_RES (1)..(1): Xaa is C or S
  MOD_RES (15)..(16)..(17)..(18)..(19): Xaa is A or G
  MOD_RES (20)..(21)..(22)..(23): Xaa is A or G or absent
XVPTELSATSMLYYXXXXXXXXXLRKHRDMVVEG

SEQ ID NO: 6572 - protein, 37 aa, Artificial Sequence
  Non-cyclic GFR-binding peptide
  MOD_RES (5)..(37): Xaa is C or S
TKPTXAPTKLSPISVLYKDDSSNVILKYHYNMVVRSX

SEQ ID NO: 6573 - protein, 38 aa, Artificial Sequence
  Non-cyclic GFR-binding peptide
  MOD_RES (3)..(4)..(37): Xaa is C or S
  MOD_RES (18)..(19)..(20)..(21)..(22): Xaa is A or G
  MOD_RES (23)..(24)..(25)..(26): Xaa is A or G or absent
SPXXVSQDLSATSILYYXXXXXXXXXLRKHRMIVKSXK

SEQ ID NO: 6574 - protein, 35 aa, Artificial Sequence
  Non-cyclic GFR-binding peptide
  MOD_RES (2)..(3)..(35): Xaa is C or S
AXXAPTKLSAISVLYLDSSNNVILKNYQNMVVKAX

SEQ ID NO: 6575 - protein, 38 aa, Artificial Sequence
  Non-cyclic GFR-binding peptide
  MOD_RES (1)..(2)..(36)..(38): Xaa is C or S
  MOD_RES (16)..(17)..(18)..(19)..(20): Xaa is A or G
  MOD_RES (21)..(22)..(23)..(24): Xaa is A or G or absent
XXAPTKLSATSVLYYXXXXXXXXXLRKHRNMVVRSXGX

SEQ ID NO: 6576 - protein, 40 aa, Artificial Sequence
  Non-cyclic GFR-binding peptide
  MOD_RES (5)..(6)..(37)..(39): Xaa is C or S
SASPXXVPQDLNAISILYFVGRTPKVLKKYRMVVKSXKXS

SEQ ID NO: 6577 - protein, 30 aa, Artificial Sequence
  Non-cyclic GFR-binding peptide
VPQDLSAISILYLVGRTPKVLKNYQMVVKS

SEQ ID NO: 6578 - protein, 42 aa, Artificial Sequence
  Non-cyclic GFR-binding peptide
  MOD_RES (4)..(5)..(40)..(42): Xaa is C or S
  MOD_RES (19)..(20)..(21)..(22)..(23): Xaa is A or G
  MOD_RES (24)..(25)..(26)..(27): Xaa is A or G or absent
GKAXXVPTKLSATSVLYYXXXXXXXXXLRKHREGMSVAEXGX

SEQ ID NO: 6579 - protein, 32 aa, Artificial Sequence
  Non-cyclic GFR-binding peptide
  MOD_RES (14)..(15)..(16)..(17)..(18): Xaa is A or G
  MOD_RES (19)..(20)..(21)..(22): Xaa is A or G or absent
VPTELSPISMLYKXXXXXXXXXLKYHYDMVVE

SEQ ID NO: 6580 - protein, 42 aa, Artificial Sequence
  Non-cyclic GFR-binding peptide
  MOD_RES (4)..(5)..(40)..(42): Xaa is C or S
  MOD_RES (19)..(20)..(21)..(22)..(23): Xaa is A or G
  MOD_RES (24)..(25)..(26)..(27): Xaa is A or G or absent
GKAXXVPTKLSAISVLYLXXXXXXXXXLKNYQEGMSVAEXGX

SEQ ID NO: 6581 - protein, 40 aa, Artificial Sequence
  Non-cyclic GFR-binding peptide
  MOD_RES (3)..(4)..(37)..(39): Xaa is C or S
KAXXVPTKLSAISVLYLDDMGVPTLKNYQEGMSVAEXGXR

SEQ ID NO: 6582 - protein, 40 aa, Artificial Sequence
  Non-cyclic GFR-binding peptide
  MOD_RES (4)..(5)..(38)..(40): Xaa is C or S
GKAXXVPTKLSATSVLYYDDMGVPTLRKHREGMSVAEXGX

SEQ ID NO: 6583 - protein, 33 aa, Artificial Sequence
  Non-cyclic GFR-binding peptide
  MOD_RES (1)..(2): Xaa is C or S
XXVPTELSPISMLYKDENEKVVLKYHYDMVVEG

SEQ ID NO: 6584 - protein, 38 aa, Artificial Sequence
  Non-cyclic GFR-binding peptide
  MOD_RES (2)..(3)..(36)..(38): Xaa is C or S
  MOD_RES (17)..(18)..(19)..(20)..(21): Xaa is A or G
  MOD_RES (22)..(23)..(24)..(25): Xaa is A or G or absent
PXXVSQDLSATSILYYXXXXXXXXXLRKHRMIVKSXKX

SEQ ID NO: 6585 - protein, 45 aa, Artificial Sequence
  Non-cyclic GFR-binding peptide
  MOD_RES (5)..(42)..(44): Xaa is C or S
  MOD_RES (21)..(22)..(23)..(24)..(25): Xaa is A or G
  MOD_RES (26)..(27)..(28)..(29): Xaa is A or G or absent
RNVQXRPTQVQLNAISVLYFXXXXXXXXXLKKYRTLEDHLAXKXE

SEQ ID NO: 6586 - protein, 37 aa, Artificial Sequence
  Non-cyclic GFR-binding peptide
  MOD_RES (2)..(2): Xaa is C or S
QXRPTQVQLNAISVLYFEIVRKKPIFLKKYRTLEDHL

SEQ ID NO: 6587 - protein, 33 aa, Artificial Sequence
  Non-cyclic GFR-binding peptide
  MOD_RES (14)..(15)..(16)..(17)..(18): Xaa is A or G
  MOD_RES (19)..(20)..(21)..(22): Xaa is A or G or absent
APTKLSATSVLYYXXXXXXXXXLRKHRNMVVRS

SEQ ID NO: 6588 - protein, 36 aa, Artificial Sequence
  Non-cyclic GFR-binding peptide
  MOD_RES (3)..(4): Xaa is C or S
  MOD_RES (18)..(19)..(20)..(21)..(22): Xaa is A or G
  MOD_RES (23)..(24)..(25)..(26): Xaa is A or G or absent
KAXXAPTKLSAISVLYLXXXXXXXXXLKNYQNMVVK

SEQ ID NO: 6589 - protein, 40 aa, Artificial Sequence
  Non-cyclic GFR-binding peptide
  MOD_RES (4)..(38)..(40): Xaa is C or S
  MOD_RES (18)..(19)..(20)..(21)..(22): Xaa is A or G
  MOD_RES (23)..(24)..(25)..(26): Xaa is A or G or absent
KPTXAPTKLSATSVLYYXXXXXXXXXLRKHRNMVVRSXGX

SEQ ID NO: 6590 - protein, 38 aa, Artificial Sequence
  Non-cyclic GFR-binding peptide
  MOD_RES (6)..(7)..(38): Xaa is C or S
ASASPXXVPQDLSAISILYLVGRTPKVLKNYQMVVKSX

SEQ ID NO: 6591 - protein, 38 aa, Artificial Sequence
  Non-cyclic GFR-binding peptide
  MOD_RES (3)..(4)..(37): Xaa is C or S
  MOD_RES (18)..(19)..(20)..(21)..(22): Xaa is A or G
  MOD_RES (23)..(24)..(25)..(26): Xaa is A or G or absent
APXXVPQALSPISILYKXXXXXXXXXLKYHYMIVRSXK

SEQ ID NO: 6592 - protein, 38 aa, Artificial Sequence
  Non-cyclic GFR-binding peptide
  MOD_RES (36)..(38): Xaa is C or S
PTQVQLSAISVLYLEIVRKKPIFLKNYQTLEDHLAXKX

SEQ ID NO: 6593 - protein, 41 aa, Artificial Sequence
  Non-cyclic GFR-binding peptide
  MOD_RES (4)..(5)..(38)..(40): Xaa is C or S
  MOD_RES (19)..(20)..(21)..(22)..(23): Xaa is A or G
  MOD_RES (24)..(25)..(26)..(27): Xaa is A or G or absent
ASPXXVSQDLSPISILYKXXXXXXXXXLKYHYMIVKSXKXS

SEQ ID NO: 6594 - protein, 34 aa, Artificial Sequence
  Non-cyclic GFR-binding peptide
  MOD_RES (3)..(4): Xaa is C or S
KAXXVPTELNAISMLYFDEYDKVVLKKYREMVVE

SEQ ID NO: 6595 - protein, 36 aa, Artificial Sequence
  Non-cyclic GFR-binding peptide
  MOD_RES (1)..(33)..(35): Xaa is C or S
XAPTQLSPISVLYKDDSSNVILKYHYNMVVRAXGXH

SEQ ID NO: 6596 - protein, 39 aa, Artificial Sequence
  Non-cyclic GFR-binding peptide
  MOD_RES (5)..(6)..(38): Xaa is C or S
IPKAXXVPTELNAISMLYFDEYDKVVLKKYREMVVEGXG

SEQ ID NO: 6597 - protein, 36 aa, Artificial Sequence
  Non-cyclic GFR-binding peptide
  MOD_RES (2)..(3)..(36): Xaa is C or S
AXXVPTKLSAISVLYLDDMGVPTLKNYQEGMSVAEX

SEQ ID NO: 6598 - protein, 33 aa, Artificial Sequence
  Non-cyclic GFR-binding peptide
  MOD_RES (32)..(32): Xaa is C or S
VPTELSPISMLYKDEYDKVVLKYHYEMVVEGXG

SEQ ID NO: 6599 - protein, 38 aa, Artificial Sequence
  Non-cyclic GFR-binding peptide
  MOD_RES (3)..(4)..(36)..(38): Xaa is C or S
KAXXVPTELSATSMLYYDEYDKVVLRKHREMVVEGXGX

SEQ ID NO: 6600 - protein, 34 aa, Artificial Sequence
  Non-cyclic GFR-binding peptide
  MOD_RES (1)..(2)..(33): Xaa is C or S
XXVPQDLSATSILYYVGRTPKVLRKHRMVVKSXK

SEQ ID NO: 6601 - protein, 37 aa, Artificial Sequence
  Non-cyclic GFR-binding peptide
  MOD_RES (3)..(4): Xaa is C or S
  MOD_RES (18)..(19)..(20)..(21)..(22): Xaa is A or G
  MOD_RES (23)..(24)..(25)..(26): Xaa is A or G or absent
KAXXVPTELNAISMLYFXXXXXXXXXLKKYREMVVEG

SEQ ID NO: 6602 - protein, 42 aa, Artificial Sequence
  Non-cyclic GFR-binding peptide
  MOD_RES (5)..(6)..(40)..(42): Xaa is C or S
  MOD_RES (20)..(21)..(22)..(23)..(24): Xaa is A or G
  MOD_RES (25)..(26)..(27)..(28): Xaa is A or G or absent
VPKAXXAPTKLNAISVLYFXXXXXXXXXLKKYRNMVVKAXGX

SEQ ID NO: 6603 - protein, 34 aa, Artificial Sequence
  Non-cyclic GFR-binding peptide
  MOD_RES (31)..(33): Xaa is C or S
VSQDLNAISILYFIGKTPKILKKYRMIVKSXKXS

SEQ ID NO: 6604 - protein, 39 aa, Artificial Sequence
  Non-cyclic GFR-binding peptide
  MOD_RES (4)..(5)..(37)..(39): Xaa is C or S
PKAXXAPTKLSPISVLYKDSSNNVILKYHYNMVVKAXGX

SEQ ID NO: 6605 - protein, 37 aa, Artificial Sequence
  Non-cyclic GFR-binding peptide
  MOD_RES (6)..(7): Xaa is C or S
SIPKAXXVPTELSATSMLYYDEYDKVVLRKHREMVVE

SEQ ID NO: 6606 - protein, 35 aa, Artificial Sequence
  Non-cyclic GFR-binding peptide
  MOD_RES (2)..(3): Xaa is C or S
  MOD_RES (17)..(18)..(19)..(20)..(21): Xaa is A or G
  MOD_RES (22)..(23)..(24)..(25): Xaa is A or G or absent
PXXVPQDLSPISILYKXXXXXXXXXLKYHYMVVKS

SEQ ID NO: 6607 - protein, 35 aa, Artificial Sequence
  Non-cyclic GFR-binding peptide
  MOD_RES (4)..(5): Xaa is C or S
PKAXXVPTELNAISMLYFDENEKVVLKKYRDMVVE

SEQ ID NO: 6608 - protein, 35 aa, Artificial Sequence
  Non-cyclic GFR-binding peptide
  MOD_RES (33)..(35): Xaa is C or S
VPTKLSAISVLYLDDMGVPTLKNYQEGMSVAEXGX

SEQ ID NO: 6609 - protein, 41 aa, Artificial Sequence
  Non-cyclic GFR-binding peptide
  MOD_RES (1)..(38)..(40): Xaa is C or S
XRPTQVQLSPISVLYKEIVRKKPIFLKYHYTLEDHLAXKXE

SEQ ID NO: 6610 - protein, 35 aa, Artificial Sequence
  Non-cyclic GFR-binding peptide
  MOD_RES (2)..(34): Xaa is C or S
TXAPTKLSPISVLYKDDSSNVILKYHYNMVVRSXG

SEQ ID NO: 6611 - protein, 35 aa, Artificial Sequence
  Non-cyclic GFR-binding peptide
  MOD_RES (1)..(2): Xaa is C or S
  MOD_RES (16)..(17)..(18)..(19)..(20): Xaa is A or G
  MOD_RES (21)..(22)..(23)..(24): Xaa is A or G or absent
XXVPTELNAISMLYFXXXXXXXXXLKKYRDMVVEG

SEQ ID NO: 6612 - protein, 40 aa, Artificial Sequence
  Non-cyclic GFR-binding peptide
  MOD_RES (4)..(5)..(38)..(40): Xaa is C or S
  MOD_RES (19)..(20)..(21)..(22)..(23): Xaa is A or G
  MOD_RES (24)..(25)..(26)..(27): Xaa is A or G or absent
ASPXXVSQDLSPISILYKXXXXXXXXXLKYHYMIVKSXKX

SEQ ID NO: 6613 - protein, 40 aa, Artificial Sequence
  Non-cyclic GFR-binding peptide
  MOD_RES (5)..(6)..(40): Xaa is C or S
  MOD_RES (20)..(21)..(22)..(23)..(24): Xaa is A or G
  MOD_RES (25)..(26)..(27)..(28): Xaa is A or G or absent
IPKAXXVPTELSATSMLYYXXXXXXXXXLRKHRDMVVEGX

SEQ ID NO: 6614 - protein, 38 aa, Artificial Sequence
  Non-cyclic GFR-binding peptide
  MOD_RES (1)..(2)..(35)..(37): Xaa is C or S
  MOD_RES (16)..(17)..(18)..(19)..(20): Xaa is A or G
  MOD_RES (21)..(22)..(23)..(24): Xaa is A or G or absent
XXVPQDLSATSILYYXXXXXXXXXLRKHRMVVKSXKXS

SEQ ID NO: 6615 - protein, 38 aa, Artificial Sequence
  Non-cyclic GFR-binding peptide
  MOD_RES (2)..(3)..(36)..(38): Xaa is C or S
  MOD_RES (17)..(18)..(19)..(20)..(21): Xaa is A or G
  MOD_RES (22)..(23)..(24)..(25): Xaa is A or G or absent
PXXVPQDLSATSILYYXXXXXXXXXLRKHRMVVKSXKX

SEQ ID NO: 6616 - protein, 41 aa, Artificial Sequence
  Non-cyclic GFR-binding peptide
  MOD_RES (5)..(6)..(39)..(41): Xaa is C or S
  MOD_RES (20)..(21)..(22)..(23)..(24): Xaa is A or G
  MOD_RES (25)..(26)..(27)..(28): Xaa is A or G or absent
SAAPXXVPQALNAISILYFXXXXXXXXXLKKYRMIVRSXKX

SEQ ID NO: 6617 - protein, 37 aa, Artificial Sequence
  Non-cyclic GFR-binding peptide
  MOD_RES (4)..(5): Xaa is C or S
  MOD_RES (19)..(20)..(21)..(22)..(23): Xaa is A or G
  MOD_RES (24)..(25)..(26)..(27): Xaa is A or G or absent
PKPXXAPTKLSAISVLYLXXXXXXXXXLKNYQNMVVR

SEQ ID NO: 6618 - protein, 30 aa, Artificial Sequence
  Non-cyclic GFR-binding peptide
VPQDLSPISILYKVGRTPKVLKYHYMVVKS

SEQ ID NO: 6619 - protein, 34 aa, Artificial Sequence
  Non-cyclic GFR-binding peptide
  MOD_RES (1)..(2): Xaa is C or S
  MOD_RES (16)..(17)..(18)..(19)..(20): Xaa is A or G
  MOD_RES (21)..(22)..(23)..(24): Xaa is A or G or absent
XXVPQDLNAISILYFXXXXXXXXXLKKYRMVVKS

SEQ ID NO: 6620 - protein, 32 aa, Artificial Sequence
  Non-cyclic GFR-binding peptide
  MOD_RES (14)..(15)..(16)..(17)..(18): Xaa is A or G
  MOD_RES (19)..(20)..(21)..(22): Xaa is A or G or absent
VSQDLSPISILYKXXXXXXXXXLKYHYMIVKS

SEQ ID NO: 6621 - protein, 33 aa, Artificial Sequence
  Non-cyclic GFR-binding peptide
  MOD_RES (1)..(1): Xaa is C or S
  MOD_RES (15)..(16)..(17)..(18)..(19): Xaa is A or G
  MOD_RES (20)..(21)..(22)..(23): Xaa is A or G or absent
XVSQDLSPISILYKXXXXXXXXXLKYHYMIVKS

SEQ ID NO: 6622 - protein, 39 aa, Artificial Sequence
  Non-cyclic GFR-binding peptide
  MOD_RES (3)..(4)..(38): Xaa is C or S
  MOD_RES (18)..(19)..(20)..(21)..(22): Xaa is A or G
  MOD_RES (23)..(24)..(25)..(26): Xaa is A or G or absent
KPXXAPTKLSAISVLYLXXXXXXXXXLKNYQNMVVRSXG

SEQ ID NO: 6623 - protein, 36 aa, Artificial Sequence
  Non-cyclic GFR-binding peptide
  MOD_RES (2)..(3): Xaa is C or S
  MOD_RES (17)..(18)..(19)..(20)..(21): Xaa is A or G
  MOD_RES (22)..(23)..(24)..(25): Xaa is A or G or absent
AXXAPTKLSPISVLYKXXXXXXXXXLKYHYNMVVKA

SEQ ID NO: 6624 - protein, 37 aa, Artificial Sequence
  Non-cyclic GFR-binding peptide
  MOD_RES (3)..(4)..(35)..(37): Xaa is C or S
SPXXVPQDLSPISILYKVGRTPKVLKYHYMVVKSXKX

SEQ ID NO: 6625 - protein, 40 aa, Artificial Sequence
  Non-cyclic GFR-binding peptide
  MOD_RES (5)..(6)..(37)..(39): Xaa is C or S
SASPXXVSQDLSATSILYYIGKTPKILRKHRMIVKSXKXS

SEQ ID NO: 6626 - protein, 38 aa, Artificial Sequence
  Non-cyclic GFR-binding peptide
  MOD_RES (4)..(5)..(36)..(38): Xaa is C or S
AAPXXVPQALSPISILYKVGRKPKVLKYHYMIVRSXKX

SEQ ID NO: 6627 - protein, 40 aa, Artificial Sequence
  Non-cyclic GFR-binding peptide
  MOD_RES (4)..(5)..(37)..(39): Xaa is C or S
PKPXXAPTKLSPISVLYKDDSSNVILKYHYNMVVRSXGXH

SEQ ID NO: 6628 - protein, 42 aa, Artificial Sequence
  Non-cyclic GFR-binding peptide
  MOD_RES (4)..(5)..(39)..(41): Xaa is C or S
  MOD_RES (19)..(20)..(21)..(22)..(23): Xaa is A or G
  MOD_RES (24)..(25)..(26)..(27): Xaa is A or G or absent
PKAXXAPTKLSPISVLYKXXXXXXXXXLKYHYNMVVKAXGXH

SEQ ID NO: 6629 - protein, 35 aa, Artificial Sequence
  Non-cyclic GFR-binding peptide
  MOD_RES (34)..(34): Xaa is C or S
  MOD_RES (14)..(15)..(16)..(17)..(18): Xaa is A or G
  MOD_RES (19)..(20)..(21)..(22): Xaa is A or G or absent
VPTELSPISMLYKXXXXXXXXXLKYHYDMVVEGXG

SEQ ID NO: 6630 - protein, 39 aa, Artificial Sequence
  Non-cyclic GFR-binding peptide
  MOD_RES (5)..(39): Xaa is C or S
  MOD_RES (19)..(20)..(21)..(22)..(23): Xaa is A or G
  MOD_RES (24)..(25)..(26)..(27): Xaa is A or G or absent
TKPTXAPTKLSPISVLYKXXXXXXXXXLKYHYNMVVRSX

SEQ ID NO: 6631 - protein, 34 aa, Artificial Sequence
  Non-cyclic GFR-binding peptide
  MOD_RES (3)..(3): Xaa is C or S
PTXAPTKLSAISVLYLDDSSNVILKNYQNMVVRS

SEQ ID NO: 6632 - protein, 40 aa, Artificial Sequence
  Non-cyclic GFR-binding peptide
  MOD_RES (1)..(38)..(40): Xaa is C or S
XRPTQVQLSAISVLYLEIVRKKPIFLKNYQTLEDHLAXKX

SEQ ID NO: 6633 - protein, 34 aa, Artificial Sequence
  Non-cyclic GFR-binding peptide
  MOD_RES (1)..(1): Xaa is C or S
  MOD_RES (15)..(16)..(17)..(18)..(19): Xaa is A or G
  MOD_RES (20)..(21)..(22)..(23): Xaa is A or G or absent
XVPTELNAISMLYFXXXXXXXXXLKKYRDMVVEG

SEQ ID NO: 6634 - protein, 37 aa, Artificial Sequence
  Non-cyclic GFR-binding peptide
  MOD_RES (2)..(3)..(34)..(36): Xaa is C or S
PXXVSQDLNAISILYFIGKTPKILKKYRMIVKSXKXS

SEQ ID NO: 6635 - protein, 37 aa, Artificial Sequence
  Non-cyclic GFR-binding peptide
  MOD_RES (1)..(2)..(35)..(37): Xaa is C or S
  MOD_RES (16)..(17)..(18)..(19)..(20): Xaa is A or G
  MOD_RES (21)..(22)..(23)..(24): Xaa is A or G or absent
XXVPQALSAISILYLXXXXXXXXXLKNYQMIVRSXKX

SEQ ID NO: 6636 - protein, 34 aa, Artificial Sequence
  Non-cyclic GFR-binding peptide
  MOD_RES (1)..(33): Xaa is C or S
XAPTQLSAISVLYLDDSSNVILKNYQNMVVRAXG

SEQ ID NO: 6637 - protein, 38 aa, Artificial Sequence
  Non-cyclic GFR-binding peptide
  MOD_RES (4)..(4): Xaa is C or S
NVQXRPTQVQLNAISVLYFEIVRKKPIFLKKYRTLEDH

SEQ ID NO: 6638 - protein, 41 aa, Artificial Sequence
  Non-cyclic GFR-binding peptide
  MOD_RES (4)..(5)..(38)..(40): Xaa is C or S
  MOD_RES (19)..(20)..(21)..(22)..(23): Xaa is A or G
  MOD_RES (24)..(25)..(26)..(27): Xaa is A or G or absent
ASPXXVPQDLNAISILYFXXXXXXXXXLKKYRMVVKSXKXS

SEQ ID NO: 6639 - protein, 40 aa, Artificial Sequence
  Non-cyclic GFR-binding peptide
  MOD_RES (6)..(7)..(39): Xaa is C or S
AVPKAXXAPTKLNAISVLYFDSSNNVILKKYRNMVVKAXG

SEQ ID NO: 6640 - protein, 34 aa, Artificial Sequence
  Non-cyclic GFR-binding peptide
  MOD_RES (2)..(3)..(34): Xaa is C or S
PXXVSQDLSAISILYLIGKTPKILKNYQMIVKSX

SEQ ID NO: 6641 - protein, 35 aa, Artificial Sequence
  Non-cyclic GFR-binding peptide
  MOD_RES (35)..(35): Xaa is C or S
TQVQLNAISVLYFEIVRKKPIFLKKYRTLEDHLAX

SEQ ID NO: 6642 - protein, 32 aa, Artificial Sequence
  Non-cyclic GFR-binding peptide
  MOD_RES (32)..(32): Xaa is C or S
APTQLSPISVLYKDDSSNVILKYHYNMVVRAX

SEQ ID NO: 6643 - protein, 36 aa, Artificial Sequence
  Non-cyclic GFR-binding peptide
  MOD_RES (2)..(3)..(34)..(36): Xaa is C or S
PXXVSQDLNAISILYFIGKTPKILKKYRMIVKSXKX

SEQ ID NO: 6644 - protein, 38 aa, Artificial Sequence
  Non-cyclic GFR-binding peptide
  MOD_RES (3)..(4)..(35)..(37): Xaa is C or S
SPXXVSQDLSAISILYLIGKTPKILKNYQMIVKSXKXS

SEQ ID NO: 6645 - protein, 38 aa, Artificial Sequence
  Non-cyclic GFR-binding peptide
  MOD_RES (4)..(5): Xaa is C or S
  MOD_RES (19)..(20)..(21)..(22)..(23): Xaa is A or G
  MOD_RES (24)..(25)..(26)..(27): Xaa is A or G or absent
PKAXXAPTKLSAISVLYLXXXXXXXXXLKNYQNMVVKA

SEQ ID NO: 6646 - protein, 36 aa, Artificial Sequence
  Non-cyclic GFR-binding peptide
  MOD_RES (4)..(5): Xaa is C or S
PKAXXAPTKLSAISVLYLDSSNNVILKNYQNMVVKA

SEQ ID NO: 6647 - protein, 43 aa, Artificial Sequence
  Non-cyclic GFR-binding peptide
  MOD_RES (6)..(7)..(40)..(42): Xaa is C or S
KVGKAXXVPTKLNAISVLYFDDMGVPTLKKYREGMSVAEXGXR

SEQ ID NO: 6648 - protein, 38 aa, Artificial Sequence
  Non-cyclic GFR-binding peptide
  MOD_RES (4)..(5): Xaa is C or S
  MOD_RES (19)..(20)..(21)..(22)..(23): Xaa is A or G
  MOD_RES (24)..(25)..(26)..(27): Xaa is A or G or absent
PKAXXAPTKLNAISVLYFXXXXXXXXXLKKYRNMVVKA

SEQ ID NO: 6649 - protein, 39 aa, Artificial Sequence
  Non-cyclic GFR-binding peptide
  MOD_RES (3)..(3): Xaa is C or S
VQXRPTQVQLNAISVLYFEIVRKKPIFLKKYRTLEDHLA

SEQ ID NO: 6650 - protein, 35 aa, Artificial Sequence
  Non-cyclic GFR-binding peptide
  MOD_RES (1)..(2)..(35): Xaa is C or S
  MOD_RES (16)..(17)..(18)..(19)..(20): Xaa is A or G
  MOD_RES (21)..(22)..(23)..(24): Xaa is A or G or absent
XXVPQDLSPISILYKXXXXXXXXXLKYHYMVVKSX

SEQ ID NO: 6651 - protein, 36 aa, Artificial Sequence
  Non-cyclic GFR-binding peptide
  MOD_RES (1)..(34)..(36): Xaa is C or S
  MOD_RES (15)..(16)..(17)..(18)..(19): Xaa is A or G
  MOD_RES (20)..(21)..(22)..(23): Xaa is A or G or absent
XVPQDLSPISILYKXXXXXXXXXLKYHYMVVKSXKX

SEQ ID NO: 6652 - protein, 34 aa, Artificial Sequence
  Non-cyclic GFR-binding peptide
  MOD_RES (1)..(34): Xaa is C or S
  MOD_RES (15)..(16)..(17)..(18)..(19): Xaa is A or G
  MOD_RES (20)..(21)..(22)..(23): Xaa is A or G or absent
XVPQALSPISILYKXXXXXXXXXLKYHYMIVRSX

SEQ ID NO: 6653 - protein, 36 aa, Artificial Sequence
  Non-cyclic GFR-binding peptide
  MOD_RES (4)..(5): Xaa is C or S
PKPXXAPTQLSAISVLYLDDSSNVILKNYQNMVVRA

SEQ ID NO: 6654 - protein, 35 aa, Artificial Sequence
  Non-cyclic GFR-binding peptide
  MOD_RES (2)..(3)..(34): Xaa is C or S
PXXVPQALSATSILYYVGRKPKVLRKHRMIVRSXK

SEQ ID NO: 6655 - protein, 37 aa, Artificial Sequence
  Non-cyclic GFR-binding peptide
  MOD_RES (2)..(3)..(36): Xaa is C or S
AXXVPTKLSAISVLYLDDMGVPTLKNYQEGMSVAEXG

SEQ ID NO: 6656 - protein, 41 aa, Artificial Sequence
  Non-cyclic GFR-binding peptide
  MOD_RES (5)..(39)..(41): Xaa is C or S
  MOD_RES (19)..(20)..(21)..(22)..(23): Xaa is A or G
  MOD_RES (24)..(25)..(26)..(27): Xaa is A or G or absent
TKPTXAPTKLSATSVLYYXXXXXXXXXLRKHRNMVVRSXGX

SEQ ID NO: 6657 - protein, 39 aa, Artificial Sequence
  Non-cyclic GFR-binding peptide
  MOD_RES (36)..(38): Xaa is C or S
PTQVQLNAISVLYFEIVRKKPIFLKKYRTLEDHLAXKXE

SEQ ID NO: 6658 - protein, 38 aa, Artificial Sequence
  Non-cyclic GFR-binding peptide
  MOD_RES (3)..(4)..(36)..(38): Xaa is C or S
KAXXAPTKLNAISVLYFDSSNNVILKKYRNMVVKAXGX

SEQ ID NO: 6659 - protein, 37 aa, Artificial Sequence
  Non-cyclic GFR-binding peptide
  MOD_RES (1)..(2)..(36): Xaa is C or S
  MOD_RES (16)..(17)..(18)..(19)..(20): Xaa is A or G
  MOD_RES (21)..(22)..(23)..(24): Xaa is A or G or absent
XXAPTKLSATSVLYYXXXXXXXXXLRKHRNMVVRSXG

SEQ ID NO: 6660 - protein, 35 aa, Artificial Sequence
  Non-cyclic GFR-binding peptide
  MOD_RES (1)..(35): Xaa is C or S
  MOD_RES (15)..(16)..(17)..(18)..(19): Xaa is A or G
  MOD_RES (20)..(21)..(22)..(23): Xaa is A or G or absent
XVPTELSATSMLYYXXXXXXXXXLRKHRDMVVEGX

SEQ ID NO: 6661 - protein, 34 aa, Artificial Sequence
  Non-cyclic GFR-binding peptide
  MOD_RES (1)..(2)..(33): Xaa is C or S
XXVPQALSAISILYLVGRKPKVLKNYQMIVRSXK

SEQ ID NO: 6662 - protein, 34 aa, Artificial Sequence
  Non-cyclic GFR-binding peptide
  MOD_RES (33)..(33): Xaa is C or S
  MOD_RES (14)..(15)..(16)..(17)..(18): Xaa is A or G
  MOD_RES (19)..(20)..(21)..(22): Xaa is A or G or absent
VPQALNAISILYFXXXXXXXXXLKKYRMIVRSXK

SEQ ID NO: 6663 - protein, 40 aa, Artificial Sequence
  Non-cyclic GFR-binding peptide
  MOD_RES (2)..(3)..(37)..(39): Xaa is C or S
  MOD_RES (17)..(18)..(19)..(20)..(21): Xaa is A or G
  MOD_RES (22)..(23)..(24)..(25): Xaa is A or G or absent
AXXVPTELNAISMLYFXXXXXXXXXLKKYRDMVVEGXGXR

SEQ ID NO: 6664 - protein, 34 aa, Artificial Sequence
  Non-cyclic GFR-binding peptide
  MOD_RES (2)..(3): Xaa is C or S
PXXAPTKLSAISVLYLDDSSNVILKNYQNMVVRS

SEQ ID NO: 6665 - protein, 37 aa, Artificial Sequence
  Non-cyclic GFR-binding peptide
  MOD_RES (1)..(34)..(36): Xaa is C or S
XVPTKLNAISVLYFDDMGVPTLKKYREGMSVAEXGXR

SEQ ID NO: 6666 - protein, 33 aa, Artificial Sequence
  Non-cyclic GFR-binding peptide
  MOD_RES (32)..(32): Xaa is C or S
APTKLSPISVLYKDSSNNVILKYHYNMVVKAXG

SEQ ID NO: 6667 - protein, 39 aa, Artificial Sequence
  Non-cyclic GFR-binding peptide
  MOD_RES (6)..(7)..(39): Xaa is C or S
SIPKAXXVPTELSATSMLYYDEYDKVVLRKHREMVVEGX

SEQ ID NO: 6668 - protein, 41 aa, Artificial Sequence
  Non-cyclic GFR-binding peptide
  MOD_RES (5)..(6)..(39)..(41): Xaa is C or S
VGKAXXVPTKLSAISVLYLDDMGVPTLKNYQEGMSVAEXGX

SEQ ID NO: 6669 - protein, 39 aa, Artificial Sequence
  Non-cyclic GFR-binding peptide
  MOD_RES (6)..(7)..(38): Xaa is C or S
ASAAPXXVPQALNAISILYFVGRKPKVLKKYRMIVRSXK

SEQ ID NO: 6670 - protein, 35 aa, Artificial Sequence
  Non-cyclic GFR-binding peptide
  MOD_RES (3)..(4): Xaa is C or S
KPXXAPTQLSPISVLYKDDSSNVILKYHYNMVVRA

SEQ ID NO: 6671 - protein, 33 aa, Artificial Sequence
  Non-cyclic GFR-binding peptide
  MOD_RES (14)..(15)..(16)..(17)..(18): Xaa is A or G
  MOD_RES (19)..(20)..(21)..(22): Xaa is A or G or absent
APTKLSPISVLYKXXXXXXXXXLKYHYNMVVKA

SEQ ID NO: 6672 - protein, 39 aa, Artificial Sequence
  Non-cyclic GFR-binding peptide
  MOD_RES (3)..(4)..(36)..(38): Xaa is C or S
KAXXVPTELSATSMLYYDEYDKVVLRKHREMVVEGXGXR

SEQ ID NO: 6673 - protein, 33 aa, Artificial Sequence
  Non-cyclic GFR-binding peptide
  MOD_RES (1)..(33): Xaa is C or S
XVPTELSPISMLYKDENEKVVLKYHYDMVVEGX

SEQ ID NO: 6674 - protein, 35 aa, Artificial Sequence
  Non-cyclic GFR-binding peptide
  MOD_RES (32)..(34): Xaa is C or S
VPTELNAISMLYFDEYDKVVLKKYREMVVEGXGXR

SEQ ID NO: 6675 - protein, 36 aa, Artificial Sequence
  Non-cyclic GFR-binding peptide
  MOD_RES (5)..(6): Xaa is C or S
SASPXXVSQDLNAISILYFIGKTPKILKKYRMIVKS

SEQ ID NO: 6676 - protein, 32 aa, Artificial Sequence
  Non-cyclic GFR-binding peptide
  MOD_RES (14)..(15)..(16)..(17)..(18): Xaa is A or G
  MOD_RES (19)..(20)..(21)..(22): Xaa is A or G or absent
VSQDLSATSILYYXXXXXXXXXLRKHRMIVKS

SEQ ID NO: 6677 - protein, 35 aa, Artificial Sequence
  Non-cyclic GFR-binding peptide
  MOD_RES (3)..(35): Xaa is C or S
PTXAPTKLSATSVLYYDDSSNVILRKHRNMVVRSX

SEQ ID NO: 6678 - protein, 37 aa, Artificial Sequence
  Non-cyclic GFR-binding peptide
  MOD_RES (4)..(5): Xaa is C or S
  MOD_RES (19)..(20)..(21)..(22)..(23): Xaa is A or G
  MOD_RES (24)..(25)..(26)..(27): Xaa is A or G or absent
PKAXXAPTKLSAISVLYLXXXXXXXXXLKNYQNMVVK

SEQ ID NO: 6679 - protein, 34 aa, Artificial Sequence
  Non-cyclic GFR-binding peptide
  MOD_RES (2)..(2): Xaa is C or S
  MOD_RES (16)..(17)..(18)..(19)..(20): Xaa is A or G
  MOD_RES (21)..(22)..(23)..(24): Xaa is A or G or absent
TXAPTKLSATSVLYYXXXXXXXXXLRKHRNMVVR

SEQ ID NO: 6680 - protein, 35 aa, Artificial Sequence
  Non-cyclic GFR-binding peptide
  MOD_RES (1)..(2)..(34): Xaa is C or S
XXAPTKLSATSVLYYDDSSNVILRKHRNMVVRSXG

SEQ ID NO: 6681 - protein, 30 aa, Artificial Sequence
  Non-cyclic GFR-binding peptide
VSQDLNAISILYFIGKTPKILKKYRMIVKS

SEQ ID NO: 6682 - protein, 38 aa, Artificial Sequence
  Non-cyclic GFR-binding peptide
  MOD_RES (1)..(35)..(37): Xaa is C or S
  MOD_RES (15)..(16)..(17)..(18)..(19): Xaa is A or G
  MOD_RES (20)..(21)..(22)..(23): Xaa is A or G or absent
XAPTKLSPISVLYKXXXXXXXXXLKYHYNMVVRSXGXH

SEQ ID NO: 6683 - protein, 38 aa, Artificial Sequence
  Non-cyclic GFR-binding peptide
  MOD_RES (3)..(4)..(35)..(37): Xaa is C or S
SPXXVSQDLNAISILYFIGKTPKILKKYRMIVKSXKXS

SEQ ID NO: 6684 - protein, 43 aa, Artificial Sequence
  Non-cyclic GFR-binding peptide
  MOD_RES (5)..(42): Xaa is C or S
  MOD_RES (21)..(22)..(23)..(24)..(25): Xaa is A or G
  MOD_RES (26)..(27)..(28)..(29): Xaa is A or G or absent
RNVQXRPTQVQLSAISVLYLXXXXXXXXXLKNYQTLEDHLAXK

SEQ ID NO: 6685 - protein, 36 aa, Artificial Sequence
  Non-cyclic GFR-binding peptide
  MOD_RES (1)..(2)..(35): Xaa is C or S
  MOD_RES (16)..(17)..(18)..(19)..(20): Xaa is A or G
  MOD_RES (21)..(22)..(23)..(24): Xaa is A or G or absent
XXVPQALSAISILYLXXXXXXXXXLKNYQMIVRSXK

SEQ ID NO: 6686 - protein, 40 aa, Artificial Sequence
  Non-cyclic GFR-binding peptide
  MOD_RES (4)..(5)..(39): Xaa is C or S
  MOD_RES (19)..(20)..(21)..(22)..(23): Xaa is A or G
  MOD_RES (24)..(25)..(26)..(27): Xaa is A or G or absent
PKAXXVPTELNAISMLYFXXXXXXXXXLKKYRDMVVEGXG

SEQ ID NO: 6687 - protein, 32 aa, Artificial Sequence
  Non-cyclic GFR-binding peptide
  MOD_RES (32)..(32): Xaa is C or S
APTKLSATSVLYYDDSSNVILRKHRNMVVRSX

SEQ ID NO: 6688 - protein, 44 aa, Artificial Sequence
  Non-cyclic GFR-binding peptide
  MOD_RES (5)..(42)..(44): Xaa is C or S
RNVQXRPTQVQLSATSVLYYEIVRKKPIFLRKHRTLEDHLAXKX

SEQ ID NO: 6689 - protein, 37 aa, Artificial Sequence
  Non-cyclic GFR-binding peptide
  MOD_RES (1)..(2)..(36): Xaa is C or S
  MOD_RES (16)..(17)..(18)..(19)..(20): Xaa is A or G
  MOD_RES (21)..(22)..(23)..(24): Xaa is A or G or absent
XXVPTELSPISMLYKXXXXXXXXXLKYHYDMVVEGXG

SEQ ID NO: 6690 - protein, 37 aa, Artificial Sequence
  Non-cyclic GFR-binding peptide
  MOD_RES (3)..(4): Xaa is C or S
  MOD_RES (18)..(19)..(20)..(21)..(22): Xaa is A or G
  MOD_RES (23)..(24)..(25)..(26): Xaa is A or G or absent
KAXXAPTKLNAISVLYFXXXXXXXXXLKKYRNMVVKA

SEQ ID NO: 6691 - protein, 38 aa, Artificial Sequence
  Non-cyclic GFR-binding peptide
  MOD_RES (6)..(7): Xaa is C or S
TVPKPXXAPTQLSATSVLYYDDSSNVILRKHRNMVVRA

SEQ ID NO: 6692 - protein, 36 aa, Artificial Sequence
  Non-cyclic GFR-binding peptide
  MOD_RES (2)..(2): Xaa is C or S
  MOD_RES (18)..(19)..(20)..(21)..(22): Xaa is A or G
  MOD_RES (23)..(24)..(25)..(26): Xaa is A or G or absent
QXRPTQVQLSAISVLYLXXXXXXXXXLKNYQTLEDH

SEQ ID NO: 6693 - protein, 34 aa, Artificial Sequence
  Non-cyclic GFR-binding peptide
  MOD_RES (1)..(2)..(34): Xaa is C or S
XXAPTQLSPISVLYKDDSSNVILKYHYNMVVRAX

SEQ ID NO: 6694 - protein, 39 aa, Artificial Sequence
  Non-cyclic GFR-binding peptide
  MOD_RES (3)..(4)..(36)..(38): Xaa is C or S
KPXXAPTQLSATSVLYYDDSSNVILRKHRNMVVRAXGXH

SEQ ID NO: 6695 - protein, 38 aa, Artificial Sequence
  Non-cyclic GFR-binding peptide
  MOD_RES (1)..(2)..(36)..(38): Xaa is C or S
  MOD_RES (16)..(17)..(18)..(19)..(20): Xaa is A or G
  MOD_RES (21)..(22)..(23)..(24): Xaa is A or G or absent
XXVPTELSATSMLYYXXXXXXXXXLRKHRDMVVEGXGX

SEQ ID NO: 6696 - protein, 42 aa, Artificial Sequence
  Non-cyclic GFR-binding peptide
  MOD_RES (3)..(40)..(42): Xaa is C or S
  MOD_RES (19)..(20)..(21)..(22)..(23): Xaa is A or G
  MOD_RES (24)..(25)..(26)..(27): Xaa is A or G or absent
VQXRPTQVQLSPISVLYKXXXXXXXXXLKYHYTLEDHLAXKX

SEQ ID NO: 6697 - protein, 36 aa, Artificial Sequence
  Non-cyclic GFR-binding peptide
  MOD_RES (1)..(34)..(36): Xaa is C or S
  MOD_RES (15)..(16)..(17)..(18)..(19): Xaa is A or G
  MOD_RES (20)..(21)..(22)..(23): Xaa is A or G or absent
XVSQDLNAISILYFXXXXXXXXXLKKYRMIVKSXKX

SEQ ID NO: 6698 - protein, 39 aa, Artificial Sequence
  Non-cyclic GFR-binding peptide
  MOD_RES (5)..(6)..(38): Xaa is C or S
VPKAXXAPTKLSAISVLYLDSSNNVILKNYQNMVVKAXG

SEQ ID NO: 6699 - protein, 40 aa, Artificial Sequence
  Non-cyclic GFR-binding peptide
  MOD_RES (3)..(4)..(38)..(40): Xaa is C or S
  MOD_RES (18)..(19)..(20)..(21)..(22): Xaa is A or G
  MOD_RES (23)..(24)..(25)..(26): Xaa is A or G or absent
KAXXVPTELSPISMLYKXXXXXXXXXLKYHYEMVVEGXGX

SEQ ID NO: 6700 - protein, 40 aa, Artificial Sequence
  Non-cyclic GFR-binding peptide
  MOD_RES (6)..(7)..(38)..(40): Xaa is C or S
ASASPXXVSQDLSPISILYKIGKTPKILKYHYMIVKSXKX

SEQ ID NO: 6701 - protein, 41 aa, Artificial Sequence
  Non-cyclic GFR-binding peptide
  MOD_RES (5)..(6)..(39)..(41): Xaa is C or S
VGKAXXVPTKLNAISVLYFDDMGVPTLKKYREGMSVAEXGX

SEQ ID NO: 6702 - protein, 40 aa, Artificial Sequence
  Non-cyclic GFR-binding peptide
  MOD_RES (4)..(4): Xaa is C or S
  MOD_RES (20)..(21)..(22)..(23)..(24): Xaa is A or G
  MOD_RES (25)..(26)..(27)..(28): Xaa is A or G or absent
NVQXRPTQVQLNAISVLYFXXXXXXXXXLKKYRTLEDHLA

SEQ ID NO: 6703 - protein, 42 aa, Artificial Sequence
  Non-cyclic GFR-binding peptide
  MOD_RES (6)..(7)..(40)..(42): Xaa is C or S
  MOD_RES (21)..(22)..(23)..(24)..(25): Xaa is A or G
  MOD_RES (26)..(27)..(28)..(29): Xaa is A or G or absent
ASASPXXVPQDLSATSILYYXXXXXXXXXLRKHRMVVKSXKX

SEQ ID NO: 6704 - protein, 38 aa, Artificial Sequence
  Non-cyclic GFR-binding peptide
  MOD_RES (3)..(35)..(37): Xaa is C or S
PTXAPTKLSAISVLYLDDSSNVILKNYQNMVVRSXGXH

SEQ ID NO: 6705 - protein, 36 aa, Artificial Sequence
  Non-cyclic GFR-binding peptide
  MOD_RES (1)..(2)..(34)..(36): Xaa is C or S
XXAPTKLSPISVLYKDSSNNVILKYHYNMVVKAXGX

SEQ ID NO: 6706 - protein, 34 aa, Artificial Sequence
  Non-cyclic GFR-binding peptide
PTQVQLSPISVLYKEIVRKKPIFLKYHYTLEDHL

SEQ ID NO: 6707 - protein, 38 aa, Artificial Sequence
  Non-cyclic GFR-binding peptide
  MOD_RES (2)..(3)..(36)..(38): Xaa is C or S
AXXVPTKLSATSVLYYDDMGVPTLRKHREGMSVAEXGX

SEQ ID NO: 6708 - protein, 42 aa, Artificial Sequence
  Non-cyclic GFR-binding peptide
  MOD_RES (6)..(7)..(40)..(42): Xaa is C or S
  MOD_RES (21)..(22)..(23)..(24)..(25): Xaa is A or G
  MOD_RES (26)..(27)..(28)..(29): Xaa is A or G or absent
ASASPXXVPQDLSAISILYLXXXXXXXXXLKNYQMVVKSXKX

SEQ ID NO: 6709 - protein, 43 aa, Artificial Sequence
  Non-cyclic GFR-binding peptide
  MOD_RES (5)..(42): Xaa is C or S
  MOD_RES (21)..(22)..(23)..(24)..(25): Xaa is A or G
  MOD_RES (26)..(27)..(28)..(29): Xaa is A or G or absent
RNVQXRPTQVQLSATSVLYYXXXXXXXXXLRKHRTLEDHLAXK

SEQ ID NO: 6710 - protein, 35 aa, Artificial Sequence
  Non-cyclic GFR-binding peptide
  MOD_RES (33)..(35): Xaa is C or S
  MOD_RES (14)..(15)..(16)..(17)..(18): Xaa is A or G
  MOD_RES (19)..(20)..(21)..(22): Xaa is A or G or absent
VPQALSATSILYYXXXXXXXXXLRKHRMIVRSXKX

SEQ ID NO: 6711 - protein, 39 aa, Artificial Sequence
  Non-cyclic GFR-binding peptide
  MOD_RES (3)..(4)..(38): Xaa is C or S
  MOD_RES (18)..(19)..(20)..(21)..(22): Xaa is A or G
  MOD_RES (23)..(24)..(25)..(26): Xaa is A or G or absent
KPXXAPTKLSATSVLYYXXXXXXXXXLRKHRNMVVRSXG

SEQ ID NO: 6712 - protein, 39 aa, Artificial Sequence
  Non-cyclic GFR-binding peptide
  MOD_RES (1)..(2)..(36)..(38): Xaa is C or S
  MOD_RES (16)..(17)..(18)..(19)..(20): Xaa is A or G
  MOD_RES (21)..(22)..(23)..(24): Xaa is A or G or absent
XXVPTELSATSMLYYXXXXXXXXXLRKHRDMVVEGXGXR

SEQ ID NO: 6713 - protein, 37 aa, Artificial Sequence
  Non-cyclic GFR-binding peptide
  MOD_RES (1)..(35)..(37): Xaa is C or S
  MOD_RES (15)..(16)..(17)..(18)..(19): Xaa is A or G
  MOD_RES (20)..(21)..(22)..(23): Xaa is A or G or absent
XVPTELSPISMLYKXXXXXXXXXLKYHYEMVVEGXGX

SEQ ID NO: 6714 - protein, 38 aa, Artificial Sequence
  Non-cyclic GFR-binding peptide
  MOD_RES (4)..(5)..(38): Xaa is C or S
GKAXXVPTKLNAISVLYFDDMGVPTLKKYREGMSVAEX

SEQ ID NO: 6715 - protein, 39 aa, Artificial Sequence
  Non-cyclic GFR-binding peptide
  MOD_RES (5)..(6)..(37)..(39): Xaa is C or S
SAAPXXVPQALNAISILYFVGRKPKVLKKYRMIVRSXKX

SEQ ID NO: 6716 - protein, 36 aa, Artificial Sequence
  Non-cyclic GFR-binding peptide
  MOD_RES (5)..(6): Xaa is C or S
VPKPXXAPTKLSPISVLYKDDSSNVILKYHYNMVVR

SEQ ID NO: 6717 - protein, 35 aa, Artificial Sequence
  Non-cyclic GFR-binding peptide
  MOD_RES (4)..(5): Xaa is C or S
PKAXXVPTELSATSMLYYDENEKVVLRKHRDMVVE

SEQ ID NO: 6718 - protein, 40 aa, Artificial Sequence
  Non-cyclic GFR-binding peptide
  MOD_RES (2)..(3)..(37)..(39): Xaa is C or S
  MOD_RES (17)..(18)..(19)..(20)..(21): Xaa is A or G
  MOD_RES (22)..(23)..(24)..(25): Xaa is A or G or absent
PXXAPTQLSATSVLYYXXXXXXXXXLRKHRNMVVRAXGXH

SEQ ID NO: 6719 - protein, 34 aa, Artificial Sequence
  Non-cyclic GFR-binding peptide
TQVQLSAISVLYLEIVRKKPIFLKNYQTLEDHLA

SEQ ID NO: 6720 - protein, 34 aa, Artificial Sequence
  Non-cyclic GFR-binding peptide
  MOD_RES (3)..(4): Xaa is C or S
SPXXVPQDLNAISILYFVGRTPKVLKKYRMVVKS

SEQ ID NO: 6721 - protein, 34 aa, Artificial Sequence
  Non-cyclic GFR-binding peptide
TQVQLSATSVLYYEIVRKKPIFLRKHRTLEDHLA

SEQ ID NO: 6722 - protein, 42 aa, Artificial Sequence
  Non-cyclic GFR-binding peptide
  MOD_RES (6)..(7)..(39)..(41): Xaa is C or S
SIPKAXXVPTELSPISMLYKDEYDKVVLKYHYEMVVEGXGXR

SEQ ID NO: 6723 - protein, 35 aa, Artificial Sequence
  Non-cyclic GFR-binding peptide
  MOD_RES (1)..(1): Xaa is C or S
  MOD_RES (17)..(18)..(19)..(20)..(21): Xaa is A or G
  MOD_RES (22)..(23)..(24)..(25): Xaa is A or G or absent
XRPTQVQLSATSVLYYXXXXXXXXXLRKHRTLEDH

SEQ ID NO: 6724 - protein, 39 aa, Artificial Sequence
  Non-cyclic GFR-binding peptide
  MOD_RES (3)..(4)..(36)..(38): Xaa is C or S
KAXXVPTELSPISMLYKDENEKVVLKYHYDMVVEGXGXR

SEQ ID NO: 6725 - protein, 40 aa, Artificial Sequence
  Non-cyclic GFR-binding peptide
  MOD_RES (3)..(4)..(37)..(39): Xaa is C or S
  MOD_RES (18)..(19)..(20)..(21)..(22): Xaa is A or G
  MOD_RES (23)..(24)..(25)..(26): Xaa is A or G or absent
SPXXVSQDLSAISILYLXXXXXXXXXLKNYQMIVKSXKXS

SEQ ID NO: 6726 - protein, 35 aa, Artificial Sequence
  Non-cyclic GFR-binding peptide
  MOD_RES (1)..(34): Xaa is C or S
XVPTKLNAISVLYFDDMGVPTLKKYREGMSVAEXG

SEQ ID NO: 6727 - protein, 43 aa, Artificial Sequence
  Non-cyclic GFR-binding peptide
  MOD_RES (5)..(42): Xaa is C or S
RNVQXRPTQVQLSATSVLYYEIVRKKPIFLRKHRTLEDHLAXK

SEQ ID NO: 6728 - protein, 33 aa, Artificial Sequence
  Non-cyclic GFR-binding peptide
  MOD_RES (14)..(15)..(16)..(17)..(18): Xaa is A or G
  MOD_RES (19)..(20)..(21)..(22): Xaa is A or G or absent
TQVQLSPISVLYKXXXXXXXXXLKYHYTLEDHL

SEQ ID NO: 6729 - protein, 33 aa, Artificial Sequence
  Non-cyclic GFR-binding peptide
  MOD_RES (1)..(33): Xaa is C or S
XVPTELNAISMLYFDENEKVVLKKYRDMVVEGX

SEQ ID NO: 6730 - protein, 37 aa, Artificial Sequence
  Non-cyclic GFR-binding peptide
  MOD_RES (1)..(2)..(35)..(37): Xaa is C or S
  MOD_RES (16)..(17)..(18)..(19)..(20): Xaa is A or G
  MOD_RES (21)..(22)..(23)..(24): Xaa is A or G or absent
XXVSQDLSPISILYKXXXXXXXXXLKYHYMIVKSXKX

SEQ ID NO: 6731 - protein, 37 aa, Artificial Sequence
  Non-cyclic GFR-binding peptide
  MOD_RES (3)..(4)..(37): Xaa is C or S
  MOD_RES (18)..(19)..(20)..(21)..(22): Xaa is A or G
  MOD_RES (23)..(24)..(25)..(26): Xaa is A or G or absent
SPXXVPQDLSATSILYYXXXXXXXXXLRKHRMVVKSX

SEQ ID NO: 6732 - protein, 38 aa, Artificial Sequence
  Non-cyclic GFR-binding peptide
  MOD_RES (5)..(6): Xaa is C or S
  MOD_RES (20)..(21)..(22)..(23)..(24): Xaa is A or G
  MOD_RES (25)..(26)..(27)..(28): Xaa is A or G or absent
IPKAXXVPTELNAISMLYFXXXXXXXXXLKKYRDMVVE

SEQ ID NO: 6733 - protein, 34 aa, Artificial Sequence
  Non-cyclic GFR-binding peptide
  MOD_RES (1)..(2)..(34): Xaa is C or S
XXVPTELNAISMLYFDENEKVVLKKYRDMVVEGX

SEQ ID NO: 6734 - protein, 39 aa, Artificial Sequence
  Non-cyclic GFR-binding peptide
  MOD_RES (6)..(7): Xaa is C or S
KVGKAXXVPTKLNAISVLYFDDMGVPTLKKYREGMSVAE

SEQ ID NO: 6735 - protein, 35 aa, Artificial Sequence
  Non-cyclic GFR-binding peptide
  MOD_RES (1)..(2)..(34): Xaa is C or S
XXAPTQLSATSVLYYDDSSNVILRKHRNMVVRAXG

SEQ ID NO: 6736 - protein, 37 aa, Artificial Sequence
  Non-cyclic GFR-binding peptide
  MOD_RES (3)..(4)..(35)..(37): Xaa is C or S
APXXVPQALSPISILYKVGRKPKVLKYHYMIVRSXKX

SEQ ID NO: 6737 - protein, 37 aa, Artificial Sequence
  Non-cyclic GFR-binding peptide
  MOD_RES (2)..(3)..(36): Xaa is C or S
  MOD_RES (17)..(18)..(19)..(20)..(21): Xaa is A or G
  MOD_RES (22)..(23)..(24)..(25): Xaa is A or G or absent
PXXVPQDLSATSILYYXXXXXXXXXLRKHRMVVKSXK

SEQ ID NO: 6738 - protein, 40 aa, Artificial Sequence
  Non-cyclic GFR-binding peptide
  MOD_RES (6)..(7)..(40): Xaa is C or S
  MOD_RES (21)..(22)..(23)..(24)..(25): Xaa is A or G
  MOD_RES (26)..(27)..(28)..(29): Xaa is A or G or absent
ASASPXXVPQDLSPISILYKXXXXXXXXXLKYHYMVVKSX

SEQ ID NO: 6739 - protein, 35 aa, Artificial Sequence
  Non-cyclic GFR-binding peptide
  MOD_RES (1)..(34): Xaa is C or S
  MOD_RES (15)..(16)..(17)..(18)..(19): Xaa is A or G
  MOD_RES (20)..(21)..(22)..(23): Xaa is A or G or absent
XVPQALNAISILYFXXXXXXXXXLKKYRMIVRSXK

SEQ ID NO: 6740 - protein, 34 aa, Artificial Sequence
  Non-cyclic GFR-binding peptide
  MOD_RES (1)..(2)..(34): Xaa is C or S
XXVPTELSPISMLYKDENEKVVLKYHYDMVVEGX

SEQ ID NO: 6741 - protein, 36 aa, Artificial Sequence
  Non-cyclic GFR-binding peptide
  MOD_RES (1)..(2)..(33)..(35): Xaa is C or S
XXVSQDLNAISILYFIGKTPKILKKYRMIVKSXKXS

SEQ ID NO: 6742 - protein, 36 aa, Artificial Sequence
  Non-cyclic GFR-binding peptide
  MOD_RES (1)..(2)..(36): Xaa is C or S
  MOD_RES (16)..(17)..(18)..(19)..(20): Xaa is A or G
  MOD_RES (21)..(22)..(23)..(24): Xaa is A or G or absent
XXVPTELNAISMLYFXXXXXXXXXLKKYRDMVVEGX

SEQ ID NO: 6743 - protein, 42 aa, Artificial Sequence
  Non-cyclic GFR-binding peptide
  MOD_RES (4)..(5)..(39)..(41): Xaa is C or S
  MOD_RES (19)..(20)..(21)..(22)..(23): Xaa is A or G
  MOD_RES (24)..(25)..(26)..(27): Xaa is A or G or absent
PKPXXAPTQLSATSVLYYXXXXXXXXXLRKHRNMVVRAXGXH

SEQ ID NO: 6744 - protein, 32 aa, Artificial Sequence
  Non-cyclic GFR-binding peptide
  MOD_RES (32)..(32): Xaa is C or S
APTQLSAISVLYLDDSSNVILKNYQNMVVRAX

SEQ ID NO: 6745 - protein, 38 aa, Artificial Sequence
  Non-cyclic GFR-binding peptide
  MOD_RES (5)..(6)..(38): Xaa is C or S
IPKAXXVPTELNAISMLYFDEYDKVVLKKYREMVVEGX

SEQ ID NO: 6746 - protein, 37 aa, Artificial Sequence
  Non-cyclic GFR-binding peptide
  MOD_RES (6)..(7): Xaa is C or S
YVPKPXXAPTKLSAISVLYLDDSSNVILKNYQNMVVR

SEQ ID NO: 6747 - protein, 42 aa, Artificial Sequence
  Non-cyclic GFR-binding peptide
  MOD_RES (6)..(7)..(41): Xaa is C or S
  MOD_RES (21)..(22)..(23)..(24)..(25): Xaa is A or G
  MOD_RES (26)..(27)..(28)..(29): Xaa is A or G or absent
SIPKAXXVPTELSATSMLYYXXXXXXXXXLRKHREMVVEGXG

SEQ ID NO: 6748 - protein, 43 aa, Artificial Sequence
  Non-cyclic GFR-binding peptide
  MOD_RES (5)..(6)..(40)..(42): Xaa is C or S
  MOD_RES (20)..(21)..(22)..(23)..(24): Xaa is A or G
  MOD_RES (25)..(26)..(27)..(28): Xaa is A or G or absent
VPKPXXAPTQLSPISVLYKXXXXXXXXXLKYHYNMVVRAXGXH

SEQ ID NO: 6749 - protein, 38 aa, Artificial Sequence
  Non-cyclic GFR-binding peptide
  MOD_RES (2)..(3)..(37): Xaa is C or S
  MOD_RES (17)..(18)..(19)..(20)..(21): Xaa is A or G
  MOD_RES (22)..(23)..(24)..(25): Xaa is A or G or absent
AXXVPTELNAISMLYFXXXXXXXXXLKKYREMVVEGXG

SEQ ID NO: 6750 - protein, 37 aa, Artificial Sequence
  Non-cyclic GFR-binding peptide
  MOD_RES (3)..(4)..(37): Xaa is C or S
  MOD_RES (18)..(19)..(20)..(21)..(22): Xaa is A or G
  MOD_RES (23)..(24)..(25)..(26): Xaa is A or G or absent
SPXXVPQDLSAISILYLXXXXXXXXXLKNYQMVVKSX

SEQ ID NO: 6751 - protein, 39 aa, Artificial Sequence
  Non-cyclic GFR-binding peptide
  MOD_RES (5)..(37)..(39): Xaa is C or S
TKPTXAPTKLSPISVLYKDDSSNVILKYHYNMVVRSXGX

SEQ ID NO: 6752 - protein, 35 aa, Artificial Sequence
  Non-cyclic GFR-binding peptide
  MOD_RES (33)..(35): Xaa is C or S
  MOD_RES (14)..(15)..(16)..(17)..(18): Xaa is A or G
  MOD_RES (19)..(20)..(21)..(22): Xaa is A or G or absent
VSQDLSPISILYKXXXXXXXXXLKYHYMIVKSXKX

SEQ ID NO: 6753 - protein, 35 aa, Artificial Sequence
  Non-cyclic GFR-binding peptide
  MOD_RES (3)..(4): Xaa is C or S
KAXXVPTELSATSMLYYDENEKVVLRKHRDMVVEG

SEQ ID NO: 6754 - protein, 40 aa, Artificial Sequence
  Non-cyclic GFR-binding peptide
  MOD_RES (6)..(7)..(38)..(40): Xaa is C or S
ASASPXXVPQDLSATSILYYVGRTPKVLRKHRMVVKSXKX

SEQ ID NO: 6755 - protein, 39 aa, Artificial Sequence
  Non-cyclic GFR-binding peptide
  MOD_RES (5)..(6)..(37)..(39): Xaa is C or S
SASPXXVPQDLSPISILYKVGRTPKVLKYHYMVVKSXKX

SEQ ID NO: 6756 - protein, 32 aa, Artificial Sequence
  Non-cyclic GFR-binding peptide
  MOD_RES (1)..(1): Xaa is C or S
XVPTELSATSMLYYDEYDKVVLRKHREMVVEG

SEQ ID NO: 6757 - protein, 36 aa, Artificial Sequence
  Non-cyclic GFR-binding peptide
  MOD_RES (1)..(2)..(34)..(36): Xaa is C or S
XXAPTQLSAISVLYLDDSSNVILKNYQNMVVRAXGX

SEQ ID NO: 6758 - protein, 34 aa, Artificial Sequence
  Non-cyclic GFR-binding peptide
  MOD_RES (1)..(2): Xaa is C or S
  MOD_RES (16)..(17)..(18)..(19)..(20): Xaa is A or G
  MOD_RES (21)..(22)..(23)..(24): Xaa is A or G or absent
XXAPTKLNAISVLYFXXXXXXXXXLKKYRNMVVK

SEQ ID NO: 6759 - protein, 37 aa, Artificial Sequence
  Non-cyclic GFR-binding peptide
  MOD_RES (1)..(34)..(36): Xaa is C or S
  MOD_RES (15)..(16)..(17)..(18)..(19): Xaa is A or G
  MOD_RES (20)..(21)..(22)..(23): Xaa is A or G or absent
XVPQDLSAISILYLXXXXXXXXXLKNYQMVVKSXKXS

SEQ ID NO: 6760 - protein, 37 aa, Artificial Sequence
  Non-cyclic GFR-binding peptide
  MOD_RES (1)..(1): Xaa is C or S
  MOD_RES (17)..(18)..(19)..(20)..(21): Xaa is A or G
  MOD_RES (22)..(23)..(24)..(25): Xaa is A or G or absent
XRPTQVQLNAISVLYFXXXXXXXXXLKKYRTLEDHLA

SEQ ID NO: 6761 - protein, 35 aa, Artificial Sequence
  Non-cyclic GFR-binding peptide
  MOD_RES (1)..(2)..(35): Xaa is C or S
  MOD_RES (16)..(17)..(18)..(19)..(20): Xaa is A or G
  MOD_RES (21)..(22)..(23)..(24): Xaa is A or G or absent
XXVSQDLSPISILYKXXXXXXXXXLKYHYMIVKSX

SEQ ID NO: 6762 - protein, 36 aa, Artificial Sequence
  Non-cyclic GFR-binding peptide
  MOD_RES (5)..(5): Xaa is C or S
TKPTXAPTKLSPISVLYKDDSSNVILKYHYNMVVRS

SEQ ID NO: 6763 - protein, 39 aa, Artificial Sequence
  Non-cyclic GFR-binding peptide
  MOD_RES (5)..(6): Xaa is C or S
  MOD_RES (20)..(21)..(22)..(23)..(24): Xaa is A or G
  MOD_RES (25)..(26)..(27)..(28): Xaa is A or G or absent
VPKAXXAPTKLSPISVLYKXXXXXXXXXLKYHYNMVVKA

SEQ ID NO: 6764 - protein, 41 aa, Artificial Sequence
  Non-cyclic GFR-binding peptide
  MOD_RES (6)..(7)..(39)..(41): Xaa is C or S
KIPKAXXVPTELNAISMLYFDENEKVVLKKYRDMVVEGXGX

SEQ ID NO: 6765 - protein, 34 aa, Artificial Sequence
  Non-cyclic GFR-binding peptide
  MOD_RES (15)..(16)..(17)..(18)..(19): Xaa is A or G
  MOD_RES (20)..(21)..(22)..(23): Xaa is A or G or absent
PTQVQLSATSVLYYXXXXXXXXXLRKHRTLEDHL

SEQ ID NO: 6766 - protein, 35 aa, Artificial Sequence
  Non-cyclic GFR-binding peptide
  MOD_RES (1)..(2)..(34): Xaa is C or S
XXAPTKLSAISVLYLDSSNNVILKNYQNMVVKAXG

SEQ ID NO: 6767 - protein, 37 aa, Artificial Sequence
  Non-cyclic GFR-binding peptide
  MOD_RES (1)..(35)..(37): Xaa is C or S
  MOD_RES (15)..(16)..(17)..(18)..(19): Xaa is A or G
  MOD_RES (20)..(21)..(22)..(23): Xaa is A or G or absent
XVPTELSPISMLYKXXXXXXXXXLKYHYDMVVEGXGX

SEQ ID NO: 6768 - protein, 39 aa, Artificial Sequence
  Non-cyclic GFR-binding peptide
  MOD_RES (4)..(5)..(39): Xaa is C or S
  MOD_RES (19)..(20)..(21)..(22)..(23): Xaa is A or G
  MOD_RES (24)..(25)..(26)..(27): Xaa is A or G or absent
PKAXXAPTKLSAISVLYLXXXXXXXXXLKNYQNMVVKAX

SEQ ID NO: 6769 - protein, 40 aa, Artificial Sequence
  Non-cyclic GFR-binding peptide
  MOD_RES (5)..(6)..(38)..(40): Xaa is C or S
IPKAXXVPTELSATSMLYYDEYDKVVLRKHREMVVEGXGX

SEQ ID NO: 6770 - protein, 39 aa, Artificial Sequence
  Non-cyclic GFR-binding peptide
  MOD_RES (2)..(3)..(37)..(39): Xaa is C or S
  MOD_RES (17)..(18)..(19)..(20)..(21): Xaa is A or G
  MOD_RES (22)..(23)..(24)..(25): Xaa is A or G or absent
AXXVPTELSPISMLYKXXXXXXXXXLKYHYDMVVEGXGX

SEQ ID NO: 6771 - protein, 41 aa, Artificial Sequence
  Non-cyclic GFR-binding peptide
  MOD_RES (4)..(5)..(39)..(41): Xaa is C or S
  MOD_RES (19)..(20)..(21)..(22)..(23): Xaa is A or G
  MOD_RES (24)..(25)..(26)..(27): Xaa is A or G or absent
PKPXXAPTQLSPISVLYKXXXXXXXXXLKYHYNMVVRAXGX

SEQ ID NO: 6772 - protein, 41 aa, Artificial Sequence
  Non-cyclic GFR-binding peptide
  MOD_RES (1)..(38)..(40): Xaa is C or S
XRPTQVQLSAISVLYLEIVRKKPIFLKNYQTLEDHLAXKXE

SEQ ID NO: 6773 - protein, 36 aa, Artificial Sequence
  Non-cyclic GFR-binding peptide
  MOD_RES (2)..(3): Xaa is C or S
  MOD_RES (17)..(18)..(19)..(20)..(21): Xaa is A or G
  MOD_RES (22)..(23)..(24)..(25): Xaa is A or G or absent
AXXVPTELSATSMLYYXXXXXXXXXLRKHREMVVEG

SEQ ID NO: 6774 - protein, 39 aa, Artificial Sequence
  Non-cyclic GFR-binding peptide
  MOD_RES (4)..(5)..(39): Xaa is C or S
  MOD_RES (19)..(20)..(21)..(22)..(23): Xaa is A or G
  MOD_RES (24)..(25)..(26)..(27): Xaa is A or G or absent
PKPXXAPTKLSPISVLYKXXXXXXXXXLKYHYNMVVRSX

SEQ ID NO: 6775 - protein, 34 aa, Artificial Sequence
  Non-cyclic GFR-binding peptide
  MOD_RES (2)..(3)..(34): Xaa is C or S
PXXVSQDLNAISILYFIGKTPKILKKYRMIVKSX

SEQ ID NO: 6776 - protein, 35 aa, Artificial Sequence
  Non-cyclic GFR-binding peptide
  MOD_RES (2)..(3): Xaa is C or S
  MOD_RES (17)..(18)..(19)..(20)..(21): Xaa is A or G
  MOD_RES (22)..(23)..(24)..(25): Xaa is A or G or absent
PXXVPQDLSATSILYYXXXXXXXXXLRKHRMVVKS

SEQ ID NO: 6777 - protein, 38 aa, Artificial Sequence
  Non-cyclic GFR-binding peptide
  MOD_RES (5)..(6)..(37): Xaa is C or S
SASPXXVSQDLSATSILYYIGKTPKILRKHRMIVKSXK

SEQ ID NO: 6778 - protein, 37 aa, Artificial Sequence
  Non-cyclic GFR-binding peptide
  MOD_RES (4)..(5): Xaa is C or S
  MOD_RES (19)..(20)..(21)..(22)..(23): Xaa is A or G
  MOD_RES (24)..(25)..(26)..(27): Xaa is A or G or absent
AAPXXVPQALSPISILYKXXXXXXXXXLKYHYMIVRS

SEQ ID NO: 6779 - protein, 38 aa, Artificial Sequence
  Non-cyclic GFR-binding peptide
  MOD_RES (1)..(2)..(36)..(38): Xaa is C or S
  MOD_RES (16)..(17)..(18)..(19)..(20): Xaa is A or G
  MOD_RES (21)..(22)..(23)..(24): Xaa is A or G or absent
XXVPTELNAISMLYFXXXXXXXXXLKKYREMVVEGXGX

SEQ ID NO: 6780 - protein, 38 aa, Artificial Sequence
  Non-cyclic GFR-binding peptide
  MOD_RES (3)..(4)..(37): Xaa is C or S
  MOD_RES (18)..(19)..(20)..(21)..(22): Xaa is A or G
  MOD_RES (23)..(24)..(25)..(26): Xaa is A or G or absent
APXXVPQALSAISILYLXXXXXXXXXLKNYQMIVRSXK

SEQ ID NO: 6781 - protein, 41 aa, Artificial Sequence
  Non-cyclic GFR-binding peptide
  MOD_RES (6)..(7)..(38)..(40): Xaa is C or S
ASASPXXVSQDLSAISILYLIGKTPKILKNYQMIVKSXKXS

SEQ ID NO: 6782 - protein, 41 aa, Artificial Sequence
  Non-cyclic GFR-binding peptide
  MOD_RES (6)..(7)..(41): Xaa is C or S
  MOD_RES (21)..(22)..(23)..(24)..(25): Xaa is A or G
  MOD_RES (26)..(27)..(28)..(29): Xaa is A or G or absent
YVPKPXXAPTKLSPISVLYKXXXXXXXXXLKYHYNMVVRSX

SEQ ID NO: 6783 - protein, 40 aa, Artificial Sequence
  Non-cyclic GFR-binding peptide
  MOD_RES (6)..(7)..(38)..(40): Xaa is C or S
ASAAPXXVPQALSAISILYLVGRKPKVLKNYQMIVRSXKX

SEQ ID NO: 6784 - protein, 34 aa, Artificial Sequence
  Non-cyclic GFR-binding peptide
  MOD_RES (1)..(33): Xaa is C or S
XVPTELNAISMLYFDEYDKVVLKKYREMVVEGXG

SEQ ID NO: 6785 - protein, 38 aa, Artificial Sequence
  Non-cyclic GFR-binding peptide
  MOD_RES (1)..(2)..(36)..(38): Xaa is C or S
  MOD_RES (16)..(17)..(18)..(19)..(20): Xaa is A or G
  MOD_RES (21)..(22)..(23)..(24): Xaa is A or G or absent
XXVPTELSATSMLYYXXXXXXXXXLRKHREMVVEGXGX

SEQ ID NO: 6786 - protein, 33 aa, Artificial Sequence
  Non-cyclic GFR-binding peptide
  MOD_RES (14)..(15)..(16)..(17)..(18): Xaa is A or G
  MOD_RES (19)..(20)..(21)..(22): Xaa is A or G or absent
APTQLSATSVLYYXXXXXXXXXLRKHRNMVVRA

SEQ ID NO: 6787 - protein, 41 aa, Artificial Sequence
  Non-cyclic GFR-binding peptide
  MOD_RES (6)..(7)..(40): Xaa is C or S
  MOD_RES (21)..(22)..(23)..(24)..(25): Xaa is A or G
  MOD_RES (26)..(27)..(28)..(29): Xaa is A or G or absent
ASASPXXVPQDLSAISILYLXXXXXXXXXLKNYQMVVKSXK

SEQ ID NO: 6788 - protein, 37 aa, Artificial Sequence
  Non-cyclic GFR-binding peptide
  MOD_RES (6)..(7): Xaa is C or S
ASAAPXXVPQALNAISILYFVGRKPKVLKKYRMIVRS

SEQ ID NO: 6789 - protein, 36 aa, Artificial Sequence
  Non-cyclic GFR-binding peptide
  MOD_RES (1)..(36): Xaa is C or S
  MOD_RES (15)..(16)..(17)..(18)..(19): Xaa is A or G
  MOD_RES (20)..(21)..(22)..(23): Xaa is A or G or absent
XVPTKLNAISVLYFXXXXXXXXXLKKYREGMSVAEX

SEQ ID NO: 6790 - protein, 41 aa, Artificial Sequence
  Non-cyclic GFR-binding peptide
  MOD_RES (4)..(5)..(38)..(40): Xaa is C or S
GKAXXVPTKLNAISVLYFDDMGVPTLKKYREGMSVAEXGXR

SEQ ID NO: 6791 - protein, 42 aa, Artificial Sequence
  Non-cyclic GFR-binding peptide
  MOD_RES (6)..(7)..(41): Xaa is C or S
  MOD_RES (21)..(22)..(23)..(24)..(25): Xaa is A or G
  MOD_RES (26)..(27)..(28)..(29): Xaa is A or G or absent
TVPKPXXAPTQLSAISVLYLXXXXXXXXXLKNYQNMVVRAXG

SEQ ID NO: 6792 - protein, 40 aa, Artificial Sequence
  Non-cyclic GFR-binding peptide
  MOD_RES (3)..(40): Xaa is C or S
  MOD_RES (19)..(20)..(21)..(22)..(23): Xaa is A or G
  MOD_RES (24)..(25)..(26)..(27): Xaa is A or G or absent
VQXRPTQVQLSAISVLYLXXXXXXXXXLKNYQTLEDHLAX

SEQ ID NO: 6793 - protein, 36 aa, Artificial Sequence
  Non-cyclic GFR-binding peptide
  MOD_RES (1)..(2)..(33)..(35): Xaa is C or S
XXVSQDLSAISILYLIGKTPKILKNYQMIVKSXKXS

SEQ ID NO: 6794 - protein, 31 aa, Artificial Sequence
  Non-cyclic GFR-binding peptide
APTQLSPISVLYKDDSSNVILKYHYNMVVRA

SEQ ID NO: 6795 - protein, 36 aa, Artificial Sequence
  Non-cyclic GFR-binding peptide
  MOD_RES (5)..(6): Xaa is C or S
VPKPXXAPTKLSAISVLYLDDSSNVILKNYQNMVVR

SEQ ID NO: 6796 - protein, 33 aa, Artificial Sequence
  Non-cyclic GFR-binding peptide
  MOD_RES (1)..(2): Xaa is C or S
XXVPTELNAISMLYFDEYDKVVLKKYREMVVEG

SEQ ID NO: 6797 - protein, 36 aa, Artificial Sequence
  Non-cyclic GFR-binding peptide
  MOD_RES (3)..(4): Xaa is C or S
  MOD_RES (18)..(19)..(20)..(21)..(22): Xaa is A or G
  MOD_RES (23)..(24)..(25)..(26): Xaa is A or G or absent
KPXXAPTQLSAISVLYLXXXXXXXXXLKNYQNMVVR

SEQ ID NO: 6798 - protein, 33 aa, Artificial Sequence
  Non-cyclic GFR-binding peptide
  MOD_RES (1)..(1): Xaa is C or S
  MOD_RES (15)..(16)..(17)..(18)..(19): Xaa is A or G
  MOD_RES (20)..(21)..(22)..(23): Xaa is A or G or absent
XVPTELSATSMLYYXXXXXXXXXLRKHRDMVVE

SEQ ID NO: 6799 - protein, 37 aa, Artificial Sequence
  Non-cyclic GFR-binding peptide
  MOD_RES (1)..(2)..(34)..(36): Xaa is C or S
XXVPTELNAISMLYFDENEKVVLKKYRDMVVEGXGXR

SEQ ID NO: 6800 - protein, 38 aa, Artificial Sequence
  Non-cyclic GFR-binding peptide
  MOD_RES (2)..(3)..(36)..(38): Xaa is C or S
  MOD_RES (17)..(18)..(19)..(20)..(21): Xaa is A or G
  MOD_RES (22)..(23)..(24)..(25): Xaa is A or G or absent
PXXVSQDLSAISILYLXXXXXXXXXLKNYQMIVKSXKX

SEQ ID NO: 6801 - protein, 38 aa, Artificial Sequence
  Non-cyclic GFR-binding peptide
  MOD_RES (2)..(3)..(35)..(37): Xaa is C or S
PXXAPTKLSATSVLYYDDSSNVILRKHRNMVVRSXGXH

SEQ ID NO: 6802 - protein, 37 aa, Artificial Sequence
  Non-cyclic GFR-binding peptide
  MOD_RES (35)..(37): Xaa is C or S
TQVQLSATSVLYYEIVRKKPIFLRKHRTLEDHLAXKX

SEQ ID NO: 6803 - protein, 36 aa, Artificial Sequence
  Non-cyclic GFR-binding peptide
  MOD_RES (5)..(6): Xaa is C or S
SASPXXVPQDLNAISILYFVGRTPKVLKKYRMVVKS

SEQ ID NO: 6804 - protein, 35 aa, Artificial Sequence
  Non-cyclic GFR-binding peptide
  MOD_RES (1)..(32)..(34): Xaa is C or S
XVPQALSATSILYYVGRKPKVLRKHRMIVRSXKXS

SEQ ID NO: 6805 - protein, 35 aa, Artificial Sequence
  Non-cyclic GFR-binding peptide
  MOD_RES (1)..(33)..(35): Xaa is C or S
XVPTELSATSMLYYDEYDKVVLRKHREMVVEGXGX

SEQ ID NO: 6806 - protein, 35 aa, Artificial Sequence
  Non-cyclic GFR-binding peptide
  MOD_RES (1)..(32)..(34): Xaa is C or S
XVPQALSPISILYKVGRKPKVLKYHYMIVRSXKXS

SEQ ID NO: 6807 - protein, 39 aa, Artificial Sequence
  Non-cyclic GFR-binding peptide
  MOD_RES (1)..(2)..(36)..(38): Xaa is C or S
  MOD_RES (16)..(17)..(18)..(19)..(20): Xaa is A or G
  MOD_RES (21)..(22)..(23)..(24): Xaa is A or G or absent
XXAPTQLSPISVLYKXXXXXXXXXLKYHYNMVVRAXGXH

SEQ ID NO: 6808 - protein, 39 aa, Artificial Sequence
  Non-cyclic GFR-binding peptide
  MOD_RES (5)..(6)..(37)..(39): Xaa is C or S
SASPXXVSQDLSPISILYKIGKTPKILKYHYMIVKSXKX

SEQ ID NO: 6809 - protein, 39 aa, Artificial Sequence
  Non-cyclic GFR-binding peptide
  MOD_RES (5)..(6)..(38): Xaa is C or S
IPKAXXVPTELSPISMLYKDENEKVVLKYHYDMVVEGXG

SEQ ID NO: 6810 - protein, 38 aa, Artificial Sequence
  Non-cyclic GFR-binding peptide
  MOD_RES (3)..(4)..(37): Xaa is C or S
  MOD_RES (18)..(19)..(20)..(21)..(22): Xaa is A or G
  MOD_RES (23)..(24)..(25)..(26): Xaa is A or G or absent
SPXXVSQDLSAISILYLXXXXXXXXXLKNYQMIVKSXK

SEQ ID NO: 6811 - protein, 39 aa, Artificial Sequence
  Non-cyclic GFR-binding peptide
  MOD_RES (6)..(7)..(38): Xaa is C or S
ASAAPXXVPQALSPISILYKVGRKPKVLKYHYMIVRSXK

SEQ ID NO: 6812 - protein, 39 aa, Artificial Sequence
  Non-cyclic GFR-binding peptide
  MOD_RES (4)..(5)..(38): Xaa is C or S
  MOD_RES (19)..(20)..(21)..(22)..(23): Xaa is A or G
  MOD_RES (24)..(25)..(26)..(27): Xaa is A or G or absent
AAPXXVPQALSATSILYYXXXXXXXXXLRKHRMIVRSXK

SEQ ID NO: 6813 - protein, 34 aa, Artificial Sequence
  Non-cyclic GFR-binding peptide
  MOD_RES (33)..(33): Xaa is C or S
  MOD_RES (14)..(15)..(16)..(17)..(18): Xaa is A or G
  MOD_RES (19)..(20)..(21)..(22): Xaa is A or G or absent
VSQDLSATSILYYXXXXXXXXXLRKHRMIVKSXK

SEQ ID NO: 6814 - protein, 40 aa, Artificial Sequence
  Non-cyclic GFR-binding peptide
  MOD_RES (6)..(38)..(40): Xaa is C or S
VTKPTXAPTKLSPISVLYKDDSSNVILKYHYNMVVRSXGX

SEQ ID NO: 6815 - protein, 40 aa, Artificial Sequence
  Non-cyclic GFR-binding peptide
  MOD_RES (4)..(5)..(37)..(39): Xaa is C or S
PKAXXVPTELSATSMLYYDEYDKVVLRKHREMVVEGXGXR

SEQ ID NO: 6816 - protein, 39 aa, Artificial Sequence
  Non-cyclic GFR-binding peptide
  MOD_RES (6)..(7): Xaa is C or S
  MOD_RES (21)..(22)..(23)..(24)..(25): Xaa is A or G
  MOD_RES (26)..(27)..(28)..(29): Xaa is A or G or absent
SIPKAXXVPTELNAISMLYFXXXXXXXXXLKKYREMVVE

SEQ ID NO: 6817 - protein, 37 aa, Artificial Sequence
  Non-cyclic GFR-binding peptide
  MOD_RES (1)..(2)..(36): Xaa is C or S
  MOD_RES (16)..(17)..(18)..(19)..(20): Xaa is A or G
  MOD_RES (21)..(22)..(23)..(24): Xaa is A or G or absent
XXAPTKLSPISVLYKXXXXXXXXXLKYHYNMVVKAXG

SEQ ID NO: 6818 - protein, 40 aa, Artificial Sequence
  Non-cyclic GFR-binding peptide
  MOD_RES (4)..(5)..(39): Xaa is C or S
  MOD_RES (19)..(20)..(21)..(22)..(23): Xaa is A or G
  MOD_RES (24)..(25)..(26)..(27): Xaa is A or G or absent
PKAXXAPTKLNAISVLYFXXXXXXXXXLKKYRNMVVKAXG

SEQ ID NO: 6819 - protein, 37 aa, Artificial Sequence
  Non-cyclic GFR-binding peptide
  MOD_RES (7)..(7): Xaa is C or S
HVTKPTXAPTKLSPISVLYKDDSSNVILKYHYNMVVR

SEQ ID NO: 6820 - protein, 33 aa, Artificial Sequence
  Non-cyclic GFR-binding peptide
  MOD_RES (33)..(33): Xaa is C or S
VPTKLNAISVLYFDDMGVPTLKKYREGMSVAEX

SEQ ID NO: 6821 - protein, 39 aa, Artificial Sequence
  Non-cyclic GFR-binding peptide
  MOD_RES (5)..(6): Xaa is C or S
  MOD_RES (20)..(21)..(22)..(23)..(24): Xaa is A or G
  MOD_RES (25)..(26)..(27)..(28): Xaa is A or G or absent
IPKAXXVPTELNAISMLYFXXXXXXXXXLKKYRDMVVEG

SEQ ID NO: 6822 - protein, 40 aa, Artificial Sequence
  Non-cyclic GFR-binding peptide
  MOD_RES (6)..(7)..(40): Xaa is C or S
KVGKAXXVPTKLSAISVLYLDDMGVPTLKNYQEGMSVAEX

SEQ ID NO: 6823 - protein, 37 aa, Artificial Sequence
  Non-cyclic GFR-binding peptide
  MOD_RES (3)..(4): Xaa is C or S
  MOD_RES (18)..(19)..(20)..(21)..(22): Xaa is A or G
  MOD_RES (23)..(24)..(25)..(26): Xaa is A or G or absent
KAXXAPTKLSAISVLYLXXXXXXXXXLKNYQNMVVKA

SEQ ID NO: 6824 - protein, 45 aa, Artificial Sequence
  Non-cyclic GFR-binding peptide
  MOD_RES (5)..(42)..(44): Xaa is C or S
RNVQXRPTQVQLSAISVLYLEIVRKKPIFLKNYQTLEDHLAXKXE

SEQ ID NO: 6825 - protein, 37 aa, Artificial Sequence
  Non-cyclic GFR-binding peptide
  MOD_RES (6)..(7): Xaa is C or S
YVPKPXXAPTKLSPISVLYKDDSSNVILKYHYNMVVR

SEQ ID NO: 6826 - protein, 32 aa, Artificial Sequence
  Non-cyclic GFR-binding peptide
  MOD_RES (31)..(31): Xaa is C or S
VPQDLSATSILYYVGRTPKVLRKHRMVVKSXK

SEQ ID NO: 6827 - protein, 38 aa, Artificial Sequence
  Non-cyclic GFR-binding peptide
  MOD_RES (6)..(7): Xaa is C or S
SIPKAXXVPTELSPISMLYKDEYDKVVLKYHYEMVVEG

SEQ ID NO: 6828 - protein, 36 aa, Artificial Sequence
  Non-cyclic GFR-binding peptide
  MOD_RES (34)..(36): Xaa is C or S
  MOD_RES (14)..(15)..(16)..(17)..(18): Xaa is A or G
  MOD_RES (19)..(20)..(21)..(22): Xaa is A or G or absent
APTQLSAISVLYLXXXXXXXXXLKNYQNMVVRAXGX

SEQ ID NO: 6829 - protein, 38 aa, Artificial Sequence
  Non-cyclic GFR-binding peptide
  MOD_RES (3)..(4): Xaa is C or S
  MOD_RES (18)..(19)..(20)..(21)..(22): Xaa is A or G
  MOD_RES (23)..(24)..(25)..(26): Xaa is A or G or absent
KAXXVPTKLNAISVLYFXXXXXXXXXLKKYREGMSVAE

SEQ ID NO: 6830 - protein, 37 aa, Artificial Sequence
  Non-cyclic GFR-binding peptide
  MOD_RES (1)..(34)..(36): Xaa is C or S
  MOD_RES (15)..(16)..(17)..(18)..(19): Xaa is A or G
  MOD_RES (20)..(21)..(22)..(23): Xaa is A or G or absent
XVPQALNAISILYFXXXXXXXXXLKKYRMIVRSXKXS

SEQ ID NO: 6831 - protein, 39 aa, Artificial Sequence
  Non-cyclic GFR-binding peptide
  MOD_RES (5)..(6)..(37)..(39): Xaa is C or S
SASPXXVSQDLNAISILYFIGKTPKILKKYRMIVKSXKX

SEQ ID NO: 6832 - protein, 36 aa, Artificial Sequence
  Non-cyclic GFR-binding peptide
RPTQVQLSAISVLYLEIVRKKPIFLKNYQTLEDHLA

SEQ ID NO: 6833 - protein, 37 aa, Artificial Sequence
  Non-cyclic GFR-binding peptide
  MOD_RES (2)..(3)..(37): Xaa is C or S
  MOD_RES (17)..(18)..(19)..(20)..(21): Xaa is A or G
  MOD_RES (22)..(23)..(24)..(25): Xaa is A or G or absent
PXXAPTQLSAISVLYLXXXXXXXXXLKNYQNMVVRAX

SEQ ID NO: 6834 - protein, 34 aa, Artificial Sequence
  Non-cyclic GFR-binding peptide
  MOD_RES (32)..(34): Xaa is C or S
APTQLSPISVLYKDDSSNVILKYHYNMVVRAXGX

SEQ ID NO: 6835 - protein, 33 aa, Artificial Sequence
  Non-cyclic GFR-binding peptide
  MOD_RES (15)..(16)..(17)..(18)..(19): Xaa is A or G
  MOD_RES (20)..(21)..(22)..(23): Xaa is A or G or absent
PTQVQLSPISVLYKXXXXXXXXXLKYHYTLEDH

SEQ ID NO: 6836 - protein, 37 aa, Artificial Sequence
  Non-cyclic GFR-binding peptide
  MOD_RES (3)..(4): Xaa is C or S
  MOD_RES (18)..(19)..(20)..(21)..(22): Xaa is A or G
  MOD_RES (23)..(24)..(25)..(26): Xaa is A or G or absent
KPXXAPTKLSAISVLYLXXXXXXXXXLKNYQNMVVRS

SEQ ID NO: 6837 - protein, 40 aa, Artificial Sequence
  Non-cyclic GFR-binding peptide
  MOD_RES (3)..(4)..(38)..(40): Xaa is C or S
  MOD_RES (18)..(19)..(20)..(21)..(22): Xaa is A or G
  MOD_RES (23)..(24)..(25)..(26): Xaa is A or G or absent
KAXXAPTKLNAISVLYFXXXXXXXXXLKKYRNMVVKAXGX

SEQ ID NO: 6838 - protein, 38 aa, Artificial Sequence
  Non-cyclic GFR-binding peptide
  MOD_RES (1)..(35)..(37): Xaa is C or S
  MOD_RES (15)..(16)..(17)..(18)..(19): Xaa is A or G
  MOD_RES (20)..(21)..(22)..(23): Xaa is A or G or absent
XVPTELNAISMLYFXXXXXXXXXLKKYREMVVEGXGXR

SEQ ID NO: 6839 - protein, 41 aa, Artificial Sequence
  Non-cyclic GFR-binding peptide
  MOD_RES (1)..(38)..(40): Xaa is C or S
  MOD_RES (17)..(18)..(19)..(20)..(21): Xaa is A or G
  MOD_RES (22)..(23)..(24)..(25): Xaa is A or G or absent
XRPTQVQLSAISVLYLXXXXXXXXXLKNYQTLEDHLAXKXE

SEQ ID NO: 6840 - protein, 36 aa, Artificial Sequence
  Non-cyclic GFR-binding peptide
  MOD_RES (1)..(2)..(35): Xaa is C or S
  MOD_RES (16)..(17)..(18)..(19)..(20): Xaa is A or G
  MOD_RES (21)..(22)..(23)..(24): Xaa is A or G or absent
XXVPQDLSAISILYLXXXXXXXXXLKNYQMVVKSXK

SEQ ID NO: 6841 - protein, 37 aa, Artificial Sequence
  Non-cyclic GFR-binding peptide
  MOD_RES (6)..(7): Xaa is C or S
SIPKAXXVPTELNAISMLYFDEYDKVVLKKYREMVVE

SEQ ID NO: 6842 - protein, 35 aa, Artificial Sequence
  Non-cyclic GFR-binding peptide
  MOD_RES (32)..(34): Xaa is C or S
APTKLNAISVLYFDSSNNVILKKYRNMVVKAXGXH

SEQ ID NO: 6843 - protein, 38 aa, Artificial Sequence
  Non-cyclic GFR-binding peptide
  MOD_RES (4)..(4): Xaa is C or S
  MOD_RES (20)..(21)..(22)..(23)..(24): Xaa is A or G
  MOD_RES (25)..(26)..(27)..(28): Xaa is A or G or absent
NVQXRPTQVQLNAISVLYFXXXXXXXXXLKKYRTLEDH

SEQ ID NO: 6844 - protein, 38 aa, Artificial Sequence
  Non-cyclic GFR-binding peptide
  MOD_RES (35)..(37): Xaa is C or S
  MOD_RES (14)..(15)..(16)..(17)..(18): Xaa is A or G
  MOD_RES (19)..(20)..(21)..(22): Xaa is A or G or absent
VPTKLSATSVLYYXXXXXXXXXLRKHREGMSVAEXGXR

SEQ ID NO: 6845 - protein, 35 aa, Artificial Sequence
  Non-cyclic GFR-binding peptide
  MOD_RES (1)..(34): Xaa is C or S
  MOD_RES (15)..(16)..(17)..(18)..(19): Xaa is A or G
  MOD_RES (20)..(21)..(22)..(23): Xaa is A or G or absent
XVSQDLSPISILYKXXXXXXXXXLKYHYMIVKSXK

SEQ ID NO: 6846 - protein, 37 aa, Artificial Sequence
  Non-cyclic GFR-binding peptide
  MOD_RES (4)..(5): Xaa is C or S
  MOD_RES (19)..(20)..(21)..(22)..(23): Xaa is A or G
  MOD_RES (24)..(25)..(26)..(27): Xaa is A or G or absent
ASPXXVPQDLNAISILYFXXXXXXXXXLKKYRMVVKS

SEQ ID NO: 6847 - protein, 38 aa, Artificial Sequence
  Non-cyclic GFR-binding peptide
  MOD_RES (4)..(5)..(37): Xaa is C or S
PKPXXAPTKLSAISVLYLDDSSNVILKNYQNMVVRSXG

SEQ ID NO: 6848 - protein, 34 aa, Artificial Sequence
  Non-cyclic GFR-binding peptide
  MOD_RES (1)..(2): Xaa is C or S
  MOD_RES (16)..(17)..(18)..(19)..(20): Xaa is A or G
  MOD_RES (21)..(22)..(23)..(24): Xaa is A or G or absent
XXAPTQLSAISVLYLXXXXXXXXXLKNYQNMVVR

SEQ ID NO: 6849 - protein, 38 aa, Artificial Sequence
  Non-cyclic GFR-binding peptide
  MOD_RES (3)..(4)..(37): Xaa is C or S
  MOD_RES (18)..(19)..(20)..(21)..(22): Xaa is A or G
  MOD_RES (23)..(24)..(25)..(26): Xaa is A or G or absent
APXXVPQALSATSILYYXXXXXXXXXLRKHRMIVRSXK

SEQ ID NO: 6850 - protein, 38 aa, Artificial Sequence
  Non-cyclic GFR-binding peptide
  MOD_RES (4)..(5)..(37): Xaa is C or S
PKPXXAPTKLSPISVLYKDDSSNVILKYHYNMVVRSXG

SEQ ID NO: 6851 - protein, 36 aa, Artificial Sequence
  Non-cyclic GFR-binding peptide
RPTQVQLSATSVLYYEIVRKKPIFLRKHRTLEDHLA

SEQ ID NO: 6852 - protein, 40 aa, Artificial Sequence
  Non-cyclic GFR-binding peptide
  MOD_RES (5)..(6)..(38)..(40): Xaa is C or S
IPKAXXVPTELSATSMLYYDENEKVVLRKHRDMVVEGXGX

SEQ ID NO: 6853 - protein, 31 aa, Artificial Sequence
  Non-cyclic GFR-binding peptide
  MOD_RES (31)..(31): Xaa is C or S
VPQALSAISILYLVGRKPKVLKNYQMIVRSX

SEQ ID NO: 6854 - protein, 44 aa, Artificial Sequence
  Non-cyclic GFR-binding peptide
  MOD_RES (4)..(41)..(43): Xaa is C or S
NVQXRPTQVQLNAISVLYFEIVRKKPIFLKKYRTLEDHLAXKXE

SEQ ID NO: 6855 - protein, 39 aa, Artificial Sequence
  Non-cyclic GFR-binding peptide
  MOD_RES (3)..(4)..(37)..(39): Xaa is C or S
  MOD_RES (18)..(19)..(20)..(21)..(22): Xaa is A or G
  MOD_RES (23)..(24)..(25)..(26): Xaa is A or G or absent
SPXXVPQDLSAISILYLXXXXXXXXXLKNYQMVVKSXKX

SEQ ID NO: 6856 - protein, 42 aa, Artificial Sequence
  Non-cyclic GFR-binding peptide
  MOD_RES (6)..(7)..(41): Xaa is C or S
  MOD_RES (21)..(22)..(23)..(24)..(25): Xaa is A or G
  MOD_RES (26)..(27)..(28)..(29): Xaa is A or G or absent
AVPKAXXAPTKLSPISVLYKXXXXXXXXXLKYHYNMVVKAXG

SEQ ID NO: 6857 - protein, 34 aa, Artificial Sequence
  Non-cyclic GFR-binding peptide
  MOD_RES (1)..(34): Xaa is C or S
XVPTKLNAISVLYFDDMGVPTLKKYREGMSVAEX

SEQ ID NO: 6858 - protein, 41 aa, Artificial Sequence
  Non-cyclic GFR-binding peptide
  MOD_RES (5)..(6)..(38)..(40): Xaa is C or S
IPKAXXVPTELSPISMLYKDENEKVVLKYHYDMVVEGXGXR

SEQ ID NO: 6859 - protein, 35 aa, Artificial Sequence
  Non-cyclic GFR-binding peptide
  MOD_RES (1)..(33)..(35): Xaa is C or S
XAPTQLSATSVLYYDDSSNVILRKHRNMVVRAXGX

SEQ ID NO: 6860 - protein, 36 aa, Artificial Sequence
  Non-cyclic GFR-binding peptide
  MOD_RES (34)..(36): Xaa is C or S
  MOD_RES (14)..(15)..(16)..(17)..(18): Xaa is A or G
  MOD_RES (19)..(20)..(21)..(22): Xaa is A or G or absent
VPTELNAISMLYFXXXXXXXXXLKKYREMVVEGXGX

SEQ ID NO: 6861 - protein, 35 aa, Artificial Sequence
  Non-cyclic GFR-binding peptide
  MOD_RES (1)..(33)..(35): Xaa is C or S
XAPTKLSATSVLYYDDSSNVILRKHRNMVVRSXGX

SEQ ID NO: 6862 - protein, 37 aa, Artificial Sequence
  Non-cyclic GFR-binding peptide
  MOD_RES (2)..(3)..(35)..(37): Xaa is C or S
AXXAPTKLSPISVLYKDSSNNVILKYHYNMVVKAXGX

SEQ ID NO: 6863 - protein, 33 aa, Artificial Sequence
  Non-cyclic GFR-binding peptide
  MOD_RES (1)..(33): Xaa is C or S
XAPTKLSAISVLYLDSSNNVILKNYQNMVVKAX

SEQ ID NO: 6864 - protein, 38 aa, Artificial Sequence
  Non-cyclic GFR-binding peptide
  MOD_RES (5)..(6): Xaa is C or S
  MOD_RES (20)..(21)..(22)..(23)..(24): Xaa is A or G
  MOD_RES (25)..(26)..(27)..(28): Xaa is A or G or absent
VPKAXXAPTKLNAISVLYFXXXXXXXXXLKKYRNMVVK

SEQ ID NO: 6865 - protein, 31 aa, Artificial Sequence
  Non-cyclic GFR-binding peptide
APTKLSAISVLYLDSSNNVILKNYQNMVVKA

SEQ ID NO: 6866 - protein, 40 aa, Artificial Sequence
  Non-cyclic GFR-binding peptide
  MOD_RES (4)..(5)..(39): Xaa is C or S
  MOD_RES (19)..(20)..(21)..(22)..(23): Xaa is A or G
  MOD_RES (24)..(25)..(26)..(27): Xaa is A or G or absent
PKAXXVPTELNAISMLYFXXXXXXXXXLKKYREMVVEGXG

SEQ ID NO: 6867 - protein, 43 aa, Artificial Sequence
  Non-cyclic GFR-binding peptide
  MOD_RES (6)..(7)..(41)..(43): Xaa is C or S
  MOD_RES (21)..(22)..(23)..(24)..(25): Xaa is A or G
  MOD_RES (26)..(27)..(28)..(29): Xaa is A or G or absent
KIPKAXXVPTELSPISMLYKXXXXXXXXXLKYHYDMVVEGXGX

SEQ ID NO: 6868 - protein, 40 aa, Artificial Sequence
  Non-cyclic GFR-binding peptide
  MOD_RES (5)..(6)..(37)..(39): Xaa is C or S
SAAPXXVPQALSPISILYKVGRKPKVLKYHYMIVRSXKXS

SEQ ID NO: 6869 - protein, 33 aa, Artificial Sequence
  Non-cyclic GFR-binding peptide
  MOD_RES (1)..(1): Xaa is C or S
  MOD_RES (15)..(16)..(17)..(18)..(19): Xaa is A or G
  MOD_RES (20)..(21)..(22)..(23): Xaa is A or G or absent
XVPTELSPISMLYKXXXXXXXXXLKYHYDMVVE

SEQ ID NO: 6870 - protein, 34 aa, Artificial Sequence
  Non-cyclic GFR-binding peptide
  MOD_RES (2)..(2): Xaa is C or S
  MOD_RES (16)..(17)..(18)..(19)..(20): Xaa is A or G
  MOD_RES (21)..(22)..(23)..(24): Xaa is A or G or absent
TXAPTKLSPISVLYKXXXXXXXXXLKYHYNMVVR

SEQ ID NO: 6871 - protein, 35 aa, Artificial Sequence
  Non-cyclic GFR-binding peptide
  MOD_RES (32)..(34): Xaa is C or S
APTQLSATSVLYYDDSSNVILRKHRNMVVRAXGXH

SEQ ID NO: 6872 - protein, 42 aa, Artificial Sequence
  Non-cyclic GFR-binding peptide
  MOD_RES (2)..(39)..(41): Xaa is C or S
QXRPTQVQLSPISVLYKEIVRKKPIFLKYHYTLEDHLAXKXE

SEQ ID NO: 6873 - protein, 39 aa, Artificial Sequence
  Non-cyclic GFR-binding peptide
  MOD_RES (2)..(3)..(36)..(38): Xaa is C or S
  MOD_RES (17)..(18)..(19)..(20)..(21): Xaa is A or G
  MOD_RES (22)..(23)..(24)..(25): Xaa is A or G or absent
PXXVSQDLSAISILYLXXXXXXXXXLKNYQMIVKSXKXS

SEQ ID NO: 6874 - protein, 38 aa, Artificial Sequence
  Non-cyclic GFR-binding peptide
  MOD_RES (36)..(38): Xaa is C or S
  MOD_RES (15)..(16)..(17)..(18)..(19): Xaa is A or G
  MOD_RES (20)..(21)..(22)..(23): Xaa is A or G or absent
PTQVQLSATSVLYYXXXXXXXXXLRKHRTLEDHLAXKX

SEQ ID NO: 6875 - protein, 35 aa, Artificial Sequence
  Non-cyclic GFR-binding peptide
  MOD_RES (3)..(4)..(35): Xaa is C or S
SPXXVPQDLSATSILYYVGRTPKVLRKHRMVVKSX

SEQ ID NO: 6876 - protein, 36 aa, Artificial Sequence
  Non-cyclic GFR-binding peptide
  MOD_RES (2)..(3)..(34)..(36): Xaa is C or S
PXXVPQALSPISILYKVGRKPKVLKYHYMIVRSXKX

SEQ ID NO: 6877 - protein, 35 aa, Artificial Sequence
  Non-cyclic GFR-binding peptide
  MOD_RES (1)..(2)..(35): Xaa is C or S
  MOD_RES (16)..(17)..(18)..(19)..(20): Xaa is A or G
  MOD_RES (21)..(22)..(23)..(24): Xaa is A or G or absent
XXVSQDLNAISILYFXXXXXXXXXLKKYRMIVKSX

SEQ ID NO: 6878 - protein, 33 aa, Artificial Sequence
  Non-cyclic GFR-binding peptide
  MOD_RES (32)..(32): Xaa is C or S
VPTELSATSMLYYDENEKVVLRKHRDMVVEGXG

SEQ ID NO: 6879 - protein, 42 aa, Artificial Sequence
  Non-cyclic GFR-binding peptide
  MOD_RES (3)..(40)..(42): Xaa is C or S
  MOD_RES (19)..(20)..(21)..(22)..(23): Xaa is A or G
  MOD_RES (24)..(25)..(26)..(27): Xaa is A or G or absent
VQXRPTQVQLNAISVLYFXXXXXXXXXLKKYRTLEDHLAXKX

SEQ ID NO: 6880 - protein, 39 aa, Artificial Sequence
  Non-cyclic GFR-binding peptide
  MOD_RES (5)..(39): Xaa is C or S
  MOD_RES (19)..(20)..(21)..(22)..(23): Xaa is A or G
  MOD_RES (24)..(25)..(26)..(27): Xaa is A or G or absent
TKPTXAPTKLSATSVLYYXXXXXXXXXLRKHRNMVVRSX

SEQ ID NO: 6881 - protein, 38 aa, Artificial Sequence
  Non-cyclic GFR-binding peptide
  MOD_RES (5)..(6)..(37): Xaa is C or S
SASPXXVPQDLSATSILYYVGRTPKVLRKHRMVVKSXK

SEQ ID NO: 6882 - protein, 40 aa, Artificial Sequence
  Non-cyclic GFR-binding peptide
  MOD_RES (5)..(6)..(38)..(40): Xaa is C or S
VPKAXXAPTKLSPISVLYKDSSNNVILKYHYNMVVKAXGX

SEQ ID NO: 6883 - protein, 37 aa, Artificial Sequence
  Non-cyclic GFR-binding peptide
  MOD_RES (3)..(4): Xaa is C or S
  MOD_RES (18)..(19)..(20)..(21)..(22): Xaa is A or G
  MOD_RES (23)..(24)..(25)..(26): Xaa is A or G or absent
KAXXVPTELSPISMLYKXXXXXXXXXLKYHYDMVVEG

SEQ ID NO: 6884 - protein, 38 aa, Artificial Sequence
  Non-cyclic GFR-binding peptide
  MOD_RES (2)..(3)..(35)..(37): Xaa is C or S
AXXAPTKLSAISVLYLDSSNNVILKNYQNMVVKAXGXH

SEQ ID NO: 6885 - protein, 38 aa, Artificial Sequence
  Non-cyclic GFR-binding peptide
  MOD_RES (2)..(3)..(36)..(38): Xaa is C or S
  MOD_RES (17)..(18)..(19)..(20)..(21): Xaa is A or G
  MOD_RES (22)..(23)..(24)..(25): Xaa is A or G or absent
PXXVPQALSAISILYLXXXXXXXXXLKNYQMIVRSXKX

SEQ ID NO: 6886 - protein, 39 aa, Artificial Sequence
  Non-cyclic GFR-binding peptide
  MOD_RES (6)..(7)..(39): Xaa is C or S
YVPKPXXAPTKLSAISVLYLDDSSNVILKNYQNMVVRSX

SEQ ID NO: 6887 - protein, 40 aa, Artificial Sequence
  Non-cyclic GFR-binding peptide
  MOD_RES (5)..(5): Xaa is C or S
  MOD_RES (21)..(22)..(23)..(24)..(25): Xaa is A or G
  MOD_RES (26)..(27)..(28)..(29): Xaa is A or G or absent
RNVQXRPTQVQLSAISVLYLXXXXXXXXXLKNYQTLEDHL

SEQ ID NO: 6888 - protein, 35 aa, Artificial Sequence
  Non-cyclic GFR-binding peptide
  MOD_RES (2)..(3)..(34): Xaa is C or S
PXXVPQALNAISILYFVGRKPKVLKKYRMIVRSXK

SEQ ID NO: 6889 - protein, 31 aa, Artificial Sequence
  Non-cyclic GFR-binding peptide
APTKLNAISVLYFDSSNNVILKKYRNMVVKA

SEQ ID NO: 6890 - protein, 38 aa, Artificial Sequence
  Non-cyclic GFR-binding peptide
  MOD_RES (6)..(7)..(38): Xaa is C or S
ASAAPXXVPQALSPISILYKVGRKPKVLKYHYMIVRSX

SEQ ID NO: 6891 - protein, 34 aa, Artificial Sequence
  Non-cyclic GFR-binding peptide
  MOD_RES (32)..(34): Xaa is C or S
APTKLSPISVLYKDDSSNVILKYHYNMVVRSXGX

SEQ ID NO: 6892 - protein, 35 aa, Artificial Sequence
  Non-cyclic GFR-binding peptide
  MOD_RES (4)..(5): Xaa is C or S
PKAXXVPTELNAISMLYFDEYDKVVLKKYREMVVE

SEQ ID NO: 6893 - protein, 35 aa, Artificial Sequence
  Non-cyclic GFR-binding peptide
  MOD_RES (2)..(3)..(34): Xaa is C or S
PXXVPQALSPISILYKVGRKPKVLKYHYMIVRSXK

SEQ ID NO: 6894 - protein, 40 aa, Artificial Sequence
  Non-cyclic GFR-binding peptide
  MOD_RES (3)..(40): Xaa is C or S
  MOD_RES (19)..(20)..(21)..(22)..(23): Xaa is A or G
  MOD_RES (24)..(25)..(26)..(27): Xaa is A or G or absent
VQXRPTQVQLSPISVLYKXXXXXXXXXLKYHYTLEDHLAX

SEQ ID NO: 6895 - protein, 37 aa, Artificial Sequence
  Non-cyclic GFR-binding peptide
  MOD_RES (4)..(5): Xaa is C or S
  MOD_RES (19)..(20)..(21)..(22)..(23): Xaa is A or G
  MOD_RES (24)..(25)..(26)..(27): Xaa is A or G or absent
PKAXXVPTELSPISMLYKXXXXXXXXXLKYHYEMVVE

SEQ ID NO: 6896 - protein, 32 aa, Artificial Sequence
  Non-cyclic GFR-binding peptide
  MOD_RES (32)..(32): Xaa is C or S
VPTELNAISMLYFDENEKVVLKKYRDMVVEGX

SEQ ID NO: 6897 - protein, 35 aa, Artificial Sequence
  Non-cyclic GFR-binding peptide
  MOD_RES (1)..(2): Xaa is C or S
  MOD_RES (16)..(17)..(18)..(19)..(20): Xaa is A or G
  MOD_RES (21)..(22)..(23)..(24): Xaa is A or G or absent
XXAPTKLSATSVLYYXXXXXXXXXLRKHRNMVVRS

SEQ ID NO: 6898 - protein, 35 aa, Artificial Sequence
  Non-cyclic GFR-binding peptide
  MOD_RES (1)..(2)..(34): Xaa is C or S
XXAPTKLSPISVLYKDSSNNVILKYHYNMVVKAXG

SEQ ID NO: 6899 - protein, 36 aa, Artificial Sequence
  Non-cyclic GFR-binding peptide
  MOD_RES (1)..(2)..(36): Xaa is C or S
  MOD_RES (16)..(17)..(18)..(19)..(20): Xaa is A or G
  MOD_RES (21)..(22)..(23)..(24): Xaa is A or G or absent
XXAPTQLSPISVLYKXXXXXXXXXLKYHYNMVVRAX

SEQ ID NO: 6900 - protein, 39 aa, Artificial Sequence
  Non-cyclic GFR-binding peptide
  MOD_RES (6)..(7): Xaa is C or S
  MOD_RES (21)..(22)..(23)..(24)..(25): Xaa is A or G
  MOD_RES (26)..(27)..(28)..(29): Xaa is A or G or absent
KIPKAXXVPTELSATSMLYYXXXXXXXXXLRKHRDMVVE

SEQ ID NO: 6901 - protein, 41 aa, Artificial Sequence
  Non-cyclic GFR-binding peptide
  MOD_RES (3)..(40): Xaa is C or S
  MOD_RES (19)..(20)..(21)..(22)..(23): Xaa is A or G
  MOD_RES (24)..(25)..(26)..(27): Xaa is A or G or absent
VQXRPTQVQLNAISVLYFXXXXXXXXXLKKYRTLEDHLAXK

SEQ ID NO: 6902 - protein, 36 aa, Artificial Sequence
  Non-cyclic GFR-binding peptide
  MOD_RES (4)..(5): Xaa is C or S
PKAXXVPTELSATSMLYYDENEKVVLRKHRDMVVEG

SEQ ID NO: 6903 - protein, 38 aa, Artificial Sequence
  Non-cyclic GFR-binding peptide
  MOD_RES (5)..(6)..(38): Xaa is C or S
IPKAXXVPTELSPISMLYKDEYDKVVLKYHYEMVVEGX

SEQ ID NO: 6904 - protein, 39 aa, Artificial Sequence
  Non-cyclic GFR-binding peptide
  MOD_RES (6)..(38): Xaa is C or S
VTKPTXAPTKLSAISVLYLDDSSNVILKNYQNMVVRSXG

SEQ ID NO: 6905 - protein, 39 aa, Artificial Sequence
  Non-cyclic GFR-binding peptide
  MOD_RES (5)..(5): Xaa is C or S
RNVQXRPTQVQLSATSVLYYEIVRKKPIFLRKHRTLEDH

SEQ ID NO: 6906 - protein, 39 aa, Artificial Sequence
  Non-cyclic GFR-binding peptide
  MOD_RES (3)..(3): Xaa is C or S
VQXRPTQVQLSPISVLYKEIVRKKPIFLKYHYTLEDHLA

SEQ ID NO: 6907 - protein, 42 aa, Artificial Sequence
  Non-cyclic GFR-binding peptide
  MOD_RES (6)..(7)..(40)..(42): Xaa is C or S
  MOD_RES (21)..(22)..(23)..(24)..(25): Xaa is A or G
  MOD_RES (26)..(27)..(28)..(29): Xaa is A or G or absent
ASASPXXVSQDLSPISILYKXXXXXXXXXLKYHYMIVKSXKX

SEQ ID NO: 6908 - protein, 35 aa, Artificial Sequence
  Non-cyclic GFR-binding peptide
  MOD_RES (3)..(35): Xaa is C or S
PTXAPTKLSPISVLYKDDSSNVILKYHYNMVVRSX

SEQ ID NO: 6909 - protein, 40 aa, Artificial Sequence
  Non-cyclic GFR-binding peptide
  MOD_RES (6)..(7)..(39): Xaa is C or S
TVPKPXXAPTQLSAISVLYLDDSSNVILKNYQNMVVRAXG

SEQ ID NO: 6910 - protein, 34 aa, Artificial Sequence
  Non-cyclic GFR-binding peptide
  MOD_RES (1)..(2)..(33): Xaa is C or S
XXVPQALNAISILYFVGRKPKVLKKYRMIVRSXK

SEQ ID NO: 6911 - protein, 39 aa, Artificial Sequence
  Non-cyclic GFR-binding peptide
  MOD_RES (3)..(4)..(37)..(39): Xaa is C or S
  MOD_RES (18)..(19)..(20)..(21)..(22): Xaa is A or G
  MOD_RES (23)..(24)..(25)..(26): Xaa is A or G or absent
SPXXVSQDLSPISILYKXXXXXXXXXLKYHYMIVKSXKX

SEQ ID NO: 6912 - protein, 42 aa, Artificial Sequence
  Non-cyclic GFR-binding peptide
  MOD_RES (5)..(6)..(40)..(42): Xaa is C or S
  MOD_RES (20)..(21)..(22)..(23)..(24): Xaa is A or G
  MOD_RES (25)..(26)..(27)..(28): Xaa is A or G or absent
VPKPXXAPTQLSPISVLYKXXXXXXXXXLKYHYNMVVRAXGX

SEQ ID NO: 6913 - protein, 36 aa, Artificial Sequence
  Non-cyclic GFR-binding peptide
  MOD_RES (3)..(4): Xaa is C or S
  MOD_RES (18)..(19)..(20)..(21)..(22): Xaa is A or G
  MOD_RES (23)..(24)..(25)..(26): Xaa is A or G or absent
KAXXVPTELNAISMLYFXXXXXXXXXLKKYREMVVE

SEQ ID NO: 6914 - protein, 41 aa, Artificial Sequence
  Non-cyclic GFR-binding peptide
  MOD_RES (5)..(6)..(40): Xaa is C or S
  MOD_RES (20)..(21)..(22)..(23)..(24): Xaa is A or G
  MOD_RES (25)..(26)..(27)..(28): Xaa is A or G or absent
VPKPXXAPTKLSATSVLYYXXXXXXXXXLRKHRNMVVRSXG

SEQ ID NO: 6915 - protein, 40 aa, Artificial Sequence
  Non-cyclic GFR-binding peptide
  MOD_RES (5)..(5): Xaa is C or S
RNVQXRPTQVQLSATSVLYYEIVRKKPIFLRKHRTLEDHL

SEQ ID NO: 6916 - protein, 37 aa, Artificial Sequence
  Non-cyclic GFR-binding peptide
  MOD_RES (1)..(1): Xaa is C or S
XRPTQVQLSPISVLYKEIVRKKPIFLKYHYTLEDHLA

SEQ ID NO: 6917 - protein, 31 aa, Artificial Sequence
  Non-cyclic GFR-binding peptide
  MOD_RES (1)..(1): Xaa is C or S
XVPTELSATSMLYYDEYDKVVLRKHREMVVE

SEQ ID NO: 6918 - protein, 37 aa, Artificial Sequence
  Non-cyclic GFR-binding peptide
  MOD_RES (2)..(3)..(37): Xaa is C or S
  MOD_RES (17)..(18)..(19)..(20)..(21): Xaa is A or G
  MOD_RES (22)..(23)..(24)..(25): Xaa is A or G or absent
AXXAPTKLNAISVLYFXXXXXXXXXLKKYRNMVVKAX

SEQ ID NO: 6919 - protein, 36 aa, Artificial Sequence
  Non-cyclic GFR-binding peptide
  MOD_RES (2)..(3)..(34)..(36): Xaa is C or S
PXXVPQDLNAISILYFVGRTPKVLKKYRMVVKSXKX

SEQ ID NO: 6920 - protein, 37 aa, Artificial Sequence
  Non-cyclic GFR-binding peptide
  MOD_RES (3)..(4)..(36): Xaa is C or S
KPXXAPTQLSPISVLYKDDSSNVILKYHYNMVVRAXG

SEQ ID NO: 6921 - protein, 38 aa, Artificial Sequence
  Non-cyclic GFR-binding peptide
  MOD_RES (2)..(3)..(37): Xaa is C or S
  MOD_RES (17)..(18)..(19)..(20)..(21): Xaa is A or G
  MOD_RES (22)..(23)..(24)..(25): Xaa is A or G or absent
PXXAPTQLSPISVLYKXXXXXXXXXLKYHYNMVVRAXG

SEQ ID NO: 6922 - protein, 39 aa, Artificial Sequence
  Non-cyclic GFR-binding peptide
  MOD_RES (1)..(38): Xaa is C or S
XRPTQVQLNAISVLYFEIVRKKPIFLKKYRTLEDHLAXK

SEQ ID NO: 6923 - protein, 38 aa, Artificial Sequence
  Non-cyclic GFR-binding peptide
  MOD_RES (4)..(5): Xaa is C or S
  MOD_RES (19)..(20)..(21)..(22)..(23): Xaa is A or G
  MOD_RES (24)..(25)..(26)..(27): Xaa is A or G or absent
PKAXXVPTELNAISMLYFXXXXXXXXXLKKYREMVVEG

SEQ ID NO: 6924 - protein, 41 aa, Artificial Sequence
  Non-cyclic GFR-binding peptide
  MOD_RES (3)..(4)..(38)..(40): Xaa is C or S
  MOD_RES (18)..(19)..(20)..(21)..(22): Xaa is A or G
  MOD_RES (23)..(24)..(25)..(26): Xaa is A or G or absent
KAXXAPTKLNAISVLYFXXXXXXXXXLKKYRNMVVKAXGXH

SEQ ID NO: 6925 - protein, 40 aa, Artificial Sequence
  Non-cyclic GFR-binding peptide
  MOD_RES (6)..(7): Xaa is C or S
  MOD_RES (21)..(22)..(23)..(24)..(25): Xaa is A or G
  MOD_RES (26)..(27)..(28)..(29): Xaa is A or G or absent
KIPKAXXVPTELNAISMLYFXXXXXXXXXLKKYRDMVVEG

SEQ ID NO: 6926 - protein, 34 aa, Artificial Sequence
  Non-cyclic GFR-binding peptide
  MOD_RES (3)..(4): Xaa is C or S
KAXXVPTELSATSMLYYDEYDKVVLRKHREMVVE

SEQ ID NO: 6927 - protein, 42 aa, Artificial Sequence
  Non-cyclic GFR-binding peptide
  MOD_RES (6)..(7)..(41): Xaa is C or S
  MOD_RES (21)..(22)..(23)..(24)..(25): Xaa is A or G
  MOD_RES (26)..(27)..(28)..(29): Xaa is A or G or absent
AVPKAXXAPTKLNAISVLYFXXXXXXXXXLKKYRNMVVKAXG

SEQ ID NO: 6928 - protein, 38 aa, Artificial Sequence
  Non-cyclic GFR-binding peptide
  MOD_RES (5)..(6): Xaa is C or S
  MOD_RES (20)..(21)..(22)..(23)..(24): Xaa is A or G
  MOD_RES (25)..(26)..(27)..(28): Xaa is A or G or absent
SASPXXVPQDLSATSILYYXXXXXXXXXLRKHRMVVKS

SEQ ID NO: 6929 - protein, 42 aa, Artificial Sequence
  Non-cyclic GFR-binding peptide
  MOD_RES (5)..(6)..(39)..(41): Xaa is C or S
  MOD_RES (20)..(21)..(22)..(23)..(24): Xaa is A or G
  MOD_RES (25)..(26)..(27)..(28): Xaa is A or G or absent
SAAPXXVPQALSPISILYKXXXXXXXXXLKYHYMIVRSXKXS

SEQ ID NO: 6930 - protein, 37 aa, Artificial Sequence
  Non-cyclic GFR-binding peptide
  MOD_RES (37)..(37): Xaa is C or S
  MOD_RES (16)..(17)..(18)..(19)..(20): Xaa is A or G
  MOD_RES (21)..(22)..(23)..(24): Xaa is A or G or absent
RPTQVQLSAISVLYLXXXXXXXXXLKNYQTLEDHLAX

SEQ ID NO: 6931 - protein, 38 aa, Artificial Sequence
  Non-cyclic GFR-binding peptide
  MOD_RES (3)..(4)..(36)..(38): Xaa is C or S
KPXXAPTQLSAISVLYLDDSSNVILKNYQNMVVRAXGX

SEQ ID NO: 6932 - protein, 33 aa, Artificial Sequence
  Non-cyclic GFR-binding peptide
  MOD_RES (1)..(32): Xaa is C or S
XVPQDLSATSILYYVGRTPKVLRKHRMVVKSXK

SEQ ID NO: 6933 - protein, 39 aa, Artificial Sequence
  Non-cyclic GFR-binding peptide
  MOD_RES (4)..(5)..(37)..(39): Xaa is C or S
PKAXXVPTELSATSMLYYDENEKVVLRKHRDMVVEGXGX

SEQ ID NO: 6934 - protein, 37 aa, Artificial Sequence
  Non-cyclic GFR-binding peptide
  MOD_RES (37)..(37): Xaa is C or S
RPTQVQLSATSVLYYEIVRKKPIFLRKHRTLEDHLAX

SEQ ID NO: 6935 - protein, 41 aa, Artificial Sequence
  Non-cyclic GFR-binding peptide
  MOD_RES (5)..(6)..(40): Xaa is C or S
  MOD_RES (20)..(21)..(22)..(23)..(24): Xaa is A or G
  MOD_RES (25)..(26)..(27)..(28): Xaa is A or G or absent
VPKAXXAPTKLNAISVLYFXXXXXXXXXLKKYRNMVVKAXG

SEQ ID NO: 6936 - protein, 35 aa, Artificial Sequence
  Non-cyclic GFR-binding peptide
  MOD_RES (35)..(35): Xaa is C or S
TQVQLSPISVLYKEIVRKKPIFLKYHYTLEDHLAX

SEQ ID NO: 6937 - protein, 37 aa, Artificial Sequence
  Non-cyclic GFR-binding peptide
  MOD_RES (1)..(2)..(35)..(37): Xaa is C or S
  MOD_RES (16)..(17)..(18)..(19)..(20): Xaa is A or G
  MOD_RES (21)..(22)..(23)..(24): Xaa is A or G or absent
XXVPQDLSPISILYKXXXXXXXXXLKYHYMVVKSXKX

SEQ ID NO: 6938 - protein, 42 aa, Artificial Sequence
  Non-cyclic GFR-binding peptide
  MOD_RES (5)..(6)..(39)..(41): Xaa is C or S
  MOD_RES (20)..(21)..(22)..(23)..(24): Xaa is A or G
  MOD_RES (25)..(26)..(27)..(28): Xaa is A or G or absent
SASPXXVPQDLSAISILYLXXXXXXXXXLKNYQMVVKSXKXS

SEQ ID NO: 6939 - protein, 39 aa, Artificial Sequence
  Non-cyclic GFR-binding peptide
  MOD_RES (4)..(4): Xaa is C or S
NVQXRPTQVQLNAISVLYFEIVRKKPIFLKKYRTLEDHL

SEQ ID NO: 6940 - protein, 37 aa, Artificial Sequence
  Non-cyclic GFR-binding peptide
  MOD_RES (3)..(4)..(37): Xaa is C or S
KAXXVPTKLSAISVLYLDDMGVPTLKNYQEGMSVAEX

SEQ ID NO: 6941 - protein, 36 aa, Artificial Sequence
  Non-cyclic GFR-binding peptide
  MOD_RES (2)..(2): Xaa is C or S
QXRPTQVQLNAISVLYFEIVRKKPIFLKKYRTLEDH

SEQ ID NO: 6942 - protein, 36 aa, Artificial Sequence
  Non-cyclic GFR-binding peptide
  MOD_RES (5)..(6): Xaa is C or S
VPKAXXAPTKLNAISVLYFDSSNNVILKKYRNMVVK

SEQ ID NO: 6943 - protein, 39 aa, Artificial Sequence
  Non-cyclic GFR-binding peptide
  MOD_RES (4)..(5)..(37)..(39): Xaa is C or S
PKPXXAPTQLSAISVLYLDDSSNVILKNYQNMVVRAXGX

SEQ ID NO: 6944 - protein, 40 aa, Artificial Sequence
  Non-cyclic GFR-binding peptide
  MOD_RES (3)..(4)..(38)..(40): Xaa is C or S
  MOD_RES (18)..(19)..(20)..(21)..(22): Xaa is A or G
  MOD_RES (23)..(24)..(25)..(26): Xaa is A or G or absent
KAXXVPTELSPISMLYKXXXXXXXXXLKYHYDMVVEGXGX

SEQ ID NO: 6945 - protein, 38 aa, Artificial Sequence
  Non-cyclic GFR-binding peptide
  MOD_RES (3)..(4)..(36)..(38): Xaa is C or S
KAXXVPTELSATSMLYYDENEKVVLRKHRDMVVEGXGX

SEQ ID NO: 6946 - protein, 40 aa, Artificial Sequence
  Non-cyclic GFR-binding peptide
  MOD_RES (5)..(6): Xaa is C or S
  MOD_RES (20)..(21)..(22)..(23)..(24): Xaa is A or G
  MOD_RES (25)..(26)..(27)..(28): Xaa is A or G or absent
VGKAXXVPTKLNAISVLYFXXXXXXXXXLKKYREGMSVAE

SEQ ID NO: 6947 - protein, 38 aa, Artificial Sequence
  Non-cyclic GFR-binding peptide
  MOD_RES (4)..(5)..(36)..(38): Xaa is C or S
AAPXXVPQALNAISILYFVGRKPKVLKKYRMIVRSXKX

SEQ ID NO: 6948 - protein, 34 aa, Artificial Sequence
  Non-cyclic GFR-binding peptide
  MOD_RES (34)..(34): Xaa is C or S
  MOD_RES (14)..(15)..(16)..(17)..(18): Xaa is A or G
  MOD_RES (19)..(20)..(21)..(22): Xaa is A or G or absent
APTKLSATSVLYYXXXXXXXXXLRKHRNMVVRSX

SEQ ID NO: 6949 - protein, 38 aa, Artificial Sequence
  Non-cyclic GFR-binding peptide
  MOD_RES (4)..(38): Xaa is C or S
  MOD_RES (18)..(19)..(20)..(21)..(22): Xaa is A or G
  MOD_RES (23)..(24)..(25)..(26): Xaa is A or G or absent
KPTXAPTKLSATSVLYYXXXXXXXXXLRKHRNMVVRSX

SEQ ID NO: 6950 - protein, 37 aa, Artificial Sequence
  Non-cyclic GFR-binding peptide
  MOD_RES (2)..(3)..(34)..(36): Xaa is C or S
PXXVPQDLSPISILYKVGRTPKVLKYHYMVVKSXKXS

SEQ ID NO: 6951 - protein, 41 aa, Artificial Sequence
  Non-cyclic GFR-binding peptide
  MOD_RES (5)..(5): Xaa is C or S
  MOD_RES (21)..(22)..(23)..(24)..(25): Xaa is A or G
  MOD_RES (26)..(27)..(28)..(29): Xaa is A or G or absent
RNVQXRPTQVQLNAISVLYFXXXXXXXXXLKKYRTLEDHLA

SEQ ID NO: 6952 - protein, 42 aa, Artificial Sequence
  Non-cyclic GFR-binding peptide
  MOD_RES (3)..(4)..(39)..(41): Xaa is C or S
  MOD_RES (18)..(19)..(20)..(21)..(22): Xaa is A or G
  MOD_RES (23)..(24)..(25)..(26): Xaa is A or G or absent
KAXXVPTKLSATSVLYYXXXXXXXXXLRKHREGMSVAEXGXR

SEQ ID NO: 6953 - protein, 34 aa, Artificial Sequence
  Non-cyclic GFR-binding peptide
  MOD_RES (1)..(2): Xaa is C or S
  MOD_RES (16)..(17)..(18)..(19)..(20): Xaa is A or G
  MOD_RES (21)..(22)..(23)..(24): Xaa is A or G or absent
XXAPTQLSPISVLYKXXXXXXXXXLKYHYNMVVR

SEQ ID NO: 6954 - protein, 40 aa, Artificial Sequence
  Non-cyclic GFR-binding peptide
  MOD_RES (5)..(6)..(38)..(40): Xaa is C or S
VPKPXXAPTKLSAISVLYLDDSSNVILKNYQNMVVRSXGX

SEQ ID NO: 6955 - protein, 42 aa, Artificial Sequence
  Non-cyclic GFR-binding peptide
  MOD_RES (6)..(7)..(39)..(41): Xaa is C or S
AVPKAXXAPTKLSPISVLYKDSSNNVILKYHYNMVVKAXGXH

SEQ ID NO: 6956 - protein, 34 aa, Artificial Sequence
  Non-cyclic GFR-binding peptide
  MOD_RES (32)..(34): Xaa is C or S
VPTELNAISMLYFDENEKVVLKKYRDMVVEGXGX

SEQ ID NO: 6957 - protein, 37 aa, Artificial Sequence
  Non-cyclic GFR-binding peptide
  MOD_RES (5)..(6): Xaa is C or S
IPKAXXVPTELSATSMLYYDEYDKVVLRKHREMVVEG

SEQ ID NO: 6958 - protein, 36 aa, Artificial Sequence
  Non-cyclic GFR-binding peptide
  MOD_RES (2)..(3)..(35): Xaa is C or S
AXXVPTELNAISMLYFDEYDKVVLKKYREMVVEGXG

SEQ ID NO: 6959 - protein, 35 aa, Artificial Sequence
  Non-cyclic GFR-binding peptide
  MOD_RES (1)..(1): Xaa is C or S
  MOD_RES (17)..(18)..(19)..(20)..(21): Xaa is A or G
  MOD_RES (22)..(23)..(24)..(25): Xaa is A or G or absent
XRPTQVQLSAISVLYLXXXXXXXXXLKNYQTLEDH

SEQ ID NO: 6960 - protein, 37 aa, Artificial Sequence
  Non-cyclic GFR-binding peptide
  MOD_RES (2)..(3)..(34)..(36): Xaa is C or S
PXXVPQALSAISILYLVGRKPKVLKNYQMIVRSXKXS

SEQ ID NO: 6961 - protein, 36 aa, Artificial Sequence
  Non-cyclic GFR-binding peptide
  MOD_RES (5)..(6): Xaa is C or S
VPKPXXAPTQLSPISVLYKDDSSNVILKYHYNMVVR

SEQ ID NO: 6962 - protein, 34 aa, Artificial Sequence
  Non-cyclic GFR-binding peptide
  MOD_RES (1)..(2)..(34): Xaa is C or S
XXAPTKLSPISVLYKDDSSNVILKYHYNMVVRSX

SEQ ID NO: 6963 - protein, 32 aa, Artificial Sequence
  Non-cyclic GFR-binding peptide
  MOD_RES (32)..(32): Xaa is C or S
VPTELSPISMLYKDENEKVVLKYHYDMVVEGX

SEQ ID NO: 6964 - protein, 39 aa, Artificial Sequence
  Non-cyclic GFR-binding peptide
  MOD_RES (3)..(4)..(37)..(39): Xaa is C or S
  MOD_RES (18)..(19)..(20)..(21)..(22): Xaa is A or G
  MOD_RES (23)..(24)..(25)..(26): Xaa is A or G or absent
APXXVPQALSPISILYKXXXXXXXXXLKYHYMIVRSXKX

SEQ ID NO: 6965 - protein, 37 aa, Artificial Sequence
  Non-cyclic GFR-binding peptide
  MOD_RES (1)..(35)..(37): Xaa is C or S
  MOD_RES (15)..(16)..(17)..(18)..(19): Xaa is A or G
  MOD_RES (20)..(21)..(22)..(23): Xaa is A or G or absent
XVPTELNAISMLYFXXXXXXXXXLKKYRDMVVEGXGX

SEQ ID NO: 6966 - protein, 37 aa, Artificial Sequence
  Non-cyclic GFR-binding peptide
  MOD_RES (2)..(3)..(36): Xaa is C or S
  MOD_RES (17)..(18)..(19)..(20)..(21): Xaa is A or G
  MOD_RES (22)..(23)..(24)..(25): Xaa is A or G or absent
PXXVPQALSATSILYYXXXXXXXXXLRKHRMIVRSXK

SEQ ID NO: 6967 - protein, 35 aa, Artificial Sequence
  Non-cyclic GFR-binding peptide
  MOD_RES (4)..(5): Xaa is C or S
AAPXXVPQALNAISILYFVGRKPKVLKKYRMIVRS

SEQ ID NO: 6968 - protein, 41 aa, Artificial Sequence
  Non-cyclic GFR-binding peptide
  MOD_RES (6)..(7)..(40): Xaa is C or S
  MOD_RES (21)..(22)..(23)..(24)..(25): Xaa is A or G
  MOD_RES (26)..(27)..(28)..(29): Xaa is A or G or absent
ASASPXXVPQDLNAISILYFXXXXXXXXXLKKYRMVVKSXK

SEQ ID NO: 6969 - protein, 41 aa, Artificial Sequence
  Non-cyclic GFR-binding peptide
  MOD_RES (6)..(7)..(40): Xaa is C or S
  MOD_RES (21)..(22)..(23)..(24)..(25): Xaa is A or G
  MOD_RES (26)..(27)..(28)..(29): Xaa is A or G or absent
ASASPXXVPQDLSPISILYKXXXXXXXXXLKYHYMVVKSXK

SEQ ID NO: 6970 - protein, 33 aa, Artificial Sequence
  Non-cyclic GFR-binding peptide
  MOD_RES (2)..(3): Xaa is C or S
AXXAPTKLSPISVLYKDSSNNVILKYHYNMVVK

SEQ ID NO: 6971 - protein, 40 aa, Artificial Sequence
  Non-cyclic GFR-binding peptide
  MOD_RES (5)..(6)..(39): Xaa is C or S
VGKAXXVPTKLNAISVLYFDDMGVPTLKKYREGMSVAEXG

SEQ ID NO: 6972 - protein, 40 aa, Artificial Sequence
  Non-cyclic GFR-binding peptide
  MOD_RES (5)..(5): Xaa is C or S
  MOD_RES (21)..(22)..(23)..(24)..(25): Xaa is A or G
  MOD_RES (26)..(27)..(28)..(29): Xaa is A or G or absent
RNVQXRPTQVQLNAISVLYFXXXXXXXXXLKKYRTLEDHL

SEQ ID NO: 6973 - protein, 35 aa, Artificial Sequence
  Non-cyclic GFR-binding peptide
  MOD_RES (1)..(2)..(35): Xaa is C or S
XXVPTKLSATSVLYYDDMGVPTLRKHREGMSVAEX

SEQ ID NO: 6974 - protein, 37 aa, Artificial Sequence
  Non-cyclic GFR-binding peptide
  MOD_RES (4)..(5): Xaa is C or S
  MOD_RES (19)..(20)..(21)..(22)..(23): Xaa is A or G
  MOD_RES (24)..(25)..(26)..(27): Xaa is A or G or absent
AAPXXVPQALSATSILYYXXXXXXXXXLRKHRMIVRS

SEQ ID NO: 6975 - protein, 39 aa, Artificial Sequence
  Non-cyclic GFR-binding peptide
  MOD_RES (6)..(7): Xaa is C or S
  MOD_RES (21)..(22)..(23)..(24)..(25): Xaa is A or G
  MOD_RES (26)..(27)..(28)..(29): Xaa is A or G or absent
ASASPXXVSQDLNAISILYFXXXXXXXXXLKKYRMIVKS

SEQ ID NO: 6976 - protein, 34 aa, Artificial Sequence
  Non-cyclic GFR-binding peptide
  MOD_RES (1)..(2)..(33): Xaa is C or S
XXVPQALSPISILYKVGRKPKVLKYHYMIVRSXK

SEQ ID NO: 6977 - protein, 41 aa, Artificial Sequence
  Non-cyclic GFR-binding peptide
  MOD_RES (5)..(6)..(41): Xaa is C or S
  MOD_RES (20)..(21)..(22)..(23)..(24): Xaa is A or G
  MOD_RES (25)..(26)..(27)..(28): Xaa is A or G or absent
VGKAXXVPTKLSATSVLYYXXXXXXXXXLRKHREGMSVAEX

SEQ ID NO: 6978 - protein, 37 aa, Artificial Sequence
  Non-cyclic GFR-binding peptide
  MOD_RES (2)..(34)..(36): Xaa is C or S
TXAPTKLSAISVLYLDDSSNVILKNYQNMVVRSXGXH

SEQ ID NO: 6979 - protein, 36 aa, Artificial Sequence
  Non-cyclic GFR-binding peptide
  MOD_RES (5)..(6): Xaa is C or S
VPKPXXAPTKLSATSVLYYDDSSNVILRKHRNMVVR

SEQ ID NO: 6980 - protein, 40 aa, Artificial Sequence
  Non-cyclic GFR-binding peptide
  MOD_RES (2)..(3)..(37)..(39): Xaa is C or S
  MOD_RES (17)..(18)..(19)..(20)..(21): Xaa is A or G
  MOD_RES (22)..(23)..(24)..(25): Xaa is A or G or absent
AXXAPTKLSPISVLYKXXXXXXXXXLKYHYNMVVKAXGXH

SEQ ID NO: 6981 - protein, 42 aa, Artificial Sequence
  Non-cyclic GFR-binding peptide
  MOD_RES (5)..(39)..(41): Xaa is C or S
  MOD_RES (19)..(20)..(21)..(22)..(23): Xaa is A or G
  MOD_RES (24)..(25)..(26)..(27): Xaa is A or G or absent
TKPTXAPTKLSPISVLYKXXXXXXXXXLKYHYNMVVRSXGXH

SEQ ID NO: 6982 - protein, 35 aa, Artificial Sequence
  Non-cyclic GFR-binding peptide
  MOD_RES (2)..(3)..(35): Xaa is C or S
AXXVPTELNAISMLYFDENEKVVLKKYRDMVVEGX

SEQ ID NO: 6983 - protein, 35 aa, Artificial Sequence
  Non-cyclic GFR-binding peptide
  MOD_RES (2)..(3): Xaa is C or S
  MOD_RES (17)..(18)..(19)..(20)..(21): Xaa is A or G
  MOD_RES (22)..(23)..(24)..(25): Xaa is A or G or absent
AXXVPTELNAISMLYFXXXXXXXXXLKKYRDMVVE

SEQ ID NO: 6984 - protein, 35 aa, Artificial Sequence
  Non-cyclic GFR-binding peptide
  MOD_RES (2)..(3)..(35): Xaa is C or S
AXXVPTELSPISMLYKDENEKVVLKYHYDMVVEGX

SEQ ID NO: 6985 - protein, 35 aa, Artificial Sequence
  Non-cyclic GFR-binding peptide
  MOD_RES (1)..(2)..(33)..(35): Xaa is C or S
XXVSQDLNAISILYFIGKTPKILKKYRMIVKSXKX

SEQ ID NO: 6986 - protein, 34 aa, Artificial Sequence
  Non-cyclic GFR-binding peptide
  MOD_RES (34)..(34): Xaa is C or S
  MOD_RES (14)..(15)..(16)..(17)..(18): Xaa is A or G
  MOD_RES (19)..(20)..(21)..(22): Xaa is A or G or absent
APTKLSPISVLYKXXXXXXXXXLKYHYNMVVRSX

SEQ ID NO: 6987 - protein, 44 aa, Artificial Sequence
  Non-cyclic GFR-binding peptide
  MOD_RES (7)..(41)..(43): Xaa is C or S
  MOD_RES (21)..(22)..(23)..(24)..(25): Xaa is A or G
  MOD_RES (26)..(27)..(28)..(29): Xaa is A or G or absent
HVTKPTXAPTKLSATSVLYYXXXXXXXXXLRKHRNMVVRSXGXH

SEQ ID NO: 6988 - protein, 32 aa, Artificial Sequence
  Non-cyclic GFR-binding peptide
  MOD_RES (1)..(2): Xaa is C or S
XXVPTELSATSMLYYDEYDKVVLRKHREMVVE

SEQ ID NO: 6989 - protein, 39 aa, Artificial Sequence
  Non-cyclic GFR-binding peptide
  MOD_RES (1)..(38): Xaa is C or S
  MOD_RES (17)..(18)..(19)..(20)..(21): Xaa is A or G
  MOD_RES (22)..(23)..(24)..(25): Xaa is A or G or absent
XRPTQVQLNAISVLYFXXXXXXXXXLKKYRTLEDHLAXK

SEQ ID NO: 6990 - protein, 34 aa, Artificial Sequence
  Non-cyclic GFR-binding peptide
  MOD_RES (1)..(2): Xaa is C or S
  MOD_RES (16)..(17)..(18)..(19)..(20): Xaa is A or G
  MOD_RES (21)..(22)..(23)..(24): Xaa is A or G or absent
XXVPTELSATSMLYYXXXXXXXXXLRKHRDMVVE

SEQ ID NO: 6991 - protein, 43 aa, Artificial Sequence
  Non-cyclic GFR-binding peptide
  MOD_RES (4)..(41)..(43): Xaa is C or S
NVQXRPTQVQLNAISVLYFEIVRKKPIFLKKYRTLEDHLAXKX

SEQ ID NO: 6992 - protein, 33 aa, Artificial Sequence
  Non-cyclic GFR-binding peptide
  MOD_RES (1)..(2)..(33): Xaa is C or S
XXVPQALSPISILYKVGRKPKVLKYHYMIVRSX

SEQ ID NO: 6993 - protein, 38 aa, Artificial Sequence
  Non-cyclic GFR-binding peptide
  MOD_RES (6)..(38): Xaa is C or S
VTKPTXAPTKLSAISVLYLDDSSNVILKNYQNMVVRSX

SEQ ID NO: 6994 - protein, 38 aa, Artificial Sequence
  Non-cyclic GFR-binding peptide
  MOD_RES (1)..(2)..(35)..(37): Xaa is C or S
  MOD_RES (16)..(17)..(18)..(19)..(20): Xaa is A or G
  MOD_RES (21)..(22)..(23)..(24): Xaa is A or G or absent
XXVSQDLSAISILYLXXXXXXXXXLKNYQMIVKSXKXS

SEQ ID NO: 6995 - protein, 35 aa, Artificial Sequence
  Non-cyclic GFR-binding peptide
  MOD_RES (1)..(2)..(33)..(35): Xaa is C or S
XXVPQALNAISILYFVGRKPKVLKKYRMIVRSXKX

SEQ ID NO: 6996 - protein, 40 aa, Artificial Sequence
  Non-cyclic GFR-binding peptide
  MOD_RES (5)..(6)..(40): Xaa is C or S
  MOD_RES (20)..(21)..(22)..(23)..(24): Xaa is A or G
  MOD_RES (25)..(26)..(27)..(28): Xaa is A or G or absent
VPKPXXAPTKLSATSVLYYXXXXXXXXXLRKHRNMVVRSX

SEQ ID NO: 6997 - protein, 44 aa, Artificial Sequence
  Non-cyclic GFR-binding peptide
  MOD_RES (5)..(42)..(44): Xaa is C or S
RNVQXRPTQVQLSAISVLYLEIVRKKPIFLKNYQTLEDHLAXKX

SEQ ID NO: 6998 - protein, 40 aa, Artificial Sequence
  Non-cyclic GFR-binding peptide
  MOD_RES (4)..(5)..(38)..(40): Xaa is C or S
  MOD_RES (19)..(20)..(21)..(22)..(23): Xaa is A or G
  MOD_RES (24)..(25)..(26)..(27): Xaa is A or G or absent
ASPXXVPQDLSATSILYYXXXXXXXXXLRKHRMVVKSXKX

SEQ ID NO: 6999 - protein, 41 aa, Artificial Sequence
  Non-cyclic GFR-binding peptide
  MOD_RES (7)..(39)..(41): Xaa is C or S
HVTKPTXAPTKLSAISVLYLDDSSNVILKNYQNMVVRSXGX

SEQ ID NO: 7000 - protein, 39 aa, Artificial Sequence
  Non-cyclic GFR-binding peptide
  MOD_RES (3)..(4)..(38): Xaa is C or S
  MOD_RES (18)..(19)..(20)..(21)..(22): Xaa is A or G
  MOD_RES (23)..(24)..(25)..(26): Xaa is A or G or absent
KAXXVPTELNAISMLYFXXXXXXXXXLKKYREMVVEGXG

SEQ ID NO: 7001 - protein, 34 aa, Artificial Sequence
  Non-cyclic GFR-binding peptide
  MOD_RES (32)..(34): Xaa is C or S
VPTELNAISMLYFDEYDKVVLKKYREMVVEGXGX

SEQ ID NO: 7002 - protein, 36 aa, Artificial Sequence
  Non-cyclic GFR-binding peptide
  MOD_RES (2)..(3): Xaa is C or S
  MOD_RES (17)..(18)..(19)..(20)..(21): Xaa is A or G
  MOD_RES (22)..(23)..(24)..(25): Xaa is A or G or absent
PXXAPTQLSATSVLYYXXXXXXXXXLRKHRNMVVRA

SEQ ID NO: 7003 - protein, 34 aa, Artificial Sequence
  Non-cyclic GFR-binding peptide
  MOD_RES (3)..(4): Xaa is C or S
SPXXVSQDLSATSILYYIGKTPKILRKHRMIVKS

SEQ ID NO: 7004 - protein, 38 aa, Artificial Sequence
  Non-cyclic GFR-binding peptide
  MOD_RES (37)..(37): Xaa is C or S
RPTQVQLSAISVLYLEIVRKKPIFLKNYQTLEDHLAXK

SEQ ID NO: 7005 - protein, 39 aa, Artificial Sequence
  Non-cyclic GFR-binding peptide
  MOD_RES (3)..(4)..(36)..(38): Xaa is C or S
KAXXVPTELNAISMLYFDENEKVVLKKYRDMVVEGXGXR

SEQ ID NO: 7006 - protein, 43 aa, Artificial Sequence
  Non-cyclic GFR-binding peptide
  MOD_RES (6)..(7)..(40)..(42): Xaa is C or S
  MOD_RES (21)..(22)..(23)..(24)..(25): Xaa is A or G
  MOD_RES (26)..(27)..(28)..(29): Xaa is A or G or absent
ASAAPXXVPQALSAISILYLXXXXXXXXXLKNYQMIVRSXKXS

SEQ ID NO: 7007 - protein, 37 aa, Artificial Sequence
  Non-cyclic GFR-binding peptide
  MOD_RES (34)..(36): Xaa is C or S
  MOD_RES (14)..(15)..(16)..(17)..(18): Xaa is A or G
  MOD_RES (19)..(20)..(21)..(22): Xaa is A or G or absent
APTKLSPISVLYKXXXXXXXXXLKYHYNMVVKAXGXH

SEQ ID NO: 7008 - protein, 41 aa, Artificial Sequence
  Non-cyclic GFR-binding peptide
  MOD_RES (6)..(7)..(39)..(41): Xaa is C or S
SIPKAXXVPTELSPISMLYKDEYDKVVLKYHYEMVVEGXGX

SEQ ID NO: 7009 - protein, 38 aa, Artificial Sequence
  Non-cyclic GFR-binding peptide
  MOD_RES (5)..(6): Xaa is C or S
  MOD_RES (20)..(21)..(22)..(23)..(24): Xaa is A or G
  MOD_RES (25)..(26)..(27)..(28): Xaa is A or G or absent
SASPXXVPQDLSAISILYLXXXXXXXXXLKNYQMVVKS

SEQ ID NO: 7010 - protein, 37 aa, Artificial Sequence
  Non-cyclic GFR-binding peptide
  MOD_RES (1)..(1): Xaa is C or S
XRPTQVQLNAISVLYFEIVRKKPIFLKKYRTLEDHLA

SEQ ID NO: 7011 - protein, 36 aa, Artificial Sequence
  Non-cyclic GFR-binding peptide
  MOD_RES (34)..(36): Xaa is C or S
  MOD_RES (14)..(15)..(16)..(17)..(18): Xaa is A or G
  MOD_RES (19)..(20)..(21)..(22): Xaa is A or G or absent
VPTELSATSMLYYXXXXXXXXXLRKHRDMVVEGXGX

SEQ ID NO: 7012 - protein, 37 aa, Artificial Sequence
  Non-cyclic GFR-binding peptide
  MOD_RES (3)..(4)..(36): Xaa is C or S
KPXXAPTKLSPISVLYKDDSSNVILKYHYNMVVRSXG

SEQ ID NO: 7013 - protein, 39 aa, Artificial Sequence
  Non-cyclic GFR-binding peptide
  MOD_RES (4)..(4): Xaa is C or S
NVQXRPTQVQLSAISVLYLEIVRKKPIFLKNYQTLEDHL

SEQ ID NO: 7014 - protein, 34 aa, Artificial Sequence
  Non-cyclic GFR-binding peptide
  MOD_RES (1)..(34): Xaa is C or S
  MOD_RES (15)..(16)..(17)..(18)..(19): Xaa is A or G
  MOD_RES (20)..(21)..(22)..(23): Xaa is A or G or absent
XVSQDLSATSILYYXXXXXXXXXLRKHRMIVKSX

SEQ ID NO: 7015 - protein, 35 aa, Artificial Sequence
  Non-cyclic GFR-binding peptide
  MOD_RES (1)..(35): Xaa is C or S
  MOD_RES (15)..(16)..(17)..(18)..(19): Xaa is A or G
  MOD_RES (20)..(21)..(22)..(23): Xaa is A or G or absent
XAPTKLSPISVLYKXXXXXXXXXLKYHYNMVVRSX

SEQ ID NO: 7016 - protein, 34 aa, Artificial Sequence
  Non-cyclic GFR-binding peptide
  MOD_RES (1)..(34): Xaa is C or S
  MOD_RES (15)..(16)..(17)..(18)..(19): Xaa is A or G
  MOD_RES (20)..(21)..(22)..(23): Xaa is A or G or absent
XVSQDLSAISILYLXXXXXXXXXLKNYQMIVKSX

SEQ ID NO: 7017 - protein, 39 aa, Artificial Sequence
  Non-cyclic GFR-binding peptide
  MOD_RES (2)..(3)..(37)..(39): Xaa is C or S
  MOD_RES (17)..(18)..(19)..(20)..(21): Xaa is A or G
  MOD_RES (22)..(23)..(24)..(25): Xaa is A or G or absent
AXXAPTKLSPISVLYKXXXXXXXXXLKYHYNMVVKAXGX

SEQ ID NO: 7018 - protein, 41 aa, Artificial Sequence
  Non-cyclic GFR-binding peptide
  MOD_RES (4)..(5)..(38)..(40): Xaa is C or S
  MOD_RES (19)..(20)..(21)..(22)..(23): Xaa is A or G
  MOD_RES (24)..(25)..(26)..(27): Xaa is A or G or absent
AAPXXVPQALSATSILYYXXXXXXXXXLRKHRMIVRSXKXS

SEQ ID NO: 7019 - protein, 39 aa, Artificial Sequence
  Non-cyclic GFR-binding peptide
  MOD_RES (6)..(7): Xaa is C or S
  MOD_RES (21)..(22)..(23)..(24)..(25): Xaa is A or G
  MOD_RES (26)..(27)..(28)..(29): Xaa is A or G or absent
ASASPXXVPQDLSAISILYLXXXXXXXXXLKNYQMVVKS

SEQ ID NO: 7020 - protein, 36 aa, Artificial Sequence
  Non-cyclic GFR-binding peptide
  MOD_RES (16)..(17)..(18)..(19)..(20): Xaa is A or G
  MOD_RES (21)..(22)..(23)..(24): Xaa is A or G or absent
RPTQVQLSATSVLYYXXXXXXXXXLRKHRTLEDHLA

SEQ ID NO: 7021 - protein, 37 aa, Artificial Sequence
  Non-cyclic GFR-binding peptide
  MOD_RES (1)..(34)..(36): Xaa is C or S
  MOD_RES (15)..(16)..(17)..(18)..(19): Xaa is A or G
  MOD_RES (20)..(21)..(22)..(23): Xaa is A or G or absent
XVSQDLSATSILYYXXXXXXXXXLRKHRMIVKSXKXS

SEQ ID NO: 7022 - protein, 34 aa, Artificial Sequence
  Non-cyclic GFR-binding peptide
  MOD_RES (3)..(4): Xaa is C or S
SPXXVSQDLNAISILYFIGKTPKILKKYRMIVKS

SEQ ID NO: 7023 - protein, 42 aa, Artificial Sequence
  Non-cyclic GFR-binding peptide
  MOD_RES (3)..(40)..(42): Xaa is C or S
VQXRPTQVQLSPISVLYKEIVRKKPIFLKYHYTLEDHLAXKX

SEQ ID NO: 7024 - protein, 36 aa, Artificial Sequence
  Non-cyclic GFR-binding peptide
  MOD_RES (2)..(3)..(34)..(36): Xaa is C or S
PXXVPQALNAISILYFVGRKPKVLKKYRMIVRSXKX

SEQ ID NO: 7025 - protein, 34 aa, Artificial Sequence
  Non-cyclic GFR-binding peptide
  MOD_RES (32)..(34): Xaa is C or S
APTKLSAISVLYLDSSNNVILKNYQNMVVKAXGX

SEQ ID NO: 7026 - protein, 36 aa, Artificial Sequence
  Non-cyclic GFR-binding peptide
  MOD_RES (16)..(17)..(18)..(19)..(20): Xaa is A or G
  MOD_RES (21)..(22)..(23)..(24): Xaa is A or G or absent
RPTQVQLSAISVLYLXXXXXXXXXLKNYQTLEDHLA

SEQ ID NO: 7027 - protein, 41 aa, Artificial Sequence
  Non-cyclic GFR-binding peptide
  MOD_RES (4)..(5)..(39)..(41): Xaa is C or S
  MOD_RES (19)..(20)..(21)..(22)..(23): Xaa is A or G
  MOD_RES (24)..(25)..(26)..(27): Xaa is A or G or absent
PKAXXVPTELNAISMLYFXXXXXXXXXLKKYRDMVVEGXGX

SEQ ID NO: 7028 - protein, 39 aa, Artificial Sequence
  Non-cyclic GFR-binding peptide
  MOD_RES (4)..(5)..(38): Xaa is C or S
  MOD_RES (19)..(20)..(21)..(22)..(23): Xaa is A or G
  MOD_RES (24)..(25)..(26)..(27): Xaa is A or G or absent
ASPXXVPQDLNAISILYFXXXXXXXXXLKKYRMVVKSXK

SEQ ID NO: 7029 - protein, 38 aa, Artificial Sequence
  Non-cyclic GFR-binding peptide
  MOD_RES (4)..(38): Xaa is C or S
  MOD_RES (18)..(19)..(20)..(21)..(22): Xaa is A or G
  MOD_RES (23)..(24)..(25)..(26): Xaa is A or G or absent
KPTXAPTKLSAISVLYLXXXXXXXXXLKNYQNMVVRSX

SEQ ID NO: 7030 - protein, 38 aa, Artificial Sequence
  Non-cyclic GFR-binding peptide
  MOD_RES (5)..(6): Xaa is C or S
  MOD_RES (20)..(21)..(22)..(23)..(24): Xaa is A or G
  MOD_RES (25)..(26)..(27)..(28): Xaa is A or G or absent
SASPXXVPQDLSPISILYKXXXXXXXXXLKYHYMVVKS

SEQ ID NO: 7031 - protein, 36 aa, Artificial Sequence
  Non-cyclic GFR-binding peptide
  MOD_RES (2)..(3)..(36): Xaa is C or S
  MOD_RES (17)..(18)..(19)..(20)..(21): Xaa is A or G
  MOD_RES (22)..(23)..(24)..(25): Xaa is A or G or absent
PXXVPQALNAISILYFXXXXXXXXXLKKYRMIVRSX

SEQ ID NO: 7032 - protein, 32 aa, Artificial Sequence
  Non-cyclic GFR-binding peptide
  MOD_RES (1)..(1): Xaa is C or S
XVPTELSPISMLYKDENEKVVLKYHYDMVVEG

SEQ ID NO: 7033 - protein, 40 aa, Artificial Sequence
  Non-cyclic GFR-binding peptide
  MOD_RES (3)..(4)..(38)..(40): Xaa is C or S
  MOD_RES (18)..(19)..(20)..(21)..(22): Xaa is A or G
  MOD_RES (23)..(24)..(25)..(26): Xaa is A or G or absent
KPXXAPTKLSATSVLYYXXXXXXXXXLRKHRNMVVRSXGX

SEQ ID NO: 7034 - protein, 33 aa, Artificial Sequence
  Non-cyclic GFR-binding peptide
  MOD_RES (2)..(3): Xaa is C or S
AXXAPTKLSAISVLYLDSSNNVILKNYQNMVVK

SEQ ID NO: 7035 - protein, 39 aa, Artificial Sequence
  Non-cyclic GFR-binding peptide
  MOD_RES (5)..(39): Xaa is C or S
  MOD_RES (19)..(20)..(21)..(22)..(23): Xaa is A or G
  MOD_RES (24)..(25)..(26)..(27): Xaa is A or G or absent
TKPTXAPTKLSAISVLYLXXXXXXXXXLKNYQNMVVRSX

SEQ ID NO: 7036 - protein, 38 aa, Artificial Sequence
  Non-cyclic GFR-binding peptide
  MOD_RES (3)..(4)..(35)..(37): Xaa is C or S
SPXXVPQDLSPISILYKVGRTPKVLKYHYMVVKSXKXS

SEQ ID NO: 7037 - protein, 36 aa, Artificial Sequence
  Non-cyclic GFR-binding peptide
  MOD_RES (36)..(36): Xaa is C or S
PTQVQLNAISVLYFEIVRKKPIFLKKYRTLEDHLAX

SEQ ID NO: 7038 - protein, 39 aa, Artificial Sequence
  Non-cyclic GFR-binding peptide
  MOD_RES (2)..(3)..(36)..(38): Xaa is C or S
AXXVPTKLSATSVLYYDDMGVPTLRKHREGMSVAEXGXR

SEQ ID NO: 7039 - protein, 32 aa, Artificial Sequence
  Non-cyclic GFR-binding peptide
  MOD_RES (1)..(1): Xaa is C or S
XAPTKLSPISVLYKDDSSNVILKYHYNMVVRS

SEQ ID NO: 7040 - protein, 35 aa, Artificial Sequence
  Non-cyclic GFR-binding peptide
  MOD_RES (2)..(2): Xaa is C or S
  MOD_RES (16)..(17)..(18)..(19)..(20): Xaa is A or G
  MOD_RES (21)..(22)..(23)..(24): Xaa is A or G or absent
TXAPTKLSATSVLYYXXXXXXXXXLRKHRNMVVRS

SEQ ID NO: 7041 - protein, 36 aa, Artificial Sequence
  Non-cyclic GFR-binding peptide
  MOD_RES (2)..(3): Xaa is C or S
  MOD_RES (17)..(18)..(19)..(20)..(21): Xaa is A or G
  MOD_RES (22)..(23)..(24)..(25): Xaa is A or G or absent
AXXVPTELSATSMLYYXXXXXXXXXLRKHRDMVVEG

SEQ ID NO: 7042 - protein, 38 aa, Artificial Sequence
  Non-cyclic GFR-binding peptide
  MOD_RES (4)..(5)..(36)..(38): Xaa is C or S
ASPXXVSQDLSPISILYKIGKTPKILKYHYMIVKSXKX

SEQ ID NO: 7043 - protein, 41 aa, Artificial Sequence
  Non-cyclic GFR-binding peptide
  MOD_RES (6)..(7)..(38)..(40): Xaa is C or S
ASAAPXXVPQALSATSILYYVGRKPKVLRKHRMIVRSXKXS

SEQ ID NO: 7044 - protein, 37 aa, Artificial Sequence
  Non-cyclic GFR-binding peptide
  MOD_RES (34)..(36): Xaa is C or S
  MOD_RES (14)..(15)..(16)..(17)..(18): Xaa is A or G
  MOD_RES (19)..(20)..(21)..(22): Xaa is A or G or absent
VPTELSATSMLYYXXXXXXXXXLRKHRDMVVEGXGXR

SEQ ID NO: 7045 - protein, 39 aa, Artificial Sequence
  Non-cyclic GFR-binding peptide
  MOD_RES (4)..(5)..(37)..(39): Xaa is C or S
PKPXXAPTKLSAISVLYLDDSSNVILKNYQNMVVRSXGX

SEQ ID NO: 7046 - protein, 37 aa, Artificial Sequence
  Non-cyclic GFR-binding peptide
  MOD_RES (4)..(5): Xaa is C or S
  MOD_RES (19)..(20)..(21)..(22)..(23): Xaa is A or G
  MOD_RES (24)..(25)..(26)..(27): Xaa is A or G or absent
PKAXXVPTELSATSMLYYXXXXXXXXXLRKHREMVVE

SEQ ID NO: 7047 - protein, 37 aa, Artificial Sequence
  Non-cyclic GFR-binding peptide
  MOD_RES (3)..(4)..(35)..(37): Xaa is C or S
SPXXVSQDLSPISILYKIGKTPKILKYHYMIVKSXKX

SEQ ID NO: 7048 - protein, 36 aa, Artificial Sequence
  Non-cyclic GFR-binding peptide
  MOD_RES (4)..(5)..(36): Xaa is C or S
AAPXXVPQALNAISILYFVGRKPKVLKKYRMIVRSX

SEQ ID NO: 7049 - protein, 42 aa, Artificial Sequence
  Non-cyclic GFR-binding peptide
  MOD_RES (6)..(7)..(40)..(42): Xaa is C or S
KVGKAXXVPTKLSATSVLYYDDMGVPTLRKHREGMSVAEXGX

SEQ ID NO: 7050 - protein, 36 aa, Artificial Sequence
  Non-cyclic GFR-binding peptide
  MOD_RES (1)..(2)..(36): Xaa is C or S
  MOD_RES (16)..(17)..(18)..(19)..(20): Xaa is A or G
  MOD_RES (21)..(22)..(23)..(24): Xaa is A or G or absent
XXAPTQLSATSVLYYXXXXXXXXXLRKHRNMVVRAX

SEQ ID NO: 7051 - protein, 41 aa, Artificial Sequence
  Non-cyclic GFR-binding peptide
  MOD_RES (2)..(3)..(38)..(40): Xaa is C or S
  MOD_RES (17)..(18)..(19)..(20)..(21): Xaa is A or G
  MOD_RES (22)..(23)..(24)..(25): Xaa is A or G or absent
AXXVPTKLNAISVLYFXXXXXXXXXLKKYREGMSVAEXGXR

SEQ ID NO: 7052 - protein, 36 aa, Artificial Sequence
  Non-cyclic GFR-binding peptide
  MOD_RES (2)..(3)..(35): Xaa is C or S
AXXAPTKLNAISVLYFDSSNNVILKKYRNMVVKAXG

SEQ ID NO: 7053 - protein, 38 aa, Artificial Sequence
  Non-cyclic GFR-binding peptide
  MOD_RES (5)..(6)..(37): Xaa is C or S
SAAPXXVPQALSPISILYKVGRKPKVLKYHYMIVRSXK

SEQ ID NO: 7054 - protein, 34 aa, Artificial Sequence
  Non-cyclic GFR-binding peptide
  MOD_RES (33)..(33): Xaa is C or S
  MOD_RES (14)..(15)..(16)..(17)..(18): Xaa is A or G
  MOD_RES (19)..(20)..(21)..(22): Xaa is A or G or absent
VSQDLSAISILYLXXXXXXXXXLKNYQMIVKSXK

SEQ ID NO: 7055 - protein, 38 aa, Artificial Sequence
  Non-cyclic GFR-binding peptide
  MOD_RES (3)..(4)..(36)..(38): Xaa is C or S
KPXXAPTKLSAISVLYLDDSSNVILKNYQNMVVRSXGX

SEQ ID NO: 7056 - protein, 39 aa, Artificial Sequence
  Non-cyclic GFR-binding peptide
  MOD_RES (6)..(7): Xaa is C or S
  MOD_RES (21)..(22)..(23)..(24)..(25): Xaa is A or G
  MOD_RES (26)..(27)..(28)..(29): Xaa is A or G or absent
ASASPXXVPQDLSATSILYYXXXXXXXXXLRKHRMVVKS

SEQ ID NO: 7057 - protein, 37 aa, Artificial Sequence
  Non-cyclic GFR-binding peptide
  MOD_RES (5)..(6)..(37): Xaa is C or S
SASPXXVPQDLSAISILYLVGRTPKVLKNYQMVVKSX

SEQ ID NO: 7058 - protein, 42 aa, Artificial Sequence
  Non-cyclic GFR-binding peptide
  MOD_RES (5)..(6)..(39)..(41): Xaa is C or S
  MOD_RES (20)..(21)..(22)..(23)..(24): Xaa is A or G
  MOD_RES (25)..(26)..(27)..(28): Xaa is A or G or absent
SASPXXVSQDLSATSILYYXXXXXXXXXLRKHRMIVKSXKXS

SEQ ID NO: 7059 - protein, 38 aa, Artificial Sequence
  Non-cyclic GFR-binding peptide
  MOD_RES (1)..(38): Xaa is C or S
XRPTQVQLSPISVLYKEIVRKKPIFLKYHYTLEDHLAX

SEQ ID NO: 7060 - protein, 34 aa, Artificial Sequence
  Non-cyclic GFR-binding peptide
  MOD_RES (2)..(2): Xaa is C or S
  MOD_RES (16)..(17)..(18)..(19)..(20): Xaa is A or G
  MOD_RES (21)..(22)..(23)..(24): Xaa is A or G or absent
TXAPTKLSAISVLYLXXXXXXXXXLKNYQNMVVR

SEQ ID NO: 7061 - protein, 37 aa, Artificial Sequence
  Non-cyclic GFR-binding peptide
  MOD_RES (3)..(4)..(35)..(37): Xaa is C or S
SPXXVSQDLSATSILYYIGKTPKILRKHRMIVKSXKX

SEQ ID NO: 7062 - protein, 36 aa, Artificial Sequence
  Non-cyclic GFR-binding peptide
  MOD_RES (1)..(2)..(36): Xaa is C or S
  MOD_RES (16)..(17)..(18)..(19)..(20): Xaa is A or G
  MOD_RES (21)..(22)..(23)..(24): Xaa is A or G or absent
XXVPTELSATSMLYYXXXXXXXXXLRKHREMVVEGX

SEQ ID NO: 7063 - protein, 40 aa, Artificial Sequence
  Non-cyclic GFR-binding peptide
  MOD_RES (4)..(4): Xaa is C or S
NVQXRPTQVQLSATSVLYYEIVRKKPIFLRKHRTLEDHLA

SEQ ID NO: 7064 - protein, 33 aa, Artificial Sequence
  Non-cyclic GFR-binding peptide
  MOD_RES (15)..(16)..(17)..(18)..(19): Xaa is A or G
  MOD_RES (20)..(21)..(22)..(23): Xaa is A or G or absent
PTQVQLSAISVLYLXXXXXXXXXLKNYQTLEDH

SEQ ID NO: 7065 - protein, 32 aa, Artificial Sequence
  Non-cyclic GFR-binding peptide
  MOD_RES (32)..(32): Xaa is C or S
APTKLSAISVLYLDSSNNVILKNYQNMVVKAX

SEQ ID NO: 7066 - protein, 34 aa, Artificial Sequence
  Non-cyclic GFR-binding peptide
  MOD_RES (1)..(33): Xaa is C or S
XVPTELSATSMLYYDEYDKVVLRKHREMVVEGXG

SEQ ID NO: 7067 - protein, 33 aa, Artificial Sequence
  Non-cyclic GFR-binding peptide
  MOD_RES (33)..(33): Xaa is C or S
  MOD_RES (14)..(15)..(16)..(17)..(18): Xaa is A or G
  MOD_RES (19)..(20)..(21)..(22): Xaa is A or G or absent
VPQALSPISILYKXXXXXXXXXLKYHYMIVRSX

SEQ ID NO: 7068 - protein, 35 aa, Artificial Sequence
  Non-cyclic GFR-binding peptide
  MOD_RES (2)..(3): Xaa is C or S
  MOD_RES (17)..(18)..(19)..(20)..(21): Xaa is A or G
  MOD_RES (22)..(23)..(24)..(25): Xaa is A or G or absent
PXXAPTQLSPISVLYKXXXXXXXXXLKYHYNMVVR

SEQ ID NO: 7069 - protein, 37 aa, Artificial Sequence
  Non-cyclic GFR-binding peptide
  MOD_RES (2)..(3)..(36): Xaa is C or S
  MOD_RES (17)..(18)..(19)..(20)..(21): Xaa is A or G
  MOD_RES (22)..(23)..(24)..(25): Xaa is A or G or absent
PXXVPQDLSPISILYKXXXXXXXXXLKYHYMVVKSXK

SEQ ID NO: 7070 - protein, 44 aa, Artificial Sequence
  Non-cyclic GFR-binding peptide
  MOD_RES (6)..(7)..(41)..(43): Xaa is C or S
  MOD_RES (21)..(22)..(23)..(24)..(25): Xaa is A or G
  MOD_RES (26)..(27)..(28)..(29): Xaa is A or G or absent
KIPKAXXVPTELSATSMLYYXXXXXXXXXLRKHRDMVVEGXGXR

SEQ ID NO: 7071 - protein, 39 aa, Artificial Sequence
  Non-cyclic GFR-binding peptide
  MOD_RES (5)..(6)..(39): Xaa is C or S
VGKAXXVPTKLSAISVLYLDDMGVPTLKNYQEGMSVAEX

SEQ ID NO: 7072 - protein, 43 aa, Artificial Sequence
  Non-cyclic GFR-binding peptide
  MOD_RES (6)..(7)..(41)..(43): Xaa is C or S
  MOD_RES (21)..(22)..(23)..(24)..(25): Xaa is A or G
  MOD_RES (26)..(27)..(28)..(29): Xaa is A or G or absent
YVPKPXXAPTKLSATSVLYYXXXXXXXXXLRKHRNMVVRSXGX

SEQ ID NO: 7073 - protein, 38 aa, Artificial Sequence
  Non-cyclic GFR-binding peptide
  MOD_RES (4)..(5)..(38): Xaa is C or S
  MOD_RES (19)..(20)..(21)..(22)..(23): Xaa is A or G
  MOD_RES (24)..(25)..(26)..(27): Xaa is A or G or absent
AAPXXVPQALSPISILYKXXXXXXXXXLKYHYMIVRSX

SEQ ID NO: 7074 - protein, 36 aa, Artificial Sequence
  Non-cyclic GFR-binding peptide
  MOD_RES (1)..(1): Xaa is C or S
XRPTQVQLSAISVLYLEIVRKKPIFLKNYQTLEDHL

SEQ ID NO: 7075 - protein, 33 aa, Artificial Sequence
  Non-cyclic GFR-binding peptide
  MOD_RES (1)..(2)..(33): Xaa is C or S
XXVPQALSATSILYYVGRKPKVLRKHRMIVRSX

SEQ ID NO: 7076 - protein, 37 aa, Artificial Sequence
  Non-cyclic GFR-binding peptide
  MOD_RES (1)..(2)..(35)..(37): Xaa is C or S
XXVPTKLSATSVLYYDDMGVPTLRKHREGMSVAEXGX

SEQ ID NO: 7077 - protein, 37 aa, Artificial Sequence
  Non-cyclic GFR-binding peptide
  MOD_RES (1)..(1): Xaa is C or S
  MOD_RES (17)..(18)..(19)..(20)..(21): Xaa is A or G
  MOD_RES (22)..(23)..(24)..(25): Xaa is A or G or absent
XRPTQVQLSPISVLYKXXXXXXXXXLKYHYTLEDHLA

SEQ ID NO: 7078 - protein, 40 aa, Artificial Sequence
  Non-cyclic GFR-binding peptide
  MOD_RES (5)..(6)..(40): Xaa is C or S
  MOD_RES (20)..(21)..(22)..(23)..(24): Xaa is A or G
  MOD_RES (25)..(26)..(27)..(28): Xaa is A or G or absent
VPKPXXAPTKLSAISVLYLXXXXXXXXXLKNYQNMVVRSX

SEQ ID NO: 7079 - protein, 40 aa, Artificial Sequence
  Non-cyclic GFR-binding peptide
  MOD_RES (5)..(6)..(39): Xaa is C or S
  MOD_RES (20)..(21)..(22)..(23)..(24): Xaa is A or G
  MOD_RES (25)..(26)..(27)..(28): Xaa is A or G or absent
SASPXXVPQDLNAISILYFXXXXXXXXXLKKYRMVVKSXK

SEQ ID NO: 7080 - protein, 41 aa, Artificial Sequence
  Non-cyclic GFR-binding peptide
  MOD_RES (3)..(40): Xaa is C or S
VQXRPTQVQLNAISVLYFEIVRKKPIFLKKYRTLEDHLAXK

SEQ ID NO: 7081 - protein, 35 aa, Artificial Sequence
  Non-cyclic GFR-binding peptide
  MOD_RES (1)..(2): Xaa is C or S
  MOD_RES (16)..(17)..(18)..(19)..(20): Xaa is A or G
  MOD_RES (21)..(22)..(23)..(24): Xaa is A or G or absent
XXVPTELSATSMLYYXXXXXXXXXLRKHREMVVEG

SEQ ID NO: 7082 - protein, 36 aa, Artificial Sequence
  Non-cyclic GFR-binding peptide
  MOD_RES (1)..(35): Xaa is C or S
  MOD_RES (15)..(16)..(17)..(18)..(19): Xaa is A or G
  MOD_RES (20)..(21)..(22)..(23): Xaa is A or G or absent
XVPTELSATSMLYYXXXXXXXXXLRKHREMVVEGXG

SEQ ID NO: 7083 - protein, 39 aa, Artificial Sequence
  Non-cyclic GFR-binding peptide
  MOD_RES (6)..(7): Xaa is C or S
  MOD_RES (21)..(22)..(23)..(24)..(25): Xaa is A or G
  MOD_RES (26)..(27)..(28)..(29): Xaa is A or G or absent
AVPKAXXAPTKLNAISVLYFXXXXXXXXXLKKYRNMVVK

SEQ ID NO: 7084 - protein, 42 aa, Artificial Sequence
  Non-cyclic GFR-binding peptide
  MOD_RES (6)..(7)..(42): Xaa is C or S
  MOD_RES (21)..(22)..(23)..(24)..(25): Xaa is A or G
  MOD_RES (26)..(27)..(28)..(29): Xaa is A or G or absent
KVGKAXXVPTKLNAISVLYFXXXXXXXXXLKKYREGMSVAEX

SEQ ID NO: 7085 - protein, 40 aa, Artificial Sequence
  Non-cyclic GFR-binding peptide
  MOD_RES (6)..(7)..(40): Xaa is C or S
  MOD_RES (21)..(22)..(23)..(24)..(25): Xaa is A or G
  MOD_RES (26)..(27)..(28)..(29): Xaa is A or G or absent
ASAAPXXVPQALSATSILYYXXXXXXXXXLRKHRMIVRSX

SEQ ID NO: 7086 - protein, 35 aa, Artificial Sequence
  Non-cyclic GFR-binding peptide
  MOD_RES (33)..(35): Xaa is C or S
  MOD_RES (14)..(15)..(16)..(17)..(18): Xaa is A or G
  MOD_RES (19)..(20)..(21)..(22): Xaa is A or G or absent
VPQALSAISILYLXXXXXXXXXLKNYQMIVRSXKX

SEQ ID NO: 7087 - protein, 38 aa, Artificial Sequence
  Non-cyclic GFR-binding peptide
  MOD_RES (2)..(3)..(35)..(37): Xaa is C or S
AXXVPTELNAISMLYFDENEKVVLKKYRDMVVEGXGXR

SEQ ID NO: 7088 - protein, 36 aa, Artificial Sequence
  Non-cyclic GFR-binding peptide
  MOD_RES (33)..(35): Xaa is C or S
  MOD_RES (14)..(15)..(16)..(17)..(18): Xaa is A or G
  MOD_RES (19)..(20)..(21)..(22): Xaa is A or G or absent
VSQDLSAISILYLXXXXXXXXXLKNYQMIVKSXKXS

SEQ ID NO: 7089 - protein, 35 aa, Artificial Sequence
  Non-cyclic GFR-binding peptide
  MOD_RES (2)..(34): Xaa is C or S
TXAPTKLSAISVLYLDDSSNVILKNYQNMVVRSXG

SEQ ID NO: 7090 - protein, 34 aa, Artificial Sequence
  Non-cyclic GFR-binding peptide
  MOD_RES (4)..(4): Xaa is C or S
KPTXAPTKLSATSVLYYDDSSNVILRKHRNMVVR

SEQ ID NO: 7091 - protein, 40 aa, Artificial Sequence
  Non-cyclic GFR-binding peptide
  MOD_RES (3)..(4)..(38)..(40): Xaa is C or S
  MOD_RES (18)..(19)..(20)..(21)..(22): Xaa is A or G
  MOD_RES (23)..(24)..(25)..(26): Xaa is A or G or absent
KPXXAPTQLSPISVLYKXXXXXXXXXLKYHYNMVVRAXGX

SEQ ID NO: 7092 - protein, 37 aa, Artificial Sequence
  Non-cyclic GFR-binding peptide
  MOD_RES (3)..(4)..(37): Xaa is C or S
  MOD_RES (18)..(19)..(20)..(21)..(22): Xaa is A or G
  MOD_RES (23)..(24)..(25)..(26): Xaa is A or G or absent
APXXVPQALSPISILYKXXXXXXXXXLKYHYMIVRSX

SEQ ID NO: 7093 - protein, 32 aa, Artificial Sequence
  Non-cyclic GFR-binding peptide
  MOD_RES (31)..(31): Xaa is C or S
VPQALNAISILYFVGRKPKVLKKYRMIVRSXK

SEQ ID NO: 7094 - protein, 45 aa, Artificial Sequence
  Non-cyclic GFR-binding peptide
  MOD_RES (5)..(42)..(44): Xaa is C or S
RNVQXRPTQVQLNAISVLYFEIVRKKPIFLKKYRTLEDHLAXKXE

SEQ ID NO: 7095 - protein, 35 aa, Artificial Sequence
  Non-cyclic GFR-binding peptide
  MOD_RES (3)..(4)..(35): Xaa is C or S
SPXXVSQDLSPISILYKIGKTPKILKYHYMIVKSX

SEQ ID NO: 7096 - protein, 35 aa, Artificial Sequence
  Non-cyclic GFR-binding peptide
  MOD_RES (3)..(4): Xaa is C or S
KAXXAPTKLSAISVLYLDSSNNVILKNYQNMVVKA

SEQ ID NO: 7097 - protein, 34 aa, Artificial Sequence
  Non-cyclic GFR-binding peptide
  MOD_RES (1)..(1): Xaa is C or S
  MOD_RES (15)..(16)..(17)..(18)..(19): Xaa is A or G
  MOD_RES (20)..(21)..(22)..(23): Xaa is A or G or absent
XVPTELSATSMLYYXXXXXXXXXLRKHREMVVEG

SEQ ID NO: 7098 - protein, 35 aa, Artificial Sequence
  Non-cyclic GFR-binding peptide
  MOD_RES (2)..(3): Xaa is C or S
  MOD_RES (17)..(18)..(19)..(20)..(21): Xaa is A or G
  MOD_RES (22)..(23)..(24)..(25): Xaa is A or G or absent
AXXAPTKLSPISVLYKXXXXXXXXXLKYHYNMVVK

SEQ ID NO: 7099 - protein, 40 aa, Artificial Sequence
  Non-cyclic GFR-binding peptide
  MOD_RES (2)..(3)..(37)..(39): Xaa is C or S
  MOD_RES (17)..(18)..(19)..(20)..(21): Xaa is A or G
  MOD_RES (22)..(23)..(24)..(25): Xaa is A or G or absent
PXXAPTKLSAISVLYLXXXXXXXXXLKNYQNMVVRSXGXH

SEQ ID NO: 7100 - protein, 35 aa, Artificial Sequence
  Non-cyclic GFR-binding peptide
  MOD_RES (3)..(4): Xaa is C or S
KPXXAPTKLSATSVLYYDDSSNVILRKHRNMVVRS

SEQ ID NO: 7101 - protein, 33 aa, Artificial Sequence
  Non-cyclic GFR-binding peptide
TQVQLNAISVLYFEIVRKKPIFLKKYRTLEDHL

SEQ ID NO: 7102 - protein, 39 aa, Artificial Sequence
  Non-cyclic GFR-binding peptide
  MOD_RES (4)..(5)..(39): Xaa is C or S
  MOD_RES (19)..(20)..(21)..(22)..(23): Xaa is A or G
  MOD_RES (24)..(25)..(26)..(27): Xaa is A or G or absent
PKAXXVPTELNAISMLYFXXXXXXXXXLKKYRDMVVEGX

SEQ ID NO: 7103 - protein, 38 aa, Artificial Sequence
  Non-cyclic GFR-binding peptide
  MOD_RES (35)..(37): Xaa is C or S
  MOD_RES (14)..(15)..(16)..(17)..(18): Xaa is A or G
  MOD_RES (19)..(20)..(21)..(22): Xaa is A or G or absent
VPTKLSAISVLYLXXXXXXXXXLKNYQEGMSVAEXGXR

SEQ ID NO: 7104 - protein, 43 aa, Artificial Sequence
  Non-cyclic GFR-binding peptide
  MOD_RES (3)..(40)..(42): Xaa is C or S
VQXRPTQVQLSPISVLYKEIVRKKPIFLKYHYTLEDHLAXKXE

SEQ ID NO: 7105 - protein, 37 aa, Artificial Sequence
  Non-cyclic GFR-binding peptide
  MOD_RES (5)..(6)..(37): Xaa is C or S
SAAPXXVPQALSPISILYKVGRKPKVLKYHYMIVRSX

SEQ ID NO: 7106 - protein, 39 aa, Artificial Sequence
  Non-cyclic GFR-binding peptide
  MOD_RES (3)..(4)..(37)..(39): Xaa is C or S
  MOD_RES (18)..(19)..(20)..(21)..(22): Xaa is A or G
  MOD_RES (23)..(24)..(25)..(26): Xaa is A or G or absent
SPXXVPQDLSATSILYYXXXXXXXXXLRKHRMVVKSXKX

SEQ ID NO: 7107 - protein, 39 aa, Artificial Sequence
  Non-cyclic GFR-binding peptide
  MOD_RES (1)..(2)..(36)..(38): Xaa is C or S
  MOD_RES (16)..(17)..(18)..(19)..(20): Xaa is A or G
  MOD_RES (21)..(22)..(23)..(24): Xaa is A or G or absent
XXAPTKLSPISVLYKXXXXXXXXXLKYHYNMVVKAXGXH

SEQ ID NO: 7108 - protein, 41 aa, Artificial Sequence
  Non-cyclic GFR-binding peptide
  MOD_RES (6)..(7): Xaa is C or S
  MOD_RES (21)..(22)..(23)..(24)..(25): Xaa is A or G
  MOD_RES (26)..(27)..(28)..(29): Xaa is A or G or absent
KVGKAXXVPTKLNAISVLYFXXXXXXXXXLKKYREGMSVAE

SEQ ID NO: 7109 - protein, 35 aa, Artificial Sequence
  Non-cyclic GFR-binding peptide
  MOD_RES (2)..(3): Xaa is C or S
  MOD_RES (17)..(18)..(19)..(20)..(21): Xaa is A or G
  MOD_RES (22)..(23)..(24)..(25): Xaa is A or G or absent
PXXVPQDLSAISILYLXXXXXXXXXLKNYQMVVKS

SEQ ID NO: 7110 - protein, 38 aa, Artificial Sequence
  Non-cyclic GFR-binding peptide
  MOD_RES (4)..(5)..(36)..(38): Xaa is C or S
ASPXXVSQDLSATSILYYIGKTPKILRKHRMIVKSXKX

SEQ ID NO: 7111 - protein, 37 aa, Artificial Sequence
  Non-cyclic GFR-binding peptide
  MOD_RES (34)..(36): Xaa is C or S
  MOD_RES (14)..(15)..(16)..(17)..(18): Xaa is A or G
  MOD_RES (19)..(20)..(21)..(22): Xaa is A or G or absent
APTQLSPISVLYKXXXXXXXXXLKYHYNMVVRAXGXH

SEQ ID NO: 7112 - protein, 33 aa, Artificial Sequence
  Non-cyclic GFR-binding peptide
  MOD_RES (14)..(15)..(16)..(17)..(18): Xaa is A or G
  MOD_RES (19)..(20)..(21)..(22): Xaa is A or G or absent
VPTELSATSMLYYXXXXXXXXXLRKHREMVVEG

SEQ ID NO: 7113 - protein, 30 aa, Artificial Sequence
  Non-cyclic GFR-binding peptide
VSQDLSAISILYLIGKTPKILKNYQMIVKS

SEQ ID NO: 7114 - protein, 38 aa, Artificial Sequence
  Non-cyclic GFR-binding peptide
  MOD_RES (1)..(2)..(36)..(38): Xaa is C or S
  MOD_RES (16)..(17)..(18)..(19)..(20): Xaa is A or G
  MOD_RES (21)..(22)..(23)..(24): Xaa is A or G or absent
XXAPTQLSAISVLYLXXXXXXXXXLKNYQNMVVRAXGX

SEQ ID NO: 7115 - protein, 36 aa, Artificial Sequence
  Non-cyclic GFR-binding peptide
  MOD_RES (3)..(4): Xaa is C or S
  MOD_RES (18)..(19)..(20)..(21)..(22): Xaa is A or G
  MOD_RES (23)..(24)..(25)..(26): Xaa is A or G or absent
APXXVPQALNAISILYFXXXXXXXXXLKKYRMIVRS

SEQ ID NO: 7116 - protein, 39 aa, Artificial Sequence
  Non-cyclic GFR-binding peptide
  MOD_RES (6)..(38): Xaa is C or S
VTKPTXAPTKLSPISVLYKDDSSNVILKYHYNMVVRSXG

SEQ ID NO: 7117 - protein, 35 aa, Artificial Sequence
  Non-cyclic GFR-binding peptide
  MOD_RES (4)..(4): Xaa is C or S
KPTXAPTKLSATSVLYYDDSSNVILRKHRNMVVRS

SEQ ID NO: 7118 - protein, 38 aa, Artificial Sequence
  Non-cyclic GFR-binding peptide
  MOD_RES (2)..(3)..(35)..(37): Xaa is C or S
PXXAPTQLSATSVLYYDDSSNVILRKHRNMVVRAXGXH

SEQ ID NO: 7119 - protein, 41 aa, Artificial Sequence
  Non-cyclic GFR-binding peptide
  MOD_RES (4)..(41): Xaa is C or S
NVQXRPTQVQLSAISVLYLEIVRKKPIFLKNYQTLEDHLAX

SEQ ID NO: 7120 - protein, 40 aa, Artificial Sequence
  Non-cyclic GFR-binding peptide
  MOD_RES (4)..(5)..(40): Xaa is C or S
  MOD_RES (19)..(20)..(21)..(22)..(23): Xaa is A or G
  MOD_RES (24)..(25)..(26)..(27): Xaa is A or G or absent
GKAXXVPTKLSATSVLYYXXXXXXXXXLRKHREGMSVAEX

SEQ ID NO: 7121 - protein, 42 aa, Artificial Sequence
  Non-cyclic GFR-binding peptide
  MOD_RES (2)..(39)..(41): Xaa is C or S
  MOD_RES (18)..(19)..(20)..(21)..(22): Xaa is A or G
  MOD_RES (23)..(24)..(25)..(26): Xaa is A or G or absent
QXRPTQVQLSPISVLYKXXXXXXXXXLKYHYTLEDHLAXKXE

SEQ ID NO: 7122 - protein, 40 aa, Artificial Sequence
  Non-cyclic GFR-binding peptide
  MOD_RES (6)..(7)..(38)..(40): Xaa is C or S
ASASPXXVSQDLNAISILYFIGKTPKILKKYRMIVKSXKX

SEQ ID NO: 7123 - protein, 38 aa, Artificial Sequence
  Non-cyclic GFR-binding peptide
  MOD_RES (5)..(6)..(38): Xaa is C or S
VPKAXXAPTKLSAISVLYLDSSNNVILKNYQNMVVKAX

SEQ ID NO: 7124 - protein, 34 aa, Artificial Sequence
  Non-cyclic GFR-binding peptide
  MOD_RES (1)..(34): Xaa is C or S
  MOD_RES (15)..(16)..(17)..(18)..(19): Xaa is A or G
  MOD_RES (20)..(21)..(22)..(23): Xaa is A or G or absent
XVPQALNAISILYFXXXXXXXXXLKKYRMIVRSX

SEQ ID NO: 7125 - protein, 38 aa, Artificial Sequence
  Non-cyclic GFR-binding peptide
  MOD_RES (6)..(7)..(38): Xaa is C or S
ASASPXXVSQDLNAISILYFIGKTPKILKKYRMIVKSX

SEQ ID NO: 7126 - protein, 37 aa, Artificial Sequence
  Non-cyclic GFR-binding peptide
  MOD_RES (1)..(36): Xaa is C or S
  MOD_RES (15)..(16)..(17)..(18)..(19): Xaa is A or G
  MOD_RES (20)..(21)..(22)..(23): Xaa is A or G or absent
XVPTKLNAISVLYFXXXXXXXXXLKKYREGMSVAEXG

SEQ ID NO: 7127 - protein, 36 aa, Artificial Sequence
  Non-cyclic GFR-binding peptide
  MOD_RES (1)..(2)..(36): Xaa is C or S
  MOD_RES (16)..(17)..(18)..(19)..(20): Xaa is A or G
  MOD_RES (21)..(22)..(23)..(24): Xaa is A or G or absent
XXAPTKLSAISVLYLXXXXXXXXXLKNYQNMVVKAX

SEQ ID NO: 7128 - protein, 39 aa, Artificial Sequence
  Non-cyclic GFR-binding peptide
  MOD_RES (5)..(6)..(37)..(39): Xaa is C or S
SASPXXVPQDLNAISILYFVGRTPKVLKKYRMVVKSXKX

SEQ ID NO: 7129 - protein, 38 aa, Artificial Sequence
  Non-cyclic GFR-binding peptide
  MOD_RES (3)..(4)..(37): Xaa is C or S
KAXXVPTKLNAISVLYFDDMGVPTLKKYREGMSVAEXG

SEQ ID NO: 7130 - protein, 37 aa, Artificial Sequence
  Non-cyclic GFR-binding peptide
  MOD_RES (2)..(2): Xaa is C or S
  MOD_RES (18)..(19)..(20)..(21)..(22): Xaa is A or G
  MOD_RES (23)..(24)..(25)..(26): Xaa is A or G or absent
QXRPTQVQLSPISVLYKXXXXXXXXXLKYHYTLEDHL

SEQ ID NO: 7131 - protein, 34 aa, Artificial Sequence
  Non-cyclic GFR-binding peptide
  MOD_RES (3)..(4): Xaa is C or S
SPXXVPQDLSAISILYLVGRTPKVLKNYQMVVKS

SEQ ID NO: 7132 - protein, 38 aa, Artificial Sequence
  Non-cyclic GFR-binding peptide
  MOD_RES (2)..(2): Xaa is C or S
  MOD_RES (18)..(19)..(20)..(21)..(22): Xaa is A or G
  MOD_RES (23)..(24)..(25)..(26): Xaa is A or G or absent
QXRPTQVQLSAISVLYLXXXXXXXXXLKNYQTLEDHLA

SEQ ID NO: 7133 - protein, 41 aa, Artificial Sequence
  Non-cyclic GFR-binding peptide
  MOD_RES (5)..(6)..(40): Xaa is C or S
  MOD_RES (20)..(21)..(22)..(23)..(24): Xaa is A or G
  MOD_RES (25)..(26)..(27)..(28): Xaa is A or G or absent
IPKAXXVPTELNAISMLYFXXXXXXXXXLKKYREMVVEGXG

SEQ ID NO: 7134 - protein, 38 aa, Artificial Sequence
  Non-cyclic GFR-binding peptide
  MOD_RES (4)..(5)..(36)..(38): Xaa is C or S
ASPXXVPQDLSPISILYKVGRTPKVLKYHYMVVKSXKX

SEQ ID NO: 7135 - protein, 35 aa, Artificial Sequence
  Non-cyclic GFR-binding peptide
  MOD_RES (2)..(3): Xaa is C or S
  MOD_RES (17)..(18)..(19)..(20)..(21): Xaa is A or G
  MOD_RES (22)..(23)..(24)..(25): Xaa is A or G or absent
AXXAPTKLSAISVLYLXXXXXXXXXLKNYQNMVVK

SEQ ID NO: 7136 - protein, 44 aa, Artificial Sequence
  Non-cyclic GFR-binding peptide
  MOD_RES (5)..(42)..(44): Xaa is C or S
  MOD_RES (21)..(22)..(23)..(24)..(25): Xaa is A or G
  MOD_RES (26)..(27)..(28)..(29): Xaa is A or G or absent
RNVQXRPTQVQLSATSVLYYXXXXXXXXXLRKHRTLEDHLAXKX

SEQ ID NO: 7137 - protein, 37 aa, Artificial Sequence
  Non-cyclic GFR-binding peptide
  MOD_RES (4)..(5)..(37): Xaa is C or S
PKAXXVPTELSPISMLYKDEYDKVVLKYHYEMVVEGX

SEQ ID NO: 7138 - protein, 38 aa, Artificial Sequence
  Non-cyclic GFR-binding peptide
  MOD_RES (2)..(2): Xaa is C or S
  MOD_RES (18)..(19)..(20)..(21)..(22): Xaa is A or G
  MOD_RES (23)..(24)..(25)..(26): Xaa is A or G or absent
QXRPTQVQLSATSVLYYXXXXXXXXXLRKHRTLEDHLA

SEQ ID NO: 7139 - protein, 37 aa, Artificial Sequence
  Non-cyclic GFR-binding peptide
  MOD_RES (5)..(5): Xaa is C or S
  MOD_RES (19)..(20)..(21)..(22)..(23): Xaa is A or G
  MOD_RES (24)..(25)..(26)..(27): Xaa is A or G or absent
TKPTXAPTKLSATSVLYYXXXXXXXXXLRKHRNMVVR

SEQ ID NO: 7140 - protein, 37 aa, Artificial Sequence
  Non-cyclic GFR-binding peptide
  MOD_RES (5)..(37): Xaa is C or S
TKPTXAPTKLSATSVLYYDDSSNVILRKHRNMVVRSX

SEQ ID NO: 7141 - protein, 36 aa, Artificial Sequence
  Non-cyclic GFR-binding peptide
  MOD_RES (1)..(2)..(33)..(35): Xaa is C or S
XXVPQALSAISILYLVGRKPKVLKNYQMIVRSXKXS

SEQ ID NO: 7142 - protein, 36 aa, Artificial Sequence
  Non-cyclic GFR-binding peptide
  MOD_RES (3)..(4)..(36): Xaa is C or S
KAXXVPTELNAISMLYFDEYDKVVLKKYREMVVEGX

SEQ ID NO: 7143 - protein, 37 aa, Artificial Sequence
  Non-cyclic GFR-binding peptide
  MOD_RES (35)..(37): Xaa is C or S
TQVQLSAISVLYLEIVRKKPIFLKNYQTLEDHLAXKX

SEQ ID NO: 7144 - protein, 36 aa, Artificial Sequence
  Non-cyclic GFR-binding peptide
  MOD_RES (5)..(6): Xaa is C or S
VPKPXXAPTQLSAISVLYLDDSSNVILKNYQNMVVR

SEQ ID NO: 7145 - protein, 40 aa, Artificial Sequence
  Non-cyclic GFR-binding peptide
  MOD_RES (1)..(2)..(37)..(39): Xaa is C or S
  MOD_RES (16)..(17)..(18)..(19)..(20): Xaa is A or G
  MOD_RES (21)..(22)..(23)..(24): Xaa is A or G or absent
XXVPTKLSAISVLYLXXXXXXXXXLKNYQEGMSVAEXGXR

SEQ ID NO: 7146 - protein, 37 aa, Artificial Sequence
  Non-cyclic GFR-binding peptide
  MOD_RES (1)..(2)..(34)..(36): Xaa is C or S
XXVPTELSPISMLYKDENEKVVLKYHYDMVVEGXGXR

SEQ ID NO: 7147 - protein, 35 aa, Artificial Sequence
  Non-cyclic GFR-binding peptide
  MOD_RES (3)..(4)..(35): Xaa is C or S
SPXXVPQDLSPISILYKVGRTPKVLKYHYMVVKSX

SEQ ID NO: 7148 - protein, 35 aa, Artificial Sequence
  Non-cyclic GFR-binding peptide
  MOD_RES (4)..(5): Xaa is C or S
AAPXXVPQALSAISILYLVGRKPKVLKNYQMIVRS

SEQ ID NO: 7149 - protein, 35 aa, Artificial Sequence
  Non-cyclic GFR-binding peptide
RPTQVQLNAISVLYFEIVRKKPIFLKKYRTLEDHL

SEQ ID NO: 7150 - protein, 38 aa, Artificial Sequence
  Non-cyclic GFR-binding peptide
  MOD_RES (4)..(5): Xaa is C or S
  MOD_RES (19)..(20)..(21)..(22)..(23): Xaa is A or G
  MOD_RES (24)..(25)..(26)..(27): Xaa is A or G or absent
PKPXXAPTQLSPISVLYKXXXXXXXXXLKYHYNMVVRA

SEQ ID NO: 7151 - protein, 37 aa, Artificial Sequence
  Non-cyclic GFR-binding peptide
  MOD_RES (5)..(6)..(37): Xaa is C or S
SASPXXVPQDLNAISILYFVGRTPKVLKKYRMVVKSX

SEQ ID NO: 7152 - protein, 34 aa, Artificial Sequence
  Non-cyclic GFR-binding peptide
  MOD_RES (14)..(15)..(16)..(17)..(18): Xaa is A or G
  MOD_RES (19)..(20)..(21)..(22): Xaa is A or G or absent
TQVQLNAISVLYFXXXXXXXXXLKKYRTLEDHLA

SEQ ID NO: 7153 - protein, 39 aa, Artificial Sequence
  Non-cyclic GFR-binding peptide
  MOD_RES (2)..(3)..(36)..(38): Xaa is C or S
AXXVPTKLSAISVLYLDDMGVPTLKNYQEGMSVAEXGXR

SEQ ID NO: 7154 - protein, 40 aa, Artificial Sequence
  Non-cyclic GFR-binding peptide
  MOD_RES (3)..(4)..(37)..(39): Xaa is C or S
  MOD_RES (18)..(19)..(20)..(21)..(22): Xaa is A or G
  MOD_RES (23)..(24)..(25)..(26): Xaa is A or G or absent
SPXXVPQDLSATSILYYXXXXXXXXXLRKHRMVVKSXKXS

SEQ ID NO: 7155 - protein, 37 aa, Artificial Sequence
  Non-cyclic GFR-binding peptide
  MOD_RES (4)..(5)..(37): Xaa is C or S
PKAXXVPTELNAISMLYFDEYDKVVLKKYREMVVEGX

SEQ ID NO: 7156 - protein, 41 aa, Artificial Sequence
  Non-cyclic GFR-binding peptide
  MOD_RES (4)..(5)..(38)..(40): Xaa is C or S
  MOD_RES (19)..(20)..(21)..(22)..(23): Xaa is A or G
  MOD_RES (24)..(25)..(26)..(27): Xaa is A or G or absent
ASPXXVSQDLSAISILYLXXXXXXXXXLKNYQMIVKSXKXS

SEQ ID NO: 7157 - protein, 37 aa, Artificial Sequence
  Non-cyclic GFR-binding peptide
  MOD_RES (1)..(2)..(36): Xaa is C or S
  MOD_RES (16)..(17)..(18)..(19)..(20): Xaa is A or G
  MOD_RES (21)..(22)..(23)..(24): Xaa is A or G or absent
XXAPTKLNAISVLYFXXXXXXXXXLKKYRNMVVKAXG

SEQ ID NO: 7158 - protein, 42 aa, Artificial Sequence
  Non-cyclic GFR-binding peptide
  MOD_RES (6)..(7)..(39)..(41): Xaa is C or S
TVPKPXXAPTQLSPISVLYKDDSSNVILKYHYNMVVRAXGXH

SEQ ID NO: 7159 - protein, 38 aa, Artificial Sequence
  Non-cyclic GFR-binding peptide
  MOD_RES (4)..(5)..(37): Xaa is C or S
PKPXXAPTQLSPISVLYKDDSSNVILKYHYNMVVRAXG

SEQ ID NO: 7160 - protein, 39 aa, Artificial Sequence
  Non-cyclic GFR-binding peptide
  MOD_RES (5)..(6)..(38): Xaa is C or S
VPKPXXAPTQLSATSVLYYDDSSNVILRKHRNMVVRAXG

SEQ ID NO: 7161 - protein, 40 aa, Artificial Sequence
  Non-cyclic GFR-binding peptide
  MOD_RES (3)..(4)..(39): Xaa is C or S
  MOD_RES (18)..(19)..(20)..(21)..(22): Xaa is A or G
  MOD_RES (23)..(24)..(25)..(26): Xaa is A or G or absent
KAXXVPTKLNAISVLYFXXXXXXXXXLKKYREGMSVAEXG

SEQ ID NO: 7162 - protein, 38 aa, Artificial Sequence
  Non-cyclic GFR-binding peptide
  MOD_RES (4)..(5)..(36)..(38): Xaa is C or S
ASPXXVPQDLSATSILYYVGRTPKVLRKHRMVVKSXKX

SEQ ID NO: 7163 - protein, 36 aa, Artificial Sequence
  Non-cyclic GFR-binding peptide
  MOD_RES (1)..(2)..(35): Xaa is C or S
  MOD_RES (16)..(17)..(18)..(19)..(20): Xaa is A or G
  MOD_RES (21)..(22)..(23)..(24): Xaa is A or G or absent
XXVPQALSATSILYYXXXXXXXXXLRKHRMIVRSXK

SEQ ID NO: 7164 - protein, 40 aa, Artificial Sequence
  Non-cyclic GFR-binding peptide
  MOD_RES (6)..(7)..(40): Xaa is C or S
  MOD_RES (21)..(22)..(23)..(24)..(25): Xaa is A or G
  MOD_RES (26)..(27)..(28)..(29): Xaa is A or G or absent
ASAAPXXVPQALSAISILYLXXXXXXXXXLKNYQMIVRSX

SEQ ID NO: 7165 - protein, 35 aa, Artificial Sequence
  Non-cyclic GFR-binding peptide
  MOD_RES (3)..(4)..(35): Xaa is C or S
SPXXVSQDLSATSILYYIGKTPKILRKHRMIVKSX

SEQ ID NO: 7166 - protein, 38 aa, Artificial Sequence
  Non-cyclic GFR-binding peptide
  MOD_RES (4)..(5): Xaa is C or S
  MOD_RES (19)..(20)..(21)..(22)..(23): Xaa is A or G
  MOD_RES (24)..(25)..(26)..(27): Xaa is A or G or absent
PKAXXVPTELSPISMLYKXXXXXXXXXLKYHYDMVVEG

SEQ ID NO: 7167 - protein, 34 aa, Artificial Sequence
  Non-cyclic GFR-binding peptide
  MOD_RES (34)..(34): Xaa is C or S
  MOD_RES (14)..(15)..(16)..(17)..(18): Xaa is A or G
  MOD_RES (19)..(20)..(21)..(22): Xaa is A or G or absent
APTKLSAISVLYLXXXXXXXXXLKNYQNMVVRSX

SEQ ID NO: 7168 - protein, 43 aa, Artificial Sequence
  Non-cyclic GFR-binding peptide
  MOD_RES (4)..(41)..(43): Xaa is C or S
  MOD_RES (20)..(21)..(22)..(23)..(24): Xaa is A or G
  MOD_RES (25)..(26)..(27)..(28): Xaa is A or G or absent
NVQXRPTQVQLSAISVLYLXXXXXXXXXLKNYQTLEDHLAXKX

SEQ ID NO: 7169 - protein, 37 aa, Artificial Sequence
  Non-cyclic GFR-binding peptide
  MOD_RES (1)..(2)..(34)..(36): Xaa is C or S
XXAPTKLSAISVLYLDSSNNVILKNYQNMVVKAXGXH

SEQ ID NO: 7170 - protein, 40 aa, Artificial Sequence
  Non-cyclic GFR-binding peptide
  MOD_RES (6)..(7)..(40): Xaa is C or S
  MOD_RES (21)..(22)..(23)..(24)..(25): Xaa is A or G
  MOD_RES (26)..(27)..(28)..(29): Xaa is A or G or absent
ASASPXXVSQDLNAISILYFXXXXXXXXXLKKYRMIVKSX

SEQ ID NO: 7171 - protein, 35 aa, Artificial Sequence
  Non-cyclic GFR-binding peptide
  MOD_RES (1)..(33)..(35): Xaa is C or S
XAPTKLNAISVLYFDSSNNVILKKYRNMVVKAXGX

SEQ ID NO: 7172 - protein, 34 aa, Artificial Sequence
  Non-cyclic GFR-binding peptide
  MOD_RES (33)..(33): Xaa is C or S
  MOD_RES (14)..(15)..(16)..(17)..(18): Xaa is A or G
  MOD_RES (19)..(20)..(21)..(22): Xaa is A or G or absent
VSQDLSPISILYKXXXXXXXXXLKYHYMIVKSXK

SEQ ID NO: 7173 - protein, 32 aa, Artificial Sequence
  Non-cyclic GFR-binding peptide
  MOD_RES (31)..(31): Xaa is C or S
VPQALSPISILYKVGRKPKVLKYHYMIVRSXK

SEQ ID NO: 7174 - protein, 36 aa, Artificial Sequence
  Non-cyclic GFR-binding peptide
  MOD_RES (36)..(36): Xaa is C or S
  MOD_RES (15)..(16)..(17)..(18)..(19): Xaa is A or G
  MOD_RES (20)..(21)..(22)..(23): Xaa is A or G or absent
PTQVQLSATSVLYYXXXXXXXXXLRKHRTLEDHLAX

SEQ ID NO: 7175 - protein, 36 aa, Artificial Sequence
  Non-cyclic GFR-binding peptide
  MOD_RES (5)..(6): Xaa is C or S
VPKAXXAPTKLSAISVLYLDSSNNVILKNYQNMVVK

SEQ ID NO: 7176 - protein, 35 aa, Artificial Sequence
  Non-cyclic GFR-binding peptide
  MOD_RES (2)..(3)..(35): Xaa is C or S
PXXAPTKLSATSVLYYDDSSNVILRKHRNMVVRSX

SEQ ID NO: 7177 - protein, 39 aa, Artificial Sequence
  Non-cyclic GFR-binding peptide
  MOD_RES (4)..(36)..(38): Xaa is C or S
KPTXAPTKLSAISVLYLDDSSNVILKNYQNMVVRSXGXH

SEQ ID NO: 7178 - protein, 38 aa, Artificial Sequence
  Non-cyclic GFR-binding peptide
  MOD_RES (2)..(3)..(37): Xaa is C or S
  MOD_RES (17)..(18)..(19)..(20)..(21): Xaa is A or G
  MOD_RES (22)..(23)..(24)..(25): Xaa is A or G or absent
AXXAPTKLNAISVLYFXXXXXXXXXLKKYRNMVVKAXG

SEQ ID NO: 7179 - protein, 42 aa, Artificial Sequence
  Non-cyclic GFR-binding peptide
  MOD_RES (6)..(7)..(39)..(41): Xaa is C or S
AVPKAXXAPTKLNAISVLYFDSSNNVILKKYRNMVVKAXGXH

SEQ ID NO: 7180 - protein, 40 aa, Artificial Sequence
  Non-cyclic GFR-binding peptide
  MOD_RES (6)..(7)..(39): Xaa is C or S
KIPKAXXVPTELSPISMLYKDENEKVVLKYHYDMVVEGXG

SEQ ID NO: 7181 - protein, 37 aa, Artificial Sequence
  Non-cyclic GFR-binding peptide
  MOD_RES (1)..(2)..(34)..(36): Xaa is C or S
XXAPTKLSPISVLYKDDSSNVILKYHYNMVVRSXGXH

SEQ ID NO: 7182 - protein, 35 aa, Artificial Sequence
  Non-cyclic GFR-binding peptide
  MOD_RES (4)..(5): Xaa is C or S
AAPXXVPQALSPISILYKVGRKPKVLKYHYMIVRS

SEQ ID NO: 7183 - protein, 40 aa, Artificial Sequence
  Non-cyclic GFR-binding peptide
  MOD_RES (5)..(39): Xaa is C or S
  MOD_RES (19)..(20)..(21)..(22)..(23): Xaa is A or G
  MOD_RES (24)..(25)..(26)..(27): Xaa is A or G or absent
TKPTXAPTKLSPISVLYKXXXXXXXXXLKYHYNMVVRSXG

SEQ ID NO: 7184 - protein, 42 aa, Artificial Sequence
  Non-cyclic GFR-binding peptide
  MOD_RES (4)..(41): Xaa is C or S
NVQXRPTQVQLNAISVLYFEIVRKKPIFLKKYRTLEDHLAXK

SEQ ID NO: 7185 - protein, 37 aa, Artificial Sequence
  Non-cyclic GFR-binding peptide
  MOD_RES (5)..(6)..(37): Xaa is C or S
SAAPXXVPQALSATSILYYVGRKPKVLRKHRMIVRSX

SEQ ID NO: 7186 - protein, 40 aa, Artificial Sequence
  Non-cyclic GFR-binding peptide
  MOD_RES (4)..(4): Xaa is C or S
NVQXRPTQVQLSAISVLYLEIVRKKPIFLKNYQTLEDHLA

SEQ ID NO: 7187 - protein, 35 aa, Artificial Sequence
  Non-cyclic GFR-binding peptide
  MOD_RES (34)..(34): Xaa is C or S
  MOD_RES (14)..(15)..(16)..(17)..(18): Xaa is A or G
  MOD_RES (19)..(20)..(21)..(22): Xaa is A or G or absent
APTQLSAISVLYLXXXXXXXXXLKNYQNMVVRAXG

SEQ ID NO: 7188 - protein, 34 aa, Artificial Sequence
  Non-cyclic GFR-binding peptide
  MOD_RES (1)..(2): Xaa is C or S
XXVPTKLNAISVLYFDDMGVPTLKKYREGMSVAE

SEQ ID NO: 7189 - protein, 35 aa, Artificial Sequence
  Non-cyclic GFR-binding peptide
  MOD_RES (3)..(4): Xaa is C or S
KAXXAPTKLNAISVLYFDSSNNVILKKYRNMVVKA

SEQ ID NO: 7190 - protein, 35 aa, Artificial Sequence
  Non-cyclic GFR-binding peptide
  MOD_RES (1)..(35): Xaa is C or S
  MOD_RES (15)..(16)..(17)..(18)..(19): Xaa is A or G
  MOD_RES (20)..(21)..(22)..(23): Xaa is A or G or absent
XAPTKLSAISVLYLXXXXXXXXXLKNYQNMVVRSX

SEQ ID NO: 7191 - protein, 37 aa, Artificial Sequence
  Non-cyclic GFR-binding peptide
  MOD_RES (2)..(3)..(37): Xaa is C or S
  MOD_RES (17)..(18)..(19)..(20)..(21): Xaa is A or G
  MOD_RES (22)..(23)..(24)..(25): Xaa is A or G or absent
PXXAPTQLSATSVLYYXXXXXXXXXLRKHRNMVVRAX

SEQ ID NO: 7192 - protein, 38 aa, Artificial Sequence
  Non-cyclic GFR-binding peptide
  MOD_RES (2)..(36)..(38): Xaa is C or S
  MOD_RES (16)..(17)..(18)..(19)..(20): Xaa is A or G
  MOD_RES (21)..(22)..(23)..(24): Xaa is A or G or absent
TXAPTKLSAISVLYLXXXXXXXXXLKNYQNMVVRSXGX

SEQ ID NO: 7193 - protein, 43 aa, Artificial Sequence
  Non-cyclic GFR-binding peptide
  MOD_RES (5)..(6)..(40)..(42): Xaa is C or S
  MOD_RES (20)..(21)..(22)..(23)..(24): Xaa is A or G
  MOD_RES (25)..(26)..(27)..(28): Xaa is A or G or absent
IPKAXXVPTELSPISMLYKXXXXXXXXXLKYHYEMVVEGXGXR

SEQ ID NO: 7194 - protein, 39 aa, Artificial Sequence
  Non-cyclic GFR-binding peptide
  MOD_RES (5)..(6)..(39): Xaa is C or S
  MOD_RES (20)..(21)..(22)..(23)..(24): Xaa is A or G
  MOD_RES (25)..(26)..(27)..(28): Xaa is A or G or absent
SAAPXXVPQALSPISILYKXXXXXXXXXLKYHYMIVRSX

SEQ ID NO: 7195 - protein, 38 aa, Artificial Sequence
  Non-cyclic GFR-binding peptide
  MOD_RES (3)..(4)..(35)..(37): Xaa is C or S
APXXVPQALSAISILYLVGRKPKVLKNYQMIVRSXKXS

SEQ ID NO: 7196 - protein, 38 aa, Artificial Sequence
  Non-cyclic GFR-binding peptide
  MOD_RES (3)..(4)..(38): Xaa is C or S
  MOD_RES (18)..(19)..(20)..(21)..(22): Xaa is A or G
  MOD_RES (23)..(24)..(25)..(26): Xaa is A or G or absent
KPXXAPTKLSATSVLYYXXXXXXXXXLRKHRNMVVRSX

SEQ ID NO: 7197 - protein, 38 aa, Artificial Sequence
  Non-cyclic GFR-binding peptide
  MOD_RES (6)..(7)..(38): Xaa is C or S
ASASPXXVPQDLNAISILYFVGRTPKVLKKYRMVVKSX

SEQ ID NO: 7198 - protein, 39 aa, Artificial Sequence
  Non-cyclic GFR-binding peptide
  MOD_RES (37)..(39): Xaa is C or S
  MOD_RES (16)..(17)..(18)..(19)..(20): Xaa is A or G
  MOD_RES (21)..(22)..(23)..(24): Xaa is A or G or absent
RPTQVQLSPISVLYKXXXXXXXXXLKYHYTLEDHLAXKX

SEQ ID NO: 7199 - protein, 34 aa, Artificial Sequence
  Non-cyclic GFR-binding peptide
  MOD_RES (2)..(3): Xaa is C or S
AXXVPTELNAISMLYFDENEKVVLKKYRDMVVEG

SEQ ID NO: 7200 - protein, 42 aa, Artificial Sequence
  Non-cyclic GFR-binding peptide
  MOD_RES (4)..(41): Xaa is C or S
  MOD_RES (20)..(21)..(22)..(23)..(24): Xaa is A or G
  MOD_RES (25)..(26)..(27)..(28): Xaa is A or G or absent
NVQXRPTQVQLNAISVLYFXXXXXXXXXLKKYRTLEDHLAXK

SEQ ID NO: 7201 - protein, 36 aa, Artificial Sequence
  Non-cyclic GFR-binding peptide
  MOD_RES (5)..(6): Xaa is C or S
VPKAXXAPTKLSPISVLYKDSSNNVILKYHYNMVVK

SEQ ID NO: 7202 - protein, 40 aa, Artificial Sequence
  Non-cyclic GFR-binding peptide
  MOD_RES (6)..(7): Xaa is C or S
  MOD_RES (21)..(22)..(23)..(24)..(25): Xaa is A or G
  MOD_RES (26)..(27)..(28)..(29): Xaa is A or G or absent
TVPKPXXAPTQLSATSVLYYXXXXXXXXXLRKHRNMVVRA

SEQ ID NO: 7203 - protein, 41 aa, Artificial Sequence
  Non-cyclic GFR-binding peptide
  MOD_RES (4)..(5)..(39)..(41): Xaa is C or S
  MOD_RES (19)..(20)..(21)..(22)..(23): Xaa is A or G
  MOD_RES (24)..(25)..(26)..(27): Xaa is A or G or absent
PKAXXVPTELSPISMLYKXXXXXXXXXLKYHYEMVVEGXGX

SEQ ID NO: 7204 - protein, 37 aa, Artificial Sequence
  Non-cyclic GFR-binding peptide
  MOD_RES (3)..(4)..(36): Xaa is C or S
KAXXVPTELSPISMLYKDENEKVVLKYHYDMVVEGXG

SEQ ID NO: 7205 - protein, 42 aa, Artificial Sequence
  Non-cyclic GFR-binding peptide
  MOD_RES (6)..(7)..(40)..(42): Xaa is C or S
  MOD_RES (21)..(22)..(23)..(24)..(25): Xaa is A or G
  MOD_RES (26)..(27)..(28)..(29): Xaa is A or G or absent
ASAAPXXVPQALSPISILYKXXXXXXXXXLKYHYMIVRSXKX

SEQ ID NO: 7206 - protein, 38 aa, Artificial Sequence
  Non-cyclic GFR-binding peptide
  MOD_RES (4)..(36)..(38): Xaa is C or S
KPTXAPTKLSATSVLYYDDSSNVILRKHRNMVVRSXGX

SEQ ID NO: 7207 - protein, 36 aa, Artificial Sequence
  Non-cyclic GFR-binding peptide
  MOD_RES (1)..(2): Xaa is C or S
  MOD_RES (16)..(17)..(18)..(19)..(20): Xaa is A or G
  MOD_RES (21)..(22)..(23)..(24): Xaa is A or G or absent
XXVPTKLSAISVLYLXXXXXXXXXLKNYQEGMSVAE

SEQ ID NO: 7208 - protein, 35 aa, Artificial Sequence
  Non-cyclic GFR-binding peptide
  MOD_RES (2)..(3)..(35): Xaa is C or S
PXXAPTQLSPISVLYKDDSSNVILKYHYNMVVRAX

SEQ ID NO: 7209 - protein, 33 aa, Artificial Sequence
  Non-cyclic GFR-binding peptide
  MOD_RES (2)..(3): Xaa is C or S
PXXAPTQLSATSVLYYDDSSNVILRKHRNMVVR

SEQ ID NO: 7210 - protein, 41 aa, Artificial Sequence
  Non-cyclic GFR-binding peptide
  MOD_RES (6)..(7)..(38)..(40): Xaa is C or S
ASASPXXVPQDLNAISILYFVGRTPKVLKKYRMVVKSXKXS

SEQ ID NO: 7211 - protein, 32 aa, Artificial Sequence
  Non-cyclic GFR-binding peptide
  MOD_RES (14)..(15)..(16)..(17)..(18): Xaa is A or G
  MOD_RES (19)..(20)..(21)..(22): Xaa is A or G or absent
VPQDLNAISILYFXXXXXXXXXLKKYRMVVKS

SEQ ID NO: 7212 - protein, 38 aa, Artificial Sequence
  Non-cyclic GFR-binding peptide
  MOD_RES (5)..(6): Xaa is C or S
VGKAXXVPTKLSATSVLYYDDMGVPTLRKHREGMSVAE

SEQ ID NO: 7213 - protein, 34 aa, Artificial Sequence
  Non-cyclic GFR-binding peptide
  MOD_RES (3)..(4): Xaa is C or S
SPXXVPQDLSPISILYKVGRTPKVLKYHYMVVKS

SEQ ID NO: 7214 - protein, 37 aa, Artificial Sequence
  Non-cyclic GFR-binding peptide
  MOD_RES (1)..(35)..(37): Xaa is C or S
  MOD_RES (15)..(16)..(17)..(18)..(19): Xaa is A or G
  MOD_RES (20)..(21)..(22)..(23): Xaa is A or G or absent
XAPTKLNAISVLYFXXXXXXXXXLKKYRNMVVKAXGX

SEQ ID NO: 7215 - protein, 35 aa, Artificial Sequence
  Non-cyclic GFR-binding peptide
  MOD_RES (33)..(35): Xaa is C or S
  MOD_RES (14)..(15)..(16)..(17)..(18): Xaa is A or G
  MOD_RES (19)..(20)..(21)..(22): Xaa is A or G or absent
VPQDLSATSILYYXXXXXXXXXLRKHRMVVKSXKX

SEQ ID NO: 7216 - protein, 38 aa, Artificial Sequence
  Non-cyclic GFR-binding peptide
  MOD_RES (2)..(3)..(37): Xaa is C or S
  MOD_RES (17)..(18)..(19)..(20)..(21): Xaa is A or G
  MOD_RES (22)..(23)..(24)..(25): Xaa is A or G or absent
AXXVPTELNAISMLYFXXXXXXXXXLKKYRDMVVEGXG

SEQ ID NO: 7217 - protein, 36 aa, Artificial Sequence
  Non-cyclic GFR-binding peptide
  MOD_RES (1)..(2): Xaa is C or S
  MOD_RES (16)..(17)..(18)..(19)..(20): Xaa is A or G
  MOD_RES (21)..(22)..(23)..(24): Xaa is A or G or absent
XXVPTKLSATSVLYYXXXXXXXXXLRKHREGMSVAE

SEQ ID NO: 7218 - protein, 41 aa, Artificial Sequence
  Non-cyclic GFR-binding peptide
  MOD_RES (1)..(38)..(40): Xaa is C or S
XRPTQVQLSATSVLYYEIVRKKPIFLRKHRTLEDHLAXKXE

SEQ ID NO: 7219 - protein, 38 aa, Artificial Sequence
  Non-cyclic GFR-binding peptide
  MOD_RES (3)..(4)..(38): Xaa is C or S
  MOD_RES (18)..(19)..(20)..(21)..(22): Xaa is A or G
  MOD_RES (23)..(24)..(25)..(26): Xaa is A or G or absent
KAXXVPTELSATSMLYYXXXXXXXXXLRKHRDMVVEGX

SEQ ID NO: 7220 - protein, 33 aa, Artificial Sequence
  Non-cyclic GFR-binding peptide
  MOD_RES (1)..(1): Xaa is C or S
  MOD_RES (15)..(16)..(17)..(18)..(19): Xaa is A or G
  MOD_RES (20)..(21)..(22)..(23): Xaa is A or G or absent
XVPQDLNAISILYFXXXXXXXXXLKKYRMVVKS

SEQ ID NO: 7221 - protein, 38 aa, Artificial Sequence
  Non-cyclic GFR-binding peptide
  MOD_RES (2)..(3)..(37): Xaa is C or S
  MOD_RES (17)..(18)..(19)..(20)..(21): Xaa is A or G
  MOD_RES (22)..(23)..(24)..(25): Xaa is A or G or absent
PXXAPTKLSATSVLYYXXXXXXXXXLRKHRNMVVRSXG

SEQ ID NO: 7222 - protein, 36 aa, Artificial Sequence
  Non-cyclic GFR-binding peptide
  MOD_RES (1)..(2)..(35): Xaa is C or S
  MOD_RES (16)..(17)..(18)..(19)..(20): Xaa is A or G
  MOD_RES (21)..(22)..(23)..(24): Xaa is A or G or absent
XXVPQDLSPISILYKXXXXXXXXXLKYHYMVVKSXK

SEQ ID NO: 7223 - protein, 35 aa, Artificial Sequence
  Non-cyclic GFR-binding peptide
  MOD_RES (34)..(34): Xaa is C or S
  MOD_RES (14)..(15)..(16)..(17)..(18): Xaa is A or G
  MOD_RES (19)..(20)..(21)..(22): Xaa is A or G or absent
APTKLSAISVLYLXXXXXXXXXLKNYQNMVVKAXG

SEQ ID NO: 7224 - protein, 37 aa, Artificial Sequence
  Non-cyclic GFR-binding peptide
  MOD_RES (2)..(3)..(37): Xaa is C or S
  MOD_RES (17)..(18)..(19)..(20)..(21): Xaa is A or G
  MOD_RES (22)..(23)..(24)..(25): Xaa is A or G or absent
AXXVPTELNAISMLYFXXXXXXXXXLKKYREMVVEGX

SEQ ID NO: 7225 - protein, 38 aa, Artificial Sequence
  Non-cyclic GFR-binding peptide
  MOD_RES (6)..(7)..(38): Xaa is C or S
ASAAPXXVPQALSATSILYYVGRKPKVLRKHRMIVRSX

SEQ ID NO: 7226 - protein, 30 aa, Artificial Sequence
  Non-cyclic GFR-binding peptide
VSQDLSPISILYKIGKTPKILKYHYMIVKS

SEQ ID NO: 7227 - protein, 36 aa, Artificial Sequence
  Non-cyclic GFR-binding peptide
  MOD_RES (1)..(1): Xaa is C or S
XRPTQVQLNAISVLYFEIVRKKPIFLKKYRTLEDHL

SEQ ID NO: 7228 - protein, 32 aa, Artificial Sequence
  Non-cyclic GFR-binding peptide
  MOD_RES (1)..(32): Xaa is C or S
XVPQALNAISILYFVGRKPKVLKKYRMIVRSX

SEQ ID NO: 7229 - protein, 31 aa, Artificial Sequence
  Non-cyclic GFR-binding peptide
  MOD_RES (31)..(31): Xaa is C or S
VPQALNAISILYFVGRKPKVLKKYRMIVRSX

SEQ ID NO: 7230 - protein, 41 aa, Artificial Sequence
  Non-cyclic GFR-binding peptide
  MOD_RES (4)..(41): Xaa is C or S
  MOD_RES (20)..(21)..(22)..(23)..(24): Xaa is A or G
  MOD_RES (25)..(26)..(27)..(28): Xaa is A or G or absent
NVQXRPTQVQLNAISVLYFXXXXXXXXXLKKYRTLEDHLAX

SEQ ID NO: 7231 - protein, 37 aa, Artificial Sequence
  Non-cyclic GFR-binding peptide
  MOD_RES (1)..(2)..(36): Xaa is C or S
  MOD_RES (16)..(17)..(18)..(19)..(20): Xaa is A or G
  MOD_RES (21)..(22)..(23)..(24): Xaa is A or G or absent
XXVPTELNAISMLYFXXXXXXXXXLKKYRDMVVEGXG

SEQ ID NO: 7232 - protein, 36 aa, Artificial Sequence
  Non-cyclic GFR-binding peptide
  MOD_RES (1)..(2)..(33)..(35): Xaa is C or S
XXVPQDLSPISILYKVGRTPKVLKYHYMVVKSXKXS

SEQ ID NO: 7233 - protein, 35 aa, Artificial Sequence
  Non-cyclic GFR-binding peptide
  MOD_RES (1)..(32)..(34): Xaa is C or S
XVSQDLSATSILYYIGKTPKILRKHRMIVKSXKXS

SEQ ID NO: 7234 - protein, 40 aa, Artificial Sequence
  Non-cyclic GFR-binding peptide
  MOD_RES (6)..(7)..(38)..(40): Xaa is C or S
ASASPXXVPQDLNAISILYFVGRTPKVLKKYRMVVKSXKX

SEQ ID NO: 7235 - protein, 38 aa, Artificial Sequence
  Non-cyclic GFR-binding peptide
  MOD_RES (4)..(5)..(38): Xaa is C or S
  MOD_RES (19)..(20)..(21)..(22)..(23): Xaa is A or G
  MOD_RES (24)..(25)..(26)..(27): Xaa is A or G or absent
ASPXXVSQDLNAISILYFXXXXXXXXXLKKYRMIVKSX

SEQ ID NO: 7236 - protein, 37 aa, Artificial Sequence
  Non-cyclic GFR-binding peptide
  MOD_RES (2)..(3)..(34)..(36): Xaa is C or S
PXXVPQALNAISILYFVGRKPKVLKKYRMIVRSXKXS

SEQ ID NO: 7237 - protein, 42 aa, Artificial Sequence
  Non-cyclic GFR-binding peptide
  MOD_RES (5)..(42): Xaa is C or S
  MOD_RES (21)..(22)..(23)..(24)..(25): Xaa is A or G
  MOD_RES (26)..(27)..(28)..(29): Xaa is A or G or absent
RNVQXRPTQVQLNAISVLYFXXXXXXXXXLKKYRTLEDHLAX

SEQ ID NO: 7238 - protein, 35 aa, Artificial Sequence
  Non-cyclic GFR-binding peptide
  MOD_RES (1)..(2)..(33)..(35): Xaa is C or S
XXVSQDLSPISILYKIGKTPKILKYHYMIVKSXKX

SEQ ID NO: 7239 - protein, 42 aa, Artificial Sequence
  Non-cyclic GFR-binding peptide
  MOD_RES (5)..(6)..(39)..(41): Xaa is C or S
  MOD_RES (20)..(21)..(22)..(23)..(24): Xaa is A or G
  MOD_RES (25)..(26)..(27)..(28): Xaa is A or G or absent
SAAPXXVPQALNAISILYFXXXXXXXXXLKKYRMIVRSXKXS

SEQ ID NO: 7240 - protein, 36 aa, Artificial Sequence
  Non-cyclic GFR-binding peptide
  MOD_RES (1)..(33)..(35): Xaa is C or S
XVPTELSATSMLYYDENEKVVLRKHRDMVVEGXGXR

SEQ ID NO: 7241 - protein, 38 aa, Artificial Sequence
  Non-cyclic GFR-binding peptide
  MOD_RES (5)..(6)..(38): Xaa is C or S
VPKAXXAPTKLNAISVLYFDSSNNVILKKYRNMVVKAX

SEQ ID NO: 7242 - protein, 39 aa, Artificial Sequence
  Non-cyclic GFR-binding peptide
  MOD_RES (3)..(37)..(39): Xaa is C or S
  MOD_RES (17)..(18)..(19)..(20)..(21): Xaa is A or G
  MOD_RES (22)..(23)..(24)..(25): Xaa is A or G or absent
PTXAPTKLSATSVLYYXXXXXXXXXLRKHRNMVVRSXGX

SEQ ID NO: 7243 - protein, 43 aa, Artificial Sequence
  Non-cyclic GFR-binding peptide
  MOD_RES (7)..(41)..(43): Xaa is C or S
  MOD_RES (21)..(22)..(23)..(24)..(25): Xaa is A or G
  MOD_RES (26)..(27)..(28)..(29): Xaa is A or G or absent
HVTKPTXAPTKLSAISVLYLXXXXXXXXXLKNYQNMVVRSXGX

SEQ ID NO: 7244 - protein, 30 aa, Artificial Sequence; identical to SEQ ID NO: 785
  Non-cyclic GFR-binding peptide

SEQ ID NO: 7245 - protein, 33 aa, Artificial Sequence
  Non-cyclic GFR-binding peptide
  MOD_RES (15)..(16)..(17)..(18)..(19): Xaa is A or G
  MOD_RES (20)..(21)..(22)..(23): Xaa is A or G or absent
PTQVQLNAISVLYFXXXXXXXXXLKKYRTLEDH

SEQ ID NO: 7246 - protein, 37 aa, Artificial Sequence
  Non-cyclic GFR-binding peptide
  MOD_RES (2)..(3)..(35)..(37): Xaa is C or S
AXXVPTELSATSMLYYDENEKVVLRKHRDMVVEGXGX

SEQ ID NO: 7247 - protein, 37 aa, Artificial Sequence
  Non-cyclic GFR-binding peptide
  MOD_RES (36)..(36): Xaa is C or S
  MOD_RES (15)..(16)..(17)..(18)..(19): Xaa is A or G
  MOD_RES (20)..(21)..(22)..(23): Xaa is A or G or absent
PTQVQLSATSVLYYXXXXXXXXXLRKHRTLEDHLAXK

SEQ ID NO: 7248 - protein, 36 aa, Artificial Sequence
  Non-cyclic GFR-binding peptide
  MOD_RES (1)..(1): Xaa is C or S
  MOD_RES (17)..(18)..(19)..(20)..(21): Xaa is A or G
  MOD_RES (22)..(23)..(24)..(25): Xaa is A or G or absent
XRPTQVQLSATSVLYYXXXXXXXXXLRKHRTLEDHL

SEQ ID NO: 7249 - protein, 44 aa, Artificial Sequence
  Non-cyclic GFR-binding peptide
  MOD_RES (6)..(7)..(41)..(43): Xaa is C or S
  MOD_RES (21)..(22)..(23)..(24)..(25): Xaa is A or G
  MOD_RES (26)..(27)..(28)..(29): Xaa is A or G or absent
TVPKPXXAPTQLSAISVLYLXXXXXXXXXLKNYQNMVVRAXGXH

SEQ ID NO: 7250 - protein, 41 aa, Artificial Sequence
  Non-cyclic GFR-binding peptide
  MOD_RES (3)..(4)..(39)..(41): Xaa is C or S
  MOD_RES (18)..(19)..(20)..(21)..(22): Xaa is A or G
  MOD_RES (23)..(24)..(25)..(26): Xaa is A or G or absent
KAXXVPTKLSATSVLYYXXXXXXXXXLRKHREGMSVAEXGX

SEQ ID NO: 7251 - protein, 38 aa, Artificial Sequence
  Non-cyclic GFR-binding peptide
  MOD_RES (3)..(4)..(37): Xaa is C or S
KAXXVPTKLSATSVLYYDDMGVPTLRKHREGMSVAEXG

SEQ ID NO: 7252 - protein, 37 aa, Artificial Sequence
  Non-cyclic GFR-binding peptide
  MOD_RES (2)..(3)..(36): Xaa is C or S
  MOD_RES (17)..(18)..(19)..(20)..(21): Xaa is A or G
  MOD_RES (22)..(23)..(24)..(25): Xaa is A or G or absent
PXXVPQALSPISILYKXXXXXXXXXLKYHYMIVRSXK

SEQ ID NO: 7253 - protein, 39 aa, Artificial Sequence
  Non-cyclic GFR-binding peptide
  MOD_RES (3)..(4)..(38): Xaa is C or S
  MOD_RES (18)..(19)..(20)..(21)..(22): Xaa is A or G
  MOD_RES (23)..(24)..(25)..(26): Xaa is A or G or absent
KAXXVPTELSATSMLYYXXXXXXXXXLRKHRDMVVEGXG

SEQ ID NO: 7254 - protein, 31 aa, Artificial Sequence
  Non-cyclic GFR-binding peptide
  MOD_RES (1)..(1): Xaa is C or S
XVSQDLSATSILYYIGKTPKILRKHRMIVKS

SEQ ID NO: 7255 - protein, 38 aa, Artificial Sequence
  Non-cyclic GFR-binding peptide
  MOD_RES (6)..(38): Xaa is C or S
VTKPTXAPTKLSPISVLYKDDSSNVILKYHYNMVVRSX

SEQ ID NO: 7256 - protein, 35 aa, Artificial Sequence
  Non-cyclic GFR-binding peptide
  MOD_RES (1)..(32)..(34): Xaa is C or S
XVPQDLNAISILYFVGRTPKVLKKYRMVVKSXKXS

SEQ ID NO: 7257 - protein, 35 aa, Artificial Sequence
  Non-cyclic GFR-binding peptide
  MOD_RES (1)..(33)..(35): Xaa is C or S
XVPTELSPISMLYKDEYDKVVLKYHYEMVVEGXGX

SEQ ID NO: 7258 - protein, 35 aa, Artificial Sequence
  Non-cyclic GFR-binding peptide
  MOD_RES (1)..(34): Xaa is C or S
XVPTKLSAISVLYLDDMGVPTLKNYQEGMSVAEXG

SEQ ID NO: 7259 - protein, 37 aa, Artificial Sequence
  Non-cyclic GFR-binding peptide
  MOD_RES (6)..(7): Xaa is C or S
KIPKAXXVPTELSATSMLYYDENEKVVLRKHRDMVVE

SEQ ID NO: 7260 - protein, 41 aa, Artificial Sequence
  Non-cyclic GFR-binding peptide
  MOD_RES (4)..(41): Xaa is C or S
NVQXRPTQVQLSPISVLYKEIVRKKPIFLKYHYTLEDHLAX

SEQ ID NO: 7261 - protein, 41 aa, Artificial Sequence
  Non-cyclic GFR-binding peptide
  MOD_RES (5)..(6)..(38)..(40): Xaa is C or S
IPKAXXVPTELNAISMLYFDEYDKVVLKKYREMVVEGXGXR

SEQ ID NO: 7262 - protein, 39 aa, Artificial Sequence
  Non-cyclic GFR-binding peptide
  MOD_RES (5)..(6): Xaa is C or S
  MOD_RES (20)..(21)..(22)..(23)..(24): Xaa is A or G
  MOD_RES (25)..(26)..(27)..(28): Xaa is A or G or absent
VPKPXXAPTKLSPISVLYKXXXXXXXXXLKYHYNMVVRS

SEQ ID NO: 7263 - protein, 37 aa, Artificial Sequence
  Non-cyclic GFR-binding peptide
  MOD_RES (2)..(3)..(34)..(36): Xaa is C or S
PXXVPQDLSATSILYYVGRTPKVLRKHRMVVKSXKXS

SEQ ID NO: 7264 - protein, 44 aa, Artificial Sequence
  Non-cyclic GFR-binding peptide
  MOD_RES (4)..(41)..(43): Xaa is C or S
NVQXRPTQVQLSATSVLYYEIVRKKPIFLRKHRTLEDHLAXKXE

SEQ ID NO: 7265 - protein, 41 aa, Artificial Sequence
  Non-cyclic GFR-binding peptide
  MOD_RES (4)..(41): Xaa is C or S
  MOD_RES (20)..(21)..(22)..(23)..(24): Xaa is A or G
  MOD_RES (25)..(26)..(27)..(28): Xaa is A or G or absent
NVQXRPTQVQLSPISVLYKXXXXXXXXXLKYHYTLEDHLAX

SEQ ID NO: 7266 - protein, 39 aa, Artificial Sequence
  Non-cyclic GFR-binding peptide
  MOD_RES (7)..(7): Xaa is C or S
  MOD_RES (21)..(22)..(23)..(24)..(25): Xaa is A or G
  MOD_RES (26)..(27)..(28)..(29): Xaa is A or G or absent
HVTKPTXAPTKLSPISVLYKXXXXXXXXXLKYHYNMVVR

SEQ ID NO: 7267 - protein, 37 aa, Artificial Sequence
  Non-cyclic GFR-binding peptide
  MOD_RES (4)..(4): Xaa is C or S
  MOD_RES (18)..(19)..(20)..(21)..(22): Xaa is A or G
  MOD_RES (23)..(24)..(25)..(26): Xaa is A or G or absent
KPTXAPTKLSAISVLYLXXXXXXXXXLKNYQNMVVRS

SEQ ID NO: 7268 - protein, 34 aa, Artificial Sequence
  Non-cyclic GFR-binding peptide
  MOD_RES (1)..(32)..(34): Xaa is C or S
XVSQDLSPISILYKIGKTPKILKYHYMIVKSXKX

SEQ ID NO: 7269 - protein, 36 aa, Artificial Sequence
  Non-cyclic GFR-binding peptide
  MOD_RES (3)..(4)..(35): Xaa is C or S
APXXVPQALSAISILYLVGRKPKVLKNYQMIVRSXK

SEQ ID NO: 7270 - protein, 36 aa, Artificial Sequence
  Non-cyclic GFR-binding peptide
  MOD_RES (1)..(2)..(35): Xaa is C or S
XXVPTKLSAISVLYLDDMGVPTLKNYQEGMSVAEXG

SEQ ID NO: 7271 - protein, 38 aa, Artificial Sequence
  Non-cyclic GFR-binding peptide
  MOD_RES (4)..(4): Xaa is C or S
  MOD_RES (20)..(21)..(22)..(23)..(24): Xaa is A or G
  MOD_RES (25)..(26)..(27)..(28): Xaa is A or G or absent
NVQXRPTQVQLSPISVLYKXXXXXXXXXLKYHYTLEDH

SEQ ID NO: 7272 - protein, 39 aa, Artificial Sequence
  Non-cyclic GFR-binding peptide
  MOD_RES (5)..(5): Xaa is C or S
  MOD_RES (21)..(22)..(23)..(24)..(25): Xaa is A or G
  MOD_RES (26)..(27)..(28)..(29): Xaa is A or G or absent
RNVQXRPTQVQLSPISVLYKXXXXXXXXXLKYHYTLEDH

SEQ ID NO: 7273 - protein, 35 aa, Artificial Sequence
  Non-cyclic GFR-binding peptide
PTQVQLNAISVLYFEIVRKKPIFLKKYRTLEDHLA

SEQ ID NO: 7274 - protein, 42 aa, Artificial Sequence
  Non-cyclic GFR-binding peptide
  MOD_RES (5)..(42): Xaa is C or S
RNVQXRPTQVQLNAISVLYFEIVRKKPIFLKKYRTLEDHLAX

SEQ ID NO: 7275 - protein, 42 aa, Artificial Sequence
  Non-cyclic GFR-binding peptide
  MOD_RES (5)..(6)..(40)..(42): Xaa is C or S
  MOD_RES (20)..(21)..(22)..(23)..(24): Xaa is A or G
  MOD_RES (25)..(26)..(27)..(28): Xaa is A or G or absent
VPKPXXAPTQLSAISVLYLXXXXXXXXXLKNYQNMVVRAXGX

SEQ ID NO: 7276 - protein, 34 aa, Artificial Sequence
  Non-cyclic GFR-binding peptide
  MOD_RES (2)..(3)..(34): Xaa is C or S
PXXVPQDLSAISILYLVGRTPKVLKNYQMVVKSX

SEQ ID NO: 7277 - protein, 40 aa, Artificial Sequence
  Non-cyclic GFR-binding peptide
  MOD_RES (5)..(5): Xaa is C or S
  MOD_RES (21)..(22)..(23)..(24)..(25): Xaa is A or G
  MOD_RES (26)..(27)..(28)..(29): Xaa is A or G or absent
RNVQXRPTQVQLSATSVLYYXXXXXXXXXLRKHRTLEDHL

SEQ ID NO: 7278 - protein, 42 aa, Artificial Sequence
  Non-cyclic GFR-binding peptide
  MOD_RES (5)..(6)..(39)..(41): Xaa is C or S
VGKAXXVPTKLNAISVLYFDDMGVPTLKKYREGMSVAEXGXR

SEQ ID NO: 7279 - protein, 39 aa, Artificial Sequence
  Non-cyclic GFR-binding peptide
  MOD_RES (3)..(4)..(38): Xaa is C or S
  MOD_RES (18)..(19)..(20)..(21)..(22): Xaa is A or G
  MOD_RES (23)..(24)..(25)..(26): Xaa is A or G or absent
KPXXAPTQLSAISVLYLXXXXXXXXXLKNYQNMVVRAXG

SEQ ID NO: 7280 - protein, 36 aa, Artificial Sequence
  Non-cyclic GFR-binding peptide
  MOD_RES (2)..(36): Xaa is C or S
  MOD_RES (16)..(17)..(18)..(19)..(20): Xaa is A or G
  MOD_RES (21)..(22)..(23)..(24): Xaa is A or G or absent
TXAPTKLSPISVLYKXXXXXXXXXLKYHYNMVVRSX

SEQ ID NO: 7281 - protein, 34 aa, Artificial Sequence
  Non-cyclic GFR-binding peptide
  MOD_RES (34)..(34): Xaa is C or S
  MOD_RES (14)..(15)..(16)..(17)..(18): Xaa is A or G
  MOD_RES (19)..(20)..(21)..(22): Xaa is A or G or absent
VPTELNAISMLYFXXXXXXXXXLKKYREMVVEGX

SEQ ID NO: 7282 - protein, 39 aa, Artificial Sequence
  Non-cyclic GFR-binding peptide
  MOD_RES (7)..(39): Xaa is C or S
HVTKPTXAPTKLSAISVLYLDDSSNVILKNYQNMVVRSX

SEQ ID NO: 7283 - protein, 37 aa, Artificial Sequence
  Non-cyclic GFR-binding peptide
  MOD_RES (2)..(34)..(36): Xaa is C or S
TXAPTKLSATSVLYYDDSSNVILRKHRNMVVRSXGXH

SEQ ID NO: 7284 - protein, 40 aa, Artificial Sequence
  Non-cyclic GFR-binding peptide
  MOD_RES (7)..(7): Xaa is C or S
  MOD_RES (21)..(22)..(23)..(24)..(25): Xaa is A or G
  MOD_RES (26)..(27)..(28)..(29): Xaa is A or G or absent
HVTKPTXAPTKLSAISVLYLXXXXXXXXXLKNYQNMVVRS

SEQ ID NO: 7285 - protein, 33 aa, Artificial Sequence
  Non-cyclic GFR-binding peptide
  MOD_RES (3)..(3): Xaa is C or S
PTXAPTKLSPISVLYKDDSSNVILKYHYNMVVR

SEQ ID NO: 7286 - protein, 44 aa, Artificial Sequence
  Non-cyclic GFR-binding peptide
  MOD_RES (6)..(7)..(41)..(43): Xaa is C or S
  MOD_RES (21)..(22)..(23)..(24)..(25): Xaa is A or G
  MOD_RES (26)..(27)..(28)..(29): Xaa is A or G or absent
YVPKPXXAPTKLSPISVLYKXXXXXXXXXLKYHYNMVVRSXGXH

SEQ ID NO: 7287 - protein, 39 aa, Artificial Sequence
  Non-cyclic GFR-binding peptide
  MOD_RES (6)..(7)..(38): Xaa is C or S
ASAAPXXVPQALSAISILYLVGRKPKVLKNYQMIVRSXK

SEQ ID NO: 7288 - protein, 35 aa, Artificial Sequence
  Non-cyclic GFR-binding peptide
  MOD_RES (1)..(2)..(33)..(35): Xaa is C or S
XXVPQALSATSILYYVGRKPKVLRKHRMIVRSXKX

SEQ ID NO: 7289 - protein, 44 aa, Artificial Sequence
  Non-cyclic GFR-binding peptide
  MOD_RES (6)..(7)..(41)..(43): Xaa is C or S
  MOD_RES (21)..(22)..(23)..(24)..(25): Xaa is A or G
  MOD_RES (26)..(27)..(28)..(29): Xaa is A or G or absent
YVPKPXXAPTKLSATSVLYYXXXXXXXXXLRKHRNMVVRSXGXH

SEQ ID NO: 7290 - protein, 37 aa, Artificial Sequence
  Non-cyclic GFR-binding peptide
  MOD_RES (1)..(35)..(37): Xaa is C or S
  MOD_RES (15)..(16)..(17)..(18)..(19): Xaa is A or G
  MOD_RES (20)..(21)..(22)..(23): Xaa is A or G or absent
XAPTQLSAISVLYLXXXXXXXXXLKNYQNMVVRAXGX

SEQ ID NO: 7291 - protein, 38 aa, Artificial Sequence
  Non-cyclic GFR-binding peptide
  MOD_RES (3)..(3): Xaa is C or S
  MOD_RES (19)..(20)..(21)..(22)..(23): Xaa is A or G
  MOD_RES (24)..(25)..(26)..(27): Xaa is A or G or absent
VQXRPTQVQLNAISVLYFXXXXXXXXXLKKYRTLEDHL

SEQ ID NO: 7292 - protein, 43 aa, Artificial Sequence
  Non-cyclic GFR-binding peptide
  MOD_RES (6)..(7)..(41)..(43): Xaa is C or S
  MOD_RES (21)..(22)..(23)..(24)..(25): Xaa is A or G
  MOD_RES (26)..(27)..(28)..(29): Xaa is A or G or absent
SIPKAXXVPTELSPISMLYKXXXXXXXXXLKYHYEMVVEGXGX

SEQ ID NO: 7293 - protein, 40 aa, Artificial Sequence
  Non-cyclic GFR-binding peptide
  MOD_RES (2)..(39): Xaa is C or S
  MOD_RES (18)..(19)..(20)..(21)..(22): Xaa is A or G
  MOD_RES (23)..(24)..(25)..(26): Xaa is A or G or absent
QXRPTQVQLSPISVLYKXXXXXXXXXLKYHYTLEDHLAXK

SEQ ID NO: 7294 - protein, 40 aa, Artificial Sequence
  Non-cyclic GFR-binding peptide
  MOD_RES (5)..(6)..(39): Xaa is C or S
  MOD_RES (20)..(21)..(22)..(23)..(24): Xaa is A or G
  MOD_RES (25)..(26)..(27)..(28): Xaa is A or G or absent
SASPXXVPQDLSPISILYKXXXXXXXXXLKYHYMVVKSXK

SEQ ID NO: 7295 - protein, 40 aa, Artificial Sequence
  Non-cyclic GFR-binding peptide
  MOD_RES (4)..(5)..(37)..(39): Xaa is C or S
PKAXXAPTKLSAISVLYLDSSNNVILKNYQNMVVKAXGXH

SEQ ID NO: 7296 - protein, 37 aa, Artificial Sequence
  Non-cyclic GFR-binding peptide
  MOD_RES (3)..(4): Xaa is C or S
  MOD_RES (18)..(19)..(20)..(21)..(22): Xaa is A or G
  MOD_RES (23)..(24)..(25)..(26): Xaa is A or G or absent
KPXXAPTQLSPISVLYKXXXXXXXXXLKYHYNMVVRA

SEQ ID NO: 7297 - protein, 38 aa, Artificial Sequence
  Non-cyclic GFR-binding peptide
  MOD_RES (5)..(6): Xaa is C or S
  MOD_RES (20)..(21)..(22)..(23)..(24): Xaa is A or G
  MOD_RES (25)..(26)..(27)..(28): Xaa is A or G or absent
IPKAXXVPTELNAISMLYFXXXXXXXXXLKKYREMVVE

SEQ ID NO: 7298 - protein, 33 aa, Artificial Sequence
  Non-cyclic GFR-binding peptide
  MOD_RES (1)..(32): Xaa is C or S
XVPQDLNAISILYFVGRTPKVLKKYRMVVKSXK

SEQ ID NO: 7299 - protein, 39 aa, Artificial Sequence
  Non-cyclic GFR-binding peptide
  MOD_RES (1)..(2)..(36)..(38): Xaa is C or S
  MOD_RES (16)..(17)..(18)..(19)..(20): Xaa is A or G
  MOD_RES (21)..(22)..(23)..(24): Xaa is A or G or absent
XXVPTELNAISMLYFXXXXXXXXXLKKYREMVVEGXGXR

SEQ ID NO: 7300 - protein, 33 aa, Artificial Sequence
  Non-cyclic GFR-binding peptide
  MOD_RES (1)..(32): Xaa is C or S
XVSQDLNAISILYFIGKTPKILKKYRMIVKSXK

SEQ ID NO: 7301 - protein, 37 aa, Artificial Sequence
  Non-cyclic GFR-binding peptide
  MOD_RES (1)..(2)..(36): Xaa is C or S
  MOD_RES (16)..(17)..(18)..(19)..(20): Xaa is A or G
  MOD_RES (21)..(22)..(23)..(24): Xaa is A or G or absent
XXVPTELNAISMLYFXXXXXXXXXLKKYREMVVEGXG

SEQ ID NO: 7302 - protein, 36 aa, Artificial Sequence
  Non-cyclic GFR-binding peptide
  MOD_RES (3)..(4)..(35): Xaa is C or S
SPXXVPQDLSATSILYYVGRTPKVLRKHRMVVKSXK

SEQ ID NO: 7303 - protein, 40 aa, Artificial Sequence
  Non-cyclic GFR-binding peptide
  MOD_RES (7)..(39): Xaa is C or S
HVTKPTXAPTKLSPISVLYKDDSSNVILKYHYNMVVRSXG

SEQ ID NO: 7304 - protein, 36 aa, Artificial Sequence
  Non-cyclic GFR-binding peptide
  MOD_RES (2)..(3): Xaa is C or S
  MOD_RES (17)..(18)..(19)..(20)..(21): Xaa is A or G
  MOD_RES (22)..(23)..(24)..(25): Xaa is A or G or absent
AXXVPTELSPISMLYKXXXXXXXXXLKYHYDMVVEG

SEQ ID NO: 7305 - protein, 38 aa, Artificial Sequence
  Non-cyclic GFR-binding peptide
  MOD_RES (3)..(4)..(38): Xaa is C or S
  MOD_RES (18)..(19)..(20)..(21)..(22): Xaa is A or G
  MOD_RES (23)..(24)..(25)..(26): Xaa is A or G or absent
KPXXAPTKLSAISVLYLXXXXXXXXXLKNYQNMVVRSX

SEQ ID NO: 7306 - protein, 36 aa, Artificial Sequence
  Non-cyclic GFR-binding peptide
  MOD_RES (1)..(2)..(33)..(35): Xaa is C or S
XXVPQDLSAISILYLVGRTPKVLKNYQMVVKSXKXS

SEQ ID NO: 7307 - protein, 40 aa, Artificial Sequence
  Non-cyclic GFR-binding peptide
  MOD_RES (4)..(5)..(37)..(39): Xaa is C or S
PKAXXVPTELNAISMLYFDEYDKVVLKKYREMVVEGXGXR

SEQ ID NO: 7308 - protein, 40 aa, Artificial Sequence
  Non-cyclic GFR-binding peptide
  MOD_RES (5)..(6)..(39): Xaa is C or S
VGKAXXVPTKLSATSVLYYDDMGVPTLRKHREGMSVAEXG

SEQ ID NO: 7309 - protein, 32 aa, Artificial Sequence
  Non-cyclic GFR-binding peptide
  MOD_RES (1)..(2): Xaa is C or S
XXVPTELNAISMLYFDEYDKVVLKKYREMVVE

SEQ ID NO: 7310 - protein, 36 aa, Artificial Sequence
  Non-cyclic GFR-binding peptide
  MOD_RES (2)..(2): Xaa is C or S
  MOD_RES (18)..(19)..(20)..(21)..(22): Xaa is A or G
  MOD_RES (23)..(24)..(25)..(26): Xaa is A or G or absent
QXRPTQVQLNAISVLYFXXXXXXXXXLKKYRTLEDH

SEQ ID NO: 7311 - protein, 33 aa, Artificial Sequence
  Non-cyclic GFR-binding peptide
  MOD_RES (1)..(1): Xaa is C or S
  MOD_RES (15)..(16)..(17)..(18)..(19): Xaa is A or G
  MOD_RES (20)..(21)..(22)..(23): Xaa is A or G or absent
XVSQDLSAISILYLXXXXXXXXXLKNYQMIVKS

SEQ ID NO: 7312 - protein, 41 aa, Artificial Sequence
  Non-cyclic GFR-binding peptide
  MOD_RES (6)..(7)..(41): Xaa is C or S
  MOD_RES (21)..(22)..(23)..(24)..(25): Xaa is A or G
  MOD_RES (26)..(27)..(28)..(29): Xaa is A or G or absent
TVPKPXXAPTQLSPISVLYKXXXXXXXXXLKYHYNMVVRAX

SEQ ID NO: 7313 - protein, 36 aa, Artificial Sequence
  Non-cyclic GFR-binding peptide
  MOD_RES (2)..(3)..(36): Xaa is C or S
AXXVPTKLSATSVLYYDDMGVPTLRKHREGMSVAEX

SEQ ID NO: 7314 - protein, 32 aa, Artificial Sequence
  Non-cyclic GFR-binding peptide
  MOD_RES (32)..(32): Xaa is C or S
VPTELNAISMLYFDEYDKVVLKKYREMVVEGX

SEQ ID NO: 7315 - protein, 30 aa, Artificial Sequence; identical to SEQ ID NO: 849
  Non-cyclic GFR-binding peptide

SEQ ID NO: 7316 - protein, 39 aa, Artificial Sequence
  Non-cyclic GFR-binding peptide
  MOD_RES (6)..(7)..(38): Xaa is C or S
ASASPXXVPQDLSATSILYYVGRTPKVLRKHRMVVKSXK

SEQ ID NO: 7317 - protein, 38 aa, Artificial Sequence
  Non-cyclic GFR-binding peptide
  MOD_RES (3)..(4)..(36)..(38): Xaa is C or S
KAXXVPTELSPISMLYKDENEKVVLKYHYDMVVEGXGX

SEQ ID NO: 7318 - protein, 41 aa, Artificial Sequence
  Non-cyclic GFR-binding peptide
  MOD_RES (7)..(41): Xaa is C or S
  MOD_RES (21)..(22)..(23)..(24)..(25): Xaa is A or G
  MOD_RES (26)..(27)..(28)..(29): Xaa is A or G or absent
HVTKPTXAPTKLSPISVLYKXXXXXXXXXLKYHYNMVVRSX

SEQ ID NO: 7319 - protein, 36 aa, Artificial Sequence
  Non-cyclic GFR-binding peptide
  MOD_RES (1)..(2)..(34)..(36): Xaa is C or S
XXAPTKLSATSVLYYDDSSNVILRKHRNMVVRSXGX

SEQ ID NO: 7320 - protein, 36 aa, Artificial Sequence
  Non-cyclic GFR-binding peptide
  MOD_RES (1)..(35): Xaa is C or S
  MOD_RES (15)..(16)..(17)..(18)..(19): Xaa is A or G
  MOD_RES (20)..(21)..(22)..(23): Xaa is A or G or absent
XAPTKLNAISVLYFXXXXXXXXXLKKYRNMVVKAXG

SEQ ID NO: 7321 - protein, 38 aa, Artificial Sequence
  Non-cyclic GFR-binding peptide
  MOD_RES (4)..(38): Xaa is C or S
  MOD_RES (18)..(19)..(20)..(21)..(22): Xaa is A or G
  MOD_RES (23)..(24)..(25)..(26): Xaa is A or G or absent
KPTXAPTKLSPISVLYKXXXXXXXXXLKYHYNMVVRSX

SEQ ID NO: 7322 - protein, 38 aa, Artificial Sequence
  Non-cyclic GFR-binding peptide
  MOD_RES (5)..(6): Xaa is C or S
  MOD_RES (20)..(21)..(22)..(23)..(24): Xaa is A or G
  MOD_RES (25)..(26)..(27)..(28): Xaa is A or G or absent
VPKPXXAPTKLSAISVLYLXXXXXXXXXLKNYQNMVVR

SEQ ID NO: 7323 - protein, 34 aa, Artificial Sequence
  Non-cyclic GFR-binding peptide
  MOD_RES (1)..(33): Xaa is C or S
XAPTQLSATSVLYYDDSSNVILRKHRNMVVRAXG

SEQ ID NO: 7324 - protein, 38 aa, Artificial Sequence
  Non-cyclic GFR-binding peptide
  MOD_RES (4)..(5)..(37): Xaa is C or S
PKAXXAPTKLNAISVLYFDSSNNVILKKYRNMVVKAXG

SEQ ID NO: 7325 - protein, 37 aa, Artificial Sequence
  Non-cyclic GFR-binding peptide
  MOD_RES (6)..(7): Xaa is C or S
AVPKAXXAPTKLSPISVLYKDSSNNVILKYHYNMVVK

SEQ ID NO: 7326 - protein, 33 aa, Artificial Sequence
  Non-cyclic GFR-binding peptide
  MOD_RES (2)..(3): Xaa is C or S
PXXVPQALSPISILYKVGRKPKVLKYHYMIVRS

SEQ ID NO: 7327 - protein, 35 aa, Artificial Sequence
  Non-cyclic GFR-binding peptide
  MOD_RES (4)..(5): Xaa is C or S
AAPXXVPQALSATSILYYVGRKPKVLRKHRMIVRS

SEQ ID NO: 7328 - protein, 38 aa, Artificial Sequence
  Non-cyclic GFR-binding peptide
  MOD_RES (2)..(3)..(36)..(38): Xaa is C or S
  MOD_RES (17)..(18)..(19)..(20)..(21): Xaa is A or G
  MOD_RES (22)..(23)..(24)..(25): Xaa is A or G or absent
PXXVPQDLSPISILYKXXXXXXXXXLKYHYMVVKSXKX

SEQ ID NO: 7329 - protein, 37 aa, Artificial Sequence
  Non-cyclic GFR-binding peptide
  MOD_RES (2)..(3)..(34)..(36): Xaa is C or S
PXXVSQDLSPISILYKIGKTPKILKYHYMIVKSXKXS

SEQ ID NO: 7330 - protein, 36 aa, Artificial Sequence
  Non-cyclic GFR-binding peptide
  MOD_RES (1)..(35): Xaa is C or S
  MOD_RES (15)..(16)..(17)..(18)..(19): Xaa is A or G
  MOD_RES (20)..(21)..(22)..(23): Xaa is A or G or absent
XAPTKLSAISVLYLXXXXXXXXXLKNYQNMVVRSXG

SEQ ID NO: 7331 - protein, 35 aa, Artificial Sequence
  Non-cyclic GFR-binding peptide
  MOD_RES (16)..(17)..(18)..(19)..(20): Xaa is A or G
  MOD_RES (21)..(22)..(23)..(24): Xaa is A or G or absent
RPTQVQLSPISVLYKXXXXXXXXXLKYHYTLEDHL

SEQ ID NO: 7332 - protein, 39 aa, Artificial Sequence
  Non-cyclic GFR-binding peptide
  MOD_RES (2)..(39): Xaa is C or S
  MOD_RES (18)..(19)..(20)..(21)..(22): Xaa is A or G
  MOD_RES (23)..(24)..(25)..(26): Xaa is A or G or absent
QXRPTQVQLSPISVLYKXXXXXXXXXLKYHYTLEDHLAX

SEQ ID NO: 7333 - protein, 33 aa, Artificial Sequence
  Non-cyclic GFR-binding peptide
  MOD_RES (33)..(33): Xaa is C or S
  MOD_RES (14)..(15)..(16)..(17)..(18): Xaa is A or G
  MOD_RES (19)..(20)..(21)..(22): Xaa is A or G or absent
VPQDLNAISILYFXXXXXXXXXLKKYRMVVKSX

SEQ ID NO: 7334 - protein, 39 aa, Artificial Sequence
  Non-cyclic GFR-binding peptide
  MOD_RES (1)..(38): Xaa is C or S
XRPTQVQLSATSVLYYEIVRKKPIFLRKHRTLEDHLAXK

SEQ ID NO: 7335 - protein, 34 aa, Artificial Sequence
  Non-cyclic GFR-binding peptide
  MOD_RES (1)..(34): Xaa is C or S
  MOD_RES (15)..(16)..(17)..(18)..(19): Xaa is A or G
  MOD_RES (20)..(21)..(22)..(23): Xaa is A or G or absent
XVSQDLNAISILYFXXXXXXXXXLKKYRMIVKSX

SEQ ID NO: 7336 - protein, 36 aa, Artificial Sequence
  Non-cyclic GFR-binding peptide
  MOD_RES (4)..(5): Xaa is C or S
PKAXXVPTELSPISMLYKDEYDKVVLKYHYEMVVEG

SEQ ID NO: 7337 - protein, 39 aa, Artificial Sequence
  Non-cyclic GFR-binding peptide
  MOD_RES (6)..(7)..(38): Xaa is C or S
ASASPXXVSQDLSATSILYYIGKTPKILRKHRMIVKSXK

SEQ ID NO: 7338 - protein, 37 aa, Artificial Sequence
  Non-cyclic GFR-binding peptide
  MOD_RES (1)..(1): Xaa is C or S
XRPTQVQLSATSVLYYEIVRKKPIFLRKHRTLEDHLA

SEQ ID NO: 7339 - protein, 36 aa, Artificial Sequence
  Non-cyclic GFR-binding peptide
  MOD_RES (2)..(3)..(35): Xaa is C or S
AXXVPTELSPISMLYKDEYDKVVLKYHYEMVVEGXG

SEQ ID NO: 7340 - protein, 42 aa, Artificial Sequence
  Non-cyclic GFR-binding peptide
  MOD_RES (2)..(39)..(41): Xaa is C or S
  MOD_RES (18)..(19)..(20)..(21)..(22): Xaa is A or G
  MOD_RES (23)..(24)..(25)..(26): Xaa is A or G or absent
QXRPTQVQLNAISVLYFXXXXXXXXXLKKYRTLEDHLAXKXE

SEQ ID NO: 7341 - protein, 36 aa, Artificial Sequence
  Non-cyclic GFR-binding peptide
  MOD_RES (4)..(5)..(36): Xaa is C or S
ASPXXVSQDLSPISILYKIGKTPKILKYHYMIVKSX

SEQ ID NO: 7342 - protein, 37 aa, Artificial Sequence
  Non-cyclic GFR-binding peptide
  MOD_RES (1)..(35)..(37): Xaa is C or S
  MOD_RES (15)..(16)..(17)..(18)..(19): Xaa is A or G
  MOD_RES (20)..(21)..(22)..(23): Xaa is A or G or absent
XVPTELSATSMLYYXXXXXXXXXLRKHREMVVEGXGX

SEQ ID NO: 7343 - protein, 32 aa, Artificial Sequence
  Non-cyclic GFR-binding peptide
  MOD_RES (14)..(15)..(16)..(17)..(18): Xaa is A or G
  MOD_RES (19)..(20)..(21)..(22): Xaa is A or G or absent
VPQDLSAISILYLXXXXXXXXXLKNYQMVVKS

SEQ ID NO: 7344 - protein, 40 aa, Artificial Sequence
  Non-cyclic GFR-binding peptide
  MOD_RES (3)..(4)..(37)..(39): Xaa is C or S
  MOD_RES (18)..(19)..(20)..(21)..(22): Xaa is A or G
  MOD_RES (23)..(24)..(25)..(26): Xaa is A or G or absent
SPXXVPQDLSPISILYKXXXXXXXXXLKYHYMVVKSXKXS

SEQ ID NO: 7345 - protein, 35 aa, Artificial Sequence
  Non-cyclic GFR-binding peptide
  MOD_RES (1)..(1): Xaa is C or S
XRPTQVQLNAISVLYFEIVRKKPIFLKKYRTLEDH

SEQ ID NO: 7346 - protein, 39 aa, Artificial Sequence
  Non-cyclic GFR-binding peptide
  MOD_RES (2)..(3)..(37)..(39): Xaa is C or S
  MOD_RES (17)..(18)..(19)..(20)..(21): Xaa is A or G
  MOD_RES (22)..(23)..(24)..(25): Xaa is A or G or absent
PXXAPTQLSAISVLYLXXXXXXXXXLKNYQNMVVRAXGX

SEQ ID NO: 7347 - protein, 34 aa, Artificial Sequence
  Non-cyclic GFR-binding peptide
  MOD_RES (2)..(3)..(34): Xaa is C or S
PXXVPQDLNAISILYFVGRTPKVLKKYRMVVKSX

SEQ ID NO: 7348 - protein, 38 aa, Artificial Sequence
  Non-cyclic GFR-binding peptide
  MOD_RES (2)..(2): Xaa is C or S
QXRPTQVQLSAISVLYLEIVRKKPIFLKNYQTLEDHLA

SEQ ID NO: 7349 - protein, 37 aa, Artificial Sequence
  Non-cyclic GFR-binding peptide
  MOD_RES (1)..(2)..(34)..(36): Xaa is C or S
XXAPTKLSPISVLYKDSSNNVILKYHYNMVVKAXGXH

SEQ ID NO: 7350 - protein, 33 aa, Artificial Sequence
  Non-cyclic GFR-binding peptide
  MOD_RES (33)..(33): Xaa is C or S
VPTKLSAISVLYLDDMGVPTLKNYQEGMSVAEX

SEQ ID NO: 7351 - protein, 37 aa, Artificial Sequence
  Non-cyclic GFR-binding peptide
  MOD_RES (1)..(2)..(34)..(36): Xaa is C or S
XXVPTELSATSMLYYDENEKVVLRKHRDMVVEGXGXR

SEQ ID NO: 7352 - protein, 37 aa, Artificial Sequence
  Non-cyclic GFR-binding peptide
  MOD_RES (34)..(36): Xaa is C or S
  MOD_RES (14)..(15)..(16)..(17)..(18): Xaa is A or G
  MOD_RES (19)..(20)..(21)..(22): Xaa is A or G or absent
VPTELNAISMLYFXXXXXXXXXLKKYRDMVVEGXGXR

SEQ ID NO: 7353 - protein, 42 aa, Artificial Sequence
  Non-cyclic GFR-binding peptide
  MOD_RES (4)..(5)..(39)..(41): Xaa is C or S
  MOD_RES (19)..(20)..(21)..(22)..(23): Xaa is A or G
  MOD_RES (24)..(25)..(26)..(27): Xaa is A or G or absent
PKAXXVPTELNAISMLYFXXXXXXXXXLKKYRDMVVEGXGXR

SEQ ID NO: 7354 - protein, 42 aa, Artificial Sequence
  Non-cyclic GFR-binding peptide
  MOD_RES (6)..(7)..(41): Xaa is C or S
  MOD_RES (21)..(22)..(23)..(24)..(25): Xaa is A or G
  MOD_RES (26)..(27)..(28)..(29): Xaa is A or G or absent
KIPKAXXVPTELNAISMLYFXXXXXXXXXLKKYRDMVVEGXG

SEQ ID NO: 7355 - protein, 35 aa, Artificial Sequence
  Non-cyclic GFR-binding peptide
  MOD_RES (4)..(5): Xaa is C or S
ASPXXVPQDLSPISILYKVGRTPKVLKYHYMVVKS

SEQ ID NO: 7356 - protein, 32 aa, Artificial Sequence
  Non-cyclic GFR-binding peptide
  MOD_RES (1)..(1): Xaa is C or S
XAPTQLSPISVLYKDDSSNVILKYHYNMVVRA

SEQ ID NO: 7357 - protein, 40 aa, Artificial Sequence
  Non-cyclic GFR-binding peptide
  MOD_RES (5)..(6)..(38)..(40): Xaa is C or S
VPKPXXAPTKLSPISVLYKDDSSNVILKYHYNMVVRSXGX

SEQ ID NO: 7358 - protein, 38 aa, Artificial Sequence
  Non-cyclic GFR-binding peptide
  MOD_RES (2)..(2): Xaa is C or S
QXRPTQVQLSATSVLYYEIVRKKPIFLRKHRTLEDHLA

SEQ ID NO: 7359 - protein, 36 aa, Artificial Sequence
  Non-cyclic GFR-binding peptide
  MOD_RES (16)..(17)..(18)..(19)..(20): Xaa is A or G
  MOD_RES (21)..(22)..(23)..(24): Xaa is A or G or absent
RPTQVQLSPISVLYKXXXXXXXXXLKYHYTLEDHLA

SEQ ID NO: 7360 - protein, 39 aa, Artificial Sequence
  Non-cyclic GFR-binding peptide
  MOD_RES (4)..(5)..(38): Xaa is C or S
GKAXXVPTKLSAISVLYLDDMGVPTLKNYQEGMSVAEXG

SEQ ID NO: 7361 - protein, 39 aa, Artificial Sequence
  Non-cyclic GFR-binding peptide
  MOD_RES (4)..(38): Xaa is C or S
  MOD_RES (18)..(19)..(20)..(21)..(22): Xaa is A or G
  MOD_RES (23)..(24)..(25)..(26): Xaa is A or G or absent
KPTXAPTKLSAISVLYLXXXXXXXXXLKNYQNMVVRSXG

SEQ ID NO: 7362 - protein, 35 aa, Artificial Sequence
  Non-cyclic GFR-binding peptide
  MOD_RES (1)..(1): Xaa is C or S
  MOD_RES (15)..(16)..(17)..(18)..(19): Xaa is A or G
  MOD_RES (20)..(21)..(22)..(23): Xaa is A or G or absent
XVPTKLNAISVLYFXXXXXXXXXLKKYREGMSVAE

SEQ ID NO: 7363 - protein, 36 aa, Artificial Sequence
  Non-cyclic GFR-binding peptide
  MOD_RES (3)..(35): Xaa is C or S
PTXAPTKLSAISVLYLDDSSNVILKNYQNMVVRSXG

SEQ ID NO: 7364 - protein, 37 aa, Artificial Sequence
  Non-cyclic GFR-binding peptide
  MOD_RES (1)..(1): Xaa is C or S
XRPTQVQLSAISVLYLEIVRKKPIFLKNYQTLEDHLA

SEQ ID NO: 7365 - protein, 39 aa, Artificial Sequence
  Non-cyclic GFR-binding peptide
  MOD_RES (6)..(7)..(39): Xaa is C or S
AVPKAXXAPTKLSAISVLYLDSSNNVILKNYQNMVVKAX

SEQ ID NO: 7366 - protein, 39 aa, Artificial Sequence
  Non-cyclic GFR-binding peptide
  MOD_RES (3)..(4)..(37)..(39): Xaa is C or S
KAXXVPTKLSATSVLYYDDMGVPTLRKHREGMSVAEXGX

SEQ ID NO: 7367 - protein, 39 aa, Artificial Sequence
  Non-cyclic GFR-binding peptide
  MOD_RES (4)..(5)..(36)..(38): Xaa is C or S
ASPXXVSQDLSATSILYYIGKTPKILRKHRMIVKSXKXS

SEQ ID NO: 7368 - protein, 35 aa, Artificial Sequence
  Non-cyclic GFR-binding peptide
  MOD_RES (33)..(35): Xaa is C or S
  MOD_RES (14)..(15)..(16)..(17)..(18): Xaa is A or G
  MOD_RES (19)..(20)..(21)..(22): Xaa is A or G or absent
VPQDLSAISILYLXXXXXXXXXLKNYQMVVKSXKX

SEQ ID NO: 7369 - protein, 37 aa, Artificial Sequence
  Non-cyclic GFR-binding peptide
  MOD_RES (1)..(35)..(37): Xaa is C or S
  MOD_RES (15)..(16)..(17)..(18)..(19): Xaa is A or G
  MOD_RES (20)..(21)..(22)..(23): Xaa is A or G or absent
XVPTELSATSMLYYXXXXXXXXXLRKHRDMVVEGXGX

SEQ ID NO: 7370 - protein, 40 aa, Artificial Sequence
  Non-cyclic GFR-binding peptide
  MOD_RES (3)..(4)..(37)..(39): Xaa is C or S
  MOD_RES (18)..(19)..(20)..(21)..(22): Xaa is A or G
  MOD_RES (23)..(24)..(25)..(26): Xaa is A or G or absent
SPXXVSQDLSATSILYYXXXXXXXXXLRKHRMIVKSXKXS

SEQ ID NO: 7371 - protein, 40 aa, Artificial Sequence
  Non-cyclic GFR-binding peptide
  MOD_RES (2)..(3)..(37)..(39): Xaa is C or S
  MOD_RES (17)..(18)..(19)..(20)..(21): Xaa is A or G
  MOD_RES (22)..(23)..(24)..(25): Xaa is A or G or absent
AXXAPTKLSAISVLYLXXXXXXXXXLKNYQNMVVKAXGXH

SEQ ID NO: 7372 - protein, 36 aa, Artificial Sequence
  Non-cyclic GFR-binding peptide
  MOD_RES (33)..(35): Xaa is C or S
  MOD_RES (14)..(15)..(16)..(17)..(18): Xaa is A or G
  MOD_RES (19)..(20)..(21)..(22): Xaa is A or G or absent
VPQALNAISILYFXXXXXXXXXLKKYRMIVRSXKXS

SEQ ID NO: 7373 - protein, 42 aa, Artificial Sequence
  Non-cyclic GFR-binding peptide
  MOD_RES (5)..(39)..(41): Xaa is C or S
  MOD_RES (19)..(20)..(21)..(22)..(23): Xaa is A or G
  MOD_RES (24)..(25)..(26)..(27): Xaa is A or G or absent
TKPTXAPTKLSAISVLYLXXXXXXXXXLKNYQNMVVRSXGXH

SEQ ID NO: 7374 - protein, 42 aa, Artificial Sequence
  Non-cyclic GFR-binding peptide
  MOD_RES (4)..(5)..(39)..(41): Xaa is C or S
  MOD_RES (19)..(20)..(21)..(22)..(23): Xaa is A or G
  MOD_RES (24)..(25)..(26)..(27): Xaa is A or G or absent
PKAXXVPTELNAISMLYFXXXXXXXXXLKKYREMVVEGXGXR

SEQ ID NO: 7375 - protein, 33 aa, Artificial Sequence
  Non-cyclic GFR-binding peptide
  MOD_RES (1)..(2): Xaa is C or S
XXAPTKLSAISVLYLDSSNNVILKNYQNMVVKA

SEQ ID NO: 7376 - protein, 33 aa, Artificial Sequence
  Non-cyclic GFR-binding peptide
  MOD_RES (31)..(33): Xaa is C or S
VPQDLSAISILYLVGRTPKVLKNYQMVVKSXKX

SEQ ID NO: 7377 - protein, 34 aa, Artificial Sequence
  Non-cyclic GFR-binding peptide
PTQVQLSAISVLYLEIVRKKPIFLKNYQTLEDHL

SEQ ID NO: 7378 - protein, 37 aa, Artificial Sequence
  Non-cyclic GFR-binding peptide
  MOD_RES (3)..(3): Xaa is C or S
VQXRPTQVQLNAISVLYFEIVRKKPIFLKKYRTLEDH

SEQ ID NO: 7379 - protein, 33 aa, Artificial Sequence
  Non-cyclic GFR-binding peptide
  MOD_RES (1)..(2): Xaa is C or S
XXAPTKLSPISVLYKDDSSNVILKYHYNMVVRS

SEQ ID NO: 7380 - protein, 38 aa, Artificial Sequence
  Non-cyclic GFR-binding peptide
  MOD_RES (5)..(6): Xaa is C or S
  MOD_RES (20)..(21)..(22)..(23)..(24): Xaa is A or G
  MOD_RES (25)..(26)..(27)..(28): Xaa is A or G or absent
SAAPXXVPQALSAISILYLXXXXXXXXXLKNYQMIVRS

SEQ ID NO: 7381 - protein, 35 aa, Artificial Sequence
  Non-cyclic GFR-binding peptide
  MOD_RES (2)..(3)..(34): Xaa is C or S
PXXVPQDLSATSILYYVGRTPKVLRKHRMVVKSXK

SEQ ID NO: 7382 - protein, 40 aa, Artificial Sequence
  Non-cyclic GFR-binding peptide
  MOD_RES (6)..(7): Xaa is C or S
  MOD_RES (21)..(22)..(23)..(24)..(25): Xaa is A or G
  MOD_RES (26)..(27)..(28)..(29): Xaa is A or G or absent
AVPKAXXAPTKLSPISVLYKXXXXXXXXXLKYHYNMVVKA

SEQ ID NO: 7383 - protein, 41 aa, Artificial Sequence
  Non-cyclic GFR-binding peptide
  MOD_RES (5)..(6)..(38)..(40): Xaa is C or S
VPKPXXAPTQLSATSVLYYDDSSNVILRKHRNMVVRAXGXH

SEQ ID NO: 7384 - protein, 33 aa, Artificial Sequence
  Non-cyclic GFR-binding peptide
  MOD_RES (1)..(33): Xaa is C or S
XAPTKLSPISVLYKDDSSNVILKYHYNMVVRSX

SEQ ID NO: 7385 - protein, 38 aa, Artificial Sequence
  Non-cyclic GFR-binding peptide
  MOD_RES (1)..(38): Xaa is C or S
  MOD_RES (17)..(18)..(19)..(20)..(21): Xaa is A or G
  MOD_RES (22)..(23)..(24)..(25): Xaa is A or G or absent
XRPTQVQLSAISVLYLXXXXXXXXXLKNYQTLEDHLAX

SEQ ID NO: 7386 - protein, 38 aa, Artificial Sequence
  Non-cyclic GFR-binding peptide
  MOD_RES (4)..(5)..(36)..(38): Xaa is C or S
AAPXXVPQALSATSILYYVGRKPKVLRKHRMIVRSXKX

SEQ ID NO: 7387 - protein, 34 aa, Artificial Sequence
  Non-cyclic GFR-binding peptide
  MOD_RES (32)..(34): Xaa is C or S
APTKLNAISVLYFDSSNNVILKKYRNMVVKAXGX

SEQ ID NO: 7388 - protein, 34 aa, Artificial Sequence
  Non-cyclic GFR-binding peptide
  MOD_RES (3)..(4): Xaa is C or S
KPXXAPTQLSATSVLYYDDSSNVILRKHRNMVVR

SEQ ID NO: 7389 - protein, 43 aa, Artificial Sequence
  Non-cyclic GFR-binding peptide
  MOD_RES (6)..(7)..(42): Xaa is C or S
  MOD_RES (21)..(22)..(23)..(24)..(25): Xaa is A or G
  MOD_RES (26)..(27)..(28)..(29): Xaa is A or G or absent
KVGKAXXVPTKLNAISVLYFXXXXXXXXXLKKYREGMSVAEXG

SEQ ID NO: 7390 - protein, 43 aa, Artificial Sequence
  Non-cyclic GFR-binding peptide
  MOD_RES (5)..(42): Xaa is C or S
RNVQXRPTQVQLSPISVLYKEIVRKKPIFLKYHYTLEDHLAXK

SEQ ID NO: 7391 - protein, 34 aa, Artificial Sequence
  Non-cyclic GFR-binding peptide
  MOD_RES (1)..(33): Xaa is C or S
XVPTELNAISMLYFDENEKVVLKKYRDMVVEGXG

SEQ ID NO: 7392 - protein, 38 aa, Artificial Sequence
  Non-cyclic GFR-binding peptide
  MOD_RES (5)..(6): Xaa is C or S
  MOD_RES (20)..(21)..(22)..(23)..(24): Xaa is A or G
  MOD_RES (25)..(26)..(27)..(28): Xaa is A or G or absent
VPKAXXAPTKLSAISVLYLXXXXXXXXXLKNYQNMVVK

SEQ ID NO: 7393 - protein, 42 aa, Artificial Sequence
  Non-cyclic GFR-binding peptide
  MOD_RES (5)..(42): Xaa is C or S
  MOD_RES (21)..(22)..(23)..(24)..(25): Xaa is A or G
  MOD_RES (26)..(27)..(28)..(29): Xaa is A or G or absent
RNVQXRPTQVQLSATSVLYYXXXXXXXXXLRKHRTLEDHLAX

SEQ ID NO: 7394 - protein, 42 aa, Artificial Sequence
  Non-cyclic GFR-binding peptide
  MOD_RES (6)..(7)..(39)..(41): Xaa is C or S
YVPKPXXAPTKLSPISVLYKDDSSNVILKYHYNMVVRSXGXH

SEQ ID NO: 7395 - protein, 35 aa, Artificial Sequence
  Non-cyclic GFR-binding peptide
  MOD_RES (2)..(3)..(34): Xaa is C or S
PXXVPQALSAISILYLVGRKPKVLKNYQMIVRSXK

SEQ ID NO: 7396 - protein, 33 aa, Artificial Sequence
  Non-cyclic GFR-binding peptide
  MOD_RES (1)..(2)..(33): Xaa is C or S
XXVPQDLSPISILYKVGRTPKVLKYHYMVVKSX

SEQ ID NO: 7397 - protein, 35 aa, Artificial Sequence
  Non-cyclic GFR-binding peptide
  MOD_RES (1)..(2)..(33)..(35): Xaa is C or S
XXVPQDLNAISILYFVGRTPKVLKKYRMVVKSXKX

SEQ ID NO: 7398 - protein, 35 aa, Artificial Sequence
  Non-cyclic GFR-binding peptide
  MOD_RES (4)..(5): Xaa is C or S
PKAXXAPTKLNAISVLYFDSSNNVILKKYRNMVVK

SEQ ID NO: 7399 - protein, 32 aa, Artificial Sequence; identical to SEQ ID NO: 862
  Non-cyclic GFR-binding peptide

SEQ ID NO: 7400 - protein, 40 aa, Artificial Sequence
  Non-cyclic GFR-binding peptide
  MOD_RES (5)..(6): Xaa is C or S
  MOD_RES (20)..(21)..(22)..(23)..(24): Xaa is A or G
  MOD_RES (25)..(26)..(27)..(28): Xaa is A or G or absent
VGKAXXVPTKLSATSVLYYXXXXXXXXXLRKHREGMSVAE

SEQ ID NO: 7401 - protein, 33 aa, Artificial Sequence
  Non-cyclic GFR-binding peptide
  MOD_RES (2)..(3): Xaa is C or S
PXXVPQDLNAISILYFVGRTPKVLKKYRMVVKS

SEQ ID NO: 7402 - protein, 36 aa, Artificial Sequence
  Non-cyclic GFR-binding peptide
  MOD_RES (1)..(2)..(35): Xaa is C or S
  MOD_RES (16)..(17)..(18)..(19)..(20): Xaa is A or G
  MOD_RES (21)..(22)..(23)..(24): Xaa is A or G or absent
XXVSQDLNAISILYFXXXXXXXXXLKKYRMIVKSXK

SEQ ID NO: 7403 - protein, 33 aa, Artificial Sequence
  Non-cyclic GFR-binding peptide
  MOD_RES (2)..(3): Xaa is C or S
PXXVPQALSAISILYLVGRKPKVLKNYQMIVRS

SEQ ID NO: 7404 - protein, 40 aa, Artificial Sequence
  Non-cyclic GFR-binding peptide
  MOD_RES (5)..(6): Xaa is C or S
  MOD_RES (20)..(21)..(22)..(23)..(24): Xaa is A or G
  MOD_RES (25)..(26)..(27)..(28): Xaa is A or G or absent
VGKAXXVPTKLSAISVLYLXXXXXXXXXLKNYQEGMSVAE

SEQ ID NO: 7405 - protein, 34 aa, Artificial Sequence
  Non-cyclic GFR-binding peptide
  MOD_RES (31)..(33): Xaa is C or S
VPQALSATSILYYVGRKPKVLRKHRMIVRSXKXS

SEQ ID NO: 7406 - protein, 40 aa, Artificial Sequence
  Non-cyclic GFR-binding peptide
  MOD_RES (5)..(39): Xaa is C or S
  MOD_RES (19)..(20)..(21)..(22)..(23): Xaa is A or G
  MOD_RES (24)..(25)..(26)..(27): Xaa is A or G or absent
TKPTXAPTKLSAISVLYLXXXXXXXXXLKNYQNMVVRSXG

SEQ ID NO: 7407 - protein, 34 aa, Artificial Sequence
  Non-cyclic GFR-binding peptide
  MOD_RES (1)..(34): Xaa is C or S
  MOD_RES (15)..(16)..(17)..(18)..(19): Xaa is A or G
  MOD_RES (20)..(21)..(22)..(23): Xaa is A or G or absent
XVPQDLSPISILYKXXXXXXXXXLKYHYMVVKSX

SEQ ID NO: 7408 - protein, 41 aa, Artificial Sequence
  Non-cyclic GFR-binding peptide
  MOD_RES (4)..(5)..(39)..(41): Xaa is C or S
  MOD_RES (19)..(20)..(21)..(22)..(23): Xaa is A or G
  MOD_RES (24)..(25)..(26)..(27): Xaa is A or G or absent
PKPXXAPTKLSPISVLYKXXXXXXXXXLKYHYNMVVRSXGX

SEQ ID NO: 7409 - protein, 36 aa, Artificial Sequence
  Non-cyclic GFR-binding peptide
  MOD_RES (33)..(35): Xaa is C or S
VPTKLNAISVLYFDDMGVPTLKKYREGMSVAEXGXR

SEQ ID NO: 7410 - protein, 33 aa, Artificial Sequence
  Non-cyclic GFR-binding peptide
  MOD_RES (2)..(3): Xaa is C or S
PXXAPTKLSAISVLYLDDSSNVILKNYQNMVVR

SEQ ID NO: 7411 - protein, 38 aa, Artificial Sequence
  Non-cyclic GFR-binding peptide
  MOD_RES (5)..(6)..(37): Xaa is C or S
SAAPXXVPQALNAISILYFVGRKPKVLKKYRMIVRSXK

SEQ ID NO: 7412 - protein, 36 aa, Artificial Sequence
  Non-cyclic GFR-binding peptide
  MOD_RES (2)..(3)..(36): Xaa is C or S
  MOD_RES (17)..(18)..(19)..(20)..(21): Xaa is A or G
  MOD_RES (22)..(23)..(24)..(25): Xaa is A or G or absent
PXXVPQDLNAISILYFXXXXXXXXXLKKYRMVVKSX

SEQ ID NO: 7413 - protein, 35 aa, Artificial Sequence
  Non-cyclic GFR-binding peptide
  MOD_RES (32)..(34): Xaa is C or S
VPTELSATSMLYYDENEKVVLRKHRDMVVEGXGXR

SEQ ID NO: 7414 - protein, 34 aa, Artificial Sequence
  Non-cyclic GFR-binding peptide
  MOD_RES (33)..(33): Xaa is C or S
  MOD_RES (14)..(15)..(16)..(17)..(18): Xaa is A or G
  MOD_RES (19)..(20)..(21)..(22): Xaa is A or G or absent
VPQDLNAISILYFXXXXXXXXXLKKYRMVVKSXK

SEQ ID NO: 7415 - protein, 34 aa, Artificial Sequence
  Non-cyclic GFR-binding peptide
  MOD_RES (1)..(2)..(34): Xaa is C or S
XXVPTELSATSMLYYDEYDKVVLRKHREMVVEGX

SEQ ID NO: 7416 - protein, 35 aa, Artificial Sequence
  Non-cyclic GFR-binding peptide
  MOD_RES (1)..(2)..(34): Xaa is C or S
XXVPTELSPISMLYKDEYDKVVLKYHYEMVVEGXG

SEQ ID NO: 7417 - protein, 33 aa, Artificial Sequence
  Non-cyclic GFR-binding peptide
  MOD_RES (1)..(2)..(33): Xaa is C or S
XXVPQALNAISILYFVGRKPKVLKKYRMIVRSX

SEQ ID NO: 7418 - protein, 36 aa, Artificial Sequence
  Non-cyclic GFR-binding peptide
  MOD_RES (36)..(36): Xaa is C or S
  MOD_RES (15)..(16)..(17)..(18)..(19): Xaa is A or G
  MOD_RES (20)..(21)..(22)..(23): Xaa is A or G or absent
PTQVQLNAISVLYFXXXXXXXXXLKKYRTLEDHLAX

SEQ ID NO: 7419 - protein, 38 aa, Artificial Sequence
  Non-cyclic GFR-binding peptide
  MOD_RES (2)..(3)..(36)..(38): Xaa is C or S
AXXVPTKLNAISVLYFDDMGVPTLKKYREGMSVAEXGX

SEQ ID NO: 7420 - protein, 41 aa, Artificial Sequence
  Non-cyclic GFR-binding peptide
  MOD_RES (5)..(6)..(40): Xaa is C or S
  MOD_RES (20)..(21)..(22)..(23)..(24): Xaa is A or G
  MOD_RES (25)..(26)..(27)..(28): Xaa is A or G or absent
VPKAXXAPTKLSAISVLYLXXXXXXXXXLKNYQNMVVKAXG

SEQ ID NO: 7421 - protein, 36 aa, Artificial Sequence
  Non-cyclic GFR-binding peptide
  MOD_RES (4)..(5): Xaa is C or S
PKAXXVPTELSPISMLYKDENEKVVLKYHYDMVVEG

SEQ ID NO: 7422 - protein, 39 aa, Artificial Sequence
  Non-cyclic GFR-binding peptide
  MOD_RES (5)..(6)..(38): Xaa is C or S
IPKAXXVPTELSATSMLYYDENEKVVLRKHRDMVVEGXG

SEQ ID NO: 7423 - protein, 35 aa, Artificial Sequence
  Non-cyclic GFR-binding peptide
  MOD_RES (2)..(3): Xaa is C or S
  MOD_RES (17)..(18)..(19)..(20)..(21): Xaa is A or G
  MOD_RES (22)..(23)..(24)..(25): Xaa is A or G or absent
PXXAPTQLSATSVLYYXXXXXXXXXLRKHRNMVVR

SEQ ID NO: 7424 - protein, 32 aa, Artificial Sequence
  Non-cyclic GFR-binding peptide
  MOD_RES (31)..(31): Xaa is C or S
VSQDLSAISILYLIGKTPKILKNYQMIVKSXK

SEQ ID NO: 7425 - protein, 34 aa, Artificial Sequence
  Non-cyclic GFR-binding peptide
  MOD_RES (1)..(2): Xaa is C or S
XXVPTKLSAISVLYLDDMGVPTLKNYQEGMSVAE

SEQ ID NO: 7426 - protein, 39 aa, Artificial Sequence
  Non-cyclic GFR-binding peptide
  MOD_RES (7)..(7): Xaa is C or S
  MOD_RES (21)..(22)..(23)..(24)..(25): Xaa is A or G
  MOD_RES (26)..(27)..(28)..(29): Xaa is A or G or absent
HVTKPTXAPTKLSATSVLYYXXXXXXXXXLRKHRNMVVR

SEQ ID NO: 7427 - protein, 36 aa, Artificial Sequence
  Non-cyclic GFR-binding peptide
  MOD_RES (5)..(6): Xaa is C or S
VPKPXXAPTQLSATSVLYYDDSSNVILRKHRNMVVR

SEQ ID NO: 7428 - protein, 38 aa, Artificial Sequence
  Non-cyclic GFR-binding peptide
  MOD_RES (4)..(5)..(37): Xaa is C or S
PKPXXAPTQLSAISVLYLDDSSNVILKNYQNMVVRAXG

SEQ ID NO: 7429 - protein, 39 aa, Artificial Sequence
  Non-cyclic GFR-binding peptide
  MOD_RES (4)..(5)..(36)..(38): Xaa is C or S
ASPXXVSQDLSAISILYLIGKTPKILKNYQMIVKSXKXS

SEQ ID NO: 7430 - protein, 35 aa, Artificial Sequence
  Non-cyclic GFR-binding peptide
  MOD_RES (2)..(3): Xaa is C or S
  MOD_RES (17)..(18)..(19)..(20)..(21): Xaa is A or G
  MOD_RES (22)..(23)..(24)..(25): Xaa is A or G or absent
AXXAPTKLNAISVLYFXXXXXXXXXLKKYRNMVVK

SEQ ID NO: 7431 - protein, 33 aa, Artificial Sequence
  Non-cyclic GFR-binding peptide
  MOD_RES (2)..(3): Xaa is C or S
AXXVPTELSATSMLYYDENEKVVLRKHRDMVVE

(The sequence listing continues in the following parts.)

1. A pharmaceutical association comprising at least one growth factor receptor-binding compound, which activates at least one growth factor receptor of a neoplastic cell, and at least one adhesion protein inhibitor which inhibits at least one transmembrane cell adhesion protein of said neoplastic cell, wherein said at least one growth factor receptor-binding compound has a molecular weight of less than 6,000 Daltons.

2-4. (canceled)

5. The pharmaceutical association according to claim 1, wherein said growth factor receptor-binding compound comprises a peptide with four amino acids PEP1, and a peptide with five amino acids PEP2; wherein PEP1 is selected from the group consisting of SAIS, SSLS, NAIS, SATS, SPIS, EPIS, SPIN, KPLS, EPLP, EPLT, SNIT, RSVK and RPVQ; and wherein PEP2 is selected from the group consisting of LKNYQ, LKVYP, LKKYR, LRKHR, LKYHY, KFKYE, YGKIP, YKQYE, DHHKD, EQLSN, IGEMS, LGEMS, KEVQV and KKATV.

6. The pharmaceutical association according to claim 1, wherein said growth factor receptor is selected from the group consisting of epidermal growth factor receptors, fibroblast growth factor receptors, vascular endothelial growth factor receptors, nerve growth factor receptors, insulin receptor family, Trk receptor family, Eph receptor family, AXL receptor family, LTK receptor family, TIE receptor family, ROR receptor family, DDR receptor family, RET receptor family, KLG receptor family, RYK receptor family, MuSK receptor family, hepatocyte growth factor receptors, somatomedin or insulin-like growth factor receptors, platelet-derived growth factor receptors, and transforming growth factor beta superfamily proteins.

7. The pharmaceutical association according to claim 1, wherein said adhesion inhibitor is selected from the group consisting of an integrin inhibitor which inhibits at least one integrin, a syndecan inhibitor which inhibits at least one syndecan, a selectin inhibitor which inhibits at least one selectin, a dystroglycan inhibitor which inhibits at least one dystroglycan, and any combinations thereof.

8-19. (canceled)

20. The pharmaceutical association according to claim 1, wherein said growth factor receptor-binding compound comprises a peptide with eight amino acids PEP12, and a peptide with five amino acids PEP2; wherein PEP12 is a peptide of general formula PEP1-AA¹⁷-PEP11; wherein AA¹⁷ is selected from the group consisting of G, A, V, L, I, P, F, M, W, T and S; wherein PEP11 is a peptide with 3 amino acids of general formula AA¹⁸-AA¹⁹-AA²⁰; wherein AA¹⁸ is selected from the group consisting of L, V, Q, A and R; wherein AA¹⁹ is selected from the group consisting of F, W, H, Y, I and K; wherein AA²⁰ is selected from the group consisting of L, F, Y, K, I, V and M.

21. The pharmaceutical association according to claim 20, wherein PEP11 is selected from the group consisting of LYL, LFF, LYF, LYY, LYK, LYI, LFI, LYV, VYY, QIM, AKV and RKI.

22-143. (canceled)

144. The pharmaceutical association according to claim 1, wherein said growth factor receptor-binding compound is a peptide or a peptidomimetic.

145. The pharmaceutical association according to claim 144, wherein said growth factor receptor-binding compound is a non-cyclic peptide with between 20 and 60 amino acids having growth factor receptor-binding capability, or is a non-cyclic peptidomimetic comprising between 20 and 50 amino acids and having growth factor receptor-binding capability.

146. The pharmaceutical association according to claim 144, wherein the RMSD value of the structure coordinates of said peptide or peptidomimetic with respect to PEPREF is 2.45 Å (Angstroms) or less, and wherein PEPREF is

| | | | | | | | | |
|---|---|---|---|---|---|---|---|---|
| ATOM | 511 | N | LYS | A | 1 | −14.570 | 46.437 | 27.424 |
| ATOM | 512 | CA | LYS | A | 1 | −13.512 | 45.748 | 28.151 |
| ATOM | 513 | C | LYS | A | 1 | −13.655 | 44.259 | 27.884 |
| ATOM | 514 | O | LYS | A | 1 | −12.769 | 43.463 | 28.197 |
| ATOM | 515 | CB | LYS | A | 1 | −13.605 | 46.029 | 29.652 |
| ATOM | 516 | CG | LYS | A | 1 | −13.640 | 47.509 | 29.991 |
| ATOM | 517 | CD | LYS | A | 1 | −12.615 | 48.297 | 29.183 |
| ATOM | 518 | CE | LYS | A | 1 | −12.625 | 49.768 | 29.575 |
| ATOM | 519 | NZ | LYS | A | 1 | −13.994 | 50.369 | 29.497 |
| ATOM | 520 | N | ILE | A | 2 | −14.792 | 43.890 | 27.309 |
| ATOM | 521 | CA | ILE | A | 2 | −15.051 | 42.499 | 26.967 |
| ATOM | 522 | C | ILE | A | 2 | −14.911 | 42.370 | 25.444 |
| ATOM | 523 | O | ILE | A | 2 | −15.531 | 43.125 | 24.683 |
| ATOM | 524 | CB | ILE | A | 2 | −16.466 | 42.065 | 27.401 |
| ATOM | 525 | CG1 | ILE | A | 2 | −16.630 | 42.238 | 28.915 |
| ATOM | 526 | CG2 | ILE | A | 2 | −16.710 | 40.629 | 26.985 |
| ATOM | 527 | CD1 | ILE | A | 2 | −15.631 | 41.478 | 29.30 |
| ATOM | 528 | N | PRO | A | 3 | −14.085 | 41.411 | 24.989 |
| ATOM | 529 | CA | PRO | A | 3 | −13.789 | 41.109 | 23.588 |
| ATOM | 530 | C | PRO | A | 3 | −14.998 | 40.695 | 22.768 |
| ATOM | 531 | O | PRO | A | 3 | −15.969 | 40.164 | 23.305 |
| ATOM | 532 | CB | PRO | A | 3 | −12.785 | 39.968 | 23.688 |
| ATOM | 533 | CG | PRO | A | 3 | −12.156 | 40.166 | 25.007 |
| ATOM | 534 | CD | PRO | A | 3 | −13.330 | 40.506 | 25.867 |
| ATOM | 535 | N | LYS | A | 4 | −14.937 | 40.937 | 21.463 |
| ATOM | 536 | CA | LYS | A | 4 | −16.023 | 40.529 | 20.590 |
| ATOM | 537 | C | LYS | A | 4 | −15.886 | 39.015 | 20.391 |
| ATOM | 538 | O | LYS | A | 4 | −14.903 | 38.415 | 20.831 |
| ATOM | 539 | CB | LYS | A | 4 | −15.926 | 41.244 | 19.245 |
| ATOM | 540 | CG | LYS | A | 4 | −15.802 | 42.751 | 19.355 |
| ATOM | 541 | CD | LYS | A | 4 | −16.292 | 43.433 | 18.083 |
| ATOM | 542 | CE | LYS | A | 4 | −16.162 | 44.943 | 18.177 |
| ATOM | 543 | NZ | LYS | A | 4 | −16.825 | 45.628 | 17.019 |
| ATOM | 544 | N | ALA | A | 5 | −16.85 | 38.393 | 19.759 |
| ATOM | 545 | CA | ALA | A | 5 | −16.811 | 36.955 | 19.507 |
| ATOM | 546 | C | ALA | A | 5 | −15.772 | 36.771 | 18.416 |
| ATOM | 547 | O | ALA | A | 5 | −15.727 | 37.534 | 17.455 |
| ATOM | 548 | CB | ALA | A | 5 | −18.168 | 36.419 | 19.043 |
| ATOM | 549 | N | CYS | A | 6 | −14.935 | 35.756 | 18.562 |
| ATOM | 550 | CA | CYS | A | 6 | −13.887 | 35.518 | 17.584 |
| ATOM | 551 | C | CYS | A | 6 | −14.347 | 34.765 | 16.338 |
| ATOM | 552 | O | CYS | A | 6 | −15.327 | 34.018 | 16.368 |
| ATOM | 553 | CB | CYS | A | 6 | −12.743 | 34.768 | 18.241 |
| ATOM | 554 | SG | CYS | A | 6 | −11.198 | 34.959 | 17.353 |
| ATOM | 555 | N | CYS | A | 7 | −13.623 | 34.973 | 15.243 |
| ATOM | 556 | CA | CYS | A | 7 | −13.931 | 34.328 | 13.969 |
| ATOM | 557 | C | CYS | A | 7 | −13.091 | 33.071 | 13.798 |
| ATOM | 558 | O | CYS | A | 7 | −11.961 | 33.123 | 13.302 |
| ATOM | 559 | CB | CYS | A | 7 | −13.653 | 35.290 | 12.824 |
| ATOM | 560 | SG | CYS | A | 7 | −13.930 | 34.633 | 11.154 |
| ATOM | 561 | N | VAL | A | 8 | −13.654 | 31.941 | 14.209 |
| ATOM | 562 | CA | VAL | A | 8 | −12.949 | 30.684 | 14.110 |
| ATOM | 563 | C | VAL | A | 8 | −13.653 | 29.733 | 13.157 |
| ATOM | 564 | O | VAL | A | 8 | −14.759 | 30.016 | 12.687 |
| ATOM | 565 | CB | VAL | A | 8 | −12.814 | 30.038 | 15.492 |
| ATOM | 566 | CG1 | VAL | A | 8 | −11.807 | 30.825 | 16.337 |
| ATOM | 567 | CG2 | VAL | A | 8 | −14.161 | 30.006 | 16.170 |
| ATOM | 568 | N | PRO | A | 9 | −13.003 | 28.601 | 12.828 |
| ATOM | 569 | CA | PRO | A | 9 | −13.593 | 27.615 | 11.918 |
| ATOM | 570 | C | PRO | A | 9 | −14.726 | 26.886 | 12.631 |
| ATOM | 571 | O | PRO | A | 9 | −14.581 | 26.476 | 13.780 |
| ATOM | 572 | CB | PRO | A | 9 | −12.423 | 26.676 | 11.601 |
| ATOM | 573 | CG | PRO | A | 9 | −11.204 | 27.487 | 11.925 |
| ATOM | 574 | CD | PRO | A | 9 | −11.620 | 28.226 | 13.163 |
| ATOM | 575 | N | THR | A | 10 | −15.847 | 26.721 | 11.942 |
| ATOM | 576 | CA | THR | A | 10 | −16.999 | 26.060 | 12.527 |
| ATOM | 577 | C | THR | A | 10 | −17.334 | 24.767 | 11.804 |
| ATOM | 578 | O | THR | A | 10 | −18.097 | 23.943 | 12.303 |
| ATOM | 579 | CB | THR | A | 10 | −18.211 | 27.010 | 12.523 |
| ATOM | 580 | OG1 | THR | A | 10 | −18.491 | 27.445 | 11.185 |
| ATOM | 581 | CG2 | THR | A | 10 | −17.902 | 28.230 | 13.375 |
| ATOM | 582 | N | GLU | A | 11 | −16.750 | 24.586 | 10.627 |
| ATOM | 583 | CA | GLU | A | 11 | −16.980 | 23.377 | 9.848 |
| ATOM | 584 | C | GLU | A | 11 | −15.643 | 22.935 | 9.246 |
| ATOM | 585 | O | GLU | A | 11 | −15.029 | 23.666 | 8.464 |
| ATOM | 586 | CB | GLU | A | 11 | −17.981 | 23.624 | 8.715 |
| ATOM | 587 | CG | GLU | A | 11 | −19.421 | 23.807 | 9.163 |
| ATOM | 588 | CD | GLU | A | 11 | −19.686 | 25.166 | 9.770 |
| ATOM | 589 | OE1 | GLU | A | 11 | −19.478 | 26.175 | 9.073 |
| ATOM | 590 | OE2 | GLU | A | 11 | −20.111 | 25.227 | 10.939 |
| ATOM | 591 | N | LEU | A | 12 | −15.183 | 21.749 | 9.622 |
| ATOM | 592 | CA | LEU | A | 12 | −13.923 | 21.254 | 9.104 |
| ATOM | 593 | C | LEU | A | 12 | −14.062 | 19.912 | 8.386 |
| ATOM | 594 | O | LEU | A | 12 | −15.136 | 19.299 | 8.359 |
| ATOM | 595 | CB | LEU | A | 12 | −12.893 | 21.144 | 10.230 |
| ATOM | 596 | CG | LEU | A | 12 | −12.660 | 22.422 | 11.054 |
| ATOM | 597 | CD1 | LEU | A | 12 | −13.475 | 22.350 | 12.337 |
| ATOM | 598 | CD2 | LEU | A | 12 | −11.181 | 22.586 | 11.399 |
| ATOM | 599 | N | SER | A | 13 | −12.971 | 19.476 | 7.771 |
| ATOM | 600 | CA | SER | A | 13 | −12.964 | 18.218 | 7.046 |
| ATOM | 601 | C | SER | A | 13 | −11.568 | 17.628 | 7.164 |
| ATOM | 602 | O | SER | A | 13 | −10.613 | 18.320 | 7.550 |
| ATOM | 603 | CB | SER | A | 13 | −13.346 | 18.435 | 5.578 |
| ATOM | 604 | OG | SER | A | 13 | −12.404 | 19.261 | 4.923 |
| ATOM | 605 | N | ALA | A | 13 | −11.449 | 16.352 | 6.818 |
| ATOM | 606 | CA | ALA | A | 13 | −10.179 | 15.665 | 6.949 |
| ATOM | 607 | C | ALA | A | 13 | −9.421 | 15.471 | 5.652 |
| ATOM | 608 | O | ALA | A | 13 | −9.941 | 15.720 | 4.563 |
| ATOM | 609 | CB | ALA | A | 13 | −10.413 | 14.306 | 7.626 |
| ATOM | 610 | N | ILE | A | 14 | −8.171 | 15.046 | 5.783 |
| ATOM | 611 | CA | ILE | A | 14 | −7.343 | 14.746 | 4.623 |
| ATOM | 612 | C | ILE | A | 14 | −6.475 | 13.559 | 5.004 |
| ATOM | 613 | O | ILE | A | 14 | −6.212 | 13.316 | 6.183 |
| ATOM | 614 | CB | ILE | A | 14 | −6.401 | 15.916 | 4.183 |
| ATOM | 615 | CG1 | ILE | A | 14 | −5.284 | 16.106 | 5.200 |
| ATOM | 616 | CG2 | ILE | A | 14 | −7.188 | 17.211 | 3.982 |
| ATOM | 617 | CD1 | ILE | A | 14 | −4.173 | 16.973 | 4.696 |
| ATOM | 618 | N | SER | A | 15 | −6.045 | 12.806 | 3.999 |
| ATOM | 619 | CA | SER | A | 15 | −5.187 | 11.662 | 4.242 |
| ATOM | 620 | C | SER | A | 15 | −3.740 | 12.089 | 4.217 |
| ATOM | 621 | O | SER | A | 15 | −3.360 | 13.020 | 3.508 |
| ATOM | 622 | CB | SER | A | 15 | −5.416 | 10.584 | 3.185 |
| ATOM | 623 | OG | SER | A | 15 | −6.667 | 9.971 | 3.401 |
| ATOM | 624 | N | MET | A | 16 | −2.933 | 11.409 | 5.012 |
| ATOM | 625 | CA | MET | A | 16 | −1.518 | 11.700 | 5.047 |
| ATOM | 626 | C | MET | A | 16 | −0.778 | 10.414 | 5.244 |
| ATOM | 627 | O | MET | A | 16 | −1.137 | 9.594 | 6.078 |
| ATOM | 628 | CB | MET | A | 16 | −1.170 | 12.694 | 6.164 |
| ATOM | 629 | CG | MET | A | 16 | −1.848 | 14.042 | 5.974 |
| ATOM | 630 | SD | MET | A | 16 | −1.017 | 15.431 | 6.760 |
| ATOM | 631 | CE | MET | A | 16 | −0.799 | 14.823 | 8.475 |
| ATOM | 632 | N | LEU | A | 17 | 0.238 | 10.231 | 4.426 |
| ATOM | 633 | CA | LEU | A | 17 | 1.077 | 9.065 | 4.508 |
| ATOM | 634 | C | LEU | A | 17 | 2.289 | 9.610 | 5.264 |
| ATOM | 635 | O | LEU | A | 17 | 2.939 | 10.565 | 4.818 |
| ATOM | 636 | CB | LEU | A | 17 | 1.461 | 8.608 | 3.100 |
| ATOM | 637 | CG | LEU | A | 17 | 2.324 | 7.355 | 2.955 |
| ATOM | 638 | CD1 | LEU | A | 17 | 1.553 | 6.145 | 3.445 |
| ATOM | 639 | CD2 | LEU | A | 17 | 2.723 | 7.190 | 1.492 |
| ATOM | 640 | N | TYR | A | 18 | 2.581 | 9.029 | 6.418 |
| ATOM | 641 | CA | TYR | A | 18 | 3.706 | 9.501 | 7.196 |
| ATOM | 642 | C | TYR | A | 18 | 4.434 | 8.333 | 7.835 |
| ATOM | 643 | O | TYR | A | 18 | 4.081 | 7.186 | 7.603 |
| ATOM | 644 | CB | TYR | A | 18 | 3.222 | 10.458 | 8.281 |
| ATOM | 645 | CG | TYR | A | 18 | 2.386 | 9.782 | 9.346 |
| ATOM | 646 | CD1 | TYR | A | 18 | 1.029 | 9.527 | 9.147 |
| ATOM | 647 | CD2 | TYR | A | 18 | 2.961 | 9.379 | 10.550 |
| ATOM | 648 | CE1 | TYR | A | 18 | 0.273 | 8.894 | 10.128 |
| ATOM | 649 | CE2 | TYR | A | 18 | 2.218 | 8.745 | 11.526 |
| ATOM | 650 | CZ | TYR | A | 18 | 0.877 | 8.508 | 11.317 |
| ATOM | 651 | OH | TYR | A | 18 | 0.134 | 7.922 | 12.318 |
| ATOM | 652 | N | LEU | A | 19 | 5.439 | 8.651 | 8.650 |
| ATOM | 653 | CA | LEU | A | 19 | 6.255 | 7.661 | 9.347 |
| ATOM | 654 | C | LEU | A | 19 | 6.210 | 7.946 | 10.847 |
| ATOM | 655 | O | LEU | A | 19 | 6.685 | 8.992 | 11.288 |
| ATOM | 656 | CB | LEU | A | 19 | 7.701 | 7.763 | 8.871 |
| ATOM | 657 | CG | LEU | A | 19 | 7.901 | 7.850 | 7.359 |
| ATOM | 658 | CD1 | LEU | A | 19 | 9.300 | 8.379 | 7.039 |
| ATOM | 659 | CD2 | LEU | A | 19 | 7.669 | 6.482 | 6.748 |
| ATOM | 660 | N | ASP | A | 20 | 5.652 | 7.035 | 11.639 |
| ATOM | 661 | CA | ASP | A | 20 | 5.594 | 7.282 | 13.071 |
| ATOM | 662 | C | ASP | A | 20 | 7.001 | 7.289 | 13.662 |
| ATOM | 663 | O | ASP | A | 20 | 7.985 | 7.185 | 12.932 |
| ATOM | 664 | CB | ASP | A | 20 | 4.714 | 6.244 | 13.786 |
| ATOM | 665 | CG | ASP | A | 20 | 5.292 | 4.837 | 13.752 |
| ATOM | 666 | OD1 | ASP | A | 20 | 6.533 | 4.678 | 13.775 |
| ATOM | 667 | OD2 | ASP | A | 20 | 4.491 | 3.882 | 13.732 |
| ATOM | 668 | N | GLU | A | 21 | 7.089 | 7.413 | 14.981 |
| ATOM | 669 | CA | GLU | A | 21 | 8.375 | 7.451 | 15.669 |
| ATOM | 670 | C | GLU | A | 21 | 9.250 | 6.212 | 15.463 |
| ATOM | 671 | O | GLU | A | 21 | 10.459 | 6.246 | 15.738 |
| ATOM | 672 | CB | GLU | A | 21 | 8.164 | 7.699 | 17.171 |
| ATOM | 673 | CG | GLU | A | 21 | 7.220 | 6.731 | 17.868 |
| ATOM | 674 | CD | GLU | A | 21 | 5.828 | 6.726 | 17.257 |
| ATOM | 675 | OE1 | GLU | A | 21 | 5.347 | 7.810 | 16.856 |
| ATOM | 676 | OE2 | GLU | A | 21 | 5.210 | 5.640 | 17.185 |
| ATOM | 677 | N | ASN | A | 22 | 8.646 | 5.133 | 14.966 |
| ATOM | 678 | CA | ASN | A | 22 | 9.377 | 3.889 | 14.727 |
| ATOM | 679 | C | ASN | A | 22 | 9.682 | 3.647 | 13.249 |
| ATOM | 680 | O | ASN | A | 22 | 10.095 | 2.554 | 12.853 |
| ATOM | 681 | CB | ASN | A | 22 | 8.591 | 2.707 | 15.299 |
| ATOM | 682 | CG | ASN | A | 22 | 8.384 | 2.827 | 16.794 |
| ATOM | 683 | OD1 | ASN | A | 22 | 9.349 | 2.930 | 17.560 |
| ATOM | 684 | ND2 | ASN | A | 22 | 7.125 | 2.819 | 17.221 |
| ATOM | 685 | N | GLU | A | 23 | 9.485 | 4.672 | 12.435 |
| ATOM | 686 | CA | GLU | A | 23 | 9.749 | 4.558 | 11.015 |
| ATOM | 687 | C | GLU | A | 23 | 8.790 | 3.603 | 10.299 |
| ATOM | 688 | O | GLU | A | 23 | 9.145 | 2.996 | 9.292 |
| ATOM | 689 | CB | GLU | A | 23 | 11.203 | 4.129 | 10.784 |
| ATOM | 690 | CG | GLU | A | 23 | 12.232 | 5.210 | 11.082 |
| ATOM | 691 | CD | GLU | A | 23 | 12.072 | 6.410 | 10.166 |
| ATOM | 692 | OE1 | GLU | A | 23 | 12.108 | 6.218 | 8.928 |
| ATOM | 693 | OE2 | GLU | A | 23 | 11.907 | 7.541 | 10.677 |
| ATOM | 694 | N | LYS | A | 24 | 7.580 | 3.459 | 10.826 |
| ATOM | 695 | CA | LYS | A | 24 | 6.583 | 2.624 | 10.175 |
| ATOM | 696 | C | LYS | A | 24 | 5.815 | 3.540 | 9.228 |
| ATOM | 697 | O | LYS | A | 24 | 5.553 | 4.692 | 9.552 |
| ATOM | 698 | CB | LYS | A | 24 | 5.602 | 2.039 | 11.182 |
| ATOM | 699 | CG | LYS | A | 24 | 6.163 | 0.963 | 12.058 |
| ATOM | 700 | CD | LYS | A | 24 | 5.068 | 0.387 | 12.947 |
| ATOM | 701 | CE | LYS | A | 24 | 5.648 | −0.511 | 14.031 |
| ATOM | 702 | NZ | LYS | A | 24 | 4.577 | −1.091 | 14.886 |
| ATOM | 703 | N | VAL | A | 25 | 5.455 | 3.037 | 8.057 |
| ATOM | 704 | CA | VAL | A | 25 | 4.713 | 3.849 | 7.116 |
| ATOM | 705 | C | VAL | A | 25 | 3.237 | 3.737 | 7.444 |
| ATOM | 706 | O | VAL | A | 25 | 2.657 | 2.659 | 7.383 |
| ATOM | 707 | CB | VAL | A | 25 | 4.969 | 3.396 | 5.681 |
| ATOM | 708 | CG1 | VAL | A | 25 | 4.250 | 4.317 | 4.708 |
| ATOM | 709 | CG2 | VAL | A | 25 | 6.462 | 3.393 | 5.422 |
| ATOM | 710 | N | VAL | A | 25 | 2.637 | 4.864 | 7.800 |
| ATOM | 711 | CA | VAL | A | 25 | 1.231 | 4.916 | 8.170 |
| ATOM | 712 | C | VAL | A | 25 | 0.418 | 5.778 | 7.213 |
| ATOM | 713 | O | VAL | A | 25 | 0.871 | 6.841 | 6.774 |
| ATOM | 714 | CB | VAL | A | 25 | 1.062 | 5.531 | 9.577 |
| ATOM | 715 | CG1 | VAL | A | 25 | −0.341 | 5.253 | 10.115 |
| ATOM | 716 | CG2 | VAL | A | 25 | 2.128 | 5.006 | 10.506 |
| ATOM | 717 | N | LEU | A | 26 | −0.779 | 5.306 | 6.887 |
| ATOM | 718 | CA | LEU | A | 26 | −1.706 | 6.048 | 6.040 |
| ATOM | 719 | C | LEU | A | 26 | −2.862 | 6.358 | 6.992 |
| ATOM | 720 | O | LEU | A | 26 | −3.679 | 5.497 | 7.297 |
| ATOM | 721 | CB | LEU | A | 26 | −2.201 | 5.189 | 4.876 |
| ATOM | 722 | CG | LEU | A | 26 | −3.204 | 5.898 | 3.952 |
| ATOM | 723 | CD1 | LEU | A | 26 | −2.519 | 7.077 | 3.262 |
| ATOM | 724 | CD2 | LEU | A | 26 | −3.755 | 4.925 | 2.929 |
| ATOM | 725 | N | LYS | A | 27 | −2.910 | 7.584 | 7.489 |
| ATOM | 726 | CA | LYS | A | 27 | −3.952 | 7.965 | 8.430 |
| ATOM | 727 | C | LYS | A | 27 | −4.831 | 9.082 | 7.881 |
| ATOM | 728 | O | LYS | A | 27 | −4.374 | 9.924 | 7.103 |
| ATOM | 729 | CB | LYS | A | 27 | −3.305 | 8.409 | 9.738 |
| ATOM | 730 | CG | LYS | A | 27 | −4.265 | 8.720 | 10.859 |
| ATOM | 731 | CD | LYS | A | 27 | −3.509 | 9.382 | 11.994 |
| ATOM | 732 | CE | LYS | A | 27 | −4.397 | 9.654 | 13.186 |
| ATOM | 733 | NZ | LYS | A | 27 | −4.839 | 8.377 | 13.816 |
| ATOM | 734 | N | ASN | A | 28 | −6.098 | 9.078 | 8.279 |
| ATOM | 735 | CA | ASN | A | 28 | −7.045 | 10.095 | 7.843 |
| ATOM | 736 | C | ASN | A | 28 | −7.147 | 11.103 | 8.979 |
| ATOM | 737 | O | ASN | A | 28 | −7.815 | 10.842 | 9.969 |
| ATOM | 738 | CB | ASN | A | 28 | −8.408 | 9.455 | 7.560 |
| ATOM | 739 | CG | ASN | A | 28 | −9.518 | 10.485 | 7.364 |
| ATOM | 740 | OD1 | ASN | A | 28 | −9.360 | 11.444 | 6.597 |
| ATOM | 741 | ND2 | ASN | A | 28 | −10.653 | 10.288 | 8.050 |
| ATOM | 742 | N | TYR | A | 29 | −6.473 | 12.241 | 8.837 |
| ATOM | 743 | CA | TYR | A | 29 | −6.470 | 13.278 | 9.869 |
| ATOM | 744 | C | TYR | A | 29 | −7.680 | 14.204 | 9.836 |
| ATOM | 745 | O | TYR | A | 29 | −7.928 | 14.870 | 8.835 |
| ATOM | 746 | CB | TYR | A | 29 | −5.197 | 14.130 | 9.768 |
| ATOM | 747 | CG | TYR | A | 29 | −3.913 | 13.420 | 10.155 |
| ATOM | 748 | CD1 | TYR | A | 29 | −3.378 | 12.394 | 9.363 |
| ATOM | 749 | CD2 | TYR | A | 29 | −3.220 | 13.792 | 11.306 |
| ATOM | 750 | CE1 | TYR | A | 29 | −2.181 | 11.765 | 9.713 |
| ATOM | 751 | CE2 | TYR | A | 29 | −2.032 | 13.171 | 11.665 |
| ATOM | 752 | CZ | TYR | A | 29 | −1.516 | 12.167 | 10.869 |
| ATOM | 753 | OH | TYR | A | 29 | −0.319 | 11.603 | 11.231 |
| ATOM | 754 | N | GLN | A | 30 | −8.408 | 14.254 | 10.950 |
| ATOM | 755 | CA | GLN | A | 30 | −9.606 | 15.088 | 11.089 |
| ATOM | 756 | C | GLN | A | 30 | −9.287 | 16.541 | 11.431 |
| ATOM | 757 | O | GLN | A | 30 | −8.213 | 16.847 | 11.925 |
| ATOM | 758 | CB | GLN | A | 30 | −10.500 | 14.541 | 12.202 |
| ATOM | 759 | CG | GLN | A | 30 | −10.807 | 13.074 | 12.104 |
| ATOM | 760 | CD | GLN | A | 30 | −11.744 | 12.749 | 10.969 |
| ATOM | 761 | OE1 | GLN | A | 30 | −11.900 | 11.582 | 10.602 |
| ATOM | 762 | NE2 | GLN | A | 30 | −12.385 | 13.773 | 10.405 |
| ATOM | 763 | N | ASP | A | 31 | −10.238 | 17.430 | 11.173 |
| ATOM | 764 | CA | ASP | A | 31 | −10.085 | 18.851 | 11.495 |
| ATOM | 765 | C | ASP | A | 31 | −8.867 | 19.494 | 10.842 |
| ATOM | 766 | O | ASP | A | 31 | −8.195 | 20.335 | 11.442 |
| ATOM | 767 | CB | ASP | A | 31 | −10.000 | 19.025 | 13.019 |
| ATOM | 768 | CG | ASP | A | 31 | −11.247 | 18.520 | 13.742 |
| ATOM | 769 | OD1 | ASP | A | 31 | −12.349 | 18.587 | 13.155 |
| ATOM | 770 | OD2 | ASP | A | 31 | −11.130 | 18.069 | 14.908 |
| ATOM | 771 | N | MET | A | 32 | −8.582 | 19.113 | 9.606 |
| ATOM | 772 | CA | MET | A | 32 | −7.426 | 19.662 | 8.918 |
| ATOM | 773 | C | MET | A | 32 | −7.780 | 20.808 | 7.987 |
| ATOM | 774 | O | MET | A | 32 | −7.021 | 21.768 | 7.855 |
| ATOM | 775 | CB | MET | A | 32 | −6.741 | 18.559 | 8.125 |
| ATOM | 776 | CG | MET | A | 32 | −6.037 | 17.540 | 8.980 |
| ATOM | 777 | SD | MET | A | 32 | −4.559 | 18.231 | 9.714 |
| ATOM | 778 | CE | MET | A | 32 | −3.406 | 18.041 | 8.318 |
| ATOM | 779 | N | VAL | A | 33 | −8.942 | 20.707 | 7.351 |
| ATOM | 780 | CA | VAL | A | 33 | −9.381 | 21.719 | 6.401 |
| ATOM | 781 | C | VAL | A | 33 | −10.579 | 22.536 | 6.858 |
| ATOM | 782 | O | VAL | A | 33 | −11.586 | 21.988 | 7.292 |
| ATOM | 783 | CB | VAL | A | 33 | −9.701 | 21.056 | 5.027 |
| ATOM | 784 | CG1 | VAL | A | 33 | −10.388 | 22.040 | 4.087 |
| ATOM | 785 | CG2 | VAL | A | 33 | −8.423 | 20.561 | 4.412 |
| ATOM | 786 | N | VAL | A | 34 | −10.465 | 23.855 | 6.739 |
| ATOM | 787 | CA | VAL | A | 34 | −11.553 | 24.745 | 7.113 |
| ATOM | 788 | C | VAL | A | 34 | −12.610 | 24.835 | 6.016 |
| ATOM | 789 | O | VAL | A | 34 | −12.373 | 25.403 | 4.950 |
| ATOM | 790 | CB | VAL | A | 34 | −11.057 | 26.176 | 7.407 |
| ATOM | 791 | CG1 | VAL | A | 34 | −12.240 | 27.097 | 7.601 |
| ATOM | 792 | CG2 | VAL | A | 34 | −10.222 | 26.186 | 8.655 |
| ATOM | 793 | N | GLU | A | 35 | −13.779 | 24.266 | 6.282 |
| ATOM | 794 | CA | GLU | A | 35 | −14.870 | 24.311 | 5.321 |
| ATOM | 795 | C | GLU | A | 35 | −15.702 | 25.565 | 5.572 |
| ATOM | 796 | O | GLU | A | 35 | −16.011 | 26.303 | 4.645 |
| ATOM | 797 | CB | GLU | A | 35 | −15.733 | 23.054 | 5.447 |
| ATOM | 798 | CG | GLU | A | 35 | −14.969 | 21.782 | 5.128 |
| ATOM | 799 | CD | GLU | A | 35 | −14.515 | 21.732 | 3.676 |
| ATOM | 800 | OE1 | GLU | A | 35 | −15.036 | 22.519 | 2.858 |
| ATOM | 801 | OE2 | GLU | A | 35 | −13.643 | 20.902 | 3.344 |
| ATOM | 802 | N | GLY | A | 36 | −16.053 | 25.811 | 6.829 |
| ATOM | 803 | CA | GLY | A | 36 | −16.834 | 26.990 | 7.152 |
| ATOM | 804 | C | GLY | A | 36 | −16.322 | 27.785 | 8.341 |
| ATOM | 805 | O | GLY | A | 36 | −15.671 | 27.249 | 9.237 |
| ATOM | 806 | N | CYS | A | 37 | −16.616 | 29.077 | 8.360 |
| ATOM | 807 | CA | CYS | A | 37 | −16.177 | 29.917 | 9.466 |
| ATOM | 808 | C | CYS | A | 37 | −17.347 | 30.502 | 10.249 |
| ATOM | 809 | O | CYS | A | 37 | −18.467 | 30.628 | 9.741 |
| ATOM | 810 | CB | CYS | A | 37 | −15.301 | 31.058 | 8.967 |
| ATOM | 811 | SG | CYS | A | 37 | −13.785 | 30.558 | 8.098 |
| ATOM | 812 | N | GLY | A | 38 | −17.079 | 30.867 | 11.494 |
| ATOM | 813 | CA | GLY | A | 38 | −18.129 | 31.430 | 12.309 |
| ATOM | 814 | C | GLY | A | 38 | −17.622 | 32.176 | 13.518 |
| ATOM | 815 | O | GLY | A | 38 | −16.425 | 32.235 | 13.791 |
| ATOM | 816 | N | CYS | A | 39 | −18.564 | 32.753 | 14.245 |
| ATOM | 817 | CA | CYS | A | 39 | −18.253 | 33.505 | 15.439 |
| ATOM | 818 | C | CYS | A | 39 | −18.543 | 32.670 | 16.665 |
| ATOM | 819 | O | CYS | A | 39 | −19.620 | 32.084 | 16.794 |
| ATOM | 820 | CB | CYS | A | 39 | −19.068 | 34.779 | 15.442 |
| ATOM | 821 | SG | CYS | A | 39 | −18.539 | 35.799 | 14.053 |

147. The pharmaceutical association according to claim 144, wherein said growth factor receptor-binding compound is a cyclic peptide with between 15 and 60 amino acids, having a growth factor receptor-binding capability, or a cyclic peptidomimetic comprising between 15 and 60 amino acids, having a growth factor receptor-binding capability.

148. The pharmaceutical association according to claim 144, wherein said growth factor receptor-binding compound is selected from the group consisting of any one of peptides of SEQ ID NO: 1 to 100371.

149. A medical composition comprising at least one pharmaceutical association according to claim 1 and at least one medically acceptable excipient, carrier or vehicle.

150. A process for manufacturing a neoplastic disease medicament, said process comprising providing at least one adhesion protein inhibitor and at least one growth factor receptor-binding compound both as defined in claim 1, wherein providing said adhesion protein inhibitor and said growth factor receptor-binding compound manufactures said neoplastic disease medicament.

151. A process for manufacturing a neoplastic disease medicament precursor, said process comprising providing at least one growth factor receptor-binding compound as defined in claim 1, wherein providing said growth factor receptor-binding compound manufactures said neoplastic disease medicament precursor.

152. A method for treating or preventing a neoplastic disease, disorder, condition, pathology, or any symptoms thereof, comprising administering, to a subject in need thereof, an effective amount of a pharmaceutical association according to claim 1.

153. The method according to claim 152, comprising a step selected from the group consisting of:
reducing or suppressing the gene expression of cyclin D during phase G1 of the cell cycle of the neoplastic cell;
restoring a function of at least one impaired cell cycle checkpoint;
down-regulating the expression or activity of a GTPase;
converting a neoplastic cell into a non-neoplastic cell;
inducing the differentiation of a neoplastic cell;
inducing the quiescence of a neoplastic cell;
inhibiting cell division of a neoplastic cell;
inhibiting cell proliferation of a neoplastic cell;
promoting anti-mitogen activity in a neoplastic cell;
promoting tumor suppressor activity in a neoplastic cell;
promoting anti-oncogenic activity in a neoplastic cell; and
any combinations thereof.

154. The method according to claim 152, wherein said method does not induce the death of said neoplastic cell.

155. A method of converting a neoplastic cell into a non-neoplastic cell, said method comprising the administration to a cell, in-vitro, ex-vivo or in-vivo, of an effective amount of a pharmaceutical association according to claim 1.

156. A method of inducing the formation of a physiologically functional and healthy cell selected from the group consisting of the bone, cartilage, vascular, blood, fibroblast, muscle, neural, epithelial, renal, and retinal cell lineage from a neoplastic cell, comprising administering to a subject in need thereof an effective amount of a pharmaceutical association according to claim 1.

157. A method of determining the effectiveness of a pharmaceutical association for converting a neoplastic cell into a non-neoplastic cell, or for treating a neoplastic disease or at least one symptom thereof, comprising:
the administration of a pharmaceutical association according to claim 1 to a cell;
the measurement of the expression of specific differentiation and/or cancerous markers;
the comparison of the expression of said specific differentiation and/or cancerous markers in the cell to the expression of said specific differentiation and/or cancerous markers in a cell treated with a control; and
determining the effectiveness of the pharmaceutical association relative to the control.

158. A method for treating or preventing a neoplastic disease, disorder, condition, pathology, or any symptoms thereof, comprising administering, to a subject in need thereof, an effective amount of a pharmaceutical association;
wherein said pharmaceutical association comprising at least one growth factor receptor-binding compound, which activates at least one growth factor receptor of a neoplastic cell, and at least one adhesion protein inhibitor which inhibits at least one transmembrane cell adhesion protein of said neoplastic cell;
wherein said growth factor receptor-binding compound is a peptide or a peptidomimetic;
wherein said growth factor receptor-binding compound comprises a peptide with four amino acids PEP1, and a peptide with five amino acids PEP2;
wherein PEP1 is selected from the group consisting of SAIS, SSLS, NAIS, SATS, SPIS, EPIS, SPIN, KPLS, EPLP, EPLT, SNIT, RSVK and RPVQ; and
wherein PEP2 is selected from the group consisting of LKNYQ, LKVYP, LKKYR, LRKHR, LKYHY, KFKYE, YGKIP, YKQYE, DHHKD, EQLSN, IGEMS, LGEMS, KEVQV and KKATV.

159. A method for treating or preventing a neoplastic disease, disorder, condition, pathology, or any symptoms thereof, comprising administering, to a subject in need thereof, an effective amount of a pharmaceutical association comprising at least one growth factor receptor-binding compound, which activates at least one growth factor receptor of a neoplastic cell, and at least one adhesion protein inhibitor which inhibits at least one transmembrane cell adhesion protein of said neoplastic cell.

160. A pharmaceutical association comprising at least one growth factor receptor-binding compound, which activates at least one growth factor receptor of a neoplastic cell, and at least one adhesion protein inhibitor which inhibits at least one transmembrane cell adhesion protein of said neoplastic cell;
wherein said at least one growth factor receptor-binding compound has a molecular weight of less than 6,000 Daltons;
wherein said growth factor receptor-binding compound is a peptide or a peptidomimetic;
wherein said growth factor receptor-binding compound comprises a peptide with four amino acids PEP1, and a peptide with five amino acids PEP2;
wherein PEP1 is selected from the group consisting of SAIS, SSLS, NAIS, SATS, SPIS, EPIS, SPIN, KPLS, EPLP, EPLT, SNIT, RSVK and RPVQ; and
wherein PEP2 is selected from the group consisting of LKNYQ, LKVYP, LKKYR, LRKHR, LKYHY, KFKYE, YGKIP, YKQYE, DHHKD, EQLSN, IGEMS, LGEMS, KEVQV and KKATV.

161. The method according to claim 152, wherein said at least one growth factor receptor-binding compound and at least one adhesion protein inhibitor are administered together or separately.

162. The method according to claim 159, wherein said at least one growth factor receptor-binding compound and at least one adhesion protein inhibitor are administered together or separately.

163. The pharmaceutical association according to claim 5, wherein said growth factor receptor is selected from the group consisting of epidermal growth factor receptors, fibroblast growth factor receptors, vascular endothelial growth factor receptors, nerve growth factor receptors, insulin receptor family, Trk receptor family, Eph receptor family, AXL receptor family, LTK receptor family, TIE receptor family, ROR receptor family, DDR receptor family, RET receptor family, KLG receptor family, RYK receptor family, MuSK receptor family, hepatocyte growth factor receptors, somatomedin or insulin-like growth factor receptors, platelet-derived growth factor receptors, and transforming growth factor beta superfamily proteins.

164. The pharmaceutical association according to claim 5, wherein said adhesion inhibitor is selected from the group consisting of an integrin inhibitor which inhibits at least one integrin, a syndecan inhibitor which inhibits at least one syndecan, a selectin inhibitor which inhibits at least one selectin, a dystroglycan inhibitor which inhibits at least one dystroglycan, and any combinations thereof.

165. The pharmaceutical association according to claim 5, wherein said growth factor receptor-binding compound is a peptide or a peptidomimetic.
